United States Patent Application Publication US 2026/0103690 A1 - sequence listing, part 31

SEQ ID NO: 141870 - protein, 375 aa, unidentified
MIKHSELFVAFDTSKLRNAVAIAEAGRAGEVRFLGEIENTAAATTKLVRKLEAKYERITFCYEAGPTGYELQRHIRGLGHECIVVAPSLIPKKPGDRVKTNRRDAVSLVKLSRAGELTAVWVPERRHEAMRDLTRAREAAVIDLRAKRQRISALLLRQGRPYPADKKTWTKVHMNWLASQRFEQPERGIVFAEMMFAIRQAQERVERLEQAIRAAVPEWSLAEMVTAFMAFRGIDLVSATCLLAELGDLTRFPTAPEVMGYVGLGCSEGSTGDKIKRGGITKSGNRRARRMLVECAWSYQHPPRVSIAKQANVAAAPAKVREIAWKAQCRLNRRYRVLLRRGKLKTVAITAVARELAGFLWAAARELSSPERVAK

SEQ ID NO: 141871 - protein, 470 aa, unidentified
MKHQRKGKGRPQGDSTSQEIEAPALESLKQINLNAAGLDIGDREIYACVPEGRAEKSVRVFATFTADLKALAEWLKSCQVTTVAMESTGVYWIPIFQILEVLGFEVYLVNAQYIKNVTGKKTDILDCQWIQQLHTYGLLHKSFRPDEQTCILRSLVRHREMLLRYRASHIQHIQKALQQMNLKLTNVLSDVTGITGMSILRDILNGIRDPHELAKHRDHRCGKSEAEIAKSLEGDYRSEHIFALGQAIELYDIYSEKLKACDQEIERQLEQFRPKVDLNEVPLPPSTRPPRNRPKNDPISDIRPVLYQMAGVDLTQIDGLSILSIQTILSEIGTDMSKWPTVKHFTSWLGLSPNNSKTGGKIIRTKTKKTDSRANLAFRQGAATLGRSKSALGQFYRRMKSKLGTPKAGVATAHKLARIVYHMLRNQTPFTAVCAEHEDARYRERALRNLQRQARKLGANIVMETEAQTA

SEQ ID NO: 141872 - protein, 364 aa, unidentified
MENVRFVGLDVHADSIAIAVAEPGRGEPGEVATIPNDTVMLLKRLRKLGHVKCCYEAGPTGFGLHRDLTAAGIDCIVVAPSLVPMKAGDRVKTDRRDAVKLARYLRSGDLTEVHVPDAATEAMRDLERARDAAKRAERAARHQLGKFLLRHGRRYPGKTAWTRGHLDWIRMQRFEHEAQQRVLEDYLKAVEDLGERIHRHTRSIEELVESWSMRPLVKALQALRGVNLIAATIIVAELGDLSRFETAPQLMGYLGLVPSENSSGETRQQGRITRAGNGHARRILVEAAWAYRFRAAKSAAIRARNRGVSEEVQRIAWKAQERLCARYRKLTARGKNKNRTVIAIARELAGFIWAIGRQPKLLEA

SEQ ID NO: 141873 - protein, 350 aa, unidentified
MQIIGVDLHTRQQTVAMWNVETGEIVEKTLRHEGDSVREFYSTLAGPTRVGIEATGSMQWFLALMEELGIDCEVGHPAKIRAAEPRKQKHDRRDAALVLQLLVENRFPSIWMPSSEQRDVRSLILYRHQWVRIRTRVQNALQAIALSHGLRRGSSLWSKAGQQTIASLSLTRYTAERRTALQSLYQQLEQQIADLNQKVEELAWLRPQARRLMTHPGVGPITALATETFLGEPKRFVDGKAVASYVGLIPSEHSSGGRQRLGGLSKQGNPLLRFLWCEAVGHAVRKDAELQRFYQHKLVQKGLGKAKVAAARKLGIRLWILLRDQIDYQEFCRRGQLRQKHGGAHAGMPA

SEQ ID NO: 141874 - protein, 388 aa, unidentified
MIYVGIDIAKLNHYASAIDSDGVVLIEPFEFLNDNEGFYTMLSKLNSFELDDIIIGLESTAHYGNNLVSFLVTKGLHVCVINPIQTATLRKNNIRKTKTDKVDTLVIAKAVALMDHPRFVTLYDIALMQLKNLGRFRMKLVKQRSRTKIQLTAYLDQVFPELQYFFKSGIHQKTVYAILKEAPSATQIASMHLTHLKNLLVSNSHGHFKKETALELRVLAQKSVGTADRSLSIQITQSIAQIELLDSQIDAVESEMKDIVISLDSVIMTIPGIGPINGGMIIGEIGDINRFSKPRKLLAFAGLDPSVYQSGNFIAKKTKMSKRGSSALRYALMNAAHNIVKYNQTFKEYYDCKRAEGRGHYNALGHCAGKLVRVIYKMLKDDVEFNLD

SEQ ID NO: 141875 - protein, 353 aa, unidentified
MKCDKYMGMDVHQAMTVVAVLDADGKVILETMVPTEATAIIRLVQSLSAPLRVTFEETTQAEWLYEVLRTHVTEVIVCDPRRNKLLEEGSKADKVDARKLADLLRTGMLRSVYHGHEATRRLKELVRAYESLSSDTQRTMSRIKAIFRGRGIRTPGRGVYQPKQREQWLRMLTEPGLHQRAEWLYEQLDQLRALRRKAKQIMLSESREHRAVGLLKTIPQLGPIRAALIVATVDTPHRFRTKRQLWSYSGLGVVTHMSAEYEMREGRVVRSRKPIATRGLNPNCNRRLKETFISAAIGGIRTEPYRSYLSRLQEGGMRAEMARLTLARKIAAIALRIWKKGETFDPKKLNWTT

SEQ ID NO: 141876 - protein, 388 aa, unidentified
MQVIGDRPEAASAIRTNLGAIFVSLELSQSTWLITSLLPGSSEKMSKHVVHGGDIAGLLERFARLQEKARARTGRNFPIIVIHEAGLDGFWIDRALKNEGIESHVVDPASVATSRRRRRAKTDKIDGEALVRTLLAYKRGEPRVCAMVKAPTPEEEDRRRLCRERKVLVTERVKHVNRLKGLLFSQGVCGYEPLRRNRRRRLDELRTGDGRPLPKNLKAQISRELDRLELLLEQIKVVETERDALLAAQQIAAPTSAAMLLAIKGIGPDFAAILWSEGLFRHFDNRRQIASYAGLAPTPWKSGSIDREQGVSKAGNPRLRTTLIQLAWLWLRHQPQSALALWFKERVVRNGGRLKKVTIVALARKLLVALWKYVTAGVVIEGAVMKVA

SEQ ID NO: 141877 - protein, 325 aa, unidentified
MDVPALGIDVSKDTLDVNVIIAGKPLGKQFANADEGYRSLIGWLKHRKLGQVHVCLEATGRYSLGVALALHEAGHIVSIVNPAQIRDFARTRLGRNKSDKADAAHIREYGALFSPPPWRPPSPSLRRLCDLQAMRAGFVVSKVAWQNRASSIGGDDDVARALANATVVHFAAQIAAVDQAIAETIDHDDDLRGKRDLLLSIDGVGETLAAVILAELPGPQVITSSVQAVAYAGLNPRQFQSGSSINHPTRISKIGNAVLRAALFMPAMVAMRHNAAVAALARRLRERGRLTGKQIVVAAMRKLLVICFGVLKSGKPFDATIAMAP

SEQ ID NO: 141878 - protein, 432 aa, unidentified
MGQFLFVDLQRRGRPDDRKGSSMEAIIERAAGLDVHQATVVAGVLIGKAAGRPRKEVRTFGTMTQDLEALRDWLHGLGVTHVGMESTGVYWMPVHTVLTGHFTLIVGNAHHIKNVPGRKTDVKDAEWIADLVRHGLIKASFVPSVQLRELRDLLRYRRSLAQTVVSVRNRTLKLLESANIKLASVATDVFGVSGMAMLGALAEGDATPDAMAALARGKLRRKRETLAQALNGRLTENHRFVLRLHIRQLDRLEADIAELDDRIADKMSPYRKQQKLLTQIPGVDDLAAANIIAEIGVDMSVFGTAGRLAAWAGVCPGSHESAGKRRRAGTRKGNLHLKTTLVMSAMSAARTRGSYYRDKYYRLKARCGGVKAAMAIAHKILIAVFHMLANDAPFQELGAAYLDQRSKQRVARALVRRLDTLGYNVQLELKAA

SEQ ID NO: 141879 - protein, 354 aa, unidentified
MPILAELVDAVVGVDTHRDSHEVEIAQPSGAVIATCQISNDTTGYAELLSWILDHTPGPRMVVSIEGTRSYGIGLARAVAAAGLMIIECEQPNRKARRGRGKSDPIDAHLAVMTALRLDVDRLPTPRADGDREALRILLAARGELTTTSTAQINRLRALLLGGDDRDRDLARGALTDATLAALGRRRQPRDADRHQAIRHAEIRRLALAIREVTRALKTNRAQLRTLVDDLAPGLTDRPGIGPVSAAQTIVSFSHPGRCRNDAAFAALAGTSPLPASSGRTIRHRLNRGGDRALNRAIHTIAITRARCCPTTQAYITRRTAEGKTPKEIRRCLKRYITRELYRTLTNTMTPPRT

SEQ ID NO: 141880 - protein, 416 aa, unidentified
MAHPLQFAALIGIDWSDTKHDLCLVDTQTGAQELSVVKQTPEALNEWALGLRTRFGGAKVAVCLEQSRGPLIYALLKYDFLILYPVNPKTLARFREAFTPSRAKDDPRDAEYLVELLIHHRERLKAWLPDDERMRTLQLLVEHRRRLVGDQTRISNRLTALLKGYFPQVLQWFPDIRTKMVCDFLLRWSSLDALKGVRRATLEKFFREHNSQRTETVERRLEAIKAAVPLTTDKAVINSSVAMVKALASQMRTTLEAIKEFDQQIEGLCQAHEDFELFTSLPGAGKVYASRLLTALGSNRERWASADELLRFSGVAPVVERSGRSSWTRWRYFCPKFLRQSFVEYAGESIRHSEWAKAFYVSQKAKGKSHQAAVRALAYKWIRIIWKCWRTRTKYDEARYVECLRKKGSAFVSAPA

SEQ ID NO: 141881 - protein, 357 aa, unidentified
MGKSIIDTSSVTRVGLDMAKRVFRIHAVDATGFVVIARSVNRRTLLKFFDMLPRCVVAMEACSCAHHWGRQLLELGFAVRLIPPAHVKPYVRRNKNDAADAAAICEAAGRPGQRFVPVRSVENQAALMRHRARELMVGQRTAALNPLRGHLSEIGVVAAQGVQNAYALKDMAAEGFDANGEIVVPDCVRLALAPLVRQIDALDEAIEVIDRELEASARTDETAKRLMTIPGVGPVTAMALLATIQDFAAFSSGREFAAFLGLTPREHSTGGKPRLGRITKMGDRYLRKLLVQGACSALGHRKGHNDALRRWASGMLERKTVKYKFKLTAVALANKLARIVYALATKGGHYDDRPVAA

SEQ ID NO: 141882 - protein, 433 aa, unidentified
MKVMYERVAGIDVHKDMIKVAIRSPGDKPWTRKTEILEYRTFYGVLQEMARELRRRGVTHVVMEASGVYTEPVYYALCEQDFTEVAVINPVHAKALKGHKTDAKDCARLAELFECGLLRGSYIPPAEQKEVRDLTRYRIKTVQARTSEIQRLGKALESAGIKLGSVASEITGKASTAMIEALTGGERRGGVLADLAIGRMRSAGKLADLSMALTGRFTGHHATLCRLHLDRIKLLGDAVGGLDDRIAAGAARWQREAGLLKSVPGFGDVVTCAWLAEIGPAPHKWFSRHEKLASWVSLCPGNNISARKRKHGRTGDAGTYIKPMLIQAAWSAIRVRGRLQARYSRLVRRFGGQKSPAAKKKAITAIAHTLLKIAYQVLKSGTPYQDLGADFYTRRNSAEEQQKYLERQLQKLHPGCTITITISPPEAALPPGE

SEQ ID NO: 141883 - protein, 342 aa, unidentified
MNSNKVTQRTLKGNDESVSGYEHYIAIDWSIKVMALAHMKRRSKTPRVHERPSDIKEVQGYLTLLKGRKILALEETTTAQWLYLELVDFVDRIIICDPYRNRLLLDGPKTDKLDAGKLCMLLRAGLLKEVFHSVNTLYELRSLVSSYEDLVQAGVRVLNQQKALELGHFTTGENAPFILDHMKQSIEMYRTSKEEYEEKFEEIAKKHTLVKHQVGIPGIGTIGAVKIVATAVDAKRFPHSGKYLSYCGLVYNEKISGGRSYGRRRPRYSRRLKSVYKLAAMSCLSGNSNPMRRYYDWLIARGLAEHNARNAVARYRAKVSYGILKNGQRFIPYQKDNQKAEQ

SEQ ID NO: 141884 - protein, 429 aa, unidentified
MQNESTPGARGPVFCGVDTHADSHWLCVLDWRGRKVLSRRFPADAAGYEALAGAIAAAGEPACVAMEGTSSYGAGLTRHLASLGMPVREALSPARMQRRRPGQGKCDESDAERAARAAMSGSRLGTPKSQDGWVDGVRCMLAARSGAVKARTSAINTARSLLTTAPEGLRSRFRGMAGPRLMEELPSVRAEGALGAALGALADLWAAARDAALDMERAIEASLEENCPALLAMYGCGPVSAAKLAVAAGDNPGRLRSEASFAAICGACPIPASSGKTVRHRLNRGGDRQANSALHEIARQRVMRDPETAEYAERARGRGKSDREVMRCLKRYVAREAYRALMRPHEVRRPEDASGLVAARRAARVSQVRAASILGTSEKYISMLERGQRELKPIRRAYEAWVEAGLPLDWDRQAFEAERKMDSKKHLAK

SEQ ID NO: 141885 - protein, 323 aa, unidentified
MQGYVGIDVSKERLDVMLLRGEQREGQHFTNTPTGYGKLAGWLKRRMKASQVQVCLEATGPYGEGVAQSLYEQGYSVSVVNPARIKGYGASQMQRNKTDKLDAALIADFCRTQQPEAWQPPSPEVRQLQQRVRHLEDLMQARQQAQNHLETPSLDAALVQNWQAQITLLDAQIAQTRQAIIDHLDHHPDLKRQADLLRSIPGLGDLTIGKLLAECRDLSAFRDVRQLVAFVGLNPRQHISGSSIHKRAHISRTGSASLRAALYMPALSAMRFNPLLRAFADRLRARGLAGKAVVCAVMRKLLHLVYGVLKSGQPFDPNWALAS

SEQ ID NO: 141886 - protein, 316 aa, unidentified
MSVETWFVGIDVAKDRLDVALHPTDERWTGSNDPAGIEALSEQLVRLAPQLVVLEATGGFEVPLVGALGARGLPVVVVNPRHVRDFAKALGRLAKTDRIDATVLAECAARVRPVVRPLPDEEARELHAWLARRRQWVEMITADENRRQQAAAPIRRPIEGHLRWRRCQLAALERELTTRVRRSPVWRESETLRRSTPAVGPVLARTLLADVPDLGRLTGQQIAALVGVAPFNRDSGPRQGHRSLWGGRAPVRGVLDLAALVATQHNPVIRAFSQRRVAAGKPWKVVLTACMRKLLTILNARMKHRTAWKPVPALGA

SEQ ID NO: 141887 - protein, 403 aa, unidentified
MFEIEDVAVFLGLDVGKTAHHGHGLTPAGKKVFDKPLPNSEPKLRAVFDKLTAKFGTVLVIVDQPASIGALPLTVARDAGCRVAYLPGLAMRRIADLYPGEAKTDAKDAAVIADAARTMPHTLRSLELPDEITAELTVLTGFDQDLAAEATRTSNRIRGLLTQFLPSLERVLGPRLDHQAVTWLLERYGSPAALRKAGRRRLVELIRPKAPRMATRLIDEVFDALDEQTVVVPGTGTLDIVIPSLAGQLTAVHTQRRAMEAQINSLLEAHPLSKVLTSMPGVGVRTAAVLLVTVGDGTSFPSAAHLASYAGLAPTTKSSGTSIHGEHAPRGGNRQLKRAMFLSAFACMNADPASRTYYDKQRARGKTHTQALLRLARQRISVLFAVLRDGTFYESRVPETATV

SEQ ID NO: 141888 - protein, 315 aa, unidentified
MRSTVAQSVGVDISKDALDVAIHPSGESFRVTNNPEGHRTLIKRLKEFDIARIVFEATGAYHRLLQQALVEAGLPWVKVNPRQARRFAQATGKLAKTDRCDALMLARMGAALDLEPGAPASKTVEAMKELVNARDALVKDRVAALNRQAIVVSPLIKRQLAQRLRQINGQIEAIDKHLKMLRNADSDLCQRFDILTSIPGLGEVTANVLVVETPELGRLDNAQAASLVGLAPLARDSGKTHGKRSIRGGRPRARQALYMPALNAIRCNPEFKIKYQAMIKAGKPAKVAIVAIMRKLLILANALIRAQRKWAPTAP

SEQ ID NO: 141889 - protein, 354 aa, unidentified
MLIIGCDFHTRYQQIAMAREETYELLLERRLDHESGEAHTFYRELQNSHEPVRVGIEATGPIHWFEHLLAQLGHELWIGDSAKIRASETRKQKTDERDAALILDLLLAKRFPKIWVPTPAERDLRQLLWHRHKLVGMRTMLGNQLHALAMSQGLCRKKKLFTKKGRGELQGLGLAPWTSRRRAELLKLLDQLEPSITELDRAVLEEAQRREDAVLLMTHPGIGPVTALAFVLAIGPITRFHRSKKIASYLGLNPSEESSGGRRRLGAISKQGNTMVRWLLIETVHHAVRVDPELRQDYQRLKFRRGHAVAKVAIARKLAVRMYWMLRSGAAYAQLVRRQGSPGGTLMNTSSSLA

SEQ ID NO: 141890 - protein, 411 aa, unidentified
MRTNTCGKLSQLLNIFERWFSHKLQDLVGIDIAKNTHWASCLSSDGEIILEPFSFSNDNSGFQKFISKLESLDKTKILIGLESTAHYGENIISYLFNLDYNIGLINPIQTANLRRSNIRKTKNDKVDTKIIIKALTLGNYSLITSRDINNLKLKGLCRSRRNLVTMRSKAKIQLVSYLDQIFPELAQFFKGNLHLNVSYQLLKEYSSPKQISSLHLPKLSNILHDNSHGRYNKQDAIRLRELAKNSVGIDNPSLSLQIKHSILQIELYNEQIAEVEALYKQILDEMNTPILSIPGMSYNQAAVIIGCIGDINRFEHSCQLLAYAGLDPSVIQSGNFQARSTRMSKRGSGMLRYSLVYSAHNVVKNNKTFRDYYELKRSQGKSHYCALGHVAHKLVRIIFKMLKDNVAFNLD

SEQ ID NO: 141891 - protein, 404 aa, unidentified
MNAVGIDVSKGKSMVCVMRPFGEIVASPFEVTHTGNELRELAGKLNNLSGETKVIMECTGSYHIPIAFALHDAGCTVCTVHAQLIHDFGNNTIRKVKTDKADAIKIANYGLTHWLDLPEYVPEDDIRHMLKAYSRQYNKYIKIKTMLKNNLISLLDQTFPSVNELFTSPPRKSDGHEKWIDFATRFWHCRCVCDLTQEKFVATYRKWCRRNGYNFSQSKAEDVFIESIGHFFVMPKNETTKLLVTQAITQISTISESIAIVAKGMKQLAEQLPEYSVVRDFRGVGDILAPQLMAEIGDIYRFARKESLVCYAGLEAPPHQSGNFESSSTSISKKGSPHLRKTLFQVMDCLLKHSPADDPVYQFLNRKRGEGKHYYNYMTAGSAKFLRIYYARVKEFLNNFYDEE

SEQ ID NO: 141892 - protein, 380 aa, unidentified
MLGKRTAPAFVPRQYDVFVGLDVDKTSISLTCVDHEQMIQSVRMPHQATRLLGYVQRHFARQRIAFAYEAGPTGYGLYDALTHAGYTCLVAAPSMIPQAAGQRVKTNRLDSQKLAMSLRGAQLPGIHIPSPVYRHLRHLVQLRDTCVQQSRASQCRIKALLLFEGLPFPGTQWSQTTVAQLETLPCAPAVRFKLSSLVQTLRFAQAQVRETTREVRRFCTEEREILRCIGYLMSIPGIGWATGTQLLARIGDWRQLRHVRQLAAFLGLVAREHSTGETIRRGAITRVGDARLRNKLIQCAWAAIRQDAELRAFYGRIYHRHPAQHASTKAIVAVARKLTTRIYAVLTEQRPYVVRSVRLQTQEENIAPLGETRMPAEPAG

SEQ ID NO: 141893 - protein, 350 aa, unidentified
MIAVNKDIITTIGVDLGKNTFHICAMNDKGTIVLRERLTRASLPKRLANIPRCLIGMEACAGSHHIGRQLATLGHDVRLMPAKYVKPFLKGHKNDYRDAEAIAEAVQRPTMRFVPFKNDEQLDLQALHRVRSRLVGQRTAVINQIRAFLLEHGVAVRQGPGALRRALPSILAQRTDVLSPRIIHLIEDLTDDWRRFDQRIADVTREIEQLAKQDEHCKGLMGVPGIGPMTASAMVAAIGDGAAFNKGRDFAAWLGLVPKQISTGDRTILGGISRRGNRYLRTLFIQGARSVLQRSNGWEKKSFGRWLIAASKRLHKNVLAAALANKLARIAWAVLSHAREFDAAFALKAA

SEQ ID NO: 141894 - protein, 343 aa, unidentified
MNIKRVGVDLAKQVFQVHGVDCQDKAVLRKRLKRDQVLKFFATLPRCLVGMEACGGSHHWARELQKLGHDVKLVAPQFVKPYVKGNKNDANDAEAICEAIGRPTMRFVAVKTVAQQDLQAVHRIRSELVRQRTAKANQARGLLAEYGIVVGRRVETLRRALPELLEDAQNGLSFDFRILLEALRQGLTYLDKRAAAMDKQLHTPANDDPAAKRLQGIPGIGPITATALACAVGDGKRFKRGRDLAAGIGLTPKQHSSGGKEKLLGISKRGDAYLRTLLIHGARSVLKVAGNKDDLRSRWLQQLCSRRNKNIAAVALANKNARVAWALLSKGLGYQPPAEPLSA

SEQ ID NO: 141895 - protein, 339 aa, unidentified
MQLYTGFDLHSSNSYLAIVDEKGKRVYKRKLRNEPVSISDTLRPFKKDIVGIAVESTYNWYWMVDHLMAEGYKVHLANPAGIQKYKGLKYSDDQHDAFWLAEMLRLGILPEGYIYPKQERPIRDLLRKRGHLVRLRTSLILSLQNIISRNNGLKITVNDVKALKTDRVAPYLTNNEDLALVGKVSKETIDYLTGKIKTIESVVEKRVNLHQPYTFLLTIPGVGKILGLTIMLETGPIERFNKVGDYVSYCRKVSSKWISNEKKKGKGNVKSGNKYLAWAYSEAAEIARRYYEEPRTYYNRKMHKTNLMVAHNALAHKLARAAYYIMKDGVSFMPEKIFV

SEQ ID NO: 141896 - protein, 343 aa, unidentified
MEEVVVTIGLDIAKSVFQVHGVNSAGDAVLRRQLKRARMLPFFAKLPPCLIGIEACNNSHYWARELSALGHDVKLMPAQYVKPYVKRQKNDAADAEAICEAVTRPTMRFVAVKSPEQQSLMMLHRVRLMLNRQRTQISNAIRAHISEFGVVAPVGRLGVERLLEVVEDEDDDRIPEDARVCLKMLAAQLAVVKQQVLENDRRVLASARRTELGRRLMEIPGVGPLLASAFVASVADPTVFKTGRDLAAWIGLVPKQNSSGGKDRLGSITRAGNRYLRQMLVVGAMAVIRYAERHGTKRPWLVELLARRPAKVAAVALANKNARMVWALMTSGERYREPQVKAA

SEQ ID NO: 141897 - protein, 342 aa, unidentified
MANLNQFCDFTKLIDIAKSVFQIYSCDTQTGEITNVQIKRDKVLERFANCGKCLIGMEACGSSQYWARQLQALGHTVRLMDPKLVKPFVRHNKSDKADAEGIYHALVSGVRAVAVKTETERDIQTLLTMRALLVKQRTARINHVRGLLAEYGHVMPKSVDQYDKKVDECINSLEGDAVQLVIDTLRDTVKSIRDDQDRIKTLQREISRLANQTRNSKHFLTVPGVGDTIMAYMCVLLADPTQFSSGRQFAAYLGLVPMHTGSGGKTVTTKIPGRCDKALRALLVQGAHAVARSKCRTDWVKTILAKKPKKVAMVAIANRMVRQCWAVASKGQDWRRMPVTAA

SEQ ID NO: 141898 - protein, 369 aa, unidentified
MGEYSEAFVAFDVAKKKHAVAIAEGGRTGEVRFVGEVENSPAAIERTIKKLGKKYDRLHVCFEAGPTGYGLCRQVRDLGHDCMVVAPALIPKRPGERVKTNRRDAVTLARLHRAGELIAVWVPDVVHEAVRDLVRAREAAADDLRRKRQQLLSFLLRHGRIYEGGGHWTLAHRRWLARQSFVHTAQQIVFQEKIDAIEDAAQRLHRMDEQLRAVVPTWSMARVVEAYQAMRGASFLVAVIFAAEIGDVRRFDTPPQLMAFLGLVPGERSTGDTVRRSSLTLAGNRRARRALVEAAWTYRYPARVSETLRVRLEGLPKAVRDIAWKGQVRLCARYRRLSATGKKPPVIVAAIAREMAAFLWAIGREVAPS

SEQ ID NO: 141899 - protein, 281 aa, unidentified
MRYVGIDYHKRYSVLCATDERGQELKQRRISSNSATGFAQFFSELGEESKVVMEACWNWGWLYDLLAKIDGIDEVMLAHPYKTRLIAEAQIKTDRLDAQMLAELLRGDLIAQSHAPSAATRARKHLLRQRLFWVRLRTMLRNGMHAILDRQHGLERPQLKNFFSRRGQTWLEEVQLPCAEDQPLLTQDLEVAELLEEKIKQLDRSIGQSQSEEEKLLESIPGIGPLFSSVIATEIDGVGRFNSATKLAAYAGVVPTTHTPAADAYSMVACSGSAINGCAGH

SEQ ID NO: 141900 - protein, 392 aa, unidentified
MLDTGDVGVFLGMDVGKSAHHGHGLTPAGKKVFDKPMPNSEPKLRAVFDKLKAKFGTVLVIVDQPASIGALPLTVARDAGCEVAYLPGLAMRRIADLYPGEAKTDTKDAAVIADAARTMPHVLRSLELTDEVTAELTVLTGFDHDLAAEATRTSNRIRGLLTQFHPSLERVLGPRLDHPAVTWLLERHGSPAALRKAGRRRLVELIRPKAPRMAVRLIDEIFDALNEQTVIVPGTGTLDIVIPSLAASLAAVHDQRRALEAQISTLLEAHPLHPVLTSMPGVGVRTAAVLLVTVGDGTSFPSAAHLASYAGLAPTTKSSGTSIHGEHAPRGGNRQLKRAMFLPAFACMNADPASRTYYDRQRTRGKTHTQALLRLARQRISVLFAMLRDGTF

SEQ ID NO: 141901 - protein, 346 aa, unidentified
MTNVTIGMDLGDKNHEVCVLDQKGHVMDRFDVGNTRKQLRKVFQPYAGALVAMENGTHSPWISRDLKALGCKVLVGNARKLRMIWVRSQKTDVKDAEMLARIARFDRQLLYPIRHRSQQAQIDLEQIKARDLLVSLRTDLINHVRSTVKAIGERLPACSTDCFHKRAQTFMPDSLRTVLMPLVEQIASLTQQIQGYGCKIEQLALTVYPETACLQQIQGVGLITSLAFILTLESPDRFDKSRAVGPHLGLTPRQDQSGSCNKQLRISKEGDVYLRRLLVSCAQYILGRYGQDSDLRRYGERLIARGGRGAKRKAVVAVARKLAVLLHRLWSTGEVYQPLYNARKVA

SEQ ID NO: 141902 - protein, 346 aa, unidentified
MILIGCDFHPSWQQVCWVDTETGETEEHKVVHAPGEAEKFYRRFAAPARIGMEATGNCQWFLELVTGLGHEVWIGDAAKIRASEVRQQKHDRRDAGLLLRLLTEGRFPRIWTPSSQQRDLRQLLIHRYKLVRLRAQVKNGLQHLALNRGLQKKRRLWSQVGQKALLAIVLPPWASRRREDLMRLLGTLDEQIELLDQAVTEAAGKNKDAQLLMTQPGVGPVTSLAFVLTMGDVKRFPRGKQVASYLGLIPREYSSGGQQRLGAISKQGNRFMRMLLVEAAQVAVRCDPQMRNEYLHRCHSKAKGIAKVAAARKLAIRLYWMLRTQKRYPEIVHVESSSRVPLASAS

SEQ ID NO: 141903 - protein, 321 aa, unidentified
MVYIGIDISKSSFVAAYPSVNGYRTKAYPNTAAGVRKFIATPSVAEHHCVMEATGNYGFLLLYLLHQSGIAISLVNPKQIKHFARMMMAVTKTDEKDACMIAMYGEKMNPPIYKMPSQAILLLKQKKTVIRQLRKQLVASKNLRESLVVLPYRDKACVRALDKTIDFLTRQIEQLEAELADIASAEFDKQLKALTSTKGIGITLATALILTTGGFTYFDNAKQLSRFIGICPTYQQSGTSVNIKGHINRNSDEHLRSLLYVASWTALRYNAACRECYLRLKANGKPSKVALIAVANKLVRQAFAIATTDSTYIDGFISAKK

SEQ ID NO: 141904 - protein, 365 aa, unidentified
MNCVGIDVSKGKSMIAVMRPFGEVVVSPFEVRHTTNELDKLAGLLKSLDGETRVVMESTGNYHAPVAWLLHDAGLYVSVVNAMLVHDYGNNSLRRAKTDKKDAVKLANYGLDHWLTLPRYVPDEDTRLMLKTCYRQYQQYSKVQTMLKNNLISLLDTTFPDANRLFTSPPRADGSEKWVDFVATFWHCECVCGRSEKAFTTQYQKWCRKHGYNFNENKALDIYASACGHFGVMPKTDTTKLLVEQAISQLRATSAALAALKQEMQSLAASLPEYPVVMGMFGVGPTLGPQLMAEIGDVRRFHSKKALVAFAGIDAPPYQSGQMDVRSRSISKRGSASLRRTLFLVMSVILQRAPMDEPVYQFMNK

SEQ ID NO: 141905 - protein, 355 aa, unidentified
MLKIVYPICCGMDVHKSFVVACIASTNDHGVTTYKSKRFSTFTRDLRRCAVWLAENDCKDVCMESAGKYWIPIYNILEPTCNIVLAHPKYVKAIRGKKTDKRDAKWIADIFKHDLVSGSFIPPADIRQLRDLVRYRWKLTNFTTGEKNRAKNCLTVSNIKLDDVFSDVFGKAASAITTRLLEHPTEKITDVSGFRTRGMKATDEEVLAAVDGEMCAEQAEKLRIIRSHMDSLEMCKANLDSLILTTAEKYLPQLNLVMTVPGIQSFAAIGIISEIGVDMSVFPTSKHLCSWAGLTPQNNESAGKKKTTRISRAGAYNPELYRKGDRPPAHREVSVEEAIFILQRQGYLVTAPPTT

SEQ ID NO: 141906 - protein, 364 aa, unidentified
MKDSTIWVGLDWHADSVVGSVFGAAGSEPLERIEAVPDARGLARLIRRLKGLGRDVRCVYEAGPCGYEPQRALARAGIGCAVAAPSLIPRRPGDRVKTDRRDADKVGRLYRAGELTLVTVPDERQEALRDLVRAREDAKADLLRRRHRLGKFLLRHGHRYREGSAWTQRHWSWIRSLHFEQPHSQAVFEEYQAAVAEGLEQVARFDRLLEEAARAPELAAKASRFQVLRGVATRTALTLIAEVGDPRRYAKASQFMGATGLIPSEHSSGGQRHQGAITKTGNAHLRRVLVEAAWHYRHRPGPSRDLARRRLGQPLPVLAIARKAELRLHRKYQRLILRGKQSTQAVVAVARELAGFIWAIAQVA

SEQ ID NO: 141907 - protein, 360 aa, unidentified
MKVGQEVLVCSVVGGVDTHKDLHVAAVVDERDHVVGSQCFATTRHGYKQMLAWMRSFGQLRRIGVEATGTYGAGLLRYMQNAGVEVLEVTTPDKHDRRKRGKNDDLDAQNAAHAAFTGKRTVTPKSRDGMIESLRVLKACRKTAVAARRVALQMIQNTIVCAPDELREALRKMTRMQLVRTLAAWRPDLTDYRNVVSAYRIALKSLGRRYLELHDEIADLDTMIIAITDELAPTLVARNSIGHGSAAQLLLTAGDNSERLHSEASFAALCGVSPVPASSGKTTRHRLNRGGDRAANSALHIIAIGRLRTDPRTKAYMAKRIAEGHSKLEVIRCLKRYIAREVFSLISQRRREINQAQVPA

SEQ ID NO: 141908 - protein, 387 aa, unidentified
MKSIIAVGIDVSKEKLDVSFYDGKNHIIKVYSNKEDGIAKLINDAEAIKKKVEQKDKNQDDMKQVDKNHLYDCELHFIMEATGSYHTKVLFELSNKNYTVYLLNPLISKRYSEEQLRRTTTDKVASKLLAEYAYSSISSYLLGIQNERYNILISSKFDSREKDELDLKILLKTLEGLKKTRTRILNQIEALNQYPKGYGIDASKSLNNVLKEIDKEIKEIENKISGILNNGEKRDLYERLKTIPGIGDRSASVIIAYFGSFSTFESPKQVPCYTGLTPLIKQSGKSVGAKEIYHISKIGSPYIRQVMYMAALSAARYNKQCNILYNRLLNKGKSKKLIYVAVSCKLLRQAFGIIKWGRVYDPDFGLILDEENKRNNNKEGLRWTASC

SEQ ID NO: 141909 - protein, 350 aa, unidentified
MSVTTIGVDLAKNVFHIHGVDAEGRSVLRRKTSRAGFERLMAGIPGCRVGMEAGSGSHHWARQLHAHGHDVKLMPPRYVRPYVKTNKHDAADAEACCEAVQRPGMRFVPVKTVEQQAVLMLHKVRDHLVCQRTGTINALRGHLAEFGITAATQRRGLSELIGLVENETDSGLPEDARKALLLLVEQIHAGDKQIKDLDRQIIEAAKVSEVCQRLIAVPGVGPIIATALTAHLPCPDQFTSGRHFAAWLGLTPRQHSSGGKDKILGISKRGNAYLRRQLVNGARAVVRVAPGREGILWSWTNQLLSRRPFNVVVAAVASKWPGLLGRCARMERSGGSLKPPNDEGPMARLA

SEQ ID NO: 141910 - protein, 339 aa, unidentified
MAVYAGIDLHSNSNFLSVVGESGKIIEKRKLSNDSSTILHALTSYCDLIRGIVIESTFNWYWIVDALMDEGYRVHLANPAAIQKYSGLKHSDDASDATWLAEMLRLGVLPEGYIYPKEERPIRDLLRKRGHLVRLRTSLINSLQGIISRNNGHSIPGRMIKQLKINQVAPLCAANEDLALCGEVSKDTIDYLGRQIKKIEKQAEERIELRPAYNALLSMPGIGVVLGLTIMLETGPIDRFAKAGNFSSYCRKVPSNWMSNGKRKGRGNTKNGNKYLAWAFSEAAELARRYDDASRSWYDRKMARTNRMIAHGALAHKLARAAYFIMREGVLFDHKKCFA

SEQ ID NO: 141911 - protein, 430 aa, unidentified
MNSTQNKKIRQVTEKTMIVGIDVGSVKHYFRAFDWRGIELTRRPIPFTNSMEGFNAFHDVVTDLMDKNNLEITLVGLEPTGHYWFNLGQYMNGKNIKFVMVNPHHVHKSKELDDNSPSKNDCKDPKVIANLVRDGRYFYTYMPSGIYAELRNASNRRFTLVEEQVRCKNRIYKWISVYFPEYKGIYTHIDAKGGILLLKNAPTPEDIIEIGVEGIIKIWKDAKLRGNGHKKAITIFNRALNSIGFKEGLTEARIEIKDLIEDYETQTKRLEQINDLIKNLTLQIKHVDKLLEIKGVGIITVAGFIAEVGDITRFDNSKELQKLAGLELVEDSSGKHNGKTKISKRGRKRLRYLLIQAAISVIGKNAEFKQIHNYYTTRNDNPLKKMQSVTAVACKLIRVFHVVLVKGVSYDASKMLEDIKYPGGAKLIAA

SEQ ID NO: 141912 - protein, 323 aa, unidentified
MTPTLETPLTPVYVGLDVAKATVVAATEPASEVWTTPTTPAALEALAARLAALRPTLVVLEATGGYEVPVVAALAAARLPVAMVNPRQVRHFARATGQHAKTDVLDARLLARFAARVQPPVRAVAEATTAELAALLQRRRQLLEMLTAEENRLALAPRAVHPSLQAHIAYLRTALDEADQALTQAVAASPVWRAEEDLLRSVPGVGPITARTLLGELPELGTLTRKQIAALAGLAPYARDSGAQRGARAIRGGRAAVRTVLYMATLVGVRRNPVLRAHYEHLLALGKAKKVALVACMRKLLVILNAMRKHQTPWCPAVAAATT

SEQ ID NO: 141913 - protein, 309 aa, unidentified
MKEELVYLGVDIAKSHLDAAIGAQKHRFCNDTVGHRQLVRWIEQTEAAVQVICESSGGYERRLVQALARARIKVSLVQANRVRQFARAAGILAKTDRIDAEVLCEFGKVMQPQTVTAATLEQEHLRELESQRRHLTHLLVMEQNRGARVSDASVVRLNRSLINQIKKQIEKLDLLIKEHIEQSPRLSAKAEKLISIKGVGERTAALLLAQMPELGQLNRREVAALVGVAPFNRDSGKMRGKRAIYGGRRFVRHGLYMAALVAARHNPILRNFYLRLRSAGKPAKLALTATMRKLLIVLNSALKRDLRYA

SEQ ID NO: 141914 - protein, 355 aa, unidentified
MESVKYIGLDVHQSTISVAVLNREGKLLMQSVIATQATAVLDLLKGLQGVLQVTFEEGTYSAWLYDVVLRHGARVVVCNPRKNALLKSGNKSDQIDARKLAELLRAGMLSPVYHGEQSTRTLQQLVASYTALTEDTGRAMRRIKALYRSQAIACAGKKPFGKRYREEWLARLSDSGQRRRVEWLYQELDAVQILRREARHAVMVECHKNQAAKLLRSMPFFGPLRAAVLIARVQTPHRFRTKRQFWTYCGLGLETRSSADYVEKDGQIMRRRKPVYIRGLNWNYSHELKNVFKSAATTASAMDGPFGAFYASRVANGMLPAMARLTLARKMAAIALILWKKGETFAAEHLKLQAA

SEQ ID NO: 141915 - protein, 321 aa, unidentified
MKFIGIDIEKDTFVAACPVQNGYQTKSYPNDAKGVKKFIGSFTNAEHHCVLEATGNYGALLLYMLSEQDIAVSLVNPKQIKHFARMMMTVTKTDQVDAGLIALYGEKMQPPIYKMPTETIVLLKQKKVILRQLKKQLTSLSNLKESFNVLPKVDKNSIRVLDKTARFIEKQISEVETELSGIAKEAFGEQIKSLTSIKGIGVTLATSLIISTGGFSQFQNSKQLSRYIGICPTYQQSGTSINIKGAINRNGNSQLRSLLYIASWSAIRYNAACKETYERLKAKGKPSKVALIAVANKLVRQAFAVCTAETTYVDGYVSKAC

SEQ ID NO: 141916 - protein, 310 aa, unidentified
METQVFVGVDVSKDNLDVAIGPQKEIITFANDQKGVDSLVKKMKRIDAQLTVFESTGGYELLAASCLAEAGLAVVIVNPRQVRNFAKATGILAKTDAIDARLIARFAQAVKPEVRQLKDRQTSELTALVTRRRQIIEMIVAEKNRLRLANKRNKKDIEDHIRWLKKRLDKIETDIGKMIQSSPIWRCKDDILQSVPGIGPVTSARLICDLPELGVLNAKKIAMLVGLAPLNCDSGKYRGRRRIWGGRAAVRSGLYMATMAAIRCNPAIKGFYQRLMAAGKCHKVAATACMRKLLIIVNAMLRDQTLWQQN

SEQ ID NO: 141917 - protein, 437 aa, unidentified
MLSYLNLNAAGVDIGATEIYIAVPGDRDPQPVRCFSTFTEDLHAAADWLKACHIETVAMESTSVYWIPLFQILEARGFQVFLVNAHHVKNVPGRKSDVSDCQWLQYLHSVGLLRASFRPEQAVCTVRSILRHREGLVQMASSHVQHMQKALDQMNLQLHHVISNITGLTGIRILDAILAGERNPHQLAKLRDRRVKAAEETIAKSLVGDYRREHLFTLRQSLAAFRQYQDWIADCDREIAQYLEQFESKLDPPPGPTSPSEDGSKPKTSEPRFDLQTHLHRIFGVDLTQVPGIQVLTTQTLLAEIGPDLSRFEDGSALASWLGLCPDNRISGGKVLSVKTRKVKNRAATALRVAAQALHHSQSFLGHFYRRMRAKLGAPKAITATAHKLARIIYHMVTTGQAYDETICAQNELQNRQRLEARLRKQARELGLQVVAA

SEQ ID NO: 141918 - protein, 427 aa, unidentified
MLKINYMSTLFVGIDVSSKSNVVCAIDFYKNPLIKSTVTNNQPGAYSLICQLLDVFHKHTDLNTVVIALESTSIYSLHIANYLSSCEELMPYHPYVFCLNPKMTANYRKSFIGMNKTDLLDAFVIADFARVGRIETDPWRGSQFLALQRLTRHRLHLVEALTREKTYMVSNMFLKFSELPILPKEEQPFCDNYGSTAASVLTEFFSMEDIINASPEELISFLGEKSRNRIENLEGTASLLQKAARDSYRLDKCLYEPLNISLACSFNCIDAFKQEIKIIDKAIEKSIAGLNPNAYTILMSIDGIGPVFASGILAEIGDISGFHSQDALAKYAGLTWTRAQSGEFEADESRMTKAGNRYLRYYLGEAANSMKNHSSEYRNFYYKKYNEVPKHKHKRALTLTSRKLVRLIFGLLTKEKLYSTDKADALS

SEQ ID NO: 141919 - protein, 353 aa, unidentified
MEFTMIARSDAACFVGIDLHKDTLTACVVVGKDREVSFERIACKSRERIREFFSSLPRPSAVAIETVGFYRWLWTELDPVVDQLVLCDARGARALAGRRIKTDREDALNVALLLADGRLPFAWAPPENVQLLRNWTRHRNGLSRQHAKVLHHVKSIMHRVNRPGPTRLDASGLQRYLLAGVERFSADDLTMLWQHQRRLVEIEQDRAQSERRIAELMRAPEFARLRTILESLPGVGLVVSATAIAEIGDFSRFPDSKAIGRYAGLAPTVYASGNSSRLGRISKTGSPDLRWALQQAAWTAIRCDAGFKKTWLRIAKTAGKKAAAVAIARKILVLMWTLVRKDELYKAREPIAA

SEQ ID NO: 141920 - protein, 313 aa, unidentified
MEPCAVGIDVSKASLQIAVHPSGEQWTSGTTPGALDALVQRLRGVTPSVVVVEATGGYERALVAHCVAAALPVAVINPRQVRAFARALGRTAKTDTLDAAVLAEFGARVAPAPRAVADAATQALAALVTRRRQLLEMIGMERSRLDQAPPTGKITRDLRQHIRWLERRVTDVDDEIGTAIQASPIWRVQEDLLRSVPGIGPTTARTLLAELPELGRLDRRAIAALAGVAPFNTDSGQHRGQRHIWGGRASVRAALYMAALVASRYNPVLRAFYQRLRAAGKPGKVALVAVMRKLLTTLNAMIKHETPWNSATA

SEQ ID NO: 141921 - protein, 369 aa, unidentified
MNTDKYVGLDVHKDTTVIAVADGGRSGEVRLFGTVSSDLRALERALKKLGGEHVRLHVVSEAGPTGYGVYRRLKQLGLECIVVAPSRIPQADGARQKNDRRDATMLARLHRAGELTAIHVRNEVDEAIRDLTRARADAVHDLTRAKQRLKSFLLRQGLHYPGKASWSEEHQRYLRALKFPIPALRAVLEEYLFAFDQIVQRVQRLEELLAVHVPQWRMYPAVEALMCLRGFRLTAAAMLIAELGDIRRFSHPRHVMAFLGLVPQQHSTGASIRLGAITKAGNPHARWILVEVVQHAFMTPKISRPLSLRQAGQPAVYREIAWKAQVRLHHRGWHLLRRGVMKAKVNIALARELVGFVWDLLRHVPEPAA

SEQ ID NO: 141922 - protein, 462 aa, unidentified
MPERKRKKKGMCLTDRPAVEANAAGIDIGARELYVAVPPDRDREPVRMFESFTEDLHRLADWLEACGVTTVAMESTGVYWIPLFEILESRGLKPHLVNARHMKNVPGRRTDWHDCQWIQYLHSVGLLRGAFRPPDEICAVRAIMRHRQGLVEMAAQHVHHMQKALTQMNLQIHHVINDITGLTGLAIVDAILAGERDPAQLAALRHYRIQADEETIRKSLVGAWRSEHLFALRQSREMWGVYQKQIEQCDAEIARLLADIEARVDPAEKPLPPDRKKRRARNDRNPGGTGFDMRTEVYRLFGVDVLQIPGLEHTALSLLTEVGTDLTRFTTAAHFVSWLSLCPDNDMSGGRWWRGVRKTNSRTGQMFRQAASSLHRSQTGLGDFLRRMKAKLGPLGATMATARKIAVIFYTMVTKQVEYDDSIWAQQEAARQRRLEARLKRQAAQLGYLLVPKNGDPQTSRA

SEQ ID NO: 141923 - protein, 432 aa, unidentified
MKYKMKQKQNQRITRITEKTLVVGADIAKKVHVARAVDFRGIELGKECVFHNDQEGLTKLASWMKELGGVHEKTDIVFGIEPTGHYWFPLAAFLKEQGIKIVVVNPHHVNKSKELEDNSQTKSDYKDAKVIADLIRNGKYSEPNLPTKEYAELRILMNFREKVMVNLNQVKARITNWFDRYFPEYPQVFKDWEGKASLMTMRQFPTPEEIVSTGARGVLTHWKTEVKRGVGIKRAEQLYAAATVSIGLVEGLTAARIEFASLLEQYDLYCKQEEKIMTEVLQILEKIPGTKQMLSIPGIGVLTVAGFLAEVGDLNNYDHGQQIIRLAGLNLTENSSGKRKGKTGISKRGRSRLRGILFRAMLPMVAKNEEFKVLHKHFTTRSQNPLKKKQSMIALCGKLVRVLYTLGTKQKEYNADDLLGPVRQAQLQQSAA

SEQ ID NO: 141924 - protein, 347 aa, unidentified
MRFFTDPHQNYCGIDLHARSMYLCIQNREGKVVLHKNMRARPEPFLKAIEPFREDIVVGVECIFTWYWLADLCAEHNIPFILGHALYMKAIHGGKAKNDRIDSRKIAALMRGGTFPVAYVYPAKMRATRDLLRRRNHLNRRRAELLAHIQNTNSQYNMEPFEKNISYKKNRAGVVEQFLDPDVRMSMQANFELIALYDDLKNRLELHITKNAKHHDPQALYRLRSVPGIGPILSLVMLYEIEDINRFARVQDFASYARLVKCARESAGKRYGTSGSKIGNVHLKWAFSEAAVLFLKGNPEGMKFKNRLEKKHGKGKALSILAHKLGRAVYYILKRDQAFDMNKFLKN

SEQ ID NO: 141925 - protein, 360 aa, unidentified
MVVQRTNVGLDVHARSVVACGLDRQTGEVFEQRLTPSHEEIAAWIRSLPGPAAAVYEAGPTGFGLARSLRAVGIDCEVAAPSKLMRPSGDRVKTDTRDARHLARLLMLGDVTAVAIPSREQEAARDLVRAREDCRGDLMSTRHRLSKLLLRQGIVYRGGKAWTGKHELWLRCQRFDDPALQLAYDTSFEAMLATIARRDRLDRAIEQMAADSEFTPVVSRLCCVRGVATLTAFGLAVEIGHWHRLTGRSIGAYLGLVPTEYSSGASRVQGGVTRTGNGHARRLLIEAAWHHRARYRPGATLRRRWDAASAPARARGQLANQRLHARWQTFDARKKRAVVANTAIARELAGWCWSLAVLDG

SEQ ID NO: 141926 - protein, 405 aa, unidentified
MNAVGIDVSKGKSTVTIRKPGDVVLMSPCDIPHSQSAINDLIKQIKSLEGETKVCMEHTGRYYEPVATWLSDAGIFVSAVNPILIRDFGDDSLRTPKTDKADSKKIARYTLDRWAKLKQYGIMDKTRNQLKTMNRQFGFYMAQKTAMKNNLIALIDQTYPGANDFFDSPARNDGSQKWVDFIHTYWHVDCVRSKSLNAFTEHYQNWCKRKNYNFSAEKAAKIYQISSDLIAVFPKDDITKMLIWQAVALLNTASKTVESLRSKMNELASTLPEYPVVMDMNGVGATLGPQLIAEIGDVSRFTHREALTAFAGVDPGKNDSGKHIQNSVRTSKKGSPYLRKALFQIMDSLIKRSPVDDPVYAFMDKKRSEGKPYYVYMTAGANKFLRIYYGRVREYLSNLSNNETI

SEQ ID NO: 141927 - protein, 338 aa, unidentified
MTVVMGLDQHRAQITAEWLDTETGEVSRARVMPADRDGVRRFLARFAGRQVEVALEATTGWRFVVEELAAVGAQAHLAEPAEASALKGNKKRAKNDRADARHLRELLMAGRLPESYIAPAHLLDLRARVRLRHSLVDQRGEWQQRIHAVLYHHGHPQKDGLLRVANREWLQRLVLPDAAREQVTVALAMIDALDAQEAPITAELRRYARRQPGCKALMGLYGVGELTAVAILAELGDPRRFASSRQAVRYAGLDITVHQSDRRRAPGHLSRQGPPALRWALYEAAQAARRPGSPDRAYYDQAAERLGGNRACLALARKLLKRSFHILRELGDEALAPA

SEQ ID NO: 141928 - protein, 417 aa, unidentified
MEEGEKASPCRYVALDIHKYYSVVAGVDREGEEILSACRVEHVDLEDWLPKHLLRTDRVVIESTTNAWHVYDLLEPLVAEVLVANPIKVKQIACARVKTDKKDTFILARLLAANLVPTVWVPPTHVRELRQLVSHRRRLAGMHTQVVNRMHSVAHRHHLNHPKGRDFQPKNTGWQRDESLSKLEKLQLELDMETREHLEKQMECMTRELGRMSHEEPWASEMLYLMQVPGCGVVTGMTILAAIGDITRFETPKALASYSGLTPGLEQSGVKLRGKGITKEGRKELRWVMVEVAWRAVKADPYWKKYFEELKRRMHPNRAIVAIARHLLTMIWYVLTRHEPYSHYSPERIAYKYLTWSWALDEEQRQGMTRPQFARYYLMRLGIGNELKRVALNPKFPYKLASVEEVLALRPELRPPG

SEQ ID NO: 141929 - protein, 315 aa, unidentified
MMATPSVFVGIDVSKGRLDVHVRPLGTGFSVSNAAAGYAELIARLRPLRTKRIVMEATGGYERALWLALTEAGLVAAVVNPRQVREFARASGRLAKTDRLDAAVIAHFAETFSPVGVRNPDPVADRLGEHVLYRRALKEEIVALANQLRRLETPALRGRAERRLESLRSEATEIDREMRAIVDGDPGKKALFACLTALKGVGPVLACTLIANMRELGSLSRHQAAALIGVAPVNRDSGTMRGHRAIAGGRRGVRNVLYVATLSAVRSNPAIKEFYGRLRGKGKPAKVALVACMRKIAIILNARIRDQLAAAAATS

SEQ ID NO: 141930 - protein, 347 aa, unidentified
MRFYTKQHPFYCGIDLHARTMYVCILSQSGEVLVHRNMKTDPETFLNVVAPYRQGLVVAVECMFTWYWLADLCADAGIPFVLGHALYMKAIHGGKAKNDKIDSQKIAALLRGGMLPQAYVYPATMRATRDLLRRRMHLAHKRAELLAHVQNTNSQYNLPAIGKKLAYKANREGVAERFADPAVQKSIEVDLALITYYDELLHDVERTIVNTAKHHDANTLYLLQTVPGIGKILSLVLLYDIHDLARFPSVQDFVSYCRLVKCAKESAGKRLGTSGAKIGNAHLKWAFSEAAVLFLRDHPAAQKYLTRLEKKHDTGKALTVLAHKLARAVYHMLKRQVAFDREKFFQR

SEQ ID NO: 141931 - protein, 346 aa, unidentified
MTIVEDTRAITGGVDTHADMHVAAALDPIGGLLGAGEFPAATAGYARLLGWLGGFGTVALVGIEGTGSYGAGLARHVTTAGIRVVEAGRSDRQDRRRQGKSDPLDAVSAARAAQSGRARGAPKGRDGAVEAIRALMADGRSARSERTQTINQARALIMTGPDDLRARFARHTAAGLVTELASLRPRPGDTVGYATRIALRELGRRAEFPGGQLGRLDELIVPLVTARAPGLLALYGVGPDTAALLLVAAGDHPHRLRSEAAWAHLCAAAPIPASSGKRTRHRLNPGGDRQANHALWRIVITRMSSHAPTRAYVERRTAEGMPEKEIIRCLKRYVAREVYRHLRAAG

SEQ ID NO: 141932 - protein, 284 aa, unidentified
MDYYAGIDVSLEASSVCLVDSAGKITRETKVASDPDALIEYFVSLGLELKRIGLEAGPLSQWLYEGLTKAGFDVVLLETRHVKAALSAMIIKTDRKDARGIAQLLRMGWYRAVHSKSPGCQDVRALLTGRKLLQAKLRDVELSIRGILRGYGLKVGEVSRGRFEARILELVEGHPVLKTVIGAMLQARHALWTEFTKMHREMLKIVRQDRVCQRLMTTPGVGALVAITYRSAVDDPGRFAKSQTVGAYFGLTPKKYQSGETDLDGGISRVGDTMVPFTRRPTSC

SEQ ID NO: 141933 - protein, 459 aa, unidentified
MKKKSKRTKGIEQAHPFDGMSKVNPNAAGVDIGAEEIVVCVAANETTQLVRGFGNYTIDLQAIADWLSEHKVKTVAMESTGVYWIPLFEALEQQGFECLLISSRSLRRVAGRKSDITDAQWIQTLHNYGLLENSFRPQSDLVALRTLLRHRAQLVEHRSPHILHMQKALLQMNVQLSQAVTDMTGVTGQAIIRAILSGVRDPKMLASLREHGCKKSEEEIGKALTGTWREEHLFVLKQAVALYDFYTEQVVECDEEIERMYAETRSDWKVGELQPLSSRKRNSHSKNARYDTEKIRQHLKRVSGVDISLVDGFGVSLAQTVIMECGTDMSKFPTEKHFCAWLGVAPKHEISGGKVLKNTTLKTKNRAGQAFRMAAQSVKQAECPFGVLYRRLRARLGPAQATVATAHAIARVVYRMLKYKVEYDPLSVNEYQKQYEEQQIKYMKKRAAKLGYQLLPVPA

SEQ ID NO: 141934 - protein, 331 aa, unidentified
MNSQRLCIGIDVSKAKLDAATMLGEKYRDKTFDNSAAGFKALIDWIAGLQSQIMDSSVDSSAQVHVCMEATNVYWEACAHALSAAGLTVSVVNPALVKAHAQSLGLRIKTDRVDARAIASFCREKAPIAWQPLSPTEQALRALVLRHTALMQMKAQESNRLETVRDAAASSVQMHLTWLDTEIDRIELEIKKRIDDDPTLKGKRELLDSIPGVGERTISVVLSYLSFIERMDNARQFAAFGGLNPALKESGTMRAKAVMSKAGHVELRRALYMPAMVTLYRTDWGKAYRQRLEANRKPAKLIIGAMMRKLAHVIFGVLKSGKPFDPTLHNC

SEQ ID NO: 141935 - protein, 330 aa, unidentified
MENYEEVIGIDVSKLTIDVYIHKKGKHRLFSNSRKGFMSLLIWSKKELGDTSFFYCFENTGHYSLKLSVYFTNNGIDYVEENALTIKRSSGIVRSKTDKLDAAMIARYAWLHREELVCSSVKSKELQELGRLLAFRDQLVRDRTGMLSSLKELENLLSSSSTDVCCKTIRRGITYLTKQVLVIEQRMKGLLKFDTDLDKNFTLLKTIKGIGLVLSCQLLYHTSNFKRFDNWRQFSSYCGTAPFAYSSGTSIKRGNKCHKIGDRKMKSLLSMASISAIQHDSELRLYYKKKVAEGKPKLVALNNVRNKLLARAFAVIKRGTPYVELQQFAA

SEQ ID NO: 141936 - protein, 355 aa, unidentified
MKYLGTDVHVTSTVWHLLDEAGETVGQGKVATTADGLSKLVSRLGGPDELVVAQEVGKMSYFVHDVLTELGARVQSFNAYHLKMIAASRKKTDKRDAYWLAKVVQTGMAPHPVYIPTGQVRRLRTLLSRRASLVKERRRWLGRARAHLHAAGYKPKAYRSVERLVSSALLHPDGVEVELGEALELCVRMDQVLTLELKRVEQTIGAEAEGIDAVQRLKTIPSVGDWVAVTMVAWIGDVHRFASARQLASYAGLVPSVSQSGTSQRMGGITKQGAPQLRMMLVQAAHVLMNRCKAAEAAPLQAIGQRIQTGRGRRKIAAVAMARHLLRIAFYILRDETVYDSKRLCASRQEEVTAA

SEQ ID NO: 141937 - protein, 363 aa, unidentified
MSVTLSSIPKLTIGLDLGDRTSRTYEVDDEGRRQAEAAVATTRQGMRRYFGDRPRCRVVLEASTHSPWVSQELTALGHEVIVANPAAMFKRARRRRRRNDALDAELLARQGRADPKLLHPVTHRRPIAQQHLEILKARDQLVRTRTQLINHVRSVVKVSGARLRATSAAAFVARAATEIPAELRVALQPVVQIITDLNRQIREADHEISRLIRDVHPVAQRLQQPSGVGPITALAFVLLVDDPTRFHNSRDVGAYFGLVPRLDESSDSQPQLRISKCGDALGRRLLVTAAHYILGPFGPDCDLRRHGQSIAARGGKNAKKRAVVAVARKLAVLLHRLWVSERPYDPDYVLTPHSGTPTTPTVS

SEQ ID NO: 141938 - protein, 420 aa, unidentified
MQIIYRRCAGLDVHEKSVSACIRIVKGKQVETVEATFPTFTEDLEQLRDWLIRNRIQRVAMESTGVYWRPVWNILERQPAKLDLLLLNPQHVKALPGHKTDRVDAARIAELTQYGLVRASFVPPQEIRELRDLVRRRVHLQQDRSRVSSRIHRLLELQNIKISSVLKKMTSATARSILEGLATATTIKPEALALLATHKKVRGKREQLKKALRCHRTDHFRFLLRELLEELDRFTAKMKLMEERIGGRMAPYSELIERLCGIPGVKELTAWTLIAEIGVDMARFPTAGHLASWCGLCPGNADSGGKRRSGRTSKGNRYIRRALLQAAWGVERITSRRTFLTSFFFRVSRKAGRRKAAVAVAHKILTLAYVMIRDGSAYYEQGVDYFDKVHPERTKKRLTARLEQLGFTVRLEPKLSPETS

SEQ ID NO: 141939 - protein, 330 aa, unidentified
MTNVSELTTEALFVGIDVSKDTLEVALGENAKTQTFGNDQAGVAALLGQLKPVAHRIAVVLLEATGGLEQVAAAALCAHGFAVIVVNPRQAHAFAKALGHLSKTDSIDAKALAQFARTLHNSDKRERLLYRLPTPEQELLLAMVTRRAQLIGMRVAESNRLASAHVSQRKSIERHIKILDKQIGQIDDDAQRHLRSHFQDKLALLKGLKGVGVGTQTMLMAALPELGSLKQREISKLVGVAPLNCDSGKFKGKRITWGGRSHVRAALYMAALTASRHDPVIKAFYERLTLAGKPKKVALVACMHKLLTIMNAVIKSAQPWQASYPQPNNV

SEQ ID NO: 141940 - protein, 320 aa, unidentified
MTAFTSVGIDIASKKFDAAIWIEGKKYKNKVFANTPTGFHAFLLWLAPYGPCHICMEATGAYSLPLATYLYDAGYPVSVENAARIHAFSQSELIRNKTDKGDAKMIARYCHLHKPPEWKPVPVNERKLQVLINRLNALKEMKRMEENRALTSETIVQDSIQKVIAALDEEIKEIEQAIKKHIDNDPDLKKNQALLESIPGVGEILSITLLGYVGDMSRFSSNKALVAYAGLNPMLKESGCWKGSTKLSKKGNALLRKALYMPAITALKYNPVVAALCNRLKEKGKRGKCLVCAAMKKLLQLAYGVLKSGKPFAAEIPLAR

SEQ ID NO: 141941 - protein, 324 aa, unidentified
MIDGILGIDVCKNTLDVSISSYTKVRTKSFTNSPDGWRHLLDWLIAQKIQRVHACLESTGRYSLGIACALYEADHVVSIINPAQIRDFVRTKLGRNKTDGVDASHIREYCELFKPSPWAPPSEAHRRLGELQTIRSGIIAGLTEWKNRKNSGIVDAEAQALADATISHFTSQLGAVDKAIALTIDNDCDLQSKRDLLLSISGVGETLAGVVLAELPGPDVLRSSAEVVAYAGLNPRQHQSGTSVDRATRISKIGNAVLRAALYMPALSAMRYNSAIVALVSRLKSRGRLKPKQIVVAAMRKLLVLCFGVLKTGRPFDAAIAMGG

SEQ ID NO: 141942 - protein, 342 aa, unidentified
MQELLYVGLDLGSSHCCQSIIDADGSLKFSRFIPTSERHLRDAFAGLGGDVRVHLEAGELSGWAGSVIGPLVSRVVVSHPRSLAWIGKDSVKDDRVDAAKLAELLRLGRVHEVYCERDSERRTFKHLVTHHEQMSREQARRKSKIKARLRTLGVIRKDAALFTSTGQAALLDEIESIEIKRMIAQSFSVLNQMLECEREAKHAMLEYSKRFPEVRLLQTAPGVGAITACRFVGYLQSPRRFSNKRKLWRYCRLGITRRESNGKRLSHPRLDGAGVGSLKDVSRKVFEAARRCKGNNSFKRVYDQSFENTKNAVHARLAAQRKVLATMRAIWLANRPYHNIGG

SEQ ID NO: 141943 - protein, 405 aa, unidentified
MPTSDSIPCRFIGLDIHKEYFVAIGVDSNQNQIFGPHRASMKRLDSWIAKHLTHQDAVVLEMTVNTYKVHDKLKPHVQTVTVVHPPHVALIVRAQVKTDKKAALILAQLHAAGLLPGVWIPPVEIRDLRALLAQRLKMQRIRAQAKNRLHAFLGRNNIFPNLDGMDIFDSEMREWWQELPATEMERFRIQADLDTLEFADQQVQRLQDYLNQLAPKNDVVTLLVQIPGIGVLTALTIMAAIGDISRFPSSKQLVGYAGLGASVHDSGQSYTTGRITKAGRKDLRKAMVEAANHAIRSHNHWQAEFKRLEPRKGRSKAVVTIARKLLVVVWHLLTEETSDRFGKDEQIARQFFCFAYRVGIDNLPDGLSAKQFTRNQLDRLGVGQEMTHLPWGSKRFLMPPSTLMK

SEQ ID NO: 141944 - protein, 345 aa, unidentified
MKKVIKQVVGIDVAQKELATCLGKMYEGLEVELYGHKTFANTAKGFEGLLQWVKKLTEDGICVRYVMEATGVYHESLAYFLKDQGMEVSIVLPNKISNYARSLTIKTVTDKTASEAITQFGLERNLDCWKKPSPVFKKIKQLTREREQIVEERTMVKNQLHAEQAEAEPNKTSVYRITKRIAFLNKQEKEVSKEIAALVKSDEKTSATVKLISSLPGVGLLTAAIVVAETNGFDLIRNKRQLTSYAGLDVKEKQSGTSVKGKPKISKKGNRFLRKALHLPALCAIRHDERFKAIFVRLVGKHGIKMKAAVAVQRKLLEMIYTLYKTNKKYDKDYFKKMEVEQAEK

SEQ ID NO: 141945 - protein, 337 aa, unidentified
MKYCGIDLRSNNSVIVVIDEEDRVVGQKRLPNELARIVVFIVQWRDELAGVVIESTYNWYWLVDGLQAAGFQAHLANTAAIKQYDGLKHGGDEADARHLAQLLRLGILPTGTILPRDERAVRDLARKRIQLVRGRTTHILAIENIMARQFGARMTSNQIKRLSADDIDQMPIEADVRLAMNANLAVIGALDAQIEVLERRLRERAKPRPEYAFLTSVPGIGQALSTTILLETGPIDCFASVGNYASYARCVDSAHTSNRKKKGEGNVKNGNKYLAWAFVEAANFARRYCPEAKRFYERKKAKTNNIVATKALAHKLARACYHILREGRPFDVTRCFA

SEQ ID NO: 141946 - protein, 361 aa, unidentified
MNYIFVGCDSHDKTLVNKIALNRETAERKTFAASRAGRRKMIEYLKARSHAAGNAKVVVAYEASGNGFILCDELKQAGFECHVLAPTKIERSTKQKRNKNDDRDADRLLEILRGHYLAGNKIPSVWVPDPQTRDDREPVRGRQDLSQKQTAVKTQIQMLLKRHGLEKPEGVGRWSKPYRQWLKALAEDAHGGWGVQKALGSLLRQLEFLGSEIQQLDQAMEELADTPRWKPIVAAMRKESGVGLMTALKFSTDIADFSGFRRGRQVGSFYGLTPSSHESGDNDDRKGHITPEGSPTGRQVLCQSAWSRVRHDKHEREVYGRLVLKNPKKKKIAVVACMRRLAVRLWHVGFQAQLQMKANEV

SEQ ID NO: 141947 - protein, 360 aa, unidentified
MRNERTSVGLDVHARSVVGCAIDGSTGEIHRRRLTPDPNEILGWVRSLPGPARVTYEAGPTGFGLARFLSAQGVECLVAAPSKLQRPSGDRVKTDARDALHLARLLKLDEIVAVRVPGVAQEAARDLVRAREDARADLMRTRHRLSKLLLRQGIVYSGGKTWTGQHDRWLRARHFPETGRQLAFEAAYEAMVLTGDRRDRLDAAITTMATDSEFTDVVRRLGCLRGVSTLTAFGLAVEIGDWHRFTGASIGAYLGLVPTEDTTGNSRHQGSITKTGNTHARRLLVEAAWHHRKTYAIPGAVMRARWDQAPAAARTRGHEGNQRLHRRWQVFTDRKKKPVIANVAIARELAGWCWSLATLE

SEQ ID NO: 141948 - protein, 441 aa, unidentified
MAMRKRDDDLVFPNAAGIDVGGSSHWVAVPRHTCDDPVREFGAMTDDLNAMADWLLACGVDTVALESTGVYWIPVFEVLEQRGLKVYLVDARQMKYVPGRKSDVQDCQWLQRLMSQGYLRAAFRPTDEVCVVRAVARQRDVLLAEQASWVQRMQKALVQMNIQLTEVLSDVMGLTGQAIIRAIVAGERDPKVLARHRHIRVKASEQDIAKALTGNWRDEHLFVLGQALAMYDDIARHLGECDAKLQALLSKLGASKVDLGKAPRAGSKTRAEFDVRQILANWAGVDLTRINGLGLAAVMKILSEIGPDLSRFANVKHFCSWLGLCPGTKISGGKVLSGKTKRAGNRVRQALKMAAMSLSHSDSALGAFYRRMAGRMDKPRANTATAHKLARMVYFMLTRGEAYVDQGQQQYEEQQHQRSVAALKRRAAALGFQINPTVAPA

SEQ ID NO: 141949 - protein, 412 aa, unidentified
MQVVYERCAGLDVHKRTVVACTTTPDASGQPHKECRTFSTMTPEVCQLRDWLKSLGVTHVAMESTGVYWKPIYNVLEGHFELLVVNAQHIKAVPGRKTDLKDAEWIADLLRHGLLRPSFVPSAQQRELRDLTRHRTRLIEERSRVINRLQKVLEDANIKLATVASDLMGKSAQAMLKGLLAQEADPAVLSELALGKLRAKRELVEQALTGRLKPHHRFLISEHLVHIETLEEAIERVSHEIAERMRPFEQLLKRLETIIGIKRRLAEVILAEIGTDMSRFPSARHLASWAGMCPGNRQSAGKRLGGKTRKGSPWLRTALIEAAHAAAHSKNTYLSAQYHRLAARRGTKKAAVALGHSLLVIIYHVLTEDKDYEELGGNFFDERDRQALEKQLVRRLEHLGYHVSLEPTDPAA

SEQ ID NO: 141950 - protein, 401 aa, unidentified
MVRYIGMDVHREFAQLAVLEDGLVRDEGRIGVTPEALRAWADGLRGDDQVALEATGNSDAIANLLTPLVERVVVSNPSKTRAIAEAKVKTDKVDARILAQLLAADFLPPVWLPDERTRALRRQVTRRAHLVRQRTRVKNQVHAILARNLAPTPPVSDLFGKTGRHWLSRQELPVDERSTVAALLRQLDFHGSELTIVDKELAVEALCDPAVARLMTIPGVDAIAGISIVAAIGDFSRFDDPNKLVAYVGLNPKVRQSGNSAPVHGRISKAGRAHVRGVLVEAAWSASRAPGPLRAFYQRVKARRGFQKAVVATARKMTVLAWHLVTKDQDYAFARPALVTHKRRKLELTAGAPSRRGNYRLPGAAYNDKQRRNEEKLAVEQAEHAYEVLVAHWQPKRPTPA

SEQ ID NO: 141951 - protein, 435 aa, unidentified
MSSDSEMAAFIGLDWADQHHVLCLRAADSSQIETSVLDQKPESLQAWIQQLRLRFAGRPVALILEQSRGALLYALMEVDFLRLYPINPQTLAKFRKALYPSGAKDDPTDAALLLELLEKHREHLRVWVPDDPDTRCLRLLSEARRKLVDQKTGLSNEVTSLLKGYFPQALAWAGSLDTRRACDFLDHWPSLEALRHSSRASLEKFYRRHGCPFNRSIDSVLEEIRQAQPLTRDPAVLRASALMVQALMRQVRGLLESIAQFDRQIKDLFERHPDYDVFHSFPGAGPALGPRLLALFGSDRNRFRLADEVQLLSGIAPVTERSGKAHRVHWRWACSKFLRQSVQEFSEKSIQRSPWARACYDCLRAAGKSHYAALRALGFKWIRIMFRCWKDHTPYDEQRYLAALQRRRSPLAKVGPLPPEGSLVKKMSIPCAKNA

SEQ ID NO: 141952 - protein, 333 aa, unidentified
MGSETHFARAFDWRNYEYSKKPLEFSNTEAGFMTLKAWMADFAEKYGKNVVIPGMEPTGHYWFNLGAYLQDNGMKPVHVNPHHVKKSKELDDNNPNKNDRKDPKTIAALVNEGRFSYPYIPTGIYAEIRSLSNLRLQTQEEITRIKNRIARWFSIYFPEIKDVYRNPDSVSGLMILKEAPLPQDIVKLGVDGINKIWRDAKLRAAGLKRAKTLVTAAEHSIGSQEAPDSARIELKNLLNDYEIYKNREEDLMSLTEEKLSEIPHIDKLLEIKGVGLKTVSGFVAEVGDITRFDNPKQLQKLAGYAIVECSSGKHKGESHISYRGRKTPQICTV

SEQ ID NO: 141953 - protein, 346 aa, unidentified
MMIIGCDFHPSWQQVSWLDTETGETGEQKLVQASGDAERFYRQVAAPALIGMEATGNCHWLVDLLSELGHELWVGDAAQIRASYVRQQKTDKRDAAHILKLLVEGRFPRIWMPSSEVRDLRQLLLHRYKLVIMRARVKNELQHLCLNKGVQRKHKLWSQAGQQILRELPLQPWAGRRRDDLLKLMAMLDQQIEPLDQAVKAEAQRDKMALLLQTQPGVGAITALAYVLTLGDVSRFPRGKQVASYLGLIPREHSSGGRQKLGAITKQGNRMLRMLLVEAAQIAVRYDPEFRREYLHRCHQKPKAVAKVAAARKLAVRLYWMLRTQRPYPDIVRIESSPRVALVGAS

SEQ ID NO: 141954 - protein, 390 aa, unidentified
MIYVGIDVSKFKHDCVIINSDGEILVDVFQVSNNLEGFTKLKNIILENVPNNDLQKIKVGLESTGHYSNNIINFIHQNSFPLTIFNPLSTNLFRKAQTLRKTKTDKIDAIFIATMLFSDNSKPYSPKSYHMTEIKSLARHRFRLIDYRAKLKISYTRLLDIVFPELASVIWSVHQNSAYSLLLELPTTRDISLCHLTKLTNILSKASRGKYGKDRASEIKELAKNSIGTCSLGVSFELQQTIRLIKNVDDEIKLLDKNVKVMLDELNSPIMSIPGISYVLASIILSEIGDIQCFSTPAKLLAFSGLEPSTHQSGKYTASHSKMVKRGSKYLRWALLQAALLTTNKTQTFKSYFQKKKSEGKHHIVCLSHVAKKLLRVIYHLENTNTAFID

SEQ ID NO: 141955 - protein, 395 aa, unidentified
MNYILSFDVAKGKSVYCLIDNFKNTIIDSTSVNHFKNEFDRLFGNIRDYRPLTVVMESTSVYHLPVENYFRSKGIDTIVMNPKLVKQFKDSLNKAKTDKLDCFKIARCYLGTINSFHHKNDEYFKYNPLARQYWSLTEGQVRLKNRYKQLIDVIFPEYSLLFDDLYSNLALDFIHDFPHPELFIHRKTDFLMNYLMNHNGSTKAYRFKNKVLKMKSIASNSLCFVGFDSLEVSNLVQVIELIKYNKKEIDKIKNNLISSLKDTNLFKIINSIPGFGDFTTALFLSEVGDITRFDNPYQLISFLGIDSVISQSGKSIYYGSISKTGNKFGRTILFNVVTTLIQVSAHSNPTNSVYLFFRKKQFEGKHFYKYIIACSSKLCKIVYKLCCSTVTYLNK

SEQ ID NO: 141956 - protein, 474 aa, unidentified
MPRVSLMTSHLRTSITVEIVSPGPSRATIEARPERAADRAPAHGRTSLPPRGPVGCCRRGARRPRRLIGKCRAGAAAGNVSAEGEAIRSNDYRKDTTVKAPSTRPAAVLGLDVGKSSHWACLIDRDGEVLASAPVRNREAELDALFASAPAGTLVVVDQFRNIGSLAVRRARAAGLGVAHLPGLAASRAAGLFAGEAKTDERDAAVIARTALGVPDSLSGVPGRGEALEAARALSSQRDHVVACATRDKNRLRAVLLESCPALEAAVDLSDRRWLELLAGFGGAWGIARSGAEGPRAEAAGEAAAASTAPPPALVEAENRQVRFLAARISEALDEAGALEAETAALLEGDETYACLLTVPGIGPRTAAQLAVSVDIGRFPDHDHLASYCGIAPRVRSSGTSVRSVRASRRGDARLKSLLIFSCNSLVRSSGRYGEYYRACRARGMGHGRALKAVARKRLRAIYAVMRDRVPYRE

SEQ ID NO: 141957 - protein, 347 aa, unidentified
MGVYIGVDFHARKQTVSYLTTEDGEIQQVELEHEKDYVRTFYEQFRGQKVIVGFESSGYAAWFEELLEELEYETWIGHAAAIRQFARRRQKNDRRDADLILELMVRGDFPRLHRYSRESRETLQQLRYRQRLVKMRTMVINSLRFMVASRGVTLRGTLQSRPGQARLQQVALPEPLGQQRDELLRLLLEVQQKVEMVEEWLKQKAEADPRVQRLRTHPGIGLLTGLGLVATLESIERFSHSRKVTAYVGLDPVEDSSGERRRMGSISKQGSRLMRLLLVEAGQVAARRDPELGNVYRRVTLRRGHATAKVAVARRLLVRAFIMLRDEIDYAEFCRRGVAARSSRGSA

SEQ ID NO: 141958 - protein, 340 aa, unidentified
MNFTPVGVDIAKQVFQVHWVDPQTGEVISRQIRRGAFLEHFANRTPCLIGMEACGGAQHWARRLGEMGHQVRLMPGKAVKAFVIGNKNDVADARAIWSAVQQPCVRAVALKTETQQAVLALHRMRQQLVRFRTMQINGLRGLLTEYGEVMAVGRAALNRAMAGVLARLSERLPAMLMDTLREQWQRLDVLDEQIAQIERRLSEWMKQERACRQIADIPGVGLLTATAAVATMGDPKTFSSGREFAAWLGLVPRQTGTGGKLRLHGISKRGDVYLRTLLIHGARSVLARTKEPGPWIEQLRRRRPNNVVTVALANKLARTIWALLAHDRKYEKAHVSVRPV

SEQ ID NO: 141959 - protein, 341 aa, unidentified
MKNKSFIGIDISKNVIDASIFCEGTPIKDFPHAVFNNSRKGFGEMCTWLKKNHVVLSNCLFGMEFTGSYSMELEKFLNARKYQFCMLSTHVVKHHPMGPRDKSDKIDSAKIADFLYRYDGTECVKPYKMPDKTMQRLKALTNERKFLVEQRTCFMNRRQLCTTKEDIQLYDGYIKELSHDIENIELKVQKLLETDDSLFTTYKNLLTIPGIGFVNAMNVIVITRNFTAFDTARQYANYIGVAPHFHTSGTSVRWRPRPSARCDGQAKADLSMAATVVVQYDAELQSFYNRKLGGKQDSDTKRKALNAVKFKLVLRMFAIGKQNRKWEPLDSKSSNEKLAIS

SEQ ID NO: 141960 - protein, 318 aa, unidentified
MEKIITVGLDLAKSIFQVHGITESGKVLVRRTLRRSQVLPFFRGLPSCLVGMEACASAHHWAREIAALGHSVRMMPPAYVKPYVKRNKTDMADAEAICEAVTRPTMRFVPMKTAEQQAAGMILRAREMLMRQRSQTANALRAHMAELGIVVGTGMASITKLLGLLRDREDDRIPATARFALIHFAEQIELLTTRIEKLDKEILVAVRKDPDARRLMSIPGVGPLIAATVRTSVLDARCFATARDFAAWMGLTPRAQSSGGKERLGAISKRGNRQLRTLLIVGATSIIKLAKRGLKVPLWGSDHAATTAGQGRIRGACQ

SEQ ID NO: 141961 - protein, 420 aa, unidentified
MRNAGIHANSLLEVHRMYNAVGIDVSKGKSTVAVLQPGGTVIRKPFDVSHTSQNLNELADYLSSLDGTTKIVMECTGRYHEPMVKALSEAGLFVSIVNPHLIKNFGNNSLRKVKSDPADARKIARYTHDNWTDLRQYSGMDNTRTQLKTLNSQFSFFMKQKVAAKANLIALLDNTYPGVNKLFDSPTREDGSEKWVDYSYSFWHADCVRKIGLKAFTERYMSFCKKHHYIFQQDKPEKLFNASKELVAVFPKEKTYKLLIQQSIQQLNLASEHVERLRREMNELASTLPEYSTVMGIYGVGKTYGPQLIAEIGDVSRFTHREALTAFAGVDPGVDESGQHKSKSNRASKVGSARLRKTLFQIMTTLLQNAPEADPVYCFLNKKRSQGKPYYVYMTAGANKFLRIYYGKVKECLRNLEQTE

SEQ ID NO: 141962 - protein, 403 aa, unidentified
MFCGWDWGSTVHGVCLIDDHGAVVKRWMVQHTEDQLMNVFCELAQLVEGGDVARVPIAIERGEGLVVGLIAGAGHPVWMVEPSAFKAARPRWGAAGAKSDRGDAFMLADYARTDGHRLRRVEPVGQATRELATLVRARIALVEARTAASNQLWAILAENWPGAGVVFQKLTSQIALAFLTDYPTPQAAAQLGEGRMARFCRRHSYRGGKSPAELVGRLRAAPASANPIAPTILASIVQASTAHIQLLNTEITRLERDLATVLAAHPKTPLLQTLPRVATVSLAALIAEIGPLLERCENPEQVAAMCGAAPVTRASGKSRTVAFRYTANKPARVAITSFADNSRHSSDWASDAYRRARARGARHPHAVRILARGWVRVIWACWTTDTIYDPSRHRGQQLLAAVS

SEQ ID NO: 141963 - protein, 306 aa, unidentified
MKEIGFTQIVSVGCGIDVHRSLIVASIRKSNTDVETREFEAYTSSLTSLREWCKNEGVTHVAMESTGVYWKPVFNILEEDFEVILVNARHVKNVPGHKTDKKDSRWLSKLLLSGLLKGSFIPPRDIRELRDLVRYRKKVVGQIASEKNRIIKILEDANIKLSSVLSNVDGAVGTKIINDLLGGETTADRLMRHYHGKQKVSRSEFRKALEGRITGHHKLMLSIHKDSISDKEAQLRRLDEAIDKATEGYRVEIELLDTIPGVGKESAISIISETGVDMSCFPDETHLSSWAGMSPGNCETGGKKKV

SEQ ID NO: 141964 - protein, 352 aa, unidentified
MILIGCDYHPSWQQICWLDRETGETGEKKLEHASGEAERYYRQLPGRALIGMESTGNCQWFLDLLGRLGHEVWVGDAAKIRASEVRQQKHDRRDAALILKLLLEGRFPRIWVPSGEEKDLRQLLIHRWKLVRLRVQVKNELQHLAMNQGTTRKRKLWSQAGERVLRELPLAPWASRRREDLFKVRALLEEQIGALDQAVVQAAEQNERAQLLMTQPGVGPVTSLAFVLTMGDVRRFRRGKQVASYLGLIPREYSSGGKQRFGSISKQGNRFMRMLLVEAAQVAVRCDPQMRQEYLHRCHQKPHSVAKVAAARKLAIRLYWMLRTQKRYPEIVHVESSSRVALASAPADQPKA

SEQ ID NO: 141965 - protein, 430 aa, unidentified
MRTIGLDVHKRFAEVAILTGPGTAPTRRRIATSPAALRAFAGELGPDDQVVLEATMNTWAIAEVLATMAGRVVVSNPLRTRAIAEAKVKTDEVDALTLAQLLQADFIPAVWIPDPPTRTLRRKVSHRAALVRQRTSLRNQVHAVLHRNLIDAPWSDLFGQGGRGWLAALSLPEAERAELDASLRLLTPIDLEIDRADRALAVDALGDRRVELLMTVPGVGVATALSLVAVIGDIGRFPRPAKLVGYLGLDPKVRQSGERPARTGAISHQGSAHARGLCIEAAHSAVRLPGPLHAFYMRVHARRGGQKAIVAVARKLVVLAWHLLSRGEPYRWAPATLIHTKRRALERTAGIPAGARAANGAKDRERLEREILRQAEAAYTLLVAARRNEADAAAATGRDDTGQRPKMRGGATRPTLRSSLGGQAASAEQD

SEQ ID NO: 141966 - protein, 371 aa, unidentified
MDERIKFFVGLDVHGDSIAMSVCEAGREPGRFVSTLTPDVQALLKTLSKYGAARQVSVVYEAGPTGYGLYRALSDRGYRCEIIAPSLTPRRPGERIKTDRRDSLRLAELSRAGELKAIWVPDQAHEALRNLWRAREDAVNLRLQARQQLKAFLLRQGRRYPGKTSWNKTHQRWIAEQHFDHPADYIALVEYQLAVQAAQDRVQRLTTALEHAIEGWRQEPTVAALRALRGIDTVSAIGLVCEIGDIARFGSARQLMGYLGLVPSEHSSGNSVRRGSITKTGNAHARRLLTEAAWNYRFPARMSQALRDRSATLSPGIRTHAWKAQVRLCSRFAHLSARGVQANKVCVAVARELTGFIWAIARQSLPDNTHQ

SEQ ID NO: 141967 - protein, 382 aa, unidentified
MTEVQMVPTNDTIRNDRLYIALELSNTKWKIAFGNGFKIRLKSIEARDIEQFELEVQRTRKHFGMAENIPVFCCYEAGRDGFWIHRYLCTLGIHNLVVDSSSIEVNRRSRRAKTDRLDAGKLLTMLIRYINGETKLWSVLRVPQKDHEDARRLHREIERLKKERTAHTNRIKSLLALHGVVMEMGIGKTFPEYIEKVVLWNGEHLPSRVKEEMIREYCRYDLIQQQLQASEQEKKEALKRESESSKKVLTLQNLKGIGPVSSWVLVYEFFGWRLFKNVKEVGAAAGLAPTPYDSGGSQSEQGISKSGNRRVRALMIEVGWYWLMHQPKSKLSQWFMERYGQGGKRMRRIGIVALARKLLIALWKYLEQGIMPEGATVKAYFD

SEQ ID NO: 141968 - protein, 369 aa, unidentified
MEKDTSYVALDDSKRKLVIAILRPGATEPEEREIPKDPQRIQRLFRRLGSEGRVQACYEAGVSGYDLYRQITACGVTCQVIAPALTPRRPGQRIKTDRRDARKLVRLFRAGELTPIHVPDEAEEAARDLVRCREAVRRDVVRGRHRLLKLLDRHGRLWVAEKNWTQRHWTWIRAQHFELSALQRAFEATVFALEQALARPAELDKEITVLADTAAYREPVGWLRCFRGIGTLSAMVLLAELVDFQRFRRPRALMAYLGLVPSEYSSGETQRRGALTKAGNPHARRVLVEAAWHYRHRPTIGRALASRSQAQPDEVVGHAWRAQQRLHRRYRHLVGHGKRPPVAVAAIARELVGFLWAAMTRRETRLQVA

SEQ ID NO: 141969 - protein, 340 aa, unidentified
MSLYGGIDLHANNSVIVLLNEQDEVIYRKRLPNTLPTILEQLAPYHTEVKGLVVESTYNWYWLVDGLMEAEYRVHLANPAAMQQYSGLKYTDDHSDARWLAHLLRLGVLPEGYSYPKAERAVRDLLRKRAHLVRQHTANVLSVQNIMARNTGSRFSVKRIQELTKQELTTLLAEETQVLAVTSSLMVLDCLRQQIKTLEQSVHKRLHHTPSYEQLLTVQGIGTILAQTITLETGAIHRFPSVGHYASYCRCVDSIKISNGKRKGTGNVKNGNPYLAWAYMEAAQFAMRFQPEAQRFYQRKLAKSRNNTVLARKAVAHKLSRACYYMMRDLVPYEATKAFG

SEQ ID NO: 141970 - protein, 457 aa, unidentified
MTSRKRSRPRRDMAPVHSHAAAVDIGATLPVAAVSPRCDPEPVRSFGTFTTDLHRLADWFEQCGVETVAMESTGVYWIPLYEILDQRGFEVVVVNARDAKNVPGRKTDVSDAAWLQRLHEYGLLRASFRPKGEIATLRSYLRQRERLLEGAAAHIQHMQKALTEMNLQLHHVVTDITGVTGLRILRALVAGERDPDQLAAYRDPHCKAPIASLRAALVGNDREEHVFALGQALELYDVYQAKVAACDQRIEAVLERVKAVSPPPAAPLPPLRPTRRQANEPDFAVREALHAILGVDVTQIDGIGPSLALKLVGECGTNLAAWPSAKHLTSWLSLAPHNKISGGKVLSARTRRSGSRAAALLRLAAAAVGRTATALGAFYRRLSARIGKAKAVTATARKIAVLFYNMLRHGMNYADPGASSYEERYRQRVLSNLRRRAKSLGYILQKVDPAPTAMAVS

SEQ ID NO: 141971 - protein, 339 aa, unidentified
MSKLFKNFVGIDISKSWFDATLITQDVTAKPVHQQFAQSISGYHSMIEWLRLNNVAVNEHTLFCLEYTGIYNTGFVNFLVGLHASIWVEMPLRIKKAGGLERGSDDKSASSKIAWYALRYHDQAKLWQPADSSIEKIKHLITQRERIITTLKHLTVPAQELIDCGCTADGKMVVKLQQPVIKALQKTLKQIEALINSTIREDEQLSQTVELVQSVNGIGKVTATAMLVYTKGFTAFKNAKELACYCGVVPFNKTSGSSVKYRPSVSPFANMKLKKLLHLCAMSALQNDPEMKAYFERKLLEGKNKMSIINAIRNKLVHRVFAVVRDGRYYEDNYVRTCA

SEQ ID NO: 141972 - protein, 408 aa, unidentified
MEPIYTSCCGLDVHKRSVQTCVRRLRENGSLHQETRTFGTMTRDILEMADWLAAEGVTHVAMESTGVYWKPIYNLLEGRFTLLLVNAKHVKHVPGRKTDVKDCQWLAQLLQAGLLRGSFIPERSQRELRDLTRHRSQLVAEKTRVANRIQKILEDANIKLASVASDILGASGRDMLRALIAGGKMPQEMADLARRQLRAKLPQLGLALEGQVTDHHRFMLKGLMDHLEYLEHQIEHFSRRIEEMSRPFAPALEAVASLPGFDQRSAQNVIAEMGADMAPFPSEHHLSSWAGVCPGSNESGGKRKSGKTTKGNRWLRTALVQGAWAATRKKGSYFQAQYRRLAPRRGKKRAALAVAHSLLVVIFHMLKTGSSYKELGGDYFDKLNQKRLVPYFLKRLTDLGYQVTLKAA

SEQ ID NO: 141973 - protein, 342 aa, unidentified
MEHTTIAVDLAKSVFQVAVSHRAGRVDEEQRLSRARFLPFFAHQPPAIVLMEACGSAHDWARQLQPFGHAVRLLPPHDVRPYVRRNKTDRTDAKGLLEANRNEAIHPVPVKTIEHQAIASWHRLRSTWLATRTARLNTLRGLLREFGIFIPVGAPRVVPHVRALLLEPTRVPVLLQTTLTAACDEIDVLEGNMRAVERQLAALAADMADVTLLQTVPGVGLLTATALVALVTDIRRFPSSRHFASFLGLTPREDSSALRRHIGAVSKQGDVYLRMLLLHGARSVLWHAKAAAAPTSLQRWGLRTEQRRGHNVTAVALANKLARIIWAVWTQHRPFTSEYRQA

SEQ ID NO: 141974 - protein, 359 aa, unidentified
MREQRNEISFRGQKIYVGIDVHLKSWSVTVLSETSVLKKFSQRPSPEALHGFLTRSYPGAEYRSVYEAGFCGFWIHERLTALGIDNIVVNPADVPTKSSEKLRKSDAVDSGKLARGLRANELKGIYTPDSVSLEMRSLIRLKNSITKDTIRQKNRIKSQLRYLGIGIPQEFLEPFSNWSKRFFAWLKEVETLTPSGRQALDIQIRHWEELRRQKLEMTRALRTLAKTDRFREPLRLIMSIPGFGQATGMAFLSEICDITRFRNAEQLAAYIGMIPMCHSSGEKDGTGDITLRKHAVMRCNLIEAAWVAVRQDPAMNLFFTEQCKRMPKSKAIVKVARKLVNRLYFVLKHQTEYVNSVVS

SEQ ID NO: 141975 - protein, 384 aa, unidentified
MNKDNILFIGLDTHKVSTEVAYIEDQRGALPIHHGKIPSTKAAIKKLVRYFESKYPKATLHFAYEAGPCGYWMYRFITSLGHCCYVIAPSLIPKKPGDKVKTDKRDALRLAKLLKTEDLTPIYVPEPEDESIRDLSRARETAMKDLNDARFQLKAMLLRNNINYKGKANWSKKHLRWLSELVLPHPAQQIVLQEYLQTVNERIKRLARLVNELQHQVQNWRYYPVVKALQAMRGVRLLVAAGVIAELGDLTRFDHPRKLMSYLGLVPGEHSSGERRRLGAITKCGNIRARRLLIEGAHSYRYAANISAELQKRQESLPKEIIDIAWKAQLRLCRRYQQLMQRGKHYNLVVTAIAREMVAYIWAIAREVVLSQVNPKLRISRVPA

SEQ ID NO: 141976 - protein, 404 aa, unidentified
MGMIQRACGVDVHKDRFVAAILTSRGCESRDFEKSLEGIEAFKGWLKANRCRAVAMESTGVYWIPLYAALEGEFDVKLANPERTRKTPGRKTDQSDAEWLAYLLRAGLIEASYVPERKIRVLRELTRLRTKMVQNRTDYKNRVHKVLQRCNIRLGSKLHSVFGKAGMEVLNGLMTGRSLDEIVNESKSQLLKERHGELEKVVRAGLDQEDVFVLKRCLRMIKSLDEELKELNARISMLIGDREKDVKNISKVPGVAQVSASSILAEIGDARRFANGKKIASWAGLCPSVYQTADKNLTGSLKRGSKNLKRMMIQVAHAASRASNSRLRLFFLRVAARRGKKKAYVALARKILCIIHHLLVNDEEYMEEGFVKKARIRMRALEGLPLDEMARILTCAGYLVQAPA

SEQ ID NO: 141977 - protein, 376 aa, unidentified
MEHDSTVYVGLDVHKESITVAYALGSGEVEVLGKIGTTKADIDRLCKRLQSKARHIRIVYEAGPCGYGLYRQLMQKGFDCMVCAPSLIPKKPGERVKTDRRDAVKLVRSLRAGDLSRVYVPTVDDEAFRDLARAWVSVKDDLKRARQRLKGFLLLHGVGYTGRADWGPSHRRWLSEFAFESAWQQLAFEEHRRTIEDRLAQCERLEAALREAVVNWRFYPVVLALQTMRGVQFTTAVGLLAELGDLSRFDHPRRLMGWLGVTPSEHSSGEKRRQGSITKNGNAYARKLLVEAAWSYQHPARVSPEIQRRHEGIPKPIVDRAWDAQVRLCRRYRKLVARGKQKNVAVIAVARELSGFIWDISRLAMSLAVRQEAHTT

SEQ ID NO: 141978 - protein, 331 aa, unidentified
MPVNVGLDISAYSVDVVIRQGDKASQPKQYKQSVEGHAALISQLKKAKPTLIVMEATGIYYFDLAVALADAGLPVAVINPKSFRHFAELKLQTSKSDGIDADLLAEYGQRMAPALWTPPDQQHQALRSLGRQINRLVGSRAQAKNRLHALKATRSTPALLIEDEQEGIATLESRIERLRQAALDLMAEAPVLQRQYEHLLAAKGVGEATALSVLAELCVLPRDLKSSQVSRHAGLDVRQHQSGTSVNRPGRISKAGNVYLRSALYMPALSAVRYDPNAKAFYEALVARGKKKIQALVAVMRKYLTGLWACLKTDTPFDSSRLFQPQGLQNA

SEQ ID NO: 141979 - protein, 429 aa, unidentified
MNSTQNKKIEQVKETTMIVGIDVGSEKHYFRAFNWRGIELTRKPVAFSNSMEGFNSFYNTIVELMQKSELEEALVGIEPTGHYWFDLGQFMGEKSIKFVMVNPHHVHKTKELDDNSPSKNDRKDPRVIAGLVRDGRYFYSYMPTGVYAELRNASNRRFVLVEEQTRAKNRLQKWIAVYFPEYKGIYTHIDAKGGLLVLKQAPTPEEIVKLGEEGIIKIWKDAKLRGNGNKRALKILNAAMRSIGLRTGLTEARMEIQDLIEDYELQTKRLERVNDLIKELCQQIRYADKLLEIKGIGITTVAGFIAEVGDITRFDSTKELQKLAGLELVADSSGKHNGKTKISKRGRKRLRYLLFEAAISVVGKNEEFKEIHRHYTTREKNPLKKMQSLIAVACKLIRVFHVILTKGVSYDASKMLEDIRHPGEQLKAA

SEQ ID NO: 141980 - protein, 410 aa, unidentified
MRRIHDRVGGLDVHRDSVVACVELFDGRSVEVDKQSFSTTVAGVGQLGEWLAEREVELVVMEATGVYWRPVFYGLEDRFAELWLVNAHHVKNVPGRKTDMSDAEWLADVAAHGMVRPSFVPPVEIRGLRELTRYRKTQIRARGQEIQRLERLFQDAGIKLTSVASKVWSKSSRAMTEMLIAGEADPVVLAELAQGKMRAKIPALTEALANRWVAHHGALARQILAHIDFLDATIDTLTGEIVERLVPFQAAVELLKTIPGVSDLTAQTIIAEIGVDMSRFPTARHLAAWAGVAPASHESAGKRRPAGTRHGSRHLRHTLIEAARAAAHTKGTFLSARYSRIARRRGPNKAAVAIAHSILVAVHHMLTTGEIYRDLGAAFFDKPTDPARQIRRHVAELEAAGYTVTLTPAA

SEQ ID NO: 141981 - protein, 347 aa, unidentified
MCNVPRYFIGVDLHKTVLQICVLDRTGEIVEELRCRPVDQAGGELVLDRIQPYLNAGRIAVEAIGLNRWFVNRLLARNVDFIVCDPIKLNLKILGKKTDRRDALEIARRLLLGDIDRNAKTYYATDDEYGRRKLIRARQSLVRMRQQLINQIRSMLNSYKISNFPGRLTSKKNLTKLSELEMNTKELTVVLKAFLAQLVSFTESIEALDKQIKDLAQEALPRSLQEIPGVGPLTALIIINELGDVRRFKNSRAVACYAGLVPRVNQSADTAHHGSLTKRGNRELRHILGEWAVRLLSSDKRVSDWARSRLKRSHKNKVRMALARRLIVGVYKTMLTGEEFSLERCLS

SEQ ID NO: 141982 - protein, 340 aa, unidentified
MTITTVGIDLAKNVFAVHGVDQNGKTVLIKSRVTRTALPGLIAGLSPCVIGMEACSGAHYWARLFRQYGHEPRLMAAKFVSPYRMAGKSGKNDAADAQAICEAVRRPHMRFVPVKDESQQAMQCLHRTRQGFIEDKTATYNRLRGLISEFGVIAPQSTDALRHMVSAQRNSLPLQVQQCVDDLLEHVARIEANIAEYDRILSRMAKTDHRSQRLMELKGVGPTTACALIASIGNAHDFKNGRQLAAWLGLTPSQYSSGGKSKLGRITKAGDSYLRTLLVQGARSVLIGAEKRSDSFSRWVCSLVERRGYWRAVVAIAAKNARLCWASLHYGDDFRLYSAS

SEQ ID NO: 141983 - protein, 423 aa, unidentified
MTSMTLDPPLTNLLSPAAELVAGVDTHKNTHHVAILDLVGRPVADREFRADGRGYTQVIRFLHEHGDVARVGVEGTGSYGAGLSRALNAAGLTVVEVARQDRQARRRRGKSDPLDAHQAAVAVLAGTDTAIPKSGDGAVESMRILLAERRSAAKARAQVMNQIHALLITAPELVRQAFRALSGQRLVNRLARTRPGSEASADPAVVARQTLRRFAVRHLTMQAEIDLIEQQLDFLVRQVNPALLSLSGVGPVTAATLLVAAGDNPERLGTRASFAALAGVAPIPASSGQRTRHRLSRGGNRHANAALHRIVLLRMRHREPRTMAYFERRRAEQLTDRDIMRCLKRHVANEIYAALLNPATDNPAGRELRARRQAIGIPISVLAASLGVPYQRLRRLEIGVRADPELEHRATIALDEISPPQTA

SEQ ID NO: 141984 - protein, 349 aa, unidentified
MDFYAGLDVSLEATNICAVDGDGKVVREAKLDTDPDAIELVLAEWGIQLKRVGLEAFSYSAWLFTALSDKGLPVICIETRHAKAALNAMLNKTDRNDARGIAQMMRTGWFRAVHVKSESAQTLRALLVGRKALLGKVLDMENMIRGLLRPFGLKVGEISVGRFEARVRDLLAGKKELEAIVVPLLDARNAMRLQLAKLHRLVLAAARGDEVVRRMMTVPGVGALVALTFRATVDDPSRFKKSTNVGAHFGLTPRRYQSGQTDRIGSISKCGDELTRAMLYEAAIAILTRIPKTFKLRLWGLRLARKKGLKRAATAVARALAVLLHKIWIDGTTFRFGAGGKRGRVAAAV

SEQ ID NO: 141985 - protein, 346 aa, unidentified
MGMDIAVLGVDLGKNVCSVVGLDASGAVVMRRKVRRETLIRLAEKLPPCVVGMEACCGAHHLGRLFAAHGHDVRLMSPEYVRPYVKAQKNDDRDAEGIAEAATRPTMRFVELKSQDQLDMQTLHRSRDRLVGERTALINQLRAILLERGMIAPQGKRKLEQFLSVLMDEQDGAGLSPRMVILVADVRAQWAELDRRIAAFDGEFVRWARENEDARRLVTIPGFGAIIASALVASVGRAEAFDRARDLSAWLGIVPQQFTTGGKPKLLGISKRGNKYLRRQLIHGARAALPYVAERDTPLGRWAKALLERAHRNVAVVAFANKLARIAWAVLRRGERFIATGMPRAA

SEQ ID NO: 141986 - protein, 341 aa, unidentified
MAVGEAEEPLGKLRVRACPDQAGKLVAWARAWPERTWAVEGARGLGRLLAQQLVAAGERVLDVQPKLAARVRLLEAGDTNKTDPNDARSVAVAALRSKSRQEVTADGHAVVLKVRAKRHRDLSRTRNQVVCRLHAVLCDLIPGGVPDEITAGQAARILEQVAPAGAVAQARCELAAELLADIRHLDAQRREVKKKLAAAVTASGTSLTEVFGVGPVIAATVIGDVITVARFPSRDHFAACNGTAPVEVSSGQRKIYRLSLRGNRRLNHAVHMAAITQIRHKHSDGRAHYQRKLAEGKTHKEALRCLKRRISDAIYARLRADARAAGPGGQPGNDTGSSVTG

SEQ ID NO: 141987 - protein, 445 aa, unidentified
MSEQIKSSYELVIGLDRSDRKADLHYLDTRDGRQWSATIGTSPEALDAWLAQLRDEHPDTAIGLIVEQPAAAILTFLQGRPGLAIHAINPVTLQKFREAFVVSRAKDDAKDAFYLAQLLAHHAERLPRWQPEDGATAVLGQMVLDRRMLIDERTSLTNRLKDLLKRHFPQALQLCGDDLWRPLALDFLGRWPTLAQVQAARPQTLRSFYHSHGSRSQRLLDQRLQTISGAVDLVADQALLHSYKICLQCIVAQLRVLNRSLAQFDKEISAAFAGHADHAIYDSFPGAGPTLAPRLLVGMGSQRERFANAADLQQASGIAPVTKQSGRSHLVHRRYLCSRFLRQTFHEYANQSILHCRWAAAYYLQQRRKGAQHHTAVRALAFKWQRVIFRCWQDHLPYDDQAFEASLQKRNSPLYQLLNNIEVGKNPFTQEQNKIQKPLAGSPQR

SEQ ID NO: 141988 - protein, 476 aa, unidentified
MKARHKHQGRSKRPLAPSSQMPVIHPHAAGIDIGATSHWVCVPEDAVPDTQGPVREFGAFTKDLDELVQWLRQCQVQTVAMESTSVYWIPLFQKLETAGIEVSLVNARHVRHVPGRKSDYQDCQWLQRLHSYGLLNGSFRPSDDICRLRTLLRHRDNLTRAAGSAVQHMQGALNQMNLHLHHAVSDLNGATGLRIVDAILAGERRPEKLVELRDEQCTKTTPEELAAALQGDWREEHLFVLRQSLETYRHLLQQMESCDAQVEIVLTRVVVNPSMVEEHDRPKNPPANDSRAPKRKKFKKLKSSTGLKRDVSAELTRIAGVDLTRITGLNVLAVLIVISEVGVDMSRWRNAKAFCSWLGLCPGNKISGGKVLSSHTVHVVNRVSILLRTVAPSVGRSETWLGLFHRRMRARLGPASANTATARKLACLIYHLLKYKEQYIDVDCLIYAEKIRKSRLTKLSKQAEDLGFELIKKPAT

SEQ ID NO: 141989 - protein, 347 aa, unidentified
MDHIGIDLHKRSSQICILTEGGELVERRVLTSRERFAAVLGIRSRARILIEASTESAWAAACLEQLGHEVIVADPNYAPMYAERRRKIKTDRRDARTLAEACRLGAYRPAHRTSEPQRHVRAQVAVRETLVRTRCQYMALIEAHVRQEGRHLRTGGSQTFLSRVQELSLSPPLSEVTAPLLLMLDHLNQQIRTADVQLEHLVDADPRVRRLCSVPGVGPVTAASFVATIDQVERFAGAHQVEAYLGLVPREMSSGERQHRGRITKAGNSRVRWLLVEAAWSILRYKKPETAALRHWADRIAARRGRSIAAVALARRLAGILYALLRDGTEYQPTRVRPPAHSDPAAA

SEQ ID NO: 141990 - protein, 359 aa, unidentified
MKIIGCDLHARQQTLAMLDSPTGEVVNVTLKHEGDNVREFYSKLARPVRVGIEATGSMQWFVNLMEELGIECLVGHPAEIRAAEPRKQKHDRRDADLILTLLVENRFPAIWLPTKELLDLRALLRHRHQWVCLRVKIQNALQAIALANGLRRGSSLWTQAGQHAIASLPLSPHAAYRRNELQAMYEKFEREIENLSQRVQQQARERVGARLLMTHPGVGPITALATEVFLGDPARFADSKELASYVGMIPGEHSSGKRQRLGGLTKQGNPLLRFLWSEAAIHAVRRDPQLKQFYRRKLIQKGLGKARAAVARKLGIRMWIMLRDGIEYNEFCRRGQMQQRVVPVRGCQVRVMVRKSPAD

SEQ ID NO: 141991 - protein, 325 aa, unidentified
METKKLCCGIDVSFTTLDVCYQNNLGELFHLHVGNNNAGFKKIMEHTGTNHHFVMEATGVYYIRLAFFLHSHGCTQSVVNALSIKRFIQMHGERNKSDKKDAGWICRYAIEQQPPAWQMPDSAYFQGKQLYNTIREYQEQIKRFNNQLHSLGLLPIQSKEAIRSIEKIRSSLQKEVKTLEGKLQELLAAWQPEQLKNISSVKGIGKRAAAMLIIFTQGFKHTHSHRQLISFAGLSPTEYSSGTSIQGKSKICKRGGKLLRDVLYMCAMNAMKTNPACKALYERLRAKGKTGKQALIAVCNKLLKQVFAVMKNNTLYQPAYRSAKP

SEQ ID NO: 141992 - protein, 351 aa, unidentified
MTVTIVETRAEIRAITGGVDTHADVHVAAALDPIGGLLGVREFPATTAGYARLLDWLAGFGTVCLIGIEGTGSYGAGLARHVTAVGIRVVEVDRSDRQDRRRQGKSDPLGAVSAARAAQSGRARGAPKGRDGAVEAIRALMVARRSAAGERTRTNGQARALVLTGPDDLRARFARHTPAALITGLASLRPRPGDIAGHATRVALRELGRRAVFPDGQLERPGKLIDPLVTAHAPGLLALYGIGPRTAALLLIAAGDHPGRLRSEAAWAHLCGAAPIPASSGKVTRHRLNPGGDRQANHALWRIVFTRLGSDPATRAYAERRTAEGKSKAEIIRCLKRYVAREVYPHLRRAG

SEQ ID NO: 141993 - protein, 391 aa, unidentified
MIYVGIDIAKDKHDCFITNSEGEALFNVFTISNNMDGFHELYQKISSLTSDSSEIKVGLEATGHYNYNLLGFLMDKGLPTYVINPLHTNLFRKSLSLRQTKTDKVDARTIAYMMMSGVNLQSYSDTSYHNEELKSLTRYRFDKVKEQAKLKTSISRLINILFPELEKLVPSLHLASVYALLLEFPSASAVASAHLTRLTNILQTASRGRYSKETAVAFRNAARISIGSRISAKSLELKHTIQLIQELDAEIEEIENEIKIIMDKINSPILTIPGINYRMGAMILAEIGDFSRFDSPDKILAYAGLSPSTYQSGQLDGNYSHMEKQGSRYLRYALFNATKFVCMWDSIFSSYLAKKRSEGKHYNVAVSHASKKLVRVIYQMEKTGQTYHQTT

SEQ ID NO: 141994 - protein, 421 aa, unidentified
MDVLYEACAGLDVHAATVVACVRRPGTRGRRTREVRTFGTTTGELLKLADWLTEQGVTHVAMESTGVLWKPVFNILEGSCTVILVNAQHIKAVPGRKTDVKDSEWLAQLLEHGLLRASFIPPPAIRELRDLTRRRKSLIEQRASETNRVQKLLESANIKLGLVATDILGASGRAMLRALVAGERDGAVLADLAKGTLRQKRARLAEALTGRFTAHHAALLDDLLAHIEFLDGAIERLSQRIAAALEPQAEAVERLEGIPGVNRQAAEMIIAEIGLDMSQFPTAAHLASWAGICPGNEASAGKRKTGKTRKGNRWLKSLLAECGWGAGRARHTYLGAQYVRLSHRRGKKKAVLAVGHSILVAAYYILRDGVPYRELGPEHFDRLAKERLTRHYLHRLEQLGHHVTLAPEPVQAAEDAEPGAA

SEQ ID NO: 141995 - protein, 312 aa, unidentified
MTKIICGVDVSKRRLDAYVVPSGAFESFDNDATGIAALATFCHRHRVALAAMEATGGYERVPFLLLWEAGIACGLTNPRSVRCYAEAMGILEKTDRLDASVIARFAVAKELRPTSPPTQSQQRLTALVARLRQVTDDLVVQKQRRSSAMNAEMTTSIDEVIALLKRQARTLEGEIASLIDDDPLWSQLDAALRTVKGVANRTVARLLAELPEIGIYSNKAVVKLAGLAPIAHDSGAKTGQRHIRGGRAGLRSILFLVADIARCFDASLAEFHQKLTKAGKPKMVVRIALARKLLVRLNAKARDARELYALAT

SEQ ID NO: 141996 - protein, 342 aa, unidentified
MQITTIGLDIAKNVFQVHGIDATEKVVVRKQLRRGQVMKFFAALPPCLVGMEACATAHYWARELTKLGHEVRLMPAKDVKAYVKRNKNDAADAEAICEAVRRPTMRFVRAKSAEQQGRLMQHRTRDLLLRQQTQVINALRAHLAELGIVAAQGREGLKQLLAIIADQADARLPLDARACLIVLAAQLQALHTLIKSIEKRLLVQHRANEASKRLESIPGIGIIGASAIAATVTDPKAFQSGRDFAAWIGLVPRQDSTGGKQKLGPISKQGDRYLRRILVVGAHAVLRWAKQNPGKYPWLTQLLARRPFKVVAIALANKMARVAWALLASGAKYRAPRLAAAT

SEQ ID NO: 141997 - protein, 393 aa, unidentified
MFSACVPPVPGVRSDSKEACARHEVGMSFVRDDGGRGPTETEVHALMKVLIGVDPHKASLAIAVVDEASGELLERAGFSQDRAGLRSLERWSARFPERRWAVENAGGLGRYLAGRLAAAGESVVDVPPKLSARVRVLSSGNARKNDRLDALATALAASRHERLATVDHETASEVLRLLSERREDLVAERTRALNRLHGLLRDLVPGGVAGTLSAHRAARILRGIRPQEGASSRVRRRLASEILRDVRTLDRKIADLNERIEAEVEASGTTLTHIFGIGPILAARIVGTVGNVARFPTKAHFASYSGTAPVEASSGEKVRHRLSLAGNRKLNYALHMVAVCQARSDAQGGTYYHKKIAEGKSRKEALRCLKRRISDAVFKILVADSQAPSRSAA

SEQ ID NO: 141998 - protein, 426 aa, unidentified
MKVLHERVAGIDVHKDMIKVGIRSPGDKPWTRRSEVLQYRTFYGVLQQMAADLRKRGVTHVVMEASGACTEPVYYALAERDFDEVAVINPAHARALKGHKTDARDCLRVAELFECGLLRGSYIPAAGLKEVRDLTRYRMKTVQARTSEIQRLGKALESAGIKLGSVASELTGKSATAMIEALIDGERRGRVLADLAIGRMRQAGKLADLSQALTGRFTEHHALLCRLHLDRIAVSGAAVAGLEDTIALKAARWQREQDLLRTVPGFGDAVAQAWLGEIGPAPHTCFGSHEKLASWVTLCPGNHISAGKRKHGRTGDAGTYIKPMLVQAAWAAIRVRGRLQARYSRLVRRFGGEKNPAAKKKAITAIAHTLLKIAYQVLRSGKPYEDPGADFYTRRESPGQRQAHLLRQLQKLNPGCTITITAAEAA

SEQ ID NO: 141999 - protein, 344 aa, unidentified
MSEVIIIGLDIAKHVFHVHGADERGRALFSKRISRGKLLDFFAAQPSCKVALEACGGAHHWARQLTQLGHEVRLIPPAYVKPFAKRQKNDAIDAEAICEAAQRPSMRFVAVKSEEQQAAGLLFRTRDLLVRQRTQLINAIRGHLTEYGWIAPKGPSHVAMLADLIDEEEMASSLPEAAHAMFRLMLDLLAGLNSRIADLDKEIARRAREDEVSRRLMTVPGIGPISATAIAALAPPAETFAKGRDFAAWLGLTPLQRSTGGKQKLGTTSKMGERTLRRLLIIGSSAVVQQASKRGAPKGSWLEQMLARKPRMLVTVALANKMARIVWALLVKQENYRAPAPARA

SEQ ID NO: 142000 - protein, 391 aa, unidentified
MIYVGIDVAKDKHDCFITNSDGEVLFKAFTITNNLDGFNELHQKIASVMDDVTKVKVGLEATGHYSYNLLGYLIDKGLPTYVINPLHTNLYRKSLSLRQTKTDKVDARTIASMLMSDVNLKSYSDISYHNEELKSLTRYRFDKVKERAKLKTSVSRLVCILFPELEKLVPTLHITSVYALLSEFPGAKHIATAHLTRLTNLLSEASKGRYGKDTAITFRDAARASIGSNMPAKSLELKHTIKLIQELDSEIDEIEKEIKIIMDEINSPILSIPGINYRMGAMIIAEIGDFNRFDSPDKILAYAGFSPSTYQSGQLDGAYAHMEKRGSRYLRYALYNATKYVCHWDPTFAAYLAKKRAEGKHYKVAISHAVKKLVRVIYHLEKTKQQYIKAA

SEQ ID NO: 142001 - protein, 365 aa, unidentified
MNTTTTATGLVGVDLAKNVFSICEVDGGGRVGRRQDLTRDAFGVWLVQRPAGTVVAMEACSGAHHWARRCEEYGRVPRLIAAQFVTPFRKRRTSKNDRNDAEAMATAARQGNMRFIPVKSVDQQARLSWHRVREGYKVESLVIGNRLRGLLAEFGIAVAKSESALRTALADLARNTGLPLGMKELIGDLTDHWKQIRDRIAACDARIEAHARADERCVRLRSIIGIGPLTADAMVASVGSARDFKNGRQLAAWLGLVPTQHSSGGHTRLGTISCRGDVYLRTLLIQGARSSLQRAKAVSTEKATPEQLWIGQLAARMPFGKVLVAIANKHARQLWTMLARDVDYDPSASLRHTMRSTTQPAIAAM

SEQ ID NO: 142002 - protein, 354 aa, unidentified
MKTYYVGMDVHRASIWIVVLNGAGKLVMQSVIETGAERVRGYLKQLRGKVYVTFEEGTQATWLHDIVRSLVTEVVVCDPRHNKLLQSGNKNDRVDAQKLAELLRNGALKAVYHGDHGMRTLKELVRNYDCLVSDSTRVMLRLKAIYRGRAISCAGHDIYRSDRRAQWLEKLREPGARQRASFLYAQLAALKPLRHEAKLVMVKEARRQVAYPWLMSVPQLGSVSVAQLMAVVGTPHRFRTKRQFWPYVGLAVVTRSSADHEIVNGVLRRSRRPLATRGLNRNHNHLLKKVFKSAATSACHSGPFKAGYDARVAQGMDPSLARLTIARQLAAITLAVWKRGEKFNMQMMKQQLAA

SEQ ID NO: 142003 - protein, 394 aa, unidentified
MKLIGIDIGKNKHFFCIMDKDSGEIVSQPASFSNDKEGFDFLLQKIKSYPKNSVLIGMEDTGHYHFALLKYLLDLQYTVALINPKTTDFNRKMQGGITKNDKLDTINICDVLDTPERKKQYRITKVNKFDLYEQKQLTRQHHNLKEELNVYKNRLQKSIDIVFPEFNSLFKSKYGTVYMNILKTFGSAENIANTDIRTIRKCFEIDGRGNRISLTLERLKERARSSIGISSIAEVIQIKHLSAQIDLIEEQLSEIDKKIEEFSIQNNSPILSIPGISHFSGTSILAELGDISNYSKPSQIIKFAGVAPLHYESSQFNAQHTAITKKGSKYLRKTLYQIILPVIRHNPVFNKYYQLKISQGKGHRCAQGHCVRKLLRIIYHLLKTNQQFDPQLLR

SEQ ID NO: 142004 - protein, 346 aa, unidentified
MKEKNNQMLKQNVGVDLDKDKFEAAFFVIHAHMDTSVVATRKYENREQGIANFITWLNKHRREDLSVHITMEATGVYYELLAYRLVEKQFPVHVMLPNKAKKFAQSLDMKSKTDKLDAKALGKMGIERKLRPWQPASKNLRKLRFLTRERESLINEKTRASNSLHALKHSHEAPEKSIARYEAQIEFFEERIKEVETDIHSLIQKDEILKQKVQRIVTTPGLNINTVAILIAETNGFAAINNIKQLISYAGYDPRIQESGQWKGHSKISKQGNSHIRRALYFPALSFKQHSQWHGKFFERLKTRKEKGMVAAVALQRKLLILAYVLWKNDDVFRPQYAQKMTSGIG

SEQ ID NO: 142005 - protein, 315 aa, unidentified
MTTKSETYVGIDVSKDRLDLAVLEEKRIEQYTNTERGIKELVDEMKALKPALIVVEVTGGYERAVVKALFEAGLRVARVSGYRARQYARAKGLLAKTDPLDAMNLADYGKHVQPRVYEAKSEEGQYLAGKLARRRQLGEMVQAEKNRLRLAYGDIGPSIERVIKFLQGELKQLEEEIRAYLDANPVWLEQEQLLRSMKAVGPVTAATLLAELPELGKLDGKQIASLVGLAPINQDSGKRSRYRKTGKGRPSVRNVLYMAALTGLRYNPVIKKQYDGLVLRGKVKKVALTACMRKLLTILNAMVRDQKPFGYAATS

SEQ ID NO: 142006 - protein, 404 aa, unidentified
MTKYHVGVDIGKQKHKACIRTVSQDSYSGVFSVPVSREGFEKLLTTLEKHSPDKGDFVIGIEATGNYGNTLAYFLLSRGYKVEEINPYRANQFRKAQGKKAKSDRIDARSLAAMISLGNHKPLSIPDPTIDNLRELTRFRADLIKDRSALVNQLHQCLVSLFPEFATHFCKLDSSTSLSLLISYPGPEQICRAGEDGVMQALTIASHGRVGKALAKDLIEAAHSSVGIIQRQPALAIRVTTMAERILALNAAITKVEKKIEDLFAKLPYNPNDFPVGNICSLATIIAEIEDINRFPTLKQFLSHFGWCPRSFQTGNYRLEHPRMSHAGNKYVRRIIWMLSIIAIRTVPRYHAYFLRRVEAGKPKMHVIVAVGRKLLSVFYAILKTGIPYDPNWEVNRHLALARS

SEQ ID NO: 142007 - protein, 430 aa, unidentified
MKKVDQLKRKLEAVTFRTLIVGIDVAKHTQWARFVDCRGLEQGKALKFQNNKNGFTDILSKVYHMCNEGNFTDVVIGMEPTGHYWKPLANFLLKQAKITVVLVNPYHVKKAKELDDNSQTKSDKKDALTIARLVKDGRYFDTYLPHDIYAELRGLTTARIGMVKRRNAIKNKVIAIMDEYFPEFTTVFKHPFDGKASMQILKSCPIPRFIIELGEDGILAEIKKAVKKSVGRKKARQLVETAKESIGVDYGEYAARFKINQLIDELELIEKQLMAVEKEMADALHKTGLSENLLSIKGVGVASLAMCLGELGNPLRFDDARQMSRMAGYNLIEDSSGKNKSGTCISKRGRKNLRCVLYKMAITMVATNVEMKMLYNYLKTRENNPLKKVQALVVISKKILTLIYTLAKKKENYNPELVFGDVRKSQLKAA

SEQ ID NO: 142008 - protein, 373 aa, unidentified
MKYSTVYVGMDVHKETFSLCCYTNEKEQAEYPQKVDGHYSKVINYIEAMRFHYGDDALFICGYEAGCLGFTLYHQLTDHNVKCVILAPTTMLQQKGRKKVKTDKRDAALIARCLAHHDYSPVHIPTEQDEQTKEYIRMRDDHKLALKKVKQQILSFCLRHNYRFDGTINHWTQAHLKWLRSLKPEGLYAEILQEYLLTYDNLTNKLERFDKRIEELASNETYQENVHKLSCFIGVKTVTALAVLTEVGDFKRFASAQHFASYIGLTPGEDSSGDDQNRLGITKAGNRHVRSLLVEAAQSYSRGQIGFKSKALKARQAGNSPEVIAYADKANERLRRKYYRMVLKNNKKTNVAKTAVARELACFMWGMITGNVG

SEQ ID NO: 142009 - protein, 420 aa, unidentified
MGFIGGDLRENFIGRIKGADPGKLLAVPIDVGKHSAAALVCDFWGEIIVPPFVFDLNERGFQDFAVVLARVEAERGAEWVRFGLEQAGHYHRPLQARLETHGLEISLFNPAQVKANRNQDLLASLKSDAVDLAAMAELLIRGKGRAPATGDETIAAQAALAAHRSRKVKARTALKNQIHANLDLVFPGLSGCFDTILDTKVGRLLIDQGLTPERVRRLGPERLRRFCFKRGVVLRRPKARQITDAAGVAFALSEALSGVHARLLAADVGLLSRLDREIFEAEAELAEILPRTPAHILTTLPRVAVVRASNYGGAMGDVTRFRNASQVYRLSGLVPRLYESAGKRRTGTHISREGKVELREAIIELGKALRQGHPDFARYAAGLLSRGKHKGVVRCALGQRANRVAFAMMRDQRPFDPTRW

SEQ ID NO: 142010 - protein, 349 aa, unidentified
MRIVGGLDVHRAQITFDYVDLRTGEERRGQIRPATRDEVRSFLVGLGPKQAAFALEATTGWRFIVEELRRAGMEAHLAEPADTRAARGRKRRAKTDRADARRLRDLLLAGEVPESWIPPDHLADLRTTVRLRKSLISSRTAWRQRIHAQLFHHGHPLPPSLRTAAGRERVESAELPAAARQVVNVGLAMIDRIDAEIDAIDLQLAVVAKAMKGCQVLTRQWGIGPVLAVTILAELGDTRRFSSSRQAVRFAGLDISVEDSDGHGPPGRLTRQGPRRCAGPSMRPPPRPGGSPLLITPTTSRPRNASVPSEPASRWPDASCVVSIMSWPRWERRLSPKPPDIPEPTTSTN

SEQ ID NO: 142011 - protein, 339 aa, unidentified
MKLYAGLDLHSRNTYIGIMDKEFKRVFGKRVLNELPLILKTLEPFQDQLKGIVVESTFNWYWLIDGLMDAGYQCVHLANPSAMKQYEGIKHTDDQHDAFFLAQMLILGILPQGYIYPKEDRPVRDLARKRLFLVRHRTSHILSLQSLIARCCAQRVSANDIRKFTVEDLQQLLKEEHIVLSAQANLDTIVFLKQQIKRLEKTIQNKVKLNKAFQQLMTVPGIGLILAMTIMLEVGDIGRFAQVGNFASYCRCVSSQRLSDGKSKGHGNRKNGNRYLSWAFTEAAHLSRRYNEHFRSYYNRKVAQANTSLATKALSNKLARICYYIMRDQVPFRENLLSH

SEQ ID NO: 142012 - protein, 333 aa, unidentified
MNQIRFAGIDVSAKTLVIRYESRPGKALSLEVPNTPQGHRELCAKLSSSSTPIQVCLEATGNYSLDVALALHQHGIPVMILNPRAARDFGKALQNRSKTDAVDAQVLLEYAKRMEFHPWQPPSPARLQLRDLSRRIKALTRQSTQEKNRLEAASCCQGFSPAVRKDLESHLRYLERSIDKLQKQALQLIEKDPSLKQACQRLMSIKGIGQASAVHLMAELLLLPSDMTARQWVAYAGLDPRHHESGSSVQKPTQISRTGNAQLRDSLFMPALVAAQFEPHVKAFYEKLQQRGKTRMQALVAIMRKLLHSIHGMLKNQEDFQGPKFFALETITP

SEQ ID NO: 142013 - protein, 340 aa, unidentified
MSLHGGIDLHANNSVIVLINEQDEVIYRKRLPNALPTILEQLAPYHMQIKGLVVESTYNWYWLVDGLMEADYRVHLANPAAIQQYSGLKYTDDHSDARWLAHLLRLGVLPEGYIYPKAERAVRDLLRKRAHLVRQHTANVLSVQNILVRNTGARFSVKRLQELTKQELKSLLAEEPQVLAVTSSLAVLDCLRHQIKTLEKTVHKRLHHTPAYEQLLTVDGIGTILAQTITLETGAISRFPTVGNSASYCRCVDSTKISNGKRKGTGNVKNGHPYLAWASMEAAQFAMRFQPEAKRFYQRKLAQSRNNTVLARKAVAHKLARACYYMMRDLVPYEATKAFG

SEQ ID NO: 142014 - protein, 462 aa, unidentified
MRRSIGIDLGVTSSSRMAVADGATILSNRRVRSTPEALTSAIEQASDGQPVDIIVESTAMSWFVAGVAAERSGVEHTLHRVSGRKAAALRSFYRTHTKTDRIDAPVLARMKRVDDALHEFTLPTAGELALKRLVTFRQRLEKEAAKAVSRVRSLLHWAAPQLLQAASGTSDGLLRVLRRWPDLRKLATAHAPSLAREAGMSLQQARDVRQCARDAAAFYQNRIDYGLLALELEIGLAHHQSLQQHLDRLDEMIGNEYRRAYPNDVLLSIPGVGPVVGSVIRATVGDARNFKNASAFRAYTGLLPREDSSGDQRRQGRITKAGPNLLRWALYLAADTARKHDPQLADLYRRLMVERGRHHNQATCAVATHLADRIYALLRQNRPYQPRALDGTPIDAAEAKRIAASLAVDPKTRQRLRALNKRDGGPRVPDSRQPKAPHDTKRPSTDSVADDHQRRHKGVDRP

SEQ ID NO: 142015 - protein, 365 aa, unidentified
MQKINTMQTSRKNLFQGQLTIGLDLGDRSSAYCVLNEAGEIVLEHKLATTPEAIKQVFGSMPRCRMAMETGTHSPWVSRLLTALGHEVIVAHAQKVRLITKSRRKDDRLDARTLARLVRIDPELLTPVKHRSAQAQLHLTEIRARAVLVSARTALVNAARGLVKSYGERLRKCGTEQFRRETASGLSAGLREALEPLLREVESLNERIQEYGRRIEKMANQTYPETALLKQVKGVGDLIATAYVLTIEDAHRFRKSRDAGCFVGLQPGRRNSGESEPQMRISKEGDEYLRTLLVQGAHYILGPFGEDSDLRRWGRKLSARGGKNAKKRAVVAVARKLAVLLHRLWVSGEVYEPLRNSQKAMNAAA

SEQ ID NO: 142016 - protein, 358 aa, unidentified
MTHVNIALSHAGVVVGVDTHADTHVAAALDSLGRVVGRLEVPTTRSGYSRLLSWSRDFDSNVAFGVEGTGAYGAGLARFLTAAGCRVAEINRPDRRSRRAHGKSDPLDAEAAARSVLAGRDAGLAKADHDRVGMIRTLRVARRSAVKMRTQTINQMKALVVTAPDELRSHLRQLNSTGLVAVSANARPGLIGTPTAAAKMALRSLAIRHQGFTAELNALDRELDRLTVEAAPALTTLKGVGSDVAGALLVAAGDNPERLRSDAAFASLCGVSPVPASSGKTNRHRLNRGGDRIANNALWRIVMVRLTCDERTQSYVARRTAQGMAKRDIIRCLKRYVAREVFHALVDAGTPLQGLAKA

SEQ ID NO: 142017 - protein, 421 aa, unidentified
MLEETNDDGVIIERVAALDIGKAEVVCCVRVPSPAGGRRSQEVRTYPTMTRSLSAMSDWLRDLGVSRVVMEATSDYWKSPFYLLEAAGFEVWLVNAKDVKHLPGRPKTDKLDAVWLCKVAERQMLRPSFVPPEPIRRLRDLTRYRVDLVGERGREKNRVEKLLEDAGIKLSVVASDIFGVSGRAMMAALIAGERDPLVLAGMARSVMRTKIPQLRQAFEGRFNEHHTFLLTRMLAHVDAIDADIAAVEDRIDEVIAPFADAVAHLDAIAGVGPTAARVIIAEVGLDMSRFPTAAHLASWAKFSPGVKESAGRTLGNGSTGHGNRYLARVLGEAAVGASRTNTFLGERYRRIARRRGKKKAIVAVGRSILIIAWHLLNDPDAQFIDLGPNYYDQHRGTQRALRTHIRGLQALGYRVTLQPAA

SEQ ID NO: 142018 - protein, 423 aa, unidentified
MNETPSQLGDQPALFIGIDWADQKHDCHVIDRHGKEFHQELKHSAESIDTWVGEMLKLAGGQPIAIMLEQSRGALVYALMFRQNVLLYPDNPKKLARYRESYPGDGKNDPTDAKYLARMLCERITTLTAWQPDDENTRLLANLSRQRRKIVDGQTKLRLQLTSLLKSYFPLLLELFGKDHQLPLLLTVLGRWADPRKIRRADRRLIRRVLREHSNGSQEQHDQIIARIRSAQLLCDDEALITPSAMAAKFLGSQIQQSQKTIREFDAKIDEVMKQHPDAHLFTSLRGAGKVLAPRLLCAFGSQRDRWEDAESVASFSGIAPVTKKSGKQCHVHRRFACPKYLRQTFHEFADSARIHCPWSKARYRMLRDRGMKHHAALRKIARSWIRILFRVWKTRTPFDCDRYIANLKQRCPEINQYLAQES

SEQ ID NO: 142019 - protein, 362 aa, unidentified
MRIIGCDLHARQQTLAMLDTTTGEVVEVTLKHEGDNVREFYSSLPRPVRVGIEATGSMQWFLNLMEELGIECQVGHPAQIRASAPRKQKNDRRDAELILKMLVEGRFPAIWLPSKELQDLRALLRHRHQWVRMRTRIQNALQSIALANGLRRGPSLWSQVGQHTIASLPLAPHTAYRRSELQAMYEKFEAEIEKLNQRVEEQACKRPGARLLMTHPGVGPITALATEVFLGDPARFADSKALASYVGMIPREYSSGGRQRLGGLSKQGNPLLRFLWGEAGAHAARKDPELQRFYRRKLVQKGLGKASVAVARKLGIRLWIMLRDQIEYNEFCRRGQKQQKSSDACVGMPETRYGAKSHRPID

SEQ ID NO: 142020 - protein, 362 aa, unidentified
MTQVRSWAGLDVHAAKVLAVTVDRESGELCSRRLSGRTSEVVAFCAGLAGPTRVAYEAGPTGFTLARALTDAGIECVIAAPGKIERPAQDRVKTDRRDAERLVRLLMVDGLHPVRVPSTEEEALRDLIRAREDVRGDLMRARHRLGKLLLRHDIAFDGPGKNWSAPHRQWLGRLELGERGAQVTLLDYLGAIDALIVRRDALESTIGELVPGSPWAQTVARLRCLRGIDTLSAVGLCAEIGDWERFDRAGQLMSFLGVVPSENSSGEQRRQGAITKSGSRHARRLLVEAAWHYRRAPAKGLTLKRRQEGQSPHVIALSWKAQQRLHRTWRRLDSERGKRRTIVAVAVARELAGFCWAIANAD

SEQ ID NO: 142021 - protein, 387 aa, unidentified
MTSKFDAHKPTTAFDHDSTLVVALELSGKAWEIGAVVPGVERRPKRKVDARDMAGLLMTLERWKGEAIRAGRSVQRVVVTYEAGRDGFWIGRYLVERGIEVHIMQPASIAVERRARRVKTDRIDLDMLLRTILAWLRGEPRVCMMVRIPSEAEEDLRLPGREREVLVRDRLAIENRIENLLCLHGIAGFRPRLKKAAERLQALRSFAGSPLPAKTMAQLERLMTRHRLVSEQMAQIEAQRDQVVQLAEPDREERMIKLLASIYGLGLETATLLVRELLCRPLRDRRAVAAFAGLAGTPFRSGGMEREQGISKSGNPRVRRIVMQLAWRWLRFQPDSGLSRWFGARTAGAKGRIRKIMIVALARKLLVALWRFVETGVLPEDARTMRA

SEQ ID NO: 142022 - protein, 425 aa, unidentified
MNVDSTDEPRFAAYVAIDWGDSKHVWSMQLADSDRRERGEIEHSPEAVAAWAAMLSARFGGQPVALAVEQSRGPLVFMLGKYEQLHVYPIHPRAAAQFRAALFPSGAKDDPSDAELLLDLVVHHRARLRPLKPDTEQTRLVQHLVEGRRKLVNERTRQTNRLTAQLKLYFPQMLDWFDAVDSPLVGALLKRWPTLETLQKARPDTVRSFFTAHNCRSQELIERRLDQIRQAVPAVRDKALIEAAQAMTKVLVELIATLREGIASFDRQIAQAVAAHPDFAIFDSFPGAGPALAPRLLAAFGSQRERYQSAADLQTFSGIAPVTERSGKSQWVHVRWACPRFLRQTFHEWAAHSIGFCDWARAYYQQQRGRGNDHHAAVRALAFKWIRIAFRCWKHAVPYDDARYMQSLRRRGSPLIAALAKPELP

SEQ ID NO: 142023 - protein, 344 aa, unidentified
MSYFVGLDVSLRSVALCIVDADGDIVLERALDCEVEAIDVCLRKFGEPITKLGFEAGVMSQMLFHGLQALGYDVVCMEARQVSAALSAMRNKTDKNDARGIAQVVRTGWYQPVHMKSRESHYIRAMLSSRKAVLRKCVDLENEIRGLFKTFGIRLPSTLAHHRFDDTVRPLIEADEGLAFALLPMLEARGALYVHYREMDKRVKRVAAQDPVCNLLMTTPGVGAMTALHFKAAVDDPARFNSSRTVAAHFGLTPRRFQSGEMDNPGRISRAGDTEMRAALYTAANSLLTRTKQMSPLKAWGLRLVKRRGRKRGTVAVARKLAVILHRMWVDGTPYRWSDVEVAK

SEQ ID NO: 142024 - protein, 387 aa, unidentified
MAQVDDLSHSLVPFEQHGTLVAVLEMSQSRWLAAAVVPSVERRPLKKLEPDPAALLRLVEKWRDQAAAAGGCVTRVVLAFEAGRDGFWLARWLRARGIEAYVIHSTSVAVSREHRRAKTDRLDTEMLIRVFLGWLRGEPRHCKMVAVPSLEEEDAKRPSRERENLVGERTRIVNRMKAALIRLGVRGFKPELLKAPERLEALRTPEGVPIPPNLLAEMRRDMARLAWVREQIELVERSRRERLEQAPADGPHAMVRLLARVVGVGLETADMLVHEVLSRNLRDRRAVARYAGVTGSPDESGAKRRERGLAKAGNARVRRGLMQLAWRFLRFQSESALAKWYRERTEGGGKRKTTMIVALARKLLIALWRLVRLGEIPPGVRLRTALA

SEQ ID NO: 142025 - protein, 370 aa, unidentified
MRILALDLGKYKSVACDYEAENGRQRFATILTNPKALHDLIVDLEPERVVIEICSIAGWVSDLVRSLGIEIQVANPADERWQWCKVKTKNDRADALKLAQLSAMNQLRLVYVPQSEIRQWRALIAYRQHLVQRRTKIKNHIRDLLLREGQLLPRYRSAWTQEGIANLEAMSQPLSEVSMAELWRGELAVELAQFTAVQGQLADLVAKLDELGAANRGVQLLRTISGVGPRLAEAVVTMFDDPNRFRTAGQVSSYIGMVPKQFDSGETERSGRITRHGNRLVRSLLVEVAWCALRHNPWARETYKRISGGKKSRKKIAVVAVGRKLLVRCWAMLRDQTAWQSPPLTVTRLAERPERLAEVRTRGKRLRRAA

SEQ ID NO: 142026 - protein, 427 aa, unidentified
MKTEDIRLKEFRQLRKEIRGSKQYLIVGVDIAKDKHKAFFGTATGKTILRRLVFENNREGFEKLFQQVEALKVQHNLSKVVFGMEPTANYHKPLGEYLITSGHDVVMVSGVAVKRNRELLDGRWDKHDLKDAANVADLISQGKCQYYECPEKGLGELRNLLSLKKRLKKQEHSLKVRIRNHLVAKYFPELDRYFSRGESENLAIVRGGLNPGVIAGLEYKEFFQMVTSRKKGIKQAKRLRLIWEKAAESIGCEVGETVGFEGRLMVAGLEQIRVAIKETETKIEELCIEFLEYKYLLSIPGFGPDVSSKVLGAIGNPFRFKIGKQVLKMAGLDLSADRSGKGADGAVPVLSKKGKADLRYALYQAALVASVQNRYFIGYYTNKLRGRAKEKGIKTKIRVKLSAKLLLIAWTLMKKKEVFNPEYLTIE

SEQ ID NO: 142027 - protein, 387 aa, unidentified
MTLYVGIDIAKHIHVASLIDKFGEVIISPFSFENNKDGFNLLLSKLESFDQNDLIFGFESTGHYAQNLSYFLLDKDYQVGLLNPIQIVSLRKSRIRDTKNDNLDSLLISQALSLNYHRMLSPHKEMNDLRTLCLTRHQLVKSRTSEKIKLVALVDRIFPELAGFFKKNLHIKTSYKLLKKSASPCKISKTRLDSLTNLLVSTSRGKYRKDDAIRLKKLAKDSVGIESSLTEFQINLSIELIEFYSNQIKEVEIAMDIAMSKLDLPFMSIPGMGMKQGAIIASTIIDINRFSSPSKVLAFAGLDPRVRQSGQFNARSTRMSKRGDSLLRYALVYAAHNVVKNDETFKKYYDLKVSQGKSHYNALGHCAHKLVRDIYKLWAENLTFDIS

SEQ ID NO: 142028 - protein, 419 aa, unidentified
MTCNQLSHPLAATRGEHAAIHASLELARHRWVVTVLLPGSEKMSAHGIKGGDVGALLELLERLRVRAERSIGKALKIVLIQEAGLDGFWVHRRLEAHGIESHVVDPASIPAPRRRRRAKSDKIDGQTLLRALLAWLRGEPRVCSMVRPPSPQEEDRRRLVRERGVLIKERRSEVGRIDGLLAAQGITGYKPLRRDRRGCLAQLRTAAGERLPPYLAAELGRILDRLELLLRQIADLEHQRQALLQAVCAAESAAMADTPKTTEARGTPPAGVPDTTGPAGTMGAPQERDPAAMLFRLKGIGVEGATTLAYECFFHRFDNRRQVAAFAGLAPTPWRSGQIVYEQGISKAGNPALRTIMVELAWCWRRYQPNSALTQWWRKAAATGDRRIAIVALARKLLVALWRYVTHGVLPEGVVFKAA

SEQ ID NO: 142029 - protein, 358 aa, unidentified
MKHYIGCDAHKKYSVFVGISEAGEIIPAQRVEHDRESYRSFLKGLPPASKIAVESVGNWYWMIDEMEKAGHIPTLVNAGKAKLMMGGMNKTDKLDARGLAVLSINGTLPAVWIPPGELRDQRELARMRIFLVHIRTGLKNRIHATFAKYAITFKEVSDLFGIRGRNLIEKRLVELPPETKNSVKEQLKLLDQLERQISMAEERIWQVVKITLEMQLLMSIPGVGPILAILIALEIGDLARFSDGAHLASYCGAVPRVKSSGGKTYYGKTRPDVNHYLKWGFTEAANAIVLNQHRMTGRHVAELYRRICQSKGYAKAIGALRRHLAEAAYAVLKSGQPYHEPILSKRPSVTKEVCARLA

SEQ ID NO: 142030 - protein, 343 aa, unidentified
MKDTIYNHYIAIDWSIENMAIARMTKKSNKITAIDVPSDIADLQAYLKNPRGTKMLAIEETTTSQWLYTELKDYVDRILICDPNRNKLLNEGPKTDKIDATKLVQLLKAGLMKEVYHSTDKFLYLRRFVSGYEDLVKAGVRLKNQRYSLLRACGKRGFEWAGTKLDSEGDQFVLDCIDRQIEAHKQEKEGYEKEFERLTKDYPEISHQKTLPGIGPIHAVKIVARVVSPYRFADKGHYLSYTGLVKLERVSGGRSYGRKNSRYCRQLKSVYKTSTWAAIGGNNPINDYYEYLIQDKGYPEHNARHKACRQLAILSLGVFKSGKKYQPYRRDHVKGNQEVKSGL

SEQ ID NO: 142031 - protein, 451 aa, unidentified
MPNSKRRHPERDFTPTHPHAAAIDIGSRMHVAAVPPGRDTEPVRAFGTYTGDLQQLADWFERCGVRTVAMESTGVYWIPAYEMLEQRGFEVVLVNARDAKHVPGRKTDVSDAQWLRRLHEYGLLRASFRPKGELAALRAYLRQRERLLDYSASHIQHMQKALMQMNVQLHHVVTDMTGETGMRIIRALVAGERDPAVLATHRDRRCHASEAEIVAALAGNWREEHVFALGQALELYDTYHAKVVECDFRIEIVLRRLRDAAAKSAGRLPPARHRDKTANAPAFDARAALHAVLGVDLTQIHGLGPSLALKLIGECGTDLSAWPNAKHFTSWLCLAPANKISGGKVLSTRTRRSGSRAAALLRLAAVTVGRTQTALGAFYRRLSARVGKAKAVTATARKIATLFYNTLRHGINYADPGASYYEDRYRARVLANLRRRAKSLGYMLHEMPASG

SEQ ID NO: 142032 - protein, 401 aa, unidentified
MPELWAGTDAGKAEHHCTVIDTEGKRRLSRRVANDENTLLQLIADVLALSEGEPVTWAIDLNAGGAALMIALLTDNGQRVLYIPGRTVHHASGSYRGDGKTDAKDAFVIADQARMRRDLQSMHRGDDIAVDLRILTSRRLDLAADRTRAINRLRAQMLEYFPALERAFDYSTSKGSLVLLTGYQTPGALRRIGKNRLAVWLKNRKVRNFTLVAATAIEAAEAQHTAVPGEKLAGAVVAKLAREVMALDEEIAETDVLIEGRFRDHPHAEVILSMPGIGPVLGAEFIAHTGGDMSIYGTSDRLAGVAGLAPVPKDSGRISGNMRRPRRYCRRLLRVFYMSSMVAARCCPTSKAFYERKKAEGKNHKQAIIALARRRLNVLWALIRDGRTFKITPPPPPVALG

SEQ ID NO: 142033 - protein, 345 aa, unidentified
MQCIYYIGLDIHKKIIAFCIKDQAGHLIRQGKVGANRETLSQWVSDLPGPWIGAMEATIFTGWIYDFLKPHATELKVAHPEMLKAITAAKKKNDRADAERITDLLRVDLLPECYMAPANLRELRRILRYRNHVVRNAVKAKNKISGLLMEVGASYNKKRLHGRTYFNNLLETVEDVPPSVKELLGLSRSSLEMFQTIQKRLIKALHNDPQIRERVQRLMTIQGIGEITALTWVLEVGEPERFSSIRKAVSYCGLCSAQRESAGKETRGPISKKRNKHLQTVLVEAAKLAPYWNPQLAELHARELSRGNRNRATLAVARRLVAYMLAVDKSCRDFVPKTVKEEEAA

SEQ ID NO: 142034 - protein, 369 aa, unidentified
MQVIYPIVCGVDVHKTFIVAVICDSTSIEPKYIRKRFSTFKNSLIDFRDWLLQHDCQNVCMESTGKYYIPVYNALEGHISNVVVANPKWVRAVKGEKDDNKDAKWIADLFKLGMARSSFIPGKDIRILRELTRYLYKVVGIASSEKNRFQNALVVGNLRADMVFSDVFGKSASSVVDLILSNDDVTDKEILSKVHPICKASNEEILEAMTHVELTSIQKSRIKLIRDHYDYLQTLKENLSEPIQVMIEPYESFVTLLCTIPGVSRKSAITILSEIGPDMSQFSNHYRLSKWAGLVPGQNASAGKKKSTRISRAGVYLKPCLVEVAHAAVKDKKEPYFSIKFNKISKRRGKSEHISQLQEKYWFVPITCS

SEQ ID NO: 142035 - protein, 353 aa, unidentified
MSMLADLVEVVIGVDTHKDTHTAAVLDARTGAVLARVRVNTDPDGYAELVALADEQSGLRAWALEGTGGYGAGLHRYLADAGELVVELDRPKRPTRRAGAKSDPIDAERAARDALARTRLTQPKTGPQRAALQMRLTARRAAVEAATAAQRQLHAMVITAPEAVRTRFRGQRTRTMITTAGRLRPTTAGGDIEAATALAVLRDLARRIRTLETEAASHETAIRMIVRSWRPDLLDLTGVGPIVAATVLTAWSHPGRCRNDAAFAMLAGAAPIPASSGKTIRYRLNRSGDRQLNRALHTVALSRLRYDEPTRAYADRRRAQGKTDREIKRCLKRYIARDLYRRLESPPQPLDAP

SEQ ID NO: 142036 - protein, 386 aa, unidentified
MSQVSDLSRSLVPFDQNITLTVVVELSEASWLVAGLIPGVDRQPVKKQEPEPVALLRLLERWRVEAVRAGRTIGRIALAFEAGRDGFWLARWLQARDIEVHVVHSTSVAVSREHRRAKTDRLDTAMLMRVFLGWLRGERGHCRMVAIPTLEQEDAKRPSRERESLVGERTRIVNRMKAALARLGIRGFKPTLRKAPQRLDALRTPEEVSIPPNTLDEIRRDMVRLAVVREQIDVIERARLARLEQAPAAGPHAMVRLLARVIGVGLETADMLVQEVLSRNLRDRRAVARYVGLTGSPDESGRRREKGLAKAGNARVRRGLIQLAWRFLRFQRDSTLAQWYRTRTGGPKGARKTTMIVALARKLLIALWRMVTIGEIPAGVALRQVI

SEQ ID NO: 142037 - protein, 430 aa, unidentified
MKSNTQNAKIEAITEKTLVLGIDVGSETHYARAFDYRGIEYSKKPFKFSNTEAGFVTFKEWILDLKDRHEKEKVVPGMEPTGHYWFNLGKFLQDNEMKPVLVNPHHVKKSKELDDNNPTKNDRKDPKVIAGLVREGRYMIPYLPDGVYADLRTASNIRFQLQAELTRIQNRISRWFNIYFPEYKTVYGKPDAKSGMLILKAAPLPEDILTLGIDGVNQIWRDAKLRAVGKARAKTLIEAAGHSVGSKEGAVSARMEIRMLLEDYESRNIRLQEVMGLIEGLVNQIPMAEKLLEIKGVGIKTVSGFLAEVGDISRFNNPKELQKLAGLALVENSSGKHKGETTISRRGRKRLRYLLFEAAMSLVAKNPEFRELHNYYTTRRRNPLKKMQSLMAIAAKLLRVFYAILTKGVGYDPKKMVNDIRRPAAYAQAA

SEQ ID NO: 142038 - protein, 318 aa, unidentified
MITQKNQNEINVGVDTGKHQLDIYIRPLDIYFTVSNDEKGISEAIGTLKNHHPTRIVIEATGRLEQAFIMACAKAKLPFVIANPAHVKKFAGAIGQLAKTDQLDARLIAHYGDAIKPPLSELKPEMMRRMSDLLSRRRQLIALQTMEKNRLQIMPKALSGTIKPILTVLKNQLSKIDQQLLKLIESCPQYQAKNAILQSMPGVGNVVAFNLLSNMPELGYLTNKQAAALVGVAPINRESGAYQGQRRIRGGRHQIRTVMYMAMMSAMQCNPVFKVTYERLLAAGKAKKTAIIACVRKMIVILNSMVRDGAFWNPEMAK

SEQ ID NO: 142039 - protein, 417 aa, unidentified
MARRLRLEPEDIIVGLDLAGEQHQAVICRMEGERLTRFRVPHSLVGFDDLLMRARLLASQSSGRRVFAFEATGHVWEALAHYLEARGEEYVIVNPLATFRLREARQMNRHKTDISDAEQIAELVRNDLVTETKLEAGPYLELRRSWGEYARLREERARLKTLLSHQLYGVFPELRSVWTDLLAPGCLAVLRLGLTPQEIGAMPVNDFIRRAKAASRGRRLWRFKLMAVHERAQRTVVPAAALGPLARELARLAERVDLLSDQIDALALEIQKVLAVVKESRYLLSIPGLAWSSAAGILAHVGSIDKYRHGRQLIKLAGTNPSRHDTGQRIGRKQGMTHRGRSGLRQVLYMATLSCLQHNPRIRAHFDRLIQRPDRPLARMQAFGACMNKLLLYAFAVMKRRETFDAEHAWKGAALVA

SEQ ID NO: 142040 - protein, 420 aa, unidentified
MTRLPMQAFAAFIGLDWADATHAVCLQAAGSDTRESSLLEHTPEAIDAWARALRHRFGGQPIAVCLELTTGPIVSALRTHDFLVLFPVNALTVAKYRQAFTPSRAKDDPSDAELQLELLLKHRDKLQVLTPQGATMRTLDQLVGFRRRVVEDKVRLTNRLTSALKNYFPQVLSWFSDKDTTIFCDFLSQWPTFKAVHQARRATLERFFRQHHVQTRVIAPRIQAIKSASPLTTDEGVITPHVCLVRALVAQLRATLQAIEDFDRAIAQLAPTHPDFALFQALPGAGPVFAPRLLVAFGEQRDRYASASELQQYAGIAPVTERSGNTCWVHWRLQCPKFLRQTFVEWAGASIRHSFWARAYYAQQRAKGSTHQAATRALAFKWIRILYRCWQTNTPYDESTYLNALARRGSPLIRYLASIS

SEQ ID NO: 142041 - protein, 320 aa, unidentified
MAKRTTICAGIDTGKRKLDVALDCSSEQLQVENTAEGYKTLLEWLGRHKVKRVGIEASGGYEQAVVAELRRKRLVVVVFQPAQVRAYAKYRGQRAKNDRIDAALIAACTAAVNELHPAPDARFSALAVHLTLIEQIGEDIARCKNRLESCRDVRIQKLWKEDITRLVKRKRAEFKALVEAIREHCDLAERLDLIYSVGGAGLPTAVAILVRMPEIGQLSREQAAALAGLAPYDDDSGEHTGARHIEGGRKRLRRALYAAALAGSFRWNPQLMALYKRLIAAGKGHKCALVACARKLLIFINAVVTRGTPWQADAPAAQAA

SEQ ID NO: 142042 - protein, 356 aa, unidentified
MLYSGVDLHRRLIVICTVNESGSIVARKSLKTQPDLVTAYFRQWPDQHRAVVECTTGWYWFSDLLRSLGVDVVLAHAKYLKAISYAKVKTDAVDALTLAQLLRMGYIPEAHQLPPEYRAMRDLLRQRMVMEHKRTNIIQRVTSILAQFNITDLPLSPYQPGFADFLIQCPIPEEYRMTLMLYHHQCLQVTEHRKQLEKHFTSHLRPTRAVQLLMSLPGIGDITGSIIAMETGDIHRFADAKHYCSYCRLVPGAKDSGGKHSHRCGSKDGNQYLKYAFTESAIKAMRFYPEIKHFASKLERRATKAIARTVVAKELAKISYYVLSRQQEFKTFKGIEINKLRNWPRSRKPVQLTGGL

SEQ ID NO: 142043 - protein, 272 aa, unidentified
MFFIGIDVSKAKLDCCLLLDTANYKRRAKSVSNSRIGIAELLAWCAKYNVDPSELHAILEGTGVYHEQAALALFDNGVTVSIVNPAQVKDFGRSLGIRTKTDGVDSFVLARYGASHKPSAWSPPAQEARTLQALLSRREAIVQDLQRERNRLEKADATDTPPLIRQSLVDSIAFLEKQLAKLQHDIDDHINKHPNLKADRDLLISIPAVGPQVGNHLLAVMHNHEFQSAEQLAAYLGLVPVERQSGTSLRSRPRLSKAEPALFALCCIWLPL

SEQ ID NO: 142044 - protein, 509 aa, unidentified
MVPGAGACVIGEDLIGSVSIPFRRVTNERLRAAMRPTSTCEDAMTKTVKKQHGSQQCSGKVNSGMPLINVNAAGIDVGANQHYVAVPAARDKQSVRCFGAFTEDLHALAKWLQQCGVTTVAMESTGVYWIPLYQILESYGFTVKLVNARHVKHVPGRKSDVQDCQWLQQLESFGLLTASFRPTAQICVLRSYMRQRQMLIDYGSRHVQQMQKALTEMNIKLQHVISDLTGVTGLAIVRAILDGERDRLKLAALKQRQIKSDVATIAKALEGDYRPEHLFVLRQALELYDYFQQKIAACDDEIRKAMQTLESAATATRPATAKPQPKARSKRHPFPFASQQKLQRILGVDLTRIDGINETTAQLVLSELGLDICHKWPTEGQFTSWLGLCPHNEISGGKVLRRGKRKVVNRLANALRLGAQSLLKSKSALGAYARRMRAKRGTPTAINATAHKLARLIYRTLKYGQEYIDIGQQQYEQRYKENALKALQRRARQLGYQLVVTVQSSTVVP

SEQ ID NO: 142045 - protein, 430 aa, unidentified
MYNKNYISVGIDVGSAFSFMTIVAPDGSVIQKPFKITHNKPDSLEKAVSAIKKAEELHSLESRTFLESTGIYHFPLFCYLVDCGFHVSIINPIITHSVNNTSIRKVKNDKVDSIGIAKLGLSGDIPVSQFPAKLVLEIRSLTRKYYDLTDERSAHINKLKGDLHTVFPQYLDIFCDVTGKTSTMILRQYGTPDKILRGHKKTMIEKISKASRKGLSKAAERYEKLCAAATAAKTFGCQIDSIYFNISLTLDLIEKLDSALDSILQRIHQLVTFNKSEKFIQQIKWLDTIKGVGFLTAVTIMCEIGDFSAFRNPKQLFAYFGLDPEVNQSGKFVGTEMHMTKRGSRIARRAVFAVALASIRTKRNGEGINPYLREYYEKKSGQKPKMVALGAVMHKVCNIIFAVLRDEKEFELRSPEEHCRQYQRPALQAA

SEQ ID NO: 142046 - protein, 412 aa, unidentified
MPYFVGVDWASQEHAVCVIDEHARVVLRTTIAHTAEGLNDLRTNLARLAAPTDLPIAVERPSGLLIDTLVEAGFPVVPIHPNALKASRPRYAAAQGKSDPGDAFILADLLRTDGHRFRPLHPLSDETRALRALVRARDDLVVQRIALANQLRALLEGFWPGAAMIFADVDSPIALAFLARYPTPQSAQHLGTKRLAAFLARHAYCGRRSTAELLDRLRIAPTGLAREAESETKGEVVRALVAVLEPLVGQIQQLSAAMEHAIAAHADGAIVMSFPRAGRINAAQILAALGDDRLRFASEEQLAAEAGVAPVTYESGKHRGVGFRWACNKRLRLALTTFADNSRHASPWAADVYRRARARGCDHPHAVRILARAWVRVLWRCWQDRTLYNPLSHRGAQTILRQAGQVASRCRG

SEQ ID NO: 142047 - protein, 428 aa, unidentified
MRSIALDVHRAFCEVAIKEGTKLRSGGRIKTSVAELELFAQSLGANDQVALEASGPALAIKRIIEPHVGRVVVANTRRVRAIAEAKVKTDKVDAQTLCELLAAGFLPGVFSPDEWTRSLRRRLQRRSKLVRTRTRAKNELHAVLARNLKGRPPVTDVFGKAGREWLRGLELAPDERETVDGALRQVDFLDEEVALIERELAAQALASEEIRRLMTVPGVSLISAATFVAVVGDITRFPIQKKLVSYLGLDPKVRQSGETPARHGRISKQGSPEARHMLCEAAWIVVRSPGQLRAFYERVRARRGGQIALVATARKLSVVFWHLLTREEDYAFGRPTLTRRKLRALELKVDKGWRQGKYSGPRVHETRKDREREREFAEQAEIAYRRLVADWQPKKRKGAGVPVGRASSSHLLSEETAARQDTAPDPAL

SEQ ID NO: 142048 - protein, 342 aa, unidentified
MERTQGVRSFVGIDAHSKQCSIKAISAQGEPLLELSVSTHPERLRSALRGLSEPVWVMLESSFLAGYVKENLESEVARVIVCETRENRWIAKSEDKSDPKDADRLARLLRMGEFKEVYVPKGLCRDRREVLRMYQKAQGDVARTKNRIKAKYREHGIFAQGGSVYSPTHRERWLVKLERPNIRLLLESLYSKLANEELFRDRVLEQLVELMSATREYQMLKTIPGVGKILAGVMAAVIGDFGRFSKKRQLWSYAGLGLRSPWSSDPSRARVQGSSGGNRSLKYAALSAANGALRGDNRFSRHYQKMVAEGVDPAMAKRTVARQILATALAMIKSGQVYREAK

SEQ ID NO: 142049 - protein, 337 aa, unidentified
MDIRVIGLDLAKNVFQVHGLDRVGRAVLRRQLKRREVLGFFRNLPPVLVGMEACGGAHYWARELIKLGHAIKMMNAKYVKPYVRTNKDDRIDAEAIAEAATRPKVPTVAVKQPWQQDLQSVHRVRSHLMRERTALGNQIRGLLTEYGIVVAKSPTALKRALPQILEEAENGLSSLMRELVAEQYARMGELERKIAEYDRKLAAIAREHEACGRLMEVPGIGPLSATALVAQVNDARELKNGREMAAREGLVPQHSGSGGKQRLGHISKRGDGYVRTLLVHGARAVLNHAPRKSDRLSRWATELMRRRGRNIAAVALANKMARIAWVILARGARYQPQ

SEQ ID NO: 142050 - protein, 375 aa, unidentified
MNQFIKYVGLDTHKDTIAVAIADAVGGKPRFYGEIANTPTALSKLLKDVSPNGEATSYCYEAGPCGYGIYRQISDSGHDCSVVAPSLIPTKPGDRVKTDRRDSENLARLHRAGELTSVWVPDQEQEAIRDLTRAREDMKHLERQARQRLCAFLLRHGQGYDSGKSKWTQAYWRWLERIKFDHRVQQAVLQEYIDSVKQLQQRVTDLEQSMHEALSDWALAPVVEGLMALRGCRLITAMTIVSELGDITRFDSPRQLMKYLGLVPSESSSGPRIRRGGITKTGNGHVRRVLVEAAWCYRFPARKTAPLQRRAEQTSAAVQAIAWKAQKRLCGRYQTLSKRGLLPQKTCTAIARELTGFIWAIACEAMPRNTIAVNR

SEQ ID NO: 142051 - protein, 407 aa, unidentified
MELVTIHKSVIGLDVHQAQITACALIEMPDGSTRVEQRQFGGFKRDRRELAEWALALKPDEVVMESTGIYWKSPHAALEAVGILAKVVNARHVKNVPGRKTDIGDAQWLAMLSRAGLLRGSFIPPAVLRELRLIARQRQKLVSQLTGEKNRLHKILADGGVRLSVVVSDLHGQSARILVKAIIRGCSPQEVLDQASKRLRASREVLYDAVQGELTDSHRFALGEIMQHIEEIEARLARFEARLLNGLQPEHNALALLQTVPGIDLVGAAMLLVEIGSDMTSFGSADRLASWIGICPGNHESAGKRKSGRARKGNPYVRRLLCEFAHAACRSNCAFKPKFDALMPRRGYKRSIVAIGHSIIRTIFFMLQRREHYRDRLVDYEAMAVKRNAPRWIKALTKFGYLDSASA

SEQ ID NO: 142052 - protein, 323 aa, unidentified
MLIRAQGEHMKKAAEIFVGIDISKAWLDIAVHEREEAFRAGNEDGGIADLVRRMKVLKPTLIVVEPTGGFEKLVVAELTHAGLPVVVVNAKRVRDFARATGRLAKTDKLDAKVLAHFAAAIRPALRSLPSAEEERLTMLLTRRRQVVDMLTVEKNRLVTVRAKMRSDIEAHIQWLANSLKELDKEIEDFVEATPIWKEKDDLLQSVPGVGPVTSATMLGMMPELGKLNRQEIAALVGVAPVNKDSGRKQGRRRIYGGRADVRSVLYMAALSAKKFNPVIKKFYDRLIKQGKEKKVALTACMRKLLVILNAMMRSNQSWRTLPA

SEQ ID NO: 142053 - protein, 365 aa, unidentified
MTTRQRSTSSNTDPPVRREVVLGVDTHGEMHVAAVISPLGKVLGNESFPATAAGYRQLLVWARKRGTVRRAGVEGTGTFGAGLSRYLVTQQIQVFEVNRPDRSARRLLGKSDPLDAQAAARAVLSGRARAQAKSGDGPVHSARIYKLAKDSAVKARTQAINQLKAVLVIADPALREQLSSLGNAELFRTCVTLGPPDGGGDEDAVAQATHMTLRMLAERIEQLTGQINELNQRLTRLVERHVPQLLVPVGIGPDSAVTLLITMGDNPERLNTEASFAALCGVSPVEYSSGRRSTRRLNYGGDRRANAALHRIVFTRLRHDPRTQAYFERRTQEGKTRREIIRCLKRYAAREVFNLVRTVSSVPLL

SEQ ID NO: 142054 - protein, 409 aa, unidentified
MEVLYARCAGLDVHQKTVVACVRIHGPDGRAQTETRTFATDTGALLELSAWLAQSGCTHAVMEATGVYWKPVWHILEESCALVLANAHYVRNVPGRKTDVSDAAWLADLLAHGLVRSSFVPERPTQELRDLTRTRKQLVRQRAQHVNRLHKVLEDANLKIGSYVTDITGVTGRAILAAIVAGETDATRLASLRDPRLKTPPDELAKALRGKITQHHRFLLQMHLDQIEAADRSVALLDAQIEEQTLPLADEVRLLEDMPGMSRTSACVVLAEIGADMSRFPSQRHLVSFAGLCPGLNQSAGKSRSSKLKKGSNWLKTVMVNCAWAAARSKSTYARAQFHRLKARRGAKKAVVAVAASMLTAIYFVLRDRTPYRDLGVSYFDRRDQTKIANRLRRRLESLGFSVQMQPAA

SEQ ID NO: 142055 - protein, 476 aa, unidentified
MKKNKGAKTKTKSEGSKPIHEPNVDAGGIDLSPTEIWVAVPPERAQNSVRRFEAFTKDLIELVQWLVQCGVGMVAMEATGVYWIPLYQLLEDAKIKVRLVNARHVKNVPGRKSDVGDCQWLQYLLSVGLLRGSFRPAQAVCAARSIWRYRQELISTAGQYVQHMQAALDQMNVKLHYVIDDLTGLTGQAIIEAILKGQRDPVQLAKLRDKRIQAPESLIAKALEGDWRKEHLFVLQRAWESYQQIQRQIQQCDQELLAYAGELGAATQVIQPAKTMRLRTDLMGTEPESKVPIQKPPKVRKKTSKNQPQGPWKEELERFFGVDLTAIPGISVLTGLTLMTELGNDLRAFKTEHHFASWLCLCPDNETSAGKVLRRGTRRSQNRVRYALRMAASSLHHDKSYLGDKYRRLRTKLGAPKAIIAMAHQMARIIWTLITRQVPFDLSLFAYEQKLNEQRRLKRLQSSARQMGYQLNPIAA

SEQ ID NO: 142056 - protein, 286 aa, unidentified
MKLIRIGVDLAKDVFQVHGVDRHEKAVWRRKLRRNEWLKVLVATAEPGCEIAMEACGGAHHWARKLQGLGFRVKLIAPQFVKPYVKGDKNDANDAEAICEAMSRPSMRFVTVKSAEQQDIQAVHRIRVGLVEQRTAKANQIRGLAAEYGLVAPKELGQLRIALPCWLEDAQNGLSDRFRQLLSGVWEDLRALDERVGELDREITVIAKSDPLAKRLQQLRGVGPVIATALVGALGNGEQFDRGRQMAAALGLTPRQHSSGAKSACWGSVSEGTHTCAPCSFTARVR

SEQ ID NO: 142057 - protein, 413 aa, unidentified
MAEEIFAWFVGVDCGSEKHQACIVDPQGNIAGEREFPHSGAGLAELGDWLLSIAGAVGNVAIAIEVPHGPVVDSLIDRGFVVHAINPKQLDRLRDRFSVAGAKDDRRDAYVMADSVRTDQRLFRRLHVADPRLIELRAWSRLAEELQEERVRLSNRVHHQLWRYYPQMAKLTDDLASPWFLELWTIASTPAKARQLRKSTVEQLLKQHRIRRIDAEAVLCTLQEPAIKVADGVAEAACIHMRSLIGRLRVVNRELREVERQLDKLCTAIGETEAGSGDCLRRQDIIVLKSMPGVGRINLATLLCEGSGPLSRRDYPALRTLCGAAPVTKRSGKSQIVVMRYAAHARLRNTVYHWARVAIQHDPKSRSRYVALRRRGHSHGRALRGVADRLLGLACVLLQRQTPFDPQFGQSAT

SEQ ID NO: 142058 - protein, 351 aa, unidentified
MEMVGGLDLHRRQITFRTVDLRTGELQRGKIYPGAREAVREWLDQFQSGTDAHFALEGTTGWRFVVEEIERRGFTAHLADPAELSERRGPKRRAKTDHADCELMVNLLLEGRLPQSWIPPAHILELRALVRLRKTLVDQRIEWQQRLQAQLFHQGVVPGLHLCRPEDRRRLAEMEMSPAGRQTMQRGLVMLDAFDSQLKPLSAQVVSLAKAQPGCRALEQLYGVGWLTSAAILAELGDCRRFTSADQAVRASGLDVTVYESNGKRPGGHLARQGPQVLRWALFEAAQCAARRSSPDHDYYVRVRDRIDHNRACLSVARKLCRRACHILKDLGEAAMAAPELPSASHEPKAA

SEQ ID NO: 142059 - protein, 349 aa, unidentified
MPMLADVVDAVIGVDTHTQTHTLAVCAPTGALLHQVTIPASDDGHAHALELALAAGGRVVFAIEGTRSHGIALTRAVQGAGLVVLEVEQPSRKHRRGKGKSDDIDAVLAARAALGYDVDKLPTPRADGTREALRILLVARRDATDERTAKINMLRALLRTGTPDDAALATGKMTKTRLAAIATRVGKPGDDTAAAVRLAQARRLALRISELDRELRDNDTQLRQLVTDLAPGLLDRYGIGPVNAAQAIVSWSHPGRCRSEAAFAALAGVNPIPASSGLHQRHRLNRGGDRTLNAALHNIAMIRMRSCSRTRAYVARRRAEGKNDREIRRCLKRYIARELYRTLNREITA

SEQ ID NO: 142060 - protein, 400 aa, unidentified
MMTPDDIDVWVGLDVGKSAHHAHALDHDGNTLYDKPLKQDEKAIRTMLGKLSKHGRVLLVVDQPNTIGSLPLTVARNMGIAVAYLPGTAMRRTAQLLPGDAKTDRRDAHVIAWAALKLPETLRDAGPDDETLAALKLLAGHDEDLAHESTRHVNRLRSLLLQTHPAFERALKGERITRDATLALLERYGGPMGVKRAGIEDVKDWAKSNGLRAGRIIDDMFKAIGEQTVTVPGTLMAETIIPSIAHDIKTIRARGRGVGRQVEKLLEDHPLLTVLTSMPGIGVRTASNILLGIGGDIANFKSSAHLAAYAGISPVTGQSGTSIKGERPSRRGNKRLKNALWQTAFVASTKHPPSVAYYKRKREQGKHHNAAIICLARRRCDVIYSMLKNGTLYQEPALVA

SEQ ID NO: 142061 - protein, 425 aa, unidentified
MKNTQNQKISQIKNETLVVGIDVAKETHYARAFDYRGIELAKLLKFSNTAEGFKLLDQWMQDICKQKGKTEIIAGFEPTGHYWFVLGDHLKRQGHKLAIVNPFHVNRTKELDDNSPSKNDSKDCKTIAMLVKDGRYREVYIPDDIYQELREAVAERERLQEQLTSIHNRVVRWLDIRFPEFQKVFKDWRRNAALITLRSFPTPEKIVEAGARKICETWKTEMKRPSFKRAEALVKVASNSIGRTSGKLASEASLKNLLAQYDLYCKQYEGLEQLMLELLMQVPNASKLLDIKGVGLSTAATFVGEVGDISRFQDPRQIQKLAGFNLVANSSGKHKGKTTISRRGRKRLRHSLFFAMIAILAHNPEFRSLHQRNLTRENNPLNKMQSIVALCGKLIRIFYALLSKGVDYDPEKMLNDIHQPVQQAA

SEQ ID NO: 142062 - protein, 414 aa, unidentified
MKLFVGIDVSSQELEACLMNPDGEKLDTLKVNNDLQGASHLRDRIVAAADKLSASEIHIGLESTSVYSWHPAMYLHQDPALKARNAKVFTINPKLISKFKEAYPDLDKTDRLDAWIIADRLRFGRLTMTVVMQEQYIALQRLSRMRYHLIHSLTREKQYFLQNLFYKCNAFTSEVESSVFGHAILEMLSEKYSLDDIATMDVADLADYLKEKGKNRFPDPEHVARCIQKAARDSYRLSKVVEDSIDLVLGVSIQTIRSIQAQLKELDKAIERILDGMTGAKCLRSIPGIGNVYAAGILAEIGDIERFDNQAAVAKYAGLTWRRHQSGSFEAEDTKRIRSGNRFLRYYLVEAANSVKNREPEFGEYYRKKYQEVPKHQHKRALVLTARKLVRLVDALLRNDQLYTPRRKVNSAKG

SEQ ID NO: 142063 - protein, 338 aa, unidentified
MKLYGAIDLHSNNNVTVLIDEQDQVVYQKRLPNDLPLIAQQLSGYRDRLQGIVVESTYNWYWLVDGLMDQGHRVHLANTAAIRQYEGLKYTDDHSDARWLAHILRLGVLPQGYIYPKEERAVRDLLRKRGQMVRQRTANLLSLQNLITRNTGSSIRSNRIKTLDAEQVDDLLPNSDLALAVKANLAMIQCADGQIDILERTVTDRVKLRAEFSFLKTVPGIGQILALTIMLETGEIKRFPTVGDYASYCRCVGSQKLSNGKKKGSGNTKNGNKYLAWAFVEAANFAIRYNARIKSFYQRKKAKSHGVVAIKAVAHKLCRACYYIVRDQVPFDVAKAFA

SEQ ID NO: 142064 - protein, 352 aa, unidentified
MKKIFIGIDFAKEKFDAAIIEACGLKEFGDRQYGTFSNDRKGYRQFIKWIKANSGGAVEDEWLFCGEDTGSCSIGLSKWLYGKGFDIWIENAYSIRHSSGIHRVKTDRADASMIAEYAWRHQDKAMLFEPLSESLTQLREVFLYRHKLVQQRVAIEVRKKDKESSGEASRAMSFIKRKSKHLMAEIDKSIKECDEMIDRIISEDPELAENYAIVTSIKGVARQNGACLLIYTNNFKRFDMDARKIACYYGVAPFGKESGSSVHSPAHTSHFANKLIKALLGQAAQIARIYNPEIREYYERLRTKGKKHSVAINNVKNKLLRIIVALVKKRTFYDPESYKFYRDRLNAQFMHS

SEQ ID NO: 142065 - protein, 366 aa, unidentified
MMVLGADTHKRSHTIAAVSAATGEMRGEKTVAVGARGFAALLIWARGLDGGRVWALEDCRHVAGSFERFLIARGERVLRVPTKLMADSRRAARTRGKSDSIDAIAVARAALREGIDTLPAAQLDGPELDLRLLVDHRERLVRQRVGLNNTLQWHLHDLWPELELPGGALFSTKWSAKIGRRLARAEQTMRVRIARDELRRLRELTQSIRALEAEIAQLVARVAPQLLSEPGFGPLTAAKLVGEIAGAARFATDAKLARAAGIAPDPGQLGQDQPPPAGPRRQPPDQRRGPSHRHHPRPLPSRNPRLHRPQALRRQDEPRRRPLAQAPPRPPHLAPPATAHPHPEPDDHTHFFDIGAAHAIATACLP

SEQ ID NO: 142066 - protein, 344 aa, unidentified
MSKIVADLSAVTTVGVDLAKHVFQVHAVDASGKVIAAKALRRRDLLAFFASLPPCLVGMEACGSAHHWGRELMALGHQVRLIPPAYVKPFVKRQKNDANDAAAIYEALSRPGLRFVKVRSIANQAVLMQHKAREMLAAQRTQLFNGLRGHLAEVGVIAAQGGCNMRSLGALIYEGDPAIPEAVRTSLMPLVAQIGHLDEAIKAIDADMAVQAKADPVSNRLMTIPGIGPVTASALVATIGDPASFSGPREFAAFLGLVPRQHSSGGKARLGRITKMGNNYLRKLLVVGAHAVLHHQARHDDPLRNWARKLLATKPFKLVAVATANKLARMAFALMTRDTRYAGA

SEQ ID NO: 142067 - protein, 392 aa, unidentified
MYIIGIDIGKNHHEASIVSPKGRQIGHSLRFATTHKGADSLISFIFKNIGDSPCVFGMEATGHYWYPIYSFLKFKGYTIYVINPIQSDSLRKMYIRQTKNDSIDSFLIAEVIRFGQFEATSMADETILAMRQLCRYRDSVVSSGTEIKLRISTIMEQIFPEYGKQFSSLWLGTSMGILEKYLTPENIQNAPIDELFEIIKDKSHNKLTIKKSVSIKDAAADTFGIKIAQDAFAFQLKQLIDRLNFLNEQLEALDHEILSYYEKFDCYLHTIPGIGMIAAATILAEIGDIHRFKNSSALVTFAGIDPTVRQSGEFNSIHNHMSKRGSSYLRHAIFLAATTCSFHNSPLNAYYKKKREQGKHHLTATGAVARKLTTVIYAVLRNGKPYEPKSFC

SEQ ID NO: 142068 - protein, 378 aa, unidentified
MKNDNRYVGLDVHAETIAVAVVETDGEVRFLGTIPNRAETVRRLVKRLGPANRLRFCYAAGPTGYVLYWQLTGLGAHCDVVAPTLVPVKPGDRVKTDRRDAEKLAALYRGGHLTPVWVPDQAHEALRDLVRAREAAKSDQLRARHRLQKFLLRHGRRPPQGIKAWTQKHLDWVRREVHFEALAQEAVLVDHLAEVEHARERIRRLEGAIDTAVEAAPGRMRAVIEALQALRGIATVSAATIVSEVGSLSRFRKPRQLMGYSGGVPREDSSGERVRRGGITKTGNAHLRRIVVEAAWSYRHRPTVRGELVKRQAGLSEEVKAIAWKAQHRLYSRYRRLIGKGKAKQQAVTAVARELLGFIWAIGVHVEQQHGTAARHAA

SEQ ID NO: 142069 - protein, 318 aa, unidentified
MQIKSIGIDLGKTTFHLIALGNRSQVVIHKKFSRSQLLVYRANLPSSLIGMEAGVGSHFLGRGLREQGHEVRLIPAQFVRPFVKSNKNDYRDAEAIAEAVERENMRFVPIKTEDQLDLQALHRVRDRLVARRTRVINQMRAFLLERGISFRKGPASLRRQMPEILENADAKLSTAMRRLLDFLWQEWKGLQLQIETLNTELEQIASSDPSCVRLQQIPGVGPLVSTAVVSAIGNGAAFKKGREFAAWLGLVPRQWSTGGKAKAAGHQQAGESVSAQDVHSWSTGCGLTCQTRRLQSRSLDERIGNQSRAQPGDRSHRQ

SEQ ID NO: 142070 - protein, 406 aa, unidentified
MMNAVGIDVSKGKSTVTIRRPGDEVILPPCDVRHTRSSIDTLINEIKSLEGETKVCMECTGRYYEPMATWLTDAGLFVSTVNPVLIKDFGDDSLRAPKTDKADSKKIARYTLDRWTKLKQYGLMDETRNQLKTMNRQFGFYMDQKTSMKNNLISLLDQTFPGANDFFDSPARSDGSQKWVDFVYTYWHVDCVAGRTLDVFTEHYRNWCSRKGYNFSAAKAKTIYDVSKDLIAVFPKDDVTKMIIHQAVDLLNAASKTVETLRAKMDETASRLPEYPIVMDMNGVGPTLGPQLMAEIGDVMRFEKRGSLTAFAGVDPGKNESGQYAQKSVHTSKKGSPHLRKTLFQIMDGLIQRSPVGDAVYDFMDKKRAQGKPYYVYMTAGANKFLRIYYGRVKEYLESLETNESE

SEQ ID NO: 142071 - protein, 414 aa, unidentified
MELLHERCAALDIGKKDLKACVRTPSPKGKRSRRQEIRTFATTTNALLELRDWLVAEQVSLVVLEATGDYWRGAFYLLEDQLNVILVNSAHAKGLPGRKTDVCDAAWLCQLGECGLLRASFVPPEPIRQLRDLTRYRTTLTAERSREAQRLEKELEDAGIKLSSVATDITGVSGRAMLAALIDGERDPQVLAEMAKARMRPKIPHLVQALTGNFGEHHAFLCRLHLQRIDELTAAIAELSARIAEQMRPFARQLEHLMTIPGVGQTVAEVIVAETGTDMGRFRTGANLASWAGVCPGHHESAGKRKSGKTRHGDRWLTGALGTAAMAAARTKDTTYLGARYRRLAPRLGKKKALVAIEHSILVAVWHILTNNVDYHDLGGDYFARLDPERAMRRIIRQANSLGFTVRFDPIQAA

SEQ ID NO: 142072 - protein, 370 aa, unidentified
MLNTTTFVGLDVHARSIKAVALDAMTGEVRSATFGYDAAEVAGWVSSVDPSAKCAYESGVTGFDLQKRLSSMGIDCVVGAVSKMIKPSADRRRKNDRNDAEFLARMLSVGNVVEVWVPDDECEAARDLTRALDDAREDLKRCKQRLSKFLLRHGLVFSETNAKGQRKKNWTAAHWAWIRSISFPDKADDEVLAYYIDAARQAMEDKARLERLVEAEASKPRWKKRVDSVRCLKGIDVTSAADLVFEAGEFSRFKNARSFAAWIGLTPSEHSSGESVRQGGITKAGNKHLRRVLVESAWHYLGCSPHSKDLAKGQAPDPGARRHAAKGVRRLVGRRAAMLERGVHKNKANVATARELACWCWAIGRMVENG

SEQ ID NO: 142073 - protein, 365 aa, unidentified
MSFAHADGRGPTETEVPAFMKVLIGVDPHKGSVAVAAVDEASGELLERASFPQSCAGLRALERWAQRFSERRWAVENAAGLGRHLAGRLAATGESVVDVPPKLSARVRVLSRGNARKNDGLDAFATALAASRNGQLAVVDPEATSELLRLLSERREDLVAERTRALNRLHGLLRDLLPGGVGGTLSANRVARILRGVRPQGASASLRRRLASEVLRDVRTLDRKIADLNGRIEAEVEASGTTLTEIFGVGPVLAAKIIGTVGSVARFPTKANFASYSGTAPVEASSGEVVRHRLSLAGNRHLNNALHMVAVCQARSDARGGAYYRKKIAEGKSRKEALRCLKRRICDAVFKSLVADSRAPSRSAA

SEQ ID NO: 142074 - protein, 340 aa, unidentified
MNLIAVGLDIAKSIFQVHGVAAHGRSPLRKQLRRSEVLRFFAKLPPCLVGIEACHSSHFWGRELSKLGHRVRLIPTQYVKPYLLGGKNDANDAAAICAAVMRPDMHAVAIKDAEQQSLQSLHRMRQRLVLERTAKSNQIRSMFAEEGVVFPVSITHLRRSVSNAIGDPRSAITPILRRLGTMYLEQLAALERWLAELNEQLHQIATERDDCKLLTSIPGIGPIVATALVGTVGDPQQFRNGRQFAAWAGLTPRQRSSGGKISLGGITKRGDVYLRTMLIQGARAVVRFVTRRTDRQAVWLQRLMQRRHKNVAIVALANKIARVAWAVLTRRTAYNLCQQP

SEQ ID NO: 142075 - protein, 356 aa, unidentified
MNSLTDLREVVDVVIGVDTHVLTHSAAVIDAATGGVLGEITVEATAQGYVELVAFADEYATLRAWAIEGTGGHGAGLSRHLTGRQEIVVELDRPKRAQRRNGAKSDPLDAIRAGREALARTRLGTPRSGGDRQALSVLLAARRSAVHAATEAQQQVFSLMIAAPEPIRARFRGQKLPGMLTTAAGLRVHPSWDVETTTTVIALRSLARRFRVLTKEAAEHQKAILAIVRSWRPDLLEQLGVGPIVAATVLCAWSHPGRIHSEAAFAMLAGVAPIPANSGQVTNRYRLNRYGDRQLNRALHTVVQSRIRYHDPTRDYVARRTSEGKTGREIKRCLSRYIARDLYRLLESGPTWLDGP

SEQ ID NO: 142076 - protein, 317 aa, unidentified
MSTAKHFYGVDVAKAALVIARKDQPVTQTIANEAGAIRAWLSQLPPGSIVAMESTGRYHRLLAELATAQNCLAYVLNAKDVSFYAKALGGRSKTDKVDAHVIAHFIAEQHEGLHRWEQGEPHATEIWELLLRRAEVVKHRVSLRMAMRDLQAMAQPAEQFDDSFEMLLYAIDERIKELRGQDVQMSEVSTRLQTIKGIGPQGGSLLAALFSRIPFRNADALVAYSGLDPRARDSGQKKGRRRLSKRGPAPLRRQAYLMAKAASRTPVFKPLYEALKARGFAPTQALVIMARKLLRVAFAVWKSGKPFDEARIAAARA

SEQ ID NO: 142077 - protein, 326 aa, unidentified
MADAPRPKNAPPAAVVGIDVSKHRLDIACLHGDAPLPASVENTPEGHAALVEILCQNPPRLIVLEATGGYQRGVVAALATAGLPVVVANPRQVRDFARGLGILAKTDAIDAMVLARFAEKIDPPVRNLPDAQAQALADLLARRRQLVELRTAEKNRLQQASAPRIKASIRAVLATLDAQIAALDDDLDGHIRRSPVWREKENLLLSVPGVGAQTARTLMACLPELGSISRQAIAALVGVAPINRDSGSMRGRRTTWGGRKDVRCMLYMATLVASRHNPVIRAKYQKLLAAGKPKKVALVACMRKLLTILNAMLRTGQPWRNSCETA

SEQ ID NO: 142078 - protein, 313 aa, unidentified
METAPVFVGVDVAKLQLDVAVGVEGPAWTVTNDDTGINALLEDLRARPCALVVLEATGGFEVAVTTALAAAGLPVVIINPRQARDFARATGQLAKTDRLDARILALFAERVRPEPRPLPTDAARLLDALLTRRRQLLAMILAERNRLGFAPAPLRKPIEKHIRWLQRELESVDSDLGRTIQSSPVWRARETLFQSVPGIGPVVSRTLIAELPELGYLNRKQITALVGLAPLANDSGKHKGRRLVFGGRASVREALYMAALVASRRNPTIRTFYQRLRASGKPPKVALTACMRKLLTTLNAIARTGTLWSADYA

SEQ ID NO: 142079 - protein, 406 aa, unidentified
MSPEKPDPQRFIGLDIHKHYLIAIGVDEQLNQVLGPQRVRLAYLEGWIRRTLTPGDAVVIEMTTNTWSIYDELLPHVHSVTVVHPPHVALITRAQVMTDKIAASHLARLHAKGLLVGIWIPPQEVRDRRAIVAQRQKMTRLATQAKNRLHALLHRHHLLPPEGNLFHPEQRSWWLGLPVSPLEKVRLFSDLETLAFAQGQADNLKSCLVSIAAKDERLPLLIQLPGISVVAAMTILAAIGDITRFPEAKKLVGYAGLGARVHDSGMTTRRGRITKAGRKDLRTIMVEAAHTAANTHPHWKAELARLEPRLGRNKSIVAIARKLLVAVWHVLTYQSVDRHAEPERLARKFMQTAYVLGKANRPSGQSTGQFVRHHLDRLGIGAELTEIRWGTKKPPLPLPPPSLRGK

SEQ ID NO: 142080 - protein, 317 aa, unidentified
MSRVSFEQVILRGCGLDVHKDVVVATISGEGLSTETRSYKTFSSSLTELKEWLLSNGITHAAMESTGVYWKPVYKVLECPRMKVWVVNARHIKYVPGHKTDKKDSAWICKLLLAGLLKPSYIPEREQRELRDLTRYRNKLIQHVSSDKNRIVRILEDCNIKLSSVMSHLDGVVATKLIDILIDKGHVTMDDIACVYHKRLEASPELLYQACEGFIEPHHTYMLQTIRQDIEQTESIISNLTSRIKEVLSPYENVIDLLRKIPGLDRKTVEDLIAEIGVDMEVFPTEKHLASWAGICPGNNESAGKKNVEEPLMATNS

SEQ ID NO: 142081 - protein, 337 aa, unidentified
MNQSLYVGIDVSKAKLDVALTHNGKEILSHATFENNLQGFKKLTSWTKKQSKKFEKIHYCMEATGIYSEEIANYLQDQKNSIVSVVNPVQPKAFAGSLLLRTKNDRVDAGMIACYAAMHNPPQTPKVPEDIKEFKRLVRHLNYLINSRAKEKTKLESIKSKEIALLVKETIAHYNKQIVQVEKYIKTLINSNPELKESIKLVDSVPSIGYKTACNIIAEIHYTSRDNLDVKSEIANAGLSPQEKLSGISVKGKSKICKKGNSYLRGCLYMPAMSAISRKSILGDFYRRLIDNKKLKMVALVAVMKKMLAIAIGVLKNHKPFNPNWSKLKQEEFVMAY

SEQ ID NO: 142082 - protein, 481 aa, unidentified
MAKRSKRRCDTLPVLHPDAAGIDVGASELYVAVSGDRDPQPIRSFPTFTRDLHALADWLVQCGIRSVAMESTSVYWIPVYQILEARGLEVYLVNAQHVKNVPGRKTDVSDCQWLQYLHSVGLLRASFRPPGFICAMRSLWRHRGSLIQMAAEHVLHMQKALDQMNLQIHRVLSDITGVSGLRILDAILAGERNPLTLARLCHGGVKSSEDVIAKSLEGDYRPEHLFALRQSLAAFRYYQQLVLEADQEIQLQLAELKTAATAQPTTPARTKANPHYARHYEPRTFDLRGELYRVFGVDLTNVPGISALTAQTILCEIGTDVSRFRNASAFASWLGLCPEKKVSGGKVLFTKSRRVRSRVATALRMCAQSLHHAKDYLGEFFRRITRKLGRPQAITATAHKLARIIFHLLTTKEAYNESVFHKTEEETNSPRTISTSEASCPTWLSSHPRGERVMFLGRGLHEKCELIHFQMDCLNSTKQGC

SEQ ID NO: 142083 - protein, 355 aa, unidentified
MIIIGADYHPGFQQIAFVDTDTGEFQERPLRHREEAEKFYRDLAAQGMKVRVGMEASGHARWLERLLAELNFELWIGDAAEIQSKRVRKAKTDREDARLLLRLLLEDRFPRIWVPSWENRDLRQLLWHRHRMVQARTRIMNQLQAVALNEGLRSKKKLWRESGRQQLESFRLAPWASRRRHDLLELLDRLNPMIAELNQAVEQEVERSPAAQRLMTHPGVGPLTALAFVLIIGETKRFGCGKQIASYVGLVPLEKSSGNRRRLGHITKQGSSMLRFLLVEAAQVTVRSIPEWRGKYFHLAMRRGRKIAKVAMARRLAVRLFWMWRKQWDYEQLKKFGSHAGQPGSGDGVYTTPSN

SEQ ID NO: 142084 - protein, 347 aa, unidentified
MDHYAGIDVSLECSSVCVVDASGKIVREGKVATEPEALIGHFGSLGVTVVRIGLEAGPLSQWLYAAMQASGLAVELLETRHVRDAFKAMPVKSDRNDARGIAQLMRLGWFRPVYCKSLGAQELRAVLTARKLVQSKLHDIENSLRGILRGFGLKVGHTTARSFAERIRELVAGQATLQTIARALLAAHAVLLREFNGFEKQVRLVARAHDKARLLMTTPAVGPIVALTYACAIDDPARFKSSKQTGAHFGLTPKKYQSGNTDITGRISKIGDAAVREALYQAAHVMLTKPLKGCSQLKSWAMRIARRAGMRKAKVALARKLAVIMHRMLADAKPFNAAASTKPIAAA

SEQ ID NO: 142085 - protein, 476 aa, unidentified
MPVVLGSGNEYSDEDQSALELIRSGYKEFASGSSPRERPYPLLSNMNKSGSEQPLSSKVAAYVGIDWADLKHDVVLRSAGEQQAKPEHQVIKSELNALTDWIAQMHERFAAKGKVLVCLEQSRGALIYQLMAYELFELYPINPSQLANYRRTFFSSGAKDDQPDADLLSELVMCHRDRLKAWKPDDQMTRELASLNEGRRNAVDRRTELANEIKSQLKVYFPVALQILDNDLTTALAADLLVQWPTLAELQKVSSGKLRKFFYGHNSRQEKKILERLAILREAKPLTTDLAIIRPNALRVKLLAQQLKSLLPFIAEYERRIAELFGSHPDRFLFDNLPGAGPALAPRLLTAFGTDRDRFEAAGDLLSLSGIGPVRIASGQKTGKKASVHCRRACPKFLRQSFHEFGQCSIRYCPWAQACYQAQRSRGKGHHAAVRAVTFKWIRILFACWKQRTPYDPQRYDQALQTRGSDYAPVTA

SEQ ID NO: 142086 - protein, 420 aa, unidentified
MKESKISDFSTLVGIDWADNKHDICEQTLDHKGYQYSVISSSPSSIHAWALDLKKRHPNKPVAVACELQKGPLVYALAKYEHIILFPVNPLTVAKYRNAFTHSGAKDDPSDARIQAEILENHMNKLRLITPDTADIRALAQHVENRRKLVQDRVDLTNKITATLKIYFPQILEWFPEKDTAIFCDFLSRWPSLSTAKKARKSTLLSFFHQHNSRYPEANERRIESIKEAIALTDDKAVIEPNQLMIEIFISQLKLLIGSIVQMDKVIRKYYRAQSDSVIFDSLPGAGPQLAPRLMAAMGSNRDRYENAAEIQKYVGVAPVIERSGKKFWTHWRYSCPKFLRQTFVEWAGQTIKYSFWAKAYYHQQIEKGKSHNAVIRSLAFKWIRIVFKCWKERKPYDESKYLEALKAKGSPLLNYAVNG

SEQ ID NO: 142087 - protein, 412 aa, unidentified
MSNPLVVGIDVHRKTNTIALMEQTGREVAPRLTVQNNRPGTAALAEKLQAAVQDGGYDAIHVAAEATGWYWWHLFHTLDQDAMLHQKPLLLYPFNPRLTANFRKTYADRDKTDLLDAAVIADRLRLGRDLPQPYACDEKCLALRFLTRHRCHLVHQIVREKAYFLAHLYLKASEYTRLQPFGNVFGAASRTLLQDYANLEEIAAIPFDDLVEIIDQLGKRRFADPKENARTLQAVTEDSYPFPAGLQAPVNLILRQSLQQITSLQRLVQRTETAISEALQDTPNTLATIPGLGLVYAAGMASEIGDPARFDNDQAKVAKFAGLSWRQTQSGDFQAEETRLTPSGNRYLRYYLCEGANSVRMHNAEYRAYYERKYKEVRLHQHKRAIVLTARKLVRLVVRLLTTNQPYQSRRT

SEQ ID NO: 142088 - protein, 355 aa, unidentified
MQKYKVSFKGQNIYVGIDVHLKTWHVTTLTESGCKYSFSQHADAKELFDRLNKKFPEAHFKSAYEAGFCGFSAHYALTEQGIENIVVHAADIPTTGKEKALKTDAVDSEKIAWALKRGELTGIYIKDKRYMDDTNLMRLRQRFIMDLSRQKNRTKHLLYTQGVTYPERFRKNSTHWSRNFMKWLREEVVLLSEQKMSLILLCEQVENTRKAILKVTREIRRLSTTDRYKENYNLLITVPGLGLITSMSVLTELDNNIMRFPNERSFVAILGLIPTCHDSGDRKVSGEKINRGNKHLGPLIVESCWIAIQRDIELSAYYSKCCQSMKPHKAIIKVARKLACRAYAVLKTKARYALP

SEQ ID NO: 142089 - protein, 421 aa, unidentified
MRPKGSDHQDQCYAAWVGFDWGDQEHVWALQWTDTGERERGRLEQTPEALDVWIGRLMSRLNGRRIGVAIEQKHGAVVWMLLKYECVEIYPIHPQTAGQFRQALYPSGPKSDPADGELLLDLLIHHRDRLRPLQQDDEPTRRLLLLVEQRRHWVEDKKAHGNRLSARLKVYFPQVLTWFDDIGAAPVLDLLARWPSLERLQKAKRKTLEAFLRKHRRTAKEASAWAQQVSAAVSAIQDSVLLDCYVLEVTALVVLLKQMRSSIKEFDSAIAETSHRHPCWEIAQSLPGAGLVMAPRLLAAMGNGKRYQNAHEMQCASGIAPVTVASGRTRIIQFRRACPKFLRQTFHEWAQHSMKSCRWARVYYDQIRASGKRHNVALRALAFKWQRILFRCWKDEVPYDEARYVASLKKRNSPLAMWLPE

SEQ ID NO: 142090 - protein, 452 aa, unidentified
MNQERLQRNKQIVDSKIIIGIDPAKAKHQAAMINVDGVQIEKSFSFSVSAEGFHRELWKNIAKSLPQCNPQSVVFAVETSCNLWQTVAFYLHCVMGYTVVLISPLSTYHERPILNLDFSRTDPKDAFLVASLARKGAFTLYEHFSAHSNALHHLGITYDKLRQDLAQNRSRLRAHIERIFPEFLQVFEPDTETALYLLKNYLFPDEFLGMDIDAESRAIEKISRQQLGRASLVPLHALAHNSIGILKADQERLADRLTLNAWIAIIEALRLQIKLIHQQLVRLAEELPAYPIVTSLSGVGETLAALFLANVRDLSRYDHFKQLEKLAGANLRLSQSGRYIGSRHISHIGNRRLLWVLYKMTEETAKRVPEVRSKYLKRQIKRRKHRKNVIAAIPQLLQLILALNKGKRRYEIREEAVAEMKTLEQRYIAIKAQKPSVPRKPLTLRRVNASVL

SEQ ID NO: 142091 - protein, 322 aa, unidentified
MKTITPKNKYSRVIGVDIAAEKVDIHDTQGKLSGVVQNSCAAIDKIAGKLKRSKSVLVVCEATGGYENALVESMHRAGVNVAVANPRQVREFAKGHGYFEKTDKLDAAIIAKFGSDVEVHTMPPQSEEQSSFRALVRRRSQMLATIRAEKNRLAQTRDRNTKDLIKETVSHCENQLKTLDSMIQASLAEQANDNPDIDIMQSVPGVGTVTTATLIAELPELGSLNRAKIAKLVGVAPMANQSGKSDKQRVVKGGRRQVRSVLYMAALVAASHNPVIKLFYNRLLSKGKLKKVALVACARKLLTILNDMVRNQEPWRTEEVAN

SEQ ID NO: 142092 - protein, 352 aa, unidentified
MEKNNKLDFGGQHIYVGMDVHKKSWSVSIHTEQFEHKTFTQPPEVEKLTYYLERTFPGATYHTVYEAGFSGFWLHDKLREKGIDCMVVNPADVPTKDKERAGKTDRVDCRKLARGLRNGEIKGIYVPPRVKVEDRTLMRTRQSMVRKQTRCKNQITSILFFYGIVIPEEGRWSRRFINWIESIRMERASGDFALKAHLEELKHLRQIIANLNKAILSLSRAEEYRADVLLLKSVPGISTLTAMILLTELADLSRFASLDKLASYAGVVPDIRSSGETEYVAGITFRRNAALRALLIESSWIAVRKDPALIMVFNKLSVRMKKTKAIVHIARKLLNRIRFVLKNRQEYVPAVV

SEQ ID NO: 142093 - protein, 433 aa, unidentified
MTTRQRALFTEASVSGETKEVTGKVLFAGIDWASTEHAVAVNDDAGRALASFMVEHSAEGFDKLVARLRALGEPGGLTVAIERPDGRLVDRLLEAGHPVVAVSPNAIKAWREGEVVSGAKSDPGDAAVIAEYLRLRFHLLEPLQPFSDHTRALRAAVRARGDLVAQRTAAHNQLEATLDAFWPGAKKVFSDVTCKIALAFLRRYPTPASAAKLGEKQMAAFCRKHGYSGGRSAAELVERLRRAPAGITAVAETAARKAAVLAYVGVIASLNAAIKDLDKEVATALGEHPDGEIFASLPRSGLINAAQMLAEWGDCRQAYGAPEAVAALAGMSPVTKRSGKYKAVHFRWACNKRFRTAVHTFADNSRHGSDWAAGIYAQARARGADHPHAVRILARAWIRVIYRCWSDGVGYDPAKHKAAVALAARDKPAPQAA

SEQ ID NO: 142094 - protein, 360 aa, unidentified
MFTERTSVGLDVHARSVAAAAIDGVTGELVQAKLTPAHDHIRDWLLQLPGPVAVAYEAGPTGFGLYRTLTGAGIRCEVAAPSRLMRPSGDRIKTDARDAIHLARLLRIDEVTPVAVPTVEQETARDLVRAREDVRHDLMSARHRLSKLLLRHGIVYYGGRAWTGRHDAWLQAQRFEVRASRVTFDETYDAVLTITARRDRLDAEIEAMAADSEFTPLVRRLGCLRGVATLTGFALAVELGDWHRFTGRSIGSFLGLVPSEESSGGSRVQGPITKAGNTHARRLLVEAAWHHRTRYAVGKGLRDRWALAPAAARARGDQGNRRLQKRWASFDRREKRPVIANTAIARELAGWCWSLAVLDD

SEQ ID NO: 142095 - protein, 410 aa, unidentified
MQLYCGIDWATEHHDIAIIDGDGRVVTRRRVDNDAAGFAELLTLLAQAGDTSGSPIPVGIETDHGLWVAALRATGRAIYPINPLAASRYRARHTVSGAKSDATDAVLLANIVRTDRDAHRPLPADTELAQAIRVLARAQQDAVWARQQIGNQIRDLLKDFYPAALVAFAELPSGGLARADARTILAAATTPAQAAKLTPARLRRLLVKAGRRRDLDRDIERLRQVFTDTYLHQPPQVEAAMGIQLTALLRQFDAACTAADDLAEAATAHFERHPDAAIITSFPGLGNLTGARVLAEIGDDRARFTDARGLKAYAGSAPITRASGKKTVVLHRHIKNRRLAAVGPIWALASLRASPGARRHFDNRRAAGDWNHQAQRNLFNKFLGQLHHCLQTRRLYNEHQAFPPPLDLAA

SEQ ID NO: 142096 - protein, 417 aa, unidentified
MSIDPGVTPVRVTAGVDWAKDDHAVCVAGDQGEVLERFTVRHDAAGLKRMAVRLLRTGAGQIGIERSDGPVVDTLLQAGLTVFVIPPAQVKNLRSRYGSAGNKDDRFDAYVLADVVRTDVRRLRPMARDSDQTSALRTSVRARRDLVGHRVAAANQLRAHLQIVFPAAATLFASIDSAITLTFLDRFTTQEQADWLSPRRLAAWLASAACSGGTGPCVLHARLMAAPRGATGQYASIHAGTTLALVAILRTLNTQIQVLAASIGEQLAAHPDAAIFTSLPRAGIVRAARLLAGIGDARGRFPTRDSLTCLAGVAPSTRQSGKVKSVTFRWGAGKQLRDALCDFAGDSRRASPWATALYDKAIARGCDHPHAVRILARAWTHVIWRCWQDNLPYDPAAHSSLQALLNQDQPAAARTGA

SEQ ID NO: 142097 - protein, 423 aa, unidentified
MAYRIAGIDVHKRKLAVVVADVEVEDEYQFERRWYGSNPEQLRVLSEWLLEQQIEEVVMESTAQYWKPVWGALERYWKPRRQSREGAGRMSGTLHLAQALSNRGRRGRKKDFRDAERLVKRLVSQELVLSFVPDSEQRMWRTLTRTRYQRTGDKVRLQNQLEALLEEAHIKLSSLVSDLLGASARRMLKALADGETDPAAVAALADQRLRATPAQLHDALGACTELNPVYRRLVKMTLEGLQFVEQQIGQLDQEMASLLRQHQDAVERLAVVPGLGVDSAQQIIAEVGAKAATFPSAEKLSSWVGACPGEEESAGVNRSRHSPKGNRQMRRVLNQAANAAVKHKGSIFEIAYRRLVPRLGHNKTIGVIAHRLCHLIWIILHKGVRYEERGPAVSEKSRQRRTARMVRTLRILGYRVEPLTNPT

SEQ ID NO: 142098 - protein, 332 aa, unidentified
MMAQNDLVVVGLDVAKDKVDACIRSLSQRQTFPSTAEGRRALIRWLRRHKVSKAAMEASGGYERDWARALREAGIEALIVDPKRVRNFARSAGRLAKNDPIDAQMIAWFAEIFVEAKGQTYDAEREKLAGIVSARQFLIEMRTRLRNRREHSVPEAVRKMQTQLLKSIAIELAKIEAAIAATIKAVPAFAERAAIIESVPGLAKGTSGGLIAGMPELGQASNDGAAALLGAAPYDNDSGKRRGERHIQGGRRWVRNLFYMACMGAATRHNPVLKAFYDRLIAKGKPKKVAIVACMRRLIVILNVMIARGEKWDASRYQLSEPARLPPSACAA

SEQ ID NO: 142099 - protein, 352 aa, unidentified
MQHFIGCDVHTRYQVVAWIDAETGEICKRRLEHGGEEVRKFYGQFPRGTVVGIEATFPALWFERLRAELGHELWVGDAARIWASEVRYQKTDPRDTENLLGLLHSGRFPRIWVPSRAERDLRQLLVHCMKLVHTRTQGKNQLPALAISPGVCRKGRLWSARGRAELERLELLPWAARRRQELLAWLDRLDEQVRELDQAMEGAGRERPEVALLRTHPGVGMGVALAFVLSGGPVERFPNSRKLVSYWGLNPREHSSGGHQRLGSISKQGNTRMRWLLVEAAQTAARLDPELRRTYQRLKYRRASGVAKVAVARRLAIRLDWRLRTRHNYAQLVHMSGSPSSAVVPPQKESTV

SEQ ID NO: 142100 - protein, 315 aa, unidentified
MANLKKSKTIIHVGVDVGKWFLDVCIHEKAIHWQENNNPEGIKRILKRLAHYEVKLLVVEATGRYEFALAEAAFNKNIPVCIAKPLSVRRYAGAVEQLAKTDKIDAAIIAEYAAVIKPRATPRKSKNLLAIKDLLARRRQVMQMRTQELNRKGIMGQSLEQSCKRLIKVLDLEIKRLEKKLNQHVQEQAEWSERREILKSAPGVGDTLVYTLLAELPELGQMNNKQASALVGVAPINRDSGKSSGKRRIQGGRANVRTILYMATLSATQCNPVIKAFYQKLVAQGKHKKVALTACMRKFITILNAMVRDNVEWSV

SEQ ID NO: 142101 - protein, 344 aa, unidentified
MGTIIRVGVDLAKNVFHIHAVDENEKTTWQGKYARNTWLKAIMKRVPFTAIIGMEACGSSHYWARELIKAGYTVKLVAAQFVKPYVKTNKNDKVDAEAICEAINRPNMRFVSVKTSEQQDIQSMHRVREELIAQRTARANQIRGLTAEYGIVAPVGISNLRKHIPYWLEDVENSLSFQFRELLQVLYEDLITLDERIDKVTNKIKLSLSDNPVAQRLMKIIGIGPLVCSALLIDLGDGMSFKRGRDFSASLGLVPRQHSTGGRERLLGISKRGNGYLRKLLVHGARAAFRYVKDKTDALSLWIKKLSITKHPNVAIIALANKLARISWAIVAKNVEYDASRAAA

SEQ ID NO: 142102 - protein, 387 aa, unidentified
MYIIGIDIGKNHHKASIVSPKGKQIGHSLCFATTHKGADSLMNFIFKNIGDSPCVFGMEATGHYWYPIYSFLKAKGYTIYVINPIQSDSLRKMYIRQTKNDSIDSFLIAEVIRFGQFSTTSMADENILAMRQLCRYRDSVISSRTEIKLRISTIMEQIFPEYEKQFSSLWLSTSMGILEKYLTPENIQNAPLDGLYGIIKDKSHNRLTMDKALSIKEAAADTFGIKIAQEAFSFQLKQLIDRMHFLDQQIEALDCQILGYYEKFDCYLHTIPGIGMIGAATILAEIGDTKRFKSSSALVAFAGIDPTVRQSGEFNSIHNHMSKRGSPYLRHAIFLAATTCSFHNSPLNAYYKKERDQGKHHLTATGAVARKLTTCLLYTSPSPRDCS

SEQ ID NO: 142103 - protein, 320 aa, unidentified
MSPNTTNTMTETNSVVHAGLDIAKAQLQLHLENQQHVLPNTVTGHQRLIRLLRVVAGVHVVCEATGGYERKVVSALHSVNLRVSVVNPAQVRHFALAQGQRAKNDPIDAALLTAYGHALRPNATPVPQPVLAELRELVQWRDHLKEQLVRARQPAEHATLAFVRRQQSKEAKHLEKQMAAVEKELAAALARHPRWREQVQRLAELDGVGTLTAVSVLSQMPELGHLNRGQAAALAGLAPWTRQSGPWEGQRHIGGGRAVVRRALYMSAVALARQTGSTLGKFYARLRAAGKPAKVALTAVMRKLLLQMNQVLKYHVPDPA

SEQ ID NO: 142104 - protein, 318 aa, unidentified
MNSHHKTESTEPVKYVPLDVSKRRLDYGLQPGRRAAVANTGAGIATLVKRLESYPQAQVVCEATGGYERALLVALGEAKIAVSRVHPGRVRAFARAEGLRAKTDRIDVELLRRYAVAMQPRVDILPSPEVEVLRDLMEHRRQLDEQRVLFSNRRETAGPTLLGLIEPQLAHLEQSLQEVETRIRDHIRSHESLRAKSERLQQLQGCGPVLAATLLAYLPELGVLEDRQVSGLVGVAPHANESGESAHPRHAHGGRIAVRNVLYMAAVSAAQHNPVLAPFYQRLLAEGKPAKVAIVAVMRKMIVTLNHLLRDPNFTLAN

SEQ ID NO: 142105 - protein, 346 aa, unidentified
MECYVGLDVSLKQTSICMVDQTGSVVREGVVDSDPEAIAAFVRSYAACAVRIGLETGPTATWLWTELKRLGLPVICIDARHAKAVLKMQINKSDRNDAAGIARIMQTGWFKEVHVKDLDSHAVKALLASRALLVKIKRDLENQIRGLLKNLGLVIGRAKFNVFARRAEELIEHRPELIAAVGPLLAARKAIEQQVGDLDRKVHKLARHDVQVRRFMTVPGVGPITALCFKATIDDPTRFKRSRSVGAYIGLTTRRHASGEIDWSGRISKCGDAMLRMYLFEAAGVLLTRVPKWSGLKAWGAKLTKRNGLRKAKVAVARKLAVILHRMWIDGTEFNWSTKKAAAEHA

SEQ ID NO: 142106 - protein, 393 aa, unidentified
MGSENHYARAFSWRNYEYSKKPFAFSNDEAGFAAFKEWIDDIADKHEMEVIIPGMESTGHYWLNLGAYLQEQGMKPVHVNPHHVKKSKELDDNNPSKNDRKDPKTIAGLVNEGRFSYPYIPAGIYADIRNLSNLRIQTQEEITRIKNRMARWFSIYFPEIKDVYRNPDAVSGLMVIKQAPLPCDIRELGVEGVNKIWREARLKGAGIKRATTLVTAAEHSIGNTEAPRSARKEIRNLLEDYEGYKRRMDELMEEIEKTLSEIPYIDKLMEINGIGIKTVSCFIAEVGDIGRFDNPKQVQKLAGYAIVADSSGKHNGESRISHRGRKRLRYALYEAAISVIGKNKEFKEIHSYYRTREKNLLKKMQSVIAVACKLIRIFYTILTKGGIMMVRRC

SEQ ID NO: 142107 - protein, 391 aa, unidentified
MNNWAVESADGGSQRSKIFAAIELSKAKWIVALCLPHLGKVSLYEIAGGDAERLLALLDRAHSAAAAQGEETAEIYTCYEAGYDGFWLHRLLEARGIHNSVLDSASIQVSRRRRRLKTDRTDAESLLRVFMAWHRGERQACSVVRVPSPEDEDMKRLHRSRANLLRERVRHVNRIRGLLHLQGVVHVHPHRQGWAAALPGLQTRDGRRFPPQLMGEIKREAKLLELVKKLLREVDLELVALVRAKHLRTRARQHRDAHPIASKLVSIRGIGPTLAAVLATELFYRRFDNRRQVASYTGLSPTPYSSGGTSRDQGISKAGNHRARSNAVELAWLWLRHQPDSRLAAWYRDRVTSAKGRLRRIAIVALARKLVVALWRFVETGLVPDGVVLKA

SEQ ID NO: 142108 - protein, 346 aa, unidentified
MLHVGLDLSRKRIDVCLISDQGELIGRFTATPDRDGLYGLAARVAVYGEPVRGVVESMNGARFVHDELVSHGWEVLVADAQKVKGLAPLACKTDKIDSRVLAELSFRDLVPAIWLPTVELRREREISRWRLHLVKHRSTLKNRVHSTLITFGHQRHMSDLFGVSGRRLLEELDIPEPWRSHVDASLVLIDDLEARITQIAKELRRSGADHRYIPTLLTAPGFGWITSYTVACELGDISRFSSPVKLTGYTRLCPRVKQSGQMDQRGPLSKHGPKYLRWGLMEAAIAASSHPLYRERYQATKRRLGRQRGPKVAQIDLARQLAEAIWYMLTRNQPFAPAGAIIRLAA

SEQ ID NO: 142109 - protein, 342 aa, unidentified
MTIVAGFDVHRAQITFDALDSDTGELTRGRIDATPAAVERWVQRFGDRGVHVALEACTGWLFVSRALERAGAVAHLAEPVETSALRGRKRRAKTDREDARWLRQLLSERRLPESWLPPEHVREWRSRARLRKTLIDERTQWLQRIRATLFHHGVDGTPERLRTSGGREFLQGLALPADARERIEIALAMIDALERQLHPLEAELRKLARRQSGCRALMNLYGMGELTSLVTLTELGDVQRLSASRKAVRMAGIDIGVHRSDRRARVGKLNRQGSPHLRWALYEAAQAACRPSSPDRQDYLALKARGLSHTRASLTIARKLARRSFHALSALGPDALEPTATT

SEQ ID NO: 142110 - protein, 361 aa, unidentified
MNRNANSQSAGQMIGLINGQQVVGLDIAKSVFQLHSVDMGTGEIVNMQLKRAKVLEYFANHQPCLIGIEACGGAHHWARELQALGHSVRLIHAKAVRPFVSGNKTDATDARAIWLAVQQPGTKFVGIKSEEQQATLVLHRQRELLMKMRVMQTNALRGLLYEFGATFGRGKNALFSEIEAALETLLAKNSLPQYVADSLREQVGRIKALDQDIKSIEQRLQERLKSNAQMKRIAHIPGVGLLTATAAIATMGEASAFKSGREFCAWLGLVPRQSGTGGKVKLLGISKRGDTYLRTLLIHGARSVLSHSKEPVPWLEQLQQRRPTNVVIVAQAAKMARTIWAVTAKEQNYQRGYQSTRPQTA

SEQ ID NO: 142111 - protein, 367 aa, unidentified
MKKISTVVAKQGRNNSQQELTIGLDLGDRNSWYCVLDEAGRIQLEQRVRTTAKALQEVFGTMPRSRVALEIGTHSPWISRLLKQLGHEVIVANARKVRLIGESRKKDDRLDAQTLARLARIDPELLYPVKHRSAQAQADLMMIRAGAGLVRARTSLVNTARGLAKSYGERLRGCNVRDMDPEKAENLSPELQRALEPLLATIEELSERIVEYNDRIEALAQTSYPQVDLLKQIKGVGTLIALTFLLTLEDPHRFGKSRDVGGYLGLQPGRRNSGESEPQLHISKEGDPYLRTLLVQGAQHILGPFGIDCDLRRWGLKLAERGGGNAKKRAIIATARKLAVLLHHLWVSGEVYEPLHNSRRLTVAAAA

SEQ ID NO: 142112 - protein, 400 aa, unidentified
MHLTANISVPQKNFIAIDLHSDNAVICVRRNALNKAGELVGKNIWYGRVSIRDGLDSFVKALLPYCQDFDHVAVVESTYNWYCLADVFEERGWLLRIADPSTVSQANLKASDDRTDAQYLAERLRVGSLKHYLPLSYSSRALRDLCRYRMAMVQDCASLKIKLINLYRNQLSKNLRVADLLDRCRNHMQSNYRFDPDILEEFKDPNIRLRVAFEISRITMLEEMIEECNAEIQKQCKDQELVKLCKTIPGCGPVLSAVICTEIGTMQRFKSAGDFVSYCRLCSTSKLSNGKSKGLGNAKNGNAYLSWAFTEVAQYASRNPVIREILQRLLRKYGGLSVKAIRTLAAKIARVTFYVLKNRQPFNAAQCFGDELTKGIKKKLALKPLSKDDSVVLPIVAGLA

SEQ ID NO: 142113 - protein, 354 aa, unidentified
MSNKSIATIATMGIDIGKNSFHVVGLDQRGAIVLRQKWSRGQIEARPANMPPCLIGMEACVGAHHLSRKLQALGHDARLMPAKYVRAYSKGQKNDFRDAEAIAEAVQRPTMKFVATKTADQLDLQALHRVRERLVRQRTGIINQIRAFLLERGIAVRQGLRFLRTELPNILAKRSDVLSPRMMRIIEDLASDWRRLDERIEGLSADITSLVEKDPACERLMTVPGIGPIISSAMVAAIGNGDVFSKGRDFAAWLGLVPRQISTGDRTILGKISKRGNRYLRVLFVQAAWAVLIWPQSWERHGLKSWIEAAKKRLHHNVLAIALANKLARIAWAVLNKGRNFECARTNAMAPQPA

SEQ ID NO: 142114 - protein, 430 aa, unidentified
MKFNTQNAKIEAITEKTLVLGIDVGSEMHYARAFDYRGIEYTKKPFKFSNTEAGFMSLQAWILDLKEKHEKDKVVPGMEPTGHYWFNLGKFLQDNEMKPVLVNPHHVKKSKELDDNNPTKNDCKDPKVIAGLVREGRYMIPYLPDGVYADLRTASNIRFQLQAELTRIQNRISRWFNIYFPEYKKVYGKPDAKSGILILKTAPLPEDILTLGIDGVNQIWRDAKLRAVGKARANTLIEAAEHSVGSKEGTVSARMEIRMLLEDYESRNIRLQEVMALIEELVAQIPMAEKLLEIKGVGIRTVSGFLAEVGDISRFNNPKELQKLAGLALVENSSGKHKGETTISRRGRKRLRYLLFEVAMSLVAKNPEFRELHVYYTTRKLNPLKKMQSLMAVATKLLRVFYAMLTKGVDYDPKKMVSDIKRPAAYLQTE

SEQ ID NO: 142115 - protein, 323 aa, unidentified
MNKDMIYFGIDISKDVFDVMNSNGNYFQFENDHIGFKKFVKLLSQKSHCVMEATGYYHYKLAYYLVENNIKVSVENPLSVKRFIQMRLSKIKTDKSDAKMICLYAQNVDLKLWEGQTKNQIECLQITRLLSLYFKQTTALKNKIHGEDVLGNPSSLVVRSLKRSLKHKQKEIKALEEKLIEIVKLDHQELLTRLQSIPGLGRKTSIMLIVLTNGFERFTSASELCSYSGLTPIIRQSGTSVKGRPRISKMGNKKLRNLLFMCSFTACKNNKACKALYDRIVAKGKSKKLALIAVCNKLLKQAFAIAKSGLIYDETYRSTLVKN

SEQ ID NO: 142116 - protein, 367 aa, unidentified
MKSIIYVGMDVHSTSFTLSCYSLSTQETFATIKTEATAKAVKKYLDNIRLARNEECTFVCGYEAGCLGYTLFHQLTAMDIKCVIMAPTSIMRKAQEIKTDRRDAEKLAMALAYGNYSPVYIPTAQDEAVKEYIRMRDDHKLMLKKNKQQILAFCLRHNQYFPNSHWTQAHMRWLTNLRFEGYLQDVFDEYLVTHRQLSDKIESMDSQIKQLCELDEYRDRVKKLICFKGIREHTALALIVETGDFHRFESAERYASYIGLVPGEHSSNETQRRLGITKAGNRHMRLLLAEASQCYGRGATGYKSKALKARQNGAPPEVVAYADRAAIRLRKKFAKMTFHSKKHNVAKIAIARELACFVWGMMTNNIA

SEQ ID NO: 142117 - protein, 343 aa, unidentified
MPHYVGLDVSQKTTAICVVDAQGKRLWRGVCATDPGPISARISQHAGVDAKVGIETGSMTPWLVHGLRAAGLDVACLDARRVKAALQMQLNKTDENDAEGLAQIMRTGWYRAVHVKSLDAHRARALLGARAQLVGMTTRLSNMIRGVLKTFGLLPGAGRGLRFDRKVEALLEGAPEIALVVRPLLATWRQLRQQIAVFDKAVLQQVRADPICRLRMTVPGIGALSSLMYLSTVENPSRFSRSRAVGAHLGLTPRRYQSGETDRSGHISRCGDGLARTLMYEAAIVILHRVKRSLHLKDWAEAIERRSGSGKARVALARKLSVILHSVWRSGEPFRWAAPAMAA

SEQ ID NO: 142118 - protein, 409 aa, unidentified
MQPILKSCCGIDVHKNMIKASIAKGPLDSPPKFYTRTFSTMTRDLLKLKDWLTENDVEAVAMESTGVYWKPIFNILENDFQVILANPQYLKKVPGKKSDVKDCEWIASLLRCGLIPASFIPQRPIRELRELNRTRRKLVGMMSSEKNRIQKVLEDANIKLASVVSKIDGVSSMTMIQALLDKDRLSKEEITDMARGKLKSKVDQLVEALNGKVTDHHRFLLKLHLNNIAFLADQVQEIDEQIQKLMIPFQKEESLIQTIPGISKISAKAIISEIGVDMSQFPSEAHLASWAGICPGNNESAGVKKSGKIRKGNRYLKAILIEVAWAASRTKGSAFSAIYNNIAKRRGKKRALVAVGHQILIAVYRTLKTGEPFVDQGAEAIYRRNLEARQQSAIRLLERSGYSVAKASV

SEQ ID NO: 142119 - protein, 430 aa, unidentified
MSSIVQMSRRRQAVPDPVRGLVVGIDVSKGRIDWRACSLGLWGSPHRVAQGEPGFLRLEQHLLTAAEAGQEVWVALEPTGPYGLCLQQWLLERGWMVVLVNPFHVKRTREVHDHHPGKDDCKDPGVIADLVWQGSSRRVRRIGGPYAELRVGFGEWCSLAKRRTALRNEAQALLEVWFPELGRLFADPLSKSVQALIGRYDSPAALLQAGQRSLHATLTAGTHGQGGRYAEAIWRGAQASVAVRDGQESRVRALRDLLEQLACVERQQECLRGDLARWLEQTEEGALLRRVPGVGLLTASGLLGECGPLAEFHSGRALEKFVGLNLYRISSGKRHGQVHLAKRGRAAVRALLLQLAVAQTRTGRLGHAWAQQRKAQGHSSRQTQVALARKMLALLYALARDRACFDVSRWSAEAKTADGEPTLQGAPPEA

SEQ ID NO: 142120 - protein, 368 aa, unidentified
MTTNTLKAAPAASAKELKNEKPAKAKRMLVGVDTHLRGYQAARKIDSGVIGVVENFRSEEELRLYVAKQTTLAEQVVVVYEAGPLGYTLYRKLTAAGVLCYVCAPDSGEQRKKRRKNNKIDARSLTSKLFNYLNGDQNALQLARVPTEAQEQLRMASRQHDQLVEERKRLGAKGNAMLLSQGFGSWSNWWRPKAWADLSSKLPPWLLERLKVWVDVLKVLDEKISQAKAAFARSCNGPRPKGVGALSQMQLQSEVLDWSLYSNRRKIACLAGMVPSEWSTGDKERRGSITKVGVPALRRIIVEMVWRIIFFQPQYKPVQKWLEVLRGPNPAMKKKAVIAIGRQLMVDLWRLQTGRVTAQELNLIMVTD

SEQ ID NO: 142121 - protein, 391 aa, unidentified
MSMYFVGIDISKYKHDCCIISAADQQIVSKFTIANDKDGFEHLLTTLNSLSNPEDIKIGFESTAHYALNLELFLENAHHSFMEVNPVLIKEYKKSTSLRRTKTDSVDCESIARWLMTVEYKPHSKGFYHAYSLKSLTRLRDRLIRQRSFYLVKITNVLDHTFPEFKPFFNKRLSKTAIYLLENYGSAEKMAHMNSTSYDKLRCVSRGKFSIQQFLRLKELAANTVGVNNSIFDIELNSLLTLYNSLCKEIKVLETEITRLIEEVHPHYMSIPGIGPISAAVIYAEYGDISNFSTPGQMLAFAGIEPGIDESGTESHGGRMVKHGSAQLRYVLLNACLPLIRFDITFETYYAKKRAEGKKHRVAITHVAKKLIRVIYALEKQDIDFNAQKLR

SEQ ID NO: 142122 - protein, 345 aa, unidentified
MYRTRVGVDLAKEVIQVCIYRNKKVQSNIEMTPNEFLCWLINNKPSTIIFEACGTSNYWKQKAIEAGHDARLISAKLVAVVRQNQKTDKNDALAIVQAALLPDVTFIGGKTLEQQQLQSIKRIRELAVKQQGASQKQLVSLLLELNIRISNRKGGIISAIEGVLEDAENGLSAECRMAIYTAKEHLKILIAAVHRYDDCLDKSVVAHSDCKKLLRLEGVGTMNAINLYLALGCSDIGVFSKGKDASACIGLTPIQHSSGGIVKLGSIGKHCKNSILRSQLICGAMAAVNQAVIREAKTKKDVWLKGLVERRGKKCAAVALANKTVRTAFAMLTQGTEYKAELLAA

SEQ ID NO: 142123 - protein, 425 aa, unidentified
MSVRDYSKQVARRQKIGHTTLVVGVDIGCASNAVGFMNKEGKVLGSYPKMLNSREGFEEFVKITEGLKAKHGLTDVIIGFEPTGHYWRKFAYFAKEKGYEVRFVRTTALKHHRELDESSSAKSDKRDALTLTNITREGKYIDTVIEDGRMRHLRILVKVREKIQKRNVSAKNSLHAALDDYFPELKKIFWSMNSRGLWALLERCPFPKDVLTLKVSALQEMIGRASRRRAEASQKATALYQAAKESIGLQQIGSADRYRLKMCLEEVKRTGLIIKDIEREIKGALKEIPEAEYLLSIPGIGPISAAVFLGELGNPSYFKGARQVVKYAGYDPQESDSGYRISRKFISKKGRWLLRKHLFLMSMRVVVLSRYFQEYYQRKLQTKNRFGQLPRKKEVLCAVAIKLIKVIFALLRDKRNFEDTVTAVK

SEQ ID NO: 142124 - protein, 336 aa, unidentified
MSHYCGIDLHSNNHVVVVIDEEDQRVFDKRLNNDLAATLEVLTPYRETLKGIAVESTFNWYWLVDGLQDYSFSVQLVNTAAVKQYDGLKYSGDHQDAFHLAHLMRLGILPTGYIYPKEQRAIRDLLRRRMSLVRSASTQLVSVQSQIWRSTGIRVKSGDLRKLEFVPPLMDKYTLQAVHAGLMVYQAIQQEINVLEKSAFEAIKLTQSFKILQTITGIGKILGLTIMLETGDIHRFAGAGNFASYCRCVDSSRTSNGKKKGVGNAKAGNKYLSWAFSEAAHFAVRFEPLAQRFYERKKAKTNGIIAIRAVARKLARATWMMLKHQVPYDARLMFPN

SEQ ID NO: 142125 - protein, 386 aa, unidentified
MKKNNTPEQSPSKRANKMSRKVNRTGQKSRQQTGPVTIGLDLGDKSSRYCVLNEAGQVVLERSVGSSKKAMTQVFGAIPRCRIALEVGAHSPWVSRLLERLGHEVIVANARQVKLISQSSRKNDRLDAQMLARLARVDPQLLRPIRHRSEQAQGYLTVIRVRAALVDARTGLVNAARGWAKAMGERLPKCDTDQMGEERLKMLPQGLREALRPLLQEVESLTGKIKECDVKIEQIARAEYPETCLLRQVSGVGTLIALTFVLTVEDKERFAKSREVGCFVGLRPSQSDSGESKPQLPISKEGDQYLRKMLVQGAHCILSKRGPDTDLKRWGVALSDRGGKNAKKRAIVAVARKLGILLHRLWVTGEVYEPLRNSQAAARQKKTAAA

SEQ ID NO: 142126 - protein, 387 aa, unidentified
MPSAISPPKAVLGIDVGKSSHWACLVTREGEVALNRRVRNSEGDLDGLFSQVACDTIVVVDQYRNIGLLAISRARLAGLGVAYLPGLAAHQAARLFAGDAKTDERDALVIAKTALGIPDALLPVPEPDEALEAARSLAAQRSHMVTCATRDKNRLRSILLESCPAFEALADLGDRHWLNMLEKLGGPWGCIDAGKPAFGAVTKGANRARMDAAWNAAMASTRPSKRRVDAENPQVRMLARRIREALEEADRIDREITALLAGDGTYECLVTIPGIGPRTASELVIGINIEDFPDHDRLASYCGIAPRNRQSGTSISSVSASRQGNRRLKNLLIFSCNSLVRSENRFGEYYRACRGRGMCHGEALKAVARKRLKVIYAIMRDKVPYSA

SEQ ID NO: 142127 - protein, 479 aa, unidentified
MTPSKDAFPEPCPPVPTIPEPSVLRPSFALPLYNPHAAGIDIGEAEHWVAVPPDRAPQPVRRFGTFTADLDALADWLLDCGITTVAMESTGVYWIPLFELLEARGLQVFLIDPRQAKRAPGRPKTDRLDCQWLQRLHAYGRLAAAFRPDDQVCVLRSSLRHRQMLLTYGAHHIQHMHKALQQMHLKLSQVVSDLTGATGMAILKAIIAGERDPLTLAKLRNPHCQHREDEIAKALQGTWRAEHLFALQQAVALSQFSHQQLTVCDQHLQTHLGTFADKSAGQPLPPKPRRHKKANEPHFDARTPLYRLAGVDLTTIEGIEEGTALVILAEIGTDMSRWPSVKHFCSWLGLAPQHNISGGKVLSRHVRPGAHRVAVALRLAARTVHHARTALGAFYRRMRSRLGAPKAITATAHKLARLVYSLLKHGSAYVKQGLDDYESQYRERKVKAMARQAKALGYTLVALGTPEVQSLDAVAAPTS

SEQ ID NO: 142128 - protein, 378 aa, unidentified
MKAARFTADEIERVAYLTTKGYLPVAVDVASRVFQVCYYDLGAKHVRNYQLSRVKFFEFIDDTHTPRKLIGIEACGSCNYLCRYIQEHNHKCHILPAQKVKAFLHLDKTDRIDALGILKALITPSMQHIPARTQENQYLLNLITVRDQLNKQFVQTVNAAHAFLYESGVVAGTASVASATKVTEALKALCNTETEKEHSEDDCSYSHLNCISESLLSNIESLQTKIKEINSHLLSYASNNEICSNLQTVPGIGKLSAVALYAAMGDPERFSSSRAFAAFIGVAPVTTGTGGKTTVLGIRKSGIQSIKKMLYMGAMVYLSQAMKNGTESSWLKQRLNQNRSKKIIICAIMNRLARIAYAIAKSGQAFDETKCNMIKKLR

SEQ ID NO: 142129 - protein, 345 aa, unidentified
MEYVGLDVSKEETSFCVKDCSGKVLASGKVASDPQSLFEGLREHCLCPDTIVMETGSLSNWLARELLKLGLKVDVIDARQAHAVLRLQHNKTDANDAAVLADLARTGFCRQIHVKSDEASRMRVLLKAREHMVGQHSSRQNTIRGLLASLGHRLPKGAGKFARRVKAVLENHRDLAVIFDPMLDDMAALQKGIKQLDRAVAAAAKHSAACRLLMSAPGVGPVASVAFAATMDDPVRFAKSRSVGAYLGLTSRRLQSGEMDYSGRISRHGDKMMRALLYGAANSFLSVVRRAHPLKDWARRVKRRSSHKKAVVALARKMAIILHRMLITGEAFKWPQENQKEAASA

SEQ ID NO: 142130 - protein, 517 aa, unidentified
MGSPSPLVTLTRGHSSAGRAPDWQSGGQRFDPAWLHPGGGLGGRSREASGQGQAPRFRVDLIVGLGFPRASPGRPATGRGLTRVGARSAGSRGLGLASIVDRWDESGRETAEVVATDSNPGEEGAKVADLSPAGFPNGASTRSDGARNPEAKERSAMRKIALDLGVRKTAYCEVRSGAVVQRATVTSVERLSSLLGPGQPPAVVAIEACREAWHVHDLLRSWDNEVVLVDTTRSRRLGIGQHGRKTDRIDAEVLALALERGGIPMAHVLSPHRRELRRWLGVRRSLVESRANLITTCRGLAREQGVVLPKCTVAIFARRARQSAGKALAVIEPLLKQLDAINPELVAVEARLSELSDTEPVVKLLMSAPGVGPTIAASFVSVIDDAKRFRSSHQVESYLGLVPSEDSSGGKRRLGAISKKGNPYLRSLLVEGCWGIFRSTDRSDPLRLWADAVAERRGRKIAVTALARRLVGVLWAMWRDSKPYDPAALACASSRGTRRLAHTLQTQAHTMEVCSQP

SEQ ID NO: 142131 - protein, 345 aa, unidentified
MELFTLGIDLGKTTFHVVGMNQRGEIVVRKRFTRTQLLHFTANLKVELIGMEACGGSHFLGRALREQGHEVRLIPAQYVKPYVKTNKNDYIDAEAIAEAVGRPRMRFVPVKSDEQLDLQSLHRVRERWVMRRTAAVNQVRGLLLERGITLPQGRRHVDAALPGILADPATKLSGGVLILLTELKLELAQLTERIDRADKSMEKIAQENEACQRLVTMPGVGPVISTAIIATIGNGTAFRRGRDFAVWLGVVPQEHSTGGKQVLWKIPRRGNQYLRMLFVQGARSVMQRRTKQAPGLSAWLAQLTARTHRKVAIVALANKLARIAWAVLTKNEVYRPPLLDGAAVA

SEQ ID NO: 142132 - protein, 367 aa, unidentified
MKKVSTAARKQISNFGEQKLTIGLDLGDRSSWYCVLDETGEVLLEQKLGTTPKAMQEMFGGMPRSRIALETGMHSPWVSRALSELGHEVIVAHARHVRLIGESRKKDDRLDAQTLARLARIDPQLLSPVKHRSAKAQADLTVIRARAGLVRARTALVNTARGLAKSYGERLRGCNVRNMNAEKAEGLSPELQTALEPLLAAIESLSERIRECNQRIEGLAQASYPQVALLKQVKGVGTLIALTFLLTLEDAHRFRKSRDVGCYLGLQPGRRNSGQSEPQMHISKEGDPYLRTLLVQGAQHILGPFGADSDLRRWGLKLAERGGRNGKKRAIIATARKLAVLLHRLWVSAEVYEPLRNSSRATMPAAA

SEQ ID NO: 142133 - protein, 343 aa, unidentified
MQVVRIGLDLAKYVFEVHGVDGQGNAVIRKTLRRGSVSTFFANVPPCLVGMEASNGAHYWARLLTELGHKVRLISPQFVAPYVKSNKNDRNDAEAICEAVSRPTMRFVPPKSPEQLAIQALHRIRQRLVQSRTRLVNQIRGILAEHGIVIARDIWRLRRALAEITGHVTDDLNTLVRVLILEAQAELMELDRRIASCDRRIRELYRTSELCQRLGEIEGIGPVTATALVAAVGDRSCFKNGRQFAAWLGLVPKQRSSGGRHRLFGISKRGDRYLRTLMIHGARAALGKAGGKQDPRSRWLASLRQRRHPNIAAVALANKNARIVWAMLAGNVSYEPERSVQAA

SEQ ID NO: 142134 - protein, 400 aa, unidentified
MDQPLWAGVDAGKSDHYCVVIDADGKRLLSRRVANDEAALLELINAITALADGGELTWAIDLNAGGAALLIALLIGAEQRLLYIPGRTVYHASGGYRGEGKTDAKDAAVIADQARMRRDLQPLRPEDDIAVELRILTSRRTDLVTDRTRAINRLRAQLLEYFPALERAFDYSASKAALILLSGYQTPDGLRHAGAARLAAWLRKRKARNADAVAAAAIEAAKSQHTVVPGQQLAAAMVARLAEEVMTLDTEIGDTDAMIEERFRRHRHAEIILSMPGFGVILGAEFLAATGGDIAAFGNTDRLAAVAGLAPVPRDSGRISGNLKRPRRYNRRLLRACYLASHIAIRTDTASRIYYDRKRAEGKRHTQAVLALARRRLNVMWAMLRDHKPYQPTAPNTAAA

SEQ ID NO: 142135 - protein, 343 aa, unidentified
MQIRSVGIDLGKTTFHLVALSAAGKVLLRKKFTQKQLITFTANMQTCLIGMEACSGAHFLGRTLREQGHDVKLIPAQFVKPFVKSNKNDFLDAEAIAEAVDRQNMRFVPIKTDDQLDLQAMHRVRDRLVARRTSVINQLRAFLLERGMVFAKTPAKLKQAMPEILENADANLTPRMRNLVSLLWSEWKDLEQQILAMNLEVEQIASSDPACQRLRQIPGIGPLVATAIVAAIGNGAAFHKGREFSSWLGLVPRQHSTGGKARLFGISKRGNSYLRKLLVHGARSAVLRVKRERSPFGPWLDALERRSPIKVVITAAANKLARVAWAVLSSGEEYRPPTALMPS

SEQ ID NO: 142136 - protein, 349 aa, unidentified
MVNAHRTLSPRRATRTGAFVMSEHSQGRESVMVRRPNAGVDVSKETLDVSVGGHAERFGNDAQGMESLAALLRRQDADVVVLEATGGYEAAAAAALQAAGLTVAVVNPRQARDFAKAMGVLAKTDKVDAKVLAAFADVIAQHEKRGSFLRAVPDEQRLRLAALVSRRRQLLEMRVAEGNRLALAHKGTRKSMAAVIKTLDKQISEFDRDIDNHIREHFRDLTKVLSSAKGVGTVTATTLAAHLPELGQLDRRAIAALVGVAPLACDSGKRVGHRHVWAGRAPVRAALYMAALTASRYNPVIRTFYQRLLAAGKPKKVALVACMRKLLTILNAMVRDGTQWKDALHCVSP

SEQ ID NO: 142137 - protein, 303 aa, unidentified
MDKSRELDFSDQDIFIGLDTHLKNWRVSIMVGEDVYKTFSQDPRPKLLRSYLAKNFPNANYYSAYEASFCGFNIHRDLLNLGIKNIVVNPADIPTTDKERKQKEDSRDSRKIARQLSLKDLKAIHVPDIEIEGYRSFVRYRKTLTKEIARAKHRIKSHLYYYGIEIPVQFSEKKYWSKRFTSWLGEIELPTESAKMALIGHLEMAELLRKKQYSTMKEIRKLSEKEIYKENYHLLLSVPGVGSLTAMILLTEIGDINRFKNLDKLCCFIGLVPMTDSTGENEKIGDITVRRNKIISLQSEINL

SEQ ID NO: 142138 - protein, 354 aa, unidentified
MYSPYVSVGRHIVFSFNPNSCRGIQARIFARLGTENMVNESFVGIDVSKQWLDLGWEPAGQAERLAHDEVAIAGLCERLVQERPTLIVLEATGGLETHLASALAAAGLSVAVVNPRQVRDYARACGRLAKTDRIDALILAAFARAIRPQVRAPKDDETLELGALLVRRRQLLDMRVQEPLRLERASPVQRDSIKEHIAWLTERIARLDTDLMRRLRSSSLWHEQEDLLKAIPGIGPITRVTLIALLPELGKLNRREIAALVGLAPFNRDSGQHHGERVIWGGRAQVRQVLYMAALAATRSNPVIRTFYQRLRAQGKPAKVALVACMRKLLTIMNAMLKHNTPWNPNTLDLKHSC

SEQ ID NO: 142139 - protein, 397 aa, unidentified
MNAKYYVGIDLGSRFHQVAVVDQQSGVVRPSFRIGRGRRGVELLLRTLGVPGSSLVVSIEATANYWWELVGALTQQGSQVYLISPKKGHDLRRFYALHTKTDVTDSEALARMPLVDPSLCPVWVAPPATASLLRLCRLRWKLRCRIADVKRRLTMFTELVMPGLDEVMPVRYSHSARLFMRRYLSAPHARRVGRRRMHAVLLRSSWGKFTEQKSEQLWECIDNAPELGWDPDDLQLEASVQLDELEILEAKVTELDERIAELYGEVDPEQRLLSIPGLGEFLGAAITAHVGDVSRFPSAKHLISYAGLDPRVYHTAGHSAPGQMISKHGSPFLRAWAYLGATNARHHDEALKSYHDRLRARQKQPNVALCATAARLLERVYDVMAERRSTTVTVAGD

SEQ ID NO: 142140 - protein, 338 aa, unidentified
MKGYIAFDSHKHYTLAECEDAATGQAFRTRIEHEPGAIRAYLEGCDSGQAVALEATGNWYWIVDEIEKAQCGPLLVHPRKAKLMMGMINKTDKLDVHGLNRLQRNGTLPTVWIPPAPLRDLRELTRTRMFLARHRTRLKNRIHATLAKYGLSLTGYSDSYCKGARQSLKELIAQLPPQTQYVTRMLLEQLDFIERQVQDQEERLEALITVTQEMQLLQSLPGVGMILSAVIALEVGDVTRFGNAEGLASYAGTVPRVPRFPDRIGTPICRSHRGRKGSLWAVATGRQPLPEVGFRGGGQFRGAELLASARTSPESPLLEDSRTSRPPEGNRRSRQASG

SEQ ID NO: 142141 - protein, 323 aa, unidentified
MEFAERFVGIDVAKDHLDLAVRPTPEQWQAPLTAAGIAEVVSRLQAIQPTLIVLEATGGLERPLVLALAAVELPVVVSNPRQVRDFAKSAGRLAKTDQIDARILAEFAQKMRPAVRPLPNAEALALSAILARRTQLLEMLTAENHRLGSALPPVRDRIQRHLDWLTQELATIDAELAGLVQSHPDWQGKETLLRSVPGVGPVLATTLVADLPELGTLDRRQIASLVGVAPLNADSGRRRGKRIVWGGRARVRAVLYMSALVATRFNPTIRAFYQRLCQAGKEKKVALTACMRKLLTILNAMLRDNTTWEMPIDQSVHTSPGVS

SEQ ID NO: 142142 - protein, 349 aa, unidentified
MTVYVAVDFHAREQTISYCDLADGEIHRRKLRHQHDDVRAFYQQFTGEVIVAFEASGYSAWFEQMLAELGHTVWLGNPAEIRRKAPRRQKNDRRDADLMLDLLLKGDFPRVHGFSEESRTVLRQLRYRHKLVKVRTIAKNSLHAIGINAGLPLKRRLLTEQGIAQLQALSLSPVLTQQRDEWLQLIGSMNERIATVEAQLQQRAKDDAAIALLQTHPGIGLLTSLALRYTLLPTARFSTTRQVTAYVGLDCMEEQSAERRRMGSISKAGSKLLRFLLNEAGHTAARHDPELKKFYRRLLHRRDKPKAKVAVARKLLVRSFIMLRDQIDYAEFVRRGVAARVAREAHSPK

SEQ ID NO: 142143 - protein, 396 aa, unidentified
MCIRVSGAGRRRRKEVRTFSTMTTDLLGMRDWLLAERVSVVGMQATGAYWKPVFYLLEHDIECWLLNAWHMKAVPGRKTDVKDAQWIAELVEHGLVRPSFVPPEPIRQLRDLTRYRTEIIRERTREVQRLEKFLEDAGIKLSVVVSDLTGKSARAMLEALIAGQRDPQVLAELALGSMRGKRPVLAQALTGRFTAHHAFLTLAMLDRIDACVAMEQRLSVQIEQAMAPFRHQLDLITTIPGVSTRTAEVILAEIGADPGRFRTAADLASWAGMCPGNNQSGAATKPSPPRHGEPWLKAALGQAAVAASRTKGTYLATRYRRIATRRGKKRALVAVGHSILIAVWTMLTRDLPYHELGAEHFIERLGPHGKARQARRLIDQLHQLGYQVSLHPAQAA

SEQ ID NO: 142144 - protein, 319 aa, unidentified
MVVGIDVAKAELVVAVRPSGERWTVANDERGMHTLVERLRSVAPDLIVLEATGGYELLGVAALAAAALPVVVVNPRQVRDFGRSTGQLAKSDAIDADLLALFAERIRPAVRPIPDADAQELEALLTRRRRLLEMLGAERNRLRQVFGKGKRPVKKSLKAHITYLERELRIADTDLGAMVHQSPAWRERDDLLQSVPSVGPVLSRTLLADLPELGRLSRRQIAKLVGVAPLNRDSGTMRGRRFIPGGRASVRAVLYMAALVATTRNVVIRAFYERLVRAGKPKKLALVACMRKLLTILNTMARTGVRWSAKYVAPALTTA

SEQ ID NO: 142145 - protein, 312 aa, unidentified
MSQTFVGIDVGKHYLDVHILPAGQSLRVDNDTPGIAQLLSKLTAFDLARITVESTGGYELPVVAELYAAGWPVVVVNPRQVRDFARATGRLAKTDTIDAQILARFGELIRPPLRPAVDETVREIKDLVARRKQLLALRGAETSRTEHARQPVILRSLRRTLKVIEEQILLVEQAIATLIQNSPVWRRTVQILQSVPGLGECTAAALVAALPELGALTRRQVAALAGVAPINRDSGMLRGKRMTGGGRASVRLALFMPTLVAIRHNPVIRDFYLRLLAGGKAKMTAVIACMHKLLTIVNAMIRDNRTWTLNPA

SEQ ID NO: 142146 - protein, 338 aa, unidentified
MGVYAGIDLHSSNNYIGIMDQDYKRLFGLRQPNDLNHVLKVLEPFKADLKGVVVESTYNWYWLVDGLQEQGYTVHLANPSAIKQYEGIKHTDDKWDSFWLAHMKHLDILPEGYIYPKEQRAVRDLLRRRLFFVRQRTANILSLQSTITRNLGIKMPVNGIKKLNMDDACKLFDSSNLVFMAQNSISAIRHLGEIIKGIEKEVKSHVQLRKEFVMLLTIPGIGAILGLTIMLEVGDINRFSKVGNYASYCRCVSSKRLSNGKKKGENNKKNGNKYLAWAYVEAAHFATRYMPAAQKFYQQKMAKANGAVATKALANKLARASYFIMRDRVPFDEDMLFK

SEQ ID NO: 142147 - protein, 447 aa, unidentified
MQMVHPDAAAIDVGATMHMAAVRADRAPEPVRSFGTFTADLHRLVDWFTECGVETVVMESTSVYWIPIFELLDARGFNVFLVNARDAKHVPGRKTDVSDAQWLQRLHSFGLLRASFRPKGQIAELRAYVRQRERLLEYAASHIQHMQKALTEMNLQLHHVVTDITGVTGLRIIRAILAGERDPEALACLRHYSCRSSAETIAKALTGSYRAEHLFALEQALALYDAYHEKASACDARIEAVLKELSFHRGHGHGSAPRVSRRRNRTDQANAPAFDVREALFALLGKDLTAIDGLGPYLSLKLTAECGDDLSSWPSAKHFTSWLGLAPSNKVSGGKMLSSRTRRSGGRAAALLRLAAVTVGRTDTALGAFYRRLSARIGKAKAVTATARKIAVLFYNAVRYGMDYVDPGASSYETRYRTRVVNNLHRRAKAFGFVLHPLEPKVDAAVS

SEQ ID NO: 142148 - protein, 335 aa, unidentified
MIPKNANIEFYLGIDISKADFHVALLRASDHKVIAQKTFPNHAKGYQALYDWLLKNTSADLPVHLCLEATGSYGDGVAFFFHGKAVKLSVVNPRAIKAHGASSLRRCKSDPADARLIADFCLEKQPAAWVAPTPAQQKVKAFSRRLTALKKSLAQEKNRRDTTTDKDILKDIKAHIRWIENHIEKLEAELVALTKADEQTARQLKLATSITGFGDKSAAHILAEIGDINIYQDARQLSAHAGVTPAIFQSGKHERKYTRMTKAGNSHIRKMLFFPAMVAMQHNPICREFAARLEKQGKSKLAIIGAVMNKLLRILFGVLKHQKPFNPNQLKTTQN

SEQ ID NO: 142149 - protein, 377 aa, unidentified
MHSENIAAYIGLDVHKETLAVAIAAPERLGEVRYYGTINNEAQAVRRLFQKLQGLYGNILSCYEAGPCGFGLYHQLTAMNIKCQVIAPSRIPKSPTDRIKNDHRDAISLARLLRAGELTPVWIPDLTHEAMRDLIRARAAAKRDSRVARQRILSMLLRTDKRYAGKHWTGKHRTWLANQSFSQPSQQIAFQHYCQSLEQIEDRILQLDQEISRLLPEWSLCNLVCQLQAIKGVGQLIAITLVAELGDFSRFSNPKQLMAFLGLVPGEYSSGNSIRPRGITKVGNSELRRLLYEAAWSYRTPAKVGAWLIYYRPDSVTQYSKDIAWKAQQRLCSRYRTLTAKGKKSQVAITAVARELTGFMWDIALAAQSSFSQQKQN

SEQ ID NO: 142150 - protein, 384 aa, unidentified
MRTDQTFTTGIEEPLLAVSLELAAANWKVALHDGRREKPAVHSVSQPQAMARLQAVLELVERHKEKWLLPADTPIVVSYEAGQDAFWIYRALRLKEIDCYVIDPASIPVERHQRRAKTDRLDAIKLVTNLRARLHGERDRMHVVRVPSLQDEASRHLMRERGQLQKEVLQHHDRVRKLLATLGCWDDVDHKTFAGRLARDEVRCYDGTPLPPELRGRLLRECDRLSQAEQQFAAVERSRHEMVSAPARKRIDDLSRLKGIGPVGASRLALELFWRAFHNRREVGACVGLVPQPYDSGQSHVDQGISKQGNRRVRALLIEMSWCWLRYQPDSALTRWFNRRTQGTGPNRRARRIAIVAVARRLAIALWRYLKDGVIPEGANLKAV

SEQ ID NO: 142151 - protein, 366 aa, unidentified
MTNVITYVGIDVHKKDLFVAMAVGSESTPVTWQVANESQAGRRLVRKLERDAPGPVRVFYEAGPCGYALQRQMTTSRVQCDVVAPALIPRKPGERVKTNRRDARKLMELGRAGLLTTVQPPTPEEEAVRDLARARDDAREDLQRSRHRLGKLLLRRGLHYAGRNWTRAHRQWIDGVAWTHAAERAVVNDYLLAIDQTEARLGELDTRLTEIAEQEPYRERVGWLRCFRGIDTLTAMLILAELHDFRRFPSAPALMAYLGLVPGEDSSGEKHRRGRITRTGNALVRRLLVETAWHYQHRPSVGVALTRRRKGQPGWVIAMADKAQQRLCRRFRKLAAEHKPPVKIATAVARELAGFVWAALQPAPAR

SEQ ID NO: 142152 - protein, 351 aa, unidentified
MSSEKYIGLDVHQATISVAVMDSQGKVIMESILETKASTLLEFFAGLRGSLFVTFEAAWLYDLLKPHVTEVLVCNARRNALLKHGNKSDKIDARKLAERLRLHDLKPVYHDETGVRMLRELVRSYLTVVKDLSRVMNRWKALYRSWAIPCAGRDVYYTRHRSQWLEKIPEAGTRRRAEQLYQQLDLLQHLRQQARREVLAESRKHSITAKLRQIPSLGPIRSALAVALIQTPHRFRSKRQLWTYSGLGLATRDSGEYHYVRGQVQRRKKQATIRGLNKDYNHDLKGLFKGAATRASVQPGPFQEFYQRSLAKGIQPTMVRLTLARKIAAITLTLWKKGEDFDIEKLKSQAT

SEQ ID NO: 142153 - protein, 419 aa, unidentified
MSFKILKNNCCGLDVHKTWIFACIGITDPYNRTEYKQARFSSYTKGLQELCDWLAKYNCNDVCMESTGKYWIPIFNILEKNNIWVTLSHPKYTKPQKGNKTDRKDARWICDLYMCGMVKPSFIPPADIRQLRDLVRYRFKLICMITGEKNRAHNCLTVSNLKLDDVFSDIFGKSSRSITEQILQHPGEYFDVAPFVHGRCKTPIEEIQAAVDGAISNEQAVKLRQCLSHIDELEMHKTEIEREILRLSEKYEDALSLIRTVPGFDKNPMTAIQVLSEIGGDMSVFPTDKHLVSWAGCCPRNDKSDRKIKSTRISRAGSYFKPVLVQVANALIKSKKNPEFAIRYRRIKARRGHKKAIIAICRMILTAIWHILSDLKPYTPEGFLAPPSVNESKVLTTSQALNLLKQRGYVINDAASPVI

SEQ ID NO: 142154 - protein, 422 aa, unidentified
MLEETQETEEIIQRVAALDVGKAELTCCVRVPSPGKRGKRAQEVRTYQTMTRWLLVMADRLAELGVTRVVMEATSDYWKGVYYLLEAHGFETWLVNARDVKHLPGRPKTDTLDAVWLCKLAERQMLRPSFVPSPAIRQLRHVTRYRADLVAARTAEKQRVEKLLEDAQIKLSVVASDIFGVSGRAMLAALVAGERDPKRLAQLARARMRAKLSLLEEAFSGFFTDQHAFLLAKMLARVDALDADLAELDAKLAELIAPFADAVERLDEVPGVGQTAAHLLLAEIGADMTRFPTAGHLVSWAKYAPGVKESAGKRKGSGSTGHGNPYLARVLGEAAVAAGKTDSFLGERYRRIARRRGAKRAIVAVGRSILVIVWHLLSDPEAHFHDLGAGFYDTRIGPERAKRNHIRQLEALGYKVTLQPAA

SEQ ID NO: 142155 - protein, 310 aa, unidentified
MENIIVGIDVSKDRLDVAVRPSGEFFVVERNAAGLEQLIKRLKAISPRIVALEATGGFETVAAAALASAELPVVIVNPAQVRSFAKAIGQRAKTDPIDAAVIAHFAEATKPEPRPLPDEATRLLADLVARRRQIIEMIGAECQREKRVTVPRLKKSINRLLKALKKELASVDADIDDAVRGSPAWRDKEDLLASVPGVGPTIARTLIAELPELGQLGRKQIAALTGLAPFTRQSGQWRGNSFISGGRAPVRAVLFMGAMVAKQHNPVLKAFFDRLVAAGKPKMVALIAVARKLLTILNAILRDNRPWQTA

SEQ ID NO: 142156 - protein, 343 aa, unidentified
MAYFAGLDVSVKETSVCIVDDVGKIVREVRVASEPEALLQVLTNAIYCFKRVGLEAGPLSQWFYSVLAEAGLPVICVETRHMRAMLKAQINKTDRNDARGIAQMMRVGLYRPVHVKTLRSQKLRVLLTHRKLLQSKAIAIENDLRATLRNFGLKVGTIGTVKFEARIRELVENLPDMAALVEPLLIVRRVVREQLGILHHRLLAIVRDDDVCRRLMTTPGVGPVVALTYRVTVDVPARFRNSKAVGAVFGLTPSKYQSGENDRTGAISRCGDEMMRMMLYEAAQSMLVRSTKWSWLKAWAMKIARHRGMKKAIVALARRLAVIMHRIWVDGTEFRWTREVAAA

SEQ ID NO: 142157 - protein, 319 aa, unidentified
MTREVDVTYVGVDVSKARLDIAIEPSGEAWSVGNDQAGIDCLVGRLQGEVVGRIVVEATGGQERLLVAELYQAGLPVARVNPKRVRHFARALGRLAKTDRIDAAVLADFGRLTEPLLVRLPSQQEEALATLVTRRREVVDMRTAEENRLRLAKPAGRARLEKHIRWLDEEEAELRREIEALLRQTPELDDKHTLLCSVPGVGLILSATLLSRLPELGQLTRRKVASLVGVAPFNRDSGPRRGLRRIAGGRDAVRAVLYMATVSALKCNPVIIAFKRRLMAQGKSSKVAIVACMRKLLTILNAMVRDQRPWFDPVILPHP

SEQ ID NO: 142158 - protein, 364 aa, unidentified
MDTLFHVGMDVHLSGIHAVVLAGQQVEPDSEQRLPYDFTKIRKPFRRLLARGPVVAAYEAGCMGFELARFLEDMQVPCIVAAPGKLPRKPSDKIKTDRRDAMMLARLLRRGELEAVRIPSREDEAVRDYLRARGDLRGDILATKHRLSKFLLCHGHLYSGRNWTIAHHKWLRQLELGSAMLKQTFEGYLACLLEQLERLRSMDAEIQQLATSPRYASAVGKLRCLRGINYLTALSLVCEVGDFKRFATAAHFMAFLGLVPREYSSGTKRLQGGITKSGNTHLRRLLIEAAWHYRYNCAPSKHLRERREGQSPQVLAYVSRAITRLHHKYVKLVLIKGRKPQVAVVAIARELAGFVWGLMVGNVD

SEQ ID NO: 142159 - protein, 403 aa, unidentified
MHIGGAAMFYCGIDVAKRKHAVAILDEKGLAQKPVFEVENTQAGLAFLVDTLTKVGGDVMVGLEATGHYWLSLYDVLTQNNFPVAVINPLQISAYRKTGVRKVKNDRTDAVWIADFLRIANLPASSRDIPMLLQLREFSRFRFWLSEQIGDCKRKLITILDRVFPEYEKLFSSVFVESSRALLKEAVSAQEFVDFDLQELTDLLAKKSRGLFGIEKAQQIQEQARQSVGVGFLTDAVQVEMRCLLAQIELVEDQQDEVEKAEAELMAVIPQHILSIPGIGLPTGAAILSEIGDINRFETADKLVAYAGIDATVHQSGQFNGTEMHMSKRGSPYLRLALWQAASMAIMHNDELKAYYAKKRAEGKAHGTAVGAVCRKLLTRVFIILKENRAYEERKKPILPLDS

SEQ ID NO: 142160 - protein, 367 aa, unidentified
MKKNSTVAQSPKRATARKQGPITIGMDLGDKISRYCVLGANGERLSEGGVATTRKAMAQKFSGMRRCRVAMEVGTHSPWLSRWLTSLGFEVIVANARQVKLISASARKNDRMDAQLLARLARVDPQLLRPIRHRSEQAQADLMTIRIRAALVEARTSLVNAARGFAKAQGNRLPACDADAMGVEKMEGLPAEMRERLRPLLEQVESLTEKIKTLETKIEQIARTWYPETALLRQVSGVGTLIALTFVLTVEDRNRFQKSRDVGCYVGLRPRQSESGQSQPQLRITKEGDRYLRQLLVQGAHLILNRRGPDTDLKRWGLKLASRGGKNAKKRAIVAVARKLAVLLHHLWVTGEVYEPLRNSQAAQAVA

SEQ ID NO: 142161 - protein, 438 aa, unidentified
MNCQICGKKGEYDLARRIRANGKTLLHARYHITGGCDTDKNFIVAAVYNADTGDLEAREFKQHRDDALRAAEWFRSHQVEFVIIESTANYHLLYYDTLRQEGINIGVINPLVVKSLLRVEGKSDKGDAMTLARLAASFDLKTSNMPDSQQRELRLLFKRIDAWKNQRTQITNRANGILTGYGFTVFRLVPFNSPAGYKILQAVIDRRKPEEIAALHRTKAKRIEIEKSASVQLPDYLLGYLQEVLGDVRLLNQRILDGEVSLYASIAANDLTAQVELMCTVPGVSRLLALRVIAEMGSNYHQRYYSAAAFAKGIGVVPSNEVSGGKLLKRRASHGNKRLKMHLLSSAKAFAIHGKGPLRSWYDSYRSRTHYLKAISALSRRIAEAMWWVMVRNEPYKYWQGEPIPEESSVILFGDQVVNTETGEIFDTLVDAVPVSDE

SEQ ID NO: 142162 - protein, 343 aa, unidentified
MDYFAGLDVSVKDTSVCIVDSTGKIVREVKVASEPDALLAALRNPAYDFKRIGLEAGPLSQWLFSALAEAELPVICVETRHMRAVLKAQINKTDRNDARGIAQMMRVGLYRPVHVKTLRSQKLRMLLTHRKLLQAKAIAVENDLRATLRNFGLKVGVVGRVKFETRIKELVESFPDLVALVEPLLVVRRVLREQIAILHRRVLAAVRDDEVCRRLMTVPGVGPVVALTYRATVDVPARFRKSKSVGAVFGLTPARDQSGERDRPGAISRCGDEMMRTTLYEAAQVMLLRSAKWSWLKAWAMKIAKHRGMKKAIVALARRLAVIMHRIWTDGSEFRWTRGAAAV

SEQ ID NO: 142163 - protein, 344 aa, unidentified
MHATITTIGLDIAKSVFQVHGVDANGHVVVRRQLKRRYVVAFFEKLAPCLIGIEACASSHHWSRQLRALGHTVRLMPPAYVKPYVKRQKNDATDAEAICEAVGRANMRFVPTKTPEQQSGLMVHRTRHLFIRQQTSVINAIRAHCAEFGIVAPVGRRGVEELLNVLANAKDEQVPEIARACLLALGAQLRRIKEQILEFDRVITAWHRSCETSKRLDEIPGVGPALATALVASVADPRAFRSGRDFSAWIGLVPKQSSSGGKPRLGSISKQGDRYLRGLFTAGALAVIRYAKIHGTGHRPWLTALLARRPTKVAAIALANKIARMAWAMMARGERYREPVALAA

SEQ ID NO: 142164 - protein, 436 aa, unidentified
MRGCRCSMIMGFTKPIEHFNLQRKKVITMNTLYVGIDVSSKSNVVYLMLPNGDKHSNFSVANSHEGSTLLVKKIYSALTSHSLDTVLIGLEATSVYGDNLVYFLREDATLAPFNRKIHVLNPKQVKKFHDTYNDLPKNDYVDSFVIADCLRFGRINKEVYMGDYRYKALQNLTRARFFAVQNLVKEKQRFMNVLFKKYSTMTQEKVFSDAFSTTALAVYDEFESAEALANMDLHELTDFIIEKGKNRFPDPVAVAKAIQKAARSSYRLPKTVNDSVNQVLSISITSMKALESQIKEFDKAIKALMELLPNVLISIPGIGPVYSAGIMAEIGDINRFDNQASLAKYAGLAWKQHQSGGFEAEVTRLIPSGNRFLKYYLCEAAFSLVRCDKKYSDFYHLKYKEVNRCQHKRALALTARKFVRLVFRLLKDNRLYCPAK

SEQ ID NO: 142165 - protein, 376 aa, unidentified
MLSAHSAGMSHPPLPGRETAITTIAHAEPIRVTVGVDTHGDVHVAYATDQLGRHLAATRIATTPRGYRALLDWARGLGQVAAFGVEGTGCYGAGLARFLGVQGQVVVEVNRPDRQARRRRGKSDPVDAEAAARAVLAGQATAIPKTGDSMVEMVRCLRVARATAMKARTQAANALRALLVTAPVELREQLRDLDPSKLAATAARLRPGAIVTPTAATKLALRTVAERQLALTAELTTLDAELDRLTARAAPALRELCGVGAEVAGALLVTAGDDPARLRSDAAFSMLCGASPIEASSGKTVRHRLNRGGDRQANTALYRIVVVRLRWHEPTRKYMARRTTQGLSKKEIIRCLKRYVAREVFAALMKTNPNGLAQAP

SEQ ID NO: 142166 - protein, 390 aa, unidentified
MSVTDVQFQQEPAIDTKLGAIFLSMELSRSTWLITSITPGGGARMSKRSLKAGDVAGLFERIDQLQTKAKTRTGQMFPVITIQEAGLDGFWIHRVLEREGIESHVVDAASIATSRRRRRAKTDRLDGETLLRTLLAYKRGEPRVCAMVRPPKPEDEDRRRNSRERATLIAERVKIVNRIKGLLFTQGIFDFVPLRKDRRQRFEKLKTGDGRPLSLHLNAEIGRLLDRVELLLTQIKSVEATRDALVAPTPENGGIESRAAMLMHLKGVGPDFAEVLYSEGLYRHFDNRRQLASYAGLTPTPWQSGSVSRDQGVSKTGNPRLRTTMVQLSWFWLLHQPQSALAQWFQERVKLDGGRRRKTAIIALARKLLIALWKYVQFGVVIEGAMMKTS

SEQ ID NO: 142167 - protein, 445 aa, unidentified
MEIMFSHCAGLDVHKKRITACRVPPDLTGQQADGLLELQDFGTMTADLLVLSDWLAAAGVTHVAMESTGEYWKPVFNILEESFTVFLVNASHGKQVPGRQTAKADARWLAKLMRYGLLQASFIPPAGQRDLRDLTRYRTKLVQERGREVNRVQGVLERANIKLAAVATNIFGVSGRAILAALIEGRADPATMAEWAKGRLRSQVPLLEQALTGLVRDHHCRLRTIQLAPLDFLDEPIDALSAEITGVLTDLSGGEPPSTLANPSPPAEPVVAPAPPQPPLTFARAVSLLDTIPGVNQRGAELLVAEWGIDMTRFGTAERLSAWSGVAPGSDESAGKQRSGTTRKGNRALRAGLTPLAHAAARTKGPYLSAVYHRLAARRGKKRAILAVAHAIVVSAFHMLSRNEPYRELGANYFDEHRRHQRVDRLARRIERLGDQVSLQPVTAA

SEQ ID NO: 142168 - protein, 402 aa, unidentified
MNCVGIDVSKGKSMIAVMRPFGEVVVSPFEVRHTANELSELAGLLKSLDGETRVVMESTGNYHAPVAWLLHGAGFYVSVVNAMLVHDYGNNSLRRAKTDKKDAVKLANYGLDHWLTLPRYVPEEDTRLMLKTCYRQYQQYSKVQTMLKNNLISLLDTAFPDANRLFTSPPRADGSEKWVDFVATFWHCECVCGLSKKAFTAKYQKWCRKHGYNFSQDKALDIYASACGRFGVMPKTNTAKLLVEQAISQLQTTSAALAALKQEMQSLAASLPEYPVVMEMFGVGPTLGPQLIAEIGDVRRFHSKKALVAFAGIDAPPYQSGQIDVRSRSISKRGSASLRRTLFLVMGVLLQCAPMDEPVYQFMDKKRSEGKPYRVYMMASANKFLRIYYASVKAYLESLEHD

SEQ ID NO: 142169 - protein, 387 aa, unidentified
MTHGSHEAFAAFVGIAWADIKHDVCLQAAGAEKRESFMLEHTPETIDAWGSTLRTRCNGYPIAICLARNKGPLVSALRTYDFLVLFPINPIPLARYREAFTPSRAKDDPTDAELPLALLLTHRDKLQPLQPQSPAMRALAQLVEHRRRVGGDTGRLTNRLTSTLKNSLPHVLHWFQEKDTLVFCDFLRRWPPLKAAQRARRSTLETFFRDHHVRSTDVIDTRIRAIKAATPLTTDEGVIAPHALLVQPLVRQLRVTLHAIEDFDTAIAQRAQSHPAFSLFQALPGAGPVFAARLLVAFGEQRERYASATERQQYAGIAPVTERSGKKCWVPWRLQGPTCLRQTFGEWAAESIRHSFWARVYYQPQRDKGKAHQAAVRTRAFKWLRIL

SEQ ID NO: 142170 - protein, 719 aa, unidentified
MSSYRPAATRVLRLRVKDKHASWLSGLAREVNTVFNYCNELSVKVFERERRFLSGFDFWPFLKGVTRGDCALHLPVQAVQEIAEEYARRRRQHRKVRLAWRKSGGARRSLGWIPFKVRTIRYRGGQIYFAGRWLSLWDSYGLSNFALRAGNFSEDSRGRWYLNVCVPRAPRVGGEHNKPSVGSILDRSVPSLGIDLGLKTFAAFSDEAIPPIEAERFYRDLEPALARAQRARHRNRTRAIHAKIANRRKDFLHKLSTDLVKANGATFVGNVNASALAKTRQAKSVLDAGWSTFRNSRAGPKGRKDLGISHHGTTGSRYVAPWITLRIGKEPWRRATYEWEPAMKNVRFIGLDVHAETIAVAVAEPGGEVRSLGTIPNRAESVRRLIGKLGKPESLKVCYEAGPTGYVLYWQLTELGVACEVVAPTLVPVKAGDRVKTDRRDAEKLARCYRSGDLTAVWVPDAAHEALRDLVRARLAAKRDQLRARNRLSKFLMRQGRRAPEGATAWTVKYMDWVKQQHFEHAAQEATLVDYLHEVEHVAERIVRLDRDIDAAVERTPETLRAVIAGLQSLRGIAKISAVTLVAELGQLSRFAHPRQLMGYSGAVSREHTSGPQVRRGPISKAGNAHLRRIVTESAWAYRHRPSIGRALAARNREQSEAVKAIAWRAQHRLHARYCALLARNKTKQKVIMAIGRELLGFIWAIGVEIERGHTAQEVKRAA

SEQ ID NO: 142171 - protein, 361 aa, unidentified
MTRHLEGDPARLILALDLGQSKSAFCSFETTTGAADFGQVTTRRSALQPLLEQKRPQRVVIEIRPLAGWVYDLVYSLKLEIQVADPTQDAWQWKNVKRKTDQDDALKLARLSALGQLNLVHIPTPRMRPWRRLIQERVTLVAEETRGKNRIRALLLAQEQTWLPGKSGWTKQAVTGLTAAARPLAECPAEELWRGILHTELQRLHQTATLLKTVDDKLDELGAGHANVQLLQSIPGVGPRTAEVVATTLDDPHRFRSGRQVAAYAGLTPRRWQSSSVDRQGRISKRGSRTLRWALNQAAWMAVRYNPWARAVFTRIKAGKRERAKIAIVALMRKLLVVAWAMLRDQRRYRRPVPVAETVAA

SEQ ID NO: 142172 - protein, 395 aa, unidentified
MYFLGIDIGKRTHVASIMNEEGKVLLKGFSFPNTTEGAESLIERMVDYSGAPSDFVIGMEATGHYWLSIFSYLHESDYLIHVVNPLQTDGWRKGTEIRKRKNDIIDSVLIADLMRYGSFVETVLSDENVFSLKQLSRYRTYLVGTASDFKRKIIAVLDQVFPEYATIFTKQGVFGKASKELLLAFSAPIDLENISSETLAQYLAELSRNRIKAEKADQLKQAASNSFGVKFAQEAFTFQLRSMIEQLKFIESQIKETEREIKHIMDTLNSVILTISGIGPINGATILGEIGDIQKFSNPKKLVAYAGIDASVTQSGQYEATNNVMSKRGSPYLRKALFSAALVASQCDPVFSAFYQKKVSEGKHHLTALGAVSRKLCYVIHAILTKNEPYIIVSD

SEQ ID NO: 142173 - protein, 440 aa, unidentified
MAMRKREDLVFPNAAAIDIGASSHWAAVPPHCTDAPVREVGTMTDDLNGLADWLLACGVDVVALESTGVYWIPVYEVLEQRGLKVWLVDARQVKYVPGRKSDVQDCQWLQRLMSYGLLRAAFRPEADVCVIRAVARQREVLLTQQASWVQRMQKALVQMNIQLTEVISDVMGQTGQAIIRDIVAGQREPKLLAKHRHRRIKASEKEVVRALTGNWREEHLFVLQQALAMYDDIAGHLTECDAKLRALLAERSASSVDLGKAPRAGSKARAEFDSRQQLANWAGADLTRINGLGLDSVMKILSEIGPDLSRFETVKHFCSWLGLCPATKISGGKVLSARTKRSANRVRQALKMAAMSLSHSDSALGAFYRRLCARMDKPSANTATAHKLARMVYFMLTRGEVFVDQGQQRYEAQQRERSIAALTRRAAALGFHINPVGAAA

SEQ ID NO: 142174 - protein, 400 aa, unidentified
MKGPIVSIDVSNGNSHFQCFIQRGTKMGKVHRIQHTVEGFRFLKSKVEEVAMKTKEEVVVVYEATGVYTTPLQRFLEKSEIKQYQISPLQSAKQRKTEIHNKKTDKKDPESIAEVYYAKELRKYEREADIYHQLRTANRVYEDCLEHLRKYKVTFQSHLSIVFPGYMKLFQDGYSPISLQLLEMYPHPDRLKNKQPETVAKKLNKHTDHSFEVCLKNAKRVIEFANKTYPGCDKEDPWVAVLVEDIHQLQAMIEQAEAKLDKIIKLAKTTPYYFIILSIDGIGPNLASRIIAEFGDISKFKTRGAMVAYVGNDPNRAESGDIDGYHLSISKKGNKRLRCILYLAVTCSIRSKKENPINAFYQKKRQQSTPLKSKAAKVACITKLIRTIHGMCKNGTEFTS

SEQ ID NO: 142175 - protein, 365 aa, unidentified
MRYHGVDLHKRYVTISVRNEEGTEEEFVRARADIMGYVESLGSEDAVVLEASAGALYWAEKIQSQGASCVVIDAYRFRIIRDSWQKTDKRDAANLSLALWLASRSGEMKLPEVWQPGPVVRELRRLFGLYELLNKQLRQLKNEIHGVLLDNGVRDRALGKRLANDPAKAEELLKTVELSAASRVCIMTSLALLASVEEQKEALTREIYQAGRPLEAEVKLLISIRGVTPLLALVFLSEVGDITRFRSARRLHSYLGVVPTVRSSGGVTHNGRINRRSRGLTRTLFTQAVIHLSDSSLVLTHFYRELVARKGYGRARIALLRKTFSMMRRMLLAGEPYRWVEQKLYEKKLSGYAKELKKGEKPRAA

SEQ ID NO: 142176 - protein, 375 aa, unidentified
MSKHSEAFVALDTSKLRNAVAIADGGRAGEVRFLGEIENSTAATAKLIRKLEAKYERITFCYEAGPTGYELHRQIKALGHECVVVAPSLIPKKRGDRVKTNRRDAVNLAKLLRAGELTAVWVPDRRHEAMRDLTRARETAVIDLRSKRQQVSAFLLRQGRWYPAGKKTWTNADRNWLASQKFEQPERRIVFEEMMFAIRQAQERVERLEPAIRAAVPDWSLAKVVTALMALRGIDLISATGLLAELGDLSRFQTAPELMGYLGMGSSESSTGDTIKRGPITKSGNRRARRTLVECAWSYQHPPRVGIAKQQKVAAAPPKVREIAWKAQCRLNRRYRALIRRGKLKTVAITAVARELAGFVWAIAREAGSAEPAAK

SEQ ID NO: 142177 - protein, 318 aa, unidentified
MVNESFVGIDVSKQWLDIGWESSGRTERLAHEEAAIAGLCERLAQERPSLIVLEATGGLETHLASALAASGLAVAVVNPRQVRDYARACGRLAKTDRIDALILAAFARAIRPQVREPKDEETAELGALLARRRQLIDMRVQERLRLERASALQRKSLKEHIDWLTKRIQRLDIELTHRLRNSSLWREREDLLKAIPGVGVITRSTLIAMLPELGRLNRREIAALVGVAPFNRDSGKHRGERVIWGGRAQVRQVLYMAAVAAARSNPVIRSFYQRLRAQGKPAKVALVACMRKLLTIMNAMLKHNTPWNSNTLDLKHSC

SEQ ID NO: 142178 - protein, 419 aa, unidentified
MTKKSKNSTLIQIVHPICCGLDVHKDKISACLITVDDNGKEQHEIREFSSFTQDLQKMKTWLIGNNCPVVAMESTGVYWHPVYNTIEDTMEVVLVNARHIKNVPGRKTDICDSKWLAGLLRHGLVKGSFIPPEQVREWRELSRLRKIYTESLADYKRRVHKLFITANIKIDSVVSDLFGLTGLNLINLLCKNDEVTLEKVQECAKGSLKKKIPELYLSLHGYFKNHHRFQLIGMMEAIEMFQRQIEQINSRLEILTRDHENLLERIDEVPGIDKKSAQSVLGEVGVTLDEFKSMVAFVAWAGLCPGNNESAGKRKSGRNAVRNHPFKTILIQIAWAAIKTKGSYYKAKYYQLKARRGAKKAIVAIAHRIAKAIYNIIKNGDRYKDLGEEYLSKPNKQRMLKNLAKKADELGMKLVPCEG

SEQ ID NO: 142179 - protein, 444 aa, unidentified
MRRCIGLDVHREFAQVAIWEAGVVRQAGRIQTTPEALREFAESLCASDEVVLEATGNTYAIARLLERQVGRVVVSNPQKTRAIAEAKVKTDKVDAAVLAQLLAAGFLPAVWLPDEATFALRRQVARRAHIVRQRTRLKNQVQSILHRNLVPRCPAADLFGRKGRAWLATQDLPRDEQQAVGALLRQLDFHGQELRIVDAELGRVGLEREEVRRLMTIPGVDATVALAIVAAVGDFGRFSSPQRLVGYLGLNPRVRQSGGHPAQHGRITKQGRAHARGMLVEAAWAAAKTPGPLRAFYERVRGRRGMQVAVVATARKLATLCWHLVTTGEDYAFARPSLTDKKLRSLQLRAGLPARRGQKGNAAAYSLKEVRRRERALAEQAELAYRQLVAGWQPKPAKQPPSRGVAATTGARRLGPQGGTAARQGFQPQDPALRSGVDHAPHRA

SEQ ID NO: 142180 - protein, 394 aa, unidentified
MTYYIGIDNSSLDHKVHILNSEGNFHSKFIIENSLNGFNRLHEVIRAFDEFMIGFETPHGPLAEYLRYKHLSVYSLNPLKIKRFKETVTISGNKNDNIDAAAIAEYLRKNSTQCRPLLYNSSEVEKLKMLCVIHRRMTEENSRYKNKLHFSLRQYFSLHESLFTDFGCTVQLKMLIKYPTFTDLRKADGDELKEFLKSHRYCLPKYINKIVDKVRLYDQVISPEVEYTCSIEVKMLCAILLEIRQKVNEVEREMKDILDRHHLGRVFRSIPGAGTIISANLLSLFGDNAERFDNASQVQCLFGTAPRNYQSGNYHKVLMRKACNKYARCIFYIFAFASLNYNPWARAYYDDQRAKGKTHSVALRALSNKWVKVIFRLWKDEIIYREDKKIAVAA

SEQ ID NO: 142181 - protein, 434 aa, unidentified
MIMNHQNQNTSTASTPLVFAAFVGLDWGDEKHALSLGAAGSTTIERTFLEQTPEALADWANALRTRFPNGKIAVCLEQARGALLSALLQYEHLVPYPVNPRSLARFREALYPSRSKNDPVDADLLLELIVKHRDRLRPWRPDTVQTRQLALANEQRRHFIDHRTALTNQLTAHLKAIFPQALELVGEDLASPMATDLLKKWSTLQALQKVKPTMLRKFYYGHNSRSEQLLTQRLQLIKTAVALTQDPALLALHSLAIQTLVAQLQALRPFLDQYDEQIAQLFATHPDAAIFDSLPGAGAVLAPRLLAALGTDRDRFESAVAISCYSGIAPVTEQSGKTQHWVHLRWSCPKFVRQSWHEFANSSRKFSPWAAACYEHLRRKMDHHESVRKLAYKWQRIIWRMWQDRQPYDEARYLRSLQQRGLEIYAPLTAQTGE

SEQ ID NO: 142182 - protein, 373 aa, unidentified
MLDVSSTAPTDVRLWVALDVHKLSIVAATLPAAGGQPEVQRIETTERAIRRFIERLGGAEGLALCYEAGLGGFDLLRLFSGMSVACDVIAPSLVPVRAGDRVKTDRRDAKKLVRLFRAGELTFVAPPTPQTEGLRELMRCRDDLRCARTAARHRVAKQLLRHGRIYREGKKAWTKMHRAWVARQRLDDVLAQAALAQMLIHLDGLDRQIDALDQDLERIAVAEPWLKRVAALCAFRGISTRTALGLIAEIGDFNRFAHPRELASYLGITPSEYSSGEQQHRGRITKAGNRHARRLLIEAAWHYRHHPRRPDRGPQPSDRAWQAQIRLHRRWTHLTMHGKRSTVTNVAVARELVAFLWAAMTDQPLRKGVSATA

SEQ ID NO: 142183 - protein, 367 aa, unidentified
MKKLSTAAGKESRDFRQQKLTIGLDLGDRSSWYCVLDEAGNLAMEQRVSTTPKALREVLGGMPRSRIALETGMHSPWVSRLLSELGHEVIVAHARNVRLIGESRKKDDRLDAQALARLARIDPQLLCPVKHRSARAQADLTVIRARAGLVRARTALVNTARGLAKSYGERLRGCNVRNMNPEKAEGLSPELQRALEPLLAALESLSEQIREYNQRIESLAGESYPQVGLLKQVKGVGTLIALTFLLTLEDAQRFRKSRDVGCYLGLQPGRRNSGQSEPQMHISKEGDPYLRTLLVQGAQHILGPFGTDSDLRRWGLRLAERGGRNGKKRAIVATARKLAVLLHHLWVSGEVYEPLRNSHECVVTAAA

SEQ ID NO: 142184 - protein, 343 aa, unidentified
MNVFIGLDVSLASTAICVLGPQGRIVEELQAESEPEALVRAIASLSYSIDAIGLEAGPLSQWLSKGMEEAGFDVVMMETRLVKAALKAMPIKTDRRDAQGIARLLQMGWYRPVHRKSVSSQEIRALLSARKSIQQAIINLELSMRGVLRNFGLKLGHVTRIRYEARVRELVEQNEILSVSTEALLRARAQLRVELAELDAKIADLAKQDDVCRLMMTMPGVGRIVALTVKAAIDDPTRFVRSKDVGPWVGLTPRRTQSGEMDIVGQITRAGDRALRTALYQAAMILMHRGSPNWLQAWALRVAHRRGSKRALIALARRIGVVLHRMWRDGTPFRHAQSCPATV

SEQ ID NO: 142185 - protein, 411 aa, unidentified
MERVYERCCGLDVHKGSVTACVHVPRREGGRGELIESFTTMTADLLALRDWLQGLGVTHVAMEATGVYWKPVWYVLEDDFELLLCNAGHVKNVPGRKTDVSDAQWLCQLLEHGLLRSSFVPPKPIRELRDLTRYRKTLIRERQREANRLHKVLEDAGIKLACVASDVLGVSGRAMIEALVAGEGDPSVLAELARGRLRAKLPALQRALEGRFAAHHALLCSHILAHLDYLDEAVESLSEEIDKRTRPFARELEQLDTITGVGKRAAESILAELGTDMSRFPSHRHCARWARLSPGNDESAGKRRSGKTGQGNPWLREILIECARAAARSKDTYLKAQYLHLRRRRGDSKAIVAVAHSILVSAYHILDNGEPYRDLGFDHFQRREPQDHIVRRLTRQLEQLGHRVTLEPLAV

SEQ ID NO: 142186 - protein, 318 aa, unidentified
MQAQAATVYVGIDISKSSVDVDSYPVAQPACFTNDEPGRAAAASFLRGLQPSLIVVEATGGLEAPLVGQLATVGLSVAVVNPRQARDFAKAIGVLAKTDRVDAQMLARFGQAVKPAVRPLKPEETLALEAVLTRRRQIIEMITAESNRLSSAAPRIAKQIRQHIAWLEKRLDEADQDLDGMLRQSPVWQHKAQLMTSVPGVGRVTAVTLLAELPELGTLPRREISALVGVCPYSRDSGKYRGRRSIWGGRAVVRAALYMAAIVASRHNPVIRAFYQKLVAAGKLKKVALVACMRKLLVILNAMLKHDTPWHHQPQLAA

SEQ ID NO: 142187 - protein, 343 aa, unidentified
MQTITTIGLDIAKSVFQVHGIDAEGNVVLRRQLKRRYVLAFFQKLPPCLVGIEACASSHHWSRELQALGHTVRLMPPAYVKPYVKRHKNDATDAEAICEAVTRANMRFVATKTPEQQSCLTLHRTRHLFIRQQTSVINAIRAHLAEFGIVAPVGRNGVEQLLGVVADVGDTRLPEVARACVAALGAQLQTLKAQILEFDRMIRAWHRSSEASRRLDDIPGVGPVLATALVASVADPKMFRSGRDFSAWIGLVPKQNSSGGKDRLGNISKRGDRYLRSLFTTGALAVIRYAKIHGTKHRPWLTALLARRPTKVAAIALANKIARMAWAIMAKGERYKEPAALAA

SEQ ID NO: 142188 - protein, 346 aa, unidentified
METQRWAPTDLTDTGAADTGAAGRCSWGIDVGKTWLDVAQGPAGPAWRVRNDPTGWAALVAQAAAADPAWIVLEASGALEVGVVVALDAVGRTPVILNPRVSRRFAQSHGRLAKTDRVDAAMLAQFGWERQPVPRPLPSDLARDLTALLRLRDDLVGQRTQTRNRLAVARPVVRSVLEGQQAALQTAIATVEQELAAVVARDPGWTALVTQLQTVPGIGALTATILAVELPELGTATAKQLAALVGVAPVARDSGQTRGRRAIQGGRRTVRKALYQAVFNAVCNRWCRGSLLQRHYAQLRARGKPMKVAIIACMRRLLGLLTAMVRTGCTWDQLEVHQCADRAAVA

SEQ ID NO: 142189 - protein, 348 aa, unidentified
MKYIGLDCHKQYDHATMIDTETGEIKTKRLSHIKEEFKEFIGDSTGTRMVIESCRDWSKTYELSKDLVEEVILAHPLKVKAIASAKVKTDAIDSRTLAQLLMADLIPQAHLRKAENRLKQRVIRHRAFMVVMRTRVKSRIHGLVDSQLLPVEVLKAKPKNLFSKKGMEWLLSLEWAKEEDRKLIESHLRVMDAINQEISTTNEMVKEIYEQDADAQLLATIPGIGVTLAMLISTEIDGVERFRSPSKLCSYAGLVPSTHSSGGKTYHGRITSEGNRWLRWALVEAAVPASYTDVEVKERLNGFRERKGANVAKTAMARWLLKVVFHVLKERRPYITGYGQLAKAGAAF

SEQ ID NO: 142190 - protein, 339 aa, unidentified
MKYTPVGVDIAKHLIQVHFIDEHTGEVIDKQLRRQDFLMFFCNREPCLIGMEACGGSQHWARELTKQGHKVRLLQARFVKAFVMGNKNDVMDARAIWMAVQQPGKEIAVKTEEQQSVLVLHRSRRQLVKFRTMQINSLHGTLLEFGETIHKGRAAMEREFPEALERLKERLPPYLITVLENQYNRLNELDSLIEDIEKQLTSVAKQNETCKRLLDIPGVGPLIATAAVATMGEASAFKSGREFAAYVGLVPKQTGSGGKIRLLGISKRGDTYLRALFIHGARAAALLTKEPGQWITELKKRRPASVAIVAMANKLARTVWAIAAHGSKYDKNHVSIRPY

SEQ ID NO: 142191 - protein, 335 aa, unidentified
MNFVGIDLHKKTITLEALNQDRHVVKRPTLACSDPQSIRRCFEQFRPFQAVVEATASYEWLWELLEPLAQRLVLAHPGKLRLIAESKNKSDRVDAHVLAELLVLDLIPPACRPGPRQREHRRLVRQREYLTHRTTAVRNKIRRLLSDYNADRPNLFTRDGLAYVATVAVAEADRFILQQLLAEWRHHEEQLQAMDKRLRQFAQAGPAREQEARDVLASIPGVGPVTIDVVLSEVGDVGRFRSAKEVVAYAGLAPRQRESAGKRKELGITKQGSRSLRWVLVEAAWRLVRCSRRWQTVFERLQRRGRKKAIVAVARRLLTVMVALLRTGQRYRRAA

SEQ ID NO: 142192 - protein, 361 aa, unidentified
MPTIADAVRLVTGGVDTHAEVHVAGMVDQVGRVLGTEEFPATTAGFRAALAWMRGHGELVKVGVEGTGSYGAGLARYLAAAGVEVTEVIRPNRQARRRHGKSDPADAVAAALAALNGDAPGTPKPGDGAAESIRALQVARRGSVKARTQAANQLRDLIVTAPEVLRARLAGLAAPQRVELAARFRPGDLTSPAEGAKAAMAAVARRHQALTAEITQLDASLEALLEHAAPAGFLTKKGVGPVVAAALLVTAGDNPGRLRTEASLAALCGASPVDASSGKQRRHRLNRGGDRQANSALWRIVFTRMACDPRTQAYVARRTAEGKTSKEIMRCLKRYVAREIYKALVTQARTPAASVPLTPAA

SEQ ID NO: 142193 - protein, 430 aa, unidentified
MEIIYQKACGVDVHKSFIVAVICDSTSIKPQYSRKRFSTFPNSLIDFRNWLLANDCQNVCMESTGKYYIPVYNALEGYISNVVVSNPKWVRCIKGEKDDNKDAKWIADLFKLGIVRHSFIPPKNIRVLRELTRYLYKLTNMRTSEKNRFTNALTVGNCKLDMVFSDIFGKSSSAIINTIISQNQYSDKDILKNVDKRCKASEEDILNSINGISWVDAQKERMLLIQNHIDYLNSTIKSLKEIIDIVVKPYEDYIKFLCTIPGVDRNSAISIISEIGTDMSQFSSHYRLVSWAGLAPGCNESAGKKKSVKISRAGVYLKPALVEVAHAAVTDKDCDYYAVKYKQISKRRGKKRAIIAIARKILVAIYHMLSTGEVFNPSDLSKVETSDKDRIKYTKNNFMQSAKQLLSLGLTSEEIILLVNSQNSNLTPIT

SEQ ID NO: 142194 - protein, 402 aa, unidentified
MTDGPTRFFGLDIHKEYFVAVAVNRERETVFGPQRVSNYQLDDWARRVLTLQDAIVLEMTTNTYLFHDTLLPQVHSVIAVHPPNVPLVTNVHVKTDKKAAETLAQLHAAGMLTGVWIPPHEVRDMRSLIAHREKLVHLSTMAKNRLHAMEHRKHLVLPDNPFSSDQRTWWETLELSTTEKLLVCSDLDTLEFAQKQVEQIEECLKQKSVQDERIPLLIQLPGVAMLTATTILAAIGDITRFPTAKKLVGYAGLGTRVHDSGMTHSSGRITKAGRKDLRRAMVNAANHAAENHPHWKAELERLEPHLGRSKAIVAIARKLLVAVWHVLTKQVADRFADPQNVARSFLNHAYQVRVRNLPKGQSAPAFTREQLDRLCLGKNLQKISSGSKFIKLPPSKLLIEKE

SEQ ID NO: 142195 - protein, 412 aa, unidentified
MSKIEITAVGIDVSKGKSTVAVRRPGGEIVLMPFTVLHTAEGLAELTNTLRSIGGEIRVVMEHTGMYWRPIALALKEGGFFVSVVNAMLIHDFSDNSIRKVKTDRADSLKIANYALTFWQDLRDYSVEDETRQMLKIQSRLYERTLNSSIALRNGLISLLDQTFPGANKLFDEQRTKAGHIKWVDFVRRFWHKDCVAASSLSTFADTFQKWCKRTGYHYSLSDAERIHGIARNSVATLTKNDSTKLIITQAVDSLNAVYDTLQILRSEMQHLASMLPEYEVVMAMQGAGPITGPQLMAEIGDVRRFTSKGALVAFAGVDAPPFQSGTFDSKSRHVSKRGSPHLRRVLFTICSVILQHSDPENAVFQFMDRKRAEGKHFYVYTVAGGAKFLRIYYAKVKEYLNTIDSQTGCVA

SEQ ID NO: 142196 - protein, 400 aa, unidentified
MRSIGMDVHRSFAQVAILDRGKFSAEIRVELDHDAVLVFGQRLRKDDEVVLEATGNTSAIVRLLTPFVARVVIANPLQVKAIAYARVKTDKVDAKILAQLHAAGFLPEVWVADDETLNLRRLVSERSALVRSVRRVKSRVQAVLHANLVPKYAGHLFGKGGRHWLSTAPLPQAERDLLVRHLDELDWLNGKLEKLDGALARLSLDDARTRKLMSIAGISSVVATAVIAAIGDISRFPTPDRLASYFGLTPRVRQSGDGRAIHGRISKQGNTVARTMLIEAAWSAASVPGPLRAFFLRIKDRKGLNVAAVATARKIAGLIWQLLTKEEPYRWARPAFVAMKMRKLELRAGAARAHGPAGPGRDYWLKEIRHREMELVAQAEAAYAGMVEAWRDRPPKLRKG

SEQ ID NO: 142197 - protein, 437 aa, unidentified
MTTSPRRETRHRDHQRPARHRRAGRSHQHIVINPDDADILIHSDGQQLVAKRRIADDPTGFAELTVMLADVGDTADDPIPIAIETPRGLMVAALRASGRPVFAINPLAVARYRERHSVARAKSDHADAMTLANILRVDAHIHRQLPADSELAQSIAVLARAQQDAVWRRSKASNELRSILREYYPAFLETFAGKSATNLAKPEARAILAIAPTPAHATRITKARIATALRRAGRQRGIDDLAADILRRLKTPQLRQPELVEKAMGRQALALLAMLDAACTGADELQQAAAEEFRKHPDYDIITSFPSLADLTGARMLAEIGDDRTRFADGRALKAYAGSAPVTRASGKVISITHRRIKNDRLAAVGWVWATYASINQGPAREHYRHRRDHGDRHAAALRHLFNKMLGQLYHCLQTRQTFDAQKAFSHSAETQNGAAA

SEQ ID NO: 142198 - protein, 397 aa, unidentified
MTATRVVQSTTSVPRLHLAFELSWGQWKLAFTVGHGQPARLRTIEARDLAGLLREVAKAKARFGLPEDAAVVSCYEAGRDGFWLYRWLTSQGIANVIVDSASIEVNRRKRRAKSDRLDAAKLVSMLLRYHAGEKKVWSVVRVPETADEDRRQLHRELIAVQDERTEHVNRIKGLLAGQGIALPTVTAKFPEELKRLRCWDGSELGADLRQRLLREFARWQLSDQHVKELENERKARIRRDDTPQVEYVRGLLDLAGIGLSGSWLLVYELFGWRKFSNRRQVGAIVGLTPTPYQSGDDSREQGISKAGSAVLRRMMVELAWGWLRWQPDSELSRWYARRFAYHGKRARKVGVVALARKLLIALWRYVEQGEVPAGARLTSWRAKVNAKATGASKETAA

SEQ ID NO: 142199 - protein, 343 aa, unidentified
MEAVTTIGLDIAKSVFQVHGIDAEGNVIIRRQLKRRHVQAFFQKLSPCLVGIEACATSHHWSRELTALGHIVRLMPPAYVKPYVKRQKNDAADAEAICEAVTRANMRFVETKTPEQQSCLMLHRTRHLFIRQQTAVINAIRAHLGEFGVVAPVGRKGVEELLDVIADAGDERVPEVARACVGALGVQLQTLKAQILEFDRRIMAWHRSNETSRRLDAIPGVGPALATALVASVADPKAFRSGRDFSAWVGLVPKQHSSGGKEKLGSISKQGDRYLRSLFTAGALAVIRYAKVHGTKHRPWLAGLLARRPTKVAAIALANKIARMAWAMMAKGEPYKEPAALAA

SEQ ID NO: 142200 - protein, 430 aa, unidentified
MKSNTQNAKIEAITEKTLVLGIDVGSETHYARAFDYRGVEYSKKPFKFSNTEAGFVTFKAWVLDIKEKHGKDKVIPGMEPTGHYWFNLGKFLQDNEMKPVLVNPHHVKKSKELDDNHPTKNDRKDPKVIAGLVREGRYMIPYLPDGVYADLRTASNIRFQLQAELTRIQNRINRWFNIYFPEYKTVYGKPDAKSGILILKEAPLPEDILTLGIDGVNQIWRDAKLRAVGKARAKTLIEAAEHSVGSKEGAVSARMEIRMLLEDYESRNTRLQEVMVLIEELVKQIPMAEKLLEIKGVGIKTVSGFLAEVGDISRFNSPKELQKLAGLALVENSSGKHKGETTISRRGRKRLRYLLFEVAMSLVAKNPEFRELHNYYTTRRLNPLKKMQSLMVIAAKLLRVFYAILTKGVGYDPKKMVNDIRRPAAYAQAA

SEQ ID NO: 142201 - protein, 344 aa, unidentified
MEITTIGLDLAKNVFQVHGINSTSNVVLKKTLRRAQMRGFFEQLDPCLVGIEACGTSHYWAREITKLGHEVRLMPPAYVKPYVKRGKTDASDAEAICEAVRRPTMRYVAIKSPEQQAALALHRTRDLFVKQRTQLVNMIRSLLAEFGIEIRRGIEQALMLAKRIAANEVADIPPLAAKVITGLARQVLDLQARLNEIERELLAWHRSNDIAKRLATIPGIGTVCATALAASVTDPHQFRSGRQFAAWLGLTPLQHSSGGKERQGRISKMGDKYLRRLLVVGMTSLIRRAKYKPEAVDPWLADLLSRKPARLVTVALANKAARVVWAIMVRGGVYRMPAGVTTPV

SEQ ID NO: 142202 - protein, 423 aa, unidentified
MVKLKYSICCGLDVHKNVIVATIVITNNDGISEYKQKSFSTINSDIQKFHNWLIENNCFHVCMESTGKYWIPIFNYLENDIDVCLTHPKYVKAIKGKKTDKKDSKWIADLYKFDLVRCSFIPPKDFRQLRELARYRFKLVCMKSSEKNRIQNCMTVSNVGIASVLSDPFGRTATEIMSYLLQHTADSMDEKAVRKLIKKGAKAKSDEIIEAIRGYNIETDQAKKLELARGHLEYLDDMITQTEVELYVRIKPYYEFVEFVSTMPGMTELSSTIVLAETGVDMSIFDDAKHLCSWCGLAPANNESAGKKKSVRIAKAGDYLKPMMVQCALAAVKNKKQPYFAIKYGRIKKRRGHKKAIIAIARMMMVCIYHMVSEKKPFSPTDYEELMDPRNHVERVVLNEDNVFAYLESLGYDSSKLVKRNDN

SEQ ID NO: 142203 - protein, 393 aa, unidentified
MVYVGIDVAKDKHDCFIANSDGEVLYDVFTIQNDMDGFEDLLFKIKTASKDLNKVKVGLEATGHYSCNILGFLHNKGLYTIVINPLYTSLSRKSVSLRKTKTDKVDARTIASIIMSDVSLKPYSDTVYHNEDLKSLSRYRFDKVSDRSKLKQSVSRLVNILFPELEKLVSTLHTKAVYKLLSEFPGAHQVASANLKQLTALLSTASKGHFGREKANEIREAARRSSSTYLPAKSLELRHTIKLIRELNAEIAEIETEIKKIMDSIDSPTLSVPGISYALGAVIVSEVGDFSRFDNPDKLLAFAGCSPSTYQSGQIYSTHAKMEKRGSRYLRWALINAARYVCNREPTFAAYLEKKRSEGKHYYVALSHAAKKLVRLLYHLETKGEKYIPQTLS

SEQ ID NO: 142204 - protein, 361 aa, unidentified
MTVIGIDAHKNWHTLVAVDEVGRRIDVLTVEARAAGHQKIMTWLEQFEEVSIAVEDCRHLTRRLEADLLDAGHKVVRVHTRLMAGMRRSGREPGKSDPIDAEAVARVALREGDLPTAELPGPAREIKLLSDHRRSLVARRTALQSKVRWFLHEIDPDLQIPSRALRRFHLLEELIAYLDGLTGVVPEIARDILEDIRSLTRRINEIESRLGKLVRADHSHLLDVPGLGVLGAAMIVGETAGVRRFKSKDAYARFNGTAPIPVWSGNKVRVRLSRGGNRRINTALHMAAVTQVRLGGDGTDYYDKLIAAGKTRTEALRLLRRRISDRVFAAMRADEARPVPEATSPPKTAAPHTPIPALQAA

SEQ ID NO: 142205 - protein, 365 aa, unidentified
MTKIAYVGIDYHLHSLSIAVLIEGEKEPDQMVHLKNDDRVIRKFMSKISEKFQIKACYEASTNGYCFQRKMASWGYHCDVIAPSLIPRKPGDHRKNDFRDARTLVQNYAHDMLSIIHLPSEEEEAVRSLVRCRYAFKEMSKRVKQQINSFLLGQDQHWKHSKWTHQHRTWLGKLKMSNSHSQQVLEEHLAHLDYLETRLCHLDAQVEEMAVLPLYAPAIKKLCALKGIQTLTAMLLIAEITDFRRFPTPRALMAFLGLIPSEDSSGDRRKGGAITKAGNHRCRTALIEAVQSYAKSPRISTRMKSALSQVDAPTATIAMKCLKRLHKRFWALTLKGKLRSVAITAIARELVGFIWAMLQTEPSLA

SEQ ID NO: 142206 - protein, 331 aa, unidentified
MDTKEVIGIDVGKLKNEARTHLGQNAFEFDNNPAGFRKMEKWVLTTTSCQKQQLIFAFEHTGLYSFPLSMFLTENQYLYIVIPGLELKRSMGITRGKDDKIDAKRIALYTYEKRENLKPYEMPRDEIIQIKRLLSLREKLVKHRASYKGTLGEYKHFLKKKDNKLLFDVHEKMIQELTKQIEKIESKLDDIVKHDRQLKQMYELITSIKGVGPQTALFMIAFTNEFTNFETWRKFASYCGIAPFPNRSGISIRGRTKVSNLANKKIKSLLDLCAKTSIQYNHEMKLYYEKRIAEGKSKMSTINIIRNKLLSRIFAVVQRGTPYVNTMGYAA

SEQ ID NO: 142207 - protein, 461 aa, unidentified
MSKKKPRGTQDQSVAKQTEWRALEIVHPDAAGIDIGGREHWVAISPELDAEPVRCFGCFTADLQEMARWLKEKGVRSVALQSTGVYWMPAFEILEQHGLELYLVNAQHTKNVPGRKSDIQECQWLLKLHAFGLLNNSFQPSDEIRVARTIWRHRGNLVAEASSTIQRMQKALIEMNVQLSNVLSDLSGVSGMTIIHAILKGERDAEKLAGMVQPEVKATPEDIIKSLEGNWRPELLFVLRQQVELYRTYQEKIAACDVHLRRHLESLGGKVDLLAQPIGPKPKGKKGSKNAPQFDLRSELYRLTGIDWTQVNGIDVLTAQSVMAETGPDLEAFATEKHFTSWLGLCPTNERSGGKILNRKTRKVVNRASTAFRNAATTLLRSQSYLGAQYRRLRTRLGAPKAITAMARKLACLYYRLIKHGQQYVDKGTAHYETRYREQQIRAVVKKAQKLGLHVLTPNAA

SEQ ID NO: 142208 - protein, 336 aa, unidentified
MAKWKYFIGIDVASRSFTATIGGSPWQVLAKPEGFENTLDGFRAFLDWLTEQRVDPRRAVVCLEATGVYGEALAHFLVAQKLAVAIEPPLKVKRAFETSGPKTDAVDSMQIAEYAYRFADELRLWQPRGEILEQIQVLLAAREQFVRQRSMHKNALTALKRKVVQTPAANQAHQQSIEFLTKEIKSLESELRKLIDQDPDLRQRLMLLLSVPGVGLLLGAHLLLLTQHSQNPRKLAAHLGKAPHPHRSGTSVHGKTQSRHYGPSTPRKLLYLAACSLRQHHPMFEEYYLRKIAQGKAPRLVLNNIENRLLRIACAVLRDQRPFIPGYRPLSPLTGS

SEQ ID NO: 142209 - protein, 334 aa, unidentified
MDKQAVAGVEVSADVLVVAFDDGQLRSSEFANTAAGHQQLLRWLRQPAAQVRVCMESTGLYGLDAALTLHRQPGIEIMVANPRSVRHFGCAMMQRSKTDPIDARLLAEYARRMPFQPWQPPSLQGRQLCALSRAIHQLTEMNTMQKNRLHAASVTETTPKIVIRELERSLTQQQRSIQRLTREALQLIASDPHLQKRFDLLLSFPGIAQTSALQLLGELVLLSPDCNVRQWVAYAGLDPRQYSSGKSVEKKVRISKVGNRHLRRALFMPALVAIRRNPHFRAYYRHLLAHGKFKMVALVAAMRKLLHGIYGVFQTFKPFDPQKLFTLPALIEIA

SEQ ID NO: 142210 - protein, 409 aa, unidentified
MKAKTIELTPIFKSAVGLDVHQAKITACAIVEQEDGTHEVIFKEFGGFKKDRKLLAQWLSSLHPEVVVMESTGIYWKSPFAALEKVGIVALVVNARHVKQVPGRKTDINDAQWLAMLARSGLLNGSFIPPSTLRTARLISRQRQKLVGILSAEKNRLHKVLTDGGIRLSVVLSDINGKSGRAIIEGLLEGKTTAELLQFVDRRVKASNEEIGDALQGELTPSHLFVLNELMEHIKALEIKIRRFDNQLLKELFDYKPAIELLQTMPGIDQIGAAMLIVEMGSDMDAFKSANHLASWTGLCPGNNESAGKRKSGKIRKGNPWIRRILCECAHAAKRTECMFKQKYQALVIRRGTKRALVAIAHKLLKTIYALLKSGECYRDSTINYEELSVKRNAPRWISKLKEFGYMPA

SEQ ID NO: 142211 - protein, 438 aa, unidentified
MIHPHAAGIDIGSREHWVAVPEERDEHPVRRFGCFTADLYALADWLKRCGVETVAMESTGIYWIPLYQILEDRGFDVKLVNARHVKNVPGRKSDVQDCRWLQRLHSYGLLSGSFRPEAQVCVLRSYLRQRDNLVRYASAHIQHMQKALGEMNLQLHKVLSDITGVTGMRIIRAILAGERNPAALAALRNYRVKSTEDEIAKALEGDYRAEHLFALQQAVELYDTYQQKIADCDGRIEALLGSFEPRLKGQPCVPATPRKRRKNEPYFDLRGHLHRVTGVDFTQIKGLDTSTVQTLLSEVGLDPTRFPSEKHFCSWMGLCPDHRITGGKVKKRSTRKVSNRAADAFRLAAQTLANSASALGGYYRRMRARLGAPKAITATAHKLARLFYRLWKTGDAYQDPGADYYERMYKERILSNMKRKAKELGFTLELKPLERAVS

SEQ ID NO: 142212 - protein, 424 aa, unidentified
MNCTQNERINQVSEQTLVIGVDIASELNYARAFNWRGIEKGKVFKFFNNLEGFQAFNEWAHQVMSANKLTNIMVAAEPTGHYWFGLADYLKDEKLKLVLVNPFHVNRAKELDDNHPSKTDAKDPKTIAKLVIEGRYMEPYILEGVYADLRIMYNCRQKVTKAMISLENQLKRWFKIYFPEYLSVFGNLSGQGSMAVLEKAVLPEDIISLGVDGINKLWRERKLRAVGMKRAESLYEAAVKSIGRREGSVGGRAEFRMLWEDYCHKMEQMEKLNIELESLLHKVPQAEEVLKMKGIGVVSVAGFFAEVGDLRRFESPKQIQKLAGLAIRENSSGKHKGQTTISKRGRARLRAVLFNAAIALVGRNGAFKSIHEYYIGRKANPLKKKQSIVAVSCKLIRIIYAICRHKEAYDEAKMLRDIRREQLA

SEQ ID NO: 142213 - protein, 375 aa, unidentified
MSNVRFIGLDVHAETIAVAVAEPNGEVRSLGIIPNRAESIGKLVKKLGPTEQLRVCYEAGPTGYVLYWQLAALEVRCEVVAPTLVPVKPGDRVKTDRRDALKLARSYRAGDLTSVWVPDAAHEALRDLVRAREAAKKDQLRARHRLSKFLLRQGRRPPAATKAWTQAYLAWVKSVRFAHAAQEATLLDYVHEVDHVAARIARLEQAIADAVNTAPVPTRAVIDALQALRGVALVTAVTMVSEVGDFTRFARARQLMGYSGAVASEDSSGTRTYRGAITKTGNAHLRRVLIEAAWCYRHRPAIGATLRKRHAAVDEEVKAIAWKAQHRLYARFRALTAHGKPRQLAVTAVGRELLGFMWAIGTTVHKKQRESTIAA

SEQ ID NO: 142214 - protein, 339 aa, unidentified
MKVTTFGLDLAKRLFQVHWIDMETGEICRRQLKRSEVAEFFANREAAVVAMEACGSAHYWGRKLRALGHEVRLIAAQFVKPFVKSNKTDAADAQAIWEAAQRPGMKFVALKSEAQQSVLTLHRMREQVVKMRTMQINQLRGLLYEFGADLPAGRQRGMARIPEALAKLEQRLPTMVIETMRSQRKHIEGLDQDIAGIEKKLFVWKKEDAASKKLMEIPGVGLLSATAAVATIGDAKAFKSGREFAAFLGLVPRQSGTGGRVKLLGISKRGDVYLRTLLIHGARSVITHGKQREPWLDKLLARRPFNAATVALANKMARTIWALLAHDRTYEKGYVAKAA

SEQ ID NO: 142215 - protein, 409 aa, unidentified
MQVVHERCAGLDIHKRTVVACRVSPGADGEPDKAIRSFGTMTGSLVALADWLGEVGVTHVAMESTGAYWQPVWNLLEHQFTLLLANARHMKAVPGRKTDVKDCEWIADLLRHGLLQPSFVPELEGREVRELTRYREALIQERTAEANRIHRTLERANIRLGSVASDLLGMSARAMLAQLVDGSRDPETLAELAQGRMREKIPLLQQALVGQFGTHQAFMISRQLRHVDELDALIAELSVQIEERQRPFETELALLDTIPGVGQLIAEGLLAEIGPDMTQFPTAGHLASWGGMCPGQNESAGKRKSGKTRKGSKSLRRILVQAANAAARGKTYLAALYRRLAARKGAKRAAVAVGHAILVIAYKILQARTPYHDLGYDYFDRRNPDRLRQQLVRRLEHLGFTVQLGNSPV

SEQ ID NO: 142216 - protein, 379 aa, unidentified
MKTSYYIGLDVHKDSIAVAFTKAGERKEPTYFGECGGSVLAAERCLRRLAAKLGVPFRDLKVCYEAGPSGFVLARRFLRLGLECVVMSPSRSERKPHEKIKTDRRDAILIAKTFRNGDLTVVRVPPALDEAVRDLCRARTDASDDLSRAKQRLNSFLLRNGFHYSGKARWTPSHLNYLRHLTLPDPVQNLVLEEYLQAIDAGYERVERLATRMKAVLADWEWEPVVRALMACKGFQEVAAMTLISELGDLRRFEHPRKLMAFLGLVPGEYSSGTKRRQNSITKCGNSHARWMLVECSQHYRKAPKIGAALSQRQVGQSKEVKALSWRMQHRLHRRYVKLKARGKRENKAIVAIAREMAAFLWELQNKLNLPIPGNVPAQ

SEQ ID NO: 142217 - protein, 334 aa, unidentified
MSTKSQNSATRQENNETFVGIDVGQEELVVHILPKNEQLTVSNSDKGIRKLVKRFEKINPYQIVFEATGGLERNLLTTLAAHGMPVVVLNSRQARRLAEGLGEHAKTDRVDAKMLATIAGLKHFTPRPVPSGETLEMNDLVARKQQLIHMRAMERNRLHAATKKKLAAFILRSIQKSINAIKKQIAEIDVRIQAMIDANDDWSEKDKILRSVPGVGPKTAQVLISALPELGELNRKQIASLAGVAPFKDQSGKRTGESRIAGGRPLIRCTLFMTATSAIRKPGVFKSLFDRIRAQGKAYKVALVAVMRKLITVLNAMLKTKTHWSEHGVRSGNL

SEQ ID NO: 142218 - protein, 320 aa, unidentified
MDAVLGIDIGKTKFHVTLRFSDGARRRKACANSPAGCRDLLAWMTRHGAGRVHACLEATGAYGELLATTLVEAGHQVSILNPAIIHHYAKSRLSRAKTDPVDADVIADYAAKEHPPLWTPLPREVRELQALVRRLDALLGMQTDERNRAQAGALTPAVEQSIAAVLDHLETQIAAVRQQIHEHLDQHPGLRAQRDLLTSIPGIGEATAALLLAELFNKPFASARQAAAFAGVVPRPNDSGIHQGRRAMCKLGPGRLRKGLYFPAIAAIRFNPSLRPLAHRLRGAGKPPMLIIGAAMRKLIHLAFGVLKSGRAYDAKLANA

SEQ ID NO: 142219 - protein, 343 aa, unidentified
MGTQIIGGVDTHLDVHVAAVLDEHGGLLGTASFATTPDGYDALGEWLSSFGEVALVGVEGTGSYGAGLTRRLRAAGMKVVEVDRPNRQRRRRAGKSDTHDAVSAARAAFAGDALGAPKLRQGNVEAIRVLRLARTSACRDRTKALNQMRALVTTAPDELRTQLRGLTIPKLLRTAAGFRPAGRADVISANRLALKTLARRALALAAEIQALDELLAPLVAETAPEMIERVGVGTDTAGALLVAAGENSSRIRNERSFARLCGAAPLDASSGKQQRHRLSRAGDRQANSALWRIVITRLSYDPSTRRYLRRRCAQGKTKAEAIRCLKRYVAPEPYAYLPHQTLD

SEQ ID NO: 142220 - protein, 354 aa, unidentified
MATTSKQTLPALASVGIDIGKDVFHIVGFDPDGTVVLRRKIKRLALVSTFEKLPRCIVGMEACLSAHFVSRSLRKLGFEPRIIPAKYTKPFVKGQKNDYNDAEGIAEAALRPNLKLVGEKTQEQLDLQAMHRVRSRLVSRRTATINQIRAFLIEQGITVRTGAHALRNSLFAILKNREDEISSRMGDLIVGLYEDWLWLDERIETITGEIEVISKREGNCQRLMSIPGVGPMISTAMVAAVGTGDAFDRGRDFGAWLGLVPRQYSTGGKPILGRISKRGSKYLRTLFVQAAHVILMRPHNWEKFSFGPWLKEASQRMHKNKLAAALANKLARIAWSVLRNGKAFDTNRNEVTAV

SEQ ID NO: 142221 - protein, 351 aa, unidentified
MDHIGIDVHKKESQICTLAEGGELIEQRIRTEPERFAAVLGERPRARIVIEASTESEWVARCLEGLGHEVIVADPNFAPMYATRTRKVKTDRRDARALAEACLLGAYRPAHRLSDPQRHVRGRLTVRDAVVRTRSRYISLIRALLRQQGYRVPSGSAEGFLLRVHAMTLPGRLVSTIAPLLAVMRHLNAQLAYSDETIERVTAHDARVQRLRTVPSVGPVTAAAFVATLDDVQRFRHAHQVEAYLGLVPRELSSGETQHRGHITKAGPPRMRWLLVQVAVSILRRRPPTAEALHAWALHIAARRGKHIAVVALARRVAGILYALLRDGTTFDPRRSPRPVVAATVPAAATG

SEQ ID NO: 142222 - protein, 401 aa, unidentified
MNNTTMFYVGIDVSKDKSDICIKDEKGNDLIHGFEMTYKKADLEMLYEIIESIKSKIPGNSDVVIGMEATGIYSLPLYSNLKRDGYKVKLYNPIQTNGYRKINIRKTKTDPIDSAIIADMLRHSEPPQASEIQDMQLFQLRELVRIRHRLIEKQAICKIQIIRNIDTIWPYYGGAMKGVFGAASLAILKKYSVPSKLRNESFEKFYELVKKKSRSKISRSKAEEIYANAGNILTIPELDSIMSIEIKTLITQLELYDEQIHSIEGKIDQMMKLTDTKIMSIPGIADILGPIILGEIGAIERFSNAKKLVAFAGLDPIVSQSGRFENKSGKISKRGSPLLRRALFLAANSAIQNDEILKRFYAKKRSEGKHHFSALNAVAAKLLRIVYWVLKNNKEYQIQPN

SEQ ID NO: 142223 - protein, 441 aa, unidentified
MHERVEEQVLEQELEQVARVAAIDIAKASAMVCTRLPKAGSAAGRRVQRVWPVGATTNAITELADHLICEGVGLVVMEATCDYWRPFFYLLEARGLRVWLVNARDVKNVPGRPKTDKLDAIWLAKLAERGMLRASFVPPEPVRQLRDLTRLRTVLTEDRTRYRSRIEKVLEDAQIKVSSVVSDLFGVSGRAFLAALVVGERSPVALAALARGRLRGKNAALTEALTGRFLEHHAFLIGMLLEDHDRLTAQIDQLTIRIEAAISEIDPSAPPDDDHPGQPGVMARLAEIPGVGPGTAAVIIAEIGLDMSVFPTPGHLASWAKLTPRTIQSGARSTHGPTGKGDRWLKGHLSQAAVAASRTPTFLGARYRRIAKHAPKKKAVVAVSRNILEIAWHLISDPEARFSDLGPDWHERHLDQARRTRQRIRELERLGYTVTHAQAAA

SEQ ID NO: 142224 - protein, 324 aa, unidentified
MCDAIVGIDVSKETLDVNCARGQRRQGKIFANTPEGWKLVLSWLKAMGSKQAHICMEATGRHSLGVALALHDAGHIVSIVNPAQIRDFARTKLGRNKTDKIDAALIREYAALFNPQPWKPPSLAMQRLCELQTVRAGILKNRAEWQNRIASCFGDSTATRLAAMTIEHFTTQLEAIDRAITETINQDIELRSRRDLLLSITGVGETLAGVLLAEMPEPGVLRRSGQMVAYAGLNPSHYRSGSSIDRPTRISKIGNATLRSALDMPALSAMRFNPAVAALVARLKSAGRLKPKQIVVAAMRKLLVLCFGVLKTGTPFEPTIAMPA

SEQ ID NO: 142225 - protein, 429 aa, unidentified
MNCTQNKKIEQVKETTMIVGIDVGSEKHYFRAFNWRGIELTRKPVAFSNSMEGFNSFYNTIVELMQKSELEEALVGIEPTGHYWFDLGQFMGEKDIKFVMVNPHHVHKTKELDDNSPSKNDRKDPRVIAGLVRDGRYFYSYMPTGAYAELRNASNRRFVLVEEQTRAKNRLQKWIAVYFPEYKGIYTHIDAKGGMLVLKKAPTPEEIVRLGVEGIIKIWKDAKLRGNGHKKAMLILAAAMRSIGLKAGLTEARMEIQDLIEDYELQTKRLERVNDLIKELCRKIRYADKLLEIKGIGITTVAGFIAEVGDITRFDSTKELQKLAGLELVADSSGKHNGKTKISKRGRKRLRYLLFEAAISVVGKNEEFKEIHRYYTTREKNPLKKMQSLIVVACKLIRVFHAILTKGIRYDASKMLKDIRHPGEQLKAA

SEQ ID NO: 142226 - protein, 345 aa, unidentified
MDISTIGLDLAKNVFQIHAINATGEVVVRKMLRRTQLLAFFAKLPPCLVGAEACGTSHHWARELMKLGHEVRLMPPVYVKPYVKRGKNDAADAEAICEAVTRQTMRFVPVKSREQQAALSLHRARSLLIRQRTQLVNLMRSMLAELGIAIPVGLEKALQMARQIVDQEIDLDLPAEAAGVVTMLSGQILQLHVQLRKLDLRLARLQRSDEMARRLATIPGVGPVGATALAASVTDPGQFASGRQFAAWLGLTPRQNSSGGKERLGRITKMGDKYLRQLLVIGATSLVRRAKDKPEAVDPRFIALLARKPARVATIAMANKIARIAWAVMARGDVFRPGHVPVLAA

SEQ ID NO: 142227 - protein, 340 aa, unidentified
MGEVTTIGLDLAKHVFQVHGVDADGTTVLRKQLRRGQVLAFFSRQPSCLVGLEACATAHYWARELGALGHEVRLMPAQYVKAYVKRNKNDAADAAAICEAVRRPTMRFVPAKTADQQAAVLLHRGRERLVRQRTALVNALRAHLAEFGMIAPQGLRNVSKLIAVIRDEGDTGLPVVARQVLEVLAVQIEQLDAGIAALEQQLTAWHKSNPVSQRLATIPGIGPIIATAIAATVVEPTAFRSGREFAAWLGLVPRQNSTGGKTRLGRISKRGNRYLRRLMINGASANLLRSKATNADPWVIGLRRRRPSLVVAVALANKTARIAWAVMHRKENYQRMAAAA

SEQ ID NO: 142228 - protein, 300 aa, unidentified
MDHIGMDVHKEESQLCILTEAGELIERRVRSEPQRFAVVLGERLRARILIEASTDSEWVARCLEGLGHEVIVADPNFAPMYATRTRKVKTDRRDARALAEACRLGASRPAHRLSDPQCHVRGRLLVRDALVRIRPRSISLIRALLRQHGSRVPSGSAEAFRRRVLALALPGRLLSTIAPRLAGRRPLTTQLAYSDEAIEHVTAHDERVQRLRPVPRVGPVTAAAFVATIDDVHRFRHAHQVQASLGLGPRELSSGEAPRRGRITKAGHPRMRRPWRWPMNSACGRSWATAISASVGSTGG

SEQ ID NO: 142229 - protein, 341 aa, unidentified
MGEYIGLDVSLKETAVSVRRDGKRIWRGKCPSDPHLLAALIRKRAPDAKRVVFETGPLSVWFYHALSAEGLPAICIDARHAKAALDMAPNKTDANDADGLAQLAEVGFYREVRVKSFDSMLARTLVAARTKLVRITTELSNQIRGLMKTFGLVVPPSKGGKFEANVRRLLADHDGLESIILPVLEAWRSVRVRAAELGRQLLAGARRSRSCQLLMTIPGVGAVTATAFTTAIEDPANFKTSRSVGAWLGLTTRRYQSGEVDYDGHISRRGDANLRGLLYEAATVILTRTQAESSLRVWGLKLREKIGFKRAAVAVARKLAVIMHAMLKSHAVFDRAASAMA

SEQ ID NO: 142230 - protein, 350 aa, unidentified
MKITTIGIDLAKNVLQVHGVDEQGKVVLRKQLRRSQVMDFFAQRAPCLVGMEACGSAHAWARRLIKMGYTVKLMAPQFVKPYVKTNKNDAADAEAICEAVRRPNMRFVPVKTEEQQAVLSLHRARQGFVRQRTAQANQIRGLLAEYGIVIPQGIGHIGKCLPEILEDADNALPGLFRQLLRQLGEHLKTLTQLVEEMEQQIQQWHGRNEASRKLATVPGIGALTASAMVASVGDARNFSNGRQFAAWLGLVPRQHSSGGKATLLGISKRGDRYLRTLLIHGGRSVIQAAERRKKPPVEEPLSQQRSWLQALVLRRNKNVAAVALANKNARVIWALLAHDRNYQPGYTVAA

SEQ ID NO: 142231 - protein, 314 aa, unidentified
MSKRSIICAGIDTGKHKLDVALHGRPERLQVANTAEGHEELFVWLRQHRVKRVGIEATGGYEQTVVRRLRQGRFVVVVFQPAQVRAYGRFHLRLAKNDKIDAALIAACTSDVRTIHAPPDRRLAELAELQTQIDQVVRAMARFKNHRESCRDAGLRQLWDDEIRGLFRQRLKQLVAAIRQHPDLAERLDLILSVDGIALRTASALVVRMPEIGQLSRGQAGALAGLAPYDDDSGEHAGDRHIAGGRERLRNNLYAAAWIASLRWNPQLTALYKRLRAAGKEHKVAVVACARKLLIFANAVVARGTPWEVRTIAH

SEQ ID NO: 142232 - protein, 312 aa, unidentified
MIAVGSDISQKTIDVQILDENETYIKIQNNEIGFNKLLKKLSDNPCNYHFCMEATGNYYENFADFLVENGFQVTVANPLKISKFAETEFQKTKTDKQDCKLIAQYCQEKLLKKHGTYKKPTEQQYQVKRLLSYINQLKQQKTALMNRQKNCKDEFIEIELKKQLVELKAHIKTTESKLSELTKSEEKDRLKTIPAISETTARVLVHFLTMFDFKTANKFTAFAGLSPQQRKSGTSVNKKEKLSRYGNRILKTALYMPAVVAYRMGVFKKMTDRLEKKGKSGKVVIVAIMRKLAVLAFNLYTKGQVYDIRKFG

SEQ ID NO: 142233 - protein, 412 aa, unidentified
MEVVYPCCGGLDVHKKSITACVLWAEAKGKSRKEKKRFGTFTHDLLQLADWLEQCGVTHVAMESTGVYWKPVWNILAERFEVLLVNAQHIKAVPGRKTDQKDSEWIADLLQHGLLRGSFVPPRPTRELRDLTRYRVSLVQEINRIANRIQKVLEDANIKLASVATDALGASGRAILEAMLAGEQDAARLAEMSKGLLRNKIPELKLALEGRMTEHHRFLLRQLFEHLRFTESKRSEIEQEIDRRMLPFEDKVTRLCTIPGVDRVTAWGLLAEIGLDMNQFPSSGHLASWACLCPGSFESAGKRLSGKMRKGNVSLRRCLSQAAWAISMMKNNYLSALYRRLAARRGAKRAVMGVAHALLEIAYHMLKRKEDYRELGADHFDRIDVNRIRRSLVRRLERLGHKVTLEQLAQTA

SEQ ID NO: 142234 - protein, 348 aa, unidentified
MKSCFENKEIYVGIDVHKKRWVVTVRTYDLELKTFSMQPVAEDLEKHLLDNYKDALLHIVYECCFSGFWIYDYFCVKGYNIIVTPTNRIYRDGSVVKTDKIDSRKLAFQHSRGMLREVKVPTEKVREYRSIFRIYDKEKMREGQILRQVRCVLEVRNHRLKWEKWNKEFIEKLKEVKFQESIFNRKFEQLLKEYEYVKEQIKDTERRIKEISEEEELGEKIKRIEKINGIGIVSAVRLVVYLFDQKGRFDNGEKLVHYVGLTPGEHSSGETIIRSRTGLVGNKQLRSIIIQLAWVTVRKDGSLLNKFERVYWRSGSKQKAIVAVARKLMMKVYTITEKEEEYEINKAA

SEQ ID NO: 142235 - protein, 349 aa, unidentified
MRTFTPPATAQFYAGVDLHARNLFLVVLDRDGKIRLARNLPAAPAPFLQAIAPFRQGLLVACECMHCWYWLADCCRDENIAFVLGHAWGMKAVHGAKTKCDRKDAEAIARLLKGGNLPPAYAYPRERRGLRDLLRSRLRLVRQRAELYGHVHTARRQANLPPVSSDVKYKCKRAGCTADIDDPFVRRRVETHLGLLDPLDAAIRKLEADIEDAARQIFPTELAVLQSTPGVGAVLSLTILLEIDTIDRFDTRQQFCSYARLCGAVQTSDNKRAGEGNKKAGNAWLKWAFSEAAVLSAQKDERIGALLARLASKLGKAKAYSALAHKLGRAFYHLLHTREVFDVNRFVRH

SEQ ID NO: 142236 - protein, 407 aa, unidentified
MEVLYPRCAGLDVHAGSITACMRVATGATVTYEQRKTPTTTRGLLQLAEWLTEHGCTHVAMESTGVYWKPVWHVLEEHFTLILANAMHIRNVPGRKSDMNDARWIADLLAHGLIRSSFVPPAPIQELRDLTRTRRQLVHEAARHVLRIQKTLEDANLKLTQVMSDITGVSGRAILNALIAGETDPGTLADLTRGRLKATRAELVDALHGRVTDHHRFMIKLHLSQLDALDAAIASLEARIGAALGPFRPAVSLLTTMPGLSETTAHVLVAEVGTDMTRFPTVGHLISWAGLCPRLDESAGNRRSTRTRQSAPWLKPTLVNAAWAASRKKDSYLRAQFLRIKSRRGAKKAILAVASSMLTAAYFMLRNGVEYQDLGPRYFADRDKTRLTKRLLQRLQDLGVTVEVKAA

SEQ ID NO: 142237 - protein, 318 aa, unidentified
MSTQTPSFAGIDVSKYYLDLALCQAQKSWRFDNDPEGIGQMAHLLEEHQPALIVLEATGGYEQAAFHHLSSSFPVSIVNPRRVRAFARANGRLAKTDRIDAHNLAHFAQVVQPHPQPPSSEAQQQLAGMVARRRQLHRMITAEKNRLRNAHPALVNQLQDHIDWLQQALQELDASIKLHLESDPELKVKSDLLQSAPAVGMVTAASLLADLPELGNLDRKKIAALVGIAPMNRDSGRKSGRRRIMGGRAPLRAALYMAALSASRYNPAIQPFYTRLVGNGKEKKVALTACMRKLLTMLNAMLRDNKSWNPAIPLQNQP

SEQ ID NO: 142238 - protein, 424 aa, unidentified
MKVTYQTCCGVDVHKSFLVATIVKTTGGVEPSYQKKRFSTFNNSILEFKHWLLDNDCLDVCMESTGKYWVPVFNLLEDEINVVIANPKWVKAVKGNKDDTKDSKWIGDLFRLGLVKGSYIPCKAVRILREYTRYRYKLVSCRSSEKNRYQNALTVCNVALDSVVSDIFGKSSTSIIDYLLDQSGTSINHEEIASKLLRSLKSKEDAVIESVEGYQMTDAQKYRMRLVRAHMDYITAEINDVDKMIENMISSNPDFENAVQFLCTIPGVKRDSAITIISETGTDMSQFSSSKRLCCWAGLTPGSNESAGKKKSVRITRAGVYLKPALVQCAHAAVKSDKSPYYKKKYESLVKRRGKKRAIIAIARMILTAIYQMLSTGEQWNPGDLYKIDMPVALVEKQKAKAIRQAKKLLQREGTLPPDKPLAS

SEQ ID NO: 142239 - protein, 345 aa, unidentified
MKRVLKQVLGVDVAQKELVVSLGRMHEDLVPEIYAYKVFANSPKGFANLSDWVEQRLDPTVSVRYVMEATGVYHEPFAYYLAELGCEVSIVLPNKISNYVRTLEAKTITDKTASQAIAMFGLERKLDQWTKPKAVYRTLKQLTRERDQVVQERTMAKNQLHAEQAEAEPHASSVKRIKARIAFLNKQEKEIQQEIAKVAKEDRQVSHSIKLIQSIPGVGLLTAVVVLAETNGFELIRNKRQLTNYAGLDVIEKQSGTSVRSKPRISKKGNRSLRKAMHLPALSAIGHSKRYKGLFARLVAKHGIKMKAVVAVQRKLLEMIYTIHKTKKSYDDNYLEIRHLETVMT

SEQ ID NO: 142240 - protein, 319 aa, unidentified
MSAETIIGIDVSRDWLDGFCLPGKQRFRLQNSPDGYARLLETLQSMPDDLKVGFEATGGQEWALWRVLISMGINAVQLPPAQIKAFAFSMGKRAKTDQIDAELIARFMVVRPEAGRALPDEKLQFLRALTVRRAQMVDARKRLSAQISARRKQGVSAELEDMDSSLKAFLESQISELEQRIEGVIAQGKELSAKAELLRSIPGIGPVSVAMLLAEMPELGRMTATEAAAMTGLAPMSHDSGAMRGKRVISGGRRSLRHVLFQAGLAASCHNPVLKAVAKRMKQRGKPHKLVIIAIARRLVTIANAVLKTGLPWRISPVV

SEQ ID NO: 142241 - protein, 352 aa, unidentified
MKKTLFIGIDFAKANFVASALLDEDPDPVCLPKSFSNDDKGAKALVSWIVKLLPETCSLSDVLVCGEHTGSYSLLLPRRLFDAGIDCWLENAVCIKNGSGRIVREKSDSADATMIAEYARTFYQKRVRLFIPESPVLSELRECNDIRRRLVKEQAGLMCKRHDAEVRLKAKPGSKAIMMNIKILERQLAYIKEQIAKVDRQMYSLIRSEKKLSGIYDIIVSINGVGPVTAIALIVLTSGFTTFGSKRSLACFLGIAPFRSESGTSIQNGSHRSRQADSYYSGLLYMVAVSAMNWNPEIALYRERLLKKGKPKLVIINNIKNKLITIIWAMVKNDTLYDPDHHLKVAQQYQTA

SEQ ID NO: 142242 - protein, 421 aa, unidentified
MSIDQIPAGARLCAGVDWAKDDHAVAVVDADGEVLDRLAVRHDAAGLRDMVRRLLKRGVGEVGIERPDGPVVEALRQAELTVFVIPPGQLRNLRPRYGSAGNKDDRFDAYVLADVVRTDRRRLRPLVRDTGQTTALRRSVRARRDLVAHRVAVANQLRAHLLIVFPGATGLFADIDSDISLRLLERFTTQTQARWLSVKRLTAWLRSAGYSGRTTPATLHSRLTSAPDGDTGDHDPLDAAVTLAYVTTPRALTTQIEALAGRIAEQLELHPDGPVFTSLPRSGKARAAHLLAEIGDAGGRFPTPESLACLAGVAPSTRQSGKVKAVTFRWGADKQLRDALCDFAGDSRRANPWAADLYQRARARGHNHPHAVRILARAWVNIIWRCWHDNVPYDPGSHGALQTLLKQDQKTVTGQDQQTVA

SEQ ID NO: 142243 - protein, 349 aa, unidentified
MSQNLNSAVAVIGIDIGKNSFHVVGLDNRGAIVLRQKWSRGQIEARLANLPPCLIGMEACVGAHHLSRKLKALGHDARLMPAKYVRPYSKGQKNDFRDAEAIAEAVQRPTMKFVATKTAEQLDLQALHRVRERLVSQRTGIINQIRAFLLERGVAVRQGLRFLRAELPRILATPPEVLSPRMVRVISDLAEDWRRLDERIDQLSSEIGVLARQDSGCERLMSVPGLGPIISSAMVAAIGTGDAFAKGRDFAAWLGLVPKQMSTGDRTILGKISKRGNRYLRVLFVQAAWVVLIKPMSWERHGLKHWIEAAKKRLHRNVLAIALANKLARIAWGVLAGSRTFEASKLQAA

SEQ ID NO: 142244 - protein, 380 aa, unidentified
MPQPTDIANVCCVALELSKKSWVVAFSPPPDGGKNSLHQIAARDISRLLSFLESARLKAEREASRPLEIVVCYEAGYDGFWLARLLIARGIRTIVFDPASFLMPRKGRRAKTDRLDAEGMTRTLRAWLSGDREVARDVRIPTVEEEDAKRIERERKHLVEQRTSIVGRIKGLLALHGVHLSGKRIGKGLQERLGDIKTGDGRHLAPFLRRDIERMLQHYEFISDQIKQVEADRKSALMDETGHFPHREKVHRLSMLSAVGETTATVLVAEVYHRTFETRRHVASFVGLAPSPYASGETSRDRGISKAGTKLARQTFVELAWFWLRYQPTSKLSLWWQERFGGMGMRGRKVGIVALARKLAIALWRFVEDGVIPEGATLKA

SEQ ID NO: 142245 - protein, 334 aa, unidentified
MKYQHVVGMDIAKDSVQASCFDGTTFLDFSFPNQEKSFLKKVQKSIPKSDPSHILFVMEATGVYHLKLATALYKEGYSVAVVNPFIIKKYAEMLLKRAKTDRNDARLIAQFGFYQEVTLFAPKENLAEEITQVLKGLDQLKKERTTLKNYQEALTHHNEINSVVRDIYQKQLKEVEKAIKTLEAEAKRLVCQYAPKEYQLLLSIKGIGKCSATALLGFLQKMDRFSRGKEVASFLGLAPQISQSGKDKGKAWLSKKGNGYLRRLLYLAALSASRSNAQCRELYQRLLAKGKPKKVALIAVANKLLRQAFAVLKSGCPYDPHYLKLKSNLEVVLT

SEQ ID NO: 142246 - protein, 387 aa, unidentified
MTVPAQVFKIIPRHYDIFGGLDVAKKNMAVTFTDHEALMRSLRLPYSSAHLLHYVRKHFPDRRVAFVYEAGPTGFGLHDELVTAGYRCLVVAPSMVPTAPGDKVKTNRLDSRKLSVQLRGGELRSIHVPAPRYRELRHLVQLRDTQVGQLRATKCRIKSLLLCEGLAFPPAPESSQWSARVLSELLELPCSEAVRFELDQLIGTLHFHFNSAAAAQKQIRYFCQNDPELRQSIRLLASLPGIGVIVATHLVARLGDWREISNGRQIAAFLGIVSSEHSTGEKENRGRITRTGDSRLRNKLIQSAWTAIRKDAELRAFYLRIYHRHPKKIAARKAIVAVARKLTTRIYAVLKEQRPYVLRPENLPAPLTAEETVGPRGRLVGPQNEQP

SEQ ID NO: 142247 - protein, 430 aa, unidentified
MTNREPTPAGAALVAIDISKIRNDVLIEVPGSLRRRRLIVLNTRTEHDRFVELLAGLRHPVIAGFEATGNYHRPLAYRLLEAGVSLRLVSSVALARTREALHNGWDKNDPKDAQVILHMLRIGATQVYADPIHTGIHNIQELSKTHEVVSKAKTELWHRLLTHYLPLYFPEIARFAGNSRSDWFLAFLEQFPTPASITALSKEDFTKAAWDVIGRKVSKARLLADIYETARSSIGLPAPLDSAAVAMFRMMLAEGRSLICQRDIIEGQAHALLSDSADYNRLRQVPGIGPINAMTILAEAGDLRRFGHHRQFLKFCGLDLATHQSGQFRGRTMLSKFGNARLRRAFWMAAHVAIRQRDNGFRAKYERYIARDRDNADLKRKALTAITAKMARTVHAVIKTGSDYRPFFEGPMPSGRTSLSRCREGASATL

SEQ ID NO: 142248 - protein, 337 aa, unidentified
MKFCGIDLHSNNSVVVVTDETDRVLVSRRCPNELTPILLLLEPHRAELVGVVVESTYNWYWLVDGLKAAGFEVKLAHPVAMKRYDGLKHSDDKDDATFLAHLLRLGILPTGYIHPPQERALRDLARKRIQLVRSRTQHILSVENIMARQFGQRLSCNEVKGLSATSVDRLGLPTDVALAMKANVAIVQALQIQIDFLEERLLHEAYLRPEFSLLKTMPGIGEVLATVIMLETGNIERFADVGHFASYARCVKSAHYSNGKKKGEGNAKNGNAYLIWAYIEAANFARRFSEDAKRFFEKKKAKTNAVVATKALAHKLARASYHILKEKQPFDARRCFA

SEQ ID NO: 142249 - protein, 431 aa, unidentified
MKPIVKQKTEPDPAEDVVAFLALDWADEKHAFRLQVVGQSKIETGTLEQKPQVLGPWLAQLRERFGGRPLAVGLEQSRGALIHALMAYDFLVLYPIHPTTVAKYREAFKSSGAKNDPLDAGQILEILTKHQDRLHRLNPDTVETRLLGRLVEDRRKAVELRVTHIQALGANLKEYYPQALELTNHNLKSRLACDLLMKWPTFEDFQQAKPSTLKRFYYGHNVRSPEVIERALTLAQKSQALTTDPALVESGRRLTQMYARLIQALNPAIEDYDQRIQRVFDAHPEAKLFRNLPGAGPALAPRLLAFFGTDRSRYAAALNVQSFTGIAPVTKSSGKSRVVYARAACPKFDRQTFHEFSRLSVSYCQWARNYVQYYTNKGKKYHTIIRALAYKWIRILFKCWQERTPYNEDKYIETLKIRGSIFATWHLQKTS

SEQ ID NO: 142250 - protein, 398 aa, unidentified
MLSIGIDVSKGKSTVCGMKPGGEIVYTPFEVQHTREGMSELVSLLRGSGEEVRVVLESTGSYHCPVVAALLENGIFVSVVNSLRMKRFCSQSIRRVKTDQIDAMQIALYGLAYWQELQPTRLPENTYRELQLLARQYYQMTSMLIKAKVDFNALCDQVLPGMQELMSDHAGRHKLSDFVLRYHHTAHILKMGETRFRKDYCKWAEKKGYRNHERMAALIFATAQNGIPVLPDAPSTQIVITEAIRVLHTVEASRDAILTQMQALAKTLPEYSLVREMPCIGDTLAPRLIAEIGDVRRFHSKRALIAYAGIDAPPYQSGKFSANNRHISKRGNRYLRKTGYEVMQSYVMHKPANDPIFTFIEKKRSEGKSGKLAMVAGLNKFLRVYYGKVTELYRSLPQ

SEQ ID NO: 142251 - protein, 380 aa, unidentified
MDIVAQPDPHSPDTPGRPPGQPVAVLGVDTHTDTHTAGLLSRSGGVLAALTVPADPAGAATLLSWAIQHSPGGGPLWWAVEGTRAHGLGLTRYLQHAGQFVLEAPHPLRRSRRAGKSDTLDACAAARAVLAALDSGRTDTLAIPRADGDREALRQLLVLRRHYTDTRTATVNLLKSLILTADDPLRETLRGRSTANQISTLIGPARGHGTPPPLPPATDLDATLRRTHLRDLAADIRTLDQRIRANRKHLTTLINDIMPSLLDIYGVGAVTAAILLTTWSHPGRCRNEAAYAALAGVNPIPASSGRTDRHRLNPGGDRQLNTALHTIVMTRRRSHQPTIDYINRRRSDPTRPRTDREITRSLKRYLARHLYRHMQTHARP

SEQ ID NO: 142252 - protein, 361 aa, unidentified
MNTTTVAVDLAKDVFQLVAADSQWRVTQTARLSRGQFAAWFENRAVDRVIMEACGTAHHWARWFNSLGIEVMLLPAAYVRAYVKRNKTDAADAAALLEAARCADITPVQIKSVEQQALQGMHRIRSLWMAARTSRINALRGFCREFGIPIAPGSRTGVENISRVLADPRSAVPEMIRGAMTLMVEEIRMHEARIAQIERALTRVARESQPCKLLLTIPGVGLLTSTAMVAATSGKVTHFKDARHFASWFGLTPKEYSSGSNRHLGRISKKGDRYLRMLLTHGARSVLRSAVVARSRGQDPSGVRAWALSVQARTNHNKAACALANKMARICYAVMRDGEPFGQPVVRLSKKISRQAFEMAA

SEQ ID NO: 142253 - protein, 327 aa, unidentified
MHGVNAAEQPILRKKLSRREMVKFFEKAPPTTVALEACGGSHHWARLLGSFGHDVKLIAPQLAKPYVKRGKNDAADAEALCEAMSRPTMRFVPVKSAEQQASLMLVGVRERLIRNRTQLANAIRGFAMEFGIVAATGMCRIEPLLERIAADQALPELARELFAMHGVEYRDLLAETKVVEEKLTALHRSDECSRRLAEIPGVGPVGASLLMMKTPDPRTFKSGRDFAAWIGLTPKDHSTAGKIRLGVITRAGDEMLRSILVVGATALLQHVRTGRSRHASRWLIELLQRKKPKLVAVALANKIARIAWKLMVSGETYRRPEEQTQAI

SEQ ID NO: 142254 - protein, 404 aa, unidentified
MLLVGIDWAERHHDVCLMAADGGVLVRERITDGVAGVARLHELIARHADAPAEVVVGIETDRGLLVGALVAAGYQVVAVNPLAASRSRERHTISQAKSDRGDARMLADLVRTDRHHHRPAKGDSGLAEAVKVLARGHQQLVWARQRQANVVRSALRTFYPAAVAAFGGDPGGRDAVAVLGLAPTPELGRRLSHAELVAALRRAGRRRQVEARAAAIQAALASQQLEAPPVVAAAYGQVVAAAVAVIANLSQQLAGLEAALTSTFCAHGDAGIVRSQPGLGLVLAARALAEFGDDPERYVSAKARKAYAGTAPITRASGLRRVVLARAVGNRRLSTACHLWAFAALTGSPGARRYYDTHRARGATHHQALRALANRLVGILHGCLRHRQPYDEQLAWPTTTAAAA

SEQ ID NO: 142255 - protein, 475 aa, unidentified
MGKVKHIKASKRTELQKKLRDIPYDKVLVVAIDPAKYSPKALICNYFGEILVNPFFFTINSKGLNLLLTKIQETVNNISAQKVLVCIETTGHYHEIIVRYLQEFDYDVLLINAYTTSESRAENLNWSKTDNIDLFAIASALIDGKTTKSRLLDGNYEKLKDLCRYRRYEVQKRSAIKSKIRVLMDKIWPNFQGKGKIVNGTGKVEKIFSKFWGKAPLFIMKNYPHPSLIKKFNKTDLREISRKNNLKFRNSTIEKLLLAAENSYARPYEELEVEIELLTMTIADYENANQKIELLRDKIENILVQNPGLLLLSVPEIGVVTAAEFSAEMGPATQYDYAGQVIKTAGTNPLVKESGGKKARYGSISKQGNPSFKHIVYLVGKSLATGKTNPYFKSYAERLRKRDKNPNQIYIAAGNKFIRVTFAMLRDHKLFDPPMWKGESLTSNIFDKIDSPENKEIALKTLENYPGVNSSKLTG

SEQ ID NO: 142256 - protein, 346 aa, unidentified
MMIIGCDFHPSWQQVAWVDTETGETGEEKLVHERGEAARFYQRLPGPALIGMESTGNCEWFLEMATAAGHNVWVGDAAKIRASDVRQQKHDRRDAALLLQLLLEGRFPRIWTPSSQEKDLRQLLIHRSRLVGLRARVKNELQHLALNRGVQKKRKLWSEAGQKVLREIPLRPWAGRRREDLLKLLAMLNEQVAQLDEAVTKAAEENENARLLMTQPGVGPVTSLAYVLTLGDISRFPRGKQVASYLGLIPREYSSGGKQRLGSISKQGNRFLRMLLVEAAQGAVRCDPGFRNEYLHRCHRKAKGVAKVAAARKLAIRLYWMLRTNTGYPEVVRVESSSRVPLVSAS

SEQ ID NO: 142257 - protein, 320 aa, unidentified
MQTPPVALNIGADVGKDEIVVACAEESFATRKIHNQRAALLAFLKDLPAGSRIAMESTGIYHELLAELAHQRGFVVYVLNPKDTRHYAKAMGLRGKTDRVDAELIGRLIAHEHEKLHPWIPPTVEQRQIDRLLKRRAKVSRIRATLTQSFKDVKGFAAEIKALRQRLDQLLAGLDARIKTLIEASTERKQDYARLRKIGGVGAVVGSSVLNTLERVPFRSADAFVAFTGLDPRPDESGHHHGRRRLSKRGPSELRRLLYLAAMAAAKTKTWKPLYQHDRARGLSTTAALVVLARRIARTAWSIYTHKTAFDPQRLTKALT

SEQ ID NO: 142258 - protein, 373 aa, unidentified
MPRYSTAFGMDVHLRSTTVCALDAETGEAVTRRFRGNPWGEVAEWMSGFPGPSLAAYESGYLGFAPQRELSGLGVDCVVAAVSRVPRSAADLSSKNDRNDAARMAKAILSHDVTPVWVPSPEIEGLRDLAGAHDAATARLAAAKQRLLAFLARRGYAYGGTTPAGNPRRYWTYDFLRWLDKVRPADDGGIRALAALRNEVEAAAETRDDLLAEYRAAVAAGPLSAEVEALQSIKGCGFALAAAFASEVGDFSRFRSGRQVTAYFGLAPKQRSSADSVRLGGISGAGNALVRRLAVEGSWSYVQASHQPKLMPKGSGVPLEVRMHGRKGSERLLRRREEMLARGMPQAKANAATAAELVRWLWALGAMCREATE

SEQ ID NO: 142259 - protein, 326 aa, unidentified
MSNILGIDVSKDKLDLVLLSEEGKYHKVIRNDLSGFKELDQWLISRHIDRVHVCLEATGQYGDEVSEYLYERGHDVSVVNPTRIKRYGESKLHRNKTDKADADLIAEFCLKEKPALWEPLNPDLKHLRALVRRLIDLQANYRQEESRLSSGEKDAWVIQDLTVHLEYLKACVEATEAEIQNFTKGTPDLKANQELLVSIPGVGEKTSARLLGEIGEVSRFENAPQLAAYAGLNPKGFSSGSSVHKKTCISKQGRSELRACLYMPAIVAMTHNPVIRALKERLQKKQLPNMAIIAACMRKLLHIVYGVLKSRKPFDPEYDRQFNYSA

SEQ ID NO: 142260 - protein, 316 aa, unidentified
MSTTKYWVGVDVSKKKLDVHIRPTGKSFSTTNNQLGIEQLSDSLNQLSPQLIVLEATGGMEILAAVTLSRRGLAVAVVNPRQVRDFAKATGQLAKTDSIDAAVLAHFAEVIRPEVRPLPDEQAQLLEELVTRRHQIVEMIKAESNRLPTMKGPMREHIQEHIDWLRQQRHDIEKQLQENIRQSPVWQEKVKLLKTVPGIGEVVSCTLVACLPELGSLTGKRIASLVGLAPLNRDSGQFRGKRTIWGGRARVRTALYMPTLVATRFNPIIKAFYERLLQRGKHKKVALTACMHKLLLILNSITKSGQPWRTSIAGES

SEQ ID NO: 142261 - protein, 339 aa, unidentified
MKDVSTIGLDLAKNVFQVHGVDGAGSVVVHRRLRRREVLGWFARQRACLVGIEACGSAHYWGRELRGLGHKVRLIPPAYAKAYVRRNKNDAADAAAICEAVSRPSMRFVAIKTAEQQAAAGLHKVREMQVKQRTMLMNQLRGLMAEFGIVVGAGPQHIGALLAILADPSDNRIPEPLHAALVSTAGLLAEVQRRVEALDKQIAAWGRDNKTCRHLRTIDGYGPVLSSAMAALVVDPASFASGRDFAASLGLVPRQDGTGGKVKLGAISKRGNGYLRRLLVNGAMSVLCSKRARQDPWLVKLLKTKKRKVAAVALANKMARIGWAVMLRQEDFRPRQTAS

SEQ ID NO: 142262 - protein, 392 aa, unidentified
MAICIGIDAAKVVHWVVGIDDGGRVVLDRAVENNPADIDALIADLRALGGDVVIGIDVVGSFARFIEASLLAEGFALVHTPGIAVNRAGQGFAGGERKSDPRDARTIAELVRTRDLRPVLTDDDTRVALRLKVGRRRDLMQDQVRRVARIRGLLCGIHPGLEQAFDLCCKGPLALLTRYVTPAEIRRAGKARITAHLKKTPHLHGGEALAARALECARAQRITVPGEAATAELIRELASEALEARQKIARIEKDLENILNDHPDCALIRSLPGMGVVLTAEFLAAIGNIKRFTSADALAAAAGLAPVQRQSGKRSGWRRAYGGDKALKRVFYQSAFCAVTQKEPLSKAFYDRKRKEGKHHTQALIALARRRVTVLWTMLKRRETFDPKRNAA

SEQ ID NO: 142263 - protein, 340 aa, unidentified
MLTLPIYVGLDYHKDSVQVCVLNQDGEVLGNRRCLNDSLAVMQYAEAFGSVVRASVESCPGAADFAEELVQNGWHVDLAHPGFVSRMKQNPDKTDYTDARMLADLTRVGYLPRVWLAPHAVRELRRLVRYRQQLVDERRALKLRITATLRDQRIAEPDNFGRWSKTWYNWLMACDELSEQSRWILERWLSRLKSLGEDINAVMRRLREATCKDVIVDRLLKLPGVGEVTAFVLRAEIGHFDRFNSGKQLARFCGLSPRNASSGKRQADAGLIKQASPALRTIVIEAAHRLIRYDPRWHALARRLRKVGKPGSVVAAAVGNRWMRWLFHRLTDQLPAAPTV

SEQ ID NO: 142264 - protein, 357 aa, unidentified
MESQEVKYVGVDCGKKSIEVVRINSENSLERRQFSTTESGINNLLQWLTLNDIVGLEAGSQSFRIAKSILNKGVQVIVLNPGNLATIYQSLKKTDKEDSLKIARLIQRFPIEELPTVPIPNDEEEDNRRLCSEHENWTKQLTQGKNRLHSLFTQAGLTQITKKHLRTKVSREASVTLLPSRYQKEAERILKVLDLEEQNLKLIEKEIQEALKKNKAYVQTIMSMPGIGMITSLAIMSYMGDCKRFSSAKQAAYYAGLVPRVDISGDTVRYGRIINRGCHSIRRVIVQAAWSLVRCQHGGKVKEFYQRLYLKKGAKKSIIATSRKMIEVLYVMIRTGKLFDSMPENILNRKLTQYGLM

SEQ ID NO: 142265 - protein, 340 aa, unidentified
MKLYGAIDLHSTNNVTVVIDEQDRVVYQKRLPNDLALILMELSVYQTELQGIVVESTYNWYWLVDGLMEQGYKVRLANTAAIQQYEGLKYTDDHSDARWLAHVLRLGVLPEGYIYPRADRPVRDLLRKRSQLVRQRTTNLLSIQNLVTRNTAESLSANQIKGLDVRQVDELLPNGDLALAVKANLSVMCSADEQTKILERTVTQRVKLSPQFSFLKTVPGIGQILALTIMLETGDIRRFSSVGNFASYCRCVGSQKVSNGKKKGKGNTKNGNKYLAWAFVEAANFAIRFNSKIKSFYQRKKAKTKGVVAIKAVAHKMCRACYYIMRDRVAFDVTKAFGQK

SEQ ID NO: 142266 - protein, 391 aa, unidentified
MSLYFIGIDISKYKHDCCIISAADQKVVSKFTIKNSKDGFEKLLTSINSLSSPEDIKIGFESTAHYALNLELFLEKSLLTFMEVNPVLISEYKKSTTLRRTKTDSIDCESIARWLMTVEYKPHSKGFYHAYSLKSLTRLRDKLIRQRSFYLVRITNVLDHTFPEFKPFFREHLSKTAFFLLENYGSAEKMSRMNSNSYEKLRSISKGKFSPQQFIELKQLASNTVGVNNSIFDVELNSLLTLYKSLSKEIETIEKEIITLIEEVHPHYMSIPGIGPLSAAVIYSEYGDISNFSKPSQMLAFAGIEPSVNDSGTESHGGRMVKRGSSQLRYTLINCCLPLIRFDMTFAEYYAKKRAQGKPHRVAITHVAKKLIRVIYALERQDVDYNAQLVR

SEQ ID NO: 142267 - protein, 315 aa, unidentified
MNNTVEIFVGIDVSKATLDVALWQPEQAWQVRNDIEGIGKLLERLQELRPNLVVIEATGGYEKLIVAELVLAKVPVSVVNPKRVRDFARSVGQLAKTDKIDARILAQFAQAVRPAPRPLRTEEEARLSALISRRRQIIDMLTAERNRLVTAHLATRKRMEKHIEWLQQELADIEADIDQFIQGTPLWKQKDELLRSVPGVGEVTAYTLLADLPELGTLDRQGIAALVGVAPLNKDSGSKRGKRRVFGGRETVRNVLYMAALSAARFNPTIKTFYDRLIKAGKEKKVAIVACMRKLLVILNSILRHQRPWQPNFHA

SEQ ID NO: 142268 - protein, 351 aa, unidentified
MDATTVAVDLAKDVFEVATANRAGRILERKRLTRRQFQAFVDGLPGGTTVVMEACGTAHYWGRRCQAHGHNVQLLPVQYVKPYVRRNKTDRMDTEALLEAARCAGIQPVPVKTPEQQALQALHRMRMQWQRTRTARINALRGMLREHGIPIALGATTVLSRLPRILEDAENGLPAQLHQALALVYDEVRALERRVKEIDRQLARVAAADPVAQRLLTIPGIGVITATALLGAVPHIHAFRHARHFASWLGLTPSERSSGFRRHLGRISKRGDVYLRCLLTHGARAVLLTAQRTLRGKGQGTRFQHWAVAVAARRGHNKAAIAVANKLARIVWAVWRSEQDFAAGPHVAVAA

SEQ ID NO: 142269 - protein, 387 aa, unidentified
MTARTVSNLPAAMHVETARCLFAIELSKQSWVIGFITPLSAKISRRILSGGDWKGLLELIEEVRARVSRETGRAVDVISCYEAGYDGFWLHRLLEAHGIRNYVIDPASLQVDRRMRRVKTDRIDTERLLRSLMAYLRSEPKVWSVVRVPSIAEEDARRLHRERDRLVSERVQHVNRIKGLCALHGIYDYQPLRPQAMARLEQLRTAQGLSLPPRLTSEIKRELQRLELVVEMIATLEAERDAIVEDEASTHVNAKKIQNLHKLKAIGPEFAAVLVGEVFHRDFNNRRQLASYVGYAPSPFQSGNVAHDQGISKAGNRKGRTTGIELAWLWLRYQPDSDLSVWFRARVGALKGRVRRIAIVALARKLLVALWRYLETGLVPRGAVLKG

SEQ ID NO: 142270 - protein, 416 aa, unidentified
MNTQRRWFAGVDWARESHHVRLTDEHGNDVGERIFTHGGAGLAEMASWLTTTCQADAPEIHVAIEVPHGPVVETLMERGFAVYAINPQQLDRFRDRFSVSGAKDDSRDARALASALRTDPQCFRHLTPVDPTVVELREWSRIADELIAERNRLLNRMREQLWRYFPAFLKLDEDLGADWLLDFWELAPTPLKARRVREPTVAKLLKRHRIRRVDAAQVLAIAREEPVTVQAGTMEAATAHIATLVARLRLINRQLADAHRKIDALTARLVGGEESEPGQSVEQHDATILRSLPGVGRIVLATLLAEAWEPLRRRDYHALRNLCGVAPVTRRSGKTSIVLRRRACHPRLANAVYHWARVAVQNDRTARAKYEALRARGHGYARALRSVADRLLNVACAMLRDGTLFDPSLRVQKSAC

SEQ ID NO: 142271 - protein, 353 aa, unidentified
MAQPVRALVDGVDEFIGIDHHKKRCQVMVKDRQGHVLRRGNIPTQREALERFLGDRNGAVRLAVFEAGPRYRPLYRWLAGLADQVVMANPGRLKIISETAYKDDAIDAEKLADFGMLGMVPEAYVCGDEAWDRRQGLRQRAALVKMQTSVKNRVHALVDQHPNALPARPEATDLFGSLGMQWLREVVLPETDRGRLDQLLEVYTFLHDQVRQSDAQVRQMVKADVRCGYLATMPGIGDFFAALILAEVDDIRRFPTSKDFVSYTGLVPGRDRSDEVDKPRRMHKRGSKWLRWALVEAAIPATRSNLALKNLYDRVVRKKGPKAGPNVAKVAVARKLAEIVYRILVEERPYEVR

SEQ ID NO: 142272 - protein, 387 aa, unidentified
MYYVGIDIAKLNHFASVVSADGEVLIKPFKFTNDNDGFCKLLSVLASYERGCLIIGLESTAHYADNLVEFLVSKRYQVCVINPIQTSTMRKNNIRKTKTDKVDTLVIARTLITQPHRFFSQEDIDLMHLKNLGRFRQKNVKERTRLKIQLTAYVDRVFPELQYFFKSGLHQKAVYALLKEAPTPELIASMYLTHLTHLLEASSHGHFNKQQARELRILAQKSVGSSDRALSLQVTQSVEQIELLDRQIKNIESQMTEIMLGLDSVIMTIPGIGYINGGMILGEIGDIHRFSKPCQLLAFAGLDPSVYQSGNFNASHTRMSKRGSRVLRYALINAAHNVVKNNATFKAYYDTKMAEGRTHYNALGHCAGKLVRVIFKMLSDDVTFNLE

SEQ ID NO: 142273 - protein, 353 aa, unidentified
MNKVQDFVVKGKRVFVGLEDSKRTWKVCIRCDGMIVHEASMPTEYANLRTFFERKFPECMIQVIYEAGFQGFWLHDLLEEDGVDCIVTPACKVTQEKVNRVKTDKIDARRLAKVLETGDYTSCWVPARELREDRQISRTLTQMQRNIVAIKNRIRKFLDFHGLNGDLPSGAWRVEHYQKLRAIKLNKPLQICIDAYFRVLDELEEIRKCLLLELRSLSREKRYSESVKSKESSPGVGWLSAIRFTLEWGDVSRFTSGKHLGSYLGLTASEYSTGEIIHRGRITRQGKSQVRAWLIECAWTAIRKDQALLEKFRRVWSSSGSKKKAIVAVARKLAARMRALELKNEPYHIGLIE

SEQ ID NO: 142274 - protein, 290 aa, unidentified
MQVTTMGIDLAKNVFQVHGVDASGKVVVRKALRRSQLLPFFEDLAPCLIGMEACSSAHHWARELNALGHTVKLMPPSYVKPYVKRGKNDVADAEAICEAVTRPTMRFVPVKSTDQQAVLMLHRTRALLMRQRTMAVNALRGHLAEFGLVAAQGAKSLAELIESVFEGSGTDDDAVPPLARRALAPLVAQLRQLQAQIKAIEVELLAWHRATDASRRLETIPGVGFITATAIAATVTDPSHFTSGRQFAAWLGLVPRQNSSGGKERLGSISKMGDRYLRTLLVVGATSVMR

SEQ ID NO: 142275 - protein, 365 aa, unidentified
MYRLNNTIESSSHEETRGQFNGSKADIKLGIDVHQGFYVVVEQVDGSNPKPPQRFQKQAFLHWAAKLKQQSGGQVYAVYEACGFGFSLQRQLSALGIHCYVVCPQKLDERNRRVKTDGLDAKALCLKLDRFVQGNCDALALVRVPSEAEEQLRAIHRQREQLVKARKQLEAQGRSLMGNHGIEPVQRWWKRRAFAALPVPEWMKELLGNSQPILVGLEQKIGALTLQLQAAAAPNQPRGLGKMTSVVIDREIGDWTRFNNRRQIGSYTGLCPSEQSSGNTRVQSCVTKHGNPRLRAALVELAWRLVRFQPNYKPVVKWRAILAKGALSTGAARKKAIVAVALQLAVDLWRIKTGRLRAGQLGLTI

SEQ ID NO: 142276 - protein, 340 aa, unidentified
MKISKKNYLGIDVSKPWFDVSLLSELNHVKQPMLTLRFDNTAQGLKLFKKWLTAQHVSFDNNTLLVIENTGVYHRLLWRFCSTHNLQLHIGNAAHIKWSLGITRGKSDIIDSKRLCLYCCKQAEELKATPALNPVFMKLKDLMTSRSRLVAQLHSTKNYLKEIQCTEDKQLLLVLESLHKAAIEGLKKSILKIEEYITKMIKEDAAIYHNYELIKSVPGIGHLTAVYIICCTNNFASKISGKQLASYAGVVPFEHSSGISIKGRNRVHKMANKDLKKMLHLCALTAIKYYPEFSNYFNRKKAEGKNGMSALNAIRNKLVLRVVAVVNKQTPYVDYSVKVA

SEQ ID NO: 142277 - protein, 430 aa, unidentified
MKKKNHSNEKLEAITFKTLIVGVDIAKHNQWARFVDCRGIEHDNALKFENNRNGFNAILTRIYEICKKEDFNKVIVGMEPTGHYWKAFANLLLKQAQITVVLVNPYHTKKAKELDDNSPTKSDKKDALTIARLVKDGRYFETYLPHDVYAELRGLTTTRHSMNKRKKSIINTITAVLDEYFPEFESVFKHPFKGKASMHLLKVCPIPKFILELGEEGVLEEIKKAVKKTVGKKKAAHLVEAAKDSIGVDYGEYAARFKIQQLMEELELISSQLEALEAEMAETLKKTEISEYLLSITGMGVVSLATCLGELGDPLRFEDARQMSRLAGYNLIEDSSGKNKSGTCISKRGRKNLRSVLYQISVIMVATNKEMRQLYDYLKTRGENPLKKMQALVVISKKVLTLIFTLAKKKAYYQPELVFGEYRKSQLLAA

SEQ ID NO: 142278 - protein, 351 aa, unidentified
MRKIAYLGMDVHSNHCVLGDMDARGNFRGAQTFCTSEQNIIQALQDVKATEKYLTFEEGNLAYWVARVAAPYVTEVIPCDPKENALIYKGSNKNDKVDTKKLCRLLRLGELKRVYHPETDERAIFKAAAQHYIDLRDQQISLKQKIKAMYRHWGVIDVAGEAVYSPKKRDNYLCRIKHLAIRNEISRLYYLMDQTESMQGRALKAMKQLGRKYPEIKQFQKMPGIGEILAHIFDAFIQTPHRFPDKHKLWRYSRLGVTDRSSDGKPLGFKRLDRSGISELKSLTYQAWMSALRSDNEVKRFYKNSLQRTFSRVHARLNTQRKIIATMYGMWKRGEPYNPNLFLDSPQSDAV

SEQ ID NO: 142279 - protein, 364 aa, unidentified
MNSVCNNTELSSHEGTRCQFNGSTGVIKLGIDVHQQFYVVVLQEGGTNPKPPQRLSKEGFVHWAARLKQHGGEVHAVYEACGFGFGLERQLSALGITCHVVCPQKLDEHNKRVKTDRLDAKALCLKLDRFVQGNRDALALVRIPSEKEEQLRAIHRQREQLVKARKQLEAQGRSLMVNQGIEPVRSWWKGRTFVTLPVPTWLKELLANSQPILLALEQRIRALTVQLQSGADLDQPRGLGLLSSVVIDREIGNWHRFNNRRQVGSYTGLCPSEHSSGNTRLQSCVTKHGNPRLRAALVELAWRLVRFQPNYRPIVKWNEVLRKGALATGAARKKAIVAVARQLAVDLWRIRTGRVKAEELGLIN

SEQ ID NO: 142280 - protein, 337 aa, unidentified
MKYCGIDLHGNNHWVVIIDEQDRVLYSRRHANDLPRLLAVLAAHRSELCGIVVESTFNWYWLVDGLQEAGYRVLLANTAAIKQYDGLKHRGDESDARQLAHLLRLGLLPEGHIMPKAARAVRDLARKRMQLVQQRTAQILSIESSLSRHSGWTLSSNRIKCLRQADLDEMRLGEMPMLGLKANIAVMQALQTQIDGLEKVLADYCRTEPGYRLLRTVTGIGEVLATVILLETGGIERFADAGNYASYCRCVGSAHLSNGKKKGQGNTKNGNRYLAWAFVEAANFAVRSCEAARRFYQRKKAARNNAVAIKAVAHKLARACYHMLKTQQPFCVERCFA

SEQ ID NO: 142281 - protein, 398 aa, unidentified
MKHPCIAIDVSKESSHIQGFYGLNDQVSDPLEISHDKTGFDLLKTMMESIYLETSKEVVVVYEDTGVYDKPLRMYLTDNSIRYATVNPLLSARYRKKNLRAVKTDKKDCSNIAKVYFNEDIKYKLEENTYYSNLRKLNRYYEEHVDHLRKYKVNFRETLDTVWPGFNDVFSDIFTELPLSLIEHYGHPYKLKRVRKTTLVKLIMKNSSHRESWCERKALDILNYVNSTQSGCPEDDILASIIKDKVSTIKFTLDKTEKYLTELIELSKNDTNFTLLTSIPGVGENLAARLIAEIGDISRFNNEKQLVAYAGIDPQVYESGSYKGKFSISKKGNKRLRSLLYIAVSCSLRNNLKDNSFKDYYKRKTQQGKIHKVVLIACCNKLIRIIYSMCNTGTLYEY

SEQ ID NO: 142282 - protein, 383 aa, unidentified
MKAVCGLDVHKDSIFLCILHSDGELFEQVFGVLTFQLEEMRKLLQKHHVFEVCMESTSIYWIPIWRVLSPHFTLRLVNPYFIKQLPGHKSDVKDAQWIAECTMKELVRGSFVPPEIIQQLRQYDRRIFDLNAEIVRKVSKVDGVLQRCNIRLSNYVSNIECKSYRDVVRRLSEGVTNPNELMKLVHGRIVNRHGAETILASLTGVVSQAEIDVLRQLHEEIDIAESHRNECQQRMLEICEKHFPEELERLQKIPGIKERAATSLIAEIGTDMSKFETANHLASWSGLRPRNDESNKKIKSRKITHGNVYLRNTIIQCAWAASRQKDCFFCRFSYHQTIVRRKNKMKVIVAVARKLLVAVWHVLHDRTDYVDFKPDREESANNG

SEQ ID NO: 142283 - protein, 340 aa, unidentified
MQPYFVGLDVHKQVIAYCVKTADGGIVTEGKIAATRAALDEWVQTVPRPWQGAMEATMFSHWIYWHLKPHAAELKMGHPAQMKAIFTGKNKSDKIDTRGISDLLRCNLLPECYVISPELGALRQQLRFRRLMIEQQVMFKNKTAGLLMEAGVEYERKRLHGKRYFAALLAQNEWIGKHMRPLLEYNREQIESLQDMDRRLLQMLERHPRLQARIEALRQIDGVGPVTALTWALEVGSPERFSSLKKAMSYCGLTSALRESAGKQKRGPISKQRNRHLQCALIEVAKIAPLNNEKLQETHRKAMEKGAHKNRATLAVARKLVAYLLAADRAFSQKCAALPA

SEQ ID NO: 142284 - protein, 341 aa, unidentified
MQAITVGLDIAKSVFQVHGVDADGQVVIRRQLKRRYVLAFFEKLAPCVIGIEACASSHHWSRRLQALGHTVRLMPPAYVKPYVKRQKNDATDAEAICEAVGRANMRFVPTKTPEQQSGLVLHRTRHLFIRQQTSVINAIRAHCAEFGIIAPVGRRGVEELLRGIANEKRVPELARACLLALGAQLRRIKEQILEFDRMITAWHRGCETSRRLDEIPGVGPALATAVVASIADPRAFRSGRDFSAWIGLVPKQSSSGGKPKLGSISKQGDRYLRGLFTAGALAVIRYAKIRGTGHRPWLTALLARRPIKVAAIALANKIARMVWAMMARGERYREPVALVAY

SEQ ID NO: 142285 - protein, 346 aa, unidentified
MRPNLFMENDHVVSQCVGIDVSKEKLVATMCMFSQAEQAVYSKATEFDNDKTGFNQLVKWSRKEAVKELPLRYVMEATGVYHEHLANHLVRIGCIAVVMMPTKAREFAYWEGMISKNDAIDSRVLALVGCVKRNMRPWKPTNPLYRELRTMTRFSHDAKKLRTELKNHLEALEHSHEAEKSVIKHYESLVASLDKRIEKNLENMKKKVASDEELNKKVENIITAPSIGFLSAVTVIAETNGFALIQNRKQLTSYAGLDVRDNQSGTVNGVSRISKRGNSRIRAILYMPAVQCRLHNKHLKRAYDRIVAKHPDKKMIAVTAMERRLLLLIYALWKGDRPYNEDYDKE

SEQ ID NO: 142286 - protein, 315 aa, unidentified
MDTEYVGIDVSKDNLDAAAYVSGKKWRLPNSDAGVNKLIDIFREISPALVVMEATGGYETPAAYELNKAQIPFAVINPRESRDFAKATKKLAKTDTIDARVLAHFAAAIKPEPRPMADEQTQELEVILARRRQVIEMLTAEKNRLHTARKPVIAAINAHIDYLEKELSGTDSSLKGRIAESPVQQERYKLLHSVPGVGDRIAATLVIDLPELGKVNNKQIATLVGVAPLNHDSGSKRGKCSPWGGRPQVRSALYMAALVASRCNPVISSLYVRLCAMGKAKKVALVACMHKLLTIMNSMLRHKTFWNYEPLPASR

SEQ ID NO: 142287 - protein, 345 aa, unidentified
MKITTVGIDLAKNVFQVHGIDERGKAVLCKQLRRAQVAAFFGNLPPCVIGIEACASAHHWARTLQRYGHTVRLIAPQFVKPYVKTNKNDVADAEAICEAVSRPNMRFVPVKSIEQQAILSVHRVRQGFVKARTAQANQIRGLLGEFGLVIPQGIINVAKRVPEILEDASNELPVPFRHLIDRLTEHLKELDRQVKEFEQEIIAWHRNSELSRKLEKIPGIGPLAASALVASIADAHSFDNGRQVSAWLGLVPRQSSSGGKPTLLGMSKRGDAYLRTLLIHGARSAILAAKNKVDNTQGWLTDLLKRRHPNIAAVALANKNVRTVWALLAHGREFRADYVPTRMAA

SEQ ID NO: 142288 - protein, 345 aa, unidentified
METMYYIGLDVHKRTISYCVKDVSGRVYAEGSVPATRFDLDRWMKTLPQPWTAAMEATMFSGWIYDHLKPHAAALKVAHPLMLRAIAAAKKKNDRIDANKICDCLRCDFLPECCMAPTAIRERRRTLRYRNLLVRQMVQMKTKISMLLMEAGVSYNKQRLHKAGYFRELLATNPDIDEGLCSLLRLCRETVVRLQKTESALVRSLERDSLLMDRVERLMTIPAVGPITALTWALEIGEVQRFSSIKKAVSYCGLCGDEQSSANRVQRTPLSKQRNKHLQTTLIEAAKMAPRYSPELAMLYDKEKQKGYANRATLAVARKLVAYLMAVDRGQRNFQVVETSNCVAA

SEQ ID NO: 142289 - protein, 317 aa, unidentified
MTPVKFYVGVDVAKDWLDVAQRPEGAPWRVSNDERGIAALVERLVQLRPALVVLEATGGMEMPVVGALVIVQLPTAVVNPRQVREFARATGRLAKTDAIDAQVLAQFGEAVRPELRPFPDAATQELSALLTRRRQLVGMLTAEKNRLRTAAKAVRADVQEHIRWLECRLSDLDGQLAQSIRSSPSWRELDNLLKSTPGVGPVLSVTLLAELPELGTLGRKEIAALVGVAPLNWDSGHLRGKRRVWGGRSRVRAALYMAALVAARRNPVLRAFYERLVEAGKPKKVALTACMHKLLTILNAMIRHRTPWSVEHHALQP

SEQ ID NO: 142290 - protein, 409 aa, unidentified
MFTNLFLLPLSLKPLPGVDPSYQKKRFSTFNNSILQFKNWLIENQCRDVCMESTGKYWVPVFNLLEDEMNVTIANPKWVKAVKGNKDDTKDSKWIGDLFRLGLVQGSYIPCKPIRILREFTRYRYKLTSCRTSEKNRYQNALTVCNVALDSVVSDIFGKSATSVIDCLIEQSGNSINHEEIASRLLRSLKKKSDSVIESIEGYQMTDPPKYRMRLVRAHLDYITSTINDIDTMLDSLIAPYENAVQLLCAIPGVDRNSAITVISEIGTDMTPFSNSKRLCCWAGLTPGSNESAGKKKSVRITRAGVYLKPALVQVAHAAVKSDKSPYYKQKYERIMKRRGKKRAIIAIDRMILTAIYQMLSTGEAWNPTDLYKTDMPEPLKNKQKEKAVRQAMKLLIAEGIIKEPLLAS

SEQ ID NO: 142291 - protein, 402 aa, unidentified
MNKFNPATTKVSTVSALENIQAQPSVLDKYAAYIGLDTHKDNIVVAIALPGRALAYIDSELANNEKNISKLIRRLSKQFAGQLLLFCYEAGPCGYGIQRQIMASGHDCEVIAPSKIPKKPGEKVKTDRIDACKLAQYLRSGDLTAIWIPDHEQEAMRDLTRARSDMKSQELKARQQLNAFVLRHGHSWPSNKTRWTRSHYNWLESLKFNHDWLQVVLQEYINAVKAASGRVKDITDQMERVLPQWSMAPVVDSLIALRGIDKLAAMVLLAELGDISRFDSPKQLMAYLGLVPSEHTTGSKRRQGSITRTGNSHARRMLVESAWSYRFPARQTMHLKRKAIKASDEAKTIAWRAQKRLCGRYTTLIQAGKNTKQTTVAIARELIGFIWDIVCHEMPKVKIDVQ

SEQ ID NO: 142292 - protein, 385 aa, unidentified
MKPPPRHVRRRSALLPLQPKGDQVIVVGVDPHKRTHTAVAIERASGELRAELTVSARAAGHEELLLWARQQSQVRLFALEDCRHVSEALERFLIGRGERVVRVAPKLMGQSRRGSRSYGKSDSIDALAVARAALSEPRLPEARLAGAELEVKLLLSHREDLVGEANRTSNRLRWHLHDLDPEIALARGRLDRTAWMERLSRRLQRGEQTVRVRICRQQLRRLKALAREIKGAEAELDALIRTQAPELLELPGCGTLCAAKLVAEVAGVERFPDDAKLAMLAGVAPLDASSGRQQRHRLNRKGNRQLNLALHRIAVTQARFHQPARVFLERKRAEGKGRREALRCLKRHLVRVVWRTLRAASSERMISISPNLQEIKMPTPEPVLT

SEQ ID NO: 142293 - protein, 322 aa, unidentified
MAMLSFGGIDVSKDRLDIMVLPDEQCSWVSNDAAGWAELIEQLRGSSITAIGVEASGGYERGVVRALLAAGMSVRQINPFKLRQFAKASGTLAKNDRLDARMIASFVAIMPTRPAQRQAPMIEQLAAMLTVRRQLSDHKVATENASRLLEGAMLQRLSRRRVAGLTADIDLLDQRLVEIVTADPALAHRFRLLTSMPGVGAVLGCTLIALLPELGQMSRKQVAALVGLAPYDFDSGKLKGRRCIWGGRARVRHVLYMAALSASNWNPGLKAFHDRLEATGKKPKVVIVAVMRKMITTLNAMLRDGTTWVDRYSGRRSASTAR

SEQ ID NO: 142294 - protein, 343 aa, unidentified
MAYYVGLDVSLKTTAICVVDRDQNVVWQGSAETHPEMILNALDRWIGSVMRIGLETGSSSPWLARALKARNLPVIVMDARRAASALKARPVKTDRADARALAEMRQSGWYTEVFVKSEESHRIKALLSARDQLVRNKRTFFGQIRGMLRPFGIRLPARQGTRRFDEAARAACRHDDLLYACVNALLEALGAIEVQIAALDKRVRAMVQTSKACWYLTSVPCVGPITALAFAAAIEDPGRLRRSRDVGAYLGLTPRRWQSGEKDIVGAISKQGDAMARHCLYEAANCLLTTWGGRSALKSWGLRLVKRVGAKKARVAVARKLACLLLRLWKAESHYGEDQVRTA

SEQ ID NO: 142295 - protein, 362 aa, unidentified
MKIIGCDFHPSFQQIATLDTETGELIEHKLLHPEEAIRFYKSLAGEEVLVGLESMGNTLWFERLLNRLGLGVWIGDAMAMRVSNPRKQKTDKRDACHILKLLQEGRFPRIWVPSLEERDLRQLLKHRHTLVQMRTRIKNQLQHIALNQGWQKKRTLWTQPGQQWLRQLELEPWTSRRRDDLLEMLKEMNQRIAQLNTAVEQAAAQRPEAVLLMSHPGVGPILALATVLTLGDVSRFPRGKQVASYLGLIPKEASSGQRRRLGAISKQGNSFMRFLLVQAGMSAARGEAGLGRVYKRLVQKKHHGVAKVAVARQLVVRLYWMLRENKQYPAVVRMQGSPSHPVAEVMAVALNGRPASQPNKEG

SEQ ID NO: 142296 - protein, 424 aa, unidentified
MTQNQSYAAFICLDKSDKKINVSLQQCAKNKMERSIVKGGAEALHAWVAALCARFPGQAVAICLEQPASGLIHALMSYDFIVLFPINPMTLARYREAFTPSRAKDDPTDADFLCELVALHREQLKAWQPDDVCTRKLRHLTLSRRRSVNMRTRFSNQLKALLKTYFPQALELCGDDLTTPMACALLQKWPSLQQLKKSRAETIRRFYYAQNARRGDVIEKRLALIAQAVALTNDPALIESSIITVQALTLGLRAAHTAISCYDREIARTFAQHPDASLFAALPGSGTAYSARLLAAFGSRRELFESAEAMLNFSGVAPVLKRSGQATITHRRYARPLFVHQSFIEYANESIRHSLWARAFYQMHKAAQKSHWVIIRALAYKWIRILFRCWQQRMPYDEIHYLKSLQKSHSPLLPYLAQPVIQTA

SEQ ID NO: 142297 - protein, 344 aa, unidentified
MKITTIGIDVAKNVFQVHGVDERGKTVLRKQVKRDQMAGFFAKLPGCLIGMEACGSAHHWARKLQGFGHTVRLMAPQFVKPYVKTNKNDVADAEAICEAVARPNMRFVAVKSVEQQAVLALHRVRQGLVKARTAQANQIRSLLGEFGLVMPKGITNIRKRVPELVENASGELPAAFRQLVERMLDHLKDLHRQVGELEAQIKAWHRSSELSQKLEKIPGIGPLGASALVASIADARSFDNGRQMSAWIGVVPRQHSSGGKPTLLGISKRGDVYLRTLLIHGARSAIVAAQRRASVNPWLAGLVQRRNPNVAAVALANKNARTVWALLAHDREFQPDYVPTRPAA

SEQ ID NO: 142298 - protein, 322 aa, unidentified
MPVLMGMGIGLRRKESEMHATTVAVDLAKSVFQIAVADDKSKVVEQSRLTRSQFERWFHNRDVGLVIMEPCGSAHHWGRWFNRLGIPVKLLPAAYIRAYVKRNKTDAADACALLEAARCAEIVPVQVKSLEQQALQGLHRIRSRWMATRTSRINTLRGFCREFGLVVPQGARTGVEAMSRALADPNLAIPLLIRDSMKLLIEEIRLLELRIAQLEKELTSLARQSPACTELLTIPGIGLLTATAMVAATGGSVSHFKDARHFASWFGLTPKEFSSGSSRKLGRISKKEDRYLRMLLTHGARAVLRAAELARRAGKPLDALRT

SEQ ID NO: 142299 - protein, 429 aa, unidentified
MKKIRKHAAGIDIGAKQLFVAVEEASVAVFDTFTENMHQLADYLHTHAIQTVAMEATGVYWTVLYDILEAKGFDVWLVDGRQTKQLPGRKTDVKDCQWIQQLHSYGLLNRCFVPTTSIKELRAYQRLREDHLRTASMHVNHMQKALTQMNIRLSEVLSQIHGVSGMRIIEAILAGERDVTVLVELCHTSILKKKREQVRKSLNGCYHPAHLFALEQAYQGYQFYQQQIKACDHQLEQVLQGIDLDKEQPPLEKPRKPIRHNKPDVAHLGKHLLRIFGGKDATNLPGITDYTWMQLLAETGENLTRWPTAKHFTSWLGLSPGQHQSGKSKKRPKLRGKPKAGQIFRQLAQSLMASKKIGIGAFARRLRAKKGPAIAIKATARKLATLYWGYFVHGAEYVERGVEHYEEQVLRNKRKALARLAKELGVQIA

SEQ ID NO: 142300 - protein, 361 aa, unidentified
MTGTMTWVGLDVHARSTQGAAIHSLTGELERVRFGPGVEPVIEWLSGLPGPVRAVYEAGPTGFGLKRAADQAALAMQVIAPGKTPRAATDRVKTDRKDAELLARLLLAGQLSPVFVPDAWIESVRHLARRREQVRADVMRARHRISKLLLVEGRVYCEPTTWNVRHRQWLSRQAFAHEPTELVFVDLLAALDGLLARRDALEERLSRLAQDERLWPTVARLRCFRGVDTLTALTLHLELGADWQRFSSPRQLGGWLGLTPSLSQSGQTSTSGSITKTGSSLARRLLVESAWHYMRPPRSGATLRNRQTGQPDHVLQIAWRAQHRLHKVHHKMRDRGKPHNLTTVAVARELAGFLWAAATAP

SEQ ID NO: 142301 - protein, 431 aa, unidentified
MPPKKKNTSTVSVVHHVCCGLDVHKKTVSACLLWSDRFGTEQCEMMEFETFTDDLIRLKEWLIQRECPVVAMESTGPYWTPIHNILEGFFQVILVNARHMRNVPGRKTDLSDSRWLAGLLRHGLLRAAFIPPKYQRQWRDLTRMRNKYQQSVGDFKRRVHKLFQEANIKIDSVLSDLFGLTGRNLMRLLANKGATLTLADVEQCLRGALKKKREEVYRSIQGFFEEHHRDMLSLMLDTIEKLESQVKTLDKRITQSMRDYQQKIDALDEIPGISDVSAPAVLAEIGPTLEAFPNADALSSWCGLCPGNNQSGGKRFSGKNRVRKNRLKTIMVEIAWPAIKKKRSYYRAKYYSLKARLGPKKAIVAVAHRILKAIYHVVKYGTPFKDLGETYLLQKNRDAKIRYLSRQADLLGFRLVAVEQPPPERKQRIFS

SEQ ID NO: 142302 - protein, 297 aa, unidentified
MHATTIGLDLAKNNFQVHGVADDGSVVFNRSLRRAQLLTFFQSQQPCLVGMEACATSHYWARELTALGHEVRLMPPNYVKPYVKRGKSDAADAEAICEAVTRPSMRTVPVKSVSQQSLLCQHRARELLVGQRTQLSNSIRGLLGEFGETIRSGAGHLRDFAQSIKNGSMPDLPAAARHVISALCDQLINIHNAILLLDRQIYAAGRTDHRIRLLRSIPGIGPITASAIVATIGSADTFKSGRDLAAWIGLTPINKSSGGKERLGGISKKGDRYLRKLLVVGMTPRIAAARAPWLISR

SEQ ID NO: 142303 - protein, 364 aa, unidentified
MTGTEPHAWETGLMNTITYVGLDVHKATVAVAVAQGGRGGEVRQLGVFENRSEILTKLAARLSKPGRRLSFCYEAGPCGYGLHRLLTGGGHDCVVVAPSLIPVKAGDRVKTDRRDALMLAKLHRAGELTPIWIPDAAHEAMRDLVRARATAGRVLSKARQHLQSFLLRHDQIYRGVRAWTLAYRRWLTTVRFAHPAQQIVLQDYIHAVQDAEARLDRLTRQIEELLPSWAMAPVVAALQAMRGVALVVAVTVVAEVGDFRRFANARQLMAYLGLVPSEHSSGASVRRGGITKAGNVLARRVLIEGAWTYRMPARVSRKLHDRNEKLSPAIRDIAWKGQIRLCWRYRRLAAAGKPTVVVTTATAR

SEQ ID NO: 142304 - protein, 356 aa, unidentified
MQAKIKALVDDYDRFIGIDHHKRTSYLTVKDREGNTLKRGNIPTSKNALSLFLDDGKNENGSASIAVFEAGRCYRPMYRWLSEMVETVVLAHPGGLKIVSDTVYKDDKLDSEKLADLLMLGMVPEAHVASDEAWDRRRVIRHRVLMVQMQTKVKNRIHATIDLYPDALPTRPEVSDIFGKLGMHWLQRLELPLQERRRLDELLDILKSFKERVSASDALVRKIVRDDKRCQLLKTIPGIGDFFAALIAAEVDDINRFPSSKHFVSSIGLVPGRDDSGDRERPGRMHKKGNSYLRWAVVEAAIPATRSNLALKNHYDRILARKGRKAGPNIAKVAVARKLAEIIYRILKDERPYEHR

SEQ ID NO: 142305 - protein, 402 aa, unidentified
MKVFIGVDPHKLSATIEVVDDRETVLATGRFGTDKAGYTAMRKVVARWPDRTWAVEGSNGAGRPLAQRLLADGERVVDVPAKLSARARQFDTGHNRKTDAHDAHAVAAVAVRTPALRVLSYDVEIETLRMLVDRRAELSRTRIQTVNRLQRLLAELTPGKAKKDITTLQAKAILGSVRPRDLAGRTRRRLAAEQLAELVVVDKKIKALTKELKIMVLARGSTLMDLRGVGPVVAARTLADVGDVARFADRNRFASWTGTAPIEASSGEIVRHRLSRAGNRRMNHMIHIAAACQIRLDTPGRAYYRRKLAAGKTRAEAMRCLKRRISDALYRRLLIDARALMSGGADAGPGGHCGASLESSAAGSHPYTSTSDQPLPGPARTTLPAPTSTQKSSISRPLQPAS

SEQ ID NO: 142306 - protein, 318 aa, unidentified
MSDQSFVGIDVSKDKLDVHVRPSDHSRSFVYDEEGLEQLISALQIVQPRIETIIVEATGGYERRLVAVLVAEQLPVVVVNPQRVRYFAKATGQLAKTDAIDAAVLSMFGLTLRPQARELPDQSLEDLRDLLARRRQIVAMITAEKNRLTTAVRKSIRREIQDHIHWLTKRLKSTDDELNRNIQASSVWKAKDDLLQGVPGIGPVSATSLLIQLPELGTLNRHQIAALVGIAPINQDSGRFKGHRITQGGRASVRSVLYMCTLVATKHNPAIRDFYRRLVQSGKPKMLALVASMRKLLTILNTMLKHNRAWDASYAKTS

SEQ ID NO: 142307 - protein, 353 aa, unidentified
MDDRAIEGEVILGVDTHLDTHVGALISETGKLVGTLSVAAETTGYLKLLTWANSLGHVRRAGVEGTGTYGAGLARVLRDHDIDVLEVNRPDRAARRSRGKSDPTDAENAARAVLAGRATAIPKEQSGAAEAMRTVSVARRSAVKAKTQAINQLRALLVSAPQDIRERLLRTKTSECVANCAKLRSLGGAPMLQALATTLRLLAKRYLALAEELSTLDAMLEHLTQRHARRLRERFGVGPQTAAVLVAVAGDNPERLKSDAALAALCGTSPLQASSGKTVRHRLNRGGDRAANNALWTIAMVRMRSDPRTRAYVERRTKEGMSNKEIHRCLKRYIVRELYPLILADLADSASAS

SEQ ID NO: 142308 - protein, 354 aa, unidentified
MAQTSQSKITVVGIDIGKNSFHLIGLDKRGAIVLRVKQSRSQLEARFAIMPACLVGMEACVGAHHLARRLAALGHDAKLMPAKYVRPYSKGQKNDFKDAEAIAEAVQRPTMRFVAIKSVAQLDLQALHRIRDRLVSQRTGVINQIRAFMLERGIAVRQGQRFLRAELPGLLATRDDVLSPHMLRLIEDLVSDWNRLDERIEALTSEIESMATSDLHCRRTMSVPGVGPIISSAMVAAIGTGEAFSKGRDFAAWLGLVPRQMSTGDRTILGSISKRGNKYLRKLFVQAAWVVLIKPVSWERHGLKAWIEAAKNRLHHNVLAVALANKLARIAWAVLAKGRSFEATISADGVLKPA

SEQ ID NO: 142309 - protein, 360 aa, unidentified
MRYSTIVGIDTHSKKNAVCDIVPATGEMREAVLSEDPEQLLAWIVEQDFPKPVGCVYESGPTGFGLARSLVAGGVACTVAATSKLSYRVDRQKNDRVDAKWLAQQMIAGGVREVRVPTPEEESLCHLSRLRGEVAADLRKAKQRVSSFLLLTGTEYTLTKKKWSKTFRKWAASCEFDQPADTFAFRCKMSAVLRLEERLAEVEAEILRIVASSPKLSERMSRLTCIHGVGKVSAFSLVCEVHDFDRFNNGASFASYLGLVPSENSSGKKVSRGAIAKQGNSHLRRILVEAASCYSKPFKAVRSEDAAVPEAVRAKAEKCAARLRKRRAALKKRGVSANKAKVAVARELAEWIYHIAVMPA

SEQ ID NO: 142310 - protein, 398 aa, unidentified
MDKVVIGADPHKHSVTIEILDERERVLHQGRYATDVDGYRQMLAEARRFPHRRWAVEGCNGAGKHVAQRLVADGETVFDVPAKLAARVRVFDTGNGRKSDPADAHSVAVVALRTPNLVAVRVDDDLVALRLLVDRRDELARARTQTICRLHRLLLELVPGGAKRFLSAPQAKAILDGVTIADDDIAGRVRHQIAHDLLTEVTVLDRKIKDSDKTLRAAVTATGTTLLDLNGIGPAGAARILGDVGDVSRFATRSRFASWNGTAPLDASSGDQKRHRLSRAGNRRINRALHIMAIVQIRHDTPGRAYFRRRIAAGKTPMEALRALKRRLSDVVFRRLVTDANTKVSPGGHLGATTKSSATDPTPTAGSSDKSLPGLDTHPTPRPTTRSRSPRPRTARLT

SEQ ID NO: 142311 - protein, 412 aa, unidentified
MCEEAVYVVHVGIDWGSESHQVCVVDRQAQRTQRTAPHTSAGLAALVAELVALSPENPGLIAVAIEVPRGPVVDALLERGLHVFALNPKQLDRFRDRYSVAGAKDDRRDAFVLADALRTDRHLFRRLQVDDPVIIELRELSRLDDDLREELSRLSNRLRAQLHRIRPDLLLLCPAANEPWFWALLARAFTLQGPTAVSLKVVRAVLKAYRIRRLAVDEVHTAVQVPPLPAAPGTMAAASAHIALLLPRLQLVQDQRTRTVRARLEAVLAELGKEEVPGQHRDVTILRSLPGVGRVVAATVLAEASRLLADRDYQTLRAHAGVAPVTRQSGKTMQVTMRAACNRRLRYALYHWARVSVQVDPHLRVHYERLRHGGHDHARALRGVADRSLSVLMAMLLSRTLYDPERRHEKAA

SEQ ID NO: 142312 - protein, 402 aa, unidentified
MDIHKSFLVACIATTDRNGFTSYVSKRFSTFTGDLRRLADWLAGNNCRDVCMESTGKYWIPVFNLLEKSCNVVLAHPKYVKSIRGKKTDKKDAKWIADIFKHDLISPSFIPPFEIRQLRDITRYFTKLSGFTTGEKNRAQNCLTVSNIQIDQVFSDVFGKSASAITKQLLEHPNGDFDVAPFIDHRVKAPISEIQAAIEGSICFQQAEKLRLIRQHLDSLITCKASLQVLIDKCVSQFQSQIELVITVPGIQRFSAISIISEIGVDMSVFPTAKHLCSWAGLVPQNDQSAGKKKTTRISRAGAYIKPLLVQCSLAAIKSKKHPEIKERYTALKKRRGHKKAIIAICRMLLTAIYAILKKAEPYDPSHYRAFDLAPVNSPITPDQAMQLVRRLGYTIVEVQAS

SEQ ID NO: 142313 - protein, 319 aa, unidentified
MSRRPRAVYVGIDIARDQLVGHVRPVGESFVVANDAAGHRRLIKKLKSLRPHRIVLEPTGGYERLLLKALHHAALPAFLVNPHKLRAFAQSTRGLAKTDPLDAAALAHYAEIWEPPTPIARDPMAERLAEHLSWRALLVDRRTALANRSAQLLDPALRRRARIALAQINAEIALAETMLRRILAEHPGLAELWRRLKTAPGIGDISAFALIAKLPELGRLDGKRIASLVGVAPHPWDSGRLSGRRIIQGGRFELRRTLYMAVLAAVRRPGSLRNFFLRLHANGKPTKVALMAVLRKLLCRLTAMIRDQRDWHEPHTLAP

SEQ ID NO: 142314 - protein, 327 aa, unidentified
MKKNPAPVYVGMDVAKATLQVHLNGHQFEFKNDTKGHAQLSKRLAKLTLPQVVCEATGGYEQPVVEACHKANILVSVLNPAHTLAASRAQGKRAKTDPCDAAALTDYGQRFQPEPTPAVPPAVRAITELTIWLKQLIDNRAVVKTQAEHQTNAFVGQQHAALLAHYESQIAIVEQEIKKSVHAQAPFQQRVDCLTQIEGVGFRTALLTLVFLPELGAMNRGGTAALAGLAPWTRDSGTMKGKRCIGGGRARVRSVLYMAALSASRCNPVLAPFYQGLKKRGKPSKVALTAVMRKLLIHMNSKLKKLADNPVLDKPAKSNKTKKSLAK

SEQ ID NO: 142315 - protein, 330 aa, unidentified
MSKNTTLHVGIDVSSKKLDVAFMHNGKWLQSEFSNTEKGHKAIVHYLNKRAKAALVCVEATGIYHLELCLALHSAANIEVMVINPRVGKDFSRVIMQRSKSDTSDARMLAEYTKRMEFIAWNPPKESVWELRAIARRMDVLSRQSVAEKNRLHSSLSDLISSDIEVNIKHLKRRTVQLQKKALELIEADDDMLQKFTLMITIIGIAELSAIRIMGEILMLPEDMSVRQWVAHAGLDPRIYESGTSVKKRTRISKVGNSHLRHALYMPALSASIYDEHVKIFREQLALRGKTPLQGVVAVMRKRLHTIYGVLKNKTPYDSQMFYQNVENMA

SEQ ID NO: 142316 - protein, 457 aa, unidentified
MPQAKRSRSRRDLATVHPAAAAIDIGATIHVAAVGPDRDKEPVRTFQTFTDDLHRLADWFARCGIKTIVMESTGVYWIPVYDILEQRGFEVLVVNARDAKHVPGRKTDVSDAQWLQRLHEYGLLRASFRPQAEMAGLRAYLRQRERLLDYAAAHIQHMQKALTQMNLQLHHVVSDITGVTGMLIIRAIVAGERDPGILASYRDARCHASVETVRQALVGNDREEHIFALTQALELYDVYQTKVLACDKKIEAILTRLKKSATPPINELPLARHKTRQPNAPAFEVREALHAILGVDLTQIHGLGPYLALKLVGECGTNLAAWPSAKHFTSWLALAPHNKISGGKVLSSKTRRTSNRAASLLRLAAITVGRTDTALGAFYRRLSARAGKAKAVTATARKIAVLFYNTLRHGMSYADPGASYYEDRYRQRVLSNLQRRAKSLGFVLQQAESATAQAGVS

SEQ ID NO: 142317 - protein, 340 aa, unidentified
MFTNFVGIDVSKSKFDLALIKGQDKDHVIQTVFDNTLKGIKSMNNFLEREHKVQLSETIFCMEFTGVYGYPLTDFFVKKDCHVWIEMPVNIIRSLGLQRGKNDRVDACRIALYAYKNRDDVKLWKPQREAILKLRDLLALRERLITAKKSLQMPIDEKISMGDKKGAEILRKGCQKSMSSLENEIGQIDKNLDDIIKEDPQLKELFQLATSVPGIGKLTALFMICFTNEFSMYTNPKQLACYCGVAPFEHSSGSSIRGRTRVSHMANKVLKRMLHMGAMSVISRDPELRDYYQRKVAQGKNKMLVINAVRNKIIHRLCAVIKRGYEYQSEIIFKERLVLS

SEQ ID NO: 142318 - protein, 362 aa, unidentified
MNRNTGMNAGQIIGTMGGKQVVGLDIAKHVFQLHAVDMSTGEIANVQIKRAKVLEHFVNKPKSLIAVEACGGAHHWARELTALGHTVRLLHAKIVRPFVSGNKTDATDARAIWLAVQQLGVKFVGIKSTAQQATLTLHRQRELLMKMRTMQTNALRGLLYEFGATFAQGRKAMFKDVEQTLEDLSAQLPQMVRDSLREQVARIKAMSDDILTIEKRLGLQLKADPHMQRIAQIPGVGLLTATAAIATMGEASAFKSGREFCAWLGLVPKQTGTGGKVRLGGISKRGDTYLRTLLIHGARSVLAHAKEPGPWLAQIQARRPANVVIVAQAAKMARTIWAVTAKEQSYQRGFQSVRPNVSVQAA

SEQ ID NO: 142319 - protein, 337 aa, unidentified
MDRQYVGIDFHRRRSVVVRMSATGERLSGVRVANDPVAIAAAVAEAGPDPEVVVEATYGWYWVVDLLQANGARVHLANPQGLNWGQRRVKNDERDAIDLADMLRLGRLPEAWIAPPATRELRELVRYRAKLVALRSGLKAQVHAVMAKEGVLPVQGRMFGPGGNAQLDAIVMADNYTTRVASLRDLIERYDREVGMLEGEIHRQLRHHRGYHTIQAINGIGPTIAAILVAEIGDVARFRSAQALCSWAGLTPKHRQSDTKTTRGSITKQGSKLVRWALIEAVSRYHGGPGLAPGFRRIAERRGTNKARVAVARKVLTLVYYGLRDIEIRCLAQAQAA

SEQ ID NO: 142320 - protein, 431 aa, unidentified
MFVAVPLGRDENPVRVFATFTEDLERLTDWLEQCGVTTVALESTGVYWIPLFEILEQRGIRPCLVNARYMKNVPGRRTDWHECQWLQYLHSVGLQRAAFRPGQDVCAVRTLLRHRNELVAAASQHVQHMHKALTQMNLQIHHVISDITGLTGRAIVDAILAGQRDGAELAKLRDPHIKADTETIRKSLEGNWRPEHLFTLGQSPDLYRIYQQQIVNCDLEIEKMLREFEPRTDLAERPLPLDRKQYRSGSKRRKKNGHPHPEFDLRSETYKLFGVDVTQIPGLDESALQLFGEVGRDMSRWPSASNFVSWLALCPDNDISGGKLLWRGTRTVKNRAGHLFRTAAFSLHHSLTPLGNYLRRMKAKLGPEAATMATAHKIAVIFYTMVKNQVEYDETLWAARDAQRERRLEAKLKRQAKQLGYELVPIEPKTA

SEQ ID NO: 142321 - protein, 451 aa, unidentified
MAKRKEKPARRSVVLEPDAAGIDIGAEEIYVAVPPDRDEESTRRFGSFTCDLHALADWLGQCRIQSVAMESTGVYWIPLFQILEERGFKVYLVNAHYLKSVPGRKSDVSDCQWIQYLHSVGLLRASFRPPDAICALRTLWRHRGSLLEMAAEHILHMQKALSQMNLQLHHVLSDITGTSGQAILDAILSGKRDPLALAQLCHRRVQSPRDKVAQALVGDYRPEHLFTLKQSLEGYRYYQKLILELDQETARLMQALPSATEDPIPPRSKPTAYHRKGNDPQFDLRSELYRIAGVDLTDIPGISAATAQVMLTEVGTDVSRFRHASAFASWLGLCPEKRISGGKVLSCKTRQVKHRAATALRMGANSLCRAKGYFGEFFRRMRAKLGTAQAITATAHKIARILYHVLLTKEPYTETVFHRCDEQAHQRAEMRLRKQAARLGFQLLPIPATGE

SEQ ID NO: 142322 - protein, 328 aa, unidentified
MLMVACDVAKATVDAAWFDEGRQRWFERSKIANSRRGWRVMLSWLEKSSGASRAEFTLVVEATGVYHRPLVDFAHAEGLRVVVTNPGRAADNARSHNRLNKSDRLDARSLNRYGRELKTAHEYVPDSPEISILRALLSRLRQLDKDLQRERNRLEKCPFIAQNKGLTASIRRQTKTLEREKGVIQGEIDELIRSNAELKHLRRLLCSVKGIGRVASQWLLPLLYRQQFASARQLAAFLGLTPIHKRSGTSLKKRGRLSGLGNGYVRSRLYMPAVCAITHDPAMSRFYETLIRRGKTPKQALTAVMRKLIHVCYGVVKNDQPYQSPTIA

SEQ ID NO: 142323 - protein, 389 aa, unidentified
MIYVGIDVAKDKHDCCILESEADKLYPVFTIPNNKAGFDELYEKIFTVTDDKTKIKVGLEATGHYSLNLLGSLIDKGLPTCVINPLHTNLYRKGLSLRKTKTDKVDARSIAMMLMTNKTLKPYSDTSYHSEELKSLTRYRFDKVQERAKLKSSVARLVNILFPELEKLVPSLHMASMYALLSKLPGASYITECHLTHLKNLLETASKGHYGRDMAITLRNTARDSIGSVIPAKSMELKHTIHLIEVMTEEIDEIEDSIKSIMDTCNSPIMTIPGISYRMGAMILAEIGDFTRFNYADQILAFAGLSPSTYQSGQLDSSYSHMEKRGSRYLRYALFNAAKFVCKWDENFGAYLSKKIGEGKHYNVAIGHATKKLVRTIYQMELTGEAYRR

SEQ ID NO: 142324 - protein, 464 aa, unidentified
MTAGQQLWRNRKEKKEWARRLQSEDPGLEVVHPHAAGIDVGNSTHYVAVRPDRDPEPVRRFECFTADLHRLADWLQSCGVKTVAMQSTGVYWIPLYEILEEHGLEVYLVNARHTKNLPGRKSDVQESQWLLKLHTYGLLNNSFQPVSEIRVLRTYWRQRGEQVRGAATCIQRMQKTLTQMNVQLANVISDISGLTGQAIIRAIVAGERNPLKLAMLSDPRVHASHEEIAKSLEGNWRPELLFVLHQEVDMYDTYQKRIAECDQQLQKHLSSFTRSLPIQPPTQKLKTKKPAAKNAPRFDLSSELQRVTGVDLTRIDGIDVMVAQTLLSEVGLDMSRWITESHFASWLGLCPDNRISGDKVLSRGTRRVVNRAATALRQAANTLMRSRSYLGAQYRRLRTKLGAPKAITAMAHRLARLVYRMLKYGQTYVDKGTEYYEERFRQQQIQLLRKRAAKLGLQVAEIHA

SEQ ID NO: 142325 - protein, 428 aa, unidentified
MKYTQNEKILQVTEKTLVVGVDIAKERHVGRAFDFRGVELGKRIEFENRKEGMEKFLDWANKIMKANGKENVIVGIEPTGHYWLCFEQYLRENGIKVVLVNPFHVKRSKELDDNTQTKSDIKDPKTIAMLVKDGRYTEPNIPEGIYAEMRVAMNIYERLQKQMNVLKNQIINWLDIYFPEFLEVFSDWEGKTAIATLREMPLPCDVVEKEVEGIIEYWHDKVDVRAISLRRAMDLVETAKRSIGKKEGRKLARQEIKYLLEEYELLKKQIEEIEGEMAELLREVPNGEQLLRIKGVGVKTAVGFISEVGDIRKYEDARQIQKLAGLNIIENSSGKYKGQTCISKRGRGRLRSSLFKAMITIVAKNEEFKQLHRYYTTRQNNPLKKKQSLIALCCKLIRIFFAILKKGIKYDGNKMLSDIKREALARTA

SEQ ID NO: 142326 - protein, 438 aa, unidentified
MSNKVIFNLDELFISVGIDVGADFSWMSIALPNQQFVGKPYKILHNSIDSLTTAVSKIKEAEELYSLESRIFLESTGIYHYPLFCYLRDKGFNCSVINPIITKNSTNINIRKVHNDRFDSKKAALVGLKPDLKVSLMPSDLALNCRNLCREYYDLMDNRSAYVNKLQGELRMAFPQYLGIFSKVTINTSLTLLETYTSPSAFLKADKQEIIDIIKSTARFGLTYAQNKYNAIIQAATDANQFGYIIDSNIKRIRLYISFIRKYDEEINSILESLHELVDANEDSDFVKQIHLIETFKGAGFLSAVSIMGEIGDFSAFSKPKQLFAYFGLDPAVKQSGKFEGTKVQMSKRGSAIARRVIHTLTLQSISISRNREAKNPVLREYYLKKCDSKPKLVAMGAVSHKVCNIIFAILRDNKPFKIIAPQEHIKQYNSAKCDIAA

SEQ ID NO: 142327 - protein, 342 aa, unidentified
MEVKNNKNYQNYIGIEWSQEVVVVARMSSNSTAILETVSMKPSVEQLRDYLIKLRGSKIITIEETTTSHWLYVELYKVVDKIIICDPYRNSLLKDGPKNDKRDAGTLCLLLRHGLLKEVYHSDDKLFELRKFVSIYTDFVKASVRLKNQQSALYRSVGKKVKQEKHQINFEGDLINFVSGAQSEGIIFLKQIRDKFEHEMDKIARTNADVRRLRQISGIGKKYSVIITAIIIDMNRFENKYKFWSYCGLVKYERESGGRLYGKKSPRYCRILKGVFKSAVTAAISGNNDIRVYYEYLLQKGLSLTNARKEIARYIAKSVYGVMKYKTDYRSYQWRENKIKAA

SEQ ID NO: 142328 - protein, 389 aa, unidentified
MKIYVGIDIAKLNHFAAAISSDGEILIEPFKFTNDADGFQLLVSKLESFDKNSIIIGLESTAHYGDNLVRYLVAEFYQVCVLNPIKTCQMRKNNVRKTKTDKVDTFVIAKTLMMQDDLRFITFFDLDMMDLKALGRFRQKTIKQRTRLKIQLTTYVDQVFPEIQYFFKSGLHQNAVYALLKEAPSPKEIASMHMTHLANLLKVNSHGHFTKEQAKELRVLAQKSVGANDSAISIQITQTIQQIELLDSQLEKIEAEMTDIMKFNDSVIMTIPGIGYINGGMILGEIGDIHRFSNPNKLLAFAGLDPSVYQSGNFQAKTTRMSKRGSRVLRYALVNAAWNVVRNNATFKAYYDAKRSEGRSHYNALGHCAGKLVRVIWKMLTDEVEFNLE

SEQ ID NO: 142329 - protein, 351 aa, unidentified
MGEYIAFDSHKRYTWVDRQDRLTGEVQQHRLEHAAGAIRGYLNGCEPGTGVAVEATGNWYWIVDEIEQAGLQPLLVHPRKAKLMMGLTNKTDKLDAQGLNRLQRNGTLPTVWIPPGWLRDLRELTRTRLVLVAQRTRLKNRLSATLAKYGVPASECSDPYGKQGRKELEKHLERLPEQTSWVSGQLLRQLDFVSTQVRELEQRLEELVEVTPEMPWLMSMPGVGVILAATIALEIGEVQRFPDAEHLASYAGTTPRVHASGGKVRYGNLRVDVNHYLKWAFAEAANSVAVNHARCPQRHVSELYRRLRQRKGHAKAIGAVARHLAEAAFHVLQQKQRYRDPAFGRGRASEV

SEQ ID NO: 142330 - protein, 415 aa, unidentified
MLKIVYPLCCGIDVHKTFVVATIAATDKKNITTYQTKRFSTFTQDLRALAQWLADHHCPEVCMESTGKYWIPVFNILEPSCRITVAHPKYVKAIRGKKTDKKDSIWIADLFKHDLVPGSFIPEKQIRDLREILRYRFKLVSFTSSEKNRVQNSLTVSNIQLASVVSDTFGKSAQAIVSHLLEHPDDTEFDFRPLLHGSMRKKDEQIALAVEGTISPVQAGKIQVCQQHIDSLGQYLDRLEALADSLSEPYAAILSLLESVPGVSHLSALVILSEIGADMAQFKSARHLCSWAGLAPSNDQSAGKKKSTKISRAGVYIKPVMVQCALAAIKDKSFPHYRQRYEALKHRRGHKKALIALARVMLTAIYAMLSFGELFNPKMYEESLRKPAYILSPEQQLVQLAKRLGYSVVKVPDSV

SEQ ID NO: 142331 - protein, 330 aa, unidentified
MTSLPDSTSTPVTIGIDVAKATLDIAIGLNAPPLSLTNDPEGFDTLLAQLAAHKVALVVMEATGGLETAAAAVLQAAGYAVAIINPRQARDFARAMGQLAKTDRIDARILAQLGEVIDRSPERDKFVKPLPTAEQQALAALVTRRRQLIAMLVAERNRLAQAPGATRKSIDTIIEALTTELERIDSDMAGHIQVHFADLSALLDSVKGVGKTTISTLIAEVPELGKLSRREISALIGVAPINRDSGRMRGKRTIFGGRGSVRQVLYMAALVAVRFNPAIKVFYDRLVAAGKPKKVALVACMRKLLTILNAMVKTGKPWDAVLHQSDSKNA

SEQ ID NO: 142332 - protein, 466 aa, unidentified
MSAVFSSTNEWDLIPKPNYCQSNSLGLSLLVSQSMSAFLKEVFLLARLSIKHFVCCGMDVHKKFVVATIAFTDFRGVTTYKKKRFATFNSDLRALKKWLLDHRCSEVCMESTGKYWIPIFNILEDSCHVVVANPKYVRAIKGHKTDDKDSEWIADLFKFDIVPSSYIPCREIRALRELFRYRQKLIGHRSSEKNRFQNALTVSNISLSSVLSDTFGKSATAIVDYILTCETFDPEYCKSLLLKKAKDKADDVVKSILGYELRGDQSLKMKVCRKHFDQINECVRTLDDAISDLAKPYHKFIDLAITVPGITEKSATYIVAEIGVDMAVFKSSKRLCSWAGLTPQNNESAGKKKSVHISRAGVYLKPLLVQCANAAIKDKKNPYFKYKYDRIKKRRGHKRAVIAIARMMLTCLFRMFSKQEAFNPADTDYSAIPEEMYQKFQEQYDKNAIKRLEKRGFTVIPPAATA

SEQ ID NO: 142333 - protein, 396 aa, unidentified
MQTQLHVAIDVGSQQHRVALGWEEGEPIEEFDCAHTSAGLSDFFKRIRKHEDIHHAEVCVAMEGYGGYARPLDSQILAQGWRLYAVNNLKFVRFKEIFPAPAKTDAIDARRMLQLLQLRERIPMASAVLQEVAPIDALHQQLKALTRRRKQLVAERMKVSQRMQAELQGAAPGLLAITGQADNLWFLNFLSCRTDLRKLKTVRQATLLKLGGVGVGYAARIAAWQKTAVFAESAEWAGPMIYADAMRILSLREAIAGLEVRIAELTTQSGIVQRLLSMPGIGSVCASELAAEIGNIERFKDEASLAVYLGVAPLDRSSGKRVGAKLPRQINPRARDALIIAMVHHMHAVPTSRAFYDRKRLEGKTHMQALRALARHVVRILFRMLSDNRDYRMPNS

SEQ ID NO: 142334 - protein, 399 aa, unidentified
MAEKYPEGYHALRCESRYFLRFTGHPRLGTTTAELRGLRDWLRERGVTHAAMESTGVYWKPVFNILESACQIILVNARHVKQVPGRKTDKADCAWIASLLRHGLLQASFVPDLEVRQLRDLCRMRTTLVRECVQVGNRLRKVLEDANIKLDSVASDALGVSGRDMIMALVQGRDDPAELAELARGRLRAKLPELERALEGQVTEHHRFLLRELMRQLAFLEGQVERFEEEIQRHMPPFEWAAERLMTMPGVDRTAACALIAEIGVDMSHFASSRHLASWAGLCPGNNESAGKRRSGKSHRGNRWIKGVMTEIAWAATRTKDSYSATQYRKLAGHRGKKRALVAVANSLLQAAWHMLSKRQSYIELGAQYLDRLNQKQLERTLIRRLEKLGHKVILEPVA

SEQ ID NO: 142335 - protein, 399 aa, unidentified
MECRDAPAKRPRPAPGQALSRSLVALDQNSTIIAVVELSQSSWLVGGVVPGIERQPRKKLEPNPERLLGLLHRWRDEAVRAGRTITRIAVAFEAGRDGFWLARWLEARGVEAHVIHPSSVAVSREHRRAKTDRLDTELLKRGFLGWLRGERGHCSMARVPTIAEEDAKRPNRERDCLVGERTRIVNRIKSTLARLGIRNFKPTLRKAAERLATVHTPEGTPLPPNTLAELQRDMARLGVVVSQIRQIEEARQKRLEQQHETGPHAMVRLLARIVGVGVETADMLVHEVLSRPMRDRRAVARYAGLTGSPDESGAQRREQGLARAGNARVRRGMIQLAWRFLMFQKESALALWYRARTTDSRRGTRKTMIVALARKLIIALWRFVTTGEPLEGVILRPAS

SEQ ID NO: 142336 - protein, 368 aa, unidentified
MSNYVTAIGLDVHARSIKAFALNPMSGECERASFGYDPAAIAEWALSFEEPRAVYESGVTGFHLCRTLRALGLDCVVGAVSKMQRPAADRGRKTDRRDAEFLARLLATRNVVEVWVPDESTEAARDLSRALADARDDLQRAKQRMSKFLLRHGHVFDETTPTGARKGNWTRAYWRWADAIEFAEADDAAAYEHYRDCVRRCQEARDALARRVAESAGRPGWKPAVDALRCVKGVDVATAFLLACEAGDFSRFRTAPEFASWCGLTPSEHSSGETLSRGGITRAGNAHVRSALVEAAWHVPMSSREAKPLAPDQEVAPAVRRHAAKCNRRLQDRREAMSAAGKKPVVANCATAREMACWVWAIARMAVA

SEQ ID NO: 142337 - protein, 329 aa, unidentified
MSVHQQGREATAAPRVNVGIDVSKDGLDAVWGAQSQHFANDAEGLEQLAAALQQANVDLVVLEATGGYEALAATTLQLAGLAVAVVNPRQAREFAKAMGVLAKTDRVDARVLRDFANVIAVREDRARYLRALPDEQRVVLEALVRRRRQLVGMRKAEAQRLTQAHKAAKKSLAAVLKVLDAQLRELDGQIDGHMRTHFKEALRWLDTVKGVGPVTQSTLAASLPELGQLGRRAISSLAGLAPMARDSGRMRGKRCTGGGRADVRAVLYMAALSAIQHNAVIRAFHQRLIAKGKPPKVAIIACTRKLLTILNAMVRDHTTWDDSKHLKTA

SEQ ID NO: 142338 - protein, 373 aa, unidentified
MKYTTVYVGMDVHKESFTLACYTNEKEAAEYIQRTEAHYSKVISYLEAMRFHYGDEVTFICGYEAGCLGYTLYHQLTSHHVKCIILAPTSMPAQKGKKKVKTDKRDAQKIARCLAHHDYSPVHVPTAQDEETKEYIRMRDDHKLALKRLKQQILAFCLKHDFRYPGGSTYWTLNHLKWLRELETSRLYREILDEYLLTYSNLDEKVERLDRRIEELAADEEYAESVHKLVCFLGIKAQTALSVVTETGDFNRFSTAQQYASYLGLVPGENSSGEDQIRLGITKAGNRHLRTLLVEAAQSYSHGKIGYKSRELKKRQEGNSPEVIAYADKANERMRRRYYHMALACGKRHNVAKTAVARELACFIWGMMTGNVA

SEQ ID NO: 142339 - protein, 344 aa, unidentified
MSTIRVVGIDIAKSVFQVCVWMVDGSVAWNKKISRSKLLDTIRQFEPGTLIAMEACATSHFWGRTFASMGYCVRLIPAQHVKAFVRSQKNDANDALAICETAFRPGIHFVSVKTTEQQDIKALRNTRQLMVEQRTALANQLRSLLAEYGFTIPVGILRLQQQLPELIEDASNSLTFTLRRLLSSLREDMQALNERITSLDSEIAALSSQQIAYRHLLTIPGVGPLIAAAFISEVDATQFSSGRELSAWCGLVPRQHSSGGKQRLSSVTKNGNRSLRTLIIHGARSVMRCVKKRDDSLSIWLQRLEARRGFLKTTVALANKLTRIIWRVLTDGIDFNMQKAVAIN

SEQ ID NO: 142340 - protein, 334 aa, unidentified
MSYQYVIGMDISKHSFDMAILSTNNPEEIFHNAFSNDTKGFDEIMMFVTKTMPGFDIKKALFCMEATGLYCNALLQFFESQQANVWVENAIQIKRSLGIKRGKTDKVDSISIAKYALKNAELVRLWKPSGAVLEKIKYLATLRERMVMTQKRLITPIEELRSAGQEKMAEYLHKSIKRSITAVDADLKKIESKITECLKEDASLHHLFTLITSVVGIGFVTAVNLIIYTQGFNVMCDSRKLACYCGVAPFPYESGISIKGRTKVSHMANKKLKTNLHLAALTAIKFDPELKAYYDRKVLDGKPKMSVVNAVRFKLLARVVSVVKNDKIYVKKTA

SEQ ID NO: 142341 - protein, 368 aa, unidentified
MNTVKFIGMDVHKKTITIAIINEGRQKQPRIYGAIANQLEALDKFCRKMLSTSSRLHFVYEAGPCGYGIYRHLTEKGFDCMVAAPSMIPKKSGDRIKNDHRDAAMLARLHRAGELTAVYVPDAQDEAMRDLSRAREDAVMATRKAKQRLNAFLLRNGLTFAGRSKWSKAFFNWLADIAMNYPAQQIALQEYIDSVHENQNRVNRLTDQIRQLVAGWRLAPIVSALQAARGVSLIVAVTVLAELGDLSRFDKPSQLMAYLGLVPSEHSSGQSIKRGAITKTGNSHARKVLVEAAWAYRMQARNSRLLLNRQRGLPEAVCQLAWNAQLRLCARFRRLAAKGKPKQKLVTAIARELSAFLWAIAKQLQPVA

SEQ ID NO: 142342 - protein, 438 aa, unidentified
MKKIHNHAAGIDIGARKIFVGLEGREVKSFETFTEDLEMAADYLIDNNIETVALEATGVYWVILFDILQARGIDVWLVDGRSTKQVPGRKTDVKDCQWIQQLHSHGLLSRCFVAEDLVQELREYQRLREDHIRSAAMHINHMQKALTMMNIRLKEVLSQVHGASGLRVIRAILKGERNPKVLVELCEKSILKTKRELVIKSLKGHYTQAGLFALEQAVACYDFYQVQIVRCDEKLDEVLKKMSGENGDASLKPGKKKTRKPIRHHKPKIKNLDRYLLSVFNHRDATVLPGITDYTWMQLLAEVGTDMKKWATEKHFTSWLGLAPKQHHSGKMRKNHKSKGQPKAGLIFKQVATSLLNSKKIALGAFGRKLRARKGPSHAIKAMARKLAELYWKLFVRGLDYIEKGIKDYEEKINLNKERSVRKMAKELGMVISYNTAS

SEQ ID NO: 142343 - protein, 430 aa, unidentified
MKQFELLHSLFVGIDVSMKENVVHAMPFSPEDHPGHAHLRFSAPNTPAGSAEIVEKVGDFLKFYPDVTQVVIALEDTSVYSFHLATFLSVAQFNGHIPAIVYSVNPKEIHAYKKTFTDVGKDDYVDAMVIADYARSNKIRSRPWKGPELLGLRILTRLRFRIARLIGILKNSTGNSIYLECSGLMTGENPFCNVWTATCQQLLTTFQGPDEILNLSDEELLNFITEKGHGRFSHPLDVVKKVKKAARNSYRLDKRVYEPLTSGLSVSFFIIHSLEAAIKKLDKSIETIAKSFSSDSYQILLSIDGVGPVIAGGLLAEIGDIKRFETDDDLAKYMGLTWRGKQSGQSESPVKHMSKAGDVYLRYYVLLATGQIINYSAKYREAYERIRSRKTLFPYRAALNLVARKIVRLIFTLLDRHQLYSDNKVMVTLE

SEQ ID NO: 142344 - protein, 446 aa, unidentified
MAKVAYRAVSIERVTSVSLAALLAGAVRLVVAIDVAKTKMMAGFGREDGSIVRLVRFDSPMQTRTFVELVVETGQRLGVPVEALMEPTGTYGDGLRALLSEGGVSVFMQSPKRVHDAREVFDGVPSLHDAKSCVVMAQLHRQGVSRAYDAASEERRELRALVDRRRVYEKPLQMHLGELEALLGRHWPELLVDMDVWRQRTALELLVTYPCPADATAHPDDALALMRRVSRNGLKQARLQQVLDSAASSVGLPASAHERELIRCVAREALRIRDAMRSIDKELEAIADKRDATRSIAPVVGRVTAVVLVAYLGALSEYASAAALEKACGLNLKIKSSGNAAGRPSITKRGSPEARAYLYLTAMRLVKDDPLMAAWYRSRGGYLANRKPLALVAVMRKLVRALWHVARGATFESTKLVDARALGLEACHPASTLHGTPSLAEVGVAP

SEQ ID NO: 142345 - protein, 402 aa, unidentified
MHREPGEIVGGVDTHLDVHVAAVVDHIGQILATRSFPATPAGYRQLLAWMRRHGDLRQVGVEGTGAYGAGLTRHLVGEGVEVVEVNRPDRQRRRRRGKSDTTDAEAAARAVLSVDATVIPKTGDGQVEGLRALRIARRSALKARTQTALQIRDLILTAPDHLRTQLQPLETSERAERCARFRCGDPTDPVQATKRALRILSRRYQQLTSEITELDDLIAALCAQINPALLGAKGVGPEVAATLLVIAGDNPERLHSDAALAALCGASPIEASSGRTIRHRLNRGGNREGNNALWRIVLVRMATCPRTKDYVARRTAEGRTKKEIIRCLQRYVAREIHSLLVNDHTIITGTDLRHRRQHTHLTLADAATALNTCQNAISRLERGLSHNTDLATRYHHWLQQTA

SEQ ID NO: 142346 - protein, 441 aa, unidentified
MIRGREGHIYIKPLSFFRSLPLCPINPYWLIRPLSFCQTGDWIRDTYMQPQQGGSVMPTIIGIDVSKSSSSYHVLSSTNGEGFKGSFSMDAAGFTSLLDRTKTLSNPRFIMESTGRYHITLANHLLQHDHVPFIVNPVLVKQFSKTVTLRKTKTDAVDAYTIAYFGLQHPKALAHAGRPMDDERLSIARRREQVAEDIATAKTQLKGDLAVAFPEVLDLDVFTLSMLTVLSRFPSPSSILEASPEEIQSSLRGGRGRLSSVTIQTLKSLAASSVGVPSHAPLVADSAKHILILEERNKMLTKHLVELVRITQEPELEILTSIRGIGETSAAHFLAEIGDISRFPRYQNLIAFCGTDPGIYQSGSSFKSGRITKRGSASLRKYLYLMAQSTCNYNPYFKAYYDKKKAEGFSHRKAMVALMNKLIRTIFALLTKKEKFIMPSM

SEQ ID NO: 142347 - protein, 389 aa, unidentified
MLLDHPSDGPTAIRTHIAAIFVSLELSRSNWLVTSLSPGSGEKMSRHSVAAGDMAGLLTLFAELRRKAQARTGQSYPIITIQEAGLDGFWLHRVLQQEGIESHVVDPASIAMPRRRRRAKTDKLDGETLLRTLLAYKRGEPRVCAMVVAPSPEEEDRRRLCRERRTLIEERITHVNRIKGLLFAQGISGYAPLRRDRRARLEALRTGDGRELPSHLKAQIGRELDRIELLLEQIKSVEAAQDAVLAAARKPAGEKAAPAPVTMLLALKGMGANFAAVLWSEAFYRSFSNRRQIAAYAGLAATPWQSGGIRHEQGVSKAGNPRLRTTMIQLAWLWIRHQPQSALTRWFKEQSPQGRKRAIVALARKLLVALWKYVTQGVVIEGAVMKPAA

SEQ ID NO: 142348 - protein, 408 aa, unidentified
MLFIGVDLSDRFFDYCISNSSGEVLSKNRFDFNDDGFYSFIACIGKHEPDIQNCVVGMENPHSRLVDFLVQRGYTVMATHPESIARYRESRIPSRAKSDPVDAGLIADYIREHHKNLRPINIPDEIIRELSILLEDRDKLVEQKVRFSNQLTSTLKDYFPQALEAFGSITNKSALEFLVRFDTHKDVKALSIQELEKSLTECGFFRKDSKERFHNAIDKKPSVISNAVIKAKTRLKNVLVGHLLLLISQIEDYEKQIQKIVDDAPDGGIFRSLPGADYILGARLLVLYSSREFSSASEAQAFWGTCPCTSRSGSSMIVRFRKGCHQFGRNTFHQLAFCSLSSSQWAKKQHAKKRKEGKGNNHTLRCIANTWVKVTFAMWSSKTPYDQSKHLASIANHILNQPSFILGG

SEQ ID NO: 142349 - protein, 338 aa, unidentified
MKLYGAIDLHSTNNVTVVINEQDQVVYQKRLPNDLSLIAQQLWSYRASLEGIVVESTYNWYWLVDGLMEKGYRLHLANTAAIQQYNGLKYTDDHSDARWLAHLLRLGVLPEGYIYPKQERMVRDLLRKRGQLVHQRTANLLSIQSLISRTTGNSISATIIKALDIQHVDGVLPNPDLVLALKANLAVMNSADAQIEILEKAVHERVKLRPQFRFLKTVPGIGPILALTIMLETGEIERFASVGNYASYCRCVGSKKISNGKRKGSGNTKNGNKYLAWAFVEAANFAIRFNSRIKGFYQKKKSKSNAIVAIKAVAHKLCRACYYIIKDQVTFDITKAFA

SEQ ID NO: 142350 - protein, 389 aa, unidentified
MPNVADQAEAPTTIRTDLAAIFISLELSRSIWLITSVSPGSGEKMSNHSVRAGDVAALLARFSELKHKAHARTGKSFAIIAIQEAGLDGFWLHRVLEQEGIESHVVDPASIATSRRRRRAKTDRIDGEALLRALLAYKRGEPRVCTMVRAPTPEDEDRRRLSRERKTLVAERVEHVNRIKGLLFSQGISSYEPLRRDRRQRLEDLRTGDGRCLPTHLKTQISRELDRLELLLDQTKLAEAERNALLAEDRAAAREPPGRMLLEFKGIGAEFATTLWLEGLFRRFDNRRQLASYAGLAPTPWQSGSVDREQGVSKAGNPRLRATLIELAWLWLRHQPQSALALWFKERVKRNGGRMKKTIIVALARKLLVALWKYVTAGVLIEGAVMRVA

SEQ ID NO: 142351 - protein, 317 aa, unidentified
MTTFVGIDVSKAHLDVCLRPSGDAFRVGNDESGIGELVAKVKASSPTLAVLEATGGYEAPAAAALALSGISLAVVNPRQVRDFARATGKLAKTDALDAEVLARFAECVRPEPRPLDDEQTRELSAMVTRRRQLIDMLTAETNRMHACRSDGLRKSIHEHVAWLRRQVKDVDQDLDAKLRARSLWREKDDVLRSVPGVGPVLSRTLLAELPELGTIGRAKIAALVGVAPLNRDSGTMRGKRAIWGGRASTRAVLYMATLVASRRNPVIRATYERLVAAGKAKKVALVACMRKLLLMLNAMMRDGKPWLPPATAQQDSC

SEQ ID NO: 142352 - protein, 404 aa, unidentified
MYNAVGIDVSKGKSTVTVLQPGGTVIRKPFDVSHTSQNLNELAKFLDSLNGDTRIVMECTGRYHEPIRKALSEAGLFVSVVNPHLIKNFGNNSLRKVKSDPADARKIARYTLDNWAELRQYSGMDNTRTQLKTLNSQFSFFMKQKVAAKANLIALLDNAYPGVNRLFDSPARDDGSEKWVDYAYSFWHVDCVRGIGLKAFTERYQAFCKRHHYNFQADKPEKLFNASKELVAVFPKEKTYKLLIQQSIQQLNLASEHVERLRREMNELASILPKYSTVMGIYGVGKTYGPQLIAEIGDMSRFTHREALTAFAGVDPGVDESGQHKSKSNRASKVGSARLRKTLFQIMTTLLQNAPEDDPVYRFLNKKRSQGKPYYVYMTAGANKFLRIYYGKVKECLRNLEQES

SEQ ID NO: 142353 - protein, 332 aa, unidentified
MAAEIDGVDAPSTASLCQSGDAAGHSKEASVENVHIVGLDLAKHVFQAHGADQSGAVIFRKKLRRQQVLSFFSDLPRCTVAMEACAGAHYWGREIGKLGHCVKLIAPAYVKPFVKRQKNDASDAEAICEAAQRPTMRFVAVKTEEAQASTIIFRTRDLLVRQRTQIINALRGHLTEFGIIVAKGPQHAGKLIALVNDSATDLPNAARDILKFLTEELNALNARVANLDREIARRAKEDPAARRLMTIPGIGAITAAALSALALPTETFKRGRDFAAWLGLTPLQRSTGGKERLGRTSRMGERTLRRLLIIGASAVASWRARKGAPTGGWIAC

SEQ ID NO: 142354 - protein, 520 aa, unidentified
MGQIDKRPGKGKRGRGQQGATQKEIQQRGMRETRTLVDHLNPIDLKVAGVDLGSTSHYVAAPDGCDHVVVREYGCFTPDLMAMAEWLKGRGVERVVMESTGVYWVPVYQVLEDSGLKVVLVDARYSKNLPGRKKTDVYDCSWLRKLQSYGMLRACFVPDKNIAEMRTYWRHRATLVEQASRQILLMQKALEQTNLQIHKVLSDISGVTGMAIIRKILEGEQDPLVLARLKHPLVRSSEETLVKALTGNYRAEHLFTLKQAVDTYDFIHGQMEECDAKLQACMAEFEPEQRANENSGKDRPENDENSGKDRPENDGKSGKAGPENDEIQRRADKKARAKRTRRGKNQPRFDLREEQIRITGVDLTKIDGINVMTVQTIITECGPRLSAFETEGRFASFLGLCPNNRVTGGKVRSSSTNKVHHRAAQALRQAAESLHHSDSALGGYYRRMAARLGPAVAITAAAHKLARLIFHMIKYGEDYVDRGQQWYEERYQRGLRERLAKQATRLGLALVEATTGEMVS

SEQ ID NO: 142355 - protein, 344 aa, unidentified
MDHFAGLDVSVKETSVCIVDDTGKIAREVKVASEPDALLAVLTNPAYCFKRVGLEAGPLSQWLYSALAEASLPVVCVETRHMQAVLKAQINKTDRNDARGIAQMMRVGLYRPVHVKSLRSQKLRMLLTHRKLLQSKAIAIENDLRGTLRNFGLKVGMVGTVKFEGRIKELVENLPDLAILVEPLLIVRRALREQIVILHRRLLVIVRDDAVCQRLMTTPGVGPVVALTYRATVDVPARFRKSKSVGAVFGLTCSKYQSGEIDRNGRISRCGDEMMRVMLYEAALSMLRSKKWSWLKAWAMQIARRRGMKKAIVALARRLAVIMHRIWVDGTEFRWTREQAAATA

SEQ ID NO: 142356 - protein, 449 aa, unidentified
MAAVMIGVDPHKASHTAVVIGAAEEPLGELRVRACAAQAERLLAWAAAWPERTWAVEGAGGTGHLLAQQLLAAGERVLDVQPKLGARVRLLDAGDTNKNDPNDARSAAVAALRSAGVREVRPDDHAVVLKTWSKRYRDLGRTRTQVVCRLHAVLCDLVPGGLGRPIYASHAARILEQITPPDAVAAARCELAADFLEDLRRIDAQLRETRKKLATAVQAAGTCLTGLFGVGPVIAAAVIGDVRDVSRFPGRDHFAAYNGTAPIEVSSGPHKIYRLSRRGNRRLNHAIHMAAITQIHHRHSQGRAYYDKKLAEGKTPKEALRSLKRQVSNAIFACLQADARRAAARAQGPGGQQGNDSVASAAGLHPRHRLFGQATPGPGHHPTTAAGGPAPGPAHARGRAGHSPVVATLPPAPPQVQVERPQRSEDERPGGAARRRPHSAARKDRAKDP

SEQ ID NO: 142357 - protein, 338 aa, unidentified
MTYYAGIDVSLESANVCVIDAAGKTIREGKVASEPEALREWLEAVGSSVERVGLEAGPLSQWLYAGLRQGGIAAELLETRHVRRAFEIMPVKTDRKDARGIADLMRLGWFRPVHCKSIDAQETRAALTARKLVQKQVHEVESSLRGILRGFGLKVGKTTPTRFEARVKELVAGNSRLEGIAQSLLAARAVLRREFNGFERQLRGMARTDARARLLMSTPGVGTIVALTYASAIDDPSRFKSSKTVGAHFGLTPKRYQSGETDYTGRISKLGDASVRAALYEAAHVILTKPLKGCTALKSWAMRIARRAGMSKAKVALARKLAVIMHRMLANGTTFNAA

SEQ ID NO: 142358 - protein, 392 aa, unidentified
MGRTSRVVIGMDPHKRTVTIVAMSPDEAVMSRGRFATDVAGFEAMLAVAAAWPERVWAVEGCEGIGKHVAVRLLDHGEAVVDVPAKLSARMRVYATGQGRKTDDTDAYSVALAGVRMAGLREVVNDQTLEVLRLLVGRRRRIGEDHTRMVCQLHRVLLELLPGGAKRDLSAAQARRLLAAVRPADPAGKTGKRVAMELVADLERVYARKKAANKEVVELVRQTGTGLLALHGIGPSGAARLLVEVGDITRFPAKGHFASWTGTAPIDASSGDNIRHRLSRGGNRQINMTLHMMAVVQLPTRTTHGRGYYDRKVAAGKTPNKAMRCLKRRLSDIVYRTMLDDMVANKVTGPGGHRGASLQSSAAGSHPHTGSSDKSLPGPATTKSRTPLRRAS

SEQ ID NO: 142359 - protein, 353 aa, unidentified
MNQFIGCDAHKKFSLFIAMNEEGGYGQAIRVGHDRERMRAFLEDLPAGSEIALETSGSYYWLVDEMERAGHQPQLAHAMTAKRRMEGRHKTDERDARGLAMLLRNGTLPRVWIPPAQLRDEREMLRWRMSLVETRSQVKNRIHAVLLRYNLGLKVTDIYGTAGRQELQNRLAELPEWTRQSVKEQLETVDHLNQQIEDCEQKLETLLECNAERDLLKTLPGVGKILSAVIALEIGEIGRFASPQKLVSYAGLVPAARESAGKKRPGKCPADCNTYLKWAFIEAGNVVSVHRGKWADRHVAQLYERVKHNTKMHGKATVAVGRHLAEASYWMLTKQEIYQEPNTNRRALSSTHG

SEQ ID NO: 142360 - protein, 406 aa, unidentified
MELTTLYKRVVGLDVHQAKITACAISEDGAGNVSVELAEFGGFKRDRKALAQWVAGHRPEVVVMESTGIYWKSPYAALEDVGIAATVVNARHVKTVPGRKTDWADAQWLAMLARAGMLRASFVPPAHFRALRLVGRQRQKLVGIVSGEKNRMHKLLCDGGIRLSVVVSDIHGVAARRMIKALLEEKSPTEVLLLSGTRLKADRTQLLDALDGDLTAEHRFVLQELMAHIEELEHRIARFDLHLLSELAPYRTTLALMQTIPGIDAIGAALLLVEIGNDMDAFGSVDRLASWVGICPGNNESAGTRKSGRIRKGNPWIRRLLCQFAHAASRTQCAFKSKFEALRLRRGHKRAIVAIAHKILKTVFLLIHRQAHYRDSAVDFETMSVARNAPRWLKMLKKHGFIPVAA

SEQ ID NO: 142361 - protein, 377 aa, unidentified
MGDYSEAYVGFDTSKSRNSVAIADGGRRGEVRFLGEIENTPAATAKLVRKLATKYERLTFCYEAGPTGYGLHRQIRDLGFECVVVAPSLIPKRPGDKVKTNRRDALSLAKLLRADELTSVWVPDGRHEAMRDLTRARETAMLDLRTKRQHVSAFLLRLGRPYPEGKKTWTKAHLSWIAGQKLEHPQQRLVLEEMMLAIRQAQERLARLEQAIAAAVPEWSLAPVVTALMAMRGIDMISATTLLAEIGDLSRFRTPTELMAYLGLVPSEDSTGDTVKRGPITKAGNRRARRMLVECSWSYQHPPRVGQAKQAKVDAASPLVREIAWKAQCRLYRRYRTLIRNGKLRTVAIVAIARELAGFIWAVARAVTTAPVVATPA

SEQ ID NO: 142362 - protein, 352 aa, unidentified
MSYDYHIGVDYHKAYTHLVVQDGGGKVLRSGKVKNDPSSLAGFLTPYLKNSHAVMEASRNWTVMYDWLDELCDDVVLAHPLKVKAIADAKVKTDKIDATILAHLLRADLIPESYVPCEAARELRQALRERIFFVRLRTMVKNRVVTIFDRYPEQTRALREMSDLFGKIGRGQLALLSVSAIDREHIDRALAFIDDINQHIRAAEKTIRRFSTDNAEVRRLKTMPGVGEFFARLIAAEIDDVSRFRSAKKLAAYAGLVPSTYASGGKCWNGRIIKAGNKWLRWAFVEAATPAVRAEPALKFEYERLKATKGANRAKVAVARKLLTIAYHMLRDQRDYERRDALERPSASSRLS

SEQ ID NO: 142363 - protein, 396 aa, unidentified
MNAVGIDVSKGKSMVTILRPFGEIVSSPFEIKHTSSDIHSIEGESRVVMEHTGRYYEALAHQLSAADLFVSAVNPKLVKDFNNDSLRKIKSDKADSVKIARYALDKWQSLEPYSITDELRAQLKVMNRQFHFYVKQKTAMKNNLIGLIDQTYPNANTYFNSPTRSDGSQKWVDFVSTYWHVDCIRKMSLNAFVEHYQNWCKRKKYAFNKSKAEEIYTKTKELVPVFPKNEITKHIIRQAVDQLNSTSVTVETIRTLMNETASKLPEYSIVMQFKGIGPSLGPQLMAEIGDVTRFTHKGALTAFAGVDPGVNESGSYAQKSVPTSKRGSSNLRKTLFQVMDVLIKTMPQDDPVYQFMDRKRTQGKPYYVYMTAGANKFLRIYYGRVKEYLSVLPDPS

SEQ ID NO: 142364 - protein, 401 aa, unidentified
MHAVIGIDVSKATSQVAVAVDGKVVQNFKITHDVFGFNQLNSVIMQFNTFPDIVFEATGVYSRRLKTFLEAHNYPYTYLNPLTAKKQLDQLRPNKNDLNDAKHLAETQFILKRAKSYVQNPIYIELQDMSRFYQQLNHDIVSAKNRLHRLLQLTFPEIETLFSTTDSQQYWEIVSLIPHATMAKHSRQTLSDTIQSSVSRQIGAARLTRLVDKLVALGSLSAPAVAVASYNVTEVRYYAQRLIALSQSKANVLATMVDQTKDLPEYDIYQSIPGFSDKTVVSLIAELGDLHRFATSNKLNAFVGIDLRFNDSGDYKSSGFITKRGNTIARKVLFKAISNIASTATYGHQNHINDWYQKKKQSSMSKGTKKIAIGAMSRLLRTMHYLVLNNQLYDYDTASKR

SEQ ID NO: 142365 - protein, 377 aa, unidentified
MKAPSTRPAAVLGLDVGKSSHWACLIDRDGEVLASAPVRNREAELDALFASAPAGTLVVVDQFRNIGSLAVRRARAAGLGVAYLPGLAASRAAGLFAGEAKTDERDAAVIARTALGVPDSLSGVPGRGEALEAARALSSQRDHVVACATRDKNRLRAVLLESCPALEAAVDLSDRRWLELLAGFGGAWGIARSGAEGPQAEAAGEAAAASTAPPPALVEAENRQVRFLAARISEALDEAGALEAETAALLEGDETYACLLTVPGIGPRTAAQLAVSVDIGRFPDHDHLASYCGIAPRVRSSGTSVRSVRASRRGDARLKSLLIFSCNSLVRSSGRYGEYYRACRARGMGHGRALKAVARKRLRAIYAVMRDRVPYRE

SEQ ID NO: 142366 - protein, 411 aa, unidentified
MLFVGDDWAEAHHDIEIVDETGRRLARRRLPEGIVGIAGLHALVADHLGDGDEPERVLVGIETDRGPWVAALVATGYTVYPVNPLQVARYRERHSTSGSKSDPGDAHVLAEIVRLDRDHHRTLAGDSEVAEETKLLARTHQSLIWSRQRQTNQLRSLLREFYPAALAAFGEDLAGRDALAVLAVAPTPEQGKALRVPRVVTVLRRAGRRRNLTKRAEQMVAVLRSEQLGARPRLVAAYGASTAALVAVISELAGQTAVLEVEVEACFGRHPDAEIYLSQPGLGIVLGARVLAEFGDDPNRYADARARKNYSGMSPITRASGTRRVVLARYARNRRLGDAVYQQAFSALSSSPGARAYYHQHRARGATHHQALRALGNRLVGILHGCLHHHTAYNEQTAWGHRHDTETAAAA

SEQ ID NO: 142367 - protein, 345 aa, unidentified
MQPMYYIGLDVHKQKISYCVKDSSGKIYAEGWIPATRFDLDRWMKTLPQPWSAAMEATMFSGWIYDHLKPHAAELKVAHPLMLRAIAAAKKKNDRIDANKICDCLRCDFLPECYMAPTAIRERRRTLRYRSLLVRQMVQMKIKISTLLMEAGVSYNKQKLHKAGYFRELLANNLDIDESLRELLRQCREMVVRLGKMESALIHSLQQDRLLVERVERLMSIPAIGPITALTWALEIGEVQRISSIKKAISYCGLCGDEQRSANTAQRTPLSKQRNKHLQTTLIEAAKMAPRYSPTLALLYDREKQKGNANRATLAVARKLVAYLIAVDRGQTHFLVLDRATCAAA

SEQ ID NO: 142368 - protein, 338 aa, unidentified
MDHYVGIDLHSTNSYIAIIDNDNKKVFKKKTKNDLRLVVEALTPYQEQIRGIVVESTYNWYWLVDGLIDEGYRMHLANPSAIKQYAGLKHSDDVTDAFHLANLLRLGILPTGYIYPKEERPVRDLLRKRLQLVQQRTLQILSFQNLVARNLGKSMNGNDVKKLNEDDVEQLFRDEHLVVAGKASLATILFLSERIQQIEKIIHKVAKLKDEYKLLITAPGIHKILALTIMYETGPIERFKKVGNYASYCRCVGSKRISNEKVKGKGNRKNGNKHLSRAYVEAAHHALWHYEYVKRYYQRKMAKTNTIVARKTIAHKLARACYYIIRDQKSFDPTRVFV

SEQ ID NO: 142369 - protein, 423 aa, unidentified
MKKRIYRGVNVKKVDEEKLADAVRGERVVFGLDVAKEGMVGSVVVDGNDVKLNVKWTHPAESIELVELLLGLPAASIEVAMEPSGTYGDALKCQFTMRGVPVYRVSPKRSHDAAEVYDGVPSWHDVKSAGLIARLHFDGASEPWRDRTDEERELAASIRTMEMYDCQENNNTNRLEALLARHWPEVTQGLRLKSATLVTLIKHFGSPQGVVRQASQARALMRRVGRGGVREETIEAIVRSARTTVGVPMIDAEARMLQTLAGEILRCRKAASKARADVERLSEAHEAAGRMGQTIGKATAAVLVAKAGDPRDYASASSLVKSLGLNLKERSSGKHKGQLKITKRGPSVCRYYLYLAALRLIQDDPVVRAWYGKKVVRDGGRMKNKAVIAVTRKLVKGLWHVARDEPFDSRLLFDVNNLDLVQA

SEQ ID NO: 142370 - protein, 317 aa, unidentified
MTYIGIDISKSWFDCFNSTTGTHHQYDNTIQGWNEFAGSLSDEAWAVMEASGPYYLGLACFLADRKIPVSVLNPLVIRRYSQMRLSRTKTDAKDAWLIAEYAAQQPLTRWNPPSSVNQTMRQMISVCQGLIRQRAMLLGQKEAFTNSPATDPLVIDVIDEQIHRITSALSTLEGRLRQLIVTHYQHCFDAVTSIPGIGPKTAVLLICLTDGFSKFDDARKLASYVGICPRIFNSGSSIKGRGSICKLGSSQLRKLLYMCTWTAKKCNPGCKQMYDRMKQAGKPERVIKIALAHKLLRQAYAVGTSGEHFTKEKALAA

SEQ ID NO: 142371 - protein, 344 aa, unidentified
MLSIGIDTHKASLAVSAVDELGRQLAGRSFANDPPGHAALLRWAVQLGSERRFGIEGAGSFGFALAQALLAAGEPVVDVPPHFTARERRTLRQRGKSDPGDALAIARLVAREPALRPVHVHGSLADLKLLVAARDQLVAEQTRLVNQLHADLLVLSPGYARRLPNLVAARHRQRLGIWLAEQPGVRAELARQRLARLEAVSDQARALERRIGRLVAALGSRLPSLAGVGLLTAAKLLAESGAIGDYRDAAAFAAANGTAPLPASSGQVRRHRLNRGGNRQLNRALHLMALVQARSDARARAYLARKRAEGRSWQEALRSLKRHLSDVVYRQMLADTQLAVADGT

SEQ ID NO: 142372 - protein, 378 aa, unidentified
MSRTPTAIANDIKPTLYVAFELGLKTWKLASTVGLGQKPRISTIPAGDKEAVVKEITKALERFGLAPDSRVVSCYEAGRDGFWLHRFLTHIGVENIVVDSASIEVSRRSRRRKTDRLDAIKLVTMLVRWDLGERPWSVVQVPSVEGEDSRQLHRELKTMKKDATRHVNRIKGLLANHGVRLRTIPKDLKPWLEEQRLWDGSPLPQGVGVRILLEFDRLRFIRSQILAVEVERRRLLAERRTNDAQVAHKLHRLGAIGVNGAWTFSTELFATREFKNRKQVGSLVGLAPTPFHSGGTSREQGIDKAGNKWVRAMAVEIAWAWLRFQPRSALTLWYQRRFGAGSKRLRKIGIVALARKLLVALWHWTEHDVLPEGATLKA

SEQ ID NO: 142373 - protein, 309 aa, unidentified
MEKFYVGIDISKDSLDVAVHASDKQWRYSNDPAGIASLCKMLVKLEPALVVFEATDGYEMPLYLGLDEAGLSAAQVNARQIRDFARSTGKLAKTDSLDARVIAHFGFAIQPVPHRVPDTQELKIIQSRRLQRLEMITAGTNRLRGAPKALRKRIEAHVTWLKQELADTDRELKEMIGNDPVWREKDSLLQSTPGVGPTLSATLIAQLPELGALDRRQIAALVGVAPLNRDSGTLHGRRTVWGGRTHVRAVLYMATLVATRYNPAIRLFYERLCAAGKRKKVALTACMRKLLTILNAMLKHHVPWSYSCC

SEQ ID NO: 142374 - protein, 348 aa, unidentified
MYIGVDTHKTQHMLVALDAQGRSLGARTCANTPEGWANGLAWAQGWEGRVWGIENSGSLGKGFAQSLLVQGEGTVHEVSPHRTAQYRRRGRTQDKTDETDALAIARLLLAEGDTLPEVQRDDLSTELRLLSDHRDNLLAEKTRLINQLHGQMLQVDPSYKEKSGRLTDARGVAYCRDLAPPQADRLLRTRLLIVHQLAEQILRLDAEVAAVADELAARVQESQTPILALRGVGTVVAARIIGEIGIAPRIPSAAALAALAGVSPVAVSSGGRGGYRLNRGGNRQLNRAIHVIALTQRRCDPRGRAYYMKKRAEGKTPRAALRCLKRRLVDVLFRAFSRPVDPRLCTAA

SEQ ID NO: 142375 - protein, 353 aa, unidentified
MTIVEAAPGVTGGVDTHLDKHVAAALDPLGRLVGTESFGADAAGYKALLSWLEAFGEVTKVGVEGTGSYGVGLARFLRRKNIEVVEVNRPNRQTRYARGKSDPVDAEAAARAVLSGEATGLAKVDTDHVGMIRALRVARRSAVKMRTQTYQQMKALIVTAPADLREQVRSLSHDRLVDSAACLRPGPVITPAAAVKLGLKCLAQRHQLLSAEVVTLDRDLARLVAAAAPALCALKGVGIDVAGAVLVAAGDHPERLRSEGAFANLCGVAPLPASSGKTSGRHRLNRGGDRHANCALWRIVIVRLATDAPTKQYMARRTQEGMSKPEIIRCLKRYVAREIYRELIPRAALATAA

SEQ ID NO: 142376 - protein, 361 aa, unidentified
MSIVGGMDVHRRQITVDYVDTETGRVRGGVIAPADRGCLRAWLVDRFAGRGDVTFAVEAGTGWRYVAEELAAAGAWPRLAEPADTSAKRGPKRRAKTDRADARLLRDLLVKTDLPECWIPPAIVLDCRAILELYRDLREQHEGWIQRVRAVLFHHGCPDLGPAELTTTAGRTRLRQAVAAHLPATARYQVTTALRMVDHLEGELEPLARQIRQIARRMRGPRLLRDRLYGVGPLTALALTCWLGGAGRGFTSRGAVRFTGLDITVHSTDGKRAPGHLSRQGPPVLRWALYEAAKCASQHRAPDHTYYTGVKDRIDGKRATLAEARKIVRTAHHLLTALGDEAFELEQPHPGHRPIPALAIT

SEQ ID NO: 142377 - protein, 323 aa, unidentified
MAKRITICAGIDTGKRKLDVALEGSSERIEVENTPEGHMELVGWLRLGKVKRVGIEASGGYEQAVVSELRRKRFVVVVFQPAQVRAYAKFHLQRAKNDKIDAALIAACTAAAKKIHPAPDPRLLPFAEHLTMIEQIGEDIAKLKNRLESCRNERIQKLWKEQIALLARHRRGEFKALLAAIREHRDLAARLDLIYSVGGSGLPTAVSILVRMPEIGQITREQAAALAGLAPYDDDSGDHVGVRHIEGGRERLRRALYTAALPASFRWNPQLMALYNRLIAAGKGHKRALIACARKLLVIINAVVARGTPWLAEPPKIASAPAT

SEQ ID NO: 142378 - protein, 344 aa, unidentified
MISVGMDIHSDKTVCDFFDPTAEPKRQHRTATVPTTREGLESALRPLKGQCRVAFEVGTQAQWVAQIIRPLAAEVQVANPSRITWLYRDGRKNDKRDAHKLSTLLSLNQLPTVHLPPADVSAWRALINHRRTLVHRRTMIKNQIRSILRTFAHRCPHRSCWTRIGMVWLRSLTFDAVRHEMVGALLEELTFVSKQVRGAEARLDTIAKTQPNVALLRSIPGVGPRTAEAVVAFTDVVKRFGNRKQFASYFGMTPTEDSSGRIHRYGHISKRGPSVVRWVLIEAVHQTVRRSPAFRAYFDRLHRGQRNRYKKAIVATGRKVLTIMFAMMRDQTRFSEDRVSSQAA

SEQ ID NO: 142379 - protein, 451 aa, unidentified
MPARRKTTAKTNTQLPTLHPHAAGIDLGARAIYVAVPPGTCTSTVRTFTTFTDDLLKLRDWLVKCGVRTVAMESTSVYWIPLFQILEAAGLEVCRVNARHCKNLPGRKTDVSDCQWLQYLHSVGLLRASFRPPEQICAVRSLLRHRSALVRYASDHVRHLHKALTQMNLQLHNVLSDLTGVTGLCILEAILEGERDPQKLAALKDHRIKASRDTLARSLQGDWRAEHLFVLQQALDTWRHYQQLIARCDAQIQKDLARFETKTPAHPLPPPASSHRRAQRNEPRFDARAELHRLCGVDLTQVPGVQVNTALVLFSELGPDFTDRFPTAKCFASWLGLCPDNRITGGKIISVQTREVKSRSAEALRLAAQSLWRAKNYLGDCFRRWKARLGTAKAITAMAHKLARILWHLTKHRTPYDPTVWQHAEEKLRQKKIQRLHQSAAALGFKLLTTS

SEQ ID NO: 142380 - protein, 347 aa, unidentified
MKVLIGVDPHKASIAVAAVDEDLGELLEGASFLQDRAGLRSLERWAKRFPERRWAIENAGGLGRHLAVRLAASGESVVDVPPKLSARVRALSTGNARKNDGVDALATALAASRNERLAAVDPEAASEVLRLLSERREDLVAERTRALNRLHGLLRDLVPGGVARTLSADRAARILRGIRSCGDASARLRRQLASEVLRDVRTLDRKIADLNGRIEAEVEASGTTLTEIFGIGPILAARIIGTVGDVGRFPTKAHFASYAGTAPLEASSGEVVRHRLSLAGNRKLNYALHMVAVCQARSATRGGTYYQKKIAEGKSRKEALRCLKRRVSDAVFRSLMADSQAPSRSAA

SEQ ID NO: 142381 - protein, 407 aa, unidentified
MMTSTDRRVTGGFDTHADSNVGAVFDTATSRLLATETFPTTTAGYEAALSWLCGFGVIDAVGIESTGSYGAGLARHLAVSSVRVVEVNRPERLDRRLDGKDDFVDARAAARAVLSGRATAIPKAGDGPVEAIRVLEIVHDSAIGDRTEAINQFKALLVRAPAAFRDRHSPVTLRHQLATARRFRTGASDDMVTIELKMALKTLAQRIEFLEAQIAEIDDRLRPIIAEHFPAVLGLHAVGIHSAAQLLMAAGDNAERLSSDAAFAKLCAACPKPASSGKTIRYRLDRGGDRRANKALYRIVIVRMRFDPRTRDYVARRLAEGKTKREIIRCLKRFVAREIFHAITEPHDPIPTGNELRAQRKAAGISVVAAATGAGVSYPQLSQIERGITHNTDIANRVHNWLAQQTT

SEQ ID NO: 142382 - protein, 404 aa, unidentified
MAKYHVGVDVSKSKHKACVRDLSQDSYSKVFSFDVNREGFEKFSSFLDKFSLDKEDFTIGIEATGNYGLTLSYFLLSQGYKVAEINPYQANQFRKAQGKKAKTDHIDARSLAAILSLENHKPLSLPDGVMDNLRELTRFRADMVKDRSRLVNQLHNDLICLFPEFLDLFKRLHSTTSLALLISYPGPEYISKAGEEVISKSIATVSHGRIGKEVAKALIEAAKDSVGIAQRQKALSTKLSILGRRIVALNGDIERVEREIEDLFKDLPYDPGDFPIGDTASLATIISEIEDVNRFPTLKQFLSHFGWCPQSFQTGSYQAEHPKMSHAGNRYVRRIIWMLSIASIRSVPFYSVYFQKRVKEGKAKMDIIVAIGKKLLSVFYAILKTGVPYNPNWEVNSHSSLART

SEQ ID NO: 142383 - protein, 375 aa, unidentified
MNDHSEAFVGFDTSKLRNAVAIADGVRGGEVRFLGEFENSAAATAKLVKKLAAKYQRLTFCYEAGPTGYGLYRQIKNLGHECIVVAPSLIPKKPGDRVKTNRRDALNLAKLLRAGELTAVWVPDRGHEAMRDLTRARETAMMDLRSKRQQVSAFLLRQGLHYSERKKTWTKTHMNWLASQKLEYAEQRLVFEEMMLAVRQAQERLERLEQAIRVAVPDWSLAEVVTALMAMRGIDLISAATFLAEIGDLSRFQHPSELMGYLGLVPSEHSTGDKIKRGPITKAGNRRARRMLVECAWSYQHPPRVGQKKQEKVAAAPRAVREIAWKAQCRLHGRYRALVRRGKLKTVAVTAVARELAGFIWAVNRAITTARAVAK

SEQ ID NO: 142384 - protein, 464 aa, unidentified
MRTDKKLWRNRKARKELARRLQSENPGLEVVHPHAAGIDVGNSAHYVAVRPDRDSQPVRRFECFTAELHRLADWLQSCGVKTVALQSTGVYWIPLYDILEERGFEVYLVNAQHTKNLPGRKSDVQESQWLLKLHTYGLLNNSFQPPSKIRTLRTYWRQRLQHVTGAATCVQRMQKALTQMNIQLANVISDLSGVTGQLIIRAIISGERDSWRLAELSHPRIQASRAEIAKSLEGTWRSELIFVLQQELEMYDTYQRRIAECDQQLQKHLAAFADTVTPPAKEELPAKKKKKQNKNNPHFHLADELQRISGVDLTRIDGVDVFVAQTVISEVGLDMGRWKTEAHFASWLGLCPDNRISGDKVLARGTRHVLNRAATALRLGASTLLKSQTYLGAQYRRLRSKLGAPKAITAMAHRLARLVYRMLKYGQQYVDKGAEYYERRNRQQQVEFLRKKAARLGLQIIPLE

SEQ ID NO: 142385 - protein, 411 aa, unidentified
MENIYPCCAGLDVHKESVEACVRRMGPNGRLDQQTRHWGTMTRDLLAMSDWMAAQGVTHVAMGSTGVYWKPIYNILESRFAVLLVNARHLKQVPGRKSDVRDCQWIAQLLQHGLLKPSFIPPQAQRELRDLTRHRTQLAEERTRTVNRLHKVLEDANIKLASVATDILGVSGRAMLSALMAGQESPVKLADLAERQLRGKIPELERALQGHVTEHHRFMLRLLWKQLAEQEELIAELDARIEAQTRPFADEIERLDAVPGVDRRVAEVVLAEVGADMNPFPSHRHLACWAGMCPGNEESAGKRTRRRIPPGNRWLKRSLVQAAWAASHTKHTYLASQYRRLVGRRGRKRALVAVGHSLLVIFYHVLKRRTTYADLGGDFFDRLEPERLTRYFVRRLEALGHKVTLESAVAA

SEQ ID NO: 142386 - protein, 495 aa, unidentified
MNRKSNTPKNQEANVGKTGRRSAGPKTGKKNELKRLTKEEQLELKIRAEEIGKGLTSSTWRELETAGKFDKNKKHDFVKDDTLIVGCDIGSETHYIRAIDTRGRELSQGILAFENNSEGFENALSWVLLIAAQYGKTQIVLGLEPTGHYWFTLTAWMLLHGVSVVQVNPYAVKQTKELEDNSQDKNDRKDPKLIANLVKDGNYGLPYLPEDTYATLRVLSGLRDQLKEEVGRSKNRLHRELTIVFPEYKAAFGKLDGPFTLSLLSKAPIPSDLVALGEAGIRKIWHDRKLRGAGYRRVAEIIRQASNSVGLTDGVDAHKICILHYVADIERLTSEIAEIEAELAAKCREIPNAENILAICGLGETITAGILAEMGDIDRFDDAKEIQKLSGLGLVACSSGKHKGQTKISHRGRKRLRYWLYQGAMSLVAHNEAFQQLHVYYTTRAENPLKKMQSMIVISCKLLRIIFTILKKGVRFDSERMLKDIVRPEARKAVA

SEQ ID NO: 142387 - protein, 359 aa, unidentified
MKKLTKGARRTVGLDLGDRQSRFVVLDADGQVVEEGQVATRDSALRQRFSGCERMRIALEAGTHSPWVSRLLTQCGHEVIVANSRKLRLIYENRRKDDRVDALYLARLARLDPQLLWPVEHRGPQVQEDLALLRSRDAMISARTQLINHARGLVKSLGHRLPRASSRAFPKRVLKAIPESVEPALLPVLEIVTSLNDQIKALDRKVETLGRESYPETRLLRQVTGVGPITSLGYVLILEQPARFAKSRAVGPYLGLVPGKKQSGDSDPQMRITKEGDSLLRRLMVNSAHYILGPFGPDSDLRRFGLKIAQRGGKRASKRAVIAVARKLAVLLHHLWRCAEVYDPLYQETRKASRREKAA

SEQ ID NO: 142388 - protein, 355 aa, unidentified
MDSKKYIGMDVHKESISIAVRNGAGKIVMECVIETKASTILQFIDGLCGDLQVTFEEGTWAAWLYDLLKPHVTELVVCDPRKNASMREGNQSDKIDARRLAELLRLNHLNPVYHGEHGLRSLKELVRSYLTITKDLGRVMSRVKAIYRSWAIPCTGKQVYAPRHRDEWLGKISELGVRRRAEFYYQQLDALRALRQQVRRDLLAESKKHPAWKRLCQIPSIGPIRAAVLLGILQTPHRFRTKRQLWTYSGFGIETQSSADHRSVNGQLQRVKKPSSIRGLNRNCNHDLKNLFKGAAIVASSKPGPFQEFYTALLTKGIRPEMARLTLARKIATIALIVWKRGASFDAQHLKPQTA

SEQ ID NO: 142389 - protein, 408 aa, unidentified
MKRYYVGVDWADREHQLYVGDEQGGKIAEMKVQEIPEGMAQLGRWLDERRAAGIELWAAIEKPHGRIVDFLLDHAVVVYPVNPKALDRVRDRYRMSQSKSDPFDARVLSEFLRTDHAHLRPLRPSSEQAQELKLLTRDQHRVVRHNTRLLNQLKITLKEYYPRPLEVFGDLDTQIAQDFLKAYPTPPALSELKRKQWNRFATHDHHLGKARCEELWEKLNKPQLMVPPHVVRAKAQLVEVLLEQLKPSLTAVKTYNERVERFFASMPAAEITQTLPGGKSGTLVPTIWAELGDAQDRWESFPHLQAEAGVVPVTRSSGKSHVVQFRFACNKQLRHAAYLFAFASLNRTEWANRYYRDQRAAGHSHPQALRALGAKWLKIIFVMWRDHKPYDENYHLANIARQRMRQAA

SEQ ID NO: 142390 - protein, 353 aa, unidentified
MPPLPSPTAPQKCVVGIDIAKDSFVACFGQSSFSQQLHFDKEKTFDNTASGFAALLSWVTKQHVSGNPLWFVVEATGVYYEELAYFLTDNNQLLSVLLPNKVKHFARSTELKSKTDQLDARLLCRLGLERALPSWQPPTPALRQLRALARERQVLVRQAAQLKTRAHAYQHSYQPDSRTLARLAAQQQLLVNQLKALDQDLADLLKAEPELARKLDQLTSIPGIGLTTAIVVVAETNGFVLVENERQLTSYAGLDVVQRQSGLSAHATRISRRGNVRLRTALYLPAVSSLRYNPQQIAFYARLRARQPSGKPGVIAVRRKLLVLCYSLWKNDCVYDPHYHPAHLAEQEVAPTT

SEQ ID NO: 142391 - protein, 344 aa, unidentified
MKNVTTIGIDLAKNSMQLHGIDSAGKVCLRKTLLRSKAPLFFANLPSCLVGMEACATSAYWARLIESCGHTVHRIHPRFVKPYLMADKNDANDAAAVCEAVQRPHMRFVPHKTQEQSDIQAMHRVRKGLVQARTAAINQVRGLLAENGIVIKQGACHVRSHLPSIIEDHENGLSGIMRRLLTELYEHLVALDVRIDRQSKVLQTISKEQEVCRRLMEIPGVGFLTATILLTVGGRPSDFKNGREFAAFLGLVPRQHSTGGKPRMLGITKRGNSCARTLLIHGARAVLRSLKLGRIPLGQGKEAQWVSGMMERRGYNKTSVGLANKMARIAWSMMANETQYRQAA

SEQ ID NO: 142392 - protein, 347 aa, unidentified
MDITTIGIDLAKLVFQVHAVNAHGKVVLKKQLKRNQMAEYFVNLKPCLIGMEACGSAHHWARKLQSYGHTVKLMPPQYVKPYVKTNKNDATDAEAICEAVTRPNMHFVPIKSLEQQGVLTIHRIREGFVKARTAQSNQMRGLLAEFGIEIPVGIGYIEKRVPEIIEDASNDLPGIVRLEIQELLEHFKNLQVRVNDCEKKIVRWHRKDEASKKLEAIPGIGPITASALVASIGDAKHFKNGRQVAAWIGLVPKQHSSGGKQTLLGISKRGDTYLRTLLIHGARAVIRHSVDKIKPTGTQSWVNQLVARKNKNIAAVALANKNARIVWAILNHDRDYQDNHKTLRVAA

SEQ ID NO: 142393 - protein, 345 aa, unidentified
MEISTIGLDIAKRVFQVHGADALGRAVLRRKLRRDEVLAFFEGLPAACLVGIEACGTAHHWAREIAALGHEVRLLPPAYVKPYVKRGKTDAADAEAICEAVTRPTMRAVPVKSAEQQAVLTLHRTRDLLVRQRTMLVNALRGHMAEFGIIAPQGITRVVDLVTVLMGEDGRVPALARQALRGLAAELESLGKRVDEVKAAILAWHKQNAASCRLAAIPGIGPITASAIVATVGEARQFRSARHFAAWIGLVPKQRSSGGSRRQGSISKQGDRYLRRLLVLGATTLIRHARTRTAAEAPWLKGLLERRPARLASVAQANKTARIAWALLTKGEGYRAPAPAQATAA

SEQ ID NO: 142394 - protein, 370 aa, unidentified
MLDTTTFVGLDVHARSIKAVSLDVMTGEVRAATFGYDAGAVAGWVRSVDPRARCVYESGVTGFDLQKRLSGLGVDCVVGAVSKMIKPSADRRRKNDRNDAEFLARMLSVGNVVEVWVPDDECEAARDLTRALEDARDDLSRSKQRLSKFLLRHGLVFDERTPTGRRKGNWTRAHWSWIESIRFAEGADNDVLAYYVDAVRRAAEEKARLEGLVEAEARKPRWRKRVDSLRCLKGVDTASAADLVFEAGEFSRFGNARSFAAWVGLTPSEHSSGESDRRGAITKAGNKHLRKALVEAAWHYLTCSARPKEPARGQAPDPGARRHAAKGVRRLVERRGTLLARGVHNNKANVATARELACWVWAVGLMAEEA

SEQ ID NO: 142395 - protein, 477 aa, unidentified
MAIPYPSRLTRKQRRELTRRLRSADPGLDVIHPNAAGIDVGNSAHYVAVRPDRDPDPVRRFECFTADLHQLADWLQHCGVTTVALQSTGVYWLPLYDILDARGLEVYLVNARHTKNLPGRKSDVQESQWLLKLHTYGLLRNSFYPSAEIRVVRTYWRQRADHVRAVSTCIQRMQKVLTQMNIQLANVISDLSGWTGQRIVRAILAGERDPQALAALSHPGIHASRDTVAKSLEGTWRPDLVFVLQQEVTMYDAYLQRIEECDQALAQHLKSLVDKAANTTDTTGAPSAAPRPARPRMKRRRKAGSHMPQFDLGRELHRISGVDLTRLEGIDVSVAQTVISEVGLDMSRWEDEHHFASWLGLCPDNRITGGRVIRRGTRHVINRAATALRLAATTLLRSQSYLGAQFRRFRGKLGAPKAITAMAHKLAVLVYRMLRWGHEYVDKGMQYYEERHRQQQIHLLKKRAAKLGFLLVEPQIS

SEQ ID NO: 142396 - protein, 421 aa, unidentified
MLKIHRFNCAGLDVHKNLIVATIGITDKKTRVTQYIQKDFSSLNYDLYNLKNWLIQHECFDVCMESTGKYWIPVFNVLETESKMNIVLVHPKYVKAIKGKKTDKKDSKWICDLFKHDLLKSSFIPPKDIRELRDLSRYRFKLICMRTGERNRYQNSMTVSNIGLASVVSDPFGKTAQAVMNEVLSTEVIDENKITKLIHSRCKNKDKIIESLKSSKIEPDQRFKMIEIQSHMNELDKHIEAVEVEIVKRASKYFDDFLHITEIDGIQLMSAILIISEIGVDMTQFETDKQLCCWAGTSPTNNESAGKKKSVRINKAGQYLKPVLVQCALAAIKNKNSYFGQKYTRMKKRRGHKKAIIAIARMMLVSIYHMILTGEKFNPSDYESFKNPKPQKEKNNYTVETALDFLKSQGFDVSSIQDIPK

SEQ ID NO: 142397 - protein, 325 aa, unidentified
MTSPAYLGLDIAKRKFDAALLQPQGHCRHQQFPNSQDGFAQLQLWLQRYVIGPLHACLEATGTYGDAVALFLHQQGHRVSVVNPARIKAFGKSELSRTKTDKADAALIARFAAAATPRPWTPLQPEQRQLQALVRRLEALQRMRQQERNRLDLEAADSLVAESLREHLAHLDQQIRQLQQRLRTHVRSHSGLQQQSDLLQSIPGIGATTALHVLAEIPDLAHWPSARQAAAYAGLTPRHRQSGSSVRGRPHLSKLGNPRLRRALYLPAVVAMRCNPLLKVFAQRLLAAGKPKMAVVGAVMRKLLHQAYGVLKHATPFNPNLEFTP

SEQ ID NO: 142398 - protein, 370 aa, unidentified
MRKSTKVVALEQHMDSITVAVAGPGRRAPELYGDMPSTPEAVSKLARRLDDGNTRLRFCYEAGPCGYGLYRQLTQMGYECSVVAPSLSPRRPGERIKTDRREALRLARQHRSGDLVAVWVPDEEQEVIRDLVRCREDFKHAERRARQRLNSFLLRHGRVYSGRSRWTKAHGHWLEAQCFGHAAQQIVFQEYVNAVCEGTRLVETLEQDMTQALEDWSLAPVVRGLMALRGVGPVVAMTVVAELGDITRFDSPKQLTAYIGQVPSEHSSGRTRRQGGITKTGNGHVRWVLTEAAWSYRLPARKTKHLQRQAEQTSETVQAIAWKAQKRLCGRYQHLMQRGKPTGKVITAVARELLGFMWAIAWETMPRKVA

SEQ ID NO: 142399 - protein, 342 aa, unidentified
MDHFAGLDVSVKETSICIVDDTGRIVREVKVASEPEALLKVLGNPTYHFKRIGLEAGPLSQWLFSALAGAELPVICVETRHMQAVLKAQINKTDRNDARGIAQMIRVGLYRPVHVKTLRSQKLRMLLTHRKLLQSKAIAIENDLRGTLRNFGLKVGMVGKVRFEARIQELVENQPDLAVLVEPLLIVRRALREQIVILHRRLLAIVRDDEVCRRLMTTPGVGPVVALTYRATVDVPARFRKSKSVGAVFGLTCSKYQSGEIDWSGRISRCGDEMMRVMLYEAAQSMLRSKKWSWLKAWAMQIARRRGMKKAIVALARRLAVIMHRIWVDGTEFRWTRETVAA

SEQ ID NO: 142400 - protein, 408 aa, unidentified
MTVVGIDVSKGKSMVAAMKPGGELVAAPYEVRHSDIELSRLALDVLCMEPDTRVVMEATGRYHEPVAALLHSEGIFVSILNPLLIKQSGAGSLRKVKSDPKDALKIAKYGLDNWSTLREYTPTEAIRQQLKLCERQCDLYSKNIVMLTNNLISLSDKTFPGVNELFSSPEKADGHLKWVDFYRTFWHCDCINRMSPDAFGERYKKWCKRKGYHFSADATDALYAASCGLYTTLPRDNNAKLLVTVAADQLIALRENQSKLEAEMLNLCKQLPEYETVMAMYGVGKSTGPHLMAELGDIRRFPHRSSIVAFAGVDPGVVGSGKMQLSSVATSKRGSPQLRKALFQVVSTYVKCKPENEAVYQFYTKKRDEGKPFFVCTTAAANKFLRIYYARVKECLNAAESATQVEEV

SEQ ID NO: 142401 - protein, 413 aa, unidentified
MEVLVDRCAGLDVHKKTVVACVRTPGTGRQKRASEVRTFGTFEHQLIELREWLIECGVTSVAMEATGVFWKPVWHVLDDGQPFELLLVNPGHIKNVPGRKTDVNDATWIGQLLECGLLRGSFVPPVEIRELREVTRYRRQLTEERAREIQRLQKVLEDANVKLSSVVSEVLGVSGRMILDALCAGERDPDVLADMAKRKLRSKIGDLRQCVPGRFNEHHAAMVTEIVAHIDYLAGAIARLDVRIEEVTAPFRAARELLTTIPGIQQRNAEIILAEIGVDMTRFPTPGHLASWAGVCPGNNESAGKHRSTHTRAGNLWLQSALVEAAWSAVRSKDCYLAVRFWRIAKRRGQQRALIAIAHTMLVICWHMLSEGTVYTEIGVDYLARNDNPDRRRRHLINQLEHLGYQVALTPAA

SEQ ID NO: 142402 - protein, 376 aa, unidentified
MQASNARTPIDSHSATIHVAIELSMKSWIIVIHSPDQDRLSRHRLEPGDSEGLLALIAKVRARAARVLGRAPAVVSCYEAGYDGFWLHRRLVAAGIENVVIDPASLTVDRRARRAKTDRIDGEKMIRSLMAYRRDEPRVMSVVRVPSPEQEDARRRSRERARLIQEQTGHLNRIKALLRTLGLAAGEPGRRNWAAWLAHQRDWQGQSVPPQLRAEIVREHARLMLVRDQIKALAAAPAPVATAAASAHLARLKSLGPAFSDTLASELLWKDFRNRRQVGAYCGLAPSPWQSGGVEHDQGIDKAGNRRARHAAIELAWLWLQHQPQSALSRWFHDRVGEQRGRVRRIAIVALARKLVIALWRFLTTGLVPTGAVLKA

SEQ ID NO: 142403 - protein, 368 aa, unidentified
MQELITGFVGLDAHAESTAIAVAELGREAPRFVGTVGARITELTKALGKLGQPQSLCVVYEAGPCGYALARELIRLGYRCEVAAPSKIPRCPGERIKTDRRDALKLAGLARAGELVPIRIPDERDEAIRDLSRARVDAVQARLKARQQLKALMLRHGRRYSGKTSWSAAHERYLSDVTFAHPAQDIAFIEYRQAVSEGEARVQRLSQSLTQEVEHWRMHSLVSAVMTLRGLDVVAATTVVAELGDLRRFAHPRELMGYLGLVPSEHTSGSKRRLGAITKTGNSHVRRVLIEAAWNYRYPARISRVLQLRQERQPAPIRAIAWRAQLRLNHRYRRLKARGLQHNKICVALARELAAFVWDIGRHVTPNP

SEQ ID NO: 142404 - protein, 348 aa, unidentified
MDEVRRFVGIDVAKVALDVFIGSVGAAFSVANDEVGIRELLRQLEPADFVILEATGGLETPVASALAAAGVAVAIVNPRRVRDFARATGRLAKTDRLDAEVLARFGEAVRPEARPLADEQGQALEALVTRRCQLVEMLTAEKNRRARAPKVLHRSIDEHIRWLEKRLSGFDDELGELIRNTPLWRERDESLRSVPGVGKVLSSTLLAQLPELGMLNRKQIAALAGLAPFNRDSGSLRGSRCIWGGRAQVRRVLYMATVAGVRSNPTIRTFYLRLRANGKHAKPALTACMRKFLVILNAMLHNKTHWQTPALTSSTSPLSPLLGAVSEHGCLYVEGGALQDSEWVERQG

SEQ ID NO: 142405 - protein, 413 aa, unidentified
MRLFAGDDWAEGHHDVELMDAAGRRLAKARLPEGVAGIARLHAMIGEQLGEDADEDDAGQVAIGIETDRGPWVAALIAAGYTVFAINPLQASRYRERHGVSGAKSDAADAHVLADMVRTDSHQLRPVAGDTAQAAAVKVVTRTHKTLIWERTRCTQRLRHALRDYFPAALEAFEDLDAADTLELLARAPEPASAAKLTTAQISAALKRARRRGVAAKAERIQAVLRAAHLGQPDVVAAAYAASVRALIAVLITLNEQVKTLQGQVEAYFGRHPDAEIIASQPGLGGVLGARVLAESGDDPARYASAKARKNYAGTSPITRASGKKKAVLARYVHNDRLIDALMSQAFTALRVSPGARAYYDRQRARRAGHNPALRQLANRLTGILHGCLKTRTLYDEATAWPQHAAATEKTAA

SEQ ID NO: 142406 - protein, 482 aa, unidentified
MKPSQQNKPQKASSGPEQGSWQQMNRKQRREMTRKIQAENLSLEVVHPHAAGIDIGNEAHYVAVPPDRDNKSVRRFGCTTAELKEMAAWLKQCGIRTVAMQSTGVYWIAVYDILEAAGLEVYLVNARETKNLPGHKSDVQESQWLMKLHTYGLLRNSFRPSQEIRTMRTYWRQRNDLIRSAARHIQRMQKALTQMNIQLANVLSEVSGVTGQAIIQAILAGERDPRKLAAFRDKRVKAREEEIARSLEGNWQEDQLFMLKQEQDGYEFCQKQMNECDERLQQYLQQREDRSKGAELPKENRKERLRKNKTNKPRFDLRTELFRMTGTDLTQIDAIDVRTAATVISEAGWDMSKWRTEDHFVSWLRLCPDNRVSADKVIGKRRLPMNNRLSVGLKIAASTLRQSNTYLGAQFRRLKTRLGPPIAIKAMAAKLARLVYRMMRYGMRFVDRGAEFYEAQHRRRQIDSLKRKAANLGLKIIAAPAA

SEQ ID NO: 142407 - protein, 349 aa, unidentified
MGSMPDSTFEVTAGVDTHRDTHVGAALDGLGRVLATASFPATTGGYQSLLAWLEGFGPVARVGVEGTGAWGAGLARYLTAAGIKVIEVIRPNRQLRRRYGKSDTTDAIAAARAVLSGEASGQPRGGLGPVESLRLVKVARRSAVKQRTMVANQIHSVVATAPEQLRSTLVGLPLHRIVDLAAGYRPGNPSAPLQAAKLTLRTLARRYQYLTSEINGLDGHIEQLVAEAAPPGLLALCGVGPQTAADLLITAGSNPDRLQSGASFAALCGTTPVDASSGRQQHHRLNRGGDRQANAALYRIVIVRLRYHQPTRDYMQRRLKEGLTKPEIIRCLKRYVAQETSRHLTHHPH

SEQ ID NO: 142408 - protein, 410 aa, unidentified
MSDQDNSRDWPAFVGIDWGGSEHQLCVLDTTGARLTQQRVTHDVAGLAELDTALARHGTALPIAVERAEGLLVEHLQARGHIVFPVSPRIAARARERYRVAAVKDDRLDAFVLADTLRHEHARWRALTPPSPLLAEIKALTRDRDRLQQIQQATESQLRAILEAYHPAPARLFSSVDRQITLHFVLDYPTPAAASRIKTTRMNGFLSRHRYTGRVTGQVLAERLRENLLAASTGTVAGKSYSAQSFARLLQLLNTQLAEYDDAIAAAVAEHPDTPIFASFPGVGAVLTGTLLAEIGEDRARFPTQATLLAESGLAPVTRASGRSHKVRFRYAANTILREAAMWWAYNSMKEAPWAKAAFREARDQRGQHYHRALRGLAARWMRVLWTCWSTHTPYDPKRHTTAQTALTTG

SEQ ID NO: 142409 - protein, 369 aa, unidentified
MSEVTLRLIARVGVDIAKAVIQVHAVDAAGRVVASRSLKRDQFLPWCVQHLPRGCLVAMEACGGAHHWARRLMALGFQARLIAAHFVAPYRMQGKAGKNDANDAAAICEAASRPQMRFVPIKTAQQQGVMALHTIREGFKEERTAWINRIRGVLVEFGLVFGKGPKVLRAVLPDVLEDASNELTGTARMALQQGFEHWRHLDDCMRWCDRQIGQHVRSCTAARRAARITGIGEIGASALTAAVGDFAQFNSGAQFGAWLGLVPRQNSSGGKPSLGRITKRGDDYLRTLLIQGAKAAVMSAHKRADPISQWVLKLKERAGWQKACVALANKNARILWAVMTREQRFDPHHVSVKPVAKQPPLPPLQLAAA

SEQ ID NO: 142410 - protein, 361 aa, unidentified
MNSTPLIAFDQHAATTVAAVLLPRQQTPALHSLPSETATILRFVKRVARHGAVQCCYEAGPCGFELQRTLTQQGIACDVIAPALIPRRPGDRVKTDRRDARHLAILYRAGALTAIHIPTEQEEAARDLLRCREDIRADLLRARHRLSKFLLRHGRRFTATKTAWSKRHDTWLRAQTWPLPALDQTHRAYLRAVDEGRARLQDVEQDLRALLDLEPLRTRVQRLRCFRGIDDLTALTIAAELGDARRFSTAPRTMAFAGLVPSEHSSGTKRAQGGITKTGNAHLRRVLVESAWHYRHHPFVGDTLRARQRGAPAAIIAQAWTAQQRLHRRYQRLAARGKPKQHIVTAVARELTGSVWAALTQ

SEQ ID NO: 142411 - protein, 364 aa, unidentified
MEYFVGLDVSIDETAICVVDDKGAVALTSAVATDPATIADALKPYAGCLRRVGHEAGSLSPWLHPELQALGVPIVCLETQHVRAAMAAQRNKTDATDALGLAHIVRTGWFRQAHVKTEACYRLRLLLSQRRNLKRKFLDLENSIRHSLKVFGIRLGKVGRGGFEAAVKESVAVASDAMTRGVMECMLRARAALWAEYLMLNKLVHQIALRDELCRRFMEIPGVGPVTALSYSTAIDDPSRFRRSRDVAAYFGLTAKRWQSGSSIDIKGRISKAGDPDVRRALYEAASALLTRFKGRDSIKSWGLHLAKTKCHAKARVAVARKLAVVMHAMWRDGTVYVGDPQMTDQERVAALADKVQRVKRWDS

SEQ ID NO: 142412 - protein, 331 aa, unidentified
MNQIGIDISNDVFDATMQHSGGVSRRQFSNTKSGHRQFQKWALRRANSAQVCMEATGVYHLQLALALDSNAAVELMVVNPCAARRFAQANMVRAKTDAIDADGLLLFLQRMPFRCWLAPRQQVLQLQSLAHRVSQLDKEITRERSRLHAVRRAGSHTRLVQQDIQAHLIQLKRRLEVMTARAMEVILSDPQLADDARIIDSIPGFAELSSMKLVAELSPLPDDMMPPQWVAHAGLDPRPGESGSSVRSPRRISKQGNARIRAALYMPALVAKQHDPNVKAYYEKLLAAGKPKMQAIVAVMRKLLHALWGMLHHRQEWDGQKFYRLNQVESV

SEQ ID NO: 142413 - protein, 336 aa, unidentified
MSLVMGMDQHRAQISTEWLDTMTAEVFRARIAPADRAGVRKFLGRFAGEDLEVALEATTGWRFLAEELERVGAEVHLAEPTETSGLKSKKKRAKTDWADARHLRELLLLGRLPESWIPPAHILDLRGRVRLRHTLSHQRTEWQQRIQAVLYHHGIPQRRDLLTLEKRQWLARQKLPAAAREQVTIALEMIDALDIQLAPFDVALRAYARKQPGCRALIDQIYGVGELTSVTILAELGDARRFPSSRDTVRYSGLDITVYQSDQRRAPGHLSRQGPPALRWALYEAAQRARFPASPDRAYYLQLAERIGGNRACLALARKLLKRSYQCVTNAEGGVV

SEQ ID NO: 142414 - protein, 346 aa, unidentified
MNTAAIASIGIDLGKTTFHLVALDCHAGVIVRKKFSRSQLLAFTANLPFALIGMEACSGAHFLAARLRDQGHEVKLIPAQFVKPYRKSNKNDFVDAEAIAEAVTRRNMRFVPIKTDDQLDLQALHRVRERLVRRRTALIDQIRGFLLERGLVFAKRPANLRRQMPLVLEDADAKLTPYFRRLLNDLWQEWKQVQLDIDALTEEMERISVNDSACQRLREIPGVGPVVASAIVAAIGNGAAFRKGREFAAWLGLVPAQYSTGDKTCLLGISKRGNEYLRRMFIHGARAVLFRVKYDTGAFGEWVKRLESRRARNVVVVAIANKLARIAWAVLSSGEHYQMPRAFAAA

SEQ ID NO: 142415 - protein, 400 aa, unidentified
MISVGIDVSKGKSTVCLLKPYGEIVCKPFEVQHTEKDLEELANLLQKLDGEIKIVMEATGIYHLPILTFLLEKGFFVSVINPLMMKRFSKDNSLRGAKNDRLDSVMIASYGIEKWYKLKKYEVNDRIYTELRLLGRQYYRFMQTHVKHVQELTHLLDYTAPGLKAMFNSWNEHSNRDKLCDFVERFWHFDLITSLSREEFVEQYLLWAKEKKYHQSRSKAEKVYDLASNGIPTLSSHTPSTQLMIQGAINVLRIVNNSLYHILSRMKELAKSLPEYATVRSMGGVGDSLAPRLIAEIGNVKRLRNGHSLVALAGIDPPPYESGQFVGTHRRISKRGSPILRKIGFEVMRMLKSHKEPEDNAVYNYILKKEAEGKNKKLSKIAGLNKFLRIYYVRVMEVYQ

SEQ ID NO: 142416 - protein, 383 aa, unidentified
MKTNQIKPIHDTNTSTAIAAQSNPALDHASTPRHVFKLGLDVDLNHVVTAIQCERGTITLPQKFPRGRLLDWIQKQTAAGHIVHTVYESCGFGYTLHHALVYAGAQSIVTTPMRLSPERRRKNDRLDARELCVRLSRHLDGHAHELKPIRVPSRVEQQRRELGRQREFFKRQLRRLENHGRALRIEFEHETLPAGWAGPRKWKQIAPQCSEFVRGQLEPVVAQIRACQKQMAELTAQIQARVSGEKLPKGLGALTVSLLDGEVCDWKRFRQRKAIGSYTGCCPSEHSSGGVQRFGHIDRHGNKHVRVLLVEAVWRLLKYQPQWHARVKYLPKLKHGASLKKKMAVALARQLAIDLWRWRTGRCTAAELGWTLRRAPDEGRGVK

SEQ ID NO: 142417 - protein, 284 aa, unidentified
MECYVGLDVSLKQTSICVVDQAGSVVREGVVDSDPEAISVYVRSKAPEAVRIGLETGPTSTWLWTELKRLGLPVICIDARHAKAVLKMQINKNDRNDAIGIARIMQTGWFKEVRVKDIDSHSVRALLASRALLVKIKRDLENHVRGLLKNLGLVIGRATFNVFAARAEELIEGRPDLVAAVRPLLEARNAVERQVSELDRKVMKLARLDAQVQRFMTVPGVGPITALAFKATIDDPARFARSRSVGAYVGLTSRRHASGEIDWSGRISKCGCCAVIYSKPLGFC

SEQ ID NO: 142418 - protein, 416 aa, unidentified
MSYKIAGIDVHKKVLMVVVAVAAAEVVDVAGEALEFICQRFGTGAEERRRLVRWLQQQEVTEVVMESTAQYWKPIWLELEPHFQKLHLAQAQSNRAPRGRKHDFRDAKRLARRLLAGELSLSYVPDPEQRLWRVMTRTKQQLVRERGAIRNRVEALLEEMQIKLDSVISDLLGASGRRILQALSEGETDPDKLAELGDERLKCSQAELADALRGHPTPMHISVLKLHWEHVELMDRQIADLDRLVAQALKPYQEAVLRLAEVSGFGVDSAQQLIAEVGVLADAFPSAGEFSSWVGTCPGSNVTAEENHSSRSPKGNHFARRILTQAANAAIKKKGSHFQNVFRRFVFKLGYKGAVWVVAHRLTRLVWLILNKQVRYVEQGEDTDPKAKQRRAQKLTRALRRLTYEASLKLIQIPQA

SEQ ID NO: 142419 - protein, 464 aa, unidentified
MSWEKSKKKQRQKRVGQGGAVPSLSCIEPSAAGIDVGATEIFVAIPQDRDPSPVRSFETFTEDLHRLKDWLLQHGIKTAAMESTGVYWIPLFQILERAGIEVCLVNAQHVKHVPGRKSDVIDCQWLQYLHSVGLLRASFRPEDRVCVIRSLLRHRDNLVQMAAAHVQHMQKALTQMNVQIHHVLSDITGQSGLAILDAMVKGERNPVVLAQLRDRRVKSSEEVIVKSLVGDYRREHLFTLRQSLEAFRYYQDLMAACDQEIEEQLQNFDRQPPSDAPPLPPNPHAHRRRKNEFHFDMRGELYGIWGVDVTAVPAIQALTGYTLLAEVGTDWSAKFRSVEAFASWACFCPHNKKSGGKILSAKTRKSANRVNRALRLAAQSLERDKSYLGGYYRKMCARLGRPAGITAAAHKLARILFHMITTKQAYDETVFAAEEQRQRKRMENKLKRNAHQLGYALVPLAQTA

SEQ ID NO: 142420 - protein, 359 aa, unidentified
MDVRDPAKRHVVGGVDTHKDLHVAAVVDERDRVLGSQSFTTTRQGYRQMLAWMRSFGEVQRIGIESTGSYGAGLLRFVQTVGIEVLEVTTPDRHDRRRRGKNDDLDAQNAAHAAFAGQRTVTPRSRDGMVESLRVLSACRKTAVAARRVALQLIQNTIVCAPDGLRDDLRSMTRMQLIRTLAAWRPDLTAYRDVEAAYRITFKSLARRYLELHDEIADLDVMIGAIVDELAPDLVARNSIGHVGAAQLLLTAGDNPDRLRSEASFAALCGTSPVPASSGKTIRHRLNRGGDRHANSALHIIAIGRLRTDPKTKKYVAKRIAEGHSKLEALRAVKRYIAREVFTLIMRRHKTINQTQIAA

SEQ ID NO: 142421 - protein, 351 aa, unidentified
MQVIGVDCHKARHTAVLVDAAGQEQARWDGENTPAGWQALAAWGQHQATTLVWGIEGTGQYGRGLAQLLVAAGQTVHEVNPRLTAAQRRVSRRRGKSDAADALAIARVVQQEPHLPRVQAEDATAVLAVQVIARDRMVHDLTALRNRLHQHLTQLRPVLPTPRPTLTSRAGIAALVDLQIPAGDAMVQAYAQLVRLLAAQMLLVMTQIAELTATIAALCGAWTAPLQAVTGVGVLSAGMLAAHLGGKTFQTDAALAMYAGVAPLDASSGRQVRHRLNRSGNRFLNAVFHRIALSQAAHSPRARAYLAKHRANGKTAKEALRCLKRMLARVILTAWRQCQPPPLAHISLPLT

SEQ ID NO: 142422 - protein, 338 aa, unidentified
MKITTVGLDLAKSVFTLQGVDERGNIVLRKTVRRARLLELFAQLAPCVVGMEACSGAQHWARELRKLGHEPRIMAAEFVEPYRCGGKNDANDAAAICEAVSRPKMRFVAIKSVEQQAVLAVHRLRQGLVEERTALANRLRGLLTEYGVVVGVGLDRLRRALPEIVEDGANGIPGTARDVFADAGQQLHELDARIAAYDRRIAALARASEPVQRLMKIEGVGPVTATALVASVGNASVFNNGRQFAAWLGLTPRQHSTGGKQRLGAMTKHGDVYLRTLLIHGARAVLSVTPKRSDAKSRWAESLRRRRPDNVAAVALAAKHARIIWALLAREQDYRPAA

SEQ ID NO: 142423 - protein, 371 aa, unidentified
MHDTIFVGMDVHKATISIAVADGARGGEVRQLGDFLNRADHVDKLVQRLSKTGGQRLRFCYEAGPCGYGLHRQITTLGHECVVVAPSLIPMKAGDRIKTDRRDAVMLAKLHRAGELTAVWVPDAAHEAMRDLVRARATAVRVLGKARQHLQGFLLRHGRVYAGKKGWTLPYRRWLTTVRFDHPAQQVVLQDYIHSVHDAEERIARLTKQIEDLVPTWSMAPVVEAFQAMRGVAFVAAVTVAAEVGDFTRFDNPRQVMAYLGLTPSEHSSGTAIRRGGITKAGNALARRVLIEGAWTYRMQARVSRKLHDRLEGLPQIVRDIAWKAQVRLCSRYRRLAATGKPKVVVTTAIAREMVGFLWAIARQTQIGSAA

SEQ ID NO: 142424 - protein, 353 aa, unidentified
MNDTTTIAWLGLDAHSKNCVLGQLDDHGTEIKSWGFATKPEQLVQHVKAIPATDKRLMLEESNLARWIGHLLKPHVQQLVVCDARRNRLISHDHHKHDKRDAFALARLLRLNEFKPVWQPAEDPRVLFKRIAKSYENAVQRQTRLKLQIKSLFQHWGLFPAGTTVFSRPGRVAWLKQLPFDPLRAQASLLYELLDQALAGQAQFRRLMCQTGRQFPEVQRLSTTPGVGLVGSHLFVAYIQDPTRFGKFSRLSRYCRLGIRDRTSDDKPLGYQQLDRQGIGTLKAVSYRAYLQAAKRRTGPVWEFYQLSLRQTGSTTHARLNTQRKILLTLWTLWLTGREFDPKEFFRAQPIDV

SEQ ID NO: 142425 - protein, 428 aa, unidentified
MKNRNDQKLKAITPGTLIVGVDIAKETQWAQFVDYRGLELRKAFKFKNHKKGFDSILASIKEICKKRRLDNIIIGMEPTGHYWKPLANYLLKNKVNVVMVNPYHTKRAKELDDNSQTKSDKKDALTIARLVRDGRYYEVYMPQDIFAELRVLSNSRISLMKRSNALKNTITAVMDEYFPEIVTVFKYPLKGKAAMQILKSCPFPSLILKLGIGGVLAEIKKAVKKTVGIKKAQQLVETAKSSIGVGYGLVSAKLKLGLMIEELELLSKQLEQLEKAMEKALADTGYGEIILSIPGIGVVTAASFLGEIGDPMRFDHPRQICKMAGYNLIEDSSGKNKSKTKISKRGRKNLRSVLYQMARTMVAVNTEMKELYQYLKTRPNNPLKKKQALVVISKKIVTVIYNLIKKQTGYQAELVFNKFRKNQMKQVA

SEQ ID NO: 142426 - protein, 369 aa, unidentified
MGLAIHHIIAGWKFLINKNHDQNEIILGVDTHLDVHVGAVVNTAGKLLGTLSISVNTQGYLDLLSWASSFGDVKRAGVEGTGTYGAGLCRLLTDNGITVFEVNRLDRVARRRRGKSDPIDAENAARSVLSGLSTAIPKQHSGACEAMRIASVARRSAVKARTQAINQVRAILVSAPQDIREKFWRVKASECVKACIKSRKFGDSPLMTTLQSTLKCLAKRWMMLSSELHELDKQLEQLTQNHAPKLRSRFGVGPNTAAILLSVAGDNPERLKSEAALASLCGVNPLLASSGKTVRHRLNRGGSRVANNALWTIAMVRMRSDARTRIYVERRTKEGLSTKEIQRCLKRYIIRELYPLILGDLKNTGEFLT

SEQ ID NO: 142427 - protein, 374 aa, unidentified
MRLFLRPRASGKLEASPSSERYARSGQTVNLRKEKPMSLYCGIDLHSNNQVVVVLDEEDHSVLERRLPNRLEAVLGALEPYRDELAGIAVESTYNWYWLVDGLMEAGHSLSLVNTSAVKQYEGLKHTDDRHDARWLAHLMRLGILPTGYIYPKQDRPVRDLLRHRIRLVEQRTANLLSVQNVLARETGQMIKGNDLKAFTGEAVRERLSSPELCLALESRLRLIALLDAEIDRLEEAALERAKLRPEFRVLLSVKGIGKTLGLVIMYETGEITRFPGVGNYASYCRCVRSDRVSNRKKKGEGNRKNGNPYLSWAFGQAAYYARRYQPLAQKFHQRKLAQRGAVVATRALAHKLSRAVYFMLRDQVRYDPALLFR

SEQ ID NO: 142428 - protein, 391 aa, unidentified
MIYVGIDVAKDKHDCIIKNTVGEVVFKTFTIKNNLDGFNDLYQRIESVMEDVSKVKVGLEATGHYSYNLLGYLFDKGLPTFVINPLHTNLYRKSLSLRQTKTDKVDASTIASMLMSDVNLKSYSDTSYHNEELKSLTRYRFDKVKERAKLKTSISRLVCILFPELEKLVPTLHMNSVYSLLYEFPGAKQVASAHLTRLSNLLAEASNGHYDKDVAITFREAARASIGSTMPAKSLELKHTIKLIRELDSEINEIEEEIKAIMNTINSPILSIPGISYRMGAMIIAEIGDFDRFDSADKILAYAGLSPSTYQSGQLDNCHPRMEKRGSRYLRYALFNATIFVCHWDPTFNAYLARKRAEGKHYYVAVSHATKKLVRLIYQLEKTRQSYNKAV

SEQ ID NO: 142429 - protein, 420 aa, unidentified
MRNAGIHANSLLEVRRMYNAVGIDVSKGKSTVAVLQPGGTVIRKPFDVSHTSQNLNELADYLSSLDGTTKIVMECTGRYHEPMVKALSEAGLFVSIVNPHLIKNFGNNSLRKVKSDPADARKIARYTLDNWTELRQYSGMDNTRTQLKTLNSQFSFFMKQKVAAKANLIALLDNTYPGVNKLFDSPTREDGSEKWVDYAYSFWHADCVRKIGLKAFTERYKSFCKKHHYIFQQDKPEKLFNASKELVAVFPKEKTYKLLIQQSIQQLNLASEHVERLRREMNELASTLPEYSTVMGIYGVGKTYGPQLIAEIGDVFRFTHREALTAFAGVDPGVDESGQHKSKSNRASKVGSARLRKTLFQIMTTLLQNAPEADPVYRFLDKKRSQGKPYYVYMTAGANKFLRIYYGKVKECLRNLEQTE

SEQ ID NO: 142430 - protein, 358 aa, unidentified
MAGKVTETAVVGGVETHKDLHVAAVVDQNNKVLGTQFFSTTRQGYRQMLAWMTSFGALKRIGVECTGTYGSGLLRYLQNAGLEVLEVTAPDRMERCKRGKSDTIDSECAAHAAFSGIRTVTPKTRNGMIESLRVLKTCRKTAISARRVALQIIHSNIISAPDELREQLRNMTRMQLIKTLGSWRTDASEYRNVTNVYRISLKSLARRYLELHDEIADLDVMIAAIVDELAPELIKRNAIGYESASQLLITAGDNPQRLRSESGFAALCGVSPVPVSSGKMNRYRLNRGGDRAANSALHIIAIGRLRTDDKTKEYVARRVAEGHTKMEAIRCLKRYISREVYTLLRNQNRQINSIPITT

SEQ ID NO: 142431 - protein, 397 aa, unidentified
MVLIYQVFCGLDVGKATHHATGLSADGARVVDREVANDESALRRVFSELAEHGTVLVVVDQPSSIGALPIAVARAMGIDVAYLPGLAMRRIADLHPGTAKTDARDAYVIADAARTLPHTLRRVDLGDEALAELSVLVGHDDDLAEQCTAVSNRIRGLLLQIHPAFERVLGENASHKAVLAMLVKFGGPTGITAAGRTKVGKVLKAGAPRMGDKLTEQIFAALGEQTVVVPGTTAAEKVLPRLAEQLLGLQQQRKQVAAEVEEALDAHPLTRVLTSMPGVGARTAARVLITVGDASSFPTAGHLAAYAGLAPVTRRSGSSIRGEFPSRSGNKNLKNALFLSAFAALRDPASRAYYDRKRAQGKKHNAAIICLARRRTDVLYAMLRDNQPYVSPIPSAA

SEQ ID NO: 142432 - protein, 400 aa, unidentified
MISIDGVGVFLGLDVGKQTHHGHGLTPAGKTVFDKPLPNSETKLRAVFDKLTAKFGTVLVVVDQPASIGALPLTVARDAGCQVAYLPGLAMRRIADLYPGEAKTDAKDAVVIADAARTMPHTLRTLDLADEVTAELTMLVGFDQDLAGEANRTSNRIRGLLTQFHPSLERVLGPRLDHPAVTWLLERYGSPQALRKAGRRKLVEVVRPRAPRMAERLVDDIFTALDEQTVTVPGTSTLDVIVPSLAKSLAAVHEQRRALETRIEALLEAHPLSPVLTSMPGIGVRTAAVLLTTVGDGSSFPSAGHLASYAGLAPATKQSGTSIHGEHAPRGGNRQLKRAMFLSAFAALHDPASRTYYDRCRARGKTHTQALLRLARHRISVLFAMLRDGTFYEPRTPRTA

SEQ ID NO: 142433 - protein, 363 aa, unidentified
MTVYCGVDFHTRQQLIKWCDTQDGEIKEERLFHDSLDDVRKFYSQFTGEVCIGIEACGYSEWFEQMMQGLGHEVWVGDASKIRRRARSRQKTDRRDAELLIDLLLKDEFPRINRLSFESLEVLRRLRYRHRLVQMRTRMRNSLQAIALGSGIVLKSKLRTKRGRAKLNDLPLSPVLSQQRAGWLEMIEEVEKRITEVEQELEKAAAGDERVRRLRTHPGIGLLTGLALVHTLSPVDRFANSRKVTAYVGLEPREYSSGERKRMGRISKAGSRVLRFLLVEAGIKAMRADTEMKKLYYRVMQRREQARAKVAVARHLLIHAFIMLRDEIDYGEFKLRGAEMRSNARTVHRPNMPDHLIERPAST

SEQ ID NO: 142434 - protein, 348 aa, unidentified
MEYVSIKKQYYCGIDMHAHTMYVCILNKAGKVHLHHEIPTDFERFLKLIKPYQASIAVCVESTFNWYWLADGCKKNNISFFLGHALYIKAIHSNKKKDDRIDARTLAELLRTGFFPLAYAYPREMRETRDLLRRRHYFVELRAASARHIKILLYQQGISDFPENIVKGKELRAVLLNYKLPEAVSLSIQHDIALIDYLEHTIGQLEWRILKSAENHDNYALTLLQTVKGIGDILSLTILYEIHKISRFPTVQKFSSYSRVVKVERSSAGKKTGSKNQKIGNPYLRWAFAQIAMNAQRFYPELKIYTDRLKRKLGNKKAYALLAHKFAVSVYYMLKNKTTFNLNQFIGV

SEQ ID NO: 142435 - protein, 408 aa, unidentified
MRIIGMDIHREFAEVVMMDGAELTHLGRVKMTRDNLAAFAVKLEATDHVVLESTGNTTAVVEILSPHVARVAVANPLQVHLIAKAKTKTDKIDAGVLAKLYGAGFLPEVWTPDEATLARRRQVARRTQLVKHRVRPKAYVQSILHAHLVPRCPHADLFGGKGRTWLGVQQLPDDERVSVERHVAEYDRLSVALKDIERDIAKSALADGNVTRLMTIPGIDMIVAVGVMAAIGRIDRFRSPDALVAYIGLNPSVFQSGDGPARHGRITKRGRSHARFLLVEAAWQTVRSPGPLRAFYERVRGRRGNHIAAVAVARKLAVLVWHLLTKGEDYAWASPALMARKRRSMELAAGMPSERGKKGASADYNLPHRRRADRAGAELSEIAYRRMMEGWRRMSRQKSAGATTEERL

SEQ ID NO: 142436 - protein, 428 aa, unidentified
MTTDRVPCRKFILGGAIMDKIYDNCCGIDVHKKLIVACLRKGNRQEVREFGATTRELLELADWLKTSDCKMVAMESTASYWKPLYNILESSDLNAMVVNARHMKAVPGRKTDVKDAEWIADLLQHGLLQPSYIPDKDQRELRELVRYRKSLVGERTRELNRLQKMLEGANIKLSGTVSDINGKSARSILEYLLTGECIDGEKYDEMYEQKVIAHNLKATKEQIIDDLNGVMTPLQRRMMKELLSHLDELNTHIKNLDDEIDNFMKPEEKQASQAIQDVTGIGNTSAQAIISVIGTDMERFSTDRHISSWAGLCPGDNESAKKRKSGKTRKGNSLLRTTLITCAHAAVKNKKSYFYAQFMRINAHRGKKRAYVAVAHSMLIAIYHILKDGVIFKDLGADYYNQFNKERKINAYLKKLKALGWEAPVVAA

SEQ ID NO: 142437 - protein, 306 aa, unidentified
MIIASDFIGIDVGKYTLEIFAGRELSIANTEAALVDWLAGLNRPELVLFEATGRYDGKLRRALEHAGIAFCRVNPAQARAFARATGQLAKTDKVDAQMLARMAQALRPHPQAAADERRQLLGELARRRDQLVDMRRGELTRQQEMAEPEILTDITAHIELLTSRIADFESRIAALIAASDELAQAQRLLRSIPGIGLVTATTLLAFLPEAGHRSPKTIAALAGLAPFNNDSGLFRGKRSIRGGRPRVRVALYMAALTACRSTGPLGQFFQTLTAAGKPKKLALVAIARKILVIANAVLRDQTPFKT

SEQ ID NO: 142438 - protein, 344 aa, unidentified
MKSTTIAIDLAKSVFEVGISNQPGHVASSHRLSREQIGAFMANQPATTVVMEACSSAHYWGRTFQKLGHEVKLLPPLYVRPYVQRSKTDRADVKGMLEAWRNSAIRVVPVKTESQQQLTSLHRVRSGWIEARTMRINATRGLLREFGFIFPLGASALPGRVQELIEDSDTNLPMPLRELLHLLVLEIGELGKRAKAVEKQLESLATQTPVVDLLRSVPGIGLLTSTALVGFVGEIGRFPSGRHFASYLGLTPREYSSGSRRRLGRISKQGDVYLRTLLIHGARTVLIRAKACSKPDRFQSWALELQKRSGHNKAAIAAANKLARIVWAVWKSGKPFESRSQALT

SEQ ID NO: 142439 - protein, 355 aa, unidentified
MSRDIKYIGMDVHKEATVIAVLNANGNLVMESIVETKASSLLQFIHGLRGELHVTWEEGTWAAWLYDLLKPQVQVLVCDPRRNALLKEGNKSDKVDARKLADLLRTGMLRPVYHGENGLRTLRELGRSYQTISQDLNRVMNRLKALYRGWGIACAGTQVYAPRYREEWLQKIEHAGVRRRAELLYQQLDGLQALRRTLRPELLAESRKHKATKLLRQIPCIGPIRAARLLALMQTPHRFRSKRQLWTYCGLGIETRDSAQYRFVRGQLQRAKKPQQIRGLNRNHNHEMKEIFKGAATRASCGVGPLRDFYVALLDKGMKAEMARLTLARKIAAIALTLWKKEERFDAEQLKTQAA

SEQ ID NO: 142440 - protein, 394 aa, unidentified
MFLVGIDVGKLSHMFCIMDSSNGEILVSPVSFKNNKQGFDFLMDNIKPYPKDKILIGMEDTGHYHFNLLKFLLDSGYTVALINPITTDLTRKMQLNPTKDDNLDTMTICDVLASSPRKKGYRISKINNFEFYEQKRLTREHHDLKEQLNVYANKLQKCIDIVFPEYNSLFRSKYGTVYMKVLKAFGSADSIAHADIRNIRKCFETNRNGRTISLTPEKLKEAAKHSIGFPSKAEVIEIRHLIDLIELIKEQIKDVDIKIEEFSTQLNSPILTIPGISHFSGTSILAELGDLRNYSKASQIIKFAGVSPYKHQSSQYEAQHTAITKKGSRYLRKTLYQVILPVIRYNPVFNKYYHLKLSQGKGHRCAQGHCVRKLLRIIYHLVITNQPFDSTLLK

SEQ ID NO: 142441 - protein, 336 aa, unidentified
MKNTKYFIGLDVHKEKTTYVVKDKIGNIVLQGETATLYSELFEHLESYLKSSVIGLESSTSYYTLYQQFLKNGYSIKVANTIQLRQLITKNDRLDAKRLSEMLRLGTFPCSYIPDEKIQRVRSLVQVRHSIMEEKVRCNARIQAFLDRNGVIMPSYKAFSKKWRLVLMKYMGSGDVSLELRHEYDHFVFLEKKMEQLDQELQGYVGKNWPKEYHNVQSIPGIGPVVACYVIAHILPIERFSSNRKLRRYAGVVPTCKDSGNKTSRGRIPKTSSRRLLRWALIQSANTIGKTNTRLGKYYRLKKKQKKNAGIAKVAVASSLIDVIYKVLITNKPYLV

SEQ ID NO: 142442 - protein, 534 aa, unidentified
MGTRRRRGRGRGTVHRQRRSKALEERVRRVGPERFGILAVDSAKKRFAVLLTDFYGRTLMDVLEVDNTGPALDGLVIELKAQCERHGLKDLVVAIEQTGRYHVPIRQVLRKHWDVQMVHPFATKQLRQPADPGNKTDPTDLQAIVRAIIVGYGTAEPELSPRWADWRLVSREREALVRRRAWVRVRLQMRLEALMPGYPALFGCLWNSPASLALARRYGSAAALLSAGEEAILDCGRQAGSHVQRRTVARVLAWAAEAAPADPGAEISRRLLGDQLELLSLLEAQIGRYERDLAEYLVDTPFVLLLGIPGINVVSAASYGAELGPIEHYLHPTKITGRAGIYPSRYQSDETDLADGPLVGQRNARLRDAIFEIAHNLISHNAYFKAWAELRQKRKWSKQKIHVAVASKFVRISYWMLAGRMPFQHPCLGGRDAILRKLFRFAKEQGLSAGTARSLLLHAMRQLPGGVHAEEARALIEDLPKGTRRRRRSGPVPIGEILPEVIAHLVPGLCIPTQRSQPTPLHPAEDPSPSALER

SEQ ID NO: 142443 - protein, 350 aa, unidentified
MMIIGVDYHPSFQTIAFFVEETGECGEQELNHSDGQAERFYRDLKQRGICVRVGMEATGYSRWFERLLAELGFEVWMGDPAEIKAKRVKKQKFDREDARLLRRLMLEINFPQIWVPGPENRDLRQLLWHRHRLVQMRTRIMNQLQALAMNEGYRWKKKLFSEQGRAQLEKLTLAPWASRRRQELLELLDRMNPTIEELTAAVEREARKRPEALRLMTHPGVGPLTALAYVLIIGTPTRFQRGKQIGTYVGMIPCEASSARKQRLGHISKQGNSLLRFLLVEAAQAAARIQPDWRRRYLHLAMRRHKSIAKVAMGRKLGVRLYWMWRNGCEYSPSLEFGSYVGQLGTGHGV

SEQ ID NO: 142444 - protein, 391 aa, unidentified
MLNDAPLPAQAAIRTDLGAIFVSMELSRRTWLITSLSPGAGEKMSKHSVPASDVPGLLHRFAELKRKAAARSGRDFPIIVIQEAGLDGFWIHRVLQSEGIESHVVDPASILTSRRARRAKTDRIDGETLVRTLMAFKRGEPRVCSMARAPTPQEEDRRRVCRERRILVGERVRHVNRIKGLLFAQGIFGYEPLRKCRRERLEDLRTGDGRPLPVHLKAQIIRELDRLELVLAQLKTVAAERDTLLKTASDEMPSPPAMLVQLKGIGPEIAAVLWSEGLFRRFDNRRQVAAYAGLAPTPWQSGSIDHEQGVSKAGNPRLRTTMVELAWLWLRNQPTSALSLWFHERVQSLSGRMRKTIIVALARKLLVALWRYMTAGVVIEGAVMKPASATI

SEQ ID NO: 142445 - protein, 339 aa, unidentified
MKHVAIDLGGRESQMCVRAGDGTVLKEARVWTRQLPKLVGAMEPCRLILETSAEAFRIADAARASGHEVRVVPATLVKQLGVGARGVKNDRKDARVLSEVSCRIDLPSVHIPSEQARMLKSLCGSRDVLIKSRTMVINNVRGWMRTQLIRIKGGASHTFPARLRKHAEVNVVTLPEFIERQLAVIQTISTQVAEADKQLRMLATESSVCRQLMTTPGVGVVTAVRFVAAIDDVTRFEHAHKVQSYLGLTPGEHSSSERNRMTGITKAGSSEVRRALIQAAWTALRTSNDPMVSWAKQIAARRGKFVAVVALARKLAGILFALWRDGTSYQANRTAVLTS

SEQ ID NO: 142446 - protein, 390 aa, unidentified
MEHSMQKLNDFSRSRIALEPDGTLIAVIEMSLSSWLVAGIVPGVERQPLKKLAVDESALLKLLHRWREEAEKAGRRIGRIAVAFEAGRDGFWLARWLKARSIEAYVIHAASVAVSREHRRAKTDRLDTELLKRAFLGWLRGERDHCKMVAIPSIKNEDAKRPNRERENLVSEQSRIINRMKAALIRLGIRGFNPKLKRAAGRLEDLRTPEGEPIPPNTLAELRRDMERRRLVRDQIRQIEEARLQRLDHAPYDGPHAMVRLLARVIGVGIETADMLVYEVLSRNMRDRRAVARYAGLTGSPDESGRKRREKGLARSGNGRVRRGMIQLAWRFLMHQKDSALAQWFRARTENARGTRKSMIVALARKLLIALWQLVRQGVVPDGVVLRPAQ

SEQ ID NO: 142447 - protein, 368 aa, unidentified
MKKTNTVQAFTSELFKDQKVTIGLDLGDRWSFYCVLDEAGQVILEQKVATTPEAMKQTFGKIPRSVMALETGTHSPWVSRLLSELGHGVIVAHAQKVQLITKSNRKDDRHDARTLARLARIDPALLGPVRHRSVQAQLHLTVIRARAELVSARTALVNAARGLVKSYGQRLPRCGTYQVSEKLAEGLSAELREVLVPLLKEIESLNERIKEYDERMEKIAKDIYPEVGLLKQVKGVGTQIALTYVLTLEDPYRFPKSRQVGCFLGLRPGRRNSGESEPQKGISKEGDRYLRTMLVQGAHYILGPFGEDSDLRRWGLKLAERGGKNAKKRAVVAVARKLAVLLHRLWVGGEVYEPLRNSNSQKAMRKVA

SEQ ID NO: 142448 - protein, 364 aa, unidentified
MNECTHIGLDVHKDTIAVAVLRPGTTEVDERVIPNTPEAVRRLLRRFPDPTLLHACYEAGPTGYDTHRLVTSLGVACDVIAPSLIPRRSGARVKTDRIDARNLARLNRAGELTPVRVPTTAEEAVRDLIRVREEVKSDQRVARQRIRSFLLRHDKRYPGASDKWSQRFEVWARALTFDEPLAQEAFAQLVGAYFVRDAQLTAMARRIEELATQEPFAGPVARLSALRGIGTLSAMTILSETCDFSRFPTAGSYMAFTGLVPSEHSSGTSKHQGSITKTGNRHIRRVLVEAAWAYRHAPAVRGKLKDRLAGQGPDVVAYSWAAQCRLHGTYRKITARKGSHTAVVATARELSGFIWGLMTGNMGV

SEQ ID NO: 142449 - protein, 324 aa, unidentified
MTDSSSSVSLFVGIDVALDELDLARSDSDKLLTVANDAGGIAQIVGMLRSASPTTIVVEATGGLERRLLDALLDAGLPVALVNPAHVRYLAKGLGILAKTDAIDARVLAEFARLASPRLAQKRSENQSELEALVTCRRQLVLIRTEQTNRRGATFSKSAIKSIDAVLKTLARQIQSLDKLIRKLIESDDDMDHLDKLLRTAPGVGPVLSSTLVADLPELGRADRREINALVGVAPFNHDSGRLKGKRAIRGGRASIRSVLYMATVTAIRDNPIIRSFWEKLIKAGKLKMVALVACMRKLLGLLHAMIRDDLTWHELTVVKALDL

SEQ ID NO: 142450 - protein, 423 aa, unidentified
MMKLKYSICCGLDVHKNVIVATIVTTNKDGISEYKQKSFSTINSDIQKFHNWLIENNCYHVCMESTGKYWIPIFNYLENDIDVCLTHPKYVKAIKGKKTDKKDSKWIADLYKFDLVRCSFIPPKDFRQLRELSRYRFKLVCMKSSEKNRIQNCMTVSNVGIASVLSDPFGKTATEIISYLLEHTADSMDEKAVRKLIKKGAKSKSDEIIEAIKGYTIETDQAKKLELARGHLEYLDDMITQTEVELYVRIKPYYEFVEFVSTMPGMTELSSTIVLAETGVDMDIFDDAKHLCSWCGLSPANNESAGKKKSVRIAKAGDYLKPMMVQCALAAIKSKKQPYFAIKYGRIKKRRGHKKAIIAIARMMMVCIYHMVSEKKPFTPTDYEELMNPQNHVERVVLNENNVFAYLESLGYDSSKLVKRNDN

SEQ ID NO: 142451 - protein, 417 aa, unidentified
MIDDVQWFVGIDWATQSHRVCLLDVEGRHVNERDFAHGGAGLTELRDWLLEKTKAAPGQIAVAIETPHGPVVEMLLDHGFLVFAINPKQLDRFRDRFTVAGAKDDSRDARVLGGSLRTDRQAFRRLVVDDPLVIELREWSRIADELQQERTRLSNRVRQQLWRYYPQAIELTDDVADDWFLALWQQVPTPATAAKVSEKTITRILKDHRIRRLDAATVLQTLRQKPLFVAPGTTEAACAHIRTIAARLRLVNQQIKEAHQALDGLCAKLEARESPSGQNREQRDVTILRSWPGIGRIVLATLLTEAAEPLRARDYHALRALAGTAPVTRRSGKQCFVTRRHACNGRLQTAIYHWSRVAIQRDVVARRRYDALRRRGHGHARALRSVGDRLLYALCTTLKRQTTYDPNCQAAQITASL

SEQ ID NO: 142452 - protein, 346 aa, unidentified
MTIVEAARGVTGGVDTHLDVHVAAALDPLGALLGSESFETTTAGYKSLLAWLESFGEVAKVGMEGTGSYGAGLARFLRKADIKVIDVNQPNRAERRRNGKSDPLDAIEAARAALGGRATSISKTKDGPVEAIRVLVVAKRSACQARVKALTQMRHLVITAPDQLRCRFKGLTVVALVSEASRLRSSRSGDPVAAAHKASLSSLAHRIQSLEEEIAELEQRIESLLVVTAPELLARFGVGPDTAAALLVSAGDNPERLHSEAAWAHLCGVAPISASSGKTTRHRLDRGGDRHANSALWRIVMVRIAHDPNTTAYFERKVKEGRSKRDVIRLLKRYVAREMYHYLPRG

SEQ ID NO: 142453 - protein, 375 aa, unidentified
MKDKVRFLGLDVHAETIAVAIAEPDGEVRSLGTIGNRAESIRKLMKKLGPVEQLKACYEAGPTGYVLYWQLAELGVACEVIAPTLVPMKAGDRVKTDRRDAERLARSYRSGDLTAVWVPDEGSEALRDLVRAREAAKQDQLRARHRLNKFLLRSGQRPAVGMKAWTLSYMAWVRQLRFKQVAQESTRLDYLHEVEHMAERVKRLEQAITEAVKLASPALREVIGGLQALRGVAQISAVTIAAELGNISRFEGARQLMGYSGAVPTEDSSGQRTRRGSITKTGNAHLRRIAIEAAWSYRLRPGIGPALRKRQEGVAEEIKEIAWKAQHRLHRRYMRLAAAGKDQRKIITAVGRELLGFIWAIGIKAEAASKLPKAA

SEQ ID NO: 142454 - protein, 341 aa, unidentified
MHPYYCGIDLHARLLYVCIIDNTGLILVHKKIKDDPEALLKLLKPYTGNIVVGVECMHCWYWVADFCKEHTIDFILGHALYMKAIHGGKAKNDKIDSYKIAKLIRGGNFPLAYVYDKDMRATRDLLRRRTKIVRHGADLKAHVANTASQYNLPAHNVNLKNVCDREKMRYYFPDRVVQRSINLNMAILDCYHSELKPLEHYIEQMAKQHNPVHLNILQTINGIGRILALTIIYEIGDINRFSSLQKFASYSRLVKCKAESAGKTYGTQGNKIGNAHLKWAFSEAAVLLLRHNHNANKYLEKLQKRMSKAKALSALAHKLGRCVYYMLKKETVFDEAKFLKS

SEQ ID NO: 142455 - protein, 355 aa, unidentified
MTSTKYIGMDVHKESISSAVRNAAGKIVMECVIETKASMIVQFFDGLRGDLHVTFEEGTSAAWLYDLLKPHVTKLLVCDPRKNASMREGNQSDKIDARRLAELLRLNHLHPVYHGEHGLRSLKELVRSYLTITKDLGRVMSRVKAIYRSWAIPCTGKQVYAPRHRAEWLAKITEPGVRRRAEFYYQQLDALRTVRQEVRRELLAEGKKHQAWKRLCQIPSIGPIRSAVLLGILQTPHRFRTKRQLWTYSGFGIETQSSADHRSVDGQLQRAKKQSSIRGLNRNCNHDLKNLFKGAAIVASSKPGPFQEFYTALLTKGIRPEMAGLTLARKIATIVLIVWKRGACFDAQHLKPQTA

SEQ ID NO: 142456 - protein, 430 aa, unidentified
MKSNTQNAKIEAITEKTLVLGIDVGSETHYARAFDYRGIEYSKKPFKFSNTEAGFVTFKEWILDLKERHEKDKVVPGMEPTGHYWFNLGKFLQDNEMKPVLVNPHHVKKSKELDDNNPTKNDRKDPKVIAGLVREGRYMIPYLPDGVYADLRTASNIRFQLQVELTRIQNRISRWFNIYFPEYKTVYGKPDAKSGMLILKAAPLPEDILTLGIDGVNQIWRDAKLRAVGKARAKTLIEAAEHSVGSKEGAVSARMEIRMLLEDYESRNIRFQEVMTLIEGLVKQIPMAEKLLEVKGVGIKTVSGFLAEVGDISRFNTPKELQKLAGLALVESSSGKHKGETTISRRGRKRLRYLLFEVAMSLVAKNPEFRELHNYYTTRRLNPLKKMQSLMAIAAKLIRVFYAMLTKGVDYDPKKMVSDIKRPAVYLQAA

SEQ ID NO: 142457 - protein, 387 aa, unidentified
MQKPHDESKACLTAFVQDSTLTVVIEMSLRSWLIAGMVPGVNREPRKKIAPNPEVLLLLLYRWRDEAIKAGKEITRIAVAYETGRDGFWLARWLRARGIDAHVIHATSVAVSREHRRAKTDRIDTAMLQRGFLGWLRGERGHCSMAIVPTVAEEDGRCPHRERETLVKQRTSTANRMKSILIQFGVRNFNPVLRKAPEKLESVRTPEGIPLPSNAVAALQRQMQRFRVIKEQIKAIERTRLQRLQRNPAEKFNAMVFLLVRIIGLGIETAEQLVHEILSRNLRDRKAVARYAGLTGSPDESGSKRREKGLSRSGNGRVRKILIQLSWRLLKFQPESDLVRWFKTRTANAQGSRKPMIVALARKLIIALWRYVNTGLVPEGFQLRSAA

SEQ ID NO: 142458 - protein, 326 aa, unidentified
MIIIGVDFHPEFQQIALVDTDTGEMREQRLTHREEAERFYRTLAVAGQRVRVGMEASGYGRWFERFLAQLQLELWIGDAAAIQRKRVRKQKTDRQDAQLILKLMLKDDFPRIWVPSWENRDLRQLLWHRHRMVQARSRIMNQLQAVALNEGLRCKKRLWRSRRPQLESLPLAPWAQRRRHDLLELLDRLNPTIAELSQSVEREVEKCPEAQRLATHPGVGALTAMAFILIIGKAERFPCGKQVASYLGLVPLEDSSGNQRRLGHITKQGSSLLRFLSVEAAQVTVRSLPQWRSRYFHLMMRRGRKIAKVAMARRLAVHLYWMMREG

SEQ ID NO: 142459 - protein, 320 aa, unidentified
MQTPSVALNVGADVGKDDVAMACADKSFAARKIHNQRAALLAFLKDLPAGSRIGMEATGIYHELLAELAHQRGLVVYLLNPKDTRHYAKAMGLRGKTDRVDAELIARMIAHEHEKLHPWIPPTAEQRQIDRLIKRRAKVSSIRAALTKSFKGVNGFAVELKALRERLDQLLAHLDAKVKTLIEASTDRKQDYARLRKIGGVGPVVASSVLNTLERVPFKRADAFVAFTGLDPRPDESGHHCGRRRLSKRGPSELRRLLYLAAMAAAKTKTWKPLYQRYRARGLSTTAALVVLARRIARTAWSMYTHKTAFDPERITKVLT

SEQ ID NO: 142460 - protein, 355 aa, unidentified
MSSEKYIGLDVHQATISVAVMDSEGKVVMESILETKASTLLEFFGGLRGSLFVTFEEGTWAAWLYDLLKPHVTEVLVCNPRKIPLLKHGNKSDKIDARKLAERLRLHDLKPVYHGETGIRMLRELARSYLTVVKDLSRVMNRLKALYRSWAICCAGRDVYYTRHRSQWLEKIPEAGTRRRAEQLYQQLDLLQHLRQQARRELLAESRKHAITAKLRQIPSLGPIRSALAVALIQTPHRFRSKRQLWTYSGLGLETRDSGEYHFVKGQPRKRKKQATIRGLNKDYNHDLKGLFKGAATRASVKPGPFQEFYQRSLAKGIKPTMVRLTLARKIAAITLTLWKKGEDFDINKLNSQAA

SEQ ID NO: 142461 - protein, 376 aa, unidentified
MNNVRFIGLDVHAETIAVAVAEPDGDVRSVGVIPNRPESIRKLMKKLGPAEQLRVCYEAGPTGYVVYWELTALGVTCEVVAPTWVPVKAGDRVKTDRRDALKLARSYRAGDLTAVWVPDAAHEALRDLVRAREAAKKDQLRARHRLGKLLLRHGRRPPTPMKPWTQTSLAWVKTVHFEHAAQEATLVDYLHEVEHMADRITRLERAIDDAVKTAPERMRAVIEALQALRGIAQVSAVTVVAEVGELTRFAKPRQLMGYSGAVASEDSSGDRIRRGAITKTGNAHLRRVVIEAAWAYRYRPAVGPALRKRQASVSQEVKAIAWKAQHRLHARYRHLTAQGKCKQETVTAVGRELLGFIWAIGVQVEAHGRNPQSAAA

SEQ ID NO: 142462 - protein, 448 aa, unidentified
MKKQSSKKNDVVAMPLIYPNAAGIDVGDTMHAVAVPEGRDDVRVKTFGAMTVDVEAIITWLHYCKIETVAMESTGVYWKPLFGMLVREGFEVFLVNSKQARNVSGRKNDEDDALWIQKLHSCGLLKSSYLPDDEQESVRALVRYRRTLTHDCNRFVLRMQKAMEMMNIKLHTIIRDITGKTGTAIVEAIIKGERDPEKFLVFVDRKIRADKEAIVKSLQGNWRAEQLYLLEDCYRNYTHYKERIRGCDAAIEKQLQQYHQQLFPGARIDTSTTSSKQATKNKPKFNTACYFKAILGVDVTAIFGISDISALEILAETGTDMSKWQTHKHFVSWLNLCPNNKISGGKLISSMLMRKRPNVPSQAFRNAANAVQHSDNWLGDYFRRMKAKGGNKYAMVATASKMATIYYKMVLNKAEFNPLDLKTYQQKYKQAKITYLERKLDDLKKEVA

SEQ ID NO: 142463 - protein, 343 aa, unidentified
MKLSRVGVDLAKNVFQLHGVDRHGKVVWRRRLTRKQWLSALMAQADPGCEIGMEACGGAHHWARELQSRGYTVKLIPPQFVKPYVKSNKNDANDAEAICEAMSRPNMRFVTVKSIAQQDIQATHRIRAELMGQRKAKASQIRGLVAEYGLIAPLTLRALRSAIPHWLEDAENGLTDYFRSLLNGLWSDLVLLDDRVLEMDREIERLANSNEVTRRLQQLRGVGPMVATALVATVGTAEQYPKGRQMAAALGLTPRQNSSGGKQRLLGISKRGDAYMRTLLIHGARAVVSQAKHREDRLSRWVTDIATRRHPNVAAVALANKTARMAWAMLRHGTDYDPDFVMS

SEQ ID NO: 142464 - protein, 342 aa, unidentified
MSEDVGFDVSEEETSFCVKDVSGKILARGKVATDPVALFEVLRAHCVCPERIVLETGTLSGWLSRELGKLGIAVEVIDARQAHAVMKLQHNKTDANDAALLAEIARTGFCRPVCVKSEAAQADRILLKARAHLVGQRRATQNTIRGLLGSLGIRFAKGSGKLAGLVREALEGRDELRATIDPLLRAAAALEREIARLDKAVSGRAKDDPAVRLLMTVPGIGPVTALAFAATIGDAERFAKSRTVGAYIGLTSRRWQSGEMDYSGRISKYGDAMLRALLYEAANSLLTVVRKAHPLKDWARRIRKRTSHKKACVALARKLAVILHRMVITGEPFRWPQKEAAA

SEQ ID NO: 142465 - protein, 349 aa, unidentified
MPVRRPVAAAIYGVDLGKTRFDVIASDPAGKPVQRVKLGRDTILRFFEAASPALIGMEACPGAQWLARKLAAMGHTVRIIPAQFVKPFLKSNKNDARDAEAIAEAVVRPTMRFVEIKAEAQVDLQALHRVRDRIVSNRTQLICQMRAFCLEYGIAMRQGAGVFKIDISRVIADESNDLTPMMRAMLKELWDEFALVDTRLAAVTRQIESIAQRLDAARRLMSIPGIGPLGATALLAAVGDGRQFRKARDLAAWLGLVPRQHSTGGKTTLLGISKRGNSYLRRLIIHGARSCVAHLNRERDRLGNWLDQLEQRMHKNKVIVALANKIARMVWAVLTRPGNLYERVDPAHA

SEQ ID NO: 142466 - protein, 347 aa, unidentified
MAMTIVEAGRPITGGVDTHRDVHVAAALDPLGGLLGVESFEATPIGYRSLVSWLSSFGNLTRVGVEGTGAYGAGLARFLRRVGVEVIEVDRPNRQARRHQGKSDGADAVEAARAVLSGRASGVAKTRDGQVEAIRTLLVAKRSARDARIRALNQIRHLSFTGPDELRARLKGLSSAAVAAKAARLRARRGDPVVFATTVSLATLGRRVLALDDETTRIDELLGELVATTAPNLLEIYGVGVDTAAVLLVTAGDNPERLRSEAAFAHLCGVSPVPASSGKVQRNRLNRGGDRQANQALWRIVMTRMSFDPRTRAYVDRRTKEGRSKREVIRILKRYVVREVYRQLPRA

SEQ ID NO: 142467 - protein, 338 aa, unidentified
MTGEKKYCGIDISNLTLDICYANEEGIHQYHQLSNDTMGFKKLLELTNEGCHFVMEYTGVYHMNLIFYLHEKKCAYSVVNGIQIKRYIQMHLERNKSDRKDAQRIYEYGYERQPPLYEMPDSLYFECKSLSNAIDTFTQEITSFSNKIHALKKQPTETKMIQKSYEKVIKNMQKEKKDLEQKLEEKLREWQPELVKKVGSVMSIGKRATALLIIKTQGFAHTDSYQQLISFAGLSPVIYQSGSSIKGKSKICKQGGDELRHTLYMCALNAKENNLACKQLYERLVAKGKNKKLALIAVCNKLLKQVYGVVKNDTIFILNNYIYKLSNLAASFIPIYLI

SEQ ID NO: 142468 - protein, 363 aa, unidentified
MRKSAQAARVPSVVQQPTDSTIGIDLGDRWSRYCMLDAGGTIIEEDRVRTTAEAMAERFGKRAATRIVIEAGTHSPWVSRLLESLGHRVIVANARKVRLIYESDRKNDRLDARMLAKLGRLDVSLLCPVQHRSAEAQADLAVVRSRDALVAARTQLINAVRGMVKAIGGRLPKSTTAAFAPKMTVLIPAELKTAVEPLLKSIRVLSEQIVRYDEQIEHLAEKKYPETRLLRQVKGVGPLIALTYVLTVEDPTRFRRSRQLGSFLGLRPRQRESGDSAPQLGISKCGNNHLRWLLVQAANYTLSRLAPDSRLRRWGLGLAARGGKNGKKRAVVAVARKLAVLLHRLWVNGEVYEPLYGVEPQAA

SEQ ID NO: 142469 - protein, 358 aa, unidentified
MEQLNPFVGVDLHLKTSQITVMDSQGNNQQKVKLSNDKQEIISFFNQLPRSASIAIEATYNWPWLVDTLEDLGFTPKLAHPKKVRIIAESAIKTDDVDSEALAHLDRLNFLPLSYIPSQEDRQLREQLRYRQYLVKIRTALKNRIHSTLAKLGIFHQFSDLFGKAGREFLVNIDMNPAYKTPIIEQLELITLLDKKIDAAEKSVVKEQIAGNPAFSLMRTIPGIGSLSAALLTIEIGPISRFRHYKKLISFGGLCSTISQSANKTRYGHINRDSNPFIRWVLIEAVPKAIKKDAKLAAYYHKIMIKKGKAKAKIAIARKLLIALYFMLKNNESYGLAHNINKTTKKIYRLNPVLTLGA

SEQ ID NO: 142470 - protein, 382 aa, unidentified
MTESQTIPVPDNIKNDRLYIALELSNTKWKIAFGNGFKIRMKTIAARDIEQFKLEVQGSRKHFGMSEDVPVFCCYEAGRDGFWIHRYLCTLGIRNSVVDSSSIEVNRRYRRAKTDRIDANKLLTMLIRYMNGETKLWSVLRVPEKDDEDARRLHRETERLKKERTAHTNRIKSLLALHGVVMGMGIRKSFKKDIEKVVLWNGEHLPSRVKEEMIREYDRYQLIQQQLQALEQEKKQALKSESKSSKKVLTLQNLKGIGSVSSWVLVHEYFGWRVFKNTKEVGAASGLAPTPYDSGGSQSEQGISKSGNRRVRALMVEVGWYWLWHQPQSNLSQWFMARYGQGSKRMRRIGIVALARKLLIALWKYLEQGIMPEGATMKACFD

SEQ ID NO: 142471 - protein, 348 aa, unidentified
MALTIVEDRRAITGGVDTHADSHVAAALDPVGGLLGIEEFPVTPAGYARLLSWLGGYGTVALVGIEGTGSYGAGLARHVTAAGIRVVEADRSDRQDRRRQGKSDPLDAVSAARAAQSGRARGAPKGRGGAVEAIRALMVAKRSARAERTQTVNQARSLLVTGPDDLRARFAGYTVAALVSGMASLRPRPGSTVGYATRIALRELGRRAEFLDGQLGRLDELIIPLVTARAPALLALHGVGPDTAALLLIAAGDHPERLRSEAAWAHLCAAAPIPASSGRVTRHRLNPGGNREANHALWRIVITRMSSHPATRAYVERRTAEGLSKTEIIRCLKRYVAREVYRNLRPAA

SEQ ID NO: 142472 - protein, 432 aa, unidentified
MPATFSIPRTNDLERAMTAVMIGVDPHKATHTAVVIGPAEEPLGELRVRASAGQAEKLVAWAADWPERTWAVEGAAGLGRLLAQQLVAAGERVLDVQPKLASRVRLLQAGDTNKNDPNDALSVAVAALRSKTARPVMAEDYPAVLKVWSKRHRDLARLRNQVACRLHAVLCDLVPGGHPKEISAAQAARILGQITPSGAVELARAELAAEFLEDMRRLDAQLRGTRKKLAAAVKVSGTTLTEVFGVGPVIAGTIIGDVADVSRFPGRDHFASYNGTAPVEVSSGNRKIHGLSLRGNRRVNHAIHMAAITQLRHKHSEGRTYYEKKLAEGKRTKRRSGPSSAKSATPSSPASRPIGSAVQQTNCHPFRYGRWLRMHNGFISDFATIKRDLVLVVGESLYPEIKGQTPGWWSPSRSVTCPVSGPRCPRQATGGR

SEQ ID NO: 142473 - protein, 344 aa, unidentified
MSKQSPDMMTVATVGLDLAKHVFYVHAVDGADQPVLAKMLRRRDVVPFFASLPRYLVGLEACCSAHHWARELAALGHDVRLIPPAYVKPYVKRQKNDAADAAAICEAVTRPSMRFVKPRSIANQAVLMQHKVREMLVGQRTQALNGLRGHLAELGIIAAQGARHARALAEILCKGDASIPQEVRATLLPLAIQLDHLDVQIAEADAAIVKLTKSDPVSNQLMSIPGIGPVAASALSASVGVPSAFSGSREFAAFLGLVPRQNSSGGKPRLDRISKMGNAYLRKLGAHAVLYHRKQHSDALRCWADRLLESKPFKLVAVALANKLARLVFVIMSQNSRYRSVPAQ

SEQ ID NO: 142474 - protein, 470 aa, unidentified
MKKRTAKAKLAKDKKNKKGKPGNPTLCVDAGWEMVNPNAAGIDLGAKEHWVAVGPDRAAQPVRRWGTCTQDLEAMAQWLKQCGITTVAMEATGVYWIPPFQILERCGLTVLLVNARQIKNVTGRKSDVADCQWIQRLHSYGLLGGSFRPADSYCVVRSYLRYRDELVGARSQQTQHMQKALQQMNLQLKQVLSNTSGLSGLAIIEAIVAGERDPVKLAGLAHRRVAASDAQIRKALVGDYRAEHLFVLGIALDLYKTYDAKIAQCDAALARALEALPQRVDPKLKPLPPKAPNKKVDADLRLELYRRFGVDLTAIEGIGPQVALTMLSEVGPDLSRFPTEKHFTSWLGLCPENRISGGKVLSCHTRRVVNRLSDALRLSATALEHSQSALGAYYHRMKAKLGAAEGVTATAHKLARILYRLVKHGEEYVRQGIEAYEKKYQEQQLKRLQKSAAKNGFQLVPLQHVAAVVS

SEQ ID NO: 142475 - protein, 421 aa, unidentified
MQVLFERCAAVDVGKDVIAVAVRVPGDGPDGRATHKRTFKTFYGVLREAARWLTSLGVTHVAMEATGVYSMPVYYALIEHGEFTQVLVCNAGHVKNVPGRKTDFADADWLVHLLECGLLRGSFIPPADIKAARDVIRYRTRVVQSRTSEVQRLGNVLQDAGIKIDSVASSIATKSGRAMIEALIDGERRPRVLADLALGRMRAKIPDLAMALEGRFDDHHALMCRLHLDHIGHLDAMIAKLDAQIEAMMAPFRAERDLLTTIPGIGPLAAAAVLSEIGASVTEYFPDAAHLASWVGICPGNHESAGKRHSGKRRHGNQHLQPVLVETAWAAVRCEGYLRALYHRHVMRWGGYRSPTAKKKAIIVTAHAMLVIIWHVLATGTPYDELGADYFTRRLDPERETRRLIAKLEALGHQVSLQPAS

SEQ ID NO: 142476 - protein, 417 aa, unidentified
MFYLTSLRYVRVRDLKEATTFFIFEDLLTTKIFNMKKVCGLDVHKDSIFCAIYNGENYSGVKEFSTMTPDIYSMGEYLQSEEVEEIALESTGIYWIAVWDLLYEMGFKLTLVNPYLIKQMPGRKSDIKDAQWIATLLHKGMMRGSFVPPPVIQELRVYSRKQGKLKQQVTRVLTGMDSILVKCGMRASSCLSSISTKSFLCIVEALIAGWSDPGYLVSLVYGNRKNKQSGKLKEALTGNLKAYHRQELSWAKQEYEMYQVQISECLSEMRRICDEHFSVMVKLLQTIPGISQIAAMTIIAETGGDMSVFESSDKLVGWAGLRPRNDESAGKYKSTATTKGNKYLRSILVQVSWAASRMKGSFFKDKFQRLAMRKPRKKALIAIARKLLVVIWNVLQYAKEYNPKLVPVQDPVNANGN

SEQ ID NO: 142477 - protein, 315 aa, unidentified
MYQHFIGIDISKDNFAAAQQGKNEVKIFLNNPSGFEEFCTYYQQILAQSLVVLETTGGYELPLIRHLQKKQFAVHRANARKVKYFIRSYGRVAKTDAIDAIGLAQYAFERHSALDIYVENPQKMLVKLVQRRHDLKHMLVQEKNRRQAPDQQELKESFAIIITALELQIQKIESDIDQLLKANPHFNEQKKVLETVDGIGSITAIQLLALLPELGTLNRKKIASLAGLAPHAYESGKKVGHRSVKGGRPQVKSALFMAAMTAARSHSILGEFYQKLVKSGKKKMVALTALMRKILVIANARLRDFSHLNISSQHG

SEQ ID NO: 142478 - protein, 352 aa, unidentified
MDVHKNSVSVGLLEPGSDSPLLDKLSADDESVRRLIARFEAPERVWACYEAGPTGYELARVMRSAGMRCEVIAPSLIPTRPGDRVKTDRRDARRLALLFRAGQLSSVRVPTVPEEAVRDLCRARADMVIDRTRARHRLGKFLLRHGRVWRGGDNWTLKHAAWLDQQRFEEPALNETLAHYQATLSARDAAVDAIEADLWPWCDRAPFADTVHRMAAYRGVTELGGLTFASEVCDWRRFPTAGMFMAFTGLVPSEASSGERTRRGGITHAGNSHLRAQLIEAAWTYQHQPRVGVTIRRRQQGLDPAVIARAWTAQQRLCGKFRRLDARKTNRKIVVTAVARELAGFMWAEMTA

SEQ ID NO: 142479 - protein, 409 aa, unidentified
MEVIHARCAGLDVHKKSVYGCVICCGAAGEKQLEKRSFGTMTADLLSLADWLREHAVTHVVMESTGVYWRPVWAILEGQFALMLVNPHHVKAIPGRKTDAKDCEWIAELLQHGLLRGSFVPPTEIQDLRDLTRYRVELTQAQNRVANRIQKLLQQANVKLSSVASDAMGVSGQQMIEAIIAGEQDPARLADLAQRRLRAKIPELRLALEGRVRDHHRFLLREFLEEWRALVARIQRIEEEINRRMAPFEEAVTLWQSIPGVDRVTACNLVAELGVNMAQFPSAQHLASWAGLCPGNNESAGKRMSGTMRDGNKWLRRTLCQAAWAVTRKKDCYLSAQFRRLAARRGMKRAVMAVAHTILIIAYTMLKTGRSYHELGGNYLEQINRDQLQRYFVKRLQKLGLTVTVAPAA

SEQ ID NO: 142480 - protein, 415 aa, unidentified
MTGNGKRYIGLDVHKHYLIALGVDENLEVVMPVRRVELSNLESWMKKNLTKQDEVVLEMTTNTWQLYDELSEYAGSVTVVHPPHVALITRSQVMTDKIAASILARLLAKGLLVGIWVPPQEVRELRGLVAQRQKMTHLATQAKNRLHAVIQRHHLKPPAGNPFAKTNNDWWQALTLGKLEKMNLQSDLETLQFAEQQAARIEKEMTSIAAEDEEIGRLLHIAGFGVITAVTVYAAIGDIRRFAEAKKLVGYAGLGTRVHDSGMTTRTGKITKAGRRDLRVALVEAAHVVANSHPHWQAELARLQPRLGYNKTIVAIARKLLITVWHVLARKVADRFAEPEKVSEKMLHIAYEVGKEKRAGKSAAQFVRERMDTLGLGSELTSIPWGSKKPIPLPPSTLKGRRCPELVEGSDVPNS

SEQ ID NO: 142481 - protein, 278 aa, unidentified
MKHYTGLDVSVKETSICIVDEMGKICREVKVPSHPDDLIAVLRDPAWILERVGLEAGPLSQWLFEALARAGLPVICIETRHVKAFLKAQPNNTDRNDARGIAQMMRVNLYRPVHVKTLTSQKRRALLTARKLLQGKAIAIENDIRGLLRNFGLKVGNVGAVKFEERIRELVDSMADLQIMEPLLTARRKLRDEFARLHKKVLNIVRNDEVCRLLMTIPGVGPVVSLAFTSTIDIAQRFKNSKAVGPILGLTPKLEESGESKRVGRVSLCDDAMMRTLL

SEQ ID NO: 142482 - protein, 346 aa, unidentified
MRFYNEQHAFYCGVDLHTQRMYLCILDHDGNKLLHRNVRAKPRDFLSAIEGFRDDLVVGAECMFTWYWLADLCLEEKIKFILGHALYMKAIHGGKKKDDKLDSEKIARLMRGGTFPLSYVYPREMRATRDLVRRRMFLVRRRSELLAHVQLTNQQYNHDPFEKMLQYASNRDVLDRFEQPSVRLSVEADLKTVGHYDQLLKQLETNLVRQATLHDPQACRLLRTIPGIGKILSLVLLYEIHTIDRFASVGDFLSYARLVTPKQTSDGKVTGHGGAKIGNVHLKWAFSEAVLWMLRNSDDAKAFLKRKEKKYGKARAMTMLARKIARAVYQMLKRKEPFDAVKFFAS

SEQ ID NO: 142483 - protein, 370 aa, unidentified
MAKRSMFVGMDVHKDSIDISLAEEGRDGEVRHYRGIPGDLEALAKVLKALRAPTRRLRFVYEAGPCGFGIHRYLTANGEDCVVVNPSSMPKRSGDRIKTDRRDGDALARLHRAGELTAIYIPTDDDEALRDLVRAREDAVGLSTQAKHRLKAFLLRQGRRYPGCAGWTQPYRRWLADLSFPLAPQHIALQEYRDTIDETERRVERLTDQLRMHTPAWRWAPVVDALQALRGVSFVTAVGLVAEIGDIRRFDHPRQLMAFLGLVPSEYSSGPSVRRGGITKAGNPHARRLLAEAAWAYQGVPRIGRQMLYRQEALSKGVCDIAWKAQLRLTSRFRKLVARGKAKPKVATAVARELTGFIWAIAREVPAPRA

SEQ ID NO: 142484 - protein, 321 aa, unidentified
MTYIGIDVSKDSFVVAYSPEKNSRTRTFKNTTKGIHEFIQTISKDEHHCVMEATGNYSALLVYLLSGAGITTSLENPLKVKNFARAMLSTVKTDEIDARLIALYGEKMQPAPYKLRSDAILTLKQKRTVIRQLKKQLIATRNLKGSMEVLPFFDAKCKKSIERTIAFLEKQVKDLEEDLSSLARSEYKKQMDLLTSVKGIGVTLAAALIMATGGFTYFDNAKQLTRHLGLSPTYQQSGTSVNFKGHINRNGDSSLRSQLYVAAFASLRCNTECKACYDRLRSNGKPGKVAVIAVANKLIRQAFAVVTQEKPYVDGYVSPKK

SEQ ID NO: 142485 - protein, 300 aa, unidentified
MNFYTKQHKYYCGIDLHPKNMYLCIINQDGDILVHKNLNTDPRSFYNCISPFLPDIAVTVECVFTWYWLSDFCFKYDVPFVLGHALYMKAVDGAKSKNDKIDSKRIPFLFRGGVIPMAYVYPEKMRATRDLLRRRMYFKHKRSELLAHIQNTKYQYNLPDFKKNIAYKGNRDGIEELFPDPSVKKSIECDLELLNSYDKTITPFELFITNYAKEHNPNDLYLLQSIPGVGKILALVLLYEIHDINRFPTVQKFASYARLIKPKRESAGKIYPGGKKKIGNTYLKWAFSEAAILLLRRNPS

SEQ ID NO: 142486 - protein, 340 aa, unidentified
MRLIGCDLHASQQSIAMLDRDTGVVVEKTLTHEDGAVRAFYASIPPPVVVGIEATGSMGWFLRLMEELAIECRVGHPAAIRKAETRRQKHDRRDAALLLQLLAEDRFPAIWMPSTEYRDLRSLLLHRHQWVRMRTRVQNALHAIVLAHGVRRGHTLWNRDGQALLASLPLAPHTAHRRSELQALYQHLAEQADRLDERVKHAADERPRATLLMTHPGVGPVTALATDVFVGDPTRFPDGKALASYVGMIPREYSSGTRQRLGALSKQGNPFLRFLWCEAAAHAVRRDPDLQRFYRRKVAQKGFAKARVAAARKLGIRLWIMLRDQIDYAEFCRRGLARQS

SEQ ID NO: 142487 - protein, 387 aa, unidentified
MISVGIDVSKGKSTVCIMKPCGEILESPFDIGHTADELDSLISLIKSFDEETRVVMEDTGHYHLPVATYLSSHNIFVCCVNALRMKKFCSQSIRRAKTDKIDSIKIASFGITYWNELVKAYPSNVIYDELKFLARQYYQVTGMLVKSKVNFSNLLDQVMPKINDVLSNQGENHKLTEFVSRYIHFQNILDMGEMKFTSDYCKWAKKKGYRLNERKAAEILALAQNGIPTLPNSQSVKIAVSEAVKMIHSIEESRNTILAQMQDLCNTLPEYSVVKEMDCIGDTLAPRIIAEIGDVRRFKNKHSLIAYAGIDAPPYQSGAFHASERHISKRGNSYLRKTGYEIMQSLIKHKPADNAVYDFIQKKRSEGKCGKEAMIAGLKQDPSCLLW

SEQ ID NO: 142488 - protein, 351 aa, unidentified
MPNAMTDSKLSLVSVVGGVDTHADSHTVAVLDQLGRRLGCAVFPASRAGYGALVDWLAGYGRISAVGVEGTGSYGAGLTRWLSARQIAVVEVNRPNRADRRRRGKSDPVDAEQAAAAVLANTATAVPKARTGLVESIRLIHGTRAGAVKARTAARNTFINTVRTSPDAVREALQPLTRARQLKAATGYRPAGDGPLATVKRCLRRLAVRITELTSEIIAADADLDRLTRQLAPDMRSRLGFGPETTAQLLITVGDNRDRIGSEAALAGLCGVSPVQASSGRSRYYRLNRGGDRQANRALHMIILCRLRHHQPTRAYLAGHSIDGKATPHLRRVLKRYLVREVYQLLGDLKT

SEQ ID NO: 142489 - protein, 341 aa, unidentified
MAAIGIDTHKRTLAACALDDVGAVLDERVFDCDVAGFAALAAWVRASASAARIGVEGSASYGAPVARHLAGLGFEVREVPPQLSRRERGRTRRAGKSDPGDALAIARVTLREPDLPPVRLEDRTEELGLLVDTREEVVVAQTRARNRLHAHLVVLLPGYARTAGQLVSRRQLAAIEAALDPLAGTRAELARDLLAEIRTLGRRADELEGRIAVLVAGHPVLGLPGVGPLTAARLIAETGDVRRFRSPDAFAMLAGVAPIPASSGETRRMRLNRGGNRRLNRAMYTIAMSQAWHHPPAMAYLTRKRSAGMSWSEALRCLKHRISRPVFRLLQAGQLGSASAG

SEQ ID NO: 142490 - protein, 343 aa, unidentified
MEKITIIGIDLAKRVFQLHGATAEGQPMLRKKVSRSQLLSFLARQSRAVVAMEACATAHYWGRTIAELGHEVRLIPPVYVKPFVRRQKNDATDAEAIVEAASRPTMRFVTVKTEDQQARSMIFRTRDLLVRQRTQLINALRGHLAEHGIVAAQGIAQVRRLAAALHEAVDTTLPALVRELGEQYLEHIDRLSTEIAGLEQRLRRLSKDDETAVRLQTVPGIGPVTAAAIEAFAPPMTTFRRGRDFAAWLGLVPRQHSSGGKQRLGRTSKMGQRDIRRLLIIGAMGVIRWTIRTGPAEGSWLARMLTRKPRLLVAIALANKMARSVWAMLTRGEDYRGSALVAA

SEQ ID NO: 142491 - protein, 424 aa, unidentified
MKVTYQTCCGVDVHKSFLVATIVKTTGGIEPSYQKKRFSTFNNSILEFKQWLLDNHCHDVCMESTGKYWVPVFNLLEDKINVVIANPKWVKAVKGNKDDTKDSKWIGDLFRLGLVKGSYIPCKKVRILREYTRYRYKLVSCRSSEKNRYQNALTVCNVALDSIVSDIFGKSSTSIIDYLLEQSGTSINHEEIASKLLRSLKSKEDAVIESVEGYQMTDAQKYRMRLVRAHMDYITAEINDVDIMIENMISSNPDFENAVQFLCTIPGVKRDSAITIISETGTDMSQFSSSKRLCCWAGLTPGSNESAGKKKSVRITRAGVYLKPALVQCAHAAVKSDKSPYYKKKYESLVKRRGKKRAIIAIARMILTAIYQMLSTGEQWNPSDLYKIDMPVALVEKQKAKAIKQAKKLLQREGLLPPDEPLAS

SEQ ID NO: 142492 - protein, 391 aa, unidentified
MIYVGIDVAKDKHDCFITNFDGEVLFKAFTITNNLDGFNDLYQKIESVMDDVTKVKVGLEATGHYSYNLLGYLIDKGLPTYVINPLHTNLYRKSLSLRQTKTDKVDARTIASMLMSDVNLKSYSDTSYHNEELKSLTRYRFDKVKERAKLKTSVSRLVCILFPELEKLVPTLHMASVYALLSEFPSAKHVATAHLTRLTNLLSESSKGRYGKDTAITFRDSARASIGSNMPAKSLELKHTIKLIQELDSEIDEIENEIKIIMDEINSPILSIPGINYRMGAMIIAEIGDFNRFDSPDKILAYAGFSPSTYQSGQLDGAYAHMEKRGSRYLRYALYNATKYVCHWDPTFAAYLAKKRAEGKHYNVAISHAVKKLVRVIYHLEKTKQQYIKAA

SEQ ID NO: 142493 - protein, 414 aa, unidentified
MLKIIYPICCGMDVHKNFVVACIASTDNRGVTSYKSKRFSTYSSDLRLCRDWLADNNCKDVCMESTGKYWIPIYNVLEASCNIVLAHPKYVKAIRGKKTDKKDAKWIADIFKHDLVNGSFIPPADIRQLRDLMRYRCKLTAFTTGEKNRAQNCLTVSNFKLDDVFSDVFGKASTGLIDYILAHPDETIDDISRFRTKHLRATNEQILSAIDGDMCVQQAEKLRIIRSHMENLDLCKLNLESVILSLTDKYINELNLVLTVPGIQTFSAIAVISEIGVDMSVFPSSKHLCSWAGLTPQNNESAGKKKTTRISRAGVYIKPLLVQCALCAVRAKAFPEVSKRYNALKKRRGHKKAIIAVARMLLTAIYNILKKKEPYNSELFAHSNNTPPEHRTVSVEEAIFILQRQGYTVTPCAT

SEQ ID NO: 142494 - protein, 310 aa, unidentified
MPRQIVGVDVAKDWIDTQPLGGRPERIAMAQAALAAFAADAARAGALVVFEASGGYDRPLAAALEAAGAAHVRVDPARARAFARASGRRAKTDRIDAAMLAEMGARLDLAETEPLSPARRALKTLAARRRQLVAMRKAERTRLRQVEQGFARASIERMLALLDAEIVALEAETAALVAREPELAAPTALLASAPGVGKVVAATLVAELPELGRRDRRRIAALCGLAPVARDSGRREGGRTIAGGRPVVRAALYIAALQASIRDPGLAAFRNRLEAAGKKPKQAIIAVAHKLLVMLNAMLRTGQPFVPSPP

SEQ ID NO: 142495 - protein, 314 aa, unidentified
MNTSKEINVGVDTGKAQLDIYVRPKDQAFSVANNPAGIRDAIRQLKKIKPTRIVIEATGRLELPFVLQAQKASLMVSVVNPLQMRRFASAAGKLAKTDRLDARIIAHYGEALRPEATELRSENARHISDLLARRSQLLDMATMEKNRLSILPAALHVSLKRHIKQLQAEVERIEKQLDRLVDKTPQWSAKRDLLMSVKGVGKVLSYTLLSDLPELGQLNRKEIAALVGVAPMNKESGSYLGKRRIRGGRAKVRTVLFMAIMSAIQHNPKLKKKYNELKDAGKPPKVALVACMRKLITILNQMVKTGQHWDPELA

SEQ ID NO: 142496 - protein, 420 aa, unidentified
MYNKNIIQKGIFVNRDILVIGIDIGKSTHAAVGTSLESGFTKPYYIKNSRESFEGFERIMEEWKERFDCKDILIGFESTGHYWKPLAYYLKGKGQVLVEVSTNNTKKSKEMMDNSPLKCDRKDSMVIADLVKQGKILTPVLPEGKILSLREIIHTRENLIKERTSILNRLGKIMDITFPERREVIKNVGNKTSLFLLNEAPFPENILRKGLNWLKRRMWEKSRGHYNHLDAEMLYESAKETIGIEEGREGSGYELGSLLPRLEGLNREIEEIESRIEEMLESIEESRYISSVKGIGMMTTAAIISESGGLSRYDRAESVVKVAGLSLYEVSSGKHKGEKRITKRGRSLMRHKLYFAAIQQARKGMPLYSFYKRLIDNGVKKMKALIAVAIKLLKIMFALVRDKREFEWDYKRAKKVSAVA

SEQ ID NO: 142497 - protein, 432 aa, unidentified
MKKLRRNVSGIDIGAKDIFVALEDGPVKSFKTFTEDFKLCAIYLKDNNVKSVAMEATGSYWMILYMILENAGFEVWLVDGRETKQVPGRKTDVKDCQWIQQLHSYGLLNRCFTLEEEMKNLRSYNRIREDHIRSSSMHIQHMQKALIEMNIRLKEVISQIHGASGMKIIKAILAGERDKEKLTSLCSKTILKNKRKEVEKSLEGYYTEAGLFALKQAYDSYQFYQHQISLCDGEIEKQLIKLGGDKKDEDLDTKRKPIRYNRPKVKNLGANLIGLHKGYDPTVIEGMTDYSWLKLTAELGYDLSKWKTEKHFTSWAGLAPGQNNSGKKNKSKKKRNVNQVGQIFKDIALGLINNKNSAIGEFGRRIRSRKGGAVAIKAMARKLAILYWKLFMEGIDYVKESAENYRKKLRERKQKNLRKLAKELNVQIIESQ

SEQ ID NO: 142498 - protein, 408 aa, unidentified
MEPVYVVAGIDVHKKMLAVVVAEVEQQDIRCESQRFGTSASELKRLSDWFTERQVCEVAMESTAQYWRPVWMALEGLFRLHLAQARSTTGARGRKSDFVDATRIVRRLLSGDLTLSYVPDAEQRRWRLLTRSRQQLIRDRVRLQNQVEGLLEEARIKLSSVISDLLGSSGRRMLQAMAAGETDPVKLAALGDVRLHASEEELQDALQGQMHSVHRALLNMHLERLDVLNRQIAALEKEAATSMRPQEEAIRRLCELPGLKPGAAQQIIAEIGPQAAAFASSAKLASWVGVCPGRQESAGQSRSNRSAKGNRAMRSLLSQLAWAASKADGSYFQVLFRRLIPRLGIKKAIWAVAHRLLRVIWKVLHAGVHYIERGPLALNTPARNRRKQQLVRELRRLGYAVELTPITQ

SEQ ID NO: 142499 - protein, 406 aa, unidentified
MELEALHKRVVGLDVHQAQITACALIEEADGTTRIERRQFGAFARDRRELADWIASLHPDEVVMESTGIYWKSPYAALEKVGIRAKVVNARHVKNVPGRKTDVADAHWLAMLSRAGLLRASFVAPALLRELRLIARQRQKLVGQLASEKNRLHKVLSDGGVRLGVVVSDLHGQTARTMVKAIIAGQSPHQILELAGRRLKASREELFDAIQGELSASHCFVLDELMRHIEEIEARIARFDARLLDGLRSEHPALALLQTVPGIDLIGAAMLLVEISTDMDAFGHPDRLASWVGICPGNNESAGKRKSGRARKGNPYVRRLLCEFAHAASHTRSVFKAKFQALLPRRGYKRAIIALAHKLLRTVYFILKRREHYRDSVVDYEALAVQRNAPRWIKALVKHGFLNSAA

SEQ ID NO: 142500 - protein, 376 aa, unidentified
MTAKHTTTKRPDAKRKVAKNLRHPTAASKGPASLEPASKEAHVMEDADDVSGATHGHAPEQPGVYVGIDISMDKLDLATSNHTAILTVDNDQAGIGRILQQLKPMTVKTIVIEATAGYERPLLNALLNADLPVAMVNPRQVRQMANALGKRAKTDAIDAAGLVEFARLASPRLTAKRTAQRVELQAMVVCRRQLIDARTQLSNQRKQAAHAVAAKAHDAVLKTLDKQIDAMDRQIASLIEVHDELRAMSRQLDTVPGIGPVSIAVCLAELPELGQLNSKQIAALVGVAPYNHDSGKMKGQRAISGGRAGVRCTLYMAALSAMRNNPIIRRFAQRLLAAGKKKKVVRVASIRKLVTLLNAMVKENLTWDQLNVVKMS

SEQ ID NO: 142501 - protein, 472 aa, unidentified
MAMRACLSGFARIAARAREPYAPSDWDLAEMANRGSTTRGMVILLEGGAQMKEPEVRIVGFDCAEEEHYAVLLDEDGAFESRLKVVNRRAEIEEALAQLVLAIPSDADLVVVVESKRSHGRLVTDVAKELGIQVWQVNTVALDHFRDVEGQPRKDDEWDAFLAARMVYLRTRGCRLVTETTDEERALSRLTRSYSRLTNDRTQQTLRLRAILLELAPEMLHRLWKGPKPNSKAIMYLLDRWPGFEGLEKAQLRSIEKILHRCRYGDRAPKVAKLLRDMARRISIEGQERSAMTLEMSFLVQQIKVCDASLHKLYGEITRRVENHPVGEKLLEMHGIGPVIAGVLISELLPVARTATEAQSATYSGVTPLSRKSGKTLDTAHLTRGANKRILTALYISSVAAIKNSAIDKAYYNKKLRDYVGHPKPHVAAFIALSRQRHKVIFKLMTTDARYDKEVLIASHLARLEEARGMAA

SEQ ID NO: 142502 - protein, 360 aa, unidentified
MSFNGTSVGLDVHALSVVAHAVDEQTGRVERARLCPDHGEILDWLHRLRGPVRVAYEAGPTGFGLARALADAQIECTVAAPSKLIRPPGDRVKTDARDAAHLTRLLRLGEITAVTVPDADVEAVRDLVRAREDARADLMRVRHRLSKLLLRHGRVYSGGQPWNGVHETWLRRQRFDDSYTMAAFDHDFDAVLTATAARDRLDEQIIAAATSPRWCDQVDRLGCLRGISALTGLALTVEIGDWTRFTGSSIGAYVGLVPTEYSSGSSRVQGSITKAGNAHVRRLLVESAWHHRAAYRNPGPTMRARWAKVDPALKARGHAGNRRLHQQWCRFTERNKSHVVANVAVARQLAGWCWSLATMT

SEQ ID NO: 142503 - protein, 342 aa, unidentified
MKYCGLDMGKKSSHFCIMDDERKILKEGSVRNRVEDISRVFGKHSGMKVCIEASTKTFWMADQLSELGLEPIPVDPGKTKAIGSGLIKNDKLDARVLATLCQANVVARVDHPDAETRHARMVVVSRDGVVRSRSRLMTLVRSLLDSEGYELRHLTAKSFPEAVRGMFSELPEMIQTALTPLLDAIEAMNEQVAVCDKIINERTKGDKVAQLLCTVPGVGPIVASTFISAIRDPKRFDSGRSVGAYLGLVPSLYESGTIHRKGRVTKHGNRQARWALTMAASVMLGVSKQHSSLREWGLRISKKHGRKKAVVAVARKLAGVLWAMWRDERAFRYSGTSMKVAA

SEQ ID NO: 142504 - protein, 340 aa, unidentified
MYYIGLDVHKKTISYCTKRVDGTVQAEGKLDSTRLALDAWLPGLPQPWTGALEATLFTGWIYDYLKPHAHALKVANPAMLQAIAVAKKKNDQVDARMIADLLRCNLLPECYMAPSEFRERRRTLRYRNLLVRQNVQMKNRTAGLLMETGVAYNKQKLHGKAYFAQLRKSPEVPECIQPLLKIGRESIERIAKLDRALMKALKSDPLLVARVERLLTIPCVGEVTALTWVLEVGEVSRFSSVKDAVSYCGLCSAERSSAGVQKRMPISKQRNKHLQTVLIEAAKLSQHFNDDLTAVHEKALAKGNKNRATIAVARKIAAYLLAVDRREKPFLEGEESADAA

SEQ ID NO: 142505 - protein, 351 aa, unidentified
MPHKLNSAIAVIGIDIGKNSFHVVGHDKRGAIMLRQKWSCGQVEARLANLPPCLIGMEACVGAHHLSRKLQMLGHDARLMPAKYVRPYSKGQKNDFRDAEAITEAVQRPTMKFVATKTAEQLDLQALHRVRERLVSQRTGIINQIRAFLLERGVAVRQGLRFLRNELPHILAAPCDALSPRMLRVIEDLAGDWRRLDERIEGLSSEIEARARQDKGCERLMTVPGIGPIISSAMVAAIGTGDAFSKGRDFGAWLGLVPKQISTGDRTILGSISKRGNRYLRALFVQAAWVVLVKVGPKHWARYGLRSWIEAAKKRLHHNVLAIALANKLARIAWSVLAHGRTFEASKIQAA

SEQ ID NO: 142506 - protein, 354 aa, unidentified
MNSLRYVGMDVHRDTISVAVLDESGRLMMQSVLATRAGAILDFIHGVRGTVQVTFEEGTHSAWLYDVLVRRVAKLVVCNPRKNALLKSGSKSDAIDARKLAELLRAGMLSPVYHGETSALEVQQMARSYSQLTEDTTRVMARLKAVFRGQAVSCVGKRLYGKRHRDEYLEQLSGGVRRRAQHLYQELDALQPLRHGVRRELIVECRKHAAAQWLQSVPFLGPIRAALLLGRVQTPHRFRTKRQFWSYCGLGLETRDSGEYRVVNGRVERRRKPALIRGLNWNHNHEMKNLFKSTATAASVRQGVWHEFYLGLLAKGMRPEMARLTLARKIAAITLKIWKKGERFEAEHLQLQAA

SEQ ID NO: 142507 - protein, 339 aa, unidentified
MELHCGLDLHSNNTYVGIIDQSGKRVVRTKLKNKPEHIIRFLDPYKEDLASIVVESTYNWYWVVDLLMDENYKVHLANPSAIQKYSGLKHSDDIDDAFWLAEMRRLGILPEGYIYPKAERPIRDLLRKRGHLVKLRTSLITSLQNVISRNCGIKLSASDIKAAQEDRVAPFLADQDELALAGSISKDAIDFLGSKIRYIETEVKNRIRLQEPYTLLRTMPGVGNILSLTIMLETGPINRFLKVGDYVSYCRKVPSQWTSNGKKKGKGNQKNGNRYLAWAFSEASELSRRTDANAKAYYNRKKQKSNLMVAHAALAHKLARAAYYIMRDQVPFMPEKLFR

SEQ ID NO: 142508 - protein, 348 aa, unidentified
MENISRIGMDTSKSIFVLHGVDASDQVVVRKKLRRKEVVEFFRKLRPTLIGIEACGASHYWARQLGALGHKVLLIAPQHVKPYVRRNKNDAADAEAICEAMSRPRTWFVPAKTAEQQAGLMLAGTREAFVRRRTQLSNTIRSYAAEFGLVSSRGLDKIEPLLARIAADDDLPTLAKEMFADLGEDYALLQKRLEIIERKLRLWHRNDEQSRRLAEIPGVGVVGAALLAMKVPDPKAFRSGRDFAAWLGLTPKDHSTAGKQRLGVITRAGDETLRSVLVVGATALLRQVRLGRSHHSRWLADLLRRKPPKLVAVALANKTARIAWKLMVSGESYDRTRVGIAAREAAPA

SEQ ID NO: 142509 - protein, 345 aa, unidentified
MDVTTIGLDIAKSVFQVHGVDDAGTVVIRRQLRRSRVLPFFEKLPPCLVGIEACATAHHWAREIAALGHQVKLMPAKYVKAYVKRNKNDAADAEAICEAVTRPTMRFVPIKTPEQQALLMVHRTRQLLVRQRIRLVNAMRAHLAEFGIVAGIGRNGVDRLLKLIEAGDARIPAAARDCLLALRGQLALARQQILEADRRILVHHRESELSRRLEDIPGVGPLIATALVASVPDPHAFKSARDLPAWIGLVPKQSSTGGKERLGHISKAGNRYLRSLLMIGAFSLIKRAKLGKGQHRPWLVDLMARRPIKVAAIALANKIARIAWALMTRGTRYREPQVEPTPQAA

SEQ ID NO: 142510 - protein, 425 aa, unidentified
MDFKQNQKINQVTEQTLVVGIDIAKRTHYACIVDDRGRVLQKSFSVPQAGNGFELFYQRVLAAMKEHEKSEVIVGIEPTGHYWLNLAYFLEERGIPLVMVNPMHVKRSKELDDNLPTKHDRKDALVIARLVKDGRFSYPRILKGMEAELRVGSTFRSKLTEELGAVKNMIIRWLDRYFPEFVQVFPPFGKMALAALECTPFPSDLYQKQPDEVLSLFRKVEGLKSPQRPKTVRLIEVAAGSIGVTEGLEMARIEIATLVRRYYQLEQDIESITGQLIELVKTSAEYEWLSTVPGLGDTTIVDLLAEIGSFSHYQDPRQLIKLAGLTLRENSSGLHKGQKRISKRGRRKLRALLFRVMMPMIRHNEAFRKLHEYYTNRQVNPLRKKQSIVVLCGKLLKVLHGISTKHKTFDAQRMMRDIPSLAEAE

SEQ ID NO: 142511 - protein, 341 aa, unidentified
MDHATLVGIDLGKHSFHVHGQDSKGKAVFRRKLGRKQLIEFFATCATCTIVMEACAGAHFMARKLATFGHEVKLISPQFVRPFVKSNKNDFVDAEAICEAASRPAMRFVTPKTESQQTLSVLHRVRESMVRDRTRTINQMHGFLLEFGVSLPVGKTGVVRLPELLSFHSLPPRLVAILQRLHEHFKYLQQQISEIDRDLARQLADDDVGQRLMSIPGIGPITASVLASEMGDGKQFRCSRDFAASLGLVPRQYSTGGRSNLLGISRRGDKHIRSLLVQCARAYMRCLEKRNGHLADWTRTLLTRCHSNVVACALANKLARTAWAIVARHTTFDPGPATAKA

SEQ ID NO: 142512 - protein, 387 aa, unidentified
MTVQSQVPTFIPRQYEIFAGLDVDKHSIAVTFTDHTRLLKSLRLPYSSEQLLNYTRKHFPDRRLAFVYEAGPTGFGLYDDLRASGHPCLVVAPSMVPTAPGQRVKTNRLDSKKLSEGLRGGQLRSIHVPSPTYRQLRHLVQLRDTHVRQLTATKCRIKALLLYEGIAFPEAPAGGQWSARVLRQLEALPCAEAVRFKVNHLIGTLHFHFLSAAAVQKQIRRFCQNDPELRQVIGLLTSLPGVGWIVAAHLIARLGDWREITSVRQIAAFLGLVSSEHSTGDQENRGAITRSGDSRLRNKLIQGAWTTIGKDPELRAFYRRIYQRHPKKLAARKAIVAVARKLTTRIYAVLKQQRPFVLRPDSSSAPLTAEETAGPRGRLDAAQNEQK

SEQ ID NO: 142513 - protein, 415 aa, unidentified
MARRELYVGIDVASRKVDVCFIDKEARTVRPRASYDNDPQGWTELRVAIVSASSLCGTRPRIVCGMEATGNMHKRLEEALRKEKRRTLEVHVLHPRAVKHFARALNTSAKTDRIDAEVIAQFLLRLQPQEKAAPLEGLEELREVTRMRRKLIEERTTFKNRLHKLLRYHFPGYKKLVGKRVSTRLLVILESMPSPDLMLAHRTDQIAQIKHGAHHVIGTTFSEHLRQLATQAPATSLRKSTRLLLQSTAKRVRELTTHIAELDGIIEELLDEVFPNEVLTSIPGLGKVSTAAILAEVGDISRFTTKGQFVGYCGLYPIVWQSGEATRRYRMTFKGNRMLKMTLLVASAAARQYNPIVATYYERLRKQGKSTKAAGGAIARKLAVIVYALLVSHQPWSNEKAHRGLCKGQAMAEAV

SEQ ID NO: 142514 - protein, 342 aa, unidentified
MMSAIGIDTHKATLVACAIDDLGTAVDETQFRNDQVGHDKLAAWAGRVAPGATIGIEGSSTFGAALARRLVAAGRAVCDVPPHLTRQGRSATRRAGKSDPGDALAIARVTARETGLPPVRLDDRTRQLGLLVEAREALVHEATRNRNRLHAHLLVLVPGYGERIGQLVSGAALGRASRLLRGMPGLEAELARDLIAELRRLDGRITRLTSRLTPLVGADPLLGMPGIGVLTAARLIAETGDVRRFSSPDAFAALAGLAPIPASSGQIQRVRLSRGGNRQLNRAFYSIALTQVWHHPPAKAYVAAKRAEGKSWREAIRCLKRKLVRAVFRLLQEGQLGLEQAA

SEQ ID NO: 142515 - protein, 399 aa, unidentified
MTAEYSITLGLDVGKTAHHGCALTPEGQRVYDQELPQDETALRKVITDLQQHGPVLVVVDQPNTIGALPIAVARDLGADVAYLPGLAMRKAADLYPGRSKTDARDAFIIADTARTMPHTLRAVDRNSEVLSALKVLSGFDEDLARESTRAINRLRSLLVQIYPSLERVFPGVVLTRAIVLDLLIRYHGPAGLKAAGKAGVKRWARHHSRKDPGPLIDQVFAALSEQTVTVPGADAVELIIPRVAAQIKELKHQRDIVAEEVEKLVDDFPLSTVLTSMPGVGVKTAAQILLAAGDLSAFPTPGHLAAYAGIAPVTRRSGTSIRGEFPARAGNKKLKNALFRSAWVASCHDPVSKAYYERKRAEGKRHNAAIMCLARRRLNVMYAMMKTGTLYEPRTPTAA

SEQ ID NO: 142516 - protein, 526 aa, unidentified
MSKRKVGGRRKSAPAARPRLSLVQQVRSVPPDQLGILAVDPAKDHSSVCLGNVRAEVLVAPFDVPHRKSALEGLVETMRAACPRHGLQTLVVAIERTGTYYHTIRDALKPHWKIFMVHPSVTKQFRQAIDPGYKTDPTDLFAAVRAAVVGYARPEAELPEPYAAGRLVSRERENLVGHRAGHRVYIQEQLHALLPGFADQFSELWDSAFARWLIRHFASAAALWAVGHDELRRRLRADGLAPREKTLAKLLIWAADAPDTVPHAELRHAHLCTQLGLLEGVESAIRGLEAHLADFLVQTPGVLLLSARGIGIVNAARYTAELGPVTDYANPKQITGRAGLFPSRYQSAETDRADGPLVTRRNARLRDALIQVAHDLLLCNPYVQAWTEVRVKARGWRIKKTHIAVANKFARISFAMLHERRLFRHPLLGGPDAILRKLFGFAKAHDLSPETADELLRRARTQIPRDGLLHEAEAIRQSLPRRPRRGGPPRLIGDILPEVLADIVADFPPDQQRSFGTFDNSGRAPN

SEQ ID NO: 142517 - protein, 428 aa, unidentified
MYAQFTTVPLYVAIDIGKNVHCFGGFEGAECRPCGEPEMVHSTQRGYRQFCAWLSAQVASGRYDPIVVGMEPTGIYHEHWAYALAQDFGGQIELRFLNPYQTKNRRKQVTNSRRRKSDALDVEAIAQCLRDNLAHPARLPQDASFGFGTWAASFRRAHSQKQRLHNTLLSELDRLWPGALVNVRAFRKAHPDMAEPKPLVLSHPLQRRIVQILIEFAPDPSQWLSWTLEDVCRFFHSHNLRCGPVTAARLQHVAEEAVLLPKSIASNLIEYLQIDWCRYQRLVEEVERLRQLIKDLVPGTPAAVLTTVPGIGAFLAGAYMAYVVDPARFQRADQIWSLAGFDPRQEESGDWSRLGKITRRGNPGLRNILYAIGFETSKHCPAIRRSKEQALQRGKGPVGSTLHAAHRANRMCFRLLRDQVPYDAERMR

SEQ ID NO: 142518 - protein, 379 aa, unidentified
MVCVGIDVAKDKHDCCILDSDGTIRADCITIPNNMDGFKQLLQTIRDCTKKSDKIKVGLEATGHYSYNILGFLLDNDLAVYVMNPLHTNLYRKSLSLRKTKTDRVDARTIATMLLSDVDLKSYTDTAYHNEELKSLTRYRFDKVRERAKLKQSVSRLVTILFPELEKLVPSLHIASVYALLSEYPGAKQISEIHLTKLTNLLATASKGRYGKDKAIQIRDAARTSIGSVMPAKFLELKHTIKLIRELTSEIDEIEVSIQKIMDELNPPILSIPGVGIQSAAMILAEIGDFSNFESPDKILAYAGCSPSTYQSGKLTNCYAHMEKRGSRYLRYALYNATKYVCHWNPVFAECGRHSVFSADCVPPLWACHLRRYATSCAW

SEQ ID NO: 142519 - protein, 409 aa, unidentified
MKLYVGIDVSSRDLATCIMDHEGNTCARFKVDNHLLGATFLRDQILLWANKRKPTEILIGMKATSVYSWHPAMFFHQQEALQAWNVKVFTINPKLIRKFKEAYVDLEKTDDIDAWIIADRLRFGRLKMTDVLKEQFLALQRLTRMRYHLVHQLTREKQYFLQHLFYKCSSFTQEVDSSIFGHAILELLLESWSLDDICQMDVKQLADFLRQKGRNRFADPECIAKSIQKAARSSYRLSKCVEDSIDLLLGLSIQSIRSLQSQLKELDKAITRHLEGIPNTLQTIPGNGPVYTAGILAEIGQIERFHNQATLAKYAILTWSKHQSGRFQAEVTSLIRSGNRYLRYYLVEAANSVQRHDATFRAYYRKKYEEVPKHQHKRALVLTARKLVRVIDALLRNGQIYTPRKGEDR

SEQ ID NO: 142520 - protein, 343 aa, unidentified
MQTVRTIGFDIAKSVFQVHGVDAGGQVIIRRQLKRRQVLAFFQKLPPCLVGIEACASSHHWSRELQALGHTVRLMPPAYVKPYVKRQKNDVADAEAICEAVTRANMRFVPTKTPEQQSCLMLHRTRHMFIRQQTAVVNSIRAHLAEFGIVAPVGRKGVTELLHVVADPNDKRVPEVARACLTALGAQLLSLKEQILEFDRLIMDWYRSNQTSKRLHCIPGVGPMLATALVASVVDPRTFRSGRNFSAWIGLVPKQHSSGGKDRLGSISKQGDRYLRSLFVAGALAVIRYAKIHGTGHRPWLTALLARRPTKVAAIALANKIARMAWAMMAKGERYKQPVALAA

SEQ ID NO: 142521 - protein, 418 aa, unidentified
MHNYSKTLFVGADVALDSVAICFLDYMGNKLSPKRLVYPNNLPGSQELAEQIAKTMHRHDLDAIMFGIEATSFLGWHLEIVILQSPILWKYKPSVFCFNQAQVKSHKKALGIYPKSDPIDAFAVADRLRCGKLPKPAAFNFPYIALQRLTRLRFHLADYMAREKNIFLSVLFLKFSSLRQSDIFSNTFGVASLAIINDFLTVDELAARPLPDLIDFLMDKGKSHFDDPATIAKELKDAAAKAYRLHSDLQKPVNFALKTTTDNIRFYTKQMKIVDEQIKKQITSFDNPLRSVKGIGPVFSAGLIAEIGDIARFKDNNALAKYAGLTWQFSKSGRNQRADDTSITRSGDAYLRYYLIESANLVRQLVPEYIDYYQQKYNESKTHKHRRALVFTARKLVRLVFALLRDNKNYSPNFRRCS

SEQ ID NO: 142522 - protein, 405 aa, unidentified
MVRVFVGHDWAEAHHDVHVEDETGKRLAAVRLPEGVEGVRRFHELVAGFVTDPGAVTIATETDRGLFVGAMVAAGYRVLAVNPMSTSRYRERHSTSGAKSDPGDAFVLAELARVDGHNHRPVAGDSELAEALKVLARAHQSMIWTRQRQSNQLRSTLREFYPGALDAFEDLVSGDARSVLALAPTPTLGRGLSRSKIASALRRGGRQRRVDARALEIQAALRVPQLEAPALVADAMGASVRALVAVISELSTQIAALEAGLAEHFEVHPDAKIIRSLPGLGMILSARVLAEFGDDPNRYANAKCRKNYAGTSPITRASGTRRVVLARYARNKRLADATDQWAFCAITASPGARTFYDQHRAAGDTHHRALRALANRLVGILHGCLHHATLYDEHTAWGHRLTAAA

SEQ ID NO: 142523 - protein, 348 aa, unidentified
MLYIGLDVHCKWVTIAVFNPATGEVIEHSRVGNDADTLSALLGQMQGPLHGIMESGINAWAIYRELRPLFETLTIAEPAKLWDRRRDRKAKTDRSDALRMAQMLYRGEVEGLYIPDEHTQDLRVLVRSKVRISRWVTRLTNEIGSLLKSWGYVGHRRLLTKGGRLDLDQAELPARSARVMQLWRELLEKAREIEDELQAAIEQEAAGDSDCALLESIPGVGAFTALLVKAEIGDIRRFKHSSQLISYAGLAPRVFQSGESRFYGGLGNWGNRWLRYAIGLLAQRTAQSKQDNALRTTYWRVLFRNHTNAAKMSVSRKVVRVIHQMLTHGTAWDNSKAAPRKVAARRQQ

SEQ ID NO: 142524 - protein, 408 aa, unidentified
MKRYYIGVDWGDRLHQVYVGDQDGKKVREVKVQESPEGLAEIGRWLDENRAEGIELWAAIEKPAGRIVDFLLDHGVEVYPVNPKAVDRVRDRYRMSGSKSDAFDAYVLAEFLRTDQAHLRVLRPNSEKAQELKMLSRDQRRVGRHKTRLLNQLTTTLKEYYARPLEAFENLETEIALDFLKQYPTPAHLSALKRKEFNRFATQQHHLSKQRCEQLWEKLNQPQLAVPEHVVRAKAQWVEVLIEQLRASIKAVKIYNHKVESFFASSPAAQFAKTLPGGKSGTLVAAIWAELGDAPGRWQSSRHLQAEAGAVPVTKASGKSRVVHFRFACNKHLRHTMYWFSFVSVNHSEWAKLYYRGQRDKGHSHHQALRALGAKWLKIIFVMWRDHKPYDENYHLANIARQKMRQAA

SEQ ID NO: 142525 - protein, 370 aa, unidentified
MPSITQSAAPCHIPADAAGEVLLGVDTHKDVHAAAVITTLGVTLDGRTFPATAEGYRQLVSWARSFGMLRRAGIECTGSYGAALTRHLRTEGIEVTEVNQPDKAARRRHGKTDAIDAEAAARAVVSGRATATAKTSDGPVEMLRLFKLAKGSAIKSRTQAINQLKSVLVCADAELRESLAGLSNPKLFQQCASLTKSEVFGPAGAARHTLRLLARRIQSLTEEINDLTGRITEAITASTPGLLEVNGVGPDSAATLLIAAGDNPERLGNEASFAALCGTSPIEASSGKTQRRRLNRGGDRQANAALFRIILSRLRWESRTQDYMRRRLAEGKTRREIIRCLKRYVAREIYRIIVPKATLADRTEPARDAA

SEQ ID NO: 142526 - protein, 408 aa, unidentified
MNTLYVGIDVSSKSNVVYLMLPNGDKHSNFSIANSHEGSTQLVKRILSALTSHSLDTVLIGLEATSVYGDNLVYFLREDATLASFNRKIHVLNPKQVKKFHDAYNDLPKNDYVDSFVIADCLRFGRINKEVYLGDYRYKALQNLTRARFFAVQNLVKEKQRFMNVLFKKYSTMTQEKVFSDTFSTTALAVYDEFESAEALANMDLQELTDFIIEKGKNRFPDPDAVAKAIQKAARSSYRLPKTVNDSVNQVLSISITSMKALESQIKEFDKAIKAQMELLPNVLISIPGIGPVYSAGIMAEIGDINRFNSQAALAKYAGLTWKQHQSGGFEAEVTRLIPSGNRFLKYYLCEAAFSLVRCDKEYSDFYHLKYKEVNRCQHKRALALTAHKFVRLVFRLLKDNRLYCPAK

SEQ ID NO: 142527 - protein, 246 aa, unidentified
MLYDGIKGRIKTRNIQNNRHSVENILRWLRLQHCSPEDVHVVMEATGVYHERLATELHDAGFRVSLANPHRSREFARGMGIMTKTDKVDAYMLACYVFLKKPHRWEPPAPEIRYLGALLRRRDVLLGDALREENRLEKYLSTDTPADIISSCRRMAQLLREEVSNIERQIKAHIKASPALRRDYTLLTSIKSVGPQLGMHMLVVLRSHNFVSAEQAAAFLGVVPIEKRSGTSVRSRPRMSKIGPLS

SEQ ID NO: 142528 - protein, 317 aa, unidentified
MERILGIDVSKDYLDLDTLPATEKRRLTNDPAGIAELVEWARAFGPDRIVFESTGHYQKAAVGALLAASLPAVVVNARQVRDFAKALGILAKTDAIDAAVLARFGQVVPTIVRPLPTPEIQAFQELYDRRGQLVRMLAAEKNHRHATTSPKVIQNIDAHIRYLDKQIEALEDRMDHFVQNSAAFKARDEILQSIPGVGPQVSRTLLAYLPELGLGTRQQLSALVGLAPFNDDSGTQSHTRHIRGGRGKVRLGLYQAAVVAIRHCPPMKDFYIRLKERGKASKVALIAVARKLLALANALVRTMKPYNPANSVCLNYA

SEQ ID NO: 142529 - protein, 305 aa, unidentified
MINDSETIFVGIDVSKDTLEVACDDTRKTLTFGNDEAGIQALLAHIKAAPSTGGRVGAVALEATGGFERDAAMALCGAGLPVMVVNPRQARDFAKAMGYLAKTDAIDARVLRHFAQTLYASDRREKLLMRLPDAQQVQLQVLIVRRGQLIQMRVAEDNRRTLSHPTQRKSIDAVRNVLNAQIASIDQDIDAQLKDHFATPLALLDNFKGIGTGAKACLMAALPELGRLNHKEIAKLVGVAPLNCDSGKHKGKRFTWGGRADVRCALYMVALSAARYNPIIKVFYDRLLNKGKPKKWRWWPVCIKS

SEQ ID NO: 142530 - protein, 343 aa, unidentified
MEHYAGLDVSVKETSVCVVDGAGQVVREVKVASEPGAILGVLADEDFSLKRIGLEAGPLSQWLYGALAEADLPVICVETRHMKAALSAQINKSDRNDARGITQMMRVGLYRPVHVKTLASQKQRMLLTSRQLLQAKAHDIESDLRGTLRNFGLKVGPVSRGQFEVRIRELVVDCPDLAAITGPLLIAWRALREQFAVLHRRLLAVVHDDAVCHRLMTMPGVGPVVALTFRATVDVPSRFANSKAVGAVFGLTPRQHQSGEVNRMGYISKCGDAMMRAMLFEAAQVMLTRTTKWSWLKAWGMKVARHRGMKRAIVALARRMAVVMHRMWVDGTEFRWTNFAEAA

SEQ ID NO: 142531 - protein, 353 aa, unidentified
MHYVGLDVHARRSSLCILDSCGKVVKRLEVKGSWPKLMERVAAEVPRPFAVCFEASCGYGHLHERLSALAERVAVAHPGKLRLIFRAKRKNDRVDAEKQAKLLYLDQVPLVHVPGADVRAWRGLIELRRKLVGRRTAVKSQLRALLRGAGCCDAPAGKALWSKRGLKWLAAAALGEADALRRDLLLEELAQADERVGRVTREMDRRADAHPGVALLRTIPGVGPRTAEAFVAYVDDVRRFARTRQVGCYLGLVPCQDSSAGRDRLGHITGDGPPTARMLLCEAAWQAVRRSPSVKSFFERVMHGEPGRKKIALVAVAHKLARSMAAMLRTGEAWREDGREDNREDDRGQNPEA

SEQ ID NO: 142532 - protein, 311 aa, unidentified
MTDHNIGADISKSHLDAFLLEDGAAQRFDNSAMGFRALTKSLGKAPVARIVFESTGPYHKAFEAKLGETFPLVKVNPLQARQFAEAHGTRAKTDAVDARMLARMGVAFDLVPQVPCSKEILVLKDLNVARTGLIKDRTRLRNRAQTQDIAVLKRQTKARLAQVERHVVELDAEIAALIAAGQTPARNCDILCSMPGIGTVTAAAMLTLMPEIGTLERKQVASLAGLAPITRQSGQWQGKAFIGGGRKPLRDAIYVPAVVAMRCNPDLKAKYEQLRAAGKPAKVAIVAVMRKLIEMANALVKADRTWTPKTA

SEQ ID NO: 142533 - protein, 380 aa, unidentified
MDSMTDAPRAIVVGVDSHTDTHDAAVLDDCGRLLGVQTFTADASGYGALLTWAQRLGPVGAIGVESTGSYAAGLVRHLRSEGHEVLEVNQPHPHARRRRGKSDPIDAEMAARHVLAVTSMVVAKDTTGVVEAIRQLRVAREGAIKARSAALNALTGLIVTAPESLRQQLKAPTTTRGQATLCARLRPDHARLAEPAQAAKAALRSIARRVVDLDTEIAELDRQLKQLVARAAPATTSRIAVSTGHAGTLLVCAGQNIDRMRSEAAFAALCGASPIPISTGRTDRHRLNYGGDRDANRALHMIAVCRLRYCTRTRAYAERRTAQGKTKAEIIRCLKRYIAREIYHALVADLRPAPSSRRRPDPIVSITCGAGPIGRTITTA

SEQ ID NO: 142534 - protein, 322 aa, unidentified
MRYIGIDVSKATFVVAYSSDKGGEIRTFNNTTTGIKQFIGALPKDSSIHCVMEATGNYSAMLLYLLNVAGIAVSMENPLKVKNFAKAMLSTIKTDKSDARLITLYGEKMNPRPFKVQGEAILRLRQKRTVIRQLTKQITAMSNLRGSLACLPVPDKGATHTVDETIEFLEKRRDRLQSELTDLVEVEFSRQLALLTTIKGIGITLATALIITTGGFTYFQNAKQVSRYLGICPTYEQSGTSVNIRGHINRNGDAYTRGLLYVAAWTASRFNTKCGETYTRLRQNGKPGKLAMIAVANKLVRQAFAVVTHDKEYVDGFVSNRP

SEQ ID NO: 142535 - protein, 344 aa, unidentified
MDHFAGLDVSVKETSVCIVDDTGRIVREVKVASEPGALLPVLTNPAYRFKRIGLEAGPLSQWLFSALAEAELPVVCVETRHMQAVLKAQINKTDRNDARGIAQMMRVGLYRPVHVKTLRSQKLRMLLTHRKLLQSKAIAIENDLRATLRNFGLKVGMVGKVRFEERIKELVENLPDLAALVEPLLVVRRVLREQIVILHRRLLAIVRDDEVCRRLMTTPGVGPVVALTYRATVDVPARFRKSKAVGAVFGLTCSKYQSGEIDRSGRISRCGDEMMRVMLYEAAQSMLRSKKWSWLKAWAMQIARRRGMKKAIVALARRLAVILHRIWVDGTEFRWTREQATAAA

SEQ ID NO: 142536 - protein, 354 aa, unidentified
MKRTTKYVGLDVHQATTVATVREEGGRVIARSVVPTARPALLEFFGGMRGAIHVALEEGTQAQWLHDLLVPVVDRVLVCDRRGAPKGGNKADQHDADELSHLLRTGGLRAVYHGGTNRAALKELARTYQNLVEDATRVMLRLKALFRARGIPAVGTRVYHPTHRAEWLARLTEPGVRFRAETLYAELDVLAQLRPKAKTAFVAEAQRDPAWRVLRTVPYLGPVRVALVLATLQTPWRFRTKRQLWAYAGLAVVTRSSADYTLVAGRPVRRRRPPLTRGLNRNHNHVAKDVWKGAATAATARPGPLQTLYHEMLARGMRPELARVTLTRKLAALTLRLWKTGEAYDPAKLTVQAR

SEQ ID NO: 142537 - protein, 336 aa, unidentified
MRYIGVDLHTTQITVCYLKAEAEFEIRKYQLVEMEKFVNTLEKTDEIAVEATCNTRWFYEQVASSVRRVVLVNPRQFEVVKNSVKKTDKNDALNLARFLKADLLPEVRAKREEAERVQSLFNTRTKLVRLKTSLINKIHALCVSNGWKLKKASLASEKGLEKVLLCEWSAVERLELEIIIEQIRSLKVSIKKLDTAIEAESGKLQGFESLISMSGIGSLSAGILLAVIGEVKDFATADKLASYFGIVPRVSNSNETVNHGRITKRGSKTGRTTLVQCSLSAIKKNEYLKKYYEQVKARRGHGKAKIALARKYLGIIYNTLSNNWVFADFNNFELAE

SEQ ID NO: 142538 - protein, 315 aa, unidentified
MDALVKVIGIDVSKAKLDCWALPAQEAWGIDNDDGGIAALLTQLRTRAPELVVLEATGGYETQTATALAAAGWRVAVVNPRQVRRFAQALNRLAKTDRIDAQVLAEFGRAVNPQVRPLPDAQTQELAALVARRNQLVQMRTQEKNRLPMTLPPLRPRVKEHVAFLDAAIARLEIDLTAKLRSSEVWCERRDLLLDVPGVGPILTCTLLAQLPELGQLNRQRIAALVGIAPFHDDSGKHQGRRTTWGGRREVRTVLYMATLAARIHNPVIRAFYQRLRGNGKTYKVAMVACMRKLLTILNSMIKHGHAWHYEIKIA

SEQ ID NO: 142539 - protein, 308 aa, unidentified
MAKILKNDTEGFASLIDLLADRGSNKNNSVICLETTGSYSEKICYYLLAKGYSVWSEAPHKISKTFQKQTKNDKVSACQISEYCYRYFDKFKCFEYHDELVEQIRALLVVREQLIKQSTAFNSILHVFKRKYHQTEAANTILINKIEENKESIKMIDKQIVDIINDSDKYGPTASSLKKIPGIGMLFIANIIVITNGFTKEFNYKKLASYIGICPHEFSSGTSVYRKPKSTGYGPARLRKLLYLASMSVRTHNRNFHNYFERKVAEGKNKHLILNNIANKLLRIVCVIIKNGTDYSDNYMSVHPKFLK

SEQ ID NO: 142540 - protein, 395 aa, unidentified
MLAEKEVAAQVSSMDTDPIFIAIEMSRSKWLVGTHLPASAKIGIHVMDWGDTAALFALIDRLKRRVANALGVADAPILCCYEAGYEGFWLYRRLSAAGHRALVIDPASLLVNRRAKRAKTDRIDVKAMIRALIAYTRGEDHVLSAVQIPSVEQDDQRRLMRERQRLVKERTAHTNRIKGLLLTQGIVGFDARADSADRQLDGLVTGDGRRLGPRLKDEIRREIARLRLVMEQLAHVDDERDAIALPKRLSACEDARDQDSADAAMITALARLKGVGPNDASVLVREAFWRKFANRREIAAWSGFAPTPWASGAISRDQGITKAGPASFRAYMIQLTWRWLQWQPQSRLAQWFGERTNGASGRGRRIMIVALARKLLVALWRYVMTGLVPTGAVVA

SEQ ID NO: 142541 - protein, 353 aa, unidentified
MKQFIGCDAHKKFSVFASMDENGVYGRTIRIGHDREVFRRYLRELPAGSEIALETSGCYYWIVDEMEQAGHHPRLAHALTAKRRMEGRHKTNERDARGLAMLLRNGTLPAVWIPPAELRDQREMLRWRMWLSRSRARVKNRVHAVLLRYHMEVDFADLFGDSGRAELLRRITELPPYSAASVIEQLQTVDWLGTQVSECEQKLEEMLYPNEARSVLDSLPCVGKVLSAVLALEIGDVRRFDSAGHLASYAGVVPVARESADWKRKDGCPWDANVYLKWAYVEAANLISIQRKRWAGRHVVQLYERVKQNSKMHGKATMAVARHLAEASFWMLTKQEVYQDPQLRRQALSSTHG

SEQ ID NO: 142542 - protein, 276 aa, unidentified
MDIVGIDISKAKFDAALLLGERIKHAVFSNTEAGFQQLLAWLAKHRPDPTVPLHACMEATGNWGLELADFLHAQCVRVSVVNPARIKAYGESELARNKTDKLDAGLIARFCRAHSPPAWVPAAAHLRELRELVRRCDALRAARVQELNRQKAGFASPAVARSIAAHIGWLDEQIEAVMDEARHLIAADPVLSKNLALVRSITGFGEVSATILLAELPNIADFTPKALAAFVGLSPSDHSSGTSVRKPGKISRIGTERLRSTLYMCALSSTLAIQAA

SEQ ID NO: 142543 - protein, 413 aa, unidentified
METGEKGRIQTRKENIIYVGIDLHKETHTAVMLDCWNQKLGEITFDNKPSEFHKLTRKVSRFLTEEKTVVYGLENAYGYGRALAVWLIEKGYAVKDVNTALSYAQRKSVPMYQKSDSYDAEAVALVLINMLDKLPDAVPEDAYWTLSQLVNRRDNICSHQQRLKNQLHEQLCVAYPSYKQFFGDISRRTALYFWLRYPSPEHLKGKTAEELAAELRPVSHNNCSIKRAERILELVRTDGQTTREHQESRDAITRSIAGDLEHYREQLEIVETAIETMLPSFNCTLMTMPGVDVTTAANMLSEIGDINRFPNANKLAKFAGICPINFSSAGKGKDMCPKQGNRRLQAIFYFLAIQMIQISTNGTPRNKVFRAYYLKRVAEGKNKQQALICIARRLVNIVYGMLKNHTEYREPKQ

SEQ ID NO: 142544 - protein, 438 aa, unidentified
MRVLYEHVAGIDVHKDMIKVAIRSPGAKRWTRTTEILEYRTFYGVLQQMARDLRARGVTHVVMEASGIYTEPVYYALCEQDFTEVAVINPAHARALKGHKTDAKDCARVAELFECGLLRGSYIPPAELKEVRDLTRYRMKTVQARTSEIQRLGKALESAGIKLGSVASEITGVSATAMIESLIDGERRGAVLADLAIGRLRTAGKLADLSMALTGRFTTHHALLCRLHRDRIAIFGDAIAGLDAQIAGKAAPWQREADLLKSVPGFGDVVAQAWLAEIGPAPHLWFSSREKLASWVSLCPGNNISARKRKYGRTGDAGTYIKPMLVQAAWNAIRIRGRLQARYSRLVRRFGGDKNPGAKKKAITAIAHTLLKIAYQVLRTGTPYTDLGADFYTRRESAAQQQAYLERRLQKLHPGCTITITISPPPGGPAEAALPPRR

SEQ ID NO: 142545 - protein, 319 aa, unidentified
MSTKSPVRHVGIDVSKERLDVCSLPEGGTFSVANDRAGIDELLARLLEGVRPELVVLEATGKYERPAAVAVAAAGIAVAVVNPRQARDFAKAAGRLAKTDRIDAEVLARFAGAVGPRPSVLPDEEARVLQDILLRRRQLLEMMVAEKNRLQMASEAVARRIAAHVRWLEKELGRVDRELDEAVRESETWRANEELLRSVPGVGPVLAHTLLAELPELGTLPRRRLCALVGVAPFNRDSGTFRGKRQVWGGRAPVRAALYMGALVATRHNPVIRVFYERLLAAGKPKKVALVACMRKLLSILNAVMRDRVPWHPAHLLTP

SEQ ID NO: 142546 - protein, 347 aa, unidentified
MRFYTKQHQFYCGIDLHTNKMYLCILNDEGKVVLHRNIRTNPDIFLNAIRPFRDDIVVSAECMFFWYWLADLCEDENIPFILGHALYMRAIHGGKSKNDKIDSHKIAALLRGGLIPMAYVYPSKMRATRDLMRRRNHFMRKRAELLAHIQNTASQYNLAPLGRIARPKNRDGVLEHFYDPDVQMSIAADLSMIDIYDQVLAVLEQDIVKSAREHDSVAYSLLKTIPGVGKIIALNLLYEIEDISRFPKVQNFASYCRLVKCAKESNGKKYGSSGKKIGNAHLRWAFSEAAQLFLKSNEPGCKYLQKIASKHGKGKALSILAHKLGRAVYYMLKNKQVFDMNRFLATN

SEQ ID NO: 142547 - protein, 323 aa, unidentified
MGEYIGLDVSLKETALSVRRDGKRVWRGRCDSDPAVIARVLRKHAPEAQRIVFETGPLSVWFYHALRAEGLPAICIDARHAKAALDMAANKTDANDADGLAYLAEVGFFREVRVKGYDSMLVRTLVAARSKLVQMTTELSNQIRGLMKTFGLIGPGAKGGSFEAEVLRLLSGDHGLARVILPLLEAWSAVRRRAAELGRQLLAGARRSQACQRLMAIPGIGAITATAFVTAIEDPTNFRSSRSVAAWFGLTTRRYQSGEVDYDGHISRRGDAHMRGLLYEAATVLLTRSQVDSDLRAWGLKLRERLGFKRAAVAVARKLAVTC

SEQ ID NO: 142548 - protein, 382 aa, unidentified
MSKVIMIGCDLHDRSMLLRYSVGEGAPVQASFFNDLSGRARMIRRMLALAKKVQSERIVFAYEASGQGYGLSDLLDAHGIECYVLSPTHLPKTPKSAKQKTDVKDAQMLLEQLRGFVLAGNPLPVVWTPPQRLRDDRELVRARVDAADEITRIKLQVLSMLKRRGIVKPTWYTARWSKRFMKWLRADIVANLDSVVAVVLENLVDRYEFYHREQLKFDKAIQALATTDRYQVSHQELRKLAGVGLLSAMTFLTEMGDVNRFHNRREVAAYLGLCPSSFESGKANNRKGRITRQGPSRLRKMLCQAAWVSLSHCKESSQTYQRIKQGQSKRTKKALVAVMRLLSIKMWHRAVSCGVSDELWGRGGPHASEATEHPLQRDIAFV

SEQ ID NO: 142549 - protein, 393 aa, unidentified
MTASHNSNDTTSSGILHMGFELGAGNWKLGFTSGHGEKPRLRSLRAGDLAGLTDEIAKAKKRFGLAPDARVVSCYEAGRDGFWLHRYLLTQKIENIIVDSSSIEVNRRKRRAKSDALDAASLVTMLVRYHAGETRVWSVVRVPSVAAEDERQLHRELESLKDERTEHSNRIKGLLVSQGLVLAEVGADFREWLKAARLWDGSFVSADLQLRLLREFVRWQLVDRNIKDLEKERRQRIRNDGLPHVEKVRRLLQLRGIGLNGAWLLIFELFGWRRFRNRKEVGGCAGLTPTPYQSGRSEREQGISKAGNRRLRRLLVELSWCWLQWQPESELAKWYDRRFAAGNARTRKIGIVALARKLLVALWKYLETGEVPAGSQLTTWQAKVGIKAQGVAA

SEQ ID NO: 142550 - protein, 343 aa, unidentified
MQAITTIGFDIAKSVFQVHGVDAAGQVVIRRQLKRRQVTAFFRKLAPCLVGIEACASSHYWSRELQALGHSVRLMPPAYVRPYVKRQKNDMADAEAICEAVTRANMRFVPTKTPEQQSGLMLHRTRHLFMRQQTSVINAIRAHLAEFGIVAAVGRRGVEELLSVVADPSDKRVPELVRACLATLGSQLLSLKKQILDFDRMIMAWHRSHQTSKRLNCIPGVGPLLATALVASVADPKTFRSGRNFSAWIGLVPKQHSSGGRDRLGSISKQGDRYLRGLFVAGALAVIRYAKIHGTKHRPWLTALLARRPTKVAAIALANKLARMAWAMMITGARYNYPASLRP

SEQ ID NO: 142551 - protein, 410 aa, unidentified
MRIIALDVHRSFAQMAILEKGKIRDAGRVDLERSRLLQFATTLKPDDEIVIEATGNTSAIVRLLLPFVGRVIIANPILVRAIAWAKVKTDKIDAAVLAKLHASGFLPEVWMPDEETETRRRVVAERTQLVSQMTRLKNRIHSVLHANLIPPYKGTLFSKRGKAWLVAQPLADDQRRVVLRHVGELERLGGELAQVDRSLAQTALREPRVKRLMTITGINVTVALSIVAAIGDIERFSSPEKLVSYVGLNPRVRQSGDRPAYHGRITKQGRTHARSMLVEAAWVISGVPGPLRAFFMRIRDKRGKHVAAVATARKLAIIVWHMLMKEEDYTWIRPALLQGKLRHLELTAGHPSHRGGKQKGSAAAYSNKAVRDSEREMIGQAEDVYRRFVAAWKQRPPNRCPGAANEVRQT

SEQ ID NO: 142552 - protein, 415 aa, unidentified
MDVVHPRCAGVDISKRDAKVCVRIQGAGRARARSTVTTWEAVTNRILALRDHLIAEEVTLVVMEATSDYWKPFYYLLEDAPFEVMLVNARHTKGIPGRKTDVSDAAWLAELGAHGLVRGSFVPPEPIRQLRDLTRTRTAITRERGREVQRLEKLLEDAGIKLSSVASDITGVSGRAMLEALIAGDRDPARLADLAKRRMRSKIPELTEALTGRFGEHHSFLARLHLDLIDGHSRAIEELDERIEEAMQPFRATRDLIVTIPGISTVVADVIIAETGGDMSRFPSAGHLASWAGTCPGSNESAGRVKSTHTRPGNPYLKGVLGTAAMSVAHSKNTYFAAKFRRIASRRGPVKALVALEHAMLVAIWNMCSTGTYYADPGEDFFTRLHPDRARDRALEQLHRMGYAVTLEPLPAQAG

SEQ ID NO: 142553 - protein, 427 aa, unidentified
MKKADLLSTLFVGIDISSRENVVDVMDFESTKPIASFAVPNNEPGAEEMAKKISTFITPESGLKKLVIGLESTSFYGVHIPNYLSTCRELMPFRTEVYCLNPKSIANYKKSYIGLSKNDYIDAFVIADFARVGRITTKPWRGCQYLALQRLTRHRLHLVKALTREKTYMLSNIFLKFSKFTMLDTEEQPFSNEFGATASAVLTEFLSTEEIVDMSMEKLVEFICEKGRNRFPDPQKTAKLLQVAARNSYRLDKCLYEPLTVAIASSFTMISTYNAEIKKVNQAIEKTIKGLNTNAFLSLQSIPGIGPVMAAGIMAEIGDITVFKSQESLAKYAGLVWRENQSGQFKADDTSMSKAGNSYLRYYFLEATSHIKLHCPEYREYYSKKYAEVKTHQHKRALARTARKAIKLIFGLLAKNQLYSRNRVGQA

SEQ ID NO: 142554 - protein, 339 aa, unidentified
MKYTPVGVDIAKHLIQVHFIDEHTGEVIDKQLRRQDFLMFFCNREPCLIGMEACRGSQHWGRELTKLGHKVRLLQAHFVKAFVMGNKNDVMDARAIWMAVQQPGKDIAVKTEEQQSVLVLHRSRRQLVKFRTMQINSLHGTLLEFGKTIHKGRAAMERELPEALERMKERLPPYLITVLENQYNRLNELDSLIEDIEKKLTSVARQNETCKRLLDIPGVGPLIATAAVATMREASAFKSGREFAAYVGLVPKQTGSGGKIRLLEISKRGNTYLRALFIHSARAAALLPKEPGPWITELKKRRPTSVAIVAMANKLARTVWAIAAHGSKYDKNHVSIKSY

SEQ ID NO: 142555 - protein, 334 aa, unidentified
MDNAPSSSSNLRFSLGIDVGETALELALRDDGETFARTTVPNDPEGRENLVSWLEDRGASPEETCVCMEASGDFQKAVALHLHEEGYRVSVVNPRRIKGYASSQLQRTKTDSADAALIARFGWREDPRPWTPPSAAESRLQELTRARQALKKEKTRAQNRLEEAEDEAVRNAHRELLDEIERQVEELEEEIEGHVQENPELNDQCSLLETIPGIGLQTAAIVTSELGSPERFENARQAAAYAGLVPRHRESGTSVRGNPRMSKVGNGRLRRAMYFPAMTALRFNPAVKAFGDRLKERGKEKMVVIGAAMRKLLHICYGVLKSGRSFDPSLHPGA

SEQ ID NO: 142556 - protein, 389 aa, unidentified
MITIGIDIAKENHYACVLDNQSGEVLVEPFEFKNNKEGFNKLASTIERFKNYLVGFEDTGHYGDNLLFFLLENGFRVGLINPITIEMKRKSKLKTAKNDKLDTMLIAQALVHKDEYRLVDMKTYHLRELKKLTRHHHDIKEDLNVYKNRLQKSIDLVFPEFNSLFGSKYGVTYMRLLECFRSAHTISKTDIRTLRKALEPIGQGRPVSFTAEDLKELAINSIGEKSFSSEFQVKHLVDTIQMMEEQIAEVDAKIKELSDQLNSPITSIPGIGTFSGMSILSEYGDISRFDSAAKLISFAGVAPYVIESGQFEAARTYITKKGNPYLRKTLYQIALPVIRFNPIFHKYYTLKRNQGKSHRCALGHVVRKLLRVIYHLVSNDIIFDETKLI

SEQ ID NO: 142557 - protein, 428 aa, unidentified
MAKAKAQSVIQTDDDTLYYERCAGIDVHKTLLVVCLRIGRKTESREYGTTTGEIREIVKWLKENGCQMVAMESTGSYWKPLYNIFEQESLPAMVVNAYHIKNVPGRKTDWNDAFWIAKCLAQGLLKPSFVPDREQRELRDMTRFRKSQIEERSRNINRLQKFLEGANVKLASWLSDIEGKSATELLELIIGKPDFTVDDVKACMHGNMKSSPEEMFAATEGYITPTQREFFAHVMNIIREQTKLIEVTDGMIKSSLNEEQKEAVKVLDVIPGIGVISAEQIVAETGTDMSHFRNQHAFSNWMGVAPGNNESAGKRKSGKTTYGNKTLKSTLTQCAKSAVKNKRTFFSAQYSRLVSHRGKNRATMAVAHSMAIAIYFVLSGVAFQDLGADYYNQFNREKKINSHIKQLAKLGVAFPDEVLRSAIMEDSA

SEQ ID NO: 142558 - protein, 343 aa, unidentified
MAQQMIIGIDLAKHVFQVCMVTPQGTLKTNTTVARGKLLTLMARQPPALIFMEACGGAHDWARRFCALGHEVRLLAPQYVTPFRRGQKNDPNDALALTEAGQRPNIPTVPIKTIEQQDIQALHRVRERLVKNRTAVVNQVRGLLLEYGIVIPQGIARLRKRLPRVLEEADNGLSFQMRDLLQSLQSELSALDTRITDITGQLARLSHEMEACQRLQEMEGIGPLSATALVAALGNGHDFQTGRQVAAWLGLVPRQHSSGGTTRLGGITKGGNSYVRRLLIHGARSVISHVRDKPDAKSAWIRQLVTRIGVNKACVAVANKMARVAWALLHTGEHYRKPAALSL

SEQ ID NO: 142559 - protein, 451 aa, unidentified
MCLGDRPILEPNAAGIDIGAREIHVAVPPDRDENPVRVFSTFTADLQKMAEWLVSCGITTVAMESTGVYWIPPYDVLEQHGVKPCLVDARGMKNVPGRRTDWHECQWLQFLHSVGLLRSAFRPDGGVCAVRSLMRHRSEQVLMANQHIQHMHKALTQMNVQIHHVISDITGLTGLAIVDAMIQGERDPEALAKLRDPRIRASEETIRKSLEGNWREEHLFTLKQSRESYQHYQEQISTCDEEIERLLLAFEARVDPEQRPLPPDRKRKQRGRKQKNDPKTGFDVRTESYKLFGVDLTQIPGLMAMVLTLFSEIGRDMSRWPTAGHFVSWLALCPDNDISGGQVLWRGVRKVHNRAGDLFRLAAYSLHHDESALGDYLRRMKSKLGPAGATTATAHKIAIILYTMVKNQLEYDPTIWAQRDSERKKRFEAKLQHQAHQLGYKLVPVKEKPAA

SEQ ID NO: 142560 - protein, 402 aa, unidentified
MNAVGIDVSKSKSVVAIMRPFGEIVSTPFEIKHTASDIHSLIELINSVEGESRIVMEHTGRYYEVLAHQLLEANLFVSAINPKLIKDFDNDSLRKVKSDKADAVKIARYALDKWQNLKQYNVMNELRNQLKTMNRQFGFYMKHKTAMKNNLIGILDQTYPGVNTYFDSPARSDGSQKWVDFASTYWHVDCVRKMSLNAFIDHYQNWCKRKKYNFSQSKAEEIYGKAKELVPVLPKDDITKLIIKQAVNQLNSASTTVESLRTLMNETASKLPEYPIVMAMKGVGASLGPQLMAEIGDVSRFTHKGAITAFAGVDPGVNESGSYEQKSVPTSKRGSSDLRKTLFQVMDVLIKTHPQDDPVYQFLDKKRAQGKPYYVYMTAGANKFLRIYYGRVKEYLSSLPES

SEQ ID NO: 142561 - protein, 364 aa, unidentified
MGKTEKLPRICVGVDLHKAQFTVYAINEDTGEVLVRDVFKTDIQGYQAFCERMHGFEDSMECTIELAEEATGNARYFKNKMEVEGFGVIVVNTSKFKVITMSTSKMDKNDAYTLAFYLSKDMLPQSHLCDQTGEEIRRMLKTRSILVSSTVKIKNQIRGMLLGYGIETKSAQLQSQKKRQELLNDLADQGYSQFTASSLKVTLDILDEICEQVKRIESQIKEMTKEDETVELLMTMPGVGFIGATTIAAHTKDIERFEGNFKKIAAYLGIVPSVHNSDKKKRTGKITKHGPQDLRTAFVQVALGIIRQPQNTGNWKLVQDYRTMKVSKGSGRAIIALTRKVARIIFAMLNNRQAFNPELVAKCE

SEQ ID NO: 142562 - protein, 323 aa, unidentified
MNASESTLVDIDVSKDTLEIALDDQSKTQCIANADADIAALVKELVPRSEEIGAIVLEATGGFERQVAAALCAAGLPVMVVNPRQARDFAKSMGYLSKTDAIDARVLSHFARTLHQSAQRERLLMKLPDANQEALEALLVRHNQLIGMRVAEENRLAMSHRSQHKSIKAVIKMLDRQIAAVDKNMAGMLKEHFAEKLALFKGFKGVGPCTQASLMGALPELGQLTHAQIGKLVGVAPLNADSGRHKGKRITWGGRATVRTALYMAALSAIRYNPVIKTFYERLLANGKLKKVALVACMHKMLTIMNAIVKSGIPWNPEHAKCA

SEQ ID NO: 142563 - protein, 380 aa, unidentified
MKKITTAKKNHKALSKTEKKQIWQKASQQRLTVGLDLGDAESCYHILDDVAATVSTGRLLTTKTGLKSLFEKMPSSRVALEVGTHSPWVSRLLAGLGHEVIVANPHKVRLITQSMKKNDRIDAEQLARLARVDPKLLSPIRHRGEVAQADLAVIRARAGLVEARTGLINTARGLVKPFGERLKSCDADQVGEGLQEGLSEAVCTAVEPLLRSVEAVTEQIRVYDGEIEAIAKRYPEVELLRQVYGVGQLIALTFVLTIEDPSRFEHSRDVGPFLGLTPKQGESGDRQPQLGITKAGDQLLRSLLVQGAHCLLRKGAPESDLRIWGMEKMEKGGKNAKRRAIVGVARKLAVLLHRLWVTGEVYDPLYNQKQKGKQAGRAAA

SEQ ID NO: 142564 - protein, 331 aa, unidentified
MDKQYFFIGIDVSKKELVVAVDGRKTTTFKNTKRGVASLHKFAAKLAGSLVPWFVMESSGVYSSVPAIRLYEKHNALVSIINPGRIKAHARAIGFRSKTDSQDAQVILDYAQKTKLHQWKPAPLALRILRQYIDQIRAFKKIIVMTENRMEAHDFEGVEKEITKSDNAIIRFFERQIAKLEMSIKTLVTDDEQLDQQIALLKTIPGIALASACKIMAYTRGEITKRSAKQLTAFAGLAPAHRQSGTSLHGQSRIDKQGCAPLRSTLYMCALSAATHNPELSPLYERLITRKDRPLAKKQAQVAVMRKLLLIARAVLISGKPFDRNYHAAAA

SEQ ID NO: 142565 - protein, 385 aa, unidentified
MSQLNDLSRSLTSLEQDSTIIAVIEMSQSSWLVAGIVPGIERHPLKKLEPSEEDLIRLLMRWRAEATEHGRTITRIAVAFEAGRDGFWLARWLRARDIETYVIHPTSVAVSREHRRAKTDRLDTGLLKRVFIGWLRGEPDHCHMAAIPTLAEEDAKRPNRERERLVRERTRIVNRMKSCLVRFGVRNFKPTLRKAPERLETLQTTEGVPLPPNTLLELRRDMARLRFVIDQIKQVEEARAQRLEQAPQEKSHAMVRLLARVIGVGIETADMLVHEVLARNLRDRRAVARYAGLTGAPDESGSKRREKGLAKAGNARVRRGMIQLAWRFLIFQKDSALAQWYRTRTESAGKKRKTMIVALARKLLIALWRLVTTGEVPAGVILRAA

SEQ ID NO: 142566 - protein, 353 aa, unidentified
MGNLPQFFIGVDLHKTIIQICILDGRGEILKELRYRAADLVSGLKVIGALMQYKAHGRLAVEAIGVNRWFVNSLLDHEFDVVVCDPTKLNLKMLGRKTDRRDALEIARRLMLGDIDRNAVTYYPSDDEYGKRKVIRTRHKLMQTRQGVVNQIRSLLNAYKITGFGESLCTTKSTKMLWNLEMPTPEMGTVIHALVSVMMTLTESIALLQEKQEEMAHLDVRVGNLVDNVPSVGPITASVLVYELGDVTRFKNSKAVANYAGLVPRVSQSADTAHHGRLTKRGNRELRHILGEWAIRLLSWDERAILWAKPRLARSHKNKVRVALARRLLIGVYKTLKTGEDFCMERCLGMQVK

SEQ ID NO: 142567 - protein, 338 aa, unidentified
MKRQYVAIDLHRRRSLIVRDNQDGEELGVVRIENDPVALSAALAEAGPEPEVAIEATYGWYWAVDILQAEGAKIHLVDPLGLNWDSRRVKNDYRDCRELLDRLRLGVLPEAWIAPPEVRELRELVRYRAKLVALRTGLKAQVKSVLAKEGLHPPIDDLWGVGGTRYLDDLELPDAYAIRVDSLRDLVEIYDREVATVERAVHRRLADHAGYQAIQALDGVGRVLGAIFVAEIGDVTRFPNPQTLSSWAGLTPKHRESDMKVHRGGVTKRGSPLVRWAAIEAISHIRGGPKLKADYHRIADRRGVHIARVAVARKLLTLVYYGLRDGEIRCLTQTDEAA

SEQ ID NO: 142568 - protein, 362 aa, unidentified
MNYVGVDIHKKYSVLCAVDERGRKLREARVEGNAPFGFAQFFSGLRGPSKAVVEACWNWGLIHDELEELEGIEEVVLAHPYKTRLIADAQIKTDRLDAYALSTLLRGNLVARAHVPRRETRMRKNLLRQRLYWARLRTMLRNRIHALLDRQRSLELPQCSDIFGVRGLSFLRRLELPETDAALLREQLALHDLIAQQMKAQEKRIGLEFGSEAMHQQLLSVPGIGPTVAAVIACEVDSIERFSSAEKLCAYAGVVPTTHSSGGKTRHGQLLPFCNKWLRWALIEASWVAIGCSPYFGALYKQHRARGKKANSAVLIVARRMCRIIWQLLHEKRDFEKRPLRPNFSFPGCSVVRLTAGTAARP

SEQ ID NO: 142569 - protein, 325 aa, unidentified
MQNQTIVGIDVSSATLDICIMDSKGYHSFIISNDVQSISTFFSKHNQPLIIGMENTGRYNWALYQVLKDMVHSVFVIPPLHLKKSMGLIRGKNDKIDALRIAAFTKKNHTELLQWKPSADTVQKISVLVTERNSRIKSKKQLLNQRYDYDRMKHLGIDKELEMLNNQQLELLEKQIAIIEERIEAVISSDQQMKNQARLIRSIPGVGKVLCWMMLAKTENFTAITEPRKMACYSGVVPFDNQSGTSIRGKHRVSSYADKAIKSVLHLAAMSAIRLKNDLREYYLRKVAQGKNKMSVLNAVRNKIIHRIFAVIKNQSPYQNHLLLS

SEQ ID NO: 142570 - protein, 338 aa, unidentified
MERQYVAIDLHKNRSLIVRDNAAGEELSVLRIDNDPVTLLAAVAEAGKEPEVAIEAAYGWYWAVDLLQEAGAHVHLVHPAGLNWEERRVKNDYRDGRELLDRMHLGKLPEAWISPHDVRELRELVRYRGTLVAQRPSAKAQVKAVLAKHGLHPPVDDLWGPGGTRYLDEVALDEPYAMKVASLRELVTVFNRELALVEAETRRRLADDAGYRAIQVINGVGPILAAIFVAEIGDIGRFESPQHLCSWAGLTPKHRESDEKVWRGRITKKGSTLVRWAAIEAISKIRGGPKIQADYHRIAERRGKNIARVAAARKLLTLVYYGLRDGEIRCLERADEAG

SEQ ID NO: 142571 - protein, 360 aa, unidentified
MKKISTAVVKATKNFSQPKLTIGLDLGDRSSWYCLLDEVGEVLLEQKVSTTPKAMREGFGALPRCRIGLETGTHSPWVSRLLSELGHEVIVAHARNVRLIGESRKKDDRLDARTLARLARIDPQLLCPVKHRSAKAQAELTVIRARAGLVRARTALVNTARGLVKSYGERLRGCNVRNMNPEKAQGLSPELQRALEPLLAAIESLSERIRECNERIEKLAQESYPQVALLKQVKGVGTLIVEDAHRFRKSREVGCYRGLQPGRRNSGQSEPQMHISKEGDPYLRTLLVQGAHHILGPFGADSDLRRWGLKLAERGGKNGKKRAVIATARKLAVLLHRLWVSGEVYEPLRNSHQTALPAAA

SEQ ID NO: 142572 - protein, 355 aa, unidentified
MKYHTSTTEFNCGIDLHARQMYVCVMDRAGKKLVHTNVKNNDFEFFLKLVAPYRHDLTVCAECMFGWYWLADACQAAGLHFVLAHALYLRAIHGGKNKNDRIDSEKITHLLRTNLIPPAYVYPAAKRPLRALLRQRLFYVWRRAELLARIASHQLAHNRAPIKQTRRSRDPWEAQLLAAEDHPLRQLALQNDLAMIRHFDTQIGALEAQLQRQAKQVAARDYALLQTVPGIGEHLGLTILCEIGDIARFPTVKDFLSYSRLVKGTVASAGKIKGLRGAKLGNPYLRWAFGEAAVIAKRDPAVIGPLAQRLEARMGGNKFKANTVLAIKLARAVYYMLRTGTVFDPARLVAALARN

SEQ ID NO: 142573 - protein, 374 aa, unidentified
MQIQSSLPETERHQFLYVGMDIHKDNHTAVATNCFGQNLLQLEMSNCKDDFVNFVAAVKQLSEQNDLIPVFGLEDSYGYGQRLSRYLSGQGFTVKMVPPVMTDQFRRYETHPEKNDSLDALAAAKVLIQRIDTLPVFTLSDQDEIAKEIKELALDREFLIKEQTRLKNQLHRLLHKAWNSNYRERFRDPFALRSLRYWKLHPVPKDVSEIPGDPEILKHQIVRKVRRLLEIREETKEIENELAQLMEQSGQKLTTLNGCGTTLGAQVMAEVRDIDRFHSSSALAKYAGLCPRERSSGKTFKHVKTKAGNRRLNTAIHRIALSQISRSGNQYAKAYFQRKISEGKTKTQSLCCLKRRLVDIIFMMLKYKQPYRAY

SEQ ID NO: 142574 - protein, 334 aa, unidentified
MKNYSLIIGVDISKLTLDVIGIDASNKSILQHQVIDNAKTKIKSFFKKTIIKYGKDKILVAFENTGVYGAFLAYELYTLGMDYCNLSALEVHKSVGIKRGKSDKIDALVIAQYILANGFKLQLSTFTELHLTELKVLHTQREKVIKTIRNFGNNKETQLFLPNKIIKELTKTSTSIIKNLKKNLKLIDLQILKIINSNETLKKDYQLIQSVPGIGPQTATYLLIVTKGFTTFDNARKLACYAGVAPFPYQSGTSIKGRNKVSHLADKKLKSLLNMCALNAKRWDYQLKKYFDDKVRKGKNKMLILNNIRNKLLHRIFAVIKRQQPYVNTHNFAA

SEQ ID NO: 142575 - protein, 451 aa, unidentified
MAKAKKRKHRKLERNLPVMRPNAAGIDIGATEIFVAVPADRDTESVRPFPTFTQDLHELADWLQRCRVDTVAMESTGVYWIPLFQILEGRGIEVHLVNAQHVHHVPGRKSDVMDCQWLQYLHSVGLLRASFRPEQAVCEIRSLMRHRENLVQMACVHVQHMQKSLDQMNLQIHHVISDITGVTGTAIVDAIVAGETNPEELAKLRNYRIKASMETVRKSLVGDYRPEHIFTLKQSLTAYRYYQQLIADCDREIQERIERFQNHADPSAPAESCDKSSLTTNSTFDLGSHLERIFGVDLTLVPGFDVLRIQTVFSELGVDLSGQFPTEDAFSSWLNLSPKDGFSAGRRIRGPKIKTKNRVTQVFRMAAQSLHNSQSYLGHYYRSQRARHGAPKATKNTAHKLARIFFHLVTTHQPYDETVFAKLEARNHQRQFRKLQSLAKQMGYSLVAATT

SEQ ID NO: 142576 - protein, 416 aa, unidentified
MKIVRPICCGMDVHKNIIVATIGITNKKTRITEYIQETFSTLNPDLLNLKQWLINHKCFDACMESTGKYWIPVFNILEDEINIYLTHPKYVKAIKGKKTDKKDSKWICDLFKHDLIKFSFIPPKEIRALREISRYRYKLVGMRSSERNRYQNCMTVSNIGIGSVFSDPFGKSAQAIMKEVLESDIIEDEKILKCIHRSCKNKDKILDSIKHCNIETDQRFKMNESMTHMEELQVHINNCEIEIMKRAAPMFDRFMHITQLPGISTLSAILIISEIGVDMKQFESDKQLACWAGLAPANNESANKKKSVRISKAGQYLKPLLVQCALGAIKDKEGYFGIKYSRIKKRRGHKKAIIAIARMMLVSIYHMILTGETFNPSDYESFRNPNPPIKQQVLTEESAIEFLKKSGFDVSKLAKL

SEQ ID NO: 142577 - protein, 485 aa, unidentified
MNPKHRRCCGIDVHKSSVTVCVLASAGQPQLGVKKRKCRTFTRDLRQLRGWLKNCQVTEIAMEATGQYWRAVWNVLEGEFEKLILVNPQHIKGLNGHKTDPKDAQWIAELLDSGKLRGSWVPPRPIRELRDLTRQRVNVMEDLNRAKNRIEQLCQTGNIKVSSVATDLFGVSGRKMLKAIVAGQHDAGWMADYARGTLRSKKDQLELALEGTFSSEQRWLLDKELRQVEWLESQVEVLEQEIERRVAPFQEPMRRLMTIPGIDRKTAWTIVAEIGVDMSVFGDARHLVSWAGVCPGNRESGGKRLSGRVRKANRYLKRVLCQAAWAASHTKQTYLSAFYRRLCLRKGAPKAVMALAHHILTVVFHILDRGDEYVELGGDYYDRQNKQRTVTRLVKRLMRLGYYVDLQSVQPNPVRTPPPMPVPKQAYEEAEPEPTELSSAPTAGAGKRKRGRPCKCAERGIICKHQTAPPAISLIQNASSPGEFS

SEQ ID NO: 142578 - protein, 343 aa, unidentified
MKISRVGIDLAKNVFQCHGTDRSGKAVWKRRLTRDKWLKTLIDAIEPGCEVGMEACSGAHHWARELQARGYTVKLVPPQFVKPYIKSNKNDANDAEAICEAISRPTMRYVQVKSVYQQDIQAAHRIRSELMTHRKAKANQIRGLVAEYGLVAPQHHRQLCTAVPAWLEDAENGLTDLFRRLLGGLWEDLTRLDKRIGELDKEIVSLARNDPMAQRLQQLRGVGPLIATALVATVGDGTQFKRGRQMAASLGLTPRQASSGGKERLLGISKRGDAYLRSLLIHGARSVILHAKHKEDKLSRWVTALAARRHINVAAVALANKTARMAWVLMTEDKHYEPALAAG

SEQ ID NO: 142579 - protein, 353 aa, unidentified
MDRYVGLDAHAETCTVAVVGPSGRRLTSRVVETNGQALVEAIRSIPGRVHLCLEEGTQSAWLHEILEPEVSEIAVVSPPETRGAKDDLRDAWSRAEELRVGAIRTRVYKAPRHWAGLRSAATTYRMATQDVVRAKNRLKAVLRGRGILADAGVYEGKSRGKWLKELPAAGHRPAAEWLGRELDQLVPLREEAEEWLLKEAKAHPIIKKLSTAPGMGPLRTAQLAAIVITPHRFRTRRQFWSYCGLAIVTRSSSDWMQGQNGKWTRAVVRQTRGLNRKRQPVLKTVFKGAATTVITQLHGHPLHMDYERMLQSGIKPNLAKLTLARRLAGIVLSMWKREEVYDPERHKPVIAKS

SEQ ID NO: 142580 - protein, 330 aa, unidentified
MTVFFGIDVAKERLDCAAVVQGRERPIGQKSFPNTPDGIERAVAWVMKTSKAEILGVHAILEPTAAYHELAARLLAAKGIMVSLVNPAQIRSFARGMAVLSKTDRIDAILLARYGCLARPKVWIPPAAPLVELQALLARLDDLEGDLRREQNRYEQTCVRGGSNAIKRSFITSIKALKAQCKLLQQAIAEHFAVHEDLQADLKRLRTIPAVGPKTAMRMLALLRSHSFETARQAAAFLGLIPVERQSGRSVRGRPRLSKAGNSRLRAALYMAAVVATKVNPDIKAQQQRLLARGKVKMSTLGAAMRKLVHICFGVLKSRDDYRFPIAHQT

SEQ ID NO: 142581 - protein, 343 aa, unidentified
MQTTEAGTLYAGADLHGNNVFLSLIDGGGKEVYRRRVKANLEAVNEVLEPYWPRIEALGVESTFNWYWLVDGLQAQGRDVRLGNPAKMTPYEGIKNTDDHTDARWLAEQLRLGVFPASYIYPRAIRGVRDALRRRQLFVRQRIQAMLSLEGLLVRYGVEAPGTYALKKWTVRDIEATGLEPFVQLQLRTLLGAMHDSARRVKEVETSVKAFIEPLEAFQRIQQVPGIGEILGMTIVLESGDFARFANAGCYASYCRTVQSRRESNGKKKGENNRRNGNPHLAWAFIEAATFAPRFEPQMQSWYDRKKRQRNSIVARKALACKLSKAVWHVMNGKDFDMRMLFG

SEQ ID NO: 142582 - protein, 347 aa, unidentified
MSITMIGLDTAKSVFQVHGVNETGKAEIRRKLRRSELIPFFEKQQACTVVMEACGAAHHWARVLSSLGHEVKLIAPEAARPFVKKGKKNDPADAAALCEAASRPDMMFVPVKTIEQQGILALHSARSLLVKQQTMLANAMRGLASEFGLTVPHGIGKLDELFVLVDADKAFPEKARQVFTGLFGQCSALAAGISAFEAEIVAHARHNETARRLATIPGVGPITASLIAATVVDIGLFKSARHFAAWLGLVPRQYSTGGKTRLGRITKTGNREIRRLLVLGATSMVYRAPQWNSVVGMWTRAILERRPVRLVTVALANKMARIAWALMTRKEVYRAKGRVAAATEAAA

SEQ ID NO: 142583 - protein, 383 aa, unidentified
MTTATPNEHYTAMHATEPVLFLAFELSEKTWKLGFTTGHGQQPRERSIPARHQARLLHEVAQAKRRFGLPETAPVVSCYEAGREGFWLHRFLQAHGITNHVVDSSSIEVNRRKRRAKSDGLDVRKLLTMLIRSHHGERGVWRVVNVPSIEAEDQRHLHRDLETVKQERASTTARIKGLLSSQGIRLTSVNKLPEQLDALRLWDGSPMPSGLRQRLLRVYAHYMFLSEQIAALEAERRARLHSAQDANIEKVRQLMQLKGIGINGAWLLVMEFFSWRELKTRREVGGLAGLTPTPYHSGESTREQGITKSGNRHVRWMSTELAWSWVRYQPDSALSCWFRERFGGGGKRLRRIGIVAVARKLLIALWRFLESGIIPEGAVLKEA

SEQ ID NO: 142584 - protein, 315 aa, unidentified
MAMPVLVSKPIVGVDVAKNELVIYQAELDLLEAIPNTKAAIKQWLKALPETVAIAIEATNIYHLEFADLAYEAGCTIYMVGGYELSHYRKGVKVRAKTDALDAKLLARYLKNEAEELHPWTPPSPLYRQLLSLFRRRAALVQARVGLVQSWANEPLLKTAFAEQVKSMQQLETLVEKTIKDHLKEAGLLGQLKRCLKVEGIGFLTGARLIAAFQRGDFRNANAFIAFLGMDLRVAKSGQKDCRRSLSKRGDPEARRLLHNAAMSASRTATWKGFYEAQRARGFSTTQALVMLARKLARVVFALLNGQSEYQPKTS

SEQ ID NO: 142585 - protein, 311 aa, unidentified
MTDDTIGIDISKATLDIYRLSDGKMTSFSNCCVGFKALALFCKETAVIRIVYEATGAYHSGLERALGAHFPLVKVNPLQARRFAQARGVRAKTDAVDAKMLAVMGDAFALEPSKPISETQYILKELRAFRSGLITDRTRILSRQKTQTLPMTRRQSKARLIQTEKQIVEIDAEIARLIQSSEVMARSMKILRSIPGIGAVCAAAILIEMPEIGGMDRKQVASLTGVAPMTRQSGQWRGKSFIQGGRKVVRDALYMPALVAMRFNPDPKTKYQAMIKAGKPPKVAITALMRKLIELANALIKANRTWVNKTA

SEQ ID NO: 142586 - protein, 467 aa, unidentified
MTVDKKLWRNRKERKEWARRLQSEDRGLEVVHPHAAGIDVGNSAHYVAVRPERDPQPVRRFECFTADLRRLADWLRSCGVKTVAMQSTGVYWIPLYEILEERGFEVYLVNARHTRNLPGRKSDVQESQWLLKLHTYGLLNNSFQPPAEIRALRTYWRQRGEHVAGAATCIQRIQKALTQMNLQLANVISDISGLTGQAIVRAIVAGERDPRKLAQFRDPRIQASEEEIAKSLEGNWRPELLFVLQQELEMYDTYQRRIAECDLQLQKHLASLANNVPPRPPEVEPDGKKRKRAKPAKNAPRFDLSCELQRITGVDLRIDGIDVMIAQTLLSEVGVDMSRWKTEAHFASWLGLCPDNRVSGDKVLRRGTRHVVNRAANALRQAANALIRSRSYLGAQYRRLRTKLGAPKAITAMAHRLARLVYRMLKYGQRYVDKGTEYYEQRYRNQQIQLLRKNATKLGFHITEARA

SEQ ID NO: 142587 - protein, 346 aa, unidentified
MMIIGCDFHPSWQQVSWLDTETGESGEQKLVQASGDAERFYRQVAAPALIGMEATGNSHWLVDLLSELGHELWVGDAAQIRASYVRQQKTDQRDAAHLLKLLVEGRFPRIWMPSSEVRDLRQLLLHRYKLVIIRARVKNELQHLCLNKGVQRKRKLWSAAGQQILRELPLKPWAARRRDDLLKLMAMLDQQIEPLDQAVQEEAQRDKMALLLQTQPGVGPITALAYVLTMGDVSRFPRGKQVASYLGLIPREHSSGGRQKLGAITKQGNRMMRMLLVEAAQIAVRFDPEFRKQYLHRCHSKPKAVAKVAAARKLAVRLYWMLRTQRPYPDIVRIESSPRVPLVGAS

SEQ ID NO: 142588 - protein, 368 aa, unidentified
MTISAVTVIGGVDTHKHTHYAAVVDDHGRLLGHQEFPANDAGYRSLLGWMREHGQIQAIGVESTGSFGATLTRALTRAGQRVVEVNRPNRQARRMDGKSDRLDAEQIARAVLAQTSTAIPKAKSGTVEVIRTLRVTRASAVKARTQAFNTLWGVMIGAPSPLRDDLVNLTKRRLFNKCAGLRPESDDLLSLNNDPDRLLMAAVKTSLRDLARRWKILDEEIKALNRQIDVMVRATAPQLLDLHGVGVEIAGQFLVTAGDNTDRIRNEAAFAKLCGVAPQPASSGRTTGRHRLSRSGDRAANSALYIVTIVRMRHHQPTRDYVERRTAEGLSKREIIRCLKRYITREVFNNLPRSTLIEPRLEIVHAAA

SEQ ID NO: 142589 - protein, 379 aa, unidentified
MFENITYVALDDHKRRHQVAVLLPGMKREEASTWGVENSRAGIRKMVRKVLKMAPGEVRFCYEAGPNGYVLQRQISRFDRVSCVVVAPSKTPRRPGERVKTDRRDARKLVSLFRSGELQSIVPPLEEEEAIRDLCRCRRTAQKRATASRHQLDKFLMRNGYIYLDGKNWTRRYWEWLRSLKFDDWRRERTFQTYLFGIEQDEDRVKRLDVELMRAAEEEPYRTLVGFVRCFRGLDTLSAMVLTTELYAVGRFTTAASLMGFVGMVPSEDTTGWDPNRGPITKAGNEHLRRILVEAAKHYRHPERVSKALAERRKGQPDWVIAIADKAQTRLHQKYWRLVLGKGKSPNIATIAVARELVGFIWAVLIEAATTVDADQCVH

SEQ ID NO: 142590 - protein, 392 aa, unidentified
MTATRVRHSTTPGRILYLALELGWNGWKLGFSTSPAQPVRQRSLRARDLAGLLKEIAAAKQRFGLPPETPVRSCYEAGRDGFWLHRYLTDQGIDNVVVDSASIEVNRRARRAKSDGLDAEKLVKMLMRYHGGDQKIWSVVRVPSVADEERRHLHRDLQEMKAERTRHNNRIKGLLAGVGLDVEVAADFPERLKELRTWDGAEAPGQLQQRLLREFERWRFVHLQILALDTERARRIRQGTGEQVQKVRDLLRLRAIGPSSAWLFVMEFFGWRRIRNRRELAALAGLTPTPYQSGNSDRQQGISKAGNRRVRTMAIEIAWCWLRFQPQSHLSLWYQKRFGAGTSRLRKIGIVALARKLLVALWRYLEQGELPQGAEIKAEGQPLLASVEAAFT

SEQ ID NO: 142591 - protein, 393 aa, unidentified
MSIIDRPHALAATAVENGIVAVSLELSRSKWLVTSLLPGSEKMSKHMVAAGAAAALLELLGRRRRQAEEHLGGAVRVVAIAEAGLDGFWLHRLLEANGIESHVVDAASVAVPRRRRRGKSDGIDGETLLRTLLAWRRGEPRVCSMVRPPSPQEEDRRRVVRERAVLIRERIAITNRILGLLMSQGVTDYQPLRRDRRQRLETLVTGDGRALPPQMKRELLRALDRLDVLLQQLKAVEAERDAMQEAAAEATASEAATAGDPAQLLLRLRAIGPQTAAVLVLEAFYRRFDNRRQVAAFAGLAPSPWQSGAVAHDQGISKAGQPQLRKTMVELAWLWRRHQPGSALSRWFAERARGQDRRRRRALIVALARKLLVALWRYVNAGVVPDGAAFKAA

SEQ ID NO: 142592 - protein, 350 aa, unidentified
MIILGVDAHKRTHTFVVVDEGGRKLAERTVSATEEGHVEALAWARRWDDRRFAVEDCRPVTRRLEADLLAAGETVVRVPTKLMAGARRSGRTPGKSDPIDALAVARAAIREPDLPIAHLDCATRELRLLVDHREDLVAERTRLQSRLRWHVHALFPGLEIAPASLGRHRHIAALEARLVDATGTVAEIARELLKRCRELTLRANELERQIGRLVRVLAPTLLGLPGCGGLSAAKIVGEVAGVLRFRSKATFARWNATAPIPVWSGNADRHRLNRGGNRQVNAALHRIAITQQRGVGSGRDYVQRRLRAGNTKTEALRVLRRRISDEVFRRLSVDEQRRATTTPNAIPLAA

SEQ ID NO: 142593 - protein, 353 aa, unidentified
MAYGAIDLHKKESQVRIVTDAAEVIDRRIATRRDAFTQLFGSRPPMRVLLEASTESEWVAGHLESLGHTVIVADPNYAPMYGGRSRRMKTDLRDVAALTTACAQGIYRPVHRRSAARRAIQAQLRVRDELVEARGRAISLVRALTRAEGLRLRSGSTETFVRRLADLELSPSLAATVGPVCQMLACLNEEVRRADVHLADLVRTDADVARLTTFPSIGPITAAAFVAAVDDVARFRRASQVTNYLGLVPREYSSGEQQRRGHIVRSAHPRVQALLVQAAWRVWMSRHRNTAALRTWAQLLARRRSPRIAIVALARRIARILFAMWRDECDYQPARRRAAVFTGEAPAVTAAIA

SEQ ID NO: 142594 - protein, 332 aa, unidentified
MDLHKQNVYCGLIDQEGKPIYRRRLPVELPTILQALQPYRPRLKAIAVESTFNWYWLVDGLQAADYPVHLANPAEMQKYSGLKQTDDETDALWLAEMLRLGILPTGYIYPKAERPVRDRLRRRMLIVRQATQTLLSLQSMVARHSGQAVSATKLQDWTLQEVRDTFTDPYSQQTAAAMLELLGEQRRIQHSLEKQVLAAAKPTEPFRRLLCLPGIGKILGLTIALETGPIARFASAGDYASYCRAVNSRCESAGKKKGENNRKNGNQYLGWAYVEAAQFAQRYSPQAQAWFASKMARKSRVVAIKALACKLAKAAFYVLRDGVDFDEHKLFG

SEQ ID NO: 142595 - protein, 346 aa, unidentified
MKQIIRIGMDTSKHIFQLHGVDAAEQPVLRKRLSRKQMVEFFANLPPTVIGMEACGASQYWARELSKLGHEVKLMAPQLVKPYVSRNKNDGRDAEGQCEAMSRPSMRFVPVKTAEQQAALMLTGIRDGLIARRTQLSNTIRGYAAEFGLIAPKGLDKIEPLLTQIAQDESLPAMARELFAVPGREYARLQAELKQIEAKLVAWHRADALSRRLAQIPSIGPIIATRLVMKTPDPRAFRSGRHFAAWLGLTPKDHSTAGKTRLGKITRAGDEDLRRLLVAGATSVIQQVRRGRGHPSRWLVALLKRKPPKLAAVALANKVARIAWKLMATGESYDAARMNAIPAFAA

SEQ ID NO: 142596 - protein, 412 aa, unidentified
MLIPPKVHVAVDVGCRRHSVAIGLSSGELLEAFDIDHRPEGFAEFFRRIERHHRRYPSGVPTVAMEGYNGHARPLDTLIRERGWRLLNVNNLKLARFKQMFPAAAKSDRIDTRRMLDLLQLGEHMPQARRALQEVHAPTPENAELKRLMRRRRALVDEKSRLLARLQSDLRAVCPGLLDITTDAENLWFLNLLTHGDDLQKLARLREKTVRAIPAIGAKYAAIIRQWQQHAQFSHEAPYAGPMIVEDARRILALKGSIQALERRCEALAQTSDIARLIDTVPGFALVCSAELAGEIGTLDRFASEASLAVYLGMANLDNSSGDRQGARAPGQVNKRAKAAMMTGVDRHRKQVPESQRYYEKKRAEGKAHNQAIRALGRHLCRVLYRMLKHGEPYRVREPVAPQPAVAQPLAA

SEQ ID NO: 142597 - protein, 347 aa, unidentified
MSPLVALRWGNRPAGLWIAEEFGCDDAGKIVREARVASEPEALLQVLTNTIYRFKRIGLEAGPLSQWLYSILVEAGLPVICVETRHMRAALRAQINKTDRNDARGIAQMMRVGLYRPVHVKTLRSQKLRVLLTHRKLLQSKAIAIENDLRATLRNFGLKVGTIGTVKYETRIRDLVENLPDLAVLVEPLLIVRRVVREQLGILHRRLLAIVRDDDVCRRLMTIPGVGPVVALTYRVTVDVPARFRNSKAVGAVFGLTPAKYQSGENDRTGAISRCGDEMMRMMLYEAAQIMLVRSMKWSWLKAWALKIARHRGMKKAIVALARRLAVIMHRIWVDGTEFRWTREVAA

SEQ ID NO: 142598 - protein, 393 aa, unidentified
MRFAGIDIASETHVVAVVDENAEVRLKPLAFAEDATGYAKLLAALGSPAGVLVAMEATGHYWKNLFATLAAHDYAVTLINPLRTRRFAAEDLERTKTDAIDALGIARFAAQKRPAPTRLPDSTTEELRELVRLRDRLTQDFGDRVRQLHRLVDLGFPEFTRYVKSLDSELASAILHDYPTAQAFGGISTKRLARLCYDGRHQVGTELAAALIDAAHRSVGQHHGEPYRIQVRYACEDLDTLRRRLRSLDRDIEGKLAEHEVGTLLTSIEGLGPHTAARLIATLGNPSHFRSAAALASYVGVIPGLKQSGKNRSTRASLAPLGNARLRAKLWMPTLTAVRLNPWLRTYYQGLRARGKLPKVALVACMRKLLLAVYTVAKHRKPFVFHCTNSAQP

SEQ ID NO: 142599 - protein, 356 aa, unidentified
MIILAIDLGKFNSMGCFFDTRTQEHRFLNAATTRRYLTAVLTSHEIDLVVMEACGPSGWINDLCHDLGLETLVCSTNEDAWRWKNVKRKTDKDDALKLARMAMMGQLTAVHVPCHEVREHRTLIKYRKTLVERINRIKNSIRSLFANRAIEIDSGARAWRTGRELIDSYRKPLADCSMEELWRGQLDLELTQLDALDQQLAEVECRLEAIAKEDTRIQRLQTIPGVGRKTAEVLVTALDNVDRFDNARQVSAYIGLVPRQHQSGQVDRNGRITKRGPRLLRTMLLECAWVSLRYNEWARTTYDRIHGGQKTRKKKAAIALARKIAVVGWAMLKHETDWDPKRLGIEPKPQAEPAMT

SEQ ID NO: 142600 - protein, 386 aa, unidentified
MGDQTFSAAAADGKCATIYVAIELSKKNWLVGLRDPLSKTIGQHKLDAGDAAGLVALIGRKRAELERKLGQEVRVLSCYEAGYDGFWLHRYLASRGVLNHVIDPASLSVKRRARRVKTDRIDVVSLLRALIGLAAGDDEACRLVRVPSVAQEDAKRLHRERQHLVKERTAHINRIKGLLACQGIYDFQPRCRDGAARLASLVTGDGRELPSHVGREIARELDRLALVSQQIADIEAARDATAKAPATGNSRARKIQQLYRLKGIGPEFATVLVGEAFYRSFDNRRELAAYAGLTGCPYNSGQVVREQGLSKAGNPRLRTTMVELAWFWLRHQPKSALSQWFKERLGAAAPGRLKRILIVALARKLLIALWRYLETGLVPQGAILKA

SEQ ID NO: 142601 - protein, 355 aa, unidentified
MNKIKYIGLDVHQTSISAAVVDQEGKQVMQLVLPTRADALIEFLSGLRGTLHLTFEEGTHSAWLYDLLVRRVTKLVVCNPRKNALLKVGNKSDQIDAWKLAELLRAGLLSAVYHGESSTRTLHELGRSYMALTEDTTRIMSRLKALYRGLAIPCAGKKLYTVRHRGQWLKQLTQAGILRRAERLYQELDAVQKLRRQARGDLLAESRKHPICERLRTIPFLGPIRVAVLVARMQTPHRFRSKRQFWAYCGLALETRSSADYRDINGQLQRSRKKVLIRGLNVNHNQDLKNIFKGAALSAGIFPGPLQDFYQQRLAAGLRPEMARLTLARKIAAIALTLWKKGESFEAKKLNAQAA

SEQ ID NO: 142602 - protein, 389 aa, unidentified
MQTVTDRSEAPTAIRTDLGAIFVSLELSRSTWLITSLSPAGGEKMSKHVVRGGDVAGLLERFTQVREKARTRTGKVFPFVVIQEAGLDGFWIDRVLRNEGIESHVVDPASIATSRRHRRAKTDRIDGEALVRALLAYKRGEPRVCAMVKAPTPEEEDRRRVCRERKVLIAERVRHVNRVKGLLFSQGISGYEPLRRDRRERLDTLQTGDGRPLADHLKAQVRRELDRLELLLEQIKAVETERDVLLATQQVAVPAPAAMLLGIKGIGPEIAAILWSEGLFRHFDNRRQVASYAGLAPTPWQSGSIDRDQGVSKAGNPRLRTTLIQLAWLWLRHQPKSALALWFEERVKRTGGRLKKTTIVALARKLLVALWKYVTAGVAIEGAVMKAAG

SEQ ID NO: 142603 - protein, 408 aa, unidentified
MKTLHKRCAGIDVHKTEVVACLRVITHRKVEREVRRFPTTTHGLLELAEWLESARCTHVAMEATGVYWKPIWHILDGRFALILANAAHVKTVPGRKSDVNDATWLADLLAHGLIRPSFVPPAAIQELRDLTRSRKQLTREVAQHSQRIQAVLEEANVKLCSVITDILGASGRRMLKAMIAGEADAHKLAAMGSERLGCAPETLVEALTGRMREHHRFLLAQHLQTTEQLEKTIAAFDARIEEKLVPFRDTVERLKEVPGLGSTVTEFVIAEIGLDMSLFPSAGHLLSWAGFVPRLDESAGKSRSTRIRKGAPWLKPVLVQAAWGAARKKNSYFQAQFLRLKARHGAKKAAIAVAASILTTVYHMLRDGTCYQDLGPEYFTRRNPAKAAARLANRIRNLGYYVEIRPAA

SEQ ID NO: 142604 - protein, 373 aa, unidentified
MKKVRFLGLDVHAETIAVAVAEPDGEVRSLGIIPNREESVRKLIKKLGPAEQLQVCYEAGPTGYVLYWQLTALGVKCEVVAPTLVPVKAGDRVKTDRRDATKLARSYRSGDLTAVWVPNEEHEALRDLVRAREAAKQDQLRARHRLSKFLLRRGQRAPEGIKMWTQRYLQWVKEQVHFEQPAQEYTLLDYVHEVEHVADRIQRLEQAITEAIKLAPAPMQEVVQALQALRGIAQISAVTIVAELGKISRFEGARQLMGYSGAVSSEHTSGTRVRRGSITKTGNAHLRRIAVEAAWAYRHRPAIGSALRKRQEGLSQEVKEIAWKAQHRLHKRYRTLTAAGKEKQKVITAVGRELLGFIWAIGVQVERNDPRNA

SEQ ID NO: 142605 - protein, 407 aa, unidentified
MDVLHPKCAGLDVHQQTVVACARTGAGKAVTYDVRTFGTTTAELLALSDWLTAHGCTHVAMESSGVYWKPVWHVLEGHFELVLANARHIRNIPGRKSDVNDATWIADLLAHGLIRGSFVPPEPIQELRDLTRTRQQLVREIAQHTLRIQKTLENANIKLTAVLADVLGSSGRAILRALARGERDPERLAELASDRVKASRAELVAALHGRVTPHHRFMLTLHLTQIEALEAAVREVEARLGDALAPFRAALDRLITMPGVSETVARVIVAEIGFDMTRFPSAGHLVSWAGLCPRLHESAGKRLSNRTRSSNPWLKTTLVQAAWAAARKKDSYCRAQFLRIKSRRGPKKAVLAVAASMLTAAYYMLKHGVHYRDLGADHFDRRDKAKLAKRLIARLHDLGLTVEVRAA

SEQ ID NO: 142606 - protein, 468 aa, unidentified
MGRKGKRTKGMEEAHPFAGMSRVNPNAAGVDIGAVEIVVCVAGDGETQIVRAFGNYTADLQAIGRWLKEHGVKTVAMESTGVYWIPLFEELERQGFECLLTLAPHASAGVSSRSMRRVSGRKSEITDAQWIQTLHTYGLLESSFRPQAELIALRTLLRHRSQLVEHRSPHIQHMQKALLQMNVQLSQAVTDVTGVTGQAIMWAILAGERDPQKLAALREPGCKKSEAEIGRALTGTWRAEHLFVLKQSMEMFGFYTQQIQACEDEIERVYTLTRPDWDAGELKSLSIRKRSSHSKNKPQNSESIRKHLKRISDVDLSAVDGFGASLAQTVIMEVGTDMGKFPSEKHFCSWLGLAPKHEISGGKVLKNKTLKTKNRAGQAFRMAAQSVKQADCVFGVMYRRLKARLGPAQATVATAHAIARVVYRMLKYKVEYETISVEEYEKKYRDQQLKYMKKKAAKLGFQLVPIPG

SEQ ID NO: 142607 - protein, 391 aa, unidentified
MILVGIDVAKDKHDCFIMNSDGEILVKAFTFSNNLEGFNFLYEKIRSVTKPKDKIKVWLEATGHYSYNLLGFLLNKGLPTFVINPLHTNLFRKSLTLRKTKTDKVDSRTIAMMLMSDVALKPYTDTSYHNEELKSLSRYRFTKVQERSKLKTSVSRLVQILFPELEKIVCTIHMSSIYHLLEEYPGASYIASVHLTKLTNLLMKASHGRYNRDTAIKFREAARNSIGSILPAKSLELKHTIKLIRELTVEIDEIDAEIKKMMDSIASPITTIPGIGYSMGAMIISEIGDFSRFSSPDKILAYAGLSPSTYQSGQLNNCYSHMEKRGSRYLRYALFTVAQKVCIWDNTFAEYLSKKRAEGKHYYVAISHAVKKLVRVIFHLERTGQAYLKAA

SEQ ID NO: 142608 - protein, 348 aa, unidentified
MNATPKSVVGVDTAKSVFQLYTVDKETGEVINQQIKRAQFLQWFANRAPCLVGMEACGGSQHWARKLQELGHEVKLMSGKMVKAFVCGNKNDAADARAIYMAAQQPEVKAIAVKSEGQQAVLAMHRIRQQLVKVRTAQMNELRGLLAEYGEVFGKGRKAFDAGVKTALERLAERLPAPLIDTLRDQWNELGRLDERIAHIEKSLLAWLRQDRAAKAISAIPGVGLLTATAAVATMGQAKAFRSGREFAAWIGLVPAQAGSGGKVRLLGMSKRGDTYLRTLLIHGARAVIQHTKLPSPWLQQISQRRPPNVVIVALANKIARTIWAVLAHERAYDKGHVSQRPLAAQEA

SEQ ID NO: 142609 - protein, 333 aa, unidentified
MTPNLPPTPAATGKPPVYVGIDVAKDALDLARSDDPRVGRFANDPAGIAAVVLSMREANPVVVVIESTGGLERRLLEALLEAGLPAALVHPGRVRHLAKALGIPAKTDRIDARVPVAFGRKAAPRLAERVSRNQAELRGLAARRRQLTSTRVRQGNRRFSTVSKAALKSIDAVLATLDKQVARLDQRIRGLIEADDDFRDLDRLPRTVPGVGPGLSATLVADVPEPGRTDRQRVGAIVGVAPFPDDSGTQKGKRSIGGGRADVRRVLYMAALAATRYNPVIKAFAKRLKAAGKFNKVVIVACLRKLLPLLNAMARHRLAWDQLDVVKKLAPTH

SEQ ID NO: 142610 - protein, 341 aa, unidentified
MGEVTTIGLDLAKHIFQAHGADASGAVVFRKKLRREQVLAFFAGQPRCLVAMEACAGGHYWARELAALGHETRLIPPSYVKPFVKRQKNDMADAEAICEAAQRPTMRFVLPKSAEAQGAAVIFRTRDLLVRQRTQLINALRGHLAEFGHVARKGPGHVAKLVELVRAAESDLPEEARSVLLITVEALEAVHARVRGLDRQIEARAKASPLARRLMTVPGVGPILATAMVALAPPPSTFRRGRDFAAWVGLTPRQHSSGGKERLGRTTKMGERSLRRLLIIGASSVVIAAGRGGARDPWLARLLARKPRMLVMVALANKMARIVWALMARGGSYRAPIAAAA

SEQ ID NO: 142611 - protein, 346 aa, unidentified
MELQTVGIDLGKTVFHLVGLDLRGRVMVRKRFSRSQLLHFTSNLRVQLIGMEACGGAHFLGRVLQQQGRQVRLMPAQYVKPSVKTNKNDYIDAEVVAEAVARPTMRFVPIKTDDQLDMQSLHRVRERWVMRRTAVVNQIRGLLLECGITLRKGRRYVDAALPVILEDATSKLSGALRVLIAQLKLELDQLASRIDEADSAMERTARENEACRRLTAIPGIGPVSATAFIAAIGNGAAFSRGCEFSAWVGMVPRQDSTGGKQRLPGIGKRGNSYLRRLFVQGARAVMTHRTKQTSDLSLWLEKLVVHKHHNVAIVALANKLARMAWAVLARDEPYRPPVLSCSVNIR

SEQ ID NO: 142612 - protein, 343 aa, unidentified
MWIIGCDYHSRFQQIAFVNQATGECGSRRLENGSGEAEQFYRSLAGQKVRVGIESTGGTGWLERLLAELGQELWIGDAARIRAAAAHKQKTDVRDAELILQLLLENRFPRLWMPSAEQRDLRQLLVHRHRLVQMRTRVKNQLQAIAKNEGLQRNRRLWSQAGQAELLGLSLAPWADLRRSDLLSLLQELDRRIEPLDRNLQQQAEQGWETRLLMTHPGVGPVVATAFVLTLGDPQRFVDSKRVASYLGLVPLERSTGGRQRLGHITKQGSSLLRGLLVEAARVAARHEPEWKRRYVRLAVKKNRSIAAVAVARRLGVRLWWMWKLGLDYGQMGESHSHAGSSA

SEQ ID NO: 142613 - protein, 349 aa, unidentified
MKAYCGIDLADKKSAVCIVDAAGERCLERTVRTEEGALRRLLEDAGRRWGRMRVVVEASPLAEWAACVVEDSGHEVEVIDARAARGVVRTKKKTDARDAYTLAQLVRGGWYRRVHRKSAESRVVRSVLRGREALVRAYRSVGSTIRGLLKAHGIRLGKVSRGRFAERVREVVEREVPELAGVMEGLLAVWTEAVACAEAVEREVALRTGEDEVCRRLRTVPGVGVLVSAAFRATVDDPHRFRRGEEVADYLGLTPRVYQSGQTRYRGRISKEGDGLMRWLLVEAATVLLTRGRDCALKRWGRALAERKGKAKARVAVARKLAVLLWRLWVREEEFRPWPRGGEEMAAVA

SEQ ID NO: 142614 - protein, 354 aa, unidentified
MIIIGVDYHPEFQQIASVDTDTGEFQEKKLTHCEEAEKFYRAVAASGQKVRVGMEASGHARWFERLLAELQIELWIGDAAEIRAKRVRKQKTDRQDAQLILRLLLEDRFPQIWVPSWKNRDLRQLLWHRHRMVQARTRIMNQLQAVALNEGLRCKKRLWRERGRQQLESFRLAPWASRRRRDLLELLDRLNPTIAELSLTIEQEVEKCPEAQRLMTHPGVGPLTALAFVLIIGEANRFQCGKQVASYLGLVPLEDSSGNRRRLGHITKQGSSMLRFLLVEAAQVTARSLPQWRSKYLHLMMRRGRKTAKVAMARRLAVRLYWMMRQGWDYQQWSKFGSHAGQPGNRDGVPSNTE

SEQ ID NO: 142615 - protein, 454 aa, unidentified
MIAAVVERCAGIDVGKRFLKVCVMVGPLSEEPRFEIRKVDCTSTALEGLRQWLKAEGVTHVVMESTGPYWVPVFNVLEADVKVVLANPVEVKNRKGHKTDAQDSWWLAHLLRQGMIRASFIPEKATRDLRELTRRRKKLVEQAAQERNRVQKQLEYGNVKLGNELSDVFGLSGQLMLKALVDEKRTAEQIAELAQGSLKKKKAAIAEAVRGQRLSETQKEMIRSSMRHMTFVELEIEQLDGLVAGLIRESGQQKQHELLQTIPGIKAEAAGNLLAETGPDMKQFPDAGHMSSWGGVCPGNNESAGKHKSRHTTHGNPWFRAALTECAWSASRTKGSAFETKYESLKPKIGHKRALVAVAHLLSHAIYNVLSRGEAYRETKPKELNEIQRQRLIRHHTRRLRRLGFWLPAEKLTPLQQWYATHCIPNMDPPQPKRRGRKKGQLQDGDSERGVVNG

SEQ ID NO: 142616 - protein, 353 aa, unidentified
MPIVASLTAPLKYVVGIDIAKDTFVACFGLIEPSQQLRFGKEATFDNTLAGFEALLAWAARQQATAAALWFVVEATGVYYEALAYFLADNEQALSVLLPNKVKHFAQSTEFKSKTDQLDARLLCRLGLERALPAWQPPTPALRQLRALARERQRLADQGGRLKTRCHAYQHSYQPDERTLQRLAAQQQLIAQQLKAVDQDLSALLDAEPELARKLAHLTSVPGIGLTTAIVVVAETTGFSLVENERQLTSYAGLDVVQRQSGLSAQATRISRRGNVRLRTALYLPAVSSLRYNPQQKAFYARLRARQPSGKPGVIAVMRKLLLLCYSLWKNDRPYDPLFHPAQLAEKEVAPAT

SEQ ID NO: 142617 - protein, 352 aa, unidentified
MKIVALDLGKGKSVACVFESLTGEHAFDAAPTAPETLRIMLEHYRPERVVIEICALAGWVGDLVRGLGIELQVANVNHEAWRWRNVKRKTDRLDALKLARLSAMNQLPLVHLPEAKMREWRGLIEYRQTLVARRTAVKNRIRAILGAHALRMPPGKTGWTQKTLASLRAEARPWAEVGMDTLWRGELELELQQFDQLQGLLRQVDEKLDGLAAADPRVGLLETIPGVGRRLAEMVVSVIDDPGRFRNGKQVGAYVGLTPRQYQSGAMDRQGRISGQGHRHLRALLVEVSWLGLRHNAWMREVYERVSRGSPVRRKAAICAVARRLLIRCWAMLRDGTRWQGPPLRRELTQAA

SEQ ID NO: 142618 - protein, 426 aa, unidentified
MSAADEPRKEPIAAFVGVDWADQKHDIALRSAEPEAKVERSQIANQPEALSDWILALRERFKGGKILICLEQSRGALIHFLMGYDCFELYPINPKQLDNYRKAFRPSGAKDDPTDAELLCKYLSLHHQELRPWRPNDEQTRKLALLCEKRRQAVDARSALSNQLKSELKQYYPLALAVLDNDLTTVLAADFLLKWPNFTSLKKASAHKLRSFFYGHQCRSEQKIEARIQRIQSAQPLTRDSAIIEAGALTAQMLARQLQALAPYIRQYDEQIAQLFSQHPDRVLFDNLPGAGDALAPRLLSAFGSNRDRFDNVLEPLSFFGLAPVTERSGKTTFIHFRWACPKFLRQTFHEFAGCSVRFCDWAAAFYDQQRARGKDHHVAVRALAYKWIRILFRCWKTRQPYDPQRYRAALAHRASPLATDVKNSP

SEQ ID NO: 142619 - protein, 371 aa, unidentified
MNESSKTLYVGLDVHKDSIAVAYAPEDRGAEVVSLGAIGTRQCDIDKLIRKLQAKNVMLVIAYEAGPCGYWLYRYLTRHGLRCLVVAPSLIPRKPGDRVKTDRRDAVTLARWLRSGDLSPIYVPTIDDEAIRDLSRAREDTVHDLKRSKVRLKAFLLRQDIRYEGRPNWNAAHLRWLARVVCPTPAQQIVFQEYVHAVTEQTERLARLETELDTAVTTWRLQPVVQAVQALRGLDFLGAVSLIAEVGDLTRFDTPRKLMSYLGLTPSEYSSGSHRRQGGITKAGNGHARRALVEGAWAYRYPAKVSRHLQLRLEHVPAEVRAIAWKAQVRLCKRYRLLSARGKHVNQVVVAIAREMAAFAWAIARLVPTTP

SEQ ID NO: 142620 - protein, 338 aa, unidentified
MKKYSGIDLHSNNCVVAVIDEADQVLYRKRLPNELSVIVAALGVYRGELHSVVVESTYNWYWLVDGLMEAGFEVRLANTAAIKQYGGLKHTDDGDDAVWLAHLMRLGLLPQGHIYPKAERAVRDLLRKRSQLVRQRTANILAIENLVARNSGQLINGNQVKRLSPADLPAIEPEAERRLAIAANLAVMGTLNEQIKQLEMAVKARTKAHEALPPLKTVAGIGETLALTIVLETGGIERFAKVGNFASYCRAVDSRRLSNGKKKGEGNAKCGNKYLAWAFVEAANFAVRYCAQAKRFYQRKRAQTNNAVAIKAVAHKLARACYYVMRDRVPFDPARCFS

SEQ ID NO: 142621 - protein, 353 aa, unidentified
MAYPGTPRITVGVDTHLDVHVAHANDQLGRRVDTVQVPTTPTGYHDLLAWARGLGEPVAWGVEGTGSYGAALARFLVAGGQVVLEVNRPDRSARRRRGKSDPVDAQAAARAVQAGEVTVVPKAGDGHVEMIRSLRVARQTAMRARTQTINALKALLVTAPTGLREQLRGLSASRLVRAAAELEPGKITSPLAAAMLALRTLAHRHQALSAEISSLTTELDRLTAKAAPKLVALFGVGQDSAGALLVAAGDNPDRLRSDAAFSMLCGVSPIEASSGKTTRHRLNRGGDRQANAALYRIVMVRLCYDPATKDYMARRLKEGKSKKEVIRCLKRYVAREVFAVLHQMGHDTPTAAA

SEQ ID NO: 142622 - protein, 252 aa, unidentified
MSAWIGIDVSKATLDVALRRDRDTQHTQVSNEKAGFRTLHNFLKKRCPRGTHVCLEATGLYGDAVAEFLFQQGYGVSVVNPARIKAYGDSPLKRNKTDRADAALIADFCRTPQPDLWQPPPPEVKELRAMLRHLDDLQAMRQQESNRAQSGEMSPTVLAQLQQHITFLDTQIKQIKDQLDQHPDLKRQRDLLTTIPGIADQTAGRLLGELSEMRAFHSARQVAAFVGVTPRQRCSGSSVRGPSRITKAFPKK

SEQ ID NO: 142623 - protein, 409 aa, unidentified
MRYYVGVDWADQTHAVWVVDESGTKITARTVAHSAAGFTEWGRELDEWRAQGIERWAAIERPDGRVVDFLLDHGVVVYPVNPKALDRARDRFRQSGAKSDPFDARVLADFLRTDHSHLQALQPSSEAAQELKLLTEDCQRHIRQQTRLVNQLTTTLKAYYPRALEVAELTTALAREFLQAYPTPEALTALTQRQWQRWARGRRLSEARIGALWAVLQQPQLPVPAHVVRAKARLMQSLVEQLTPVVATVAQYRTAIDDFFAHMPAAQWARTLPIGKHGITAPTLWARLGDAPGRWESFRHLQAQAGAVPVTKRSGKQRVVHFRFACDKSLRHVVDQVAFLSLLSSEWARAYYDQQRARGHAHHQALRALGAKWLKIIFVMWHRQVPYDEQYHLATMTRQQLRQRQPQIA

SEQ ID NO: 142624 - protein, 429 aa, unidentified
MSDMIDRLKLFRTMKTSVRGSEKYLLVGIDIAKSTHHAFFGTPNGRTLRKNLVFENSVTGFECLRALVSDLQKQHGLEEVVYGVEPTASYHKPLAEYLIKNQQHVVYVSNVAVARNRAMLDGRWDKNDKKDAANVADLVGQGRCLYYDIPDESLRELRSLIAFRSRLKKEEHALRMRLRNNVFAQYFPELDKLTIHPGQPNDVVLSIAQHCLDPQDIAAMEFEEFVKLVTARKVTVAQEKRLRGLWEISSRSAGCQVHDAARWESQTLVRRFKAVVEDIKDTEKRMATAAEKFPAYQCLLTIPGFGPIVSAMVLAAIGNASRFVNRKQLLRLAGLDLSASRSGQTSDTAKAVISKQGKAALRYALVQAAMVASSKNSEIRGYFSKLIHGRELECGIRLKMKVKLAAKLLVVAWTLMKTGQKFQASCFSG

SEQ ID NO: 142625 - protein, 408 aa, unidentified
MEPIYTSCCGLDVHKRSIQACVRRLRDNGSIHQETRTFGTMTRDILEMADWLAAEAVTHVALESTGVYWKPIYNLLEGHFTLLLVNAKHVKHVPGRKTDVKDCQWLAKLLQAGLLRGSFIPVRPQRELRDLTRHRSQLVAEKTRAANRIQKVLEDANIKLASVASDILGASGRDMLRALMRGETDSTNMANLARRQLRSKIPELRPALEGKVTEHHRFMLGELLAHLEYLEGRIEEFSRRIEEVSRPFAPAIAKVATLPGFDQRSAQNVVAEIGADMCVFPSEHHLSSWAGVCPGSNESGGKRKSGKTTKGNRWLRTALVQGAWAAIRTKGSYFQAQYRRLTPRRGKKRAAVAVAHSLLVVIFHMLKTGSSYKELGGDYFDKLNQKRLAPYFLKRLTDLGYQVTLKAA

SEQ ID NO: 142626 - protein, 366 aa, unidentified
MLHVGLDLSRKRVDVCLISAAGELIDQFRAPADRDGLHGLARRVAVYDDVVRGVIESMNGARFVHDELVAHGWDVLVADAQRVKGLAPLACKTDKIDARVLATLSFYDLVPAIWLPTPQLRRERERSRWRLHLVKHRSTLKNRVHSTLIGFGYQVPMADLFGVGGRRLLRELKIPEPWRGHVDASVELIDELERRIAAIEDELQRSGADHRYVPILMSAPGFGWITSFTVACELGDITRFSTPTKFVGYTGLCPRVSQSGDVDLRGPVSKRGPRYLRWGLMEAAVHACSHPLYKERYQRIKRRHGRQRGAKVAQIDLSRQLATAIWYMLTRNQPFAPAGAGSSRCLTAHFGIAPPERAPITPSPRS

SEQ ID NO: 142627 - protein, 350 aa, unidentified
MIIIGCDYHPGFEQIAFVDTETGELQERRLQHREEAEKFYRDLAAQEMKVRVGVEASGHARWFERLLSELQFELWIGDAAEISSRRVRKQKTDRQDAQLILKLMLKDDFPQIWVPSWENRDLRQLLWHRHRMVQARTRMMNQLQAVALNEGLRCKKKLWREAGRAQLEAFKLAPWASQRRVDLLELLDRLNPTIAKLTQAIDREVEKCPAARRLQTHPGVGPLTALAFVLIIGKADRFQCGKQIASYLGLVPLEKSSGNQRRLGHITKQGNSLLRFLLVEAAQVTVRSLPEWRSKYCHLTLRRGRKIAKVAMARKLAVRLYWMLRKEWDYEQLRKVGSYAGKPGYRDGVR

SEQ ID NO: 142628 - protein, 424 aa, unidentified
MNFKMQDKQNQLIERISDKHLIVGVDIAQQFHVARAINYRGIIVGDPLTFENSEVGFKRLLRWIQSLQEMKNLNAAIVGMEPTGHYWKNISNWLDEQKIEVVTVNPHLVKRNKENRDNTQSKSDKKDALVIADMVKNGYYSLISPSSESFEKLRVLISNRDVIVKRLVSSANQIHKWVDIVFPELRQVFKDITCKGAIATLRIFPTPTEIASLEPLDVMKGWKSLMQRQPGPKKAKLLIELAKSSIGTTQALDAYKFHLEQLLEEYDLTIKQLDRVEQQIKEELYKIPFVQKLLMIKGISEISLAGILGEAGDLSGFSHGNSLLRHAGLHLAEASSGKWKGQIVISKRGRSRLRRFLYLATMSLVMNNDEFKALHAHNVRVKKMKKMKSIMKLIGKLARIFVGIAKRNEAYCPSKLKETIPLAA

SEQ ID NO: 142629 - protein, 353 aa, unidentified
MKKKTSSSSAITIGIDLGDRKHAVCVLVAKGEILKQETIANNRGSLAALSRRYPGALMVMEVGTHSPWTSRFLEGLGHRVLVANPRKLRAIYQNERKSDRKDAEILARLARSDEKLLHPVRHVCEEMQRDLLQIKMRDNLVRQRVDIISSVRGTLKSLGIMLPSPNSESFARHARRILGNEHPQHLALVEASLCVLDVMTQQIRSLEKSIETMAAEQYPEAEFLTQLAGVGTLTSLTFILTIGDPTRFRRKRDVGAFLGLVPRRDQSGETDKQLSITKAGDSYLRKLLVQAAHYILGPFGPDTALKRKGLKLTECGGPRARRKAVVAVARNLAVLLLTLWHDEAIYQANRRAA

SEQ ID NO: 142630 - protein, 424 aa, unidentified
MSSDLEIAAFIGLDWADQQHVIRLRVAGSAPVESQLLDQKPETLRSWIGQLRQRFGSRPVAIALEQSRGSLLYALMNVDFLLLYPVNPQNLAQFRKAFYPSGAKDDPQDALLLLEMLEKHRDRLRVWVPDDADTRCLRLLAENRRKLVNRRTALTNQLTSLLKESFPQALDWAGPLDSVRACDFLEPWPSLPLLQKTSTSRLRKFYRDHTRLDSDALHLRLDQIRQAQPLTRDSAVLAAAELMIPALVRQLRCLIESIQQFDQQLKDRFLQHDDYTLFHSFPGAGPALGPRLLSAFGSNRNRFECAAEVQMLSGIAPVTERSGKSHWVHWRLACPKFLRQSFHEFAAQSILFSTWARAFYDQLRSRGTSHHAAVRTLAFKWIRILFRCWKNRTPYQEQIYLASLRRHGSPLCAALSPPTPGANL

SEQ ID NO: 142631 - protein, 350 aa, unidentified
MTSLSEIVEVVIGVDTHVQTHSAAVVDARTGGVLGELTVEATPDGYQALVDFAGEHSMLRAWAVEGTGGHGAGLARLLARRYELVLELDRPERARRRHGAKSDPLDAIRAAREALSRAKLGTPRATGDRQALSVLLAARRSAVQASTDAQRQLFSLVVAAPEELRDRFRGRKLPAMVRLAARLRISPRWDTETATTARVLRDLARRALALHGEAARHEKDILAGVRSWRPDLLTQRGVGPIVAATVLCAWSHPARIRSEAAFAMLAGAAPIPANSGQITTRHRLNRYGDRQLNRALHTVALSRLRYDPATQAYAKRRTAEGKTSREIKRCLKRYLARDLYRLLENPSQAT

SEQ ID NO: 142632 - protein, 358 aa, unidentified
MKAIKQTIGVDVAQDELVCSFGLLFEDLSWQIKARKTFGNHPSGFKACLKWAESMRDSGSEVLFVMEATGVYHEKFAHWLVDQGQKLSIVLPTKISNYMRTLSTKTVTDSTCADAITQFGLERKLDHWAPPKPIFRTLRQLTRERDQIVAERVTVDNQIHAENTEAFPNANSLKRLNERRKLLCKQEREIKNEIHHLVKSDQELDQAVKRITSIPGVGELTAVIVLAETNGFELVRNKRQLTSYAGFDVREKQSGTSVKGKPKISKKGNRSLRKAMHLPALAAIRHCEIYKGTFARLVGRHGIKMKAAVAVQRKLLELIYILFRNKTTFDPAYEEKREDGKNHASLYSLADADLRNEN

SEQ ID NO: 142633 - protein, 330 aa, unidentified
MPTYYLGLDVHKVRTQYCLMDPAGEILKEGAVPTEEVAAVVPDHDSAVVLEATGSWHFAYDALVATGALVKLAHPARVKAIASARVKTDKIDARILAHLLRTDLIPEAWAPPQTTRELRDLVRLRWRFVAQRTTAKNRISNLLTRECLRFPGTDMFGKSGRAWLAALDLAPHTGGMVDLLLSAIDEADHHVEALTRQLHERLDGDVDMHLLMSIPGVGFITAATLVAELGDWRRFSHAKQVSAYFGIVPSVRASASVAHYGRITRQGSSHARRALVEAAHVAKRLPGPVRHHYLSLVKRRGKKVAVVAAARVLLELSWTLLRKEEVYRAA

SEQ ID NO: 142634 - protein, 323 aa, unidentified
MRKSIGIDVSKKKLDVSIFNGKNYHKISCENTLSGIQELIERIALLGGDKLVITMEATGTYHLKAAMSLHEAGYKVSVMNPLIIKRYSEMKMLRAKTDPVDARLIAEYGYYQKPTIYRPNTPECQELIYLLKTIEGLHRMKGQNRNRIEAFTQSPGGSHAAVESIQRINKMIADEIKVLERRIMQLMRENHQEEYRRLVSIPGIGKRLAAAIIGYFQEFDRFEKAKQVASFIGVNPAPKDSGTSVKGRGSISRKGNKYLRKLIYMAALSASRYNHECSKLYNRLLADGREKKVALIAVSNKLIRQVFAIVKHQREYIPMYQSV

SEQ ID NO: 142635 - protein, 313 aa, unidentified
MKKVIGVDVCKLRLDVFCSADESVHAFANDEAGHAGLVALIEGQGTDLVVLEATGGLERAFVGRLLGAGLPVAVVNPRQVRDFAKALGHLAKTDVLDARVLAAFGQAVQPRVRRLAEEDTQALADALTRRRQLVEMRAMEKTRLAQAGPASVRKSLKQHIQWLDNQLRATDSGLRKTVEQSEAWMAKCDLLGAVKGIGPVARLSLTAWLPELGTINRKQIAALVGVAPLNHDSGTYCGRRRVWGGRAAVRAVLYMATLSAIRHNPTITAFHQRLRTAGKPKKVAIVACMRKLLTILNAMVRDGQPWRAQPHIA

SEQ ID NO: 142636 - protein, 362 aa, unidentified
MTSMTPTTGLEVFGGVDTHGQTHHAALIDAVGRQLGDREFPATASGYQALLAWITVQGCPAAVGVEGTGSYGAELARVLTAAGLTVVEVDRPDRKARRLQGKSDPLDAYAAARAVASSRANGVPKSRTGTVEATRVLRVARRSAVKARTQVINQIRGLLISAPAPLREQTTGLHRAELIRVLTRLRPGQDLSTPQEATKAALRRLARRHQWLDIEITELDAEIAPLVRACAPELLDIRGVGTETAAQLLASAGDNPERLRSEAAFAHLCGAAPIPASSGRTDRHRLNRGGDRAANAALYTIVLTRMRHNERTRAYVARRTAQGLSKKEIIRCLKRYVAREIYRAITTPRKVQPGETAPAQAA

SEQ ID NO: 142637 - protein, 417 aa, unidentified
MARWVVKQAGRFATTPEGVRAFAQGLGPADEVALEVTGNTWAIATVLTSRAGRVVVSNPAKTRAIAEAKVKTDKVDAEILAQLLAADYLPAVWLPDAATSALRRQVLRRTQLVRQRTRCKNQVHAILHRNLIPRCPAADLFGHKGRAWLAEQDLPPDEQAAAVALLRQLDFHAEELRLLDTDLGQAGLDRPEVLHLMTVPGIDATVALSIVAAVGDFTRFRTPEKLVAYLGLNPKVRQSGGQPAKHGHITKAGAAHARGMLVEAAWSASKAAGPLRAFYQRVQARRGMQIAAVATARKLAVLCWHLIIKGEDYAFAQPSLVAHKRRKLELRAGRASARGRKGTASGYSLTAVRTAERQLAAQAETAYRTMVSAWQPRRPTTPTTASKTRAAGSAVSVAATNGARQFSPSPGNAARQG

SEQ ID NO: 142638 - protein, 349 aa, unidentified
MSKNLNSAVAVIGIDIGKNSFHVVGLDDRGAIVLRQKWSRGQVEVRLANMPPCLIGMEACVGAHHLSRKLQAFGHDARLMPAKYVRPYSKGQKNDFRDAEAIAEAVQRPTMKFVATKTADQLDLQALHRVRERLVSQRTGIINQIRAFLLERGVAVRQGIRFLRAELPRILATPPDALSARMAQVISDLAEDWRRLDHRIDDLSNQIAVLARQDAGCERLMSVPGVGPIISSAMVAAIGTGDAFSKGRDFAAWLGLVPKQMSTGDRTILGKISKRGNRYLRVLFVQAAWVVLIKPSSWERHGLKHWIEAARKRLHRNVLAIALANKLARIAWGVLAGSRTFEASKLQAA

SEQ ID NO: 142639 - protein, 414 aa, unidentified
MEDILDCCCGLDIHKESIIACILKGPIQNGLKPRSEIREFGTQLTDLMSLKRWLEGQDCHYVAMESTGIFWHAVYAVLEDALLDEMHLLVVNARHMKNVPGKKTDMRDAEWIATLLRAGLLKGSFVPEQDIRDLRQLTRYRKALIRDITSQKNRIEKLLQSNGFRLSSFLSDIFGSSGIAIMEQLVQVGSISSQSLGACLKGKARQKASEILSSMNGNLSEPQRKLLKMQLEHLEDLQSNLLEVEKEIRIGFSKFQVPIELLDSIPGIDQTAAYAILAEIGQDMAAFPTAQHICAWAGLAPGNHESAGKKKKQQVTQGNTYLKTMLCEVAWVIASHKKQYLSGWYWRLKQRIGAKRAIIALARKLLVIIYTMLKTNQPFNEQKFQERKDASEQRRVNRMVNELARLGYAVSLAA

SEQ ID NO: 142640 - protein, 410 aa, unidentified
MVERFVGIDVALREHRIAVLDRDGEAVGQSFTIAASTDGVATLLRTLGARGATAAQTLIGLEASGHLWENLEAALVGAGYRVIVLNPLQTRRYRDVVRRKAKTDDIDAHVIAGLLRSGAAQASYVPDEQIQSLRELARLRARLMADRQDYLRQLVAQLDVVLPEHRTVLGDLLTARARGILAQFPTAPHLAHANPRAIRRAAEDAGARGFSLNDATVVRDRARRSLYSGKAAAARAHVVRTLVSQLERLTSAIDEVDRAATALLPPSAPGTGPSDAELLQTIPGIGPQTAATLLGELGAFTRFTDARALVAYVGFYPVINESGDRAAPPRLSPVGSRIARHSLYLAAVNAVRRSAEWRTIYLRKKAQGKTAKQALVVVAVKLLHALYAMLKHRQPYNPSRLLVAPATIGS

SEQ ID NO: 142641 - protein, 421 aa, unidentified
MLILYQRCAAIDIGKDVIAVAVRLPGDGAEHRQTIKQTFKTFYGVLKHAARWLTEQQVTHVAMEATGIYSMPVYHALIEHGQFEKVLVCNAGHVRNVPGRKTDLSDAEWLVHLLECGLLRGSFIPPAQIKAARDVIRYRTKLTESRTSELQRLGNVLQDAGIKVDSVASTITTRSVRAMVEALIDGERRPVLLAELAKGRMRARIPDLQRALEGRFDDHHALMCRLHLDHLDHLEEMIARLDTQIQDMMQPFRAQRELLTTIAGIGPFAAAAIISEAGADIGRNVPLSGPLRVLDRGVSGQPRIGGQTPFRQTRKGNQHLQHVLVECAWAASRTPGYLQSLYRWHVRKFGGSRNPTAKNKAIVAVAHKLAIIIWHVLATGKPYTDLGADYLDRRIDPAKETRRLIARLQALGHTVTIEPAA

SEQ ID NO: 142642 - protein, 210 aa, unidentified
MTGDGQRLGTARITDSPAELWREIARAGKSPRVVLEAAYGWCWAADILEAADVEVHLAHPLGVKAFIYRRVKNDERDAADLADLLRMWMTGSAWLDQLGPPQPYAGKIMSLRQLTAELTTEIIMLSEVIADLLAGDRSYQVIQQLPGIGPVLAEVIIAEIGDVTRFASAARLCSWAGLTPRHRECPQREPRTWDGSGNQISASQPSSTRP

SEQ ID NO: 142643 - protein, 421 aa, unidentified
MTGYDKRARAQGAVAVVGVDAGKFEHAMVVRPRGGRDTKPVLFKTSREGFEKAVAAILTAGGPGATPPDVLVGIEFAGTYGFTFAHFLHQQGFPVVSVLPAHTKKWKEVVHNQNLKTDAKDAVGITDLVAQGHFVSFPFLDSVYADLRHLVSTRERLSLLRRGAITRLKATLEVVFPEYERIFVQITKPTALAVLKKYPCPDAMLAAPKRQVMKLLRETSRNHLGAARYDELIEAAEHTLALTGTHRVLKDEVPMLIELIETYAAQIAQVEALMAEALDRTPEAPYLLSIPGVAPVTAAVFLGSIGDPAAYDSSKQVLRVAGLTLVERSSGLLKGQKRISKRGRPVFRRHAYIFAVRSVQKDGLFRAEYEALCARNGGRKIAALTAISRSALKLMFSIARDRRMYSVEVPRPAQRARASAA

SEQ ID NO: 142644 - protein, 400 aa, unidentified
MISVGIDVSKGKSTVCILKPYGEIVSKPFNITHTQKDLSELSSMLFRLNDEVKIVMEATGIYHLPVLTYLQEKGFFVSVINPYLMKSYRNESLRKAKTDKIDSRIIANYGIDHWFKMKEFQTSGEIYEELKLLGQQYRHYMKLHLLSLAELTHLLDLTMPGIKNLLASWNETNRKDKRSDFVERFWHYDVITSMSEQKFTEEYILWAKEKKYVPSQEKAKVIYTLAQESIPTLPSETSSVKMLVTEAVRVLKEVDATLGLILSRMQEIAKTLPEYSVVREMGGVGNTLAPKLIAEIGDVRRFRNGKALVAFAGIDPPPYESGQFVGCNRKISKRGSASLRKVGYETMRSLKMRSRPEDPVYRYVVKKESEGKSKKAAKIAGLNKFLRIYYARVTELYKNI

SEQ ID NO: 142645 - protein, 397 aa, unidentified
MAKRVSGSGTSSGREGPSAKTLGPTKATPSRRKKEAPVEREYVGIDLHRRRSVIVRKNAAGEVLDKVRIDNSPIALAKAVAAAGPEPEVVLEATFGWYWAADVLEEMGARVHLAHPLGNNWGRRRVKNDERDANDLVDLLRLGRLAEAWIAPPEIREVREVVRYRLKLVRLRGGLKAQVHAVMGKHGVLPARVDMFGLGGTAQLDALDLSEGYMARLDSLRDLIDVYNREINDLDRRIPKMLTNHQGYRAIQAIHGVGPILAAVFVSEIGDVTRFPSPAHLASWAGMTPTHHESDTKVRRGKISKQGSRHVRWAAVEAVSKNHGDGKIKADYRRISERRGRNLGRVAPPARCSPSCSTECATERSVASRKPIEGEQARTQPADSSGIGMTPSRVVLM

SEQ ID NO: 142646 - protein, 343 aa, unidentified
MDEYDGRQFVGIDLHRRRSVIVRQSESGEQLSAVRIVNDPVALGLQLEQAGSDPEVVLEATYGWYWAVDVLQAGGARVHLAHPLGVKGFRYRRVKNDVRDAGDLADLLRMGRLPEAWIAPPETRELRELVRYRAKLVAIRSGLKAQIHAVLAKAGVLIAASDLFGVTGRQRLAKVPLGPAYAERVRSLLELIDILDGHEARFAAMIAERLHTHRGYQAIQQLPGIGPVLAAVFVAEIGDVHRFTDPAHLCSWAGLTPTHRESDTVVRRGHITKQGSKLVRWAAVEAIQRQPDTTKIALDRQRIEARRGRNIAKIAAARKLLTLVYYGLRDGHIRAVAHRQVAA

SEQ ID NO: 142647 - protein, 323 aa, unidentified
MNKDIKYFGIDISYLVFDVTDSDGNYYQFKNKVSGFKKFIKLINSNSHCVMEATGYYHYQLAYYLFENGKKVSVENPLVVKRFIQMGLSKIKTDKSDSRLICAYAEQVELKLWTGSSKEVQECLQITRTLSVYTKQRTMLKNKLHGESVLGEPSKSVVRSLKRSLRQLAKEIKMLEDKLLVLVKESHQDLFTRIKTIPGIGRKTAIMLIVLTGGFERFSSARELCSYAGLTPVIRQSGSSVKGRPRISKMGNQKLRNLLFMCSFTACKYNKACRDLYERIVAKGKSKKLALIAVCNKLLKQAFAIAKSGLIFDKEYKNTLVKN

SEQ ID NO: 142648 - protein, 310 aa, unidentified
MDYFAGLDVSVKETSICIVDDAGNIVREARVASEPEALLQVLTKTIYRFKRVGLEAGPLSQWLYSVLAEAGLPVICVETRHMRAVLKAQINKTDRNDARGIAQMMRVGLYRPVHVKTLRSQKLRMLLTHRKLLQSQAIAIENDVRATLRNFGLKVGIVGTAKFEARIRELVENLPDLAVLVEPLLIVRRVVREQLGILHRRVLAVVRDDEVCRSLMTIPGVGPVVALTYRVTVDVPARFRNSKAVGAVFGLTPAKYQSGENDRTGAISRCGDEMMRMMLYEAAQSMLVRSTKWSWLKAWAMKIARHRGTA

SEQ ID NO: 142649 - protein, 454 aa, unidentified
MRRKKNTNALAMPVIREYVAGADLASEQHWIAAPPHADGSPNVRTFGTTTKQLHEMADWLLEQRVDSVAMESTGIYWIPVLEVLEARGLEVVLVNARHLSCVPGRKTDMLDCQWIQRLHSCGLLRGSFRPQGPIARLRSLRRQQHNLVEARVRAVQWMQKSLDQMNVLVHRAVSNLVGETGLRIVRAIVAGERDPQVLASFRHPRCRKSPEAIAEYLTGTWHSEHLFNLKMALELYDCLDAQITTYEAELVREIKALQPPERAEAEVPLHQTKAKEAAIRRRGEQPLREELWRFAGVDLTCIDGISPSAAMIILTEVGLDLSAFPTEKHFVAWLRLVPRLAISGGRPVKKKPNGTGANRIAGVLRMAAMAMVRSHSALGAAYRRIAFRKGAKVALFATARRLAILIYRLLRYGQDYVDIGEKLYEERFAERRLKSLRASAKNLGFAITPLEDAA

SEQ ID NO: 142650 - protein, 334 aa, unidentified
MNNVSLIGIDLGKNSFHVHCQDATGKALSRKKFTRAKLFEFLANCPSATVVMEACAGAHYIARKVFDMGHKPKLISPQFVRPFVKSNKNDFVDAEAICEAASRPSMRFVAPRTESQQEILALHRVRESLVRDKVKTTNQMHAFLLEFGISMPKGIAVIRRLSVVLEENELPPYLAKLLVKLQSHYLYLVEQIRDIEHELELAAKQDDTTQRLMSIPSVGPITASVLMANLGNGQQYKQSRDFAAATGLVPRQYSTGGRPTLLGISKRGNKNLRRLLVQCARVYILHLEHQSGYLAKWVRNQLSKKHSCVVACALANKLARIAWAITTKQSVYMA

SEQ ID NO: 142651 - protein, 299 aa, unidentified
MSQPGSLCVDIDVSKAILDIAASSAIEQFSVGNDSDGFDAIIAELRMYAIALVLMKATGGLETAIVCALQAEGFELAVVNPRQARDFARAMGYLAKTDSIDARVLSQMAEVLNRHPERERFIRALPDTECQVLTAMVVRRRQLITMLVAERNRLHPAHPLNRKSINIIIKALEDELARLDADMNSHIHSHFKELAKRLSSIKGVGTMTAAALLAEVPEQGNLSRREISVLVGMVPVNRDSGTMRGRRTIFGGRAGVRTALYMAALVATRFNPVIKVFYMRLLAAGNPKKWRWLPVYASC

SEQ ID NO: 142652 - protein, 347 aa, unidentified
MTIVGNPDAVVGGIDTHADVHVAAVVNHVGGVLGVESFPTTSTGYRRLLSWLRSHGELTLVGVEGTGSYGVGVSRHLTRAGIAVVEVDRPNRQTRHRKGKSDPVDAVAAARAALSGTATGSPKTRDGNVEAIRVLMIARRSAVDTRIETLNQLRHLVFTASPEIKARFSGLSPVMLTNKAAALRPREGDDPVRYTTFITIRTLGHRLQYLREETKRLNRMLRSLLRQTGPELLEVYGVGYDTAAKLLVAAGDNPERIRSEAAWAHLCGVAPIPASSGKTTRHRLNRGGNRQANSALYHIVLCRMANHQPTRDYVARRLAEGKTMGEIARILKRYVAREVFKHLPRPA

SEQ ID NO: 142653 - protein, 349 aa, unidentified
MVTIGVDPHKKTHSAVAVDAVGAALAARTEPAKRDGFGGLLAWARGLCDAKRVWVIEDCRHVSGALERFLLDHGEIVVRLPPRLMAGARQSVRERGKSDPIDALAVARAALREGIDTLPAARLAGVELEIRQLAVHRQRLVDARTRLINELRWQLHDLWPEWEIPKRVLIGAGWQAQVARRLKRAEPTARVRIARDEIRRIRDLTRTINELHHELAALVAQVAPQLLTEHGLGALTAAKLLGEIAGIDRFTSDAQLARLAGCAPIPASSGRTDRHRLDRGGNRQLNHAIHTLALSKIRHDPQTAAYIAKQRHNGKTNREAIRCLKRHLIRRVYNLLRDPTIPPTTLCLT

SEQ ID NO: 142654 - protein, 321 aa, unidentified
MPFPESAAGYALLRQRLQRIAQQRSPVHFVVRLDAAGQYADNLRHFLHGLGTPAADAPGAAAPFTLALSCGDPQKNKNYRAALFGGKKSDPVEARAAARFALTEKPASDTPLSLELRTLRQVAGRLQAVVRQRTRLVNQFHHLLALTFPELALLTKDLAAAWVLELVHRYPTAPLLAQATPADLGAIPYLPDPHVTPLLEHARTSIGSLTGDSVAELVRDQVRQLRDVGARQKRLENLLIAAYHALPQRNHLDTIPGIGDVSAAVRTAFILDIDQFATPGKLVGYFGVLPIEIASGVDRDGQPRGPRRLVMSPRGNDLVRR

SEQ ID NO: 142655 - protein, 332 aa, unidentified
MSCTSRRVVDRDDGRLLDTKEFSTTRAGYRALLRWLTSYGQVHAVGIEGTGSYGAGVTRHLTDAGVRVYEVDRPDRSDRRRRGKSDTIDAEMAARAVMSGRRLSLPKAKNGTVEAIRVLRLTRATAVRSRVKALQLLRNHAISAPAEVRDMVRSLTRMQLIRTVAAWRPDYDDVDHPATATRIAMRSLARRILELNDEIADLDDLIEPLVCDVGAALLERPCIGIETAGQLLVTAGGNPERLRSEAAWAMLCGTAPLPASSGQTDRHRLNRGGDRQANRALHMIAISRLRTDDATRAYAARKTAEGKSKREIIRCLKRYIAREVYPLLNPTD

SEQ ID NO: 142656 - protein, 387 aa, unidentified
MPASGPRPGQVAVQVSLAAIFVSLELSRSTWLITSLVPGGREKMSKHSARGGDIAELMTHFTKLRDKAHARAGASFPIITIQEAGLDGFWIHRVLEQAGIESHVVDAASILTSRRRRRAKTDRIDGEALLRTLLAYKRGEPRVCAMVRAPSPEEEDRRRLCRERKTLVAERVAHVNRIKGVLFAQGICDYEPLRGDRRQRLEALRTGDGRPLPPYLKAQIGRELDRLELLLEQLKAVEAERNALLEPANDAAPVAVQALAGLRGIGPEFTAVLWSECLFRSFRNRRQVAAYAGLAPTPWQSGSVQHEQGVSKSGNPRLRSTMIQLAWLWLRHQPTSELSLWFRERVKRNGGRGKKTAIVALARKLLVALWKFSSSGVVIEGAMMKTA

SEQ ID NO: 142657 - protein, 361 aa, unidentified
MRIIGCDLHARQQSLAMLDTTTGEVVNLTLKHEGNEVREFYSQLPRPVLVGIEATGSMHWFLNLMEELGIECRVGHPATIRAAEPRKQKHDRRDAELILKLVAENRFPAIWLPTKELLDLRALLLHRYQWVRIRTRIQNALQAIALANGLRRGPGLWSYDGQAKIAFLPLLPHASYRRSMLQEMYKKMKEEIENLTQRVAEQAELRSGARRLMTHPGVGPITALATEVFLGDPKRFADGKALASYVGIIPREYSSGGHQRLAGVTKQGSPLLRFLWCEAGAHAVRRDPELKRFYRRKLLQKGLGKARVAVARKLGIRLWIMLRDEIDYQEFCRRGQKQQSGAACAGMPETGYGANRHRPVD

SEQ ID NO: 142658 - protein, 385 aa, unidentified
MQKRHDDSKACLTAFVQDNTVIVIIEMSLRSWLVAGMIPGIDREPLKKIAADPEVLLRLLYRWRDEAIKAGKEITRIAVAYETGRDGFWLARWLRDRGIDAHVIHATSVAISREHRRAKTDRIDTAMLRRGFLGWLRGERGHCSMAVVPTIAEEDAKRPHRERESLVKERTRTINQMKAILTQFGVRNFKAASRKAAEKIDDVRTPEGVPLPPNAGAALRRQIEHFRLINGQIKTIEKTRLQRLRQQPTDKFNAMVFLLVRIIGLGVETAEQLVHEILSRKLRDRKAVARYSGLTGSPDESGARRREKGLSRSGNGRVRKILIQLSWRMLQFQPDSSLVRWFKDRTANSQRSRKPMIVAFARKLIIALWRYVNTGVTPEGFKLAK

SEQ ID NO: 142659 - protein, 414 aa, unidentified
MEQIYERVAGCDVHRDQVTVCARTPGPRGGTHKEKARFVTTTAGLAEMADWCGERAVQLVAMEATGVYWKPVYYALEDRFRVWLCNAYHVKNVPGRKTDMSDADWLADVAGHGMVRPSFVPPVPIRELRELTRYRKKQVDTRAAELARLEKVLQDAGIKLTSVASKVLTQSGRAVIQALIDGEGDPEALAELAKGKLRPKIPELTAALTGHFGAHHALVAERILAHLDFLDDTIAQLSRQIAARVAEGYQPALDLLLPIPGLDHTSVEVIIAETGADMSCFPSPGQLASWTGLCPGNYESAGKRRKVGTTPGNPWLRRTLIESARAAARTKGSYFGAQYHQIARRRGPNKAAVAVAHSLLDVIWHALSTGELFTDPGADYFTTRQDPEHRTRRLVSQLEQLGYTVELTQTAQTA

SEQ ID NO: 142660 - protein, 358 aa, unidentified
MQSNKISFKGQKIFIGIDVHSKIWDVAVATEVGVVKRHTQKPSAKELFDFLEKRYPDGNYLAVYESGFSGFSTYYALKEVGIDCIVIHAADVPTTQYEELMKTDKVDSAKLVRSLKAGLLKGIYVREKDNIDDRSVMRIRKVIQRQLGGYKSRVKHMLHCHGVALPERFAKPTTHWSRAFITWLMYDVCLISSTRKSLDLLISQVETLRGNLLKATRELRKLSQDERYKRRYDLLRTIPGVGLIVAMCILTEIYDVKRFHNEKEFAAYLGLIPICHSSGEKVVHGEKTFRGNKQLGPMIIEASWITISKDAGLGSLYLQYRKRMEAQEAIVRIARKLSNIIFAVLKNEKEYVSYQTGK

SEQ ID NO: 142661 - protein, 465 aa, unidentified
MKLLYRCCAGLDIHRDTVSACIRKRVRGAAEAIIEEQVFGTFTQELERLRAWLKQHKVRQVAMESTGVYWIPIWNVLERSFTLTLVNPAAVRALQGQKTDRIDARRIAEYLQYGLLRGSFIPPQPIRELRELTRMRAHIQQDRNRVVNRIARLLETVNIKLASVASHIVGASGMAMLRLLAGGVCDAERLADCAQGPMRVKIPALILALDGRPDAHFRWMLGQLLGKLDRLDEERARVDARMDELAAPHADALRRLSTIPGVDRTTALVLLAEFGEDMAQFPTAAHLASWAGLCPGNAESAGKRFSGRTRKGDRYVRRILVQSAWAASRVKDCFLAALFFRTAQRRGLKKAAVAVAHRILIIAWHILAEPGVQYRERGGDFFDRRNPERTARKLSRRLEAIGYQVTLVAPPKPFRAPPHRSIRQSPPPAVDASLCPRCARWGMPRCICLVKRKRSSPSPQTESPL

SEQ ID NO: 142662 - protein, 381 aa, unidentified
MEISPTPAAAATGIQPATLFVALELSKAKWLVGLHSPAADKISRHTIAGGDAPALLSLIEVARRRAEASLGGEVQVVACYEAGYDGFWLHRLLLAHGIANQVVDPASLLVNRRARRRKTDRIDLAGLLRTLMAWHRGEAQVCSMVRVPSLEEEDQRRRGRERERLVKERVQHLGRIKGLLMTQGIRDFQPARRGWQERLEALRTGNGQPLPVCLKAEIARECRRLALVDEMLEELEREREAASDGKVPQQAALLGKLRGIGPISAHLLAEEVFHRDFANRRQVAAYLGLEPSPWQSGQRDHEQGISKAGNRRARRVAIELAWFWLQHQPDSGLSRWFKERVGTAKGRVRRIMLVALARKLIVALWRYLASGTVPEGALMRA

SEQ ID NO: 142663 - protein, 350 aa, unidentified
MQITTIGLDLAKNVMQVHGIDVGGNSVLRKKLRRADVIRFFAELSPCLVGMEACATAHHWAREVTKLGHTVKLIPPTYVKPYVRRGKNDAIDAEAICEAVSRPSMRFVPVKSREQQAVLMLHRTRALLVRQRTMIINAWRGHLAEFGFVVAKGIGQVPELIAKVFSVNPQAASIPTIARTAIAPLVVQIDELTKQIKQIEKQLLAWHKTSDASRRLATIPGVGLITATALAATVIDPLHFKSGRQFAAWLGLTPRQNSSGGKNRLGSISKMGDRYLRTLLIVGATSIIRYARSNASTGTSWVNSLLAKKPARLVSVALANKTARVAWAILARGQVYRAPESSRQSMPVAA

SEQ ID NO: 142664 - protein, 428 aa, unidentified
MEQLDCSRLEQFRQLRKEIRGSQTHLIVGIDVGKDKHHAFFRTAAGKVLLKRLVFENSAEGLGKLLNQVERVRLENGLGEVVFGLEPTGNYHKPLGECLIRRWAQVVLVSGVAAKENRKTLDGRWDSNDPKDAANVADLVSQGKFLFYEYPDSRLRELRALLALKRRLKRLEHGYRVRIRNHLVAKYFPELDRYFGQSEKYGLAVVRWCLDPRSLSGYQLDEFVRMVAPGKGGGPQMNRLRTIFQMARGSIGCEAGPAVKFEAEVMVEGLRQIQVVIGDTDKKIQDLCLEFPEYEYLLSIPGFGPDVSSKVLGAVGDPFRFQNGKQVLKMAGLDLNAERSGKNSESAVPVISKKGKGDLRYALYQAALIASIRDRHFIVYFTNQLRGREREPGIKTKMRVKLAAKLLIIAWTLMKKKEPFNPDYLNLE

SEQ ID NO: 142665 - protein, 400 aa, unidentified
MSVAVGIDIGAYKHAVAVCRSGEREADRRTTQISSNRAGFRQLASWMDTLAEPVSLVVMESSGHYWYNLASHLHRAGIPVAVINPLESKYFGKRRLQRSKSDKADARTLAALGMHDQPRVQTPLAQSELREAARFTMRLVREQAEVGQRIQRLIDLGFPELREAWDDPTCVSALAVLRTAPTAAAVSRLRLATLAALKRPGEGGRAIGRAKAEQLLALAKESVAAPELEAQVAFEMRLLVEQHDFLDRQIATAEAQLAGLLDDETARRLLTIPGVGPATAATLLAEIGDIWRFTDVDQLLAYAGVHPKEQSSGKKGERPETSWTMAKTGNAYLRAAAYRMAVVGIKHNPIIRSHYARKRAAGKSSMNAVGHCMSKALALVWGVWRSGQDFDPHHGERRSA

SEQ ID NO: 142666 - protein, 342 aa, unidentified
MQITTIGLDIAKNVFQIHGIDAKEKVVVRKQLRRSQVIAFFTALPPCLIGMEACATAHYWARELRKLGHEVRVMPAKDVKAYLKRNKNDAADAEAICEAVRRPTMRFVQIKSAEQQGQLMQHRTRDVLIRQRTQIINAMRVHLAELGIVAAQGEAGVNELRAIVADDRDERLPIDARASVIVLAAQLEALQTLIGSIEKRIKMQHRSNEASQRVETIPGIGVLGATAIVATVADPMIFRSGRDFAAWIGLVPRQDSTGGKQKLGPISKQGDRYLRRILVVGAIAVLRRARENPGKYPWLTQLLTRRPFKVVAVALANKMARTAWALMAHGGTYRAPELAEAA

SEQ ID NO: 142667 - protein, 320 aa, unidentified
MSPNTTNTMTETNSVVHAGLDIAKAQLQLHLENQQHVLPNTVTGHQRLIRLLRVVAGVHVVCEATGGYERKVVSALHSANLPVSVVNPAQVRHFALAQGQRAKNDPIDAALLTAYGHALRPNATPVPQAVLAELRELVQWRDHLKEQLVRARQPAEHATLAFVHRQQSKEVTHLEKQMAAVEKELAAALTRHPRWREQVQRLAELDGVGTLTAVSVLSQMPELGHLNRGQAAALAGLAPWTRQSGPWEGQRHIGGGRAVVRRALYMSAVALARQTGSTLGKFYARLRAAGKPAKVALTAVMRKLLLQMNQVLKYHVPDPA

SEQ ID NO: 142668 - protein, 343 aa, unidentified
MTQRQPVVEVFAGLDVSAREIKVARVQGQDQNPTLATFANHASGHQALLAFLLEKTERVRVCLEASGNYSLDLALSLHAQRQVEVSVINPRRARKFAESLGERSKSDPVDARVLCQYAARMPWESWKPPSATALRLRAIPRAMESLGVMHTQESNRGHALASSQALPALVLRERQRHQRYLENRMKQLRREARRLIARDAELDRRYRLMLTVPGIGETSALQILGELVVLSDTADARQGVAFAGLDPCIFTSGSSVEKRPRISRGGSRHLRRALYMPALVALRREPHLKRFYERLLSRGTARLQAVVALMRKLLHALFAMFRANQPYDGSKLCPSELITKAAA

SEQ ID NO: 142669 - protein, 423 aa, unidentified
MMKLKYSICCGLDVHKNVIVATIVITNRDGVSEYRQKSFSTINSDIQKFHNWLIENNCYHVCMESTGKYWIPIFNYLEKDIEVCLTHPKYVKAIKGKKTDKKDSKWIADLYKFDLVRCSFIPPKDFRQLRELARYRFKLVCMKSSEKNRIQNCMTVSNVGIASVLSDPFGKTATEIMSYLLEHTADSIDEKAVRKLIKKGAKAKSDEIIEAIRGCNIETDQAKKLELALGHLEYLDGMITQTEVELYVRIKPYYEFVEFVSTMPGMTELSSTIVLAETGVDMNIFDDAKHLCSWCGLSPSNNESAGKKKSVRIAKAGAYLKPMMVQCALAAIKNKKQPYFAIKYGRIKKRRGHKKAIIAIARMMMVCIYHMVSEKKPFTPADYEELMKPQNHVERVVLNENNVFAYLESLGYDSSKLVKRNDN

SEQ ID NO: 142670 - protein, 355 aa, unidentified
MTHPTVTESFLPPVGLDVGDRAIHLCELDGERRVRERGKLATNEAALRRYFEAKPRCRIVLEVGSQSPWMSALLRSLGHEVLVADARRVALISKSHRKTDRRDAETLARMLAGMPELLGSVYHRGPQAQADLAIIRARDLLVRMRTRGVQHVRGTLKAFGLRVRSSTASSFHRVAREVVPELLQPALGFVLDHLADLEQRIREMDRAILRVTAERYPDAERLQQINGVGPLTSLGFVLTLDDPGRFAKSRTVGSWLGLCPRVQSSGDKDPQLSISKTGCGYMRRILVQAAHYILGPFGKDCDLRRYGGRIAERGGKAAKGRAVVAVARKLAVLMHRLLVSGEDYEPLRSAKNAAA

SEQ ID NO: 142671 - protein, 581 aa, unidentified
MSTIVNPPAPPVAFGVGFDTSRYGHHVTFLRADLQPACLPFEFPESRAGYDQVLRKFQDLQAADPAVHFHIRLDAAGQYATNLELFLRSLPFPKTLTVGEPARNQNYRQALFPKRKADPVESLCAARFALVEKPPATPDTSAVYYHLREIVQRLQGQVRQSTRLTNQLHNLLARVFPELAVLAADLKARWCLQLLDQYPTPAQLARARLSSLTAIPYLAADKAEKLRLLAATSIGSLTGDTAALLVGQLVRQLRQSLAEEDRLDDLLKAAYQALPQSNHLDSIPGVGTTTAAVLTAKIVAIERFATPAQLVSYFGVFPQEDASGLDKDGCAKPGRHTRMSPRGNDLVRKYLWNAARAGITHNPALRALFRRLRGRGVRGDVALGHCMRKLLHLVFAVWKTGKPFDRDHYPWEPSAPADTAVADKKTAGHNQDKGPEGSVVTAVTSTITPPPPADKAVSGPPPLATPVSAAGGIDYAALRSQISMEQVLAQLGCLTRLKGSGVQRRGPCPIHAPKDPANRSFSVNLDKKVFQCFHPPCGAHGNVLDLWAAVQRLPLYEAAQHLAATLHVSLTAPNGTEKRNP

SEQ ID NO: 142672 - protein, 325 aa, unidentified
MRKVGQTGVRRSAVPCFIGIDVAKAQLDIALRPSGERWAVPNDASGVAMLVERLQTLHPTLIVLEATGGLERAATSALAAAGLPVVVVNPRQARDFARATGQLAKTDALDARALAHFADVIRPTPRPLPDAQTQELRALLGRRQQLIGMRTAEQNRLAGASERLTKDITAHITWLNVAIATLDDDLETMLRASPLWRANDDLLQSAKGIGPVSAHTFLLELPELGTLTRQQIAALVGVAPLNCDSGTLRGKRTIWGGRAHVRTVLYMSTLVATRFNPQIKVFYERLLAAGKVKKVALTACMHKFLTILNAMLKHRTPWQPQEVQS

SEQ ID NO: 142673 - protein, 340 aa, unidentified
MKHTVVGIDIAKRVFQLHWVDSDTGEILSVQLRREKFLAHFVNRPACLIGMEACGGAQHWARELIKLGHQVKLLAGKFVKSFVMGNKGDAADAKGIWMAVQQPGIKPIAIKTEQQQAMLALHRMRQSLVKVRTMQTNALRGLLTEYGEVMPQGKVGIRNGIAAALARLELRLPKIVIEALHEQWLRITELSSQISQIEHKLQSWLKTDVAAKAIADIPGVGLLTATAAVATMGDPKAFKSGREFAAWLGLVPRQTGTGGKTKLLGISKRGDTYLQTLLMHGARSVLTHAKHPGQWTQELMKRKHTNVVVAALANKMARMIWAMLAHERAYQGDWPSAKPA

SEQ ID NO: 142674 - protein, 341 aa, unidentified
MQQHITTIGLDLAKSVFQVHGIDHEGQAVLRKKLRRGQMLKFFTTLSPCLIGMEACGSAHHWARALSAKGHQVRLIPPQYVRPFLKTNKHDAADAEAIAEALVRPTMRFTPIKSADQQAVLMLHRSRELLVKQRTMFSNAIRGHCSELGMIASQGASRVKDLIAIIDDPEDARLPTIAREALGVLIAQLDTVKEAIRKLESKLQAWHRSQQSSQRLTTIPGVGVITATALVATIGDGSQFKSGRHLSAWLGLVPRQHSSGGKSRLGRISKRGDGYLRRLLVHGSRAVLRWQRGAPKKPSPWIEELLTRRPTNVVLVAMANKTARTVWAMMRDQQTFTAVVR

SEQ ID NO: 142675 - protein, 349 aa, unidentified
MVIIGIDAHKRTHTAVAIDEHGRQLATRTTQATTSADHLELIRWADQFGPQRSWAVEDCRHLSRRLEADLLAAGERIVRVPPKLMAHARDAARSYGKSDPIDALAIARAAAREPDLPVAHLDEVARALRLLVDHREDLLAERTRHINRLRWHLHEIDPAWDPKPQSLITYKHLALCTDRLEGLESVVGAVALDLVARVRALTFDIRRLETEIAERTVKVAPVLLQVHGVAALSAAKIIGEVAGVVRFRSRHAFARHNGTAPLPVWSGNRRRHRLSRSGNRQLNAALHRIAVTQARAFPDAIAYLERRQADGNTRTEAIRALKRRLSDVVYRALVADAALTLTEADAVTS

SEQ ID NO: 142676 - protein, 372 aa, unidentified
MEKDSELFVGLDTSKLKISVAVAGGDRNGEIRFFGDISAEPVSVASMVAKLAKRSAKLHFCYEAGPTGYDLYRQILELGHHCEVVAPSLIPKRAGDRVKTNRRDAVSLARLHRAGELTAVWVPDQTHEAVRDLVRAREVANDGLRKARQHLQSFLLRHGRIYAGRAPWTRVHSRWLATQSFEHPAQNIVLAEYIQAIEDAAVRLDRLTKQVDEAIASWTMGPVVEAYQAMRGVALITAVTFVVEIGDVRRFDSAPQLMAYLGLVPSESSTGERVRRGGITKAGNVRARRVLIEGAWTYRFPARVSRDIEARLDGLPRSVREIAWKAQIRLCARYRKLILAGKTKTVAVTAIAREMAAFLWAIGQEVPPAVQA

SEQ ID NO: 142677 - protein, 346 aa, unidentified
MEQIIRIGIDTSKHVFQLHGVNAAEEPVLRKKLRRKEVVALFEKLSPTVVAIEACGGSHHWARLLQSFGHEVKLIPPQYVKPYVKRGKNDAADAEALCEAMSRPTMRFVPVKTAKQQAALMLVGLRDRLIRNRTQLANAIRGYAAEYGLIAARGMCKIEPLLERIAADKMLPDLARELFALHAKKYAQLQTHLKDVDAKLMAWHRAEACSQRLAQIPGVGPIGASLLVMKTLAPETFRSARHFAAWLGLTPKDHSTAGRVRLGVITRAGDEALRSVLVAGATAVIRHVRRGRGAVSPWLVDLLKRKPPKLAAVALANKIARIAWKLMVSGEVYRAKPMPPASARAA

SEQ ID NO: 142678 - protein, 294 aa, unidentified
MELYAGMDLHSRNTLVGVIDSSLKRVFEKRVPNDLSLIVDTLEPFSSELEGIVIESTYNWYWLVDGLMDAGYSNVRLANPSAIKQYEGLKHTDDRHDAFWLAHLFALGILPEGYIYPKEDRPVRDLLRKRSFLVKHRTAHILSLQSMLEREKGYKLSGNEIKRLKAEDIARIFSQEHLVMSAQANRSSIEFLRHHIKRIEKAVRNRVKLSKSFEYLLTVPGIGDILALTIMLEVGEIARFPRVGNFASYARCVSSQRLSDGKKKGQGNRKNGNRYLAWAFVEASHHARRYNERL

SEQ ID NO: 142679 - protein, 425 aa, unidentified
MRLVYPVCCGVDVHKTFLVATIITTTNSILPKYQQKRFSTYYSGLLDFKQWLFANNCKDVCMESTGKYWVPVWNVLEAASINVVIANPKWVSAVKGNKDDKKDSKWIGDLFRMGLVPPSYIPVRDIRILREFTRYRSKLVSMRSSEKNRFQNAFTVCNLTLDAVVSDMFGVSATAIENYLLDTDDVDPNHCVYLLRGSLKKKASDVVEAVKGFNMTAEQKERVRIIQGHFDDIDKRIAQIDHVILRLTADYEAQISLLCTIPGIDRRLAITIISEIGTDMSVFGSSKRLCRWAGLTPGNNESAGKKKSVRISCAGVYLKPALVEAAHAAVKATQKSPYFRIKYERIMKRRGKKRAIIATARMMLTAIFAMLQSGEVFHPCDLLKFDMPDELKRKQTLSSAKDAVKLLVSLGLVPEGSISLDPLAG

SEQ ID NO: 142680 - protein, 354 aa, unidentified
MNYVGVDIHKRYSVLVAVDERGRELARGRISGNSVHAFAQFFEALQGPGKVVLEACWNWGRIYDVLSEIEQVEEVVLAHPLKTRLIAEAQIKTDSLDALALATLLRGNLIARAHVPSKATRARKELLRQRLYWARLRTRVRNRVHAVLDRQRELEMPQCSDLFGRKGLNALSKLRLAEPDATLLGEELDLLKLIDSQIKAQEGRIVAFNANEQATQYLQSLPGMGKILAAVAAAEIDAIERFDGAAKLCAYAGLVPTTYGSGGKVHQGHLLKSRNKWLQWAFIEAAWVAVGCSSYFGGIYRYHRARGKKANIAITIVARRMCRIAFTLLKERRNFQEQHRTFPGRSAVRLTAAA

SEQ ID NO: 142681 - protein, 334 aa, unidentified
MERNYIGVDLHKAFFQACAIDGTGARVWEGRFPRTVDGIAALAARGLSGARVAVEAMGPTWKFVDALHALEVEVCVVDPRKTKLKAGFAAKTDRLDARRLADALRRESVAPIYIPSPAIRDLRERCRGRHHLVRVRGKLVQAIRALLLRQDAGDPPVTCLYSPRGQQWLQTVMVPGAAGQSLQRLAAALAAIDAHARAAQAEVVAHAAADPIAHQLTTLIGIGPILALTLRAEIGVIDRFPTWPQLASYAGLVPRVEASAGRAWHGRITREGSPWLRWALVEAAIHAMRRPDRTGRWARQLAMRKSVCPARVALARVLCRDVWRTWRMLEARPA

SEQ ID NO: 142682 - protein, 318 aa, unidentified
MTDTKAPYAIVGIDVSKDKLDIHILLDNKSLEVNNDIKAITCFVKRLKKSYQQPLIVMENTGGLEKYMVKVCHEQNISVHIAHSNRVYHFSKQKGYFAKTDIKDAITLSQYGEQEKVKPNSYPHKEGDALRELSNRRSQIVDDLHAEKCRLSRPINSQVKRSIERKIKFLHNEKELIERQINQIIEKNATMLEKSKRLQTFKGVGPAISQGIVCLLPELGTLGRSQISALIGVAPKNNDSGKKIGRRRIMGGRWNARRLLYMGALVACKFNPCLKEMYQKLINKGKPAKVAIVAVMRKMIITLNAMIRDSKDWMPSYR

SEQ ID NO: 142683 - protein, 437 aa, unidentified
MLRSSTPSRLVQREAPPDRGHLLPGGGVMDQLIERCCGLDVHRDTVAACVRVPGPNGKRQQEVRTFRTTAAELLALRDWLEAHRVTHVAMESTGVYWKPVFYVLEEAFTCLLVNATHIKQVPGRKTDVKDSVWIAQCLECGLLRGSFVPPAPIRELRDLTRHRRVLIQERTRAANRLHKLLQDAGIKLASVATNILGVSGRAMLEALVHGTTDPEVLADLARGRLRKKLPALRQALAGRFRPHHAFLVSQLLAHVDYLEEAISMVSEEVEGRLAPFTQHLMQLDTIPGIDKRTAEVLIAELGVDMSCFPSDRHLASWAALCPGNNESAGKHRSGKTRRGNRWLRTALVEAAWAAVRVKDSALGARYRRVMRHRGHKKAVVAVAHAMLRAVYHLLAEATVYREPGADYYDRRHAERVRRRAIQLLERQGYRVVLEPAA

SEQ ID NO: 142684 - protein, 415 aa, unidentified
MDVLYPRCAGLDVHKDNVVAGVRLAGDGPVRTEVRTFDTTTPGLFTLSAWLAEQGCTHVAMEATGVYWRPVWHVLSDGEFALTLANAAHVRNVPGRKTDVADALWLADLLAHGLIRPSFVPEAPTQELRSLLRTRKQLVREQASHVQRIQKTLEDANLKLGSVLSQVMGVSGRAILQALIDGQSDPDMLLTLVQRGVKASPEKLRAALTGRITGRHRFLLRLHLRQFDALAAAMAEIDAEVDRDLDPFREAVRLLRTIPGVSDLTAQVIISEIGIDMSRFPTAGHLVSWAGLCPRNDESAGKRRSTRLRKGAVWLKTTLVQCAWAGSRKKESYLQAQFQRLRHRRGPKKAICAVAASILTAAYHMLRDGTFYQDLGADHFRRTSPESHAQRLARQIAKLGFTCTITPATEGVVSV

SEQ ID NO: 142685 - protein, 415 aa, unidentified
MEIVYERVAGIDVHKRQITVAVRSPGQGTKRRTQVRRFATFYAALREMTAWLVDEGVSHVAMESTGVYWMPVFHALAGPDAVEIVLCNAQHVKNVPGRKTDVKDAQWLAQLMEVGLLRGSFIPPPQIAVIRQLCRYRRTLVEERTREGQRLRKVLEDGGIKLDSVACDVLGVSARAMIRALIAGERDPAVLADLAQRTLRRKIPDLTLALAGRFAAHHGVLCELHLDHIDHLDTMLARLDARIGTAVAPFADACQRLTSIPGIGDHAARAIIGEIGVDMSRFPTAAHLASWAGLCPGNHESAGKHRSGKTRHGNAHLCTILVEAAWATDHTHSRLGSRLRRLKRRMGKKSGPKAAAAVAHTILTIAWHLLAHGGTYTDLGADYYTRREEDPETLAARLKRKIESLGHTVELSPAA

SEQ ID NO: 142686 - protein, 336 aa, unidentified
MKIVTIGVDCHKKMYHLTEIEEGIIIKRLTVPAKPEEVLKVTCTFKDRRVRIAYEAGFSGYGLYRFLTGNGIECKVVPPSMVPHTPGEKHKKNDARDSRDLALHYDILPSVSVPTEQEEADRELVRCRQSFVEDCQTQKQRIKSFLSYHGIEEPTSCSFSKRHREWLRGLELLPESKAVLLSYLEAIEELEAKKKELDIKIKELSQESRHKENLGRIKEIAGIGVLTGMTFLTELYNPERFASSEQVASYLGLTPQEHSSGEKERFGHITRTGNARLRHILTESAWIWVRKTPRAKAQFEKLKIRRGGKRANIAMARRLGALMWLLITRKEEYKVA

SEQ ID NO: 142687 - protein, 405 aa, unidentified
MGQVFVGLDWAEDHHDVYIEDDRGDRLGGGRLPEGVEGVARFHEWVSRHVDDPGDAVVATETDRGLFIGALVAAGYVVLAVNPMSTSRYRERHSTSGAKSDPGDAKVLADLARTDAHNHRRVAGDSELAEAVKVLARAHQSMIWTRQRQTNQLRSTLREFYPGALDAFDELAGRDALAVLAIAATPTAGRQLSRSKISSALRRGGRQRRIGERALEIQTALRSEQLAAAPLVADAMGATVTALVAVLAELQTQIARLEAQLADRFEQHPDAKIIRSLPGLGMTLGARVLGEFGDDPNRYATAKCRKNYSGMSPITRASGKHHVVLARYARNKRLADACYQWAFATLTASPAARAFYDTRRAAGDTHSRALRALGNRLVGLLHGCLRHHTVYDEHTAWGHRLELAA

SEQ ID NO: 142688 - protein, 392 aa, unidentified
MDSPPPRHHSATVAFIEANGSEGETMKKHSSKHQPLSSTDIELCTTICVDLAKQVFQLAGEDATGRVIYEDRIKSRQAFHDLLLKLPVTVTVLMECGPGAQAWARLLQAKGNPVRILPAQRVAEHRSGAKNDRNDAHAILRAGRDTSIASIPIKSTTALAIQALHRIRRGNIKRHTALGNQIRGLLLEHGVSMPQGDAAITKHVPLALEDASLPLPDLLRELLDELLTDWCSLGERIATLSRRLEATAQEDKVAQRLITIRGVGPIIATAIVAKQTEPSRFASGRMYSAFFGIVPDQHSSGNKIRLGRMSKRGDGYIRSLMIQGAHAVLSQLKPDSDQPDDRRLLRWLSRLGRKEAAIRLANRNLRIIWSLLQSDQVYQHKPKGRTEAAMSS

SEQ ID NO: 142689 - protein, 443 aa, unidentified
MNTTINTPQTHAQPNAAPGPEPDFAAFVAIDWADQKHDLVLLPAGSKTKEPLTLEHTPEALSDWVAKLYQRFPTGKIAVILEQSRGSLLYALLPHERLQLYPINPKTSAKFREAFYTSGAKDDPLDADLMLDILLHHRDRLKAWQPDEPITRQLQLLVEARRRFVADQVRLTNRLRNTLKSYFPQALDLAGDDLASPMACAFIQKWPTLEAAQQIKTHLLRKFYYAHQCRSEDLIQQRLQLLAKAKPLTTDTAIVAAQSLLAQTTAREVAALPAILAEYEHRIKDLFTQHADFTIWDSFPGAGPALAPRLAAAWGTQRDRFPDSQAMACHSGIAPVKEASGKSVWIHMRWACPKFLRQTFHEMAKSSLQFCAWAMCYYQMQIQRGKGRQAAIRALAFKWQRIMWRCWHDHVPYDDVKYLASLKRNASDFYTRLVAAPVKSTGE

SEQ ID NO: 142690 - protein, 413 aa, unidentified
MTASVAGIDVHKRVLMVVVLTPGQAGAEAGSLPSRRFRTTMAELRHLVAWLQQLGVQEAVMESTAQYWKPVWLVLEQHFRLFLAQAWSNRAPRGKKADFKDAQRLVRRHLAGELTLSFVPDGEQRLARTLTRRRTQLTRDRVRIQNQVESLLEETQVKLSSLVSDLFGASGVRILKAISEGVTDPVKLAQLGDARLQHTPEELAEALTGNVSPWHRQLLKQHLEQVQLVDKQLQELSELTAAALKSHADAIQRLVQVPGIRVVAAQQIVAEAGPQASAFATADRFCSWLGVCPGSQESAGENHSSRCAKGNVYLRRVLCLAAQAAVRTQNRSFQQRFRRLLPRLGYTKAIWATAHRLAIVIWKILHTGVAYKEYGCETTPQARKRRLQRIQRELRALGYSDQLKPLAPQAQPE

SEQ ID NO: 142691 - protein, 349 aa, unidentified
MASKLDSEIAVIGIDIGKNSFHIVGLDRRGAIVLRQKWSRGQVETRLANLPPCLIGMEACVGAHHLSRKLISLGHDARLMPAKYVRPYSRGQKNDFRDAEAIAEAVQRPTMKFVATKTAEQLDLQALHRVRERLVSQRTGIINQIRAFLLERGIAVRQGLRFLRAELPRILATPRDVLSPRMVHVIEDLAGDWRRLDERIEGLSSEIEALARRDVSCERLMSVPGIGPIISSAMVAAIGAGDAFSKGRDFAAWLGLVPKQISTGDRTILGKISKRGNRYLRVLFVQAAWVVLIKPKSWDRHGLKPWLEAAKKRLHHNVLAIALANKLARIAWSVLAHGRAFEASRIQAS

SEQ ID NO: 142692 - protein, 364 aa, unidentified
MSNTTAVTVGLDVHARSVRLAALRDDELLDERTLPYDHTAIERAIRRWPGARACYEAGPTGYGLQRHLSAAGIECAVVAPALVPKRPGDRVKTDSRDARALARLHQGGLLETVWVPEPEIEAARDLIRAREDARIDRMRDRHRLSKFCLRNGLLLPGQSWGVRRRDWLSRQGFEHPARQRAFETYCHATDLVDARIQALEVEIRQVAIEGPWSSLVARLRCLRGIDTLSALGLAVEIGDFHRFGGAEKFMGFVGLVPSEYSSGEKRAQGSITKAGNAHARRLLVEAAWHSRRQPKVGYELARRQRGADPAVIERSWRAQQRLHRRWGRMAARGKPHQKIVVACARELAGFVWAIATEQPLHTTS

SEQ ID NO: 142693 - protein, 440 aa, unidentified
MSSSFPRRAAGIDVGSEQLFVAVACGPVRVFSTFTAALIQIKDYLIEQQVTTVAMESTGVYWVPVFEVLEEAGLEVYVVNAAHARNLPARKTDMKDCQWLAELHSKQMLNSGFIPPAAIRELRDYTRLRQDHIQMAMPHILHMQKALDQMNLKIHEVLSDLTGASGRRLVEAILSGERRPEALVQLCDVLVLKNKRTQMLAALQGRWKESQVFALRQAYENWCHYQKQIAACDQQIGQVLEKLAAQHRPTTPEAGEDAAPRKRLHKNAPAIKNLGPLLRSLSGGHDLTQLPCLTHYSVMQLLAEVGTDMARWKDAKHFTAWLGLAPGSRQSGKTKKSQSRFRGKAGKLFCVVAQSLAQSKYLALGGFYRRIRGRHGGQVANIAAARKLAVLFYNTLRYGWNYVEQGLNEYEKRYKEQYLKRLKASAKRFGMQLVPQLTPS

SEQ ID NO: 142694 - protein, 394 aa, unidentified
MKKLKPNVACAGMDVHYKFSNVTFRDAGGKLVSRRRLEHPDREKLRQHLGQWPSGIPVVMEASFGWGWLSDLVEQAGMEVHLSNCFKVEKMRKARGWVKTNKKDADLISLLPFEMSDWWEVWRAPPDVRNRREQMRFRADLVGMQTAVKSRIHAVFHRHGVFHEFSDLFGAKGRKFLAELCSDNPAGLPYEALTALRGNVMLLDHLRRQLAAVARTLHSQLSRTTLTTRLKTIAGFGLILSHVLAAEIGRIDRFRNHKSLAAYSLLAPRADDTGEDDPSHSPKGRHLGVRGNRTLKWAFIEAAHGAVRSGGRWRDMFDRVTDGGRKDRGRGYIKVARELVKVVYAVWSKGVDYQETPPARPGSHKNKQSKKNKKKQSRSGTGQLLHPMVHAVSA

SEQ ID NO: 142695 - protein, 348 aa, unidentified
MLADQLDYVIGVDPHRDSHALAVVHVISGAVVFQATVAASSDGYAQALKLVDEHAPGRRVFAVEGTGSFGAGLTRFLTGHDERVLEVGRLRRERCSSGKTDALDAVRAARSVLTGERPATPRAGGERQALQALVAAREGAVNARRAGLCQLRDLLITTPEPLRSELRPLTRARLLRRLATTRPHGRDDAELRGSMLALRSIARRVLQLTAEERELAAEIETITRKLAPQLLDQPGVGPHAAAQLVLSWSHRGRIESEAAFARLAGAAPIPASSGQTIRYRLDRSGDRKLNRALHMILLTRKRSHPATIAYIQRRIQEGKTKREANRCLKRYLARSLYRLLEHGTPLAT

SEQ ID NO: 142696 - protein, 388 aa, unidentified
MEVVHERCCGLDVHKDKLTACVLIGQVREVRTFGTMTRDLLQLADWLTEEKVTHVAMESTAVYWKPVYNLLEDQFSVLVVNARHIKKVPGRKTDVSDAEWIADLLRHGLIRGSYIPERPQRELRELVRYRRRLSEQRAQVVNRMQKVLEAMVQGVDNPEALAGLAKGKLREKRAQLQEALHGLMGPHQRMMLESQLRHLDFLDEEIARLDEEVSKRMRPFDEVIQRIDGIPGIGRRLAERVLAEIGVDMTRFASAEHLASWAGICPGNNESAGKRRSGRTGRGNPWLRCALVEAAWGANRTRETYLRAQFRRIAARRGNKRAALAVAHTILNIIYYMLQRGTTYEDLGGNYFDQRHSESIAHRAVLRLERLGYKVILKLPEPASTAFS

SEQ ID NO: 142697 - protein, 431 aa, unidentified
MESMKLISSNCQAVPDGERGIVVALDISKDSITYRACRPGAATRPVKVSQDMNGFGKLSSALEQFSNESYDVWVGYEPTGPYSCCVLEYLAENGWHVVQINPKHTSRFNDIRDNKPGKDDPRDPLGIAGLIWQGCYRIPLHLTGVYAELRAASAEWGMLSKESTMLKNQLHAMLELWFPELRSVFKSGLCKSACAIAKKYASVEAICSAGLAGVRGVLNKASSGRAGFRAEALLNAARGSKALRNGQKTRHRTILNHLARLELIEAQKAVLKSEMERMLLDLPESQRILSVAGMGVISTTLLIGECGNLKDYSVKQLEKLVGLNLCEFSSGRHKGKLKISKCGRSSVRYALCMAATQMMRKTGIYHDVAEDMRSNGKRSGEIRVAVARKLLRLLHALACGAQGFDRQQFVARRGTGDDQVIHQDGPALAAA

SEQ ID NO: 142698 - protein, 372 aa, unidentified
MKIVMLGIDLGKNVCSLAGLDETGAVVLRRRMKRGSVLPFTAQLERCTVAMEACCGAHHLGRQLIAQGHVVRLMSPAYVQPYVKAQKNDERNAEAIAEAATRPTMRYVEIKSEAQLEVQSLHRVRGRLVAERTALINQLRALMLERGIAVAQGRSKLERYLPEILADERSGLGPRLRRLIEDMREEWRSIDQRINGYDNELAERVRNEDAATRLIRIPGIGVLTATALVAAVGNAQTFSCGRDLAAWLGLVPRQATTGGKPRLLHISKRGNGYLRMLLIHGARTALPGLAKKDTPLGRWVKALLARAHRNRRDRSSSQQACTDRLGGARTGPPVCHRSSYRQVKGRKAIEDSTTSASGRNEMASQSIGDLET

SEQ ID NO: 142699 - protein, 311 aa, unidentified
MTHDTIGIDISKLHFDAHRRTTGSHARFDNTAAGFKAFAHWIGAEHPDLVVFEPTGPYHRDFEAAFSGRLQLVKVNPLQARRFAQSQGTRAKTDAVDAAMLARMGRALELVPDRPAEEIQIVLRELRVARSGLVRDRTALMNRLSAARLPLVRRLVKARLAQAERQIATLDAEIEARLEACPKRRRAAQILTSIPGIGRITARSILAECPEIGTLRHKQIAALAGLAPMTRQSGTWCGKARIEGGRRHLRQALFMPALVAMKKNPDLSAKYHALRAAGKPHKVALTALMRKLLILANTLLKENRLWQPKSA

SEQ ID NO: 142700 - protein, 473 aa, unidentified
MAATRISGLNRQQRKELARRLQVADPGLDVVHPNAAGIDVGNSTHYVAVRPDRDSESVRRFDCFTADLYRLADWLQQCGVTTVAMQSTGVYWIPLYEILDARGLDVYLVNARHTKNLPGRKTDVQESQWLLKLHTYGLLRNSFHPTAEIRVVRTYWRQRGDHVRAISTCIQRMQKALTQMNIQLANVISDLSGWTGMRIVRAILAGERDPHTLAALSHPGIQASRATIAKSLEGTWQADLVFILQQEVTMYDAYQQRIAECDQALQDHLKGFANRHPEAPAAGAAPSATPTRRRSDPKPRRRKAGSHAPPFDLGSELRRISGVDLTRIDGIDVSVAQTLISEIGLDMARWPDEHHVASWLGLCPDNRITGGKVIRRGTRHVINRAATALRIGATTLLRSQSYLGAQYRRLRGKLGAPKAITAMAHKLAALVYRMLRWGHEYVDKGMQYYEERHREQQIRLLKKRAAALGLVVV

SEQ ID NO: 142701 - protein, 408 aa, unidentified
MLYIGVDWADDKHDVCIRDADRRVLCEFPIDHDAAGMAKFDETVAALGAEPHECLVAIEKPHGLLVGYLLQAGYIVYAIAPKAVDRYRDRHRQSGAKTDEIDARALADILCIDREFHRPIPSDSPLAQEIKMTSRQHRKLVNECTRIKNQLAACLKEYYPAALDLFSGLDCAITWSFLRVYPNAKAAKKASLIELKAFFDYKGYSCPSKIPEIHNKLQAPAIPVADWQVRVSQRRMLVLVELLAIIVTQIKAYEKRLTELLDQHEDAFIFRSLPNVGDVTAAWLLGEIGDCRDKFESANSMQALAGSCPVTFQSNKQRRIKFRAACCKSFRNGLQQFARLSARGKDGSSWAKAYLNDQISRGHSVSRGTRALGNCWLKIIFRLWKDRVAYDEKIHLRSRAQRGHRVMA

SEQ ID NO: 142702 - protein, 419 aa, unidentified
MLVAGIDIGAESHHVAVVDRAEAVVVKATAFAENAAGYQELFALLARAGARGGADLPLAAASAEQERTLVVMEATGHYWQNLFAALVAQGYAVALVNPLRTHRFAGEELARTKTDSIDCLQLARFGAQKRPAVTCLPEAAVGELRELVRLRARLMQDVVDRVNQLHRLVDLGFPEFTRYLKNLNTQLATAILRQYPTAAAFRGLSYKRLARLSYDGRHRVGEELARQLIAAAAVSVGSQHTTAHQTGVRYACEDLETLRQRLKRLDGDITAGLQQHQVGKLLTTIAGIGDNTAAMLIAELGDPARFHSAASLAAYVGLCPGHRHSGKHQPKKSSSLTPIGNRRIRQALWMPTLSAATCSNPWLMAFYRRLIERGKPHKARAHRRHAQTARSDLLSRQAPPPLRAVLHSQPLDNEVPARL

SEQ ID NO: 142703 - protein, 358 aa, unidentified
MQKYNISFKGQKIFIGIDVHKKNWDVAVAPEVGFVKRHSQKASAKVLIDFLKKHYPDGGYMAVYESGFSGFSTYYALKEVGIDCIVIHAADVPTTQYEEVMKTDRLDSIKLVKSLKAGLLRGIYIREKENLDDRSVIRIRKSIQKELSRYKVMVKHILHNNGVTLPDCFEKPTTHWSGAFMTWLKRDVTLLSSTRNSLDLLIRQVETIRANMLNATRMLRSLSRIERYKHRCELLMTIPGIGVVVAMSILTEIYNVNRFHNEREFAAYLGLIPTSHSSGEKIIHGEKTFRGNKQLGPMIIEAAWSSIAKDPGLGSLYLRYRERMKPQEAIIRIARKLSNIILAVLKSEKEYVPYHMGN

SEQ ID NO: 142704 - protein, 339 aa, unidentified
MKLYAGIDLHANNNYLAIIDENDTRVYKRKLPNEPDVILAELEPFKKDISGIVVESTFNWYWLVDLLMESGYCLHLANPAAIQKYKGLKHSDDNHDAFWLAHMLRLNILPEGYIYPKEDRPIRDLLRKRGHLVQVRTALINSLQGIISRNCGCSLNSNKIKAFKEDYVTPLLSGQEDLELSGTVSKDCIDFLTRKIRDIEQVIKGKTKLRQSFIGLQTIPGVGLILALTIMLETGTISRFSKVGQYSSYCRKVPSKWTSNNKKKGKGNVKNGNKYLAWAFSEAAELSKRYDDSAKAFYNKKTAKTNRMVAHAALAHKLARASYYIMKDGVAFDSNKLFS

SEQ ID NO: 142705 - protein, 424 aa, unidentified
MDAKDQNRWEPRRYYMGLDWAKQEHAIVVVDRKGRIRVDTSIKHTAEGWHRLREKLVALAGPDLSLVAATIETNRGPAVERLLELGCAVYPINPNAARWYRARKTPSGSKTDRLDALSFADALRTDGQGWRPLNPEDPKTQELRLLCRDETSLIEQQTTLVNQLQQALHEYYPAVLEAFDDWTCPSSWAFIERFPTPQVLKKAGQRHWEKFLHTHRLYRPQTYQKRLAIFAGATEFCGSDAVTNAKSMLAVSLAKQLRLLEQQLKAYRKRIEAIFQEHCDYGIFASLPGVGEKLGPRLLSEFSNDRDRFPTYEGLQCYAGTAPVSFQSGQIHRVRFRYACNKNLRAAVHLWADLSRKKCVWAQVYYQQKRLEGKSHACALRCLGQRWLKILWKMWQTKTPYDEQMHTRNQIEHGSWVLALTASK

SEQ ID NO: 142706 - protein, 422 aa, unidentified
MDSQDGKVEYAAFIGLDWGSEKHAFALQCAGSNEIEPGEIKQKPEEFHAWCLKLQDKFGGRPVALAIEQSKGAVIYALLSYSFVHIFRINPLSLASYRKAFSVSGAKDDPADAELLLDWVRLHRERIKPWVPDNPETRALQRLVEFRRQVVDQRVEFTNRLTQVLKEYFPQALDWAGDIDSVMACDFLTKWPTLEKAKKVRPDTMRTFYRRHNCRRAEVIEERLKTICTACALTADSAVIETSVIVVQTIVGTLRPLLESIDRINEEIRKRFDAHPDREIFDSFPGAGEVLAPRLLTAMGSDRNRYESAPEVQMYSGTAPVTDRSGKHKWIHRRFACPKFLKQSFHEFAGQSIKFSEWARAYYEMQRGRGLTHHAAVRALAYKWIRIIFRCWKDRVTYDETIYMESLRRKKARLLEYLDAAA

SEQ ID NO: 142707 - protein, 353 aa, unidentified
MNDIKYVGMDVHKAITVIVVLNALGQMESHSKVKTKAENICDFFRGLSGKVEVVFEEGTHSAWLYKLLKPLVASVTVCDPRHNKLIGDQNKSDDEDAETLALLLRLGAVKAIYKGDDQQQQLKELCRAYTNLVEDSTRIRNRLKAIYRGRGIDCPGQAIYRSDRREAWLAKLPEEAARFRATSLLEQLDALSQLRKRAKQRLTAQARGHADYPILLKLPGFGPVRVAQLIAIVGTPHRFRTKRQFWPYCGFAVVTRSSADYQFVDGKIVKQQKKVSTRGLNRNHNPQLKLVFKSAALTAMRHTAVKTYYQRLIDDGVRPELARVSVARKLASIALAVWQRREEFDARKTFAQT

SEQ ID NO: 142708 - protein, 363 aa, unidentified
MEKYILKSAVNDHLPAPGQIVYIGIDQGLNKWVYAIRWGGELRQVLAGPSELGHLQALVKRFTGHEVRIVHEACGFGYGISRWAQDYKDQVVRVTVVPPSTIEQRPGRRVKTDRIDARKLVLKLEQGDLKSVWVPSIEQEVARQISRTQQQVAKERRRTQTQVRSLLRAHGYKAPAEAKSWSGYERWLQQLPLPEALQHCVGHLLAVRRQAAHSAQKMLCRLREMSAAEPYAKVVKAWTTLSGVGWLSAMRIRLELGEVRRFARRGSLPHYLGLTPSEYSTGDEINRGPVLRCGPARVRSQLIENAWIAVRRDPAVRARFTRLAGARPTAQQRKIAIVAVAHRRAMQLRALWKEAEAAAQPTT

SEQ ID NO: 142709 - protein, 422 aa, unidentified
MLEETQETEEIIQRVAALDIGKAELTCCVRVPSPGKRGRRAQEVRTYQTMTRSLLVMADRLAELGVTRVVMEATSDYWKGVFYLLEAHGFETWLVNARDVKHLPGRPKTDTLDAVWLCKVAERQMLRPSFVPPRGIRQLRDVTRYRADLVGVRTAEKQRVEKLLEDAQIKLSVVASDIFGVSGRAMLAALLAGERDPKRLAQLARARMRAKLSLLEEAFTGFFTDHHGFLLARMLDRVDGLSADIAALDTRIEALIGPFAQAVDRLDEIPGVGQTAAHLLIAELGVDMARFPTAGHLVSWAKFAPGVKESAGKRKGTATTGHGNPYLARVLGEAAVAAGRTDTFLGERYRRIARRRGVNKAIVAVGRSILVIIWHLLADPTTRFQDLGAGFYDTRLNADRAKRNHIRQLEALGYKVTLEPAA

SEQ ID NO: 142710 - protein, 370 aa, unidentified
MSVRRILAKTINTDLEYEAIGIDLAKNCVSVALLTTDGEVVCIDRLDYSELEKSAQVLCPTTFAMEPCTEMNYLVQKLEAWGHRCLVIGGKNVQNYVENHYSGQKTDLNDAQALAFLAQDTQLRTIKAKDMEQQKYASLTTLREQYIKQYRQTIVSLKGICQAWGLNISKGISGKARLKDLIENHAAFPEELKESLVDMVTHAQTTQKVLNKITKTLEVLAKNDKVCQLIQTIPGLGTICSCRLRATIGDIKRFKNPKDFPAYYGLVPRSIATGHNERKGKITHRGDRTMRSLMVQGAGSVVNMATKGKLKSKQLTKWILKKQKEKMPWGKLVCAVAAKLLRVVRAVLISNKPYNSKIAGVAKCSLPKGS

SEQ ID NO: 142711 - protein, 415 aa, unidentified
MNPLYRRIAGLDVHRMLYVLTVLIELDDGTLEKHQRSFGGFKRDRRALVAWLLELGVGLVVMESTGIYWKSIYAALEQAGIPAMVVNARHVKNVPGRKTDISDSEWLAQLGRFGLVKPSFIPPQDLRELRLVSRYRQKLAQILAGEKNRLHKILDDGGIKLGAVVSDIHGVSAEAMIEGLIEGRPIEQLPDLAQGTLRNKRELLEQSLDGELSPRHRFVLQHIQQHIHSLEAELAQLDAYLINAMAPYAPSWHLLQTLPGIDYISAALILVEIGTDLSVFGGAAQFASWAGLCPGNHESAGKRKTGKTRKGNHAIRYLLCEAANAARRTKSSLASKYQSLVGRKGHKKAIIALGHQMIRIIYFMFTYRQAYRDAGIDYQALVVDRNAPRWIQALKKYGYWPVSTPAESPIPAPVH

SEQ ID NO: 142712 - protein, 312 aa, unidentified
MAMLSFCGVDVSKDRLDMVVLPEGWFFSVSNDTAGWAELVARLRPLTVSAIGLEPSGGYERGIIRALLAAGLSVRRINPSNLRQFARARGVLAKNDRLDARLIAEYVAIMPTRVVQRDAAVERLAEIVTMRRQLCDEHVAAENQAAHLEDAMLRRLSKRRQTRLEADIRLLDKRLAEMVAANVALAQRYELLTSMPGVGPVLAFTLIALLPELGKMSRKQIAALVGLAPYDFDSGKLKGHRSIYGGRMPVRNVLYMAALSASRYSPALKTFHKRLAAADKKSKVIIVAVMRKMITTLNAMLRDNAAWQPRSA

SEQ ID NO: 142713 - protein, 429 aa, unidentified
MSYRIAGIDVHKKMLAVVVSNVEVESEFQFERRMFGANPEQLRLLAAWLLEQEAEEVVMESTAQYWKPVWGALERYWKPIREKREGAKRRSGTLHLAQAQSNRGRRGRKKDFVDAERLVKRLVARELTLSFVPDAEQRLWRAVTRKKYQLRRDVVRLHNQLESLLEETHIKLSSLVSDLLGVSARRMLKALADGETNPAALAALAHQRLRATPEQLCDALGACTELKPVYRRLLKMTLEHLQILEQQIGQLDQELATLLHPHQDAVQRLAEVPGFAADSAQQIIAEVGPTAATFPSEKCLSSWVGACPGDEESAGVNYSHRSPKGNRQMRRLLNQAANAAIKVKGSIFEVIYRRCVPRLGHNQAIGVIAHRQCRLIWLILHNGARYEEQGPAVTTLSKYKRTWRMIRQLQQLGYRIESPKPQPSQAQAQ

SEQ ID NO: 142714 - protein, 342 aa, unidentified
MDYYAGIDVSLEWSSVCVVDGGGKIVREGKVASEPEALIAWFGSLEPAPTRVGLEAGPLSQWLYMAMRSAGLAVELLETRHVSDAFKAMAVKSDRNDARNIAQLMRLGWFRPVHCKSLAAQEVRALLTARKLVQGKLLDIENGLRGILRGFGLKIGKTTRTGFAGRVVELVHGHSNLQTIAQALLRARAVLLAEFKSFEKQVRQTSRLHAQARLLMSTPAVGPVISLTYACAIDDPSRFTSCKQAGPHFGLTPKRYQSGETDYSGRISKIGDASVREALYEAAHLILTKPIKGCSQLKGWATRIARRAGMSKAKVALARKLAVIMLRMLKDNMPFNPVAKPV

SEQ ID NO: 142715 - protein, 343 aa, unidentified
MDHFAGLDVSVKETSVCIVDDTGKIVREVKVASEPDALLAVLANPTYRLRRIGLEAGPLSQWLFSALANAGLPVICVETRHIRAALKAQINKTDRNDARGIAQMMRAGLYRAVHVKTLRSQKLRMLLTHRKLLQSKAIAIENDLRGTLRNFGLKVGMVGTVRFEERIKELVENLPDLAVLVEPLLIVRQTLREQFGILHRRLLAIVRDDEVCRRLMTVPGVGPVVALTYRATVDVPARFRKSKAVGAVFGLTPSKYQSGEINRTGAISRCGDEMMRMMLYEAAQVMLLRSAKWSWLKAWAMKIARNRGMKKAIVALARRLAVIMHRIWVDGTEFRWTREFAAA

SEQ ID NO: 142716 - protein, 336 aa, unidentified
MRYIGVDLHTTQITVCYLTEKEEVAIQKYQLCEIERFITGLSLSDEIAVEATGNTRWFVEQVRGACGRVVLVNPRQFDVVKNSVKKTDRNDAINLALFLKADMLPEVRAKKEEADKVQSLVGTRTKLVRLKTSLINKIHALSVSKGRKLRKTSLASEKGLEKVLQEEWTEVERIELDIVIEQIRSLKAGIKKLDTAIATESEKLTGYRNLVSISGIGSLSAGILLSVIGEVKDFTNADKLASYFGIVPRVSNSNETVNHGRITKHGNKTGRTTLVQCSLAAIKKNDYLRRYYEQVKTRRGHGKAKIALARKYLKIIYSTLTNNWVFADFNNFELAE

SEQ ID NO: 142717 - protein, 346 aa, unidentified
MRIIGCDYHPSWQQVCWLDTETGETAEQKLVHASGEAQKFYQQLPAPARIGMESTGNCQWFVEMVTAAGHEVWIGDAAKIRASDVRQQKHDRRDAALLLQLLREGRFPRIWTPSSQERDLRQLLIHRYKLVRLRAQAKNGLQHLALNQGLQRKRRLWSEAGQKMLRELPLKPWASRRREDLFGVLAMLDQQIESLDLAVKEAAEKDAQARLLMTQPGVGPVTSLAFVLTLGDVKRFPRGKQVASYLGLIPREYSSGGHQRLGSISKQGNRFLRMLLVEAAQVAVRCDPGMRSEYLHRCHTKPKGVAKVAAARKLAIRLYWMLRTQKPYPEIVRIESSSRVALVSES

SEQ ID NO: 142718 - protein, 337 aa, unidentified
MGIDVHKKHWNVFIMSKHKEHKGFSQPPEAAILARYLRSNFPGASCYSVYEAGFCGFWPHQDLLKEGIHNIVVNPADVPSMDKEKKNKSDKVDCRKLCKRLRSGDLESIYVPDRIQLEDRELVRLRMKLTRDERRCKCRIKGMLNFYGIKCSSSGWSKVFINWLKGLKLSTTSGTFALQTLIQELEQISDLRKRVARQLRILIKDDNYAELIKLLYSIPGVGLVTALTFLTEVGDTSRFKRVDQLCNYIGLVPSLHSSGDKEHVGNLTPRKNTHIMAVLIESAWTAVGKDPALIHAYHKLCRRMKGQEAIIRIARKLIARMRYVLLNHTQYQLRVAA

SEQ ID NO: 142719 - protein, 356 aa, unidentified
MTQETPARSGHVVIGVDTHKHIHVAAVMDTIGGILATLTIATDTVGFKQLLAWAQGFGKIISFGIEGTGSYGAGLTSFLRRQGHKVVEVSRPDRRLRRLNGKSDTLDAENAARAVLAGFATATPKTMDGAVEMIRQLKVAHDTAVKQKAATMVTLKAMLVHAPEELRAETARKTQRALARYCAAFRPRRLASPEDANRHTLRSLAKRWLMLDEEIKELTGMIKELVLERAPHLLDEFGIGVDTAAEILIVAGDNPERIKSEAAFAKLAGISPIPAGSGMTSGKHRINHGGHRQLNAAIYRTVIVRMRFHQPTIEYVARRTAEGKSKRDIIRCLKRYVIRELYHLVKVNPRTGEIMS

SEQ ID NO: 142720 - protein, 416 aa, unidentified
MNAVGIDVSSRKSTVAVLRPLGEVVCLPFDVTHDIAGLASLAEKLKAIDGETRVVMEHTGRYYEAVAKALHEAGFFVCAVNPLLIKEYGANSLRRVKTDKADAIKIARYALDNWADLRDFTPMDAIRYDLKTLNRQFQLASKQRTASANNLIALLEQSFPGIRKCFDSPVRSDGTQKWVDFAHSFWHVDCVRKQPFAAFCERYRKWCKRHAYLFKLSNAEEVYALAKRAVVLTPKSKVVKVLVQEAANQLISISRSVEVYRAEMDRLAAMLPEYPVVMAMYGVGKSYGPQLMAEIGDVRRFERKQALVAFAGIDPMPNQSGDKNVRSNKSSKRGSPYLRKTLFNVIRTYLQCAPQDEPVFQFLNRKRAEGKPFYVYMLAAANKFLRRYYAKLRDYFATLDTLQPVAPIPTILKATL

SEQ ID NO: 142721 - protein, 345 aa, unidentified
MEEITTVGIDLAKSVFQVHAVDGAGQLVLSKAVRRSGFLAMIGKFPACLIGMEACASSHHWARELIKLGHDVRLIPPTYVKAYVRRQKNDAADAAAICEAVSRPSMRFVPVKSEDQQAVLMLHRTRALLVGQRTALICALRGHLAEFGLVSPTGPRNLPPLLAILADEADASVPTLARRALAPLVQQIDALETQIDHLDRQIQTWHGGNKTSQRLAAIPGVGPLTATALTASITDPKLFKSGREFAAFLGLTPRQSSSGGKERLGRISKMGDRYLRMLLVVGATAVLRHAKAKGSASRIWAEDLMTRKPFKLVAVALANKTARIAWAVMARGEDYRAMQPLKAAA

SEQ ID NO: 142722 - protein, 421 aa, unidentified
MKGLRAQRVRRVKEGTLIATVDIGITSNTGYCTTLDGRSTKPFRFDNTKEGFEKFWCMTLASKNRFGCDEVLVGYESTGPYAEPLVHYLAHKQIKIVQVNPMHTKKMKEVNDNSPLKTDDKDPRVIADIIRLGRALTVVVPEGDAAYLRRLNNARERHVREQTALLNQLQQLVFLIFPEFKTVLKNMKGKTAQYILKRYTTPERIGTLSKEALGEEMRKRSMGKFGVKEAESLIGLARETVGIKEGISGIFMDIRHILLQLEAEVRFISEIEAEMGATLERIPWSVRLLSIKGLGTVSVAGLIGEVGDFSKFSTQAEIMKLAGLDLYEISSGKRKGQRRISKRGRSLLRKILFYAAIQMIRKNGIMHDYYARLTGRGMERMRALIAVSRKLLRIIHAIVRDNRDYVGQYQAPEKRVIKMAA

SEQ ID NO: 142723 - protein, 318 aa, unidentified
MENQPTNTKKIMPNIIAIDIAKDSLQVHCAYGSFSLENGPRGFKALLSRLPDRDAILVVFEATGGYERALGEFLHAQNVPLSVVNPRLLRAFAKSEGIKAKTDPIDAEMISRFATGKNLRPSPAPCAQQTQLSDLIDRRAQLAEFIAREKNRAQKTSHKAVIASLRRNIKALEKELSLIENQIRKLLDTHSELKASCRVITSVKGVGEVTAWTLLSQLREITAVNRNQLVALAGVAPYNNDSGAHRGKRFIYGGRSKVRRVLDMAAHTAARHNPVIHRYVEGLLARGKPYKCAITAAMRKLLLHIQSLLKSHELSLVS

SEQ ID NO: 142724 - protein, 449 aa, unidentified
MSKVGKTLGLPIVNARAAGIDIGARIQVAAVPPELSDDPVRTFGSFTADIETMANWLVSVGITTVAMESTGVYWVPVYEILEEHGLAVVRANARDCKAVPGRKSDVYDAQWLQRLHACGLLRPSFHPARDIAALRAYMRIRDRHLEYAAAHMQHMQKALTLMNLQLHHVLSDISGVTGLKIIRAIVAGERNPDVLASMRDVRCRESLQTIRAALVGNYQPEHVFALSQALALFDSYQDRIADCDQQIENSLRQLNAGRPEPETKLPAPRTRTKQANAPKFEVRAMLYQLTGTDLTLIHGLGPSIALSLVAECGTDLGKWPTEKHFTSWLCLSPGCKISGGKVLSAHTRKSSSRLSSQLRLVAVNVGRTDTALGAFYRRLAARIGKAKAVTATARKLAILFYRAMRFGMQYQDPGADQYEQRYRERVVKQLERRAARFGFSLQPVPEGVS

SEQ ID NO: 142725 - protein, 352 aa, unidentified
MRYLGMDVHAKSTVWCLLDAQGEVVSEGHTPTTAALLAALVRELAQEDTVLAGQEVGTLTYLVHDAVTAAGTTLLSFNAQSLRMIAASRKKTDRRDAYWLAKALQSGMYPHPVYVPTGEIRELRARLSQRRVLHTDYNRWRYRARTYLRAGGYPVAPGGTALRAALAPGNAGTRGARTSLTDALGLCQRQEAALRAELAQVDATLRGRTQAVAAIQRLMTVPGIGPLTATTIYAWVGDVRRFPHAKQLAAYAGLVPAVRQSGGTVHVGGITKQGAPALRATLVQAAHVLLSRCRGADARPLQAIGLRIRGTRGRRKIAVVAVARHLLRIAYYILRDGTTYDAHRLGTMTDAA

SEQ ID NO: 142726 - protein, 432 aa, unidentified
MDVIHPRVAGIDVHKKVVWVAVRLPGERPGERTVTVKRFRTFWRELQKMAGWLAGLGVSDAALESTGVYWWPVYHALAGAGIEVCVCNAAHMRNVPGRKTDLADCQWIAELHEYGLLRPSFIPDAQVAVLRQRTRYRKKLIEQRTSEGQRLSKVLEDAGIKIGSVASDMLGVSGRAMIEALIGGERDPGRLAGLARGVLRRKADQLAMACDGRFTAAHGQMCRLHLDAYDHLTGKIAELDALVAEAAAPFAALIARLVTIPGIGQRTAQVIIAETGGDMARFATAARLAAWAGLAPGDNESAGRRKKAPARKGDRHLRTAMVEAAWATRRTATRPGARFRRLARRFGKGNEKKAAVAVAHTLLNIAWAVMRYDAGYTDAGTDYYERRDQRNREHLIRYHQNALARLGIPVTATPPGDGAPPAPPAGNPGQAA

SEQ ID NO: 142727 - protein, 387 aa, unidentified
MRRSKSRIVGLDVHPDSFAGAILQGMDPWKARVVSTSTRVALPLLEKWVLRHTREEDILVMEASGNAFCVAERLRALKHKVVILESHRAGKVGKTYCATDRVDAIKIARIYLSALSPVVWQPDAKTRERREVFSAYQAVVKEGMRLKQQIKSMLNEHCVRLEKGFRLSHPSAIVRLLQRRKWTPAQKMLLQQLHAGLVGARARRQQLRHYMAQEVLAQKELLRLTRLCGINLITLYGLIAAIGEIQRFATARKLSAYFGLNPSVEQSGNYEGSGALKRHGRGAIRALLVQSAKKLLQVDNPLQKWGLAIAMRRGRNKAAVAVARKLCVAVWHVMQGHVIGAIERMDTLHTKLHKLATDLGLSAIKQLGYDTKEAFVQKKLFLLRSYA

SEQ ID NO: 142728 - protein, 406 aa, unidentified
MKHVVAFDVSMGKSVMTVYDRYKRCEYEGEIEHTRSSFQLLHERLQQLKILDGQAPEIVFEATGVYSKGLEKFLCDHGYRYSRMNPLEANLQMASMRRHKTDKSDAHELAKTHFKMERDYTYQQDEYDEQIRALTRYYDEVDTEINHLWNRMHAILQLSFPELEQIITPRSALFLNIVQLYPHPTVLIAHSKTVIRNRLKDNTRKNLSLKRAEEKAIILLEVAKESYPAISSTDVRCEQVKDYAKRIADLKEKKEQLVKQMVELSKDRSEFQVLISFPGIGETTAVRIIGELGDICRFKNHKQLNAYVGIDIMRYQSGNTHYQDRINKRGNKKLRKILFYMMKTMITLRKKTSNHLVDYYDKLKTQPQRKPHKVAIIACMNKFLKLIFHLIQHNVPYDYDTAISCA

SEQ ID NO: 142729 - protein, 347 aa, unidentified
MDHIGIDVHKKESQICILAEGGERLERRVPTQGRRFAEELGARPHARILLESATESEWVARCLEGLGHKVVVADPNFAPMYATRTRKVKTDRRDARALAEACLLGAYRPAHRLSDAQRHVRARLTVRDTLVRTRTRYISLVRALLRQRGWPVPTGSAEGFGRRVMTLPLPGRLRAEVAPLLAVMRHLQQQLAYSDERIAAVTQTDERVRRLQSVPNIGPVTAAAFVAALDDAARFRRAQEVEAYLGLVPRELSSGETQRRGRITKAGSSRVRWLLIQAAVSMLRLHDPRTAALREWAGRIAARRGKGIAVVALARRLAGILFALLRDGTVYESRQRALAAMPPAVPA

SEQ ID NO: 142730 - protein, 355 aa, unidentified
MNQEKYIGMEVHQATISVAVMDGKGKLIMECILETKADTILEFVHGLRGTVSVTFEEGTSAAWLHDLLKPHVAYLVVCDPRKNALLKDGSKSDRIDARKLAELLRGHQLHSVYHGEHGVRTLKELGRSYQTLTKDVTRVMSRSKALYRSWAIPCSGTTVYAARHRAEWLAKIPQPGVRLRAERLYQQLDLLQPVRQEARRDLLRESRKHEAVKRLQQIPAIGPIRAALLVALLQTPHRFRTKRQLWAYSGFAIETHDSGEYRYVRGKVQRNRERITVRGLNDNHNHDLKNLFKGAALSASTQPGPLHDFYTALVEKGMRPTMARLTLARKIAAISLTIGKKGVSFDAQQLHRQAA

SEQ ID NO: 142731 - protein, 378 aa, unidentified
MKEITTYVGVDAHKKDLFIAMLIGNERTPVTWTVPNEPNAVRRLVRKLEREAPGPVRMCYEAGPCGYALQRQVATARVSCQVIAPSLIPRKPGERIKTNRRDAKKLAELFRAGLLTEVRPPTPADEAVRDLCRARDDARDDLQRSRHRLGKLLLRRGLHYSAGRNWTQGHRRWIASLQWAHPSERVVVDDYLLAIDHLEARLIELDARLVEIADTEPYRERVGWLRCFRGIDTLTAILMLAELHDFQRFPSAPALMAYVGLVPGEDSSGEKQRRGRITRMGNALVRRLLVEMAWHYQHRPHAPAQRAAEPCDCDRGQSTAATVPAIPTLRGTAQARAQDRGGDRARAGGLPVGGAPTSAGTHALRHRRRRRAGECTRP

SEQ ID NO: 142732 - protein, 337 aa, unidentified
MKRYLGVDLHRTQLTVCTRLESGEESVREWAMKDLGKFIEQLRGEDEMAVEATGTTARFYDAVVGRVRRVVVVNPHKFKVISESVSKTDGKDCRELALFLSKDLLPEVRMKPKKQRELTHMAETRDLLVKQRSALKTKINNLLAMQGINLKREALSSKVALERVLALEVSAMVKLELRVLVEQIRGLSTSIGELEELIAEEGEQLPGHENLTSIKGIGSLSATVLLTTIGSVGDFADENKLAAYLGLVPRVQNSNETERNGAITKLGNKLARTALVQCGLVAKRYSPYLNRFYERIKQRRGGGKAKIALARKMVKIVYDTLKNDWVFDDFPSFTLAA

SEQ ID NO: 142733 - protein, 454 aa, unidentified
MGQSKTKKRSCKKRFSTINPSAAGIDVGSQFHVVAVPADRDEDAVRTFQSFTGDLHRLADWLCACQIKTVAMESTGIYWIPLYEILVAQDIEVVVANARDVKHVPGRKTDVNDAQWLQQLHEYGLLRGSFHPPSDIAALRAYLRQRERLLDYAASHIQHMQKALMQMNLQLHHVVSDITGRTGMRIIRAILEGTQDPTELAKLRDVRCKASVETIAQALEGNYRPEHLLALQQAASLYDTYQGHVTECDQYIEALMVHLRTPEPPEVPLPSPRHRTRQPNALNFDVRSALYAIIGVDLTQIHGFGPYLAIKMVSECGTDMSKWPTAKHFTSWLCLAPGNKISGGKVLSSHTRRSKNRATALLRLAAVNVGKTQSALGAFYRRLAARVGKAKAVTATARKLAVLFYNTLRYGTNYSDPGASYYEERHRVRVLNNLSRRATELGYVLEPAPEVGVS

SEQ ID NO: 142734 - protein, 348 aa, unidentified
MQIKRVGLDLAKRSIQVHGVDRDERVILKRSVKRDDLLKLFATLPPCLIGMEACSGAHHWARELSRLGHDVRLMAVKHVKPYLQGQKNDANDAAAICEAVSRPKMRYVAVKSVAQQDAQALHRIRSQWVTHRTAKVNLIRGLLAEYGIAIPQQVRHLRRAIVDLLEDAENGLSAEFRVLLSDLRDDLTFADQRVDELTRRIEAHATDHETARRLLALPGVGPISASALVACAGDGSSFRHGRNLAAFLGLTPKQHSTGGKSTLLGIHKQGDSYVRGLLIHGARAVQRTAVHKTDPRSQWLNAIGERRHKNIATTAQANKTARIAWAILRGATYCADPPRRLTPTPACA

SEQ ID NO: 142735 - protein, 346 aa, unidentified
MKQVSTIGLDLAKNVFQIHGADAEGAPIFNRKLRRAELLVFFEKLSPCLVGLEACGGSHYWAREIAALGHDVRLIPPIYVKPFVKRGKTDAADAEAISEAVTRKTMRFVPIKSADQQAAAMVLRTRALLIRQQTQAINALRGHLSELGVVAALGTAKVAALIEIVRGEEDICLPKAARLALAEIADQIEALTRQIDKLERGIVGEAKRDEDMRRLTTIPGVGAITAATVKALIPDPDGFKSGRHFAAWLGLTPKPHSSGGKERLGGISKMGNPPLRSLLVCGATSVLRRVKGNDKAPRWLVALLARRPFKVVAIALANKMARIIWALLTRGGTYRNTGAASGAAHA

SEQ ID NO: 142736 - protein, 417 aa, unidentified
MTQTLPDTFAAFVGIDWADAKHDICLQVTGTAKRECFQLEHTPEAIDAWVTTLRTRFSGQPIAICLELTKGPLVSALRKYDFLVLFPINPLTLARYREAFTPSRAKDDPTDAELQLELLLTHRDKLQRLQPQSPTMRALEQLVEHRRRLVGDKVRITNRLTSALKNYFPQVLQWFQDKDTHLFCDFLSRWPTLKAAQLARRSTLEAFFRDHHVYGEDVLAKRLHAVKTATPLTTDEGVIAPQALLVQALTSQLRVTLDAIEAFDQAIAQRAQCHPDFPLFQALPGAGPVFASRLLVAFGEQRERYTSAAALQKYAGVAPVTERSGKKAWVHWRLQCPKFLRQTFVEWAAESIRHSFWAQVYYQKQRAKGNTHQAAVRALAFKWIRILYRCWQDRTPYDESVYLQALYRRGQNLAEAS

SEQ ID NO: 142737 - protein, 391 aa, unidentified
MVCVGIDVAKDKHDCCILDSDGTVRADCFTIPNNMDGFKQLLQTIRDCTKKSDKIKVGLEATGHYSYNILGFLLDNGLPTYVINPLHTNLYRKSLSLRKTKTDRVDARTIATMLLSDVDLKSYTDIAYHNEDLKSLTRYRFDKVQERAKLKQSVSRLATILFPELEQLVSSIHGTSIYALLGEYPGAKQISEVHLTKLTNLLTTASKGRYGKEKAIQIREAARASIGSVMPAKSLELKHTIKLIQELASEINEIEDSIQKIIDELNPPILSIPGMGVNSAAVILAEIGDFSNFSSPDKILAYAGCSPSTYQSGKLTNCYAHMEKRGSRYLRHALYNATKYVCYWNPVFAEYLAKKRAEGKHYNVALSHAMKKLVRLIYALQKSGKAYLAAA

SEQ ID NO: 142738 - protein, 374 aa, unidentified
MGTQGITFVGMDAHKKAINVAMLLPGQLEPVEWQVANEPAAIRRLARKLEREASGEVRCCYEAGPCGYVLMRQLEAAGGVVCEVVAPSLIPVKPGERIKTDRRDAHKLARLLRSDDLTRVHPPTAADEAVRDLCRCREDARRDLLRTRHRLATFLQRRACLYTLTRRTWGQPYRAWLQGLTFEHAPDQVTLADYVTGIEQIEQRVGSLDQQLAILAEQAPYREPVAWLRCFRGIDTGTAIALVSELHDFRRFETARALMAYLGLVPSEYSSGEQRRQGAITKAGNTHVRRLLIEAAWHYRHRPHVGVGLRQRRANQPSAIIAIADRAQHRLYHRFHKLMQRGKPSPKVVVAIARELVGFVWAALYPAASGASAR

SEQ ID NO: 142739 - protein, 346 aa, unidentified
MEHYAGIDVSLELSSVCVVDAKGKIVKEAKVASEPDALVSVFDGLGFPVQRIGLEAGPLSQWLHAGLARAGLETVLLETRHVKAALSAMTVKTDRKDARGLAQLLRMGWFRPVHAKSIGSQEMRALLVARKQLLGKLIDVELSIRGILRGFGLKVGQVTRKEFEVRIWELVMGQATLERIAGAMLSARATLKAEYEKLHKAVLAIVREDAVCRKLMTVPGVGPLVAVTFKSAVDDPRRITKSKAVGALFGLTPKKYQSGEKDITGGITRAGDGMVRTALYEAANVLLSRITRFSKLKRWGMDVAKRRGSKRAKVALARKIGVILHRMWVDGTTYRWREAKLIAARA

SEQ ID NO: 142740 - protein, 337 aa, unidentified
MKDCTVFVGLDYHQSSVQVCVMNSQGEVLLNRACRNDWPCIAQAVLRCGCPARVAIESCTGAADLAEELIDHAGWHVDLAHPGYVQRMKGSPDKSDFTDAHMLADLERVGYLPRVWLAPEEVRELRRLIRYRQQLVNDRRNIKLRISALLRDQRVRNAPGRPWTQAWLSWIRETRALSEQSTWIVGRMLGRMDAVLQDIVAVEERLTHVTRNDSVVETLQTFAGIGPVTAWTLRAEIGRFDRFRNGKQLARFCGLSPRNASSGTRQADAGLIKAGNRQLRAILMQTAHRLIRWEPRWIDFAGELTRRGKPKCVVVAATANRWVRWLYHQMQPQRLAA

SEQ ID NO: 142741 - protein, 338 aa, unidentified
MVEGTVGSHHKEGSTKMGQDSIVCAGIDTGKRKLDVALADGEHGQVDNSADGHSRLSTWLRRRRVERVGIEASGGYEQDIVARLRRDGFVVVVFQPAQVRAYAKFHLQRAKNDKIDAALIAACTAAIKKIHAPPDPRLAPLAQQLTFLDQIDEDIARCKTRRESCRDGRLRRFWDEEIARLKRLVRAELKAIVAAIRQHRDLATRLDLIASVDGIGLKTAVAILVRMPEIGAVTRAQAAALAGLAPYDADSGEQIGLRHIAGGRARLRMSLYAAALPAAFHWNRPLIALYRRLTAAGKAHKSALVACARKLLIYVNTVVARGTPWHATPPAAALRPGG

SEQ ID NO: 142742 - protein, 420 aa, unidentified
MKEPTITDFAALIGIDWADKKHDVCENPAGSSVFEDSIISNKPESLHEWAMSLKKRYPNQSIAVACELTKGPLIYALLKYDHLTLFSINPSTVAKYRKAFSHSGAKNDPSDARLQVDILSLHMNKLDTICPEKPTVRALAQLLEYRRKVVQDRVDLTNRITAILKNYYPQVLDWFKEKDTSIFCDFLMKWPSLDAVKKVRQQTLLNFFNQHHSRYMAVNEKRIENIKSAMALTDDRGVIEPNQIMIEVLIPQLKSLLDAIERLDKEIKQRYKNQKDRIIFDSLPGAGPQLSPRIFVAFGTDRTRYDDANAVHKYVGVAPVIEQSGQKKWTHWRYSCPTFLRQTFVEWAGQSVRYSFWAKAYYEQQKQKGKPHNTIIRALAFKWIRIAYKCWQTNTPYDESKYLKALKKNGSPLLNFAVNN

SEQ ID NO: 142743 - protein, 324 aa, unidentified
MTDAVLGIDVSKNTFDTNLGAGTKARSKSFANSPAGWHHLIAWLGEHKIGQVHACLEATGRHGLGIALALHQAGHVVSVVNPAQIRDFARTKLGRNKTDQVDAVHIREYAELFKPRPWTPPSPAMRRLCELQTIRAGTVAGLTEWKNRRHSGIMDDLAQSLAKTTIQHFTSQLEAVDQAIAETIDNDVELSAKRDLLVSVNGVGEALAGIVLAELPGPDILGSSAAVTAYAGLNPQQHQSGISVNRPVRISKIGNAVLRTALYMPALSAMRYNPAVAALVDRLKAQGRLKGKQIVIAAMRKLLVLCFGVLKTGKVFDPAMAMGK

SEQ ID NO: 142744 - protein, 405 aa, unidentified
MSNDVFVGLDWAVHTHAVCVIDAAGAVLDRFEIAHDRDGLAELMLRLARFGERVRIAIERPSGLIVDALVEAGHHVFPIHPNAVKASRPRYRSHGAKSDASDAYLLADLLRTDGHRWRELSPQSDSIRALRALVRSRDDLVATRVALGNQLQSTLEAFWPGAACIFADITSPIGLAFLKRYPSPASAARLSEAALGRFCRSQHYSGRRSPAELMARLHSAAVGLAGPLTNEAAAQLVRSMVAVLHPLVEQIAQLTRRIERFVESLPDGQIIMSFPRAGHVCAAQILAELGDVRERFPSLDQLASEAGAVPVTYQSGKTRSVAFRWACNHRLRKAVTCLADNSRHANAWARGIYTAARGRGCDHPHAIRILARAWLRVIWRAWTDRIPYDPGLHVSAQKLASDQGG

SEQ ID NO: 142745 - protein, 483 aa, unidentified
MKSKRVEKYKKASCRPTPNNWHQMNRKQRREMTRKIQSEDLSLEIVHPDAAGIDIGNESHYVAVPATRDSQPVRHFGCTTAELKAMADWLKQCAIRTIALQSTGVYWIAIYDILKEAGFEVYLVNANQTKNLPGRKSDVQESQWLMKLHTYGLLRNSFRPSQEIRTMRTYWRQRNDLVRAAGRHIQRMQKALTQMNIQLANVLSDVSGMTGQAIVKAILAGERDPYQLAALRNWRVKASEEEIARSLEGNWQNDLLFVLQQEQDGYEFCQKQMAECDQRLQQYLQQQEDQSHGASLPEEKRKERLRKKKKGNAPQFDLRAELFRMTGTDLTQIDGIDVTTTMTILSEAGWDMSKWKTEHHFVSWLRLCPDNRISGDKIIGKGRLPTNNRVTNALRMAASTLRLSNTYLGAQFRRLRSKLGAPVAIKAMAAKLARLVYRMLRYGMQFVDRGADFYDAQHRKLQINYLKRKAANLGFQIIEAPAA

SEQ ID NO: 142746 - protein, 343 aa, unidentified
MIHSIEPEIYVGLDYHSKTVQAAILDRGGAVLANRSLPNDVEAVVAFCGRHGRVRGVAIEACCGAADFAHRLIESTGWSTDLAHPGFVGRMKQSPDKSDHSDAHVLADLSRVGYLPRVWLAPTYIRELRHLDSARDGIAADIRRSKQRVQALLREQRIRRPENVGNPWTLSWLAWLREVASFSAAARIAAMLELELLAVLVRQRREIERQLRKATKDDPIVAALMSEPGIGEVIAWKLRARIGRFDRFRRGKQLARFCGLSPRNASSGQRQADGGLIRACDKELRAMVLQAAHQLRMRQTRWSILFARLVRKGAPRNVAVAAVANRWLRGLFHRMKEVSMTAA

SEQ ID NO: 142747 - protein, 346 aa, unidentified
MAKSSVAVLGIDLGKNSCSLVGFDPAGTVVLRRRARRETIVGLTAKLPACVVAMEACCGAHHLGRLLAAQGHTIRLMSPEYVRPYVKAQKNDDRDAEAIAEAATRPTMRFVPLKAQEQLDMQSLHRVRSRLVGMRTMLMNQLRAILLERGLVFPQGRRKFETAVGILVTDPPAQIGARIQALVAEIREEWASLDGRIEALDREFVAHARSDEAARRLVSIPGVGPMTATALRAAVDDGSAFASARDLPAWLGLVPRQHTTGGKPKLLGISKRGNAYLRGLFIHGARAALASLSKVEDATGRWLRGLLARAHYNVVVVALAAKLARIAWATLRKGVSFERQPEPALA

SEQ ID NO: 142748 - protein, 338 aa, unidentified
MKLYAGIDLHSSNCYLGIIDEQLEKVLGKRVRNSLPLIIDCLKPYKKDLQGVVVESTYNWYWLVDGLQEHGYTVHLANPSAIKQYEGIKYSDDKWDALWLAHLLKLGILPQGYIYPKETRPVRDMLRRRMLFVRHRTADILSFQSMITRNTGTRMSVNNIKKLTEVNLEKLFPDPDLFFMAQRYLSIIGFLSQQIKMIEKQAMDKISLTEQFKWLSTINGVGKILAMVIMMEVGDINRFKKVGNYCSYCRCVRSERISNGKKKGVGNKKNGNKYLSWAYVEAANFCIRHNAQAQKFYQRKKAKSNGIVAIKALSNKLARASYYMMRDQVPFDSQILFA

SEQ ID NO: 142749 - protein, 315 aa, unidentified
MNRTTYGLDLAKRVFQVHWVDIDTGEVKRRTLRRGEVLRFFALQPGSVVAMEACGSAHYWGRALTNLGHDVKLIAAQFVRPFVKTNKTDTADAQAIWEAAQRPEMRRVALKTVEQQAVLGLHRVRQQLVKQRTMHANQVRGLLYEFGVVMPQGWKKLLAEAGPLLADDDQVAVPKPLAEVMGKQLSSIQSLSERIDALERRIGLWQRGDVECQRISAIPGVGPLSATAVIATIGNANGFRSGRELAAFFGLVPRQSGTGGRVKLLGISKRGDPYVRTLLIHAARSVLVAQTRNGREPDPWVKQLLGRRPWNVVLN

SEQ ID NO: 142750 - protein, 363 aa, unidentified
MKRLQLTPAAGQRAAPNGPAPGSPVIIAIDLARTTWKHAVFWNGTIQRTLSTPGTLEHLHALVRTYHPAHPVVVVYEACGFGYQIAWWAQAQGLRALVVAPSQVDRAPGRRVKTDRLDARMLATKAAAGELKGVAVPTRAQHEQRQVLRTYGQAVRARKRAQIQLRSVLQEHGRIGPLPRSGWRVYERWLAGQTLPEPVAIAVAELRGLRAAALASEKRLAQRLEALAHTAPYAPLVAALTTQAGVRELSAMRLLLEVGDITRFDSAEAWTNFLGLTPSESSSGDHPPHRGPIRKCGPAGLRGALVQCAWAGCRSDQTLREVFDRIRVRAGSKRAIIAVTRRLARRLRARWVEALAAPPLAAA

SEQ ID NO: 142751 - protein, 407 aa, unidentified
MLFVGDDWAEDHHDVCLQDGAGRVLAARRLPEGVAGIARLHELVAGHLDGDDPAQVVLAIETDRGPWVRALVAAGYRVFAVNPKQAARHREVVAVSGKKDDTFDAAALADMVRTRRHQLRAVAADSDEAEAVKVAARAHQKLVWERTRHVLRMRSALREYFPAALEAYAELTLTGPDTLELLAKAPDPAAAARLTRAQISAALKRARRHNVAGRAARIQAALREQHLGQPEAVTEAYAAGVTASAAVIAVLNEQIKKMEARVESLFRRHPDAGTYLSQPGIGVITGARMLGEFGDAPGRYADVKARRNYAGTSPLTIASGKKKTVHARFIHNDHLVAAMHDQAFTAISASPGARAYYDELRSRDIDHTDALRRVASRMAGILHGCLKTGAAYDEHTAWGHRSQPAAA

SEQ ID NO: 142752 - protein, 320 aa, unidentified
MTKVEKSIGIDISKENFDVAFSASGRMKTQKYSFSASDIKKFISLLDAESHCVMESTGVYHLRLAHALHEAGIPVSVVNPLSVKRFIQSKMHRTKTDKSDAMMLAEYGSMMKPALWKPDEAHYTQAQQLLNIQEQLIKNRTSVSNQMEAIILSVNQSKTAPGLLKKQLLFIENQLIQIEKELEELIGRHDDEDVNNLQTIPGTGHKTAVALMVYTKGMTGFDDHRQVSSYFGICPRTVQSGTGIKGRGKICKMGMGHIRMLLYMCARSAKKYSRACRKLYERLLAKGKAKKLALIAVANKLLKQAFAIVKNKSAYVENFA

SEQ ID NO: 142753 - protein, 344 aa, unidentified
MEEYVGFDVSKEETAFCVMDKAGKILSQGKALSDPRSLFEALRDHTLCPDRIVLETGTMSAWLARELRGLGLAVDVIDARQAHAVMKLQHNKTDANDAVLLAEIARTGFCRPVSVNSEAAQVQRMLIKARTHLVRQRRDTENAIRGFLRALGIRFAKGSGKLAGRVREALEERPDLKVMIEPLLASVEALKTQIKRLDEDVVLEARGSPACRLLMTVGGVGPITALAFAATIDDAARFAKSRAVGAYLGLTSRRFQSGEMDYSGRISKHGDAMLRSLLYEAANSMLTVVRRAHPLKDWARRIRKRSSHKKACVALARKLAVIMHRMLVTGEPFRWPQIEAAATA

SEQ ID NO: 142754 - protein, 427 aa, unidentified
MSEVEAVRQEPEFAAFVGIDWADKKHVWCLRAVGLEKRESGELEHTPEAVEAWVGQLCQRFANRPIAVAVEQSRGALVFMLSKYEPLHLFPVPSTMSASMREALYPSGAKDDPRDADLLLDLLLQHRDKLRRLSPDTEATRRVQNLVEARRKLVDEKTAQTNRLVDHLKIYFPQMLDWFERLDTELVCAFLERWPTLEELQRVPPTKLRTFFQKYHCRDQELIERRIVAIRHAVPAIRDRAVMEANSMLVTVIVQVIRSLVAGIANLEEKIEEAAAAHPDFFIFDSLPGAGAALAPRLLAAFGSQRERYSTAREVQSYSGIAPVMERSGKKQWVHFRVACPKFLRQSFHEWAGHSIAYSVWARSYYQQLRSRGKGHHAAVRALAFKWIRVVFRCWKDGVAYDESRYLASLARRGSPLSAIVAAGKTL

SEQ ID NO: 142755 - protein, 338 aa, unidentified
MPLYGGIDLHANNSVVVLLNEQDQVIYQRRLTNHLPEILEPLAPYQADITGVVVESTYHWYWLVDGLMEAGYRVHLANPAAMQPYSGLKYTNDHSDARWLAHLLRLGVLPEGYIYPKAERAVRDVLRKRAHLVRQHTANVLSVQNLMVRNTGARFGAKRIDEFTPAELAGILPEAEQVLAVTSSLAVMHCLGQQIKTREKTVQKHLKHPPAYVQLQTVDGIGTILAQTIVLETGDIGRFPSVGHYASYCRCVGSTKISHGKRKGQGNVKNGNPYLEWASMEAAQFAIRFSPTVQRFYQRKQVKSHLMIARKAVAHKLARACYDIMRDLVPFEVHKAFG

SEQ ID NO: 142756 - protein, 343 aa, unidentified
MELYVGMDVSLKETSICVVDGNGEIVSEGTVISEPEAIAEFIKVKAPQAKRIGLETGPTTTWLWHELRALGLPVICIDARHAKAALSMQINKSDRNDAAGIARIMQCGWYKEVQVKRLSCHEIRAVLNSRAQLVKIKRDLENQIRGLLKNLGLVIGKAGGNVFRRRVEELLGGRGLLWQAVRPLLEVREKVGREIAALYRKLLGLARNDADSRRSMTVPGIGPINALAFHSAIDEPSRFRRSRSVGAYFGLTPRRHASGEVDWTGRISKCGDTMVRTYLFEAAGVLLTRVPRWCTLKAWGHRLWKRIGFKKAKIAVARKLAVILHRMWRDGTDFIWSAKEVTA

SEQ ID NO: 142757 - protein, 424 aa, unidentified
MNLTQNDRLKQVTFDTLIVGVDVGSKTHFCRAFDWRGFELSRRVFKFSNTGLGFLTFLRWTEELMNKTEMKKVIVGCEPTGCYWLTFQKFLKEHGVQLVTVNPFTVNRSMELDDNSPEKSDLKDPKTIAHLVKDGRFSTSYLPSSVYAEIREASVCRDQIMKQHVRLSNQIQGWLQKFFPEYFECYADWDSTSGLLLLKEAPLPQDILKIGAGGINQIWRDAKVRAAGIKRAQTLIEAAQNSVGLEAGEAARLEIWVLVNDYILKAEQLKRLDEYLEEKVKEVPNVEKLLAIKGVGMSTVIGFIAEVGDIGRFTDPKQIQKLAGLEIVKKSSGKKKGQPRISKRGRRKLRRTMYESARALMNWNPAFQDVFLYYRNRQKNPLGGMQAKIAVACKAIRVFYVVLQTGCDFDEEKFRKDINRPEAA

SEQ ID NO: 142758 - protein, 345 aa, unidentified
MPIVGGLDIHRKQLTFDYLDTVTGEVKRGQIAPADRAHLRAWLVRFAGRDDVAFALEGCTGWRYVAEELAAAGVSPHVAEPADTAFARGRKRHAKTDKTDSRHLRELLAEGRLPECWIPPSVILECRALLETYHDLRREHTAWVQRIHAVFFHQGAPALGEAALRTGRDLQAVRASAAAYLSPAGQLQVATALEMTGALEARLEVVRHELLAAARHLTGARVLAARLYGVGPVTALAMTCWLAGAGRFSSSRKAVRFAGLDITVYSSDSRRSPGRLSRQGPAVLRWAVYEAGKAHARSSAPDHRYYAQVKDRKDGKRAALSEARKILRQACHILAELGDDALTAA

SEQ ID NO: 142759 - protein, 395 aa, unidentified
MISVGIDVSKGKSTVCILKPGGEVVKPPFEMIHNAEELDSFVSLINSFDEETRVVLEDTGHYHIPVASYLSSHGIFVCCVNALRMTKFCAQSIRRSKTDKIDAVRIASFGITYWSELTRAYDAPDTYDELRFLARQYYQITSILVKAKVNLSNLLDQVMPGISNLLQNQKDNHKLTEFVDRYIHFQTILDMGEEKFTADYCKWAKKKGYRCNERKAAEIFALAQNGIPSLSNSQSVKIAVREAIKVIHSTEESRNTILAQMQKICKTLPEYSVVRDMNCIGDVLAPRIIAEIGDVRRFKNKHSLIAYAGIDAPPYQSGAFNASERKISKRGNSYLRKTGYEIMQSLIKHKPTDDSVYDFIQKKRSEGKCGKEAMIAGLNKFLRVYYGKVMELYSE

SEQ ID NO: 142760 - protein, 363 aa, unidentified
MKIMVGIDLHSNNALCGLMDESGRRLVHKKLPCDLPAILQLLAPYKDRIATIAVESTFNWYWLVDGLQDHGYHVALANPARMQPYSGMKYTDDVSDAYFLAELLRLNLLPTGHIHERKTRPVRDLLRRRLLLVRQRTMLILSFKSLNERTLGQRVSLARVKAMKVEEAQARFTAPADQLLSGTEITLMGHLTDAITKLEQHLLSVAGKWKTYQRLQELPGIGKILGLTIALETGDAQRFADAGNFASYCRCVKSLRTSNGRKKGENNRKCGNKYLAWAFVEAAHFACRYDDPCRRFYDRKKQQTNPIIATKSLACKLAKAAWHVMKADVPYDATRVFGPARKTDFGETGREPAKGSGHPSQLA

SEQ ID NO: 142761 - protein, 414 aa, unidentified
MELLHERCAALDIGKKELKACVRAPSPKGKRSRRQEIRTYATTTNALLELRDWLVAERVTLVVLEATGDYWRGAFYLLEDDLNVILVNAAHAKGLPGRKTDVCDASWLCQLGECGLLRASFVPPEPIRQLRDLTRYRTTLTAERTREAQRLEKELEDAGIKLSSVATDILGVSGRAMLAALIAGEDDAVALAELAKGRMRPKIPQLVQALTGNFGAHHAFLCRLHLERIDQLSTTIGELSARIEEQMRPFSHKLDQLQTIPGVARAVAEVIVAETGADMSRFPSPGHLASWAGVCPGHHESAGKRKSGKTRHGDRWLCGALGTAAMAAARTRDTTYLGARYRRLVPRLGKKKAIVAVEHSILTAAWHMLTDDVDYHDLGGDYFARLDPERAMRRIVKQANALGYTVRFEPIHAA

SEQ ID NO: 142762 - protein, 432 aa, unidentified
MKHTQSNKQNQRISRISESTLVIGTDIAKFNHVARAFNYRGIELGKRCLFQNDENGLLNLLAWAESIMHEHALTDVMLGVEPTGHYWFPLFHYLNQRGIEVVLVNPHHVKKSKELDDNSPTKNDIKDAKVVAKLVIDGRYTQPQLPEGVYADLRVLMNQRDRLCGDLNRVKGRIHNWLDRFFPEYTQVFKDWEGKASLITLQHFPLPKDVIAAGETTVVATWKKNDVQRAVGPKRASLLHQKAQKSIGLTEGTVAAKHELAMYLEQYAMLCRQLEQLMELVAGLVEQIPGATHMMSIPCIGLITVAGFLAEVGDLSGYDHSQQIVRHAGLNLRENSSGLHKGETTISKRGRCRLRALLFRAALTMVAKNPEFRALHLYFTTRRNNPLKKKQSMIAICNKLIRVLFELGRKQKNYDASKVLGPHREAQLQAAA

SEQ ID NO: 142763 - protein, 345 aa, unidentified
MPIVGGLDIHRRQITFDYLDTVTGEVRRGQIAPADRVHLRAWLARFAGRDDVAFAVEGCAGWRYVAEELAAAGIAAHLAEPADTAFARGRKRHAKTDKTDCRHLRMLLAEGRLPECWIPPARILECRALLELYNDLRRERTAWAQRIHAVLFHQGAPVLAEGALRTGQGVAGLRAAAAAHLSPAGQLQVATALEVIDALEARLHAVRHQLLDAARHLAGAKALAARLYGAGPVTALAITCWLAGAGRFSSSRQAVRFAGLDITVSSSDRKGPPGRLSRQGPPVLRWAVYEAGKTHARTPAPDHRYYAAVKDRKNSKRACLSEARKILRQAHHILAELGDDALAAA

SEQ ID NO: 142764 - protein, 354 aa, unidentified
MTSIKYIGMDVHMESISICVRNSLGKIVMECVIETKGSTILQFLEGLRGDLRVVFEEGTWATWLYDLMKPHATEVLVCNTRKNAVRKGSKSDRIDARKLSEQLYMNNVKSIYHGEHGLRMMKELARSYLTITKDLTRVMNRLKALYRSWGIPCAGNEVYAPRYRAEWLAKIHEAGVQRRAEHYYQQLDVLRPLRQEVRRDLLVESRKHKIWKLLRRIPAIGPIRAAILIAVMQTPHRFRTKRQLWNYSGLGLETYDSAEYRAVQGQLERSRKQATVRGLNKDYNHDLKDIFKGAAMRASTASGPLQDFYENLLAKGRKPTMARLTLARKIAAITLIVWKKEVRFDANYLKQQAA

SEQ ID NO: 142765 - protein, 371 aa, unidentified
MGQDTLFVGLDVHKEKIAVALAEGRRDGEVRFAGTIVNKLDAVQRLVAKHAKRHERLRFCYEAGPCGYAIYRQITKLGHECTVVAPSLTPTRPGDRIKTDRRDAVTLARLHRADELTAVWVPDEAHEAMRDLVRARTAAMEHLRRARQQLHGFLLRHNRIFTGGRNWTKRHRQWLAALQFDHPAHQIVLQESVDAIDDAHARLIRLEAQIAELLPQWSMAPVVEAIQAMRGVSFISAVTLVAETGDLRRFDRPRQLMSYLGLVPSEYSSGSRTLRGGITKAGSRHARRVLIEGAWTYRTKARVGPFHQARLEGLPKTVRQIAWKAQVRLCARYRRLAARGKPHTVVIAAIAREMGAFIWAIARHVQPVEQS

SEQ ID NO: 142766 - protein, 454 aa, unidentified
MRKNNQQKINKTVFDLINPDCAGIDIGSKVHYVCVPQDRSSEPIQKFECFTEDLAKMVKWLKECRIKSVAMESTGVYWIPVYQALEVAGFEVHLVNAKHVKNVPGRKKTDVEDCRWIQKLHSCGLITGSFRPTDQICVLRSLVRQRKRLTECASTHVLRMQKALTEMNIQLHNVISDITGTSGTAIIRAILAEERDPIVLSKLVHYSLIKKQDIIAKSLCGDYRKEHLYILKQEFELYEFYQQKIAELDQEIDQHYKELDKKDCNDKRALGPESKRSSAPKINIRQNLYEVIGVDLTKIPGLNELTMQTIISEVGVDMNKWETEQHFSSWLGLSPMNKITGEKVFKSRTNKVKNRASIAFRIAAQSVSRTQTALGAFFRRIKARAGAPKAITATARKIACLFYRLLKYGEDYVEQGIERYEQKYKDNLVKNMEKLAKQLGYSVIQDQEEDESVS

SEQ ID NO: 142767 - protein, 353 aa, unidentified
MQIDSRRIIDMQIRSVGIDLGKTTFHLVALGDNGKVLLKKKFTQKQLIAFTANMQTCLIGMEACSGSHFLGRALREQGHDVKLIPAQFVKPFVKSNKNDFIDAEAIAEAVDRENMRFVPIKTDDQLDLQALHRVRDRLMARRTSLINQIRAFLLERGIVFAKSPIRLREALPEVLENVNENLTPRMRNLVAMLWSEWKDLELQIVQMNDEVERIASSDAACRRLRQIPGIGPLVATAIVASIGNGAAFRKGREFAAWMGLLPKQHSTGGKARLYGISKRGNSYLRKILIHGARAVVLRSKRDRIAMGAWMTSLETRAPRNVLIVATAHKLARIAWAVLSTGQDYRAVPEALTV

SEQ ID NO: 142768 - protein, 332 aa, unidentified
MRLLAIDLGKQSFHIHGITDEGEMISKKVSRSKLEAIVLELAPESLAMEACASAHHWGRRFEAKGYRVRLIHPRFVKPFVKGSKNDAVDAEAIHEAALRPTMRFVPVKTIEQQDLQMLHRTRDRLITQRTGLINHIRGLLGEYGVVIPVGAFRFRKNIRSAVEDAPLSELASDNFNALIAEFQVLDARITAIDRKLAAICRKDERCKRLSTLPGVGPVVATALIAAIDDGRHFASGRALAAWIGLVPRQYTTGGKPRLGGIGKRGNHYLRRQLIHGARSALIRVANRNDLRSKCAKDLLARAGHNKTLVALANKTARIAWAILRKGENYKSA

SEQ ID NO: 142769 - protein, 411 aa, unidentified
MQVLHPHCAGLDVHKDSVVACVRHMDERGRASEAVRSFGTTTRQLLELGDWLAAEGVTHVAMESTGVYWKPVWNLLEGRGLELLLANAHHVKQVPGRKTDVKDCQWIAQLLQHGLLRPSFVPDRPQRELRDLTRQRAQLVMDKTRVANRVHKTLEDANIKLASVASDVLGKSGRDMLRALIAGETDAAAMAQLARMRLRTKIPQLAEALRGGVNEHHRFMLKMLLEQVEYLEQQVECFDRRIEQVMTPFEMEAVRRLDTIKGLNVRAAQNVVAEIGHDMGRFPTADHLCSWAGICPGNNQSAGKRRSGRTTQGNRWLKRTLTQCAWAAARCKDSHLAARYKRVAARRGRKRAVLAVAHSQLVAAYEMLKRGEDYHDLGPDYRDRRSGERLTRQLVDRLTHLGYKVTLEPAA

SEQ ID NO: 142770 - protein, 413 aa, unidentified
MSIDPNAAPARVTAGVDWAKDDHAVCVAGDQGEALERFTVRHDAAGLRQMASRLLRAGVAQVGIERGDGPVVDALLAAGLAVFVIPPGQVKNLRSRYGSAGNKDDRFDAYVLADVVRTDARRLRPMERDSDQTAALRSAVRARRDLVGHRVAAANQLRAHLQAAFPGAAELFAHVDSDITLAFLSRFTTQEQADWLSPLRLAAWLKSVAYSGKADPAVLHARLLAAPRGKSGTHASVHAGVTLALVAVLRALKTQIKALAASIGAQLAAHPDAAVFQSLPRSGTIRAARLLAEIGDARGRFPTRDSLTCLAGVAPSTRQSGKAKAVTFRWGADKQLRDALCDFAGDSRSASPWAASLYDKAIARGCDHPHAVRILARAWAHVIWRCWQDHAPYDPAAHNSLQAILRQQQPIAA

SEQ ID NO: 142771 - protein, 372 aa, unidentified
MNYNTVYVGMDVHKESFTLCAFTIEEDKGKYHQKTDPDFKKVLKYLEFLRSIYGDDAKFVCGYEAGCLGYTLYHQLTSHDVDCKILAPTTMLEQRSRKRIKTDKRDAEIIARCLAQHNYSPVHIPTEKDEQTKEYLRMRDDHKLALKKVKQQILAFCLRHNYRYEGNSYWTAAHITWLKSLTLEALYREILDEYLLTYTTLNDKIERMDKRIEELANQDEYREVVGKLTCFIGVKTHTALSVIVEVGDFNRFASSKNFAAYLGIVPGEDTSSENQNRLSITKAGNRHVRRLLTEAAQSYSRGQVGYKSKALKARQEGNTPQVIAYADKANERLRRRYYKMVLGKSKKANVAKTAIARELACFIWGMMTDHIA

SEQ ID NO: 142772 - protein, 402 aa, unidentified
MGFVVGLDWGGAAHAVCVVDAATGGVAARFEVAHAAAGLSELERRLARFGAPADLPVAIERPSGLLVETLTAAGHPLVPIHPNVVKASRPRYRAAGGKSDLGDAYLLADLLRTDGHRFRPLAPCSDAIRALRALVRGRDDLVATRVALANQLRSLLEGFWPGAAAIFADVDSPIALAFLQRYPTPDSAARLGEKRLAAFLGQHQYCGRRTPAALLARLRAAPAGLAGDAEADAKGEMVRALAAVLDRLVAQIAGLTSRIGHAVAALPDGQIVMSFPRAGRICAAQILAELGDVRARYQSADQLAADAGLCPVTHQSGKSRGVTFRWACNRRLRQAITCFADNSRHSSAWAAGIYRRARARGCRHPHAIRILGRAWLRVLWRAWTERIPYDPARHRAANAIPA

SEQ ID NO: 142773 - protein, 407 aa, unidentified
MEVVYRCCCGIDVHKKVIVACLVNGGEQELREFGTTTSEIKTLANWLTESGCEMIAMESTGVFWKPLYNLFELMDLDAMIVNAAHMKALPGRKTDVKDAEWIADLLRHGLLKASYIPNREQRELREITRYRKSLTEERCREVNRLQKILEGANIKLDSVVKDITGKSARKLLQRIIDDDIPDSDEVSKMVHGRMRPKLEQIVASIEGITTPLQRKLLAQIIDHIDDLNRRIGELDKLVQEYMAEYEAAIEAIDEIPGIARRSAEVILAEIGLDMGRFPSAAHLCSWAGVCPGNYQSAGRRKHGKTTKGNKALKTILTQCAKSAKTVKSSYFFAQYQRISARRGKNRATLAVAHSMLIAIYHILKNKTAFHDLGSDYYDSFNRDRKINSYLKRLKALGWEPDAIPSSA

SEQ ID NO: 142774 - protein, 364 aa, unidentified
MRKVYYIGLDVHKDNTQMAVLEMRGKEPVTIKVIDSDPNKAAKAILPYRREGTVHVGYEAGCMGYTLYRVLTGMKIDCQIIAPNKVFRGGNNEKIKTDKRDATAIAWMLRRDEEAGIAVPEKEDEAARDLLRCRGDMQDDLKRAKQRMLKFLLRQGHIYENTRYWSGKHRKWMKTLAFDMPLDKAVFEQYLYTIESIEERVGRLDVQIQEVAESPRYEARVRKFRAFKGVDYIIALSLVCEIGDFRRFPTAAAFMSYLGLVPSEYSSGKKRKQGGITKTGNGHIRKLLTEAAWHYTRPVMVSKRLAIRRVGTPEPVISYADKALNRLHSKYVKLLFRGKSKQTAVTAVARELSGFLWGVMTAVA

SEQ ID NO: 142775 - protein, 410 aa, unidentified
MLFVGDDWAEAHHDIEVQDEQGRRLARRRLPEGLSGIATLHALLAEHLPADAEPDQVVVGIETDRGTWVQALRAAGYQVFAINPLSVARYRERHVTSGAKSDPGDAKVLADLVRTDRQHHRPIAGDSELAEAVKVLARTHQNLIWTRQRQTNALRSTLREFYPAALMAFEDLAHLDALAVLAKAPTPQRGAALRRTQVEAALRAGGRKRNITSRAEQVVAALRTEQLQALPLVADAFGATVSALVAVTAELVRQIDTVEQKLSASFEQHPSAEILRSLPGLGGVLGARVLAEFGDDPHRYADARARKNYAGTSPITRASGTRRVVLARHARNRRLADALYQWAFSALTSSPAARAYYDAQRARGATHHQALRALGNRLVGVLHGCLRHDTAYDENTAWPRHAEQAGQAAA

SEQ ID NO: 142776 - protein, 372 aa, unidentified
MDNCIMIGADVHDKSMSLKIAQSRGRAEKASFANNSSGRKAMLAVLHKRVAATAGARVIFAYEASGLGFGLHDEISADGFECHVLAPTLIASSPKSRRNKTDEKDAERILDILRAHVLAGNELPAVWVPDQETRDDREIVRARLDAAEKITRLKAQVRTLLKRNNLKQPSGLGKGWTNKYRAWLRGLLTPKRSLLRHGARVGLGTLLRQLAALEQEITELDQQVKALSECEPYAEPAHEIMKEKGPGLLTAMVFLTEMGDLSRFSNRRQIGAYLGLVPSSNETGQSTDRKGHITHQGNPRVRKVLCQAVWARVRTDPQAKAAYARIVKKNPKHKKIAVVASMRRLAILMWHIGLIAQERSGCFKEQATSTAA

SEQ ID NO: 142777 - protein, 332 aa, unidentified
MENFYFIGVDVSKKKLDFCVMFEGKVVHEEETANHQGAIIALLHQLEEEYGITGGQMLVCAEHTGQYTFPLACACKAVECKLWLENPAEIKYSSGVQRGKNDKVDAKRIAIYAKRFQDRVQYFERPTEDIERLKQLESERTLYVTDLAKYKGQMKDQKDYMPRKLYERKMKRLQALMDDLEEAIQAITDEMDEVVASCPVLSRQRELLMSIDGVGRVVATNMIITTEAFTRFDDPRKFNCYAGVAPFSYSSGSSQHSKARVSHRADKVMKKLLHLAAVAVTHRVGGELKKYYERKVAEGKNKMSVINALRAKIVARMFAVIKRNEKYKPILS

SEQ ID NO: 142778 - protein, 347 aa, unidentified
MEEMKLFAGLDMHTESITGTIKDESGNPVRVLKVETSQDGVKQLFDRLQKKHITAVFEASRNWPRYAELINPYCAKVVMAHPLKVRAIASARIKTDAIDSNVLADLLRANLIPESYMPSLEIVELRELLRYRAGLSRMRGELKTKAKNILSREGKKCEFDEVTGKRARLWLRNLMLNELNRKELDYTVALIDNLTAEINKFDVEIEREQYKYPESDILKSVVGISTFSALMILAEMADIGRFPSPDKLASYAGLVPSTYQSSQTQYSGRITKRGNAHLRWILTQCTHASIKSRYSHKLKTFYLRIERKKGKQKAVIATARKMLTTIWHLLNKNEYYAYRDIPSKNGL

SEQ ID NO: 142779 - protein, 423 aa, unidentified
MGKTIPICCGVDVHKKFLVATILTGDYLIPQCKQKHFGTSFRNLLAFKQWLLDNNCKDVCMESTGKYWVPVWNVLEGVVNVVVANPKWVSAVKGNKDDKKDSKWIGNLFRMGLVPSSYIPGKDIRVLREFTRYRSKLVSMRASEKNRYQNAFTVCNLTLDAVVSDMFGKSATAIENYLLDTDVVDPEFCVSLLHWKLKPKSAEIIEAVEGFNMTLEQKERVRIVQGHFNDIDKRISQIDEIIGRLTAEYEGTISLLCTIPGIDRRLAITIISEIGTDMSEFGSSRRLCSWAGLVPGNNQSAGKKKSVKITRAGIYLKPALVEAAHAAVKATEKSPYFRIKFEKIMKRRGKKRAIIAIARMILTAIYAMVSTGEVFNPSDLLKYDMPEELQKKRTLAEAKDAVKLLVSLGLVAEGSISLEALAS

SEQ ID NO: 142780 - protein, 409 aa, unidentified
MEVMHPRCAGLDVHKDTVVACVRIASDGDVRQDVVTFETTTKGLLALSDWLGEQQATTVAMEATGVYWKPVWHVLEGSFELVLANAAHIKNVPGRKTDVNDAMWIADLLAHGLIRASFVPPTSIQELRTLTRTRKQLVRERTQHTQRIQKTLEDANLKIASVISDILGQSGRAILKALISGEADPEKLVLLASARVRASRESLIESLRGRVTSHHRFMLKLHLSQVESLELAIETIETEVGAALEPFRTTAKLLTTIPGISDIVAEAVVSEIGVDMSRFRTPGHLISWAGLCPRNDESAGKRRSTRLRKGGTWLKTVLVQSAWAAVRCKDTYLRAQFLRIKSRRGPKKAIMAVTASILTAIYFMIRDGVPYRELGSTHFDRRDKSHTITRLVRKLKSLGCTIEVKQQAA

SEQ ID NO: 142781 - protein, 309 aa, unidentified
MNLNKKVYCGVDVSKHHLDLLHEGRPVRFENSVKGAGAMMERIGPVHYVFESTGGYERTAAWVLMEAGADVSIVNPSRVRYYAQGMGRLAKTDPIDAGNITEYACAKRPEPSVKPSKCQRELVAYVDRRQQLTGMRNSELNRLDTAAYPESTKMLKKHLRWLEREIEKLDRLIAETIQADKEMREKAGRIREIPGMGEVCASTLLAHLPEIGTLSRREVAALVGLAPYNRDSGTSSRKRHVHGGRSRLRRCLYMAAVCSIRCNPVMGEFYHRLVEENHRPKKVALVAVMRKLVIAANSAIKNPDFCVAV

SEQ ID NO: 142782 - protein, 341 aa, unidentified
MMIIGCDFHPRFQQIAFVDQETGEYGERRLSHPGEAEQFYRSLAGRQVRIGAEATGNFRWFRRLMQELGLEFLLGDASAIRASCTRKQKTDKRDARHILTLLVEDRFPAVWQPPMENDDLRQLLMHRCRLVRMRTGVKNQLDSMAKNEGVLSPRVWSSKRRSEIEALPLPGWYAQRRSDLLGLLEELDERIKPLDKAVGEAAEGNAEARLLITHPGVGPIVSLAYVLTIGDWRRFPRGKQVGSYLGLIPAEESSGNSRRLGHISKQGSTLLRWLLVEAATTAQRYDASWHRQYVRLSMTKHHGVAKVAIAHKLAVRLYWMLRSGEDYSKVMERGSHVGQSV

SEQ ID NO: 142783 - protein, 353 aa, unidentified
MTNTKYIGMDVHKESISLAVRNAAGKIVMECVIETKASIILQFIDGLRGDLHVTFEEGTWATWLFDLLKPHVSKLVVCDPRKNSRQGNKNDRIDARELSDRLYMNKLSSVYHGGAGVRTLRELARSYLTISKDLARVMSRVKAIYRSWGIPCAGKQVYAPRHRAEWLAKISEVGVLRRAEFYYQQLDALRPLRHQVRRELLAESKKHPATKLLCQIPAIGPIRAALLIALIQTPQRFRSKRPLWKYSGFGIEMHSSADYRKVKGQLERTKKQVSVRGLNRDCNHDLKNLFKSAATIASVKPGPFQEFYAALVAKGMRPEMARLTLARKIATIVLIVWKRGVSFDAQYLKPQTA

SEQ ID NO: 142784 - protein, 393 aa, unidentified
MVVSIGIDVSKNKHDCFIVSSEGEVLADVFTIPNNMDGFYALLEKIRACTTPQDKIKVGLEATGHYSYNILGFLLDNGLATYVLNPLRTNLYRKSLSLRKTKTDRVDARTIAAMLLSDVGLKPYTNTAYHNEELKSLTRYRFDKVKERAKLKSSISRLVCILFPELEKLVSSLHLATVYALLEEFPGSKQIAKAHLTRLKTLLGNASKGRYGRDMAVTIRSAAQNSVGSCMPAKSLELQHTIRLIRELDAEIAEIEAEIETMMDKIQSPITTIPGMGSRMAAMILAEIGDFSRFESPDKLLAYAGMSPSTYQSGQLKNCYPHMEKRGSRYLRYALYNAAKYVCHWDPTFAAYLAKKRDEGKHYNVALSHATKKLVRLLFALERSRQPYCSLAA

SEQ ID NO: 142785 - protein, 461 aa, unidentified
MVRSRKGHDAQRLVAPGMLPQLTANDAGIDVGGTSHFVAAPADRDAEPVREFRTFTGDLYRLAAWLTACGIETVAMESTGVSWIPLFQVLEERGFTVKLVDAHQLKQAPGRKSDVLDCQWLQQLHRFGLLAGAFRPDEQICVLRSYLRQRAMLATYAGQHVQHMQKALVQMNLQLQVVLEDITGATGRKIIRAVLAGERDPHTLAALRHGGCKHSEATIAAAWQGDWREEHLFALEQAVELVENSQATIVACDARIQAHLQQFPDRGGDEPPPAGPPPRADRHDLRFDATAELYRISGVDLTAVPGLQAHTVLKVLSEIGLDMTRWPSAKHFGSWLGLAPTNRVSGGTILSRRTKPTANRAAAALRVAAQSLHRSKSALGAFLRRKAAHLGMPKAITATAYTLARSIFSLLSSGHAYREPGQDAYERAHKHRAVRSLSKRARDLGFDLVKRDPPHPLAAPA

SEQ ID NO: 142786 - protein, 310 aa, unidentified
MDAVNAAIEVGKHKLVVALGSAGELWSQDNEPRAIGQLSKRLAQANCARVLIEGGSYQNLLVVALRAAELPVVIINPRRIRDFAKSLGQFAKTDRIDARVLALYGERNQPPLRELPDEQTQALRALWVRREQLIEMLVMEENRLEHVLKPLEHGLRAHIDYLRKQIKQADDDLDATVRDSSLWDRYELLTSVPGVGPVLGAALLAALPELGRLNRAQIAALAGVAPFPDDSGTLHGRRKIQGGRWRLRRVLYVATVAAVRCNPVLKPFYQRLRARGKLPKVALVASMRRLLLMLNAMVKSHTTWSPACPA

SEQ ID NO: 142787 - protein, 351 aa, unidentified
MMLIGVDYHPSFQTIAFFMEETGECGEQELNHSDGQAEKFYRDLKQRGISVRVGMEATGYSRWFERLLAELGFEVWMGDPAEIKAKRVKKQKFDREDARLILRLMRENNFPQVWVPGPENRDLRQLLWHRHRLVQMRTRIMNQLHALAMNEGYRLKKKLFSEQGRAQLEKLTLAPWASRRRQELLELLDRMNPTIEELTAAVEREARKRPEAMRLMTHPGVGPLTALAYVLIIGTPTRFQRGKQIGTYVGMIPCEESSARKQRLGHISKQGSSLLRFLLVEAAQAAARIHPDWRRRYMHLAMRRHKSIAKVAMGRRLAVRLYWMWRNGCEYSPSLEFGSYAGQLGIGNGVK

SEQ ID NO: 142788 - protein, 360 aa, unidentified
MTLYAALDLHANNNYLVVIDEQDQVVYRRKQANELGPLLRVLEPFRQQLVGLVVESTYNWYWLVDGLMEAGWKVHLANTAGTEQYAGLKHSNDWTDAHWLAHLLRLGILPEGYIYPKAQRAVRDLLRERFRLVQERSRQIIGIEGIFARQRGVALSGRRIGELDGPELEKRFSEEPLVRQAVEARLGVLGALQTQISRLEETVTQHVEGQPDYERLQTVWGVGKVLSRTILLETGPINRFAQQGDYLSYCRMVESRKWSNGKKKGENNRKCGNRYLGWAFMEAAHFAGRYYPPAQAFVDRKTVQGHRVLGLKALASKLCRASYFVLRDQVEFDPKRVFGSTGGSRPESRPIRVGPQSRQI

SEQ ID NO: 142789 - protein, 422 aa, unidentified
MSKRRNRVCGADIHKDLIVATIRDDTQSLFQEEFGTTQSELKRFRDWLLANKCKQVAFEATGVYWLPIYDFVSSSIDTIVANPWKIKNIPKDKTDAKDSQWIASLCLNGQIKRSRILSKDDRDLRTLTRARSGYVKTRTQFRNRIHKYLASNGIKLSSCISDIFGKSGRYILQGLIEGRGIDSILDGIPSGQVRKKRDLIKAALGNGLDEISRMLIMDTMDLLNSLETKIEAASQEAVNRLQAKSKDLAIVMSIPGIGFVSGSVILAEIGNYHDFKTPEQLAKWCGLSPGDNESAGKNRPCGITKQGSKYLRTVLVQIAHVVAGKTNTKLSRFFHRLSKRKEYNVAITALARKLICLVYHLLINQELYQEEICQKRGSKPVEKSPAPSYSPEDRLEDKVAAIVEAFYHLKAKGQKRCLDRGG

SEQ ID NO: 142790 - protein, 408 aa, unidentified
MNPLFVGIDVSSKNNVAYLMKPDGSKHSSFSVQNNLGGAKLLSERIVSALGSMQLERVVIGLEATSIYGDSLVYALREDGRLGRFQRKIHVLNPKQVRKFKEAYSDLPKNDWVDAFVIADHLRFGRINREVYMDDYRYKALQTLTRARFDVIQNLTREKQRFANYLFLKCSGMAQDKDIQNTSATTIALMEHFETVDDLANADLEELTAFITETGRGKFADPDATAKAVRAAAKGSYRLPKTVNDTVNQAMAVSIASMRALKGQDKVLDKAIEQQFEIIPNTLTSIPGIGKVYSAGIIAEIGDIHRFDSQASVAKYAGLVWNRSQSGDFEAEHSRMIKSGNRYLRYYLLEAANSVRRCDSEFRRYYDLKFKEVNKYQHKRALALTARKLVRLVFRLLKDNRLYIPPEG

SEQ ID NO: 142791 - protein, 400 aa, unidentified
MLLFFEVITMIFVGIDVAKDTHYAAVSDDSGAVLVKPFAFQNNAEGFCLLLKKLSEFDRSKLLIGLESTGIYSENLICFLYESGFRLAVVNPIQTATLRKTAIRKTKTDKVDTMLIIKSLMVNSYRLYSQRDADSLKLRTLCRFRQNLKKSKARLKIQLAGYVNLVFPEFGKFFKSGIHIAASYALLKKYSSPKEIAALRTSTLCTLLSNASHGRFGKDTAEALKSLALSSVGVKNPYISIQIAQTIAQIELLEQQIKDLNSAIEEAMESINSVLMTVPGIGAVNAACILGEIGDIKRFSKPCKLLAYAGLDPTVRQSGQFTAKSTRMSKRGSALLRFALINSAWQLTLNDTTFKAYYDLKRSQGLNHYGALGHVAHKLTRVIFKLLTSDTPFNPAKLVA

SEQ ID NO: 142792 - protein, 395 aa, unidentified
MEVAVDKVWVGIDAGKGFHWAHVLDSSGRELLSRKLENDEAGISEFVGKVVPLAREVVWAVDQPGGSAALLLALLWERGQGVLYVPGLSVNRASDAYRGESKTDARDARVIADQARMRSDLGELKPGEEELAELGILLGRRRDLLVDQNRTITRLGEALLSLSPALERTLDLNRKGPLTLLTRYQSPQRLRRAGHKRIAAYLRARGVKGFDSVAGKALAAAKSQSISLPAEQVAAHIVAELAAEILVLKDRIEEIDEEIERRFFDRPEAEILASLPGMGPLLGAEFLVAIGDLSAFDSADHLAAYAGLVPTANDSGKRVENNRRMRGGNKNLKRVFYQSAFASLRSSPESRAFYDRKRTEGKRHVQALIALARRRVNVVWAMLRDGTTFEARTAA

SEQ ID NO: 142793 - protein, 319 aa, unidentified
MAQNDFVVAGIDVAKDKVDVCVRSLSLKRTFASTAEGRRELTSWLRRHKVGKAVMEASGGYERDWAKALRAAKIEVRIVDPKRVRSFAQSAGRLAKNDTIDAEMIAWFAETFDEARGQAYDAAREQLHQMVNARQALKDMQAKLENQGEHALPATVQRIHARIIKTIAVELVKIEAAISAMVQATPRFAEFAEIIESVPGIGRTTSAALIAAMPELGQANNKIVAALLGVAPYDDDSGRRRGERHIKGGRRRTRNVFYMACLGAATQHNPVLKAFYNRLVAKGKEKKVALIACMRKLISILNIMIERRQKWDANRYAVS

SEQ ID NO: 142794 - protein, 348 aa, unidentified
MMIIGCDFHPSWEQVAWLDTETGETGEHKLVHARGEAQQFYRKLTGPVRVGLEATGNCQWLVDVVSACGHEVWIGDAAQIRASYVRQQKTDKRDAAHVLKLLVESRFPRLWTPSREQRDLRQLLIHRHKLVLIRSRVKNELQHLALNQGVQRKSRLWSEAGQKLLRELPLEGWAARRREGLLGLLTALDGQVKVLDEAVAQAAEQNAQARLLRTQPGVGAITALAFVVTLGDVSRFARGKQVASYLGLIPRERTSGGRQRLGAISKQGNRFLRSLLVEAANVAVRFDPGLRQQYLHRCHSKPKGVAKVAAARKLAVRLYWMLRTQTAYPEIVRIESSPRVPLAVPQLG

SEQ ID NO: 142795 - protein, 412 aa, unidentified
MQDILTCAMGLDIHRDVIVACLAKGELGADPEIEIRSFSTLIPEMWKLRDWVLEAECHHVAMESTGIYWQPIYEMLEPCFDGQISILVVNARHMKNVPGRKTDMRDAQWIATLLRAGLLKGSFIPDKTFRELRHLTRYRKSIVHDITAQKNRIDKFLQSSGFRFTAFLSDAFGASGRNIIRHLMEYGSISREALDRCLKTQTRKRIDEILIALNGSLSEHQRNFLRMIFGHLEALEQHRHTVEDAITEEITKHEEALRLLCSIPGIDVTAAAAIIAEIGTDMSAFPDSQHICSWAGLSPGNNESAGKRKSAHINKGNPYLKSMLCEVGWVISGKRTLHLSGWYWKIKQRKGAKRATIALARKLLALIYTMLKTGSPYSEECFETRRKQSERKRAYRMVNELQKLGYFVLPPD

SEQ ID NO: 142796 - protein, 431 aa, unidentified
MNYNQNNKIAQITPKTLVVGIDIAKHHHVARAQDYRGMELGSTCFFDNTHDGFRTFINWINQIKESYEMESVITGMEPTDHYWLNLAHILKDEQIKFVTVNPLHVKHSKELDDNSPTKNDIKDAKVIAQLVKDGRYAEPTIPQGVFAELRVAKKLRDLLNVDLQIVQGQVHNWIDRYFPEFFTVFKSWEGKAAIHLLKLEALPEELVRYTEEELLEYLRQAVKRSIGIKKIQALKEAAKRSIGIRQGAMMAKMELRTLIQKYELIQAKFEELDQTLDTLLQDIPGVEQMLEITGIGRDTVAGFFAEVGNLSEYNHPRQIIKLAGLSLKENTSGKHKGRTKITKRGRKKLRALLFRASMILVAKNKAFKALHHHYTTRPDNPLKMMQSLIAFCNKLIRILFSIWKKQFVFQEEKMLKDIPHMHAFIQESIAA

SEQ ID NO: 142797 - protein, 341 aa, unidentified
MDHIGIDLGGRESQVCVRNSAGAIIEEARRPTTELGRWLASRAPARVVLETCTEAFRLAGVAQRHGHEVRVVAATLVRALGVGQRGLKNDERDARTLSEASCRIDLPSVHIPTVVSQEVKAMCVSREALVRMRTVLVNRVRSYLRSRIGERLRATPDTLPAKVRRALIDDPEGLPAHLERLLVVLEALRAQIAEADVELKVLARADVRMRRLMTVPGVGPVTAARFVAALDDVGRFPNAASVASYLGLIPGENTTGFRTKRTRLTRAGAPQVRWALGQAAWSLYLHRPRDPMVQWAKQVATRRGAQVANTALARKLAHVLYAMWKHGTTYDPARGARPVAA

SEQ ID NO: 142798 - protein, 413 aa, unidentified
MENPFLFFVGIDWATENHQICVVDRDGKTIAERQVAHSGTGLQQFLTWLQQQIPVPAERVAVAIEMPAGAIIETLVEHNYCAFSLNPKQLDRFRDRHTVAGAKDDSRDAFVLADSLRTDQPCFHPICLDDPEIIRIRTLSRFEDSLVQDWSRLTNQLREQIHRYFPQLLQLSPAADEAWIWDVLETAPLPVLASQLKHQQVQKILSQRRIRRLSAEEVLQQLRTPPLPVAPGTAEAASEACLLLIARLRLLMQQKKEVERRIEEQLTRFCAEEERMEHRDVQLILSIPGIGRVITATMLAEASQPLAQRDYHALRAYCGAAPVTHQSGKRKRQVIMRYSCNQRLRNAFYHWARISVQQDSRSRAHYHRLRSKGHSHGRALRGVLDRLLVMLISILRHQTEFDPALRKSIPVAI

SEQ ID NO: 142799 - protein, 375 aa, unidentified
MKEKVRFLGLDVHAETIAVAVAEPDGEVRSLGTIPNRGESIRKMIKKLGPAEKLRACYEAGPTGYVVYWQLAELGIQCEVVAPTLVPVKVGDRVKTDRRDAEKLARCYRSGDLTAVWVPDEGSEALRDLVRAREAAKQDQMRARHRLSKFLLRSGQRPPTGVRPWTRPYLIWVAQLRFTQVAQEATRQDYLHEVEHMRERVARLEQAIMEAVKLASPALQQVINDLQALRGIADISAVTIAAELGQVSRFGSARQLMGYCGAVPSEDSSGKRIRRGSITKTGNAHLRRIVGEAAWSYRRPPGIWYGLRRRQESISEEVKEIAWKAQHRLHKRYMKLGAAGKPQGKIITAVARELLGFIWAIGTRAETAVSQRAAA

SEQ ID NO: 142800 - protein, 326 aa, unidentified
MKKVFFVGADVSRDKIDFCFLTPVENTRPKFVSLPNDTDTIKAYFQSFIKDDIFIVFEHTNNYHVPLQSALTDLNIKHSALNPAKISHFLKHLTYQKSDVTDAYGLALYCRIFKSDLNPSTYNHEYNLIKSYNSTILLLSKIQTQLKNFKKSQDFVADTELSEIIKSLTFHVQKTQEKIKLLAFEILKSFVPNCEQIIKDNKGFGIDLALNLFPQLHFNRAKSEKQFISFLGLSPRIYESGSSVHKSPKINKRGSPAIRRILFLNAISCARFNDKFKQRYENLVSKGKKKKVALVAVMCAIVRYLKSLFPLNESYINENLYHARTS

SEQ ID NO: 142801 - protein, 403 aa, unidentified
MNAVGIDVSKGKSTVVALAPGGKFLSRPFNVLHTKSGIKELVSFVRTLDGDTRIVMEHTGRYYEPLLQWLAASDLFVTAVNPKLIKDFGNNTLRKVKTDKADAKKIARYALDNWCDLRQHTGMDTTRTQLKTMNRQFAFCMKQKTACKNNLIALIDQVYPGANTYFESPARADGSQKWVDYVLTFWHVDYVCSMTLSTFTERYRKWCHRHGYNFQPDKPGLLMEKAKDLIAMLPMDKTTKMLVQNSIAQLNVLSKTVEALRTQMIELAEQLPEYPVVIDMNGVGPTLASQLIAEIGDITRFPRRGSLTAFAGVDPGAKQSGTMQVKSNKTSKAGSPHLRRALFQIVSGLLMRSPDDAVYNFMDKKRSEGKPYYVYMTAGANKFLRIYYGRVNEYLASCPKDHE

SEQ ID NO: 142802 - protein, 372 aa, unidentified
MSQSTTAYVGLDVHKDSIDIALAETPRESEVRHLGAVGGGVEPVSKALRRLVGRGQRLHIVYEAGPCGFVLQRHFAALGWHCDVVAPSSIPRPPGERVKTDRRDALKLARLARVGELTPVRVPDTADEAVRDLARAREDAVREQRNARHRLKALLLRNGIAYAGRSAWTNAHLRWLAQVKLAHPAQQIAFQEYLHAITEAGARIARHEQALRDALPGWTLAPLVHALQALRGVQLIAAITLVAEIQDFHRFANPRQLMAYLGLVPCEHSSGTRRRQGAITKAGNAPARRMLVEIAHLYRYPARVSPVIARRQAELPTAVTDIAWAAQLRLCARFRRLAARRLPHNKIVVAIARELCGFIWAIALTVAPTLPH

SEQ ID NO: 142803 - protein, 370 aa, unidentified
MTYITSIGLDVHARSVSACAFDPFTGEVAQRRFGTDAGEIAEWIPGFESPKAVYESGPTGFALCRELRAPGVDCVVGAVSKMQKPSAEKRRKNDRRDAAFLARLLATWNIAEVWVPPVEAEAARDLSRALDDAREDLQRARRRLSKFPLRRGPVFDETDALGRRRGAWTRAFWRWAESCRPSDPAAAAAFDRYVACVRCAESDKRALEKRVLAEARADRWRGAVEALSCIKGIDAVTAFCLATEAGRFSRFPTAGAYASWLGLAPSEHSSGEKEAKGGIAKTGNPASRRALVEAAWHFKSCSPKPKAPPAGSAVPAAVKRRCDDAAARLRRRHESPGAAGKRPCVANVAVARELACWVWEVGRRAGGALA

SEQ ID NO: 142804 - protein, 344 aa, unidentified
MARTKQELYCGIDLHSNNAMYVVTDKTDKVVFKKRLPNQLSLVLKALDPFKKHLVTVAVESTYNWYWLVDGLMEQGYPVSLANPAAIDQYDGIKDANDLTDAAFLAHLARLDILPTGYIYPKQERPVRDLLRRRTLLVRQRTATILSLQNMFMREVSLNIKSAKICRLTPEQLSDLLRDNEYLMFVAQSQIEIIKGLNKTVVQFEKKVLEHAELKPEYELLLSIPGVGLILGLTIMLETGPIDRFKKVGNYTSYCRCVRATRESNKKSKGSNNSKNGNPHLSWAFVEVVHHTIRHCPQAKKFYDRKKSKCNVALATKSLGAKLTKGAYYVMKRQEPFDLTRIFS

SEQ ID NO: 142805 - protein, 343 aa, unidentified
MSNDTRIAVDVAKAVFELAISDRPGHVTRRERLPRGQFLAFIAQQPQATVVMEACGSAHHWGRKIQGLGHRIVLLPPHHVRPYIRRNKTDRTDAKGILEASRNEDIRAVPVKTVGQQVLTSLHRLRSGWMRERTARLNALRGLLRELGVFIPMGAREVVPLVWSLIEDADSELPEALRSIFAEACREIREIEARVKQVERQLEATAEQLPAVEYLRTIPGIGLLIATALVAFIGDIRRFPSGRHFASYLGLTPREYSSGLKRNLGRISKRGDGYLRTLLIHGARSVLVHARKQQPDRLREWANKLAKTHVHNKAAVAVANKLARIVWAVWHHERPFALIAKVA

SEQ ID NO: 142806 - protein, 363 aa, unidentified
MTTIGAERPDTEVAVILGVDTHLDFHAAVAVDHLGRRLGESSVPTTVKGYERLLRWAEDFGPVRCVGVEGASSYGAGLARHLRAMGIEVLEVERPKHRRRSSRRNVEKSDPSDAERAARAVLAGEASGVPKSGDGRVEMIRALRAARRSAIKARTQAANQLQGLRVTAPEKLRHRLRGLSTKELVSVAARFRIGDGPRDVPTATKFALRSVARRHEALSAEIVELDAHLDRLVAQVAPELVSLPGIGTDNAATLLIVAGDNPQRLRSEASFASLCGVAPIEASSGKVVRHRLNRGGNREANRALYMICLARMRRDRRTQEYVARRTAEGKSKREIIRCLKRYVAREAYRVLISCLARSSPIAP

SEQ ID NO: 142807 - protein, 355 aa, unidentified
MTSTKYIGMDVHKESISIAVRNDAGKIVMECVIETKASMILQFIDGLRGDLHVTFEEGTSGAWLYDLLKPHVTKLVVCDPRKNRSMREGNQSDKIDARRLAELLRLNHLNPVYHGEHGLRTLKELVRSYLTITKDVGRVMSRVKAMYRSWAIPCTGKQVYTSRHRAEWLGKIREPGVRRRAEFYYQQLDALRLLRQEVRRDLLAESKKHKAWERLCQIPSIGPIRSAELLGILQTPHRFRTKRQLWTYCGLGIETHSSADHRVVEGQLKRAKKQVEVRGLNVNCNHDLKNLFKGAAVVAATKPGPFEEFYAELLAKGMRSEMARLTLARKIATIVLIVWKRGVSFDAQHLKPQTA

SEQ ID NO: 142808 - protein, 347 aa, unidentified
MVYDQQHKFYCGVDLHARSMFTHVLDAKGKTVFEQDLPAGPDEFLRALKPFRKDVVVGCECMFAWYWLADVCEAEAIPFALGHALAMKHIHQGKSKSDKIDAGKLAAMLRGGLFPTAYVYPKAKRQTRDLLRRRSVFVRQRAQLLAHIVNTNSQFNLPPLTKKLTYAANRSADVAERFSDPSTRLMIQADLNLIDHYDTQIADVERRLVRTAKVDDAVTFGFLRTVPGIGPILGLILLYEVDDIGRFPAAGNFLSYSRLVRCEHSSAGKVKGSGGKKIGNAHLKWAVSEAACLMIRSVPAVKSWVQRQEKKRGKRKALSVLEAKIGRAVFHLWRKQQAFDLKRFLAG

SEQ ID NO: 142809 - protein, 366 aa, unidentified
MQPMYYIGLDVHKRTISYCLKDVSGTIHAEGTIPATRFHLNQWMKMLPQPWTAAMEATVFTSWIYDHLRPHAAGLKVAHPLMLRAIAAAKKKNDRIDASKICDCLRCDFLPECYMASTAIRERRRTLRYRHLLVRQMVQMKNKIAVLLMEAGVSYNKQRLHKAGYFRELLATNPDIDEGLCSLLRVCRETVVRLQRTESALVRSLERDSLLKDRVERLMTIPAVGPITALTWALEVGDVERFSSIKKVISYCGLCGAEKSSANTVQRTPISKQRNKHLQTTLIEAAKMAPRYSPQLALLHDQEKADVLFSHELCCRQHVVGRRNGPRLSWLEDLLQRPVGKDFFRAPERMIHDAPLLVVALPTLVK

SEQ ID NO: 142810 - protein, 345 aa, unidentified
MPIVGGLDIHRKQITFDYLDTVTGEVKRGQVAPADREHVRAWLTRFAGWDDAAFAMEGCAGWRYVAEELAAAGIAAHLGEPADTAALRGRKRHAKTDKTDARHLRALLAEGRLPECWIPPPHILEYRALLETYHDLRRAHTAWVQRIHAVFVHQGAPRLGEGAVRTEPGLEALRAAAAAHLSAAGQLQVATALDMLAATEAQLGPLRKQLTQTARHLTGARVLAARLYGVGPVTGLALTCWLGGAGRFSSSRKAVRFTGLDITVHSSDRKGPPGRLSRQGPPVLRWAVYEAGKTHARTSAPDHGYYAAVADRKNTKRAALPEARKIVRQACHILTELGDDALTIA

SEQ ID NO: 142811 - protein, 289 aa, unidentified
MRIIGCDLHARQQTLAMLETATGEVVKTTLKHEGNSVWEFYSSLPRPVRVGIEATGSMQWFVNLMEELGIDCLVGHPAEIRAAEPRKQKHDRRDADLLLSLLVEERFPKIWLPTKELLDLRALLRHRHQWVGLRVKIQNALQAIALANGLRRGSSLWTQAGQQAIASLPLSPHAAYRRNELQAMYVKFETEIEKLNQRVEQQARERLGARLLMTHPGVGPITALATEVFLGDPSRFAGSKELASYVGIIPGEHSSGKRQRLGGLSKQGNPLLRFLWSEAAIHAVRREPE

SEQ ID NO: 142812 - protein, 374 aa, unidentified
MGNNSEAFVAFDTSKLRNAVAIADVGRTGEVRFLGEIDNSPKAIAKLVNKLAAKYERLTFCYEAGPTGYGIYRQIIQFGHECLVVAPSLIPRKPGDRVKTNRRDANSLVKLLRAGELTEVWVPDGRHEAMRDLSRARQAAVEDLRGKRQQVSSFLLRQGSYYPGKKTWGKTHAAWLASQKLEHTEQRIAFEEMLLAVRQAQERIERLEQAIRAAVPEWSLAPVVTALMAMRGIDLVSATIFLAEIGDLSRFQSPRELMGYLGLVPSEQSTGDSIKRGPITKAGNRRARSILVECAWSYQYPPRVGREKQQKIAAAPRAVREIAWKAQCRLHARYRTLVRKGKLKTIAVVAVARELAGIIWAINREISPVVAVTR

SEQ ID NO: 142813 - protein, 360 aa, unidentified
MTNRSTDVLALTVGIDLGDKRSHYCFVDAQGEIVDEGAVPSTEAGFSRRFQSLEPCRMALEVGTRSAWLCELLQGFGHEVYVANPRQLKLISQSDRKDDRTDAETLARVARMDPKLLRPIQHRGVEARRHLAVVRSRDALVRTRTLLINHVRGIVKTFGGRLPGCSTPSFSDKVREHIPAELKKQLAPVLKVIDGLGVKIRFYDRNIQHLAKKKHPEALHLAEVPGVGVLTALAFVLTIEDPGRFPRSREVGVYLGLWRRRVDSGKTTSQLGITKAGDSHVRRLLVGASQYILGPFGPDTDLRRWGLALSKRGGKNAKKRAVVAVARKLAVLLHRMWVTGEVYEPLRNTAPIVSLSGVQG

SEQ ID NO: 142814 - protein, 341 aa, unidentified
MSPFTAQSILGIDIAKAKLDTYFQRVGSAAKPIHRRYDNTPAGHEQVVSWLAGQPVGQLHVCLEATGTYGRAVALRLHQADYRVSIVNPLRIKRYGESELLRVKTDKSDAALIARFCLTQQPAPWTPPLAEQQQLQDLVRSLHALQRLHQQQRCRQQSGPQEQAVATVTTAVLTCLQTQMESLRTQIEAHILAHESLKREYELLLSICGIGKATAAVLLGDLGDLSRFPNVRDLVAYVGLCPQLKRSGTSVHEPSPLSKRGHAPVRQALYFPAMSAARFNPAIKALYQRLLARGKPKMVALAAAMRKLLHQIYGVLRSGQPFDRAHVSLRPAPAVPTRSEQ

SEQ ID NO: 142815 - protein, 364 aa, unidentified
MDVHLRSTTVCALDAETGEAVARRFRRNPWGEVAEWMSGFPGPSLAAYESGYLGFAPQRELSALGVDCVVAAVSKVPRSAADLSSKNDRNDAARMAKAILSHDVTPVWVPSPEIEGLRDLAAAHDAATARLAAAKQRLLAFLARRGYVYGGTTPAGNPRKHWTYGFLRWLDKVRPADDGGIRALAALRNEVEAANEAREALLAEYRAAVAAGPLSAEVEALQSIKGCGFALAAAFASEVGDFSRFRSGRQVTAYFGLAPKQRSSADSVRLGGISGAGDALVRRLAVEGSWSYVQANHQPKLMPKGSGVPLEIRMHGRKGSERLLRRREEMLARGMPQAKANAATAAELVRWLWALGMMCREATE

SEQ ID NO: 142816 - protein, 378 aa, unidentified
MHSMTQEDTLVVGGVDAHADAHHAAALDQRGALLSTKSFPTTTPGYRQLLDWLSSYGEIDVVAVESTGSYAAALVRYLREHDIAVVEVNQPHAHTRRRVGKSDPIDAEMAARLFQAGKAMAVPKQTDGIVESIRLLRVARHSAVKSRSAAMVQVRDLIITAPQELRDQLSCRKTLRGKVTVCGRFRLTARELRSPSQAAKFALRSTAQRIKALDQEITALDRELEQLVATAAPRTVQLLGISTGHAGQLLVTAGQNIDRIRGESSFSMLCGASPIPASSGKTTRHRLNYGGDRQANRALHLIAVCRLRYCERTRAYVKRRTAEGKTQREIMRCLKRYIAREVFNSLRADLADTAQPRPMVSTTIMCGNPGFGINRTRA

SEQ ID NO: 142817 - protein, 350 aa, unidentified
MSIYVGMDVHRKRSQVAVLDDAGVQQRNRNVPNDPAQLVPILGALPPGTPVAFEAAYGWGWLVDLLEELELEPHLVHPSRCKAIASARLKDDKVDARTLAQLLRADLLPEAWIAPQQVRDLRALLRHRASLVRLSTAAKNRIHAVLADRGIQQQTGLWTGIGRVWLAGLELPPTPRAIVEDYLALLDGLAEPIAHLEHQIHALAKPDPRVQALMALPGVGRLTAMTLVAEIGDIDRFPTARKLCAWAGLTPAVRNSDRKVRHGHITKQGSPWVRWILQEAAQTAKRSPMFAPAYAQLARRRGKQIATVAIAHRLLARSFHILNQLEAATTGEGQTAGCARNNRMRLQHGR

SEQ ID NO: 142818 - protein, 430 aa, unidentified
MKSNTQNAKIEAITENTLVLGIDIGSETHYARAFDYRGIEYSKKPFKFSNTEVGFMSFKAWIQDMKEMHEKDKVVPGMEPTGHYWFNLGKFLQDNEMRPVLVNPHHVKKSKELDDNHPTKNDRKDPKVIAGLVREGRYMIPYLPEGVYADLRTASNIRFQLQAELTRIQNRISRWFNIYFPEYKTVYGKPDAKSGMMILKVAPLPEDILTLGIDGVNQIWRDAKMRAVGKARAKTLMEAAEHSVGSKEGAVSARMEIRMLLEDYESRNVRLQEVMALIEELVKQIPMAEKLLEIKGVGIRTVSGFLAEVGDISRFNNPKELQKLAGLALVENSSGKHKGETTISRRGRKRLRYLLFEVAMSLVAKNPEFRELHNYYTTRRLNPLKKMQSLMAIAAKLIRVFYAMLTKGVAYDPKKMINDIKRPKIYLQAA

SEQ ID NO: 142819 - protein, 353 aa, unidentified
MTSTKYIGMDVHKESISIAVRNDAGKIVMECVIETKANSILDFIHGLRGELQVTFEEGTWATWLYDLLKPHVTKLVVCDPRKNTRQGNKNDQIDARELADRLYMNKLSSVYHGGAGVRTLKELARSYLTISKDLARVMSRVKAIYRSWGIPCAGKQVYAPRHRADWLAKITEVGVLRRAEFYYQQLDALRSLRHEVRRDLLAESKKHKATKLLCQIPSIGPIRAALLIALIQTPHRFRTKRPLWKYSGFAIETHSSADYRSVKGQLQKAKKQVSVRGLNRDCNHDLKNLFKSAATIASVKPGPFQEFYAALVAKGMRPEMARLTLARKIATIVLIVWKKGVSFDAQYLKPQTA

SEQ ID NO: 142820 - protein, 422 aa, unidentified
MMNSTNTYPIHPKMTRTYAGIDSHRDSHTIVILNCFHEKLGEFKIGSAPSEFANFIKQAKKYLQTGTTWAIGFEDVSAYGRSFVKYLVDRGFLVKHVDASKVATERGQVLHKTDQYDAECCARVLINQFDKLPIANPEDKFWILQNLVTRRNAITKINVMVKNSLHSAVAENYPHYKKFFSRLTTDSALAFYEAYPAPHHLNNVTVETLADFLHSASKGRLAQTKAQLILDYVQRDKVQQVDFQETRDFTVRSLVRQVKNNLAELSAIDDEIEKILQHFNYPLTSIKGIDTLTSAKLIAEIGDINRFKSAKQLAKYSGVSPVTFASGMTNLQMANARGNRKLNEIFYRIALTSVMPIGSKGALINPIFHDYYHKKISEGKLKNQALKCVQRRLVNIVYNVMKHQRPYINPDLGYVSADPTTA

SEQ ID NO: 142821 - protein, 349 aa, unidentified
MTMVGGFDVHRKQITFDYVDDDGLVHWGEIRPATRKRLRGWLGEHCASGDAEFALEGCTGWRYVVEELDMAGVVAHLGDPAEIAGLRGPKKRAKTDRADARLLRTLLVEGRFPESWIPPAHVVEVRTLGRLYCALMEERRGWQQRIHAQLFHQGCPPVTALLSVAGRDALAGAELSGVGRQYVDTALRCIDELGAEIVPLRAQLVNFARRQQGCQALQARHYGIGWLCAAIIWAEIGDARRFSSSDQLVRFAGMDITVYSSDAKRSPGHLSRQGSPELRWATFEAAKCAARRGSPDYGYYHQLAVKHDGHNGKNPTLAVERKILRRCYHTLRELGDAALSPLQPVREAA

SEQ ID NO: 142822 - protein, 459 aa, unidentified
MNKAKQHKTDRFEKMPVVNLAAAGIDVGSRSHFVAIGQNHKDVKEFGVYTENLHALCKHLLANGITTVALESTGSYWQQLFVLLQQYQLNPILVNGKFTKNVKGRKTDVQDCQWIQKLHTMGMLEGSFIPDLFTEKVRQYYRHRQTLVDNAASYINKMQKALRLINIRLDAVLRDVMGRSGRDIVEAILKGERNAEVLACLAQPTVKTSKEEMAAALSGDWREEYIFELRQCYELYQYYHKKIDECDEAIKKLLTGEIQRKQKEENLAKTKEVKIKKKKARKNEARINIQQLAVDLTGGVDISSIDGVGLGFVLCIIAETGLDLKAFPSAKHFSSWLSVVPDLKKTGGKVINSHTRKRKGRLAKAFMYAANAVGNMKEGGYLVHFFKRIEHRRGRQTAIIATANKLSKIIWNMLTKKEAYHPVLPVEYLNKIRKKEVRNIQRRIRQFDIKEEELTFALA

SEQ ID NO: 142823 - protein, 479 aa, unidentified
MTTHARRLVGIDLGIASAHTVRVLDEAGHTIAKRKAWPTVSSLTDVETTALVGAPEGIRLEVVVEPTGPAWLPIAVFFTRRGHLVHRVSSAKAADLRRFLSRHTKTNGIDADTLARLPLFDPAGLQPLVLPGAEQAALDRRVRATDRLTQAGADHKRRIKDLARQLLPMSPLTADLGVADLAVLERYADPNALLRFGSKRLTTFIAKASHSHQGSDRAQQWIDAANASLDLYAGHPAAAFADLAAEIATEVRLLRAVQTELVAHAEHREIRYRRVDPAGLARSLPGVADIGGPALVAAIGDPTRFATGKAFRSYTGLTPKASETGDTDRKGQPMSKAGSRLLRTTLIRAADNARHQDPQLARIYYVQMVERGKDHLGALCVVAANLAERFWAVMNRGHPYLVCDTNNTPIDPVQAKAIIAAHWQVPAEVRARRRSKKGKAPQTVRTGQPKPPAQRESRRGDLPRPAWSATPPDEVNRSA

SEQ ID NO: 142824 - protein, 345 aa, unidentified
MTESKIVAFDLAKRIVQACVIDGTGAVIAEERMGPERVLSFTARHPHATVALEACGGAHHWGRALERQGHRVLLLPPQRVKSYGDPACKDDRRDARAIAEAASRSYLRPVPVKSEGQQALQSLDRVAALLARQRTQTVNALHGHLSEFGITLPKGPHLLKRRFTELEASPRWRELPEELRAAMGELFAAFLALEDRLSAIKARLAKGAKQSKLGRLLLEIPGIGPITAVSLEAAIGDDPGRFASGRQFAAWLGLTPQVSASGERRQLARITKRGSARLRSLLVVCAQAMLRQYRQGRHGDPLACWARHLLARKRWNVAVVALANKLARIVWKVASSGAAYQARTA

SEQ ID NO: 142825 - protein, 337 aa, unidentified
MTQLTRMGIDLAKHVFQLHGVDERGHTVLRRRISRAQLRPFVAQLRPCLIGVEACGSAHYWARELKTLGHDVRLIAPQFVAPYRKNDKNDGNDAEAICEAVGRPHMRFVPVKDVGQQAVLTVHRARQLLVAERTALVNQTRGLLAEYGLIMSTGVGVLRRALPALLETPALPVLAREVFTDLADRLRMLDERIAAYDCRVAQLARQTEPVQRLLQVPGVGPVTATALVAAVGDARAFKNGRQFAAWLGLVPRQHSSGGTRRLGRITKRGDVYLRTLLIHGARAVMRQLARRTDATSRWALALKMRRGFNNAVVALAAKQARVLWALLATGRPYAACP

SEQ ID NO: 142826 - protein, 344 aa, unidentified
MKLFMGFDVSLAKAAVCVISEHGKIVREAEVESDPAAIIRFAMEQQGEIAVIGMEAGPLSQWLHRHLSEAGLDVVLMETRQVKGALRAMPVKTDRRDAEGIARLLHLGWFRPVHCKSVSAQEVRALLGARKSIQQGMIALEMSMRGLLRNFGLKVGQISKGRFEARIRELVDGNSTLDAVVEPMLRARASLRRELAGLERTVRSLAQDDPTCRLLMTMPAVGAVVALTFKSAVDDPGRFTSSKKVGPWVGLTPSRQQSGERDVTGGITKAGDMQLRCALCQAATVMMNRGRGSWLRTWASRVAKRRGRKRAMVALARRIGVILHRMWRDSTSFCPDDAPAPIPG

SEQ ID NO: 142827 - protein, 382 aa, unidentified
MNRIIKIGMDVHSTNYTLCAMEPVLDGEDRIFTNIQVTPDYENVIQFIDNLKERLGSSDSYSIECGYEAGCLGYSLYHQLTKAGVKCTILAPTTMLTQQGKRVKTDKRDAVMIAQCLSYGGYHAVHVPTDQDASVKEYLRMRDDHKLALKKIKQQINAFCLRYGYIYGGHKWTIKHLEWLKKLDLSELNRETLNEYMTSYEEQTAKIERFDKRIEELAADSDYHENVRKLSCLLGIQTYTALSLIVETGDFKRFRKGNTYAAFLGLAPGESSSGEKISRTGITKAGNSRLRTLLIEAATGICKGQVGHKSKALCARQAGNPAEVIAYADRGNIRMRSKYKRMIRHEKKRNVAVAAVARELACYVWGIMTNHIEPREEGKKAA

SEQ ID NO: 142828 - protein, 428 aa, unidentified
MKYNTQNSKIASITEKTLIVGIDVGSQVHYARAFDWRNYEYSRKSFAFSNDEEGFMAFKNWMNDIAEKHDKEVVLPGMEPTGHYWFGLGMFLQDMGMHPVHVNPHHVKKSKELDDNNPNKNDRKDPKTIAALVNEGRFSYPYIPTGIYAEIRNLSNLRFQTQEQITRIKNRIARWFSIYFPEYKEVYGNLDALSGMMILKMAPLPMDIVKLGVDGVNKIWRDAKLRAVGLKRAKTLVNKAEHSIGSHEAPEAARVELQILLSDYEMYNQRMDDLMQTIEEKLYEIPYIDKLLEIKGIGMITICGFIAEVGDIRRFDNPKQLQKLAGYAIVSNDSGKHNGESHISYRGRKRLRYVLYEAAISLIGKNTEFKEIHHYYRTRERNPLKKMQSVIAVACKVIRIFYAILTKGVAYDGAKMIKDIKRPALATN

SEQ ID NO: 142829 - protein, 437 aa, unidentified
MDEVTDEPLYRDRVCGIDIGKAGMAATIRVPSDQNPARRAAETRSFGTTKREVLALADWLRCWQVPAVVMEATGDYWKGPFYRLEAEGFDCVLADAKQVKHLPGRPKHDPGDSRWLAACFERGAVTSCFVATPEFRVIRLHTRYRRDLTGERTREKQRAEKLLESAAIKLSSVVTDLHGVTGRDIMNQLIAGERSPKVLAQLARGRARRKISELEAALEGAGFFTAEHATLLAAMLARIDRVNEEIARLSEVIERLLAPHEEQLQQAESMPGWGRRAAEDAVAETGVDMTRFPSGAHLASWAGRTPLDNSSGKRAGRAKSKKGNRYLGGLLGETAVAAGKTQTREGARYRRLARRRGKAKALVAVGNTQLKVYHKLLSSPGMRHEDLGPDYYERQASTRRQIAHHVGKLGALGFEVTLCRLPEPDPDPGQAASTQAA

SEQ ID NO: 142830 - protein, 335 aa, unidentified
MQVYGIDLSMEKFDVNFIDVTGKEKNKQVKNRLTSISKFLENVPDNSVLCAEHTGSYGDLLVYLCNLMGIVIALVPGYTIKHSLGMIKGKSDPIDARRIREYGERFFDKLEFKEYDTEEIVELKSLYTLRAQLVKARKSLRTGAHGRSNLPMQSISVNKHVQQALCNLDVEIAEVEYEIEEVIKANEALNENYELAVSVKGIGPVIATDLLIKTGNFMDIDTARKASSYAGVCPFPNASGKMVGKAKTSPFADKKLKALLYMGAKSAVKHNKEYRLYYQKKKLEGKPHYLIMNNISNKMLRTIYSVIKNKTPYRQDYICLDPREKNINSSTEKVA

SEQ ID NO: 142831 - protein, 429 aa, unidentified
MLVQPPYHRREGVHMLKIVFPICCGIDVHKTFVIATIAATNRENITTYQTKRFSTFTKDLRALALWLSDHQCDVVCMESTGKYWIPIYNILESSCKITLAHPKYVKAIRGKKTDKKDSIWIADLHKHGLVPGSFIPPADIREIRDLLRYRFKLVAFVTSEKNRVQNSLTVSNIMLSSVVSDTFGKSSSAILAHLLKHPGDQDFDFLPLLHGSMRKKKDEIALAIDGTISQVQAGKITLCLEHMNAVQTYIAQVEETATHLAASYSAALTIIQSVPGISEFSALAIFSEIGVDMSKFHSARHLCSWAGLAPSNDQSAGKKKSVRISRAGVYIKPLLVQCALAAIKNQQFPHFRLRYESLKLRRGHKKAIIAIARMLLTAIYHMLTTGELFNPSLYEKAQCRPGFVASSEQHAVKLLQRLGYSVAKLSDSA

SEQ ID NO: 142832 - protein, 389 aa, unidentified
MNYIGIDISKHKHDVCVISDLGEVVNEGFSFTNNAKGFAQFLKMLVDYGGFANNRIGFEATGNYAINLKLFLEKNGFEFMEINPFLVKEYIKSETLRKTTTDKICARHIASYLLVKAYKPHRTGFYDNFALKQLTRFRQNLVKTRSKHLVQLTNVLDCIFPEFKPFFNGKLSVTALYILSHYPTPAAIANMKSPTHEKLRKVSHGHFSMAQFVELKSLAKNTVGVYQEHYGVQLEMLLDLYAHIDSSVDEVDAKIGAIIKELNPPTLSIRGVGETSTAVIVAECGDFSRFANSNKLLAFAGLEPGKFQSGTLSHEGKMVKRGSSHLRYALMNCANTVCLHNEVFAEYYRKKRNEGKKHNVARNHVAKKLVRIIFALETKGVMFDTALLR

SEQ ID NO: 142833 - protein, 400 aa, unidentified
MNPVVGLDVAKGESEAQAFLDNDRPFGKSFSVKHIKEDLDSFVSFLKGIERKTGVRPAVILESTGHYHTPIIQCLEGNQYLYILVNPIISHQAKKTSLRKVKSDAVDAYHLCVLYYKEDFEPYKKRGLRLLNLRTLSRQYETVTNLYVQAKLQFHTILDQVFPEYRGVFGDLFSKVSLQVLKEFPTSEDVLVAGEEKIMERIEEMRVKRSASWARERVAKLMASAKRNPFQQGVYQSQLYSLDMYISMLLQYQEHLSNLERQIDVLAEEIEEYKIIQSIPGIGGKIAATIISEIGEIDRFNHPKKLVAYAGIDPSVHSSGKFTATINHITKRGSSRLRHALYMAVLCGIRSCRNKKLKEYYDRKRNEGKHSKVAMIACVNKLLHWIYAILKRNEPFLDMA

SEQ ID NO: 142834 - protein, 400 aa, unidentified
MNAVGIDVSKGKSMVCVMRPFGEVVLEPFEVLHTAQNLHDLAEKLKALDGETRVVLEATGNYHKPVAFVLHDAGLFVSVVNPVLIHDYDNNSLRRVKTDKKDAVKIANYTLDKWTRLRQYLPEDDTRLALKNCYRQYQQAVAIRTMLKNNLISSLDLTFPDANKLFSSPVKNNGCEKWVDFIGDFWHSECVSSLSANAFAKKYLKWCQKHGYVFTRSKSDEIYACAVNSASLPKSPTSKLLIQQQVAQLKAVSQSVAAFRQEMLRLSQQLPEFDTVMEMYGVGPSLGPQLMAEIGDVRRFSSKKSLIFAGIEPQPNDSGKVVGNDKGISKVGSAVLRRTLFLIMTVILQTQPQDEPVFQFMNKKRSEGKPYKVYMMASANKFLRIYYAKVKAVMDSERSQ

SEQ ID NO: 142835 - protein, 407 aa, unidentified
MDLLHPHCAGLDVHKDSVVACIRIAAEPKPTHLTQTFATTTRGLIALAQWLDEHGVTHAAMEATGVYWKPVWHLLEEGRELTLANPQHIKSVPGRKTDVRDAQWIADLHAHGLITASFVPPEPIQDLRDLTRTRKQLGREVIEHTQRIQKVLQDCNLKLDSVLSNVVGKSGRAMLRAMIAGESDPTKLAGLALGNARKNKAKLEEALRGKIRPHHRGLLRVHLDLLESIEKSVAEVDALLGKALASMKVQMDLLTTIPGVSERVAQTLIAEVGVDMSKFPTVGQLISWAGLCPRNDESAGKTRSTRLRKGGSWLKTMLVQGAWAAVRTKGSYLRAQFYRLSRRGPKKAIVAVAASMLTAAYFILRNGVAYRELGADYFNKRDEQKVVARLTRRLREMGYEVETKKAA

SEQ ID NO: 142836 - protein, 336 aa, unidentified
MAQGRGTGVQFSEVEDEDAQTEQGACVCDGRRERAEFPNNAAGHKLLISWLASHGSEVRIVIEATGIYSLDLAFALQRANGVEVMVANPRAIADFARALMQRSKTDQLDAEAILEFSYRMPFVPWIPPSQARLDLRSIMRRVCSLKLQMQQESNRLHAAEHAEQITSFIRRDIEMHLRQMERHIEKLDAQAFTLVGADPELKRCYERLISARGIARTSALHILGELVILAADMTARQWVAHAGLDPRAFDSGTSIHKPARISRRGNHYLRAALYMPALVAVRRDPNVKAFYDKLVAKGKTKMQAIVAVMRKLLHAIHGMLRSDTNFTGEKFFAMKA

SEQ ID NO: 142837 - protein, 311 aa, unidentified
MSQGIFVGVDISKENLDIAINTEKGSRRLNNNAAGIKKVIEYLRGISPVLVVFEATGGLELPFWQELTEAGIAATPVNPRQIRNFAKAKGVLAKTDTIDAQVIAQYASAIQPQAQAFPDTQELKEMIARRSQIIEMLTAEKNRLKAARKAKIQQDIKINIEWLKSRLDGVDKDLQKAIKANPEWRQKYEILESTPGIGNTTAASLVAGFAELGQLNRHQVAALAGVAPINRDSGTMRGKRMVWGGRPRIRAALYMATLVATRYNPIIKAFYLRLCAAGKAKKVALTACMRKLLLILNSMLKHNLSWRYSPS

SEQ ID NO: 142838 - protein, 298 aa, unidentified
MGEVSTIGVDIAKSVFQIHGVDGDGTVVIRKRVGRAKVLEFFVDLPRCLVGMEACATAHQWARELKKFGHDMRLMPPTYVKAYVKRGKNDAADAAAICEAVTRPSMRFVPIKSVEQQSALMLHRTRDLLIRQRTQLINALRAHLAELGLVAAKGHEGLQQLVMAVTESGDERLPSNARFACQAIVAQLHAVQTQINGLDKRIIQAHRANADSKRLEAIPGFGVILSTAVVATMTDPKAFRTGREFAAWIGLVPRQNSTGGKERLGSISKQGDRYLRRLLVLGAISIVGTARTRPDKYP

SEQ ID NO: 142839 - protein, 346 aa, unidentified
MKITTIGIDLAKEVFQIHGVDMHGKALLRKQLRRSNMTKFFANLDPCLIGMEACGSSHHWARKLGEFGHTVKLMSPQFVKPYVKTNKHDMADAEAICEAVIRPNMRFVSIKNVEQQAILSIHRARQGFVKARTAQANQMRGLLSEFGIVMPQGIRSINKRMSDILEDAENGLPATLRKLLDRLNDHFKELDRQVEELELQIKLWHKESEASKRLEAIPGIGPITASAIVATVGNAREFKNGRQLSAWFGLVPKQRSSGGKQILLGISKRGDTYLRTLLIHGARAVIRFAEKKTEPESWLRKLMARRNKNVAAVALANKNARIIWALLVKGATFHPDHTSAASAAKA

SEQ ID NO: 142840 - protein, 340 aa, unidentified
MTYYAGLDVSLRTVNICIINEQAERVAETKLASDVQDIVAYLDSLELDIEKVGLEAGTLAQYLTYGLQSAGFEVICMEARQVKAALSAMRNKTDKHDARGIAQLLLSGWYSRVHVKSMQSHHIRMLLSSRKAVLGKCIDLENEIRGLFKIFGIKLPPKLGHGAFDAAVRDIIEVDETLSHALLPMLDARLVLYQTFRVLDNRTRHLANDDPVCQRLMSAPGVGFITALTFKSGVDDPGRFKRSRTVAAHFGLTPRRFQSGEMDIEGHISKCGDADVRCALYTAANAMLTWSSLKAWGMKLAKTRGHRKAVIAVARKLAVVLHRLWIDDTQFCWGNEGVRS

SEQ ID NO: 142841 - protein, 368 aa, unidentified
MKVVYQTCCGVDVHKSFLVATIIKTISGVEPSYQKKRFSTFNNSILQFKNWLIENQCRDVCMESTGKYWVPVFNLLEDDINVTIANPKWVKAVKGNKDDTKDSKWIGDLFRLGLVPGSYIPCKPIRILREFTRYRYKLTSCRTSEKNRYQNALTVCNVALDSVVSDIFGKSATSVIDYLIERSDNSINHEEIASRLLRSLKKKSDSVIESIEGYQMTDSQKYRMRLVRAHLDYITSTINDIDTMLDSLIAPYENAVQLLCTIPGVDRNSAITVISEIGTDMTPFSNSKRLCCWAGLTPGNNESAGKKKSVRITRAGVYLKPALVQVAHAAVKSDKSPYYKQKYERIMKRHYCHRPDDSHCYLSDAVHW

SEQ ID NO: 142842 - protein, 456 aa, unidentified
MSKNKTKKVKYQKSLAMVNSHSAGLDLHKETIWSCHLDDKLDAVINTFGTCTADVKALGNSLLKANVESVAMESTGVYWIPVYNILQSMGLKPVLINAREIKSVAGRPKTDKQDCMWICRLHSYGLLKESFVPDINVSALKNLCDCRDKIISDCSRTIQRIRKTLATMNCRLDKAVSDVMGVSGCKVIAAILIGEQNPQTLTDMMEDTLKMKKVEIVKELDGDFREVLIIVLKQHYELYQTFQNKIKELNVEIVRLLEERFPKKADIKDLPNKKKGYTEKQLGFNKDLRPILFEIFGTDLTQLPGIGALTVLYFLGVIGNDVSAWKTEKRFTSWLGLAPNLAVSANTKKKGKTKVVNNLLTKNLKNGAMATQRTDSYLGSQYRKFQARRGGAIAKTAIARKMAVILYNAVKTGTVIEKYDAEKYELKILQRKERKFLKDASILGYDVTKLKELKVI

SEQ ID NO: 142843 - protein, 369 aa, unidentified
MAIIGMDIHRAFAEVVALEGKSRRWLGRIAMRCDRLAAFAAGLTKDDIVVVEATGNATAVAEVLAPHVGRVVIANPKQVRVIAHAKIKTDKIDAAVLAELYASGFLPEVWIPDKDTLALRRQVTRRNQIVRQRTRLKNIVQSILHAHLIPAYPAGNMFGRKGRAWLAAQKLPEDERMAIERHVREIDRLGEDLKVIQRDLAQYGLADLRVKRLMTVPGLDMIVATALVAAIGDVGRFGSPQKLVSYLGLNPSVRQSGSGPAYHGRISKQGPGRARGLLVEAAWAAARAPGPLRAFFLRIRARRGQHVAAVATARKLAVLVWHLLSKEQDYLWVPKDHGLTDLEFMRGHRTPPRLAVRRAFAFTRVLTRF

SEQ ID NO: 142844 - protein, 397 aa, unidentified
MYIVGIDIAKRKHEAAVIDGEGTVIIKPFSFTNNCSGYNRLLAMLAKVKLPLDEVSFAMEATGHYWLALFTRLQKEGFRVQVINPVQTNSIRSFYIRQAKTDPRDALLIAEVIRFGHFSESTLHPENIYELRELCRGRHAIVSMQADVKRKVVALLDQVFPEYETAFTNLFGDTSMAILQTCPTPKELSEMRLEELCHLIEVSSHKRFRMAKARELQALAHNSFGFAMAGDVFSTMIRLYAKHLVFLKQQVQEMDRKIAEIMETLDTPITTITGIGPTLGAYILSEIGDINRFSSSAKLAAYAGIDPTMRQSGEYNGVRNRMSKRGSPYLRHAIWLAASSAVLHDPALKLYFQKKRDEGKPYMASVGHACRKMVSIIYAVMRGNKEYVPCIPSEISA

SEQ ID NO: 142845 - protein, 363 aa, unidentified
MGDRISYVGLDVHKEGIVVAVAEGGARGEIREYGRIANTTSALDGLARKLGREGVKLRFCYEAGPCGYGIQRQLSAGGHDCVVVAPSLIPKRAGERVKTDRRDAVNLARLDRAGELTAVWVPDPGHEAMRDLVRARLDAVHALRRARQQLAGFLLRQGCHYRRPAWTKLHRRWLAGLKFEQAMHHLVLEDYIAAVEAAEARRDRLTAQIAAMLPDWTLAPVVAALQAMRGMALVNAATLIAELGDLSRFANPRQLMAYLGLVPSEHSSGASVKRGGLTKAGNSAARRLLVEAAWTYRFPARVSRELLLRQEELPKAIREIAWKAQTRLCARYRRLARTGKPANVVTAAIARELAGFVWAIAGR

SEQ ID NO: 142846 - protein, 327 aa, unidentified
MMLPALGIDVAKLKFDVCLINTAGKLKHKVFPNTATGFAQLAAWLVKQNVEQVHACMEATGTYGEKLAYHLHATGHRVSVINPAAVKAFAASRLSRTKTDKVDAELIARFCHAQQPLVWTPPAVEVRELQALVRRLEALVEMRGMESNRLEALTSTPIVKASVEEHIAYLDGQIKSTEALIREHINTHPGLRQQSELLDSIPGVGATTAAVILAEVADITQYRSARQVAAYAGLVPRERRSGSSVRGRPQLSKIGNARLRRALYFPAITALRCSEFFKVWAAGLRERGKCKMSVIGATMRKLIHLAYGVLKTGKPFDPEWMQRTETA

SEQ ID NO: 142847 - protein, 353 aa, unidentified
MTYYAGLDVSMKTTSVAIVNEKGKICFESVCETDPEAIHNTINDSKFICEKIGIESGCISFWLIDELKKLSLPAICIESRQMAAIIALKVNKTDRNDARLIAEAMRCNLYKEVFHKTKESIEIGLQMGIRRVLVNTRTKLKNSVRGFLKAYGIRLKAISHNKFSEGVRRSLEGVDECVSEVFEGLLRSYEEVDRNIERVEETLQKLSKKDPVIALLQSVPGVGTITALTYKAVIDDPHRFSNPRNVGAYLGLTPNQYSSGETVKQGKISKCGCSELRTLLNECAVVLLTRTKRWTKLKAWGLKIMKKSGLNKAAAAVARKLAIIMLRMWQEGKAFIWGEKKAKEHVGKTCIAV

SEQ ID NO: 142848 - protein, 359 aa, unidentified
MSQNENVKFIQQSGGSMKQDISVLGIDLAKNVFQIHGANVHGKRVLSKRVGRKELIELMSNFTPCVVGIEACTGAHYWARLFNSMGHTVKMMAPQFVKPYVMSNKNDKNDAKGIAEAVTRPEMKFVPIKTVEQQDVLLLHRARELCVKNRTAQSNQIRGLLAEFGVIINKGLSEVRKLPELLDLNKDKLSVKAIHIFERLYEQFKRYEEQVLLYEKDIEAHVKSEPLCKEILKIEGIGPMTASALVATIGDAKVFKNGREVSAWLGLVPKQHSSGNKIRLGGISKRGDRYVRCLLVHGARSALRCVDNKTDKKSRWAANKKATQPMNKAAVALANKNARIVWAMMATGECYRQENVHAA

SEQ ID NO: 142849 - protein, 401 aa, unidentified
MKSLSGGIDIGSESHHVIIMDDTGEVLYDRKVAHQFSEFHKVIGEFKGIEEREQGVIAFAIEGKNGYGAPFDRILIENGFKLYNVDNLKLRRFRDVFGSEWRNDRRDAKMLAKMLRLKDHMDAQEEKAFIAVEKPSAVHEKLRILSRHQQSLIDEKVRIQSRLRKRLLEVCPDILEHGDTNSKKLLQLLKKYPDFSRYKKITLGALLKIETIGKKTAVSILEGLRNIQYVEELTGIYKALISSYCHRILELKEEIKMLDRELEEAGQKSAEVMQLKSIKGVGTKLSSRLAGEIGDIRRFNRESQLAVYCGVACIDDDSGKSKRTKAVYKANRICKATMIEIAGCTIRYVQESKTYYEKKRAEGKKHNHALRCLARQLIKVIFKMLTENREYIYKEELKKAA

SEQ ID NO: 142850 - protein, 312 aa, unidentified
MGSFVGIDVSKSALDVHVLEGWSERFDNTAEGVREVKDRLLDLQPERIVLEATGGYERLAAGELSLGGLPVVVVNPRQVRDFAQAIGKLAKTDEIDAAVLARFGQAVRPELRPLPDESQQKLREILTRRSQLIQMRTAECNRLSQLTDKAMRKSVEYHLAFLAKQLAQLDKDLDRSIRDSPIWQDKVDLLQTVPGIGPQTARTLVAELSELGEASRQQLAALVGVAPMNRDSGTLRGKRTTMGGRPSVRTALYMATLTATRYNQVIREYYDKLLRAGKAKKVALVACMRKLLIILNAMLRNHKTWQPKLKTT

SEQ ID NO: 142851 - protein, 420 aa, unidentified
MNNSISLQIGIDWADQKHDYCLCPFQPEPGQVQAKNESGIVSSSPEKLHEWIMQVRQRFPDGVIEVCVELSRGALINALREYDFIRIYPLNPISSNRFRECLYPSLTKDDVKDASLLLTILQKHREHLRVLTAGQRDSCLLEGLVQARRKYVNQRTALVQQLTTNLKEYYPQALGMVGDLSERMSRRFLKKWPSWDELSRVREHTLRKFYYANQSRSEARIEARLNLHRNSRPLSNNETTIELGRMQTIMLVEQLETLDKIIHEYSRKIEPLYRSHEKSTVINSLPGAGKIMGPRLICAMEGNLPACRNAAELSSYSGIAPLRQKSGNSSRISKRFRRPKFLHQTFIEWAQCSIKYSSWAKAFYDHRRHSLGHDHWAVVRALAFKWIRILYKCWEDNTAYNEENYIQTLKRRGSKLAELI

SEQ ID NO: 142852 - protein, 415 aa, unidentified
MALKIVYKICCGIDVHKTFVVACIASTNPKGVTTYENHRFSTYTKGLKNLLQWLLAHNCKDVCMESTGKYWIPVYNILEDDCSIILAHPKYVKAIRGKKTDKKDAKWIADLFKHDLVAGSFMPPADIRQLRDLMRYRFKLTCFQSSEKNRLQNCLTVSNIQLGNVVSDTFGKSAQAILDKLLENPADTSFDLEPLVYKSLKKKLPELRDAIDGYITPEQAGKLKVIKAHYEDLESRKAELEELIHALAAPYQQELAILQTAPGISSDFTAIGIISEIGTNMEAFPSAKHLCSWAGLTPTNNESAGKKKSVRVSKAGCYIKPLLVQCANAVVKSKKHPEIRNRYLRIKKRRGHKKAIIAIARMLLTALYHMLKNGENYNAELYRKSDLPPADREITVEQAIIIARNQGYKVKSATA

SEQ ID NO: 142853 - protein, 341 aa, unidentified
MHAITIGLDIAKFVFQVHAEDAEGRIIIQKRLRRSQVEAFFARLPPSLVGIEACGSSHHWGRTLRAHGHEVRLIPAAYVKPFVRRNKTDARDAAAICAALSRPDMRFVAIKSVEQQAARGLERSRELLVKQHTQLRNCVRSQLAEFGIVAAQGQRGFAALKSMLDAGDAPVPAVLVTAMRALVEQIESLRTAIAALEEQILAVAREHPVMRLLAGIPGVGGITAHAVVAAIGDGRQFRSARDFAAWAGLTPRQHSSAGKRRDQGISRQGDSRLRKLFALGASTIMRNVRFRADRATAWQRGILARRPIKVAVLAQAAKTARIAWAILTSGETYQPRRTVTA

SEQ ID NO: 142854 - protein, 291 aa, unidentified
MTKISTGVAGIDTAKDKLDIAVHGQTRRWQVENTLRGWKHLSLELRKIGVGRVGIEATGGYERGVVRHLRAAGFTVLVLQPIQVRAYARMHLRRAKNDVLDAVLIAACAAAIDSPPIEPDARLEDLADHLTFVEQIEEDMARLKTRLEHIQDKRLRRIATTDIARLERRRANELQHIAKALRSDDDLAKCFDLVLSVPGIGDRTAITLIVRMPELGRISREEAAALTGLAPFDDDSGQHKGERHIAGWSMPVVSSRAPKEWHTQRCASACPDWASQSFCEVDAAFPQCDDK

SEQ ID NO: 142855 - protein, 426 aa, unidentified
MNEVDIIRLEQFRQLKKEIRGSKEHLIVGIDVAKDKHNAFFGTATGKTLFKRLVFENTSEGFNRLLIQAEALKVQYGLKKTVFGLEPTGNYHKPLGEFLIKSDHMVVLMSGVAVKRNRELLDGRWDKHDTKDSANVSDLISQGKCLFYEYPSMALRDLRNLLSLKRRLKKQEHGLKVRIRNHLLAAYFPEFDRYYRQSDSQGLAIVRWCLDPSVIAGLKYDEFVRLVAPRTRTIGQRDRLKAIWKKASDSIGCDASESLEFEAKVMVEGLKHVQEAISEVNDKIEDICCEFPEYSYLLTIPGFGPDVSSKVFGAIGDPFRFKTGKQVLKMAGLDLSAERSGKRSDTATPVISKKGKADLRYALYQAAMIASTRNKHFITYYTNKLRGREKEKGIKTKMRVKLAAKMLIIAWTLMKKKEVFYTPQAY

SEQ ID NO: 142856 - protein, 416 aa, unidentified
MKSWTEITHYAGFDWARDHHDVVIVDRQGQIVAEFRIEHSLEGWKEFGSRLKNYSGVAVAIETSQGAAIDQLLQLDCAIYPVNPHSAKSYRERKAPSGNKTDRLDAWSLAEALRLDGQHWKSLQPLDPLTQQLQLLCRDEISLIEQRTALVNQLQQALCEYYPAALEAFDDWTQPYCWAFIIQFPTPEKLVAAGPRRWEKFLHTRKLWRPDTAPKRMEIFKNARLFCGSPAVTSAKSLLAVSLARLLNALQVQLDHYRQQIEALFRQHPDSGLFGSLPGAAQTLAPRLLGEIGGEPRRFEDTQNLQCVAGTAPVSYQSGQIHKVRVRYQCNKVLRHTVHLWAACSLRVCPWAGVYYKQKRAEGKSHACALRCLGQRLLKILWRILETRRPYDADLHTRNQQAHGSWVLQLMTPKPA

SEQ ID NO: 142857 - protein, 345 aa, unidentified
MSMVSGVVGGVDTHADVHVAAAIDANGGVLGIESFPADLRGYEALVGWLVGLGPVIRVGVEGTGSYGVGLSRFLHDQDIEVVEVDRPNRQTRRRLGKSDPIDAEAAARAALSGSAAVTPKRRDGPVEQMRVLLVARRSARRQRIATLNQLRQLVICAPDEIRVRFKDRYKTGLVTEAARMRPRKGNDPIIYTTNVVIRDLARRIKSLNTEMRSIDGALRGLIEQAAPSLLGLYGVGVDTAASLLVAAGDNPDRLHTERSWAHLCGVTPIPAGSGKTSGKVRLNRGGDRQANAALYRIVLTRMSGDDQTRNYVRRRRAQGMNTGEIMRCLKRYVARQTFKHLPRAA

SEQ ID NO: 142858 - protein, 430 aa, unidentified
MHNKNYISVGIDVGSAFSFMTILAPDETVILKPFKITHNNKDSLERAVSEIKKAEELYSLESRTFLESTGIYHFPLFCYLVDCGFNASIINPIITHSTKNGNIRKVKNDKIDSKGIAKLGLSKDIPVSQFPAKLVLELRSLTRKYYDLTDERSAHINKLKGDLHTVFPQYLDVFCDVTGKTSTMILRQYGTPDKILRGHKKTMIEKISKASRKGLAKASERYEKLCAAANAAKTFGCQIDSIYFNIFLTLDLVEKLDSALDSILNRIRQLITFNKNEKFIQQIKLLNTIPGVGFLTAVTIMCEIGDFSAFRNPKQLFAYFGLDPEVNESGKIVGTQLHMSKRGSRIARRAIFAVALASIRTKRNGEGINPYLRKYYELKSGQKPKMVAIGAVMHKVCNIVFAVLRDEKAFELRSPEEHCKQYQRPALAAA

SEQ ID NO: 142859 - protein, 487 aa, unidentified
MAKQKKSTFERLSSGTMNRQQRRDLGRRLAGNDPGLTIVHPNAGGIDVGNESHFVAVPPDRDPNPVQEFGCWTADLKRMAAWLRACRIDTVAMQATGVYSIPLYDILTGHGICVVLVNAQHTKNVPGRKSDVQECQWLMKLHTYGLLRDSFRLEEKMEGVRTIWRLRDRHVKDASRAVQHMQKALTKMNIQLANVISDITGVSGQAIITEILKGERDPWKLADLKHEMVKASREEVARSLEGNWRADLLFELRQAVDSYHFAHQQMRECDRKLKSFLASLPTRTLERPNRSGDAPPATTPQQRKARKKPKTRRNEPTIDLKAELKRICGVDLTSIDGIDVITAQTILSEAGTDMSGFQTENHFASWLGLAPSKDISGGKIIGLGKRKVQNRVAMAFRMAATTLLNSKTYLGSRYRHLRQQLPSHASAIKAMARYLAVLVYRLLTHGEAWVDRGAATFERRRTERELASLHSRAFAKGFKLVPITPAN

SEQ ID NO: 142860 - protein, 470 aa, unidentified
MGARNAIGIDPDSKGFVCAYVKLSETKVPTRGYMATEADLERFLKWVKDQGDVIVGIEGSNGLSKPIEQTLREAGVIFYSFKPADTDMFRKAVVGQNKDNKKDAESVARYAMALESQGKLDRYRRVWFADMELQILTRGYERNSEAMTAEVNRLWKLLRLASPDLYLALGGNNPEVELKQNMLQSQGILALLGEKPNVGEWKNLSDEEFLSAMGGNSKGRHALIQELRKVAAKVKPVTPGMALMIQGSAGQIERFKREQRDITKMLDELTKECPEVQRLKEMRGIGTITATTMIAEIIDIRRFVREDNLASYSGFGRREHSTGESTRMVSTRSFNHRLKDIFMTAARNYVLYNPDSHLAGYYRNLVKAGMDPMEATKRVARALVRVIFRTLSSLVEKAEGEQLPEQNRKAGESDMASGSLRSDRSHESNISLSSLRGSKAKKAKRDKRAATRTRRNGRSEKGKAVSKKIA

SEQ ID NO: 142861 - protein, 349 aa, unidentified
MAEQRISYTGERIDVGIDVHKETYTVTCLCQRQMVQTATVPADPARLAESLLRWFPRARLFSAYEAGFAGFVFHRVRTTAGSTNMVVNPASVAVAANEKVKTERRDAKRLARDLADGRLRGIYVPTEAEELARLLPRTRAQLVAHRATITRQIKAKLHQFGLITPASRRLMRSRYLREIAAWELPTELRVSLTLLADQWRFATRQLLEVRRLLREQAKAQVALETVYRSVPGIGEIVARTLATALGDMNRFAHERALFSYTGLTPSEYSSGTAIRRGHISRQGVSRLRHVLVETAWRALPRDPILQAMFDRIAATRGKQRAIVAMARRLIGRIRACFRHGTTYAVGTAG

SEQ ID NO: 142862 - protein, 409 aa, unidentified
MLHDDFQFFAGIDWGSERHRVCLMNSQGNVCDERWIDHSGSSLAQLVDWFRQQTRDSPSLLAAAIEVPHGAIVETLLEHGFAVFSINPKQLDRFRDRYSPAGAKDDRRDAFVLADSLRTDPHCFRAVRLDDPLMIRLRELSRLEDELTSEQNRVLNRFREQLHRYFPQLLQLCEAGDETWLWTLFELAPSPDRAAKLSQAKIARILVQHRIRRNAAEQVRAVLKTKPLTLAPGAAEAATEHALLLLPRLRLLYRQRTDLARRIEAILEELSAPAEDKSKHRDAAILLSLPGLGRKVAATMLSEASHAIASRDYHALRCYGGAAPITQQSGKKKIVVMRRGINQRLRNALYHWSRTSVVWDPPSKKTYAQLRARGHSHGRALRGMSDRWLKVLMAMLRNQTLYDPQRKAA

SEQ ID NO: 142863 - protein, 344 aa, unidentified
MKKATTIAVDVAQAVLEVAVSHRPGQVASRHRLQRGEVLPFFAQQPAATVLFEACGSASFWAREIEKLGHGVVLLPPQHVRRYRTRNKTDRADAKALLEAFRNEEIRAVPAKNPAQQTLAALHRLRSAWLGTRTARLNTIRGLLREHGLPIPAGARRVVPQTLDWVQDSQSPLSAALRFVLFEACSEVRELDERLHKVEVQLEALAKQTPLAVRLRSVPGVGLLTATAIAGFVGDLTRFPTGRHFASYLGLTPREHSSGSIRRLGAISKRGDTYLRMLLAHGARSVLAAAPRQTHPDRLRSWALELASRVGHNKATIALANKLARYVWAVATKALAFQPKEEAA

SEQ ID NO: 142864 - protein, 407 aa, unidentified
MICVGIDVSKRKSTVCFMAPGDKIIRRPFDVKHTKEELQPLVDEIRVQAKYDEIKVVMESTGVYHLSIAYFLQQNGIFVSVVNALKVANFNKAENFRHTKTDSIDSTNIARYGIAYWAKLPQFDLNGDKYFLLKRLCDAYLNFSEERSRILLQLQSQLEQTMPGIFDLFGGFDINSGKDKLLDFLERYCHIKDIIAKSEAEFVASYREWAKEKGYRSNESKAATIYAQAKNGIPSIPNNPIVRETIMWYVGLLRRADEALMASLTRMEDIAKDLPEYELVGEMGGVGRVTRVALIAQIGDVRRFKNKHSLIWFAGLTPSIHESGKFRASQNHIVKKGPARLRKVLYQVMMSLVMHKIPKDDAVYRFIKKKEAEGKYKKVAKVAGMAKFLRIYYGRVMHLYRDLGLAA

SEQ ID NO: 142865 - protein, 378 aa, unidentified
MDAPCTGVECAKMEVLLTPQQGTPMSEITVIGLDLAKHVFQVHGADPDGRPVLRKRLRRGQVLEFFASLSPCLIGMEACAGSHYWGRELQALGHEVRLIPPQYVKPYVKTNKNDATDAEAISEALTRPTMRFTAVKSAEQQSVLMLHRTRELLVRQRTMLVNALRGHCGEFGIVAAQGLSRAGDLIKRIEDPADTALPDLARQALQCLTSQIRAIQEQIALIEKKLLAWHSSCEASRRLAEIPGVGLITATAVVASVGNATQFRSARQFAAWLGLVPQQHSSGGKERLGHISKRGDGYIRRLLVHGARPSQLVETQEADPLGLAHRPARPPADQRRAARDGQQDRAHRLGHAEPGRKISGNDCRCCLNRQQPPTGLRG

SEQ ID NO: 142866 - protein, 376 aa, unidentified
MTMLETAVCGGVDTHLEVHVAAAVDSIGGLLGVEEFEVSKAGYEKLLSCLRSFGTVVRVGVEGTGSYGADLACFLAQSDLDVVEVDRPDRQERHRKGKSDPVDAIAAAHAALSGKAKGRPKGRNGNVEAIRVLNVARRSARNHRISTLCQMRHVAFCAPDELRVQFKGLTTHQLVTKAAGLRPGRSTDTVLAMTKRALRELGGRAQNLNAEIARLEEQLKVLVRRTAPELIGLYGVGVHAASLLLVAAGDTPGRIRKEAAWAHLCGVAPIPASSGKVTRHRRRASSQPTTISMRAGSIGRVRIRSTRTPGSTSRLRSRAAAKARSLSRWATSLDTTRSCGSRHRPRPGFELWFSNRTRRCSQPAGKVAVEMLTPWA

SEQ ID NO: 142867 - protein, 367 aa, unidentified
MKDSITVVGLDVHKNSIQIVTADTDGAMEVRPFGRIGGTMDALDRAVRKLVSRGSTLRFVYEAGPCGYEIYRHLTGKGFSCKVIAPSKTPKKSGDRIKNDRRDAETLARLERAGELTAIYVLREEDEAMRDLTRAREDAVKAQKTARHQLNAFLLRYGQRYPGKASWTPSHLRWLSDVTLPHPSQQIVLQEYINTVTVCTERTTRLTDQITKLLPDWRMFPVVRALQALRGVAPIVATTTVAEIGDLSRFANPRQLMAYLGLVPSEDSSGESTHRGSLTKTGNGHVRRVLVEAAHAYGFPARVSRHLLKRHEGVPQPVLDIAWKAQVRLCGKFRRLMARGKLKNKVVTAIARELSGFMWAIAREVEV

SEQ ID NO: 142868 - protein, 341 aa, unidentified
MDEVSIVGIDLAKRVFQVHGAAADGRVLFRKKLSRPQFAKVMASLRPCRVAMEACGSAHYWGRELSRLGHDVRLIPPVYVKPFVKRHKNDAADAEAVAEAAQRPTMRAVAVKSADQQARAMLFRTRALLVGQRTQLVNALRGHLAEHGIVLARGIGNIDRLASRLEEDEDLPDLVRDMGRLYLDRVAGLTDEIDRLDRRIAVAAKESDVARRLQTMPGIGPVCAMAITTFAPDMREFRRARDFSAWLGLVPRQHSSGGKQKLGRTSKMGQRDIRRLLIVGAMSVVHWRGRDGGRPGSWLSRMLARKPRMLVAIALANKMARMVWAMLTRNEDYQDPVGAVC

SEQ ID NO: 142869 - protein, 343 aa, unidentified
MQTITTIGLDIAKSVFQVHGVDAGGQVIIRRQLMRRQVVAFFQKLLPCLIGIEACASSHHWSRELQALGHTVRLMPPAYVKPYVKRQKNDMADAEAICEAVTRANMRFVPTKTPEQQSGLMLHRTRHMFIRQQTAVINSIRAHLAEFGIVAPVGRKGVTELLRIVADPNDKRMPEVARACLAALGTQLLALKEQILEFDRMILAWHRSNQTSKRLHYIPGVGPMLATALVASVADPRTFRSGRNFSAWIGLVPKQHSSGGKERLGGISKQGDRYLRSLFVAGALAVIRYAKIHGTGHRPWLTALLARRPTKVAAIALANKIARMAWAIMAKGERYKQPAALAR

SEQ ID NO: 142870 - protein, 340 aa, unidentified
MTNVVGVDVAKATFDVAVGLVKPGKFQTRAKLTNQEEGFKELMAWLDKHAPEAAVCMEATGIYHEALAIFLVQQGKTVYVANPAQVKYFGKSQLTRTKTDRTDAKLIAQFATSQQAGAKPMSPWIPPTEAQRTLRALVERLDDLKAMERMEANRLEVANDTVRDSLETSLKQLREQIKALEQRIDKHIDQDPQLRHDAALMESIPGIANTTSASLLAMLGDLRRFDAPGKLVAFAGLNPALRESGTLKGQVRLSKTGAPGLRAKLYMPAISAKNHNPIVRAFCERLLARGKPPIVTVCAAMRKLLHLVWGVIRTGIPFDASYAKHHSTTASCSSGEWVVA

SEQ ID NO: 142871 - protein, 365 aa, unidentified
MLLYGAIDLHSNSNQSAILGEDRKRVMKRKLANDPDLILAFWEPYKADLAGIVVESTYNWYWLVDLLQEKGYGVHLANPAAIQKYRGLKHADDNHDAFWLAELLLLGILPEGYIYPKETRAVRDLLRKRQQLRELRTCLILSLQNMVTRNGGPKLSAHDLKTLKEDRAQAYLQEFPELLLSGSANKVCIDALTQQMARIEAAVEQKLKLQEPYTKLLTLPGVARILACTIMLETGPIHRFATVGDYASYCRKVQSLWTSNEKVKGHGNKKNGNRYLAWAFSEASEKARIHHRASREFYQRKLRQKKSVSLAHNALAHKLARAAFYILRDNVPFQQEKMFGSPQALLDKGPGADGEPLVKLVKPGD

SEQ ID NO: 142872 - protein, 483 aa, unidentified
MAKRKLSTFERLRKGKLNRKQRRDLARRVDSADPGLQVLHPDAAGIDIGNESHFVAIPPDRDSTPVREFGSWTSDLQEMASWLKAHGIRTVAMQSTGVYWIAVQEVLERAGLEVYLVNARGTKNLPGRKSDVQECEWLRKLHTYGLLNNSFRPPEQIRAIRTIWRQRDRLVKQCGRVVQQMQKALTTMNVQLANAISDISGATGQAIIRAIVSGTRDPWELAKLRDRRIAASEEEIAQSLHGYWREDVLFELRQVVECYDFYHHQIEACDQELKKHMEAVATREVTVKQDLPKDASPIPSSKPARRRSKSRRKDQPKFDLASELQRAMGVDLTRIDGIDVITAQMIFTEIGPDFSSFPDENHFSSWLTLAPQRDISGGKVIRHVPAAGRNRVANALRMAAQSLSHSDSYLGARYRRLRMRLEGPLACKAMARYLACLVYRMVVKGQAYIDRGAAHYESKRLEKERLALQRRASSLGLKLIPAT

SEQ ID NO: 142873 - protein, 340 aa, unidentified
MRLYLGIDLHSSNSYLGIIDETGKRVFKRKLPNDPEMILAALSPYKNDIVGIVVESTYNWYWLVDLLMAEGYTLHLANPTAIQKYSGLKYADDQHDAFWLAEMLRLGILPEGYIYPKEDRPIRDLLRKRSHLVKLRTSLVISLQNIITRNNGIRIKGELLKALTTDHAAPFLEANEDLALAGKVSKASIDFLTRQIKAIEANIEGKVALREPYAQLVTIHGVGKILGLTIMLETGPISRFDKAGNYVSYCRKVSSKWISNDKGKGKGNRKNGNKYLAWAFSEAAELARRYYPEARAFYNRKLKHTNVAIAHGALAHKLARAAYYIMRDQVPFMPDKLFAS

SEQ ID NO: 142874 - protein, 390 aa, unidentified
MDVLYQSCAGIDVHQANIVVCILHGPLTSTRPKREMATFDTTTKGLRACHDFLSQFHVEAVGMESTGVYWRPVWHALCDDFKLILAQPAHMKAIPGHKTDKKDAHWIAKLTRIGLLPRSFVPDETIQELRELTRQRKHYVESRNRETNRIHKILQSGGIKLTTYIEDIMGLSGRNLLQLLVDGTPITPRIVHKSVYTSLKKKVPQLLEALDGYFSDHHRFMLKQSLEIYDFYQKQIELLEERMNVYLSQYENHVEILDSIPGIDVITASVIISEVGVDMSQFPTAGHLASWAGLCPGNNESAGKKRSTKIRHGNSYLKKCLCQAAFAVKKQKGSPLADRFYQIQSRRGSQKATIALAHQLLKIAYILLKEQITYPEFLAQKKTTRDELVA

SEQ ID NO: 142875 - protein, 428 aa, unidentified
MLKQNTEPDPAPDFAAFLAIDWADEEHAFHLQVVGQSKIETGTLEQKPHVLGPWVAKLRERFGGRPIAVGLEQSRGALIHGLMSYDFLVLYPIHPTTVAKYREAFKSSGAKSDPLDAGQILEILTQHQDRLHRLNPDTVETRLLGRLVEDRRKAVDLRTTHVQALGANLKEYYPQALELTNDNLSSRLAGDLLIKWPTFEDFQQAKPSTLKRFYYGHNVRSPEVIERVLTLAQKSQALTTDPAIVESGRRLTQMYARLIQALHPAIADYDQRIQQVFNAHPEAKLFRDLPGAGPALAPRLLAFFGTDRSRYAAAFNVQSFTGIAPVTKSSGKSKVVYARAACPKFDRQTFHEFSRLSVIRCQWARNYVQYYTDKGKKYHTIVRALAYKWIRILFKCWQERTPYNEDKYMETLKLRGSIFATWHLQKKT

SEQ ID NO: 142876 - protein, 379 aa, unidentified
MKARKQEETHLTIGLDLSDKTSHFCVIGKNGEVIEQGTVRTNPSRFEKHFEKYASSLIAMEVSTHSRWASQLLQSLGHEVVVANASKVQLITKNSRKNDRVDARTLARLVRADRQLLHPIQHRSNEAQEVLALLRARETLIAARTKMINCVRGLVKPTGERLPRCTARVFAKRMEASIPKALQSAVMRLLEQIQTITATIQEYDQSITALAGEKYPESRLLRQVPGVGPLTALAFMMTIGDKNRFERSRHVGTYLGLTPRQHQSGESDPGLGVSKEGDNYMRKLLVQCAHSVLNRAPDSDLKRWGLALMARGGKHGRKRAVIAMARKLAVLLHRLWVTGEVYERFRQEPTPPSLEAPAKKAAAKEKRISAVSTLQVAMA

SEQ ID NO: 142877 - protein, 388 aa, unidentified
METPAAGTLQTGGEQMAVGVDPSRDALQLAILAPHGTVSKRFPLTPAFLRSIDALLGQGQGVRIGVEGAATCGAIVLLHWLRQGYDIREVNPQISKRLRECFTEAHTDASDAQGLAWSVRFHPNLPQVRLTVTTAAWKRLSRLRTRLVKAQTGLYNRLHSLLAESYGAVYKRLFPKLKSKRALEFFQVFPTLDDALNDLPQVRSLLGEEKAALLEEAGRWGEDVYLETLRLEIRLTIQLLFAHRAAIKGVEAKMAELSRADPQVERLKAVPGMGTTLALTILGHSGDFSRFESHDAYAAYCGLAPTVWQSGQSRVYAKRRRRYSRPLRQAFLQLALTQLRRNPESRAYYERKRGEGKPHWVALTALAQKLCKKVYKLMSEEAPVMSAY

SEQ ID NO: 142878 - protein, 430 aa, unidentified
MKSNTQNAKIEAITEKTLVLGIDVGSETHYARAFDYRGIEYSKKPFKFSNTEAGFATFKEWILDLKERHEKDKVVPGMEPTGHYWFNLGKFLQDNEMKPVLVNPHHVKKSKELDDNNPTKNDRKDPKVIAGLVREGRYMIPYLPDGVYADLRTASNIRFQLQAELTRIQNRISRWFNIYFPEYKTVYGKPDAKSGMLILKAAPLPEDILTLGIDGVNQIWRDAKLRAVGKARAKTLIEAAGHSVGSKEGAVSARMEIRMLLEDYESRNMRLQEVMVLIEELVKEIPMAEKLLEIKGVGIRTVSGFLAEVGDISRFNNPKELQKLAGLALVENSSGKHKGETTISRRGRKRLRYLLFEVAMSLVSKNQEFRELHNYYTTRRLNPLKKMQSLMAIAAKLIRVFYAMLTKGVDYDPKKMVSDIKRPAVYLQAA

SEQ ID NO: 142879 - protein, 419 aa, unidentified
MSFKILKNNCCGLDVHKTWIYACIGITDSNGRTEYKQARFSSFTKGLQELCDWLVKYNCNDVCMESTGKYWIPVFNILEKNNLWVTLSHPKYTKPQKGNKTDRKDAKWICDLYMCGMVKPSFIPPADIRQLRDLVRYRFKLTCMITGEKNRAQNCLTVSNFKLDDVFSDVFGKSSRSITEQILQHPGETFDVAPFVDGRGKTPIEEIQAAVDGAISHEQAVKLRQCLNHIDELEMHKAEIEREIFRLSDKYESILNLIRTVPGFDKNPLTAIQVLSEIGGDMSVFPTAKNLVSWAGCCPRNDQSNHKIKSTRISRAGSYFKPVLVQVANALIKSKKHPEFTTRYRRIKARRGHKKAIIAICRMILTAIWHILTDLKPYTPEGFLESRPVNASKVLTTSQALNLLKQRGYFIKDDPLSVS

SEQ ID NO: 142880 - protein, 359 aa, unidentified
MKDDSTLYVGLDVHKDSITVAYALGSGEVEVFGKIGATKADIDRLCKRLQSKASRICVVYEAGPCGYGLYRQLIQKGFDCMVCAPSLIPKKPGERVKTDRRDAVKLVRLLRAGDLSAVYVPSVEDEAFRDLARAWVSAKDDLKRARQRLKAFLLSHGVRYTGRADWGPAHRRWLSAYAFDSAWQQLAFEELRRTIEDRLAQCERLEVALREAVLNWHFYPAVLGLQTMRGVQFTTAVGMLAELGDLSRFAHPRQLMAWLGVTPSEHSSGDKRRLGSITKTGNSYARKLLVEAAWSYRHPARVSPEIQRRHEGIPKPIVDRPWEPCIARTPLNAASAACPRNNACTFAQNRKDTVHCARF

SEQ ID NO: 142881 - protein, 436 aa, unidentified
MDANYANRLQWFRQFKEHVNASTSILIVGIDIGKDTHHAFLGTAAGRTIHRRLIFENSIYGFDRLLFLIKRQMSDKQLTEVVIGVEPTSVYHKPLSEYLITMGYDVVYVTNTAIKKNRAILDGRWDKNDTKDAANVADLVSRGRCHFYDLPDINLRDIRNLLSLRKRLKKQEHRVMTRIRNNLVAQYFPELDGAWYSCQQENLAIVRFCLSPQKVAELSFDDFCRMVTRRRRGIRQYQRLRHIHEVAEQSIGCQLGSSVIFEAQLLVENLERSREQIRQVEDQLSLICESYKEYELLQTIPGFGPYVSAVVLGAIGYARRFENAKQLLRLAGLDLNANRSGKSSHSAVPVISKVGKADLRYALYQAAHVATSRTAEFKAYFKRLLKGREKERGIKTKMRVKVCAKMLVMAWTLMKTSQAYKAGLLITDEPVQHRGR

SEQ ID NO: 142882 - protein, 325 aa, unidentified
MEAAIIGLDISKHVFHIHAVDDQGQVTGRQRLRRGEIVSFFSSLAPCLVGIEACATAHHWAREIRQFGHDVRLIPPAYVKPYLRRGAKNDAADAAAICEAVSRPNMRFVPIKSAENQGFLMLHRARGLLVRQRTMTACAIRAHFAEFGIIVGQGRQRVDGLVDLLDDEELMLPAHARIALAVLVSQLKELDRQVEAIERELAEIQQVNPMAKLLSSIPGIGPITATALAATVPDATMFRSGREFAAWLGLTPKQNSTGGKDRLGRITKQGDSYLRHLLVIGARNVVRYPKARARVGGGWIEALLGVGRWSSPSPLPTSWPGSSGR

SEQ ID NO: 142883 - protein, 419 aa, unidentified
MSFKILKNNCCGLDVHKTWIFACIGITDSHRRTEYKQARFSSFTKGLQELCDWLAKYNCTDVCMESTGKYWIPVFNVLEKNNIWVTLSHPKYTKPQKGNKTDRKDAKWICDLYMCGMVKPSFIPPADIRQLRDLVRYRFKLTCMITSEKNRAHNCLTISNFKLDEVFSDIFGKSSRSITEQILQHPGETFDVAQFVDGRCKTPIEEIQAAVDGAISTEQAVKLRQCLNHIDELEKHQAEIEREIFRLSDKYEEVLNLIRTVPGFDKNPMTAIQVLSEIGGDMSVFPTAKNLVLWAGCCPRNDQSNQKIKSTRISRAGSYFKPVLVQVANALIKSKKHPEFTTRYRRIKARRGHKKAIIAICRMILTAIWHILTDLKPYTTEGFLESRPVNDSKILTTSQALNLLKQRGYVIKDDIVSVP

SEQ ID NO: 142884 - protein, 349 aa, unidentified
MTTLADRSGRVTVGVDTHADTNVVAVLDAQGRRLGIESFPTTSEGHRRLEAWVLEFGLIDAVGIEGTGSWGVGIFRHLAGQGHRVVEVDRPNRQTRYRHGKSDPIDAEAAARAVLAGTATGTPKARTGLVEAIRVLRVARRSAVKQRRQAIQQLRDLVSTAPDALRERLGDLTAAQLVTTCAGFRPGDLTDVIEATKFALRSIARRHQHLSAEISELDDQLEPLVRAAAPPSLLARRGVGIDVAGQLLVTAGDNPERLRSAAAFAHLCGAAPIPVASGRSSTYRLNRGGDRQANSALYRIAICRLRWDPDTRAYVERRMKEGKTKKGALRCLKHYIAREIYNDLRQLTP

SEQ ID NO: 142885 - protein, 376 aa, unidentified
MEHDSTLYVGLDVHKDSITVAYAWGTGEVELLGKVSTTQVDIDRLCKRLQSKAQCINIVYEAGPCGYGLYRQLAQKGFDCMVCAPSLIPRKPGERIKTDRRDAVKLVRSLRAGDLSAVYVPSVEDEAFRDLARAWVSAKDDLKRARQRLKAFLLSHGVRYTGRADWGPAHRRWVSAFAFGHAWQQLAFEEFRRAIEDRLVQCDRLEAALREAAVNWRFYPAVLGLQTMRGVQFTTAVGMLAELGDLSRFAHPRQLMAWLGVTPSEHSSGAKRRQGSITKNGNSYARKLLVEAAWSYRYPAHVSPEIQLRHEGIPKPIVDRAWDAQVRLCRRYRKLVARGKEKNIAVVAVARELSGFIWDISRLAMSLAVPRAALPA

SEQ ID NO: 142886 - protein, 377 aa, unidentified
MTATTRPVESTASATLWLAFELGSTKWTLGFTPGAAQRARLRTIGAGDLAALEKEIAAAKARFGLAAATPVRSVYEAGRDGFWLYRWLGRQGIETIVVDSSSIEVSRRARRAKSDRLDVRKLLEQLLRWAGGATRTWRVVHVPTADEEDARQLVREIETVGVDRTRVRNRIHGLLATQGVRLELTAHFEARLATAQTGDGRPFPPGLRERIRHEWAYLQQIEARADRLARQRAEQIAHGTSRVAEVARQLQRLRAIGATSAALYSAELFGTRTFQNGRQVSALTGLAPVPYRSDQGVADLGISKTSRGALRRVAIQGAWCWLRWQRESALTKWFDRRFAAAGKRARRIGIVAVARKLLVALWRFAAHGVIPDGAIVH

SEQ ID NO: 142887 - protein, 390 aa, unidentified
MYLIGIDISKFKHDCFIATETGQVVKSSFSFDNNQEGFNQLLTVLLSLDHSQQIRIGLEATGHYGTNLKLFLHEHNFSFMEFNPILSDRFRQVSSLRKTKNDKIDAKLISQMLLSFDYKPNSLLSYHISKLKSLTRFRKKLVKDCTIYKERLINILDLVFPEYSNYFTQVWGKVSLYILKNYPTIQDIANINVESVLPIIKALSRGHYSMPKLIKLIEAAKVSIGCKNDSHTLELKLTINLIEQMNYAIENVENEITIIMNKYNFKTATIPGIGIISAASIVSEFNDFSNFNSSNQLLSFAGLEPSIYESGTQTTYGHLVKRGSSYLRETLMNVAPFVMNYNNVFYQYYLKKRNEGKHHRVALTHIVKKLLRVIYYLETNAVPFDSSKLK

SEQ ID NO: 142888 - protein, 428 aa, unidentified
MTPPQNSNHNPPPASQAGPTPEAWIGLDWGNQQHAFALEDRSGRRERGMLEHSSENLHQWLGQIGQYYGGRPVVLAIEASRGAVIHALLNYAWLTVYPINPITSARYRQAFTPSGAKDDLPDAQVLLELVRDHAGKLRPLQTQEPVTVKLAGLVEARRGIVDRRTTVLNEVTSLLKSYYPQALVLVGELNSELAVAFLTRWPDIISLKAAKPATLKSFYYQHHVRSTELVDERLAFIAKAVALTTEEARVSVAIFQLRELLDQVRVFHKHVPLFNAEIKSVFASHPNAHLFRDLPGAGPQLAPRLCVLFGTIESLYPDPTCLQKYVGVAPVREKSGNQVWTHWRWQAPKFLRQTLVEWAGQTVRYSAWAKVYYDRMIKKGKKHAAILRALAFKWIRILWKCWHDNTPYDEARYLAQLTHRKSPNAVAK

SEQ ID NO: 142889 - protein, 375 aa, unidentified
MSDHSEAFVAFDTSKLRNAVAIADGGRAGEVRFLGEIENAGVATAKLVRKLAAKYQRLTFCYEAGPTGYGLYRQIKSLGHECIVVAPSLIPKKPGDRVKTNRRDAVSLAKLLRADELTAVWVPDRSHEAMRDLTRARETAVIDLRAKRQQVSAFLLRQGLHYSDDKRTWTKTHMSWLASQKLEHPEQRIVFEEMMLAVRQAQERIERLEQAIGTAVPDWSLADVVTALMAMRGLALISAATFLAEIGDLSRFQTPRELMAYLGLVPSEDSTGDTIKRGPITKAGNRRARRMLVECSWSYQHPPRVSQEKQEKVAAAPRAVREIAWKAQCRLHGRYRALIRRGKLKTVAVTAVARELAGFIWAVSREITTARAAAK

SEQ ID NO: 142890 - protein, 396 aa, unidentified
MISVGIDVSKGKSTVCIMKPCGEILESPFDIGHTADELDSLISLIKSFDEETRVVMEDTGHYHLPVATYLSSHNIFVCCVNALRMKKFCSQSLRRAKTDKIDSIKIASFGITYWNELVKAYPSNVIYDELKFLARQYYQVTGMLVKSKVNFSNLLDQVMPKINDVLSNQGENHKLTEFVSRYIHFQNILDMGEMKFTSDYCKWAKKKGYRLNERKAAEILALAQNGIPTLPNSQSVKIAVSEAVKLIHSIEESRNTILAQMQDLCNTLPEYSVVKEMDCIGDTLAPRIIAEIGDVRRFKNKHSLIAYAGIDAPPYQSGAFHASERHISKRGNSYLRKTGYEIMQSLIKHKPADNAVYDFIQKKRSEGKCGKEAMIVGLNKFLRVYYGKVMEFYSEH

SEQ ID NO: 142891 - protein, 301 aa, unidentified
MKQATQIGVDVDSEELVCATKHAGQLSPATFANTAAGHKKFIRWATKGGHPARVCLEATGIYSLEFALALHHAKNVEVMVVNPRAIKDFIRACMQRAKTDAVDAGGILEYLERMPFVAWQPPATEVLELQAINRRIVQLNTELTREKNRRHATEFAGTSGDAIAHDIEVNIRHLERRIERMHDSGVKLVRGVPMLATKLAHLVSTKGIGEASAMRLLAELLVLPDDLAAPQWVAHAGLDPRPYESGTSVTAHQQSRQPLSARRSLHARPGGHSTRAQCQSVLQQTCHGREETDASRGRGNA

SEQ ID NO: 142892 - protein, 351 aa, unidentified
MMKVLLKQTVGIDVAQNELVVSLGRMDEQINIEVYAYKVFPNTKKGFSSLVSWVNKQTSTGTVVRYAMEATGVYHESLAYYLCSIKKQVSIVLPNKISNYAKTLDIKTITDKSASQAIARFGLERQLEVWQPPLKIFNDLRQLCREREQLVHERTMLKNQLHAESASATSSESSVKRTKKRIALIDLQEKQIKEEINLLIKEDQTLIEKMKIVSSIPGIGNLTAVTIIAETNGFELIKNKRQLVSYAGLDVREKTSGTSVKSKPRISKRGNRNLRKVMHFPALAAIRTDERFRDVFLRLVSNHGVKMKAIVAIQRKLLELTFILWKTDSYYNSDYEDHILRPRLLNKKALN

SEQ ID NO: 142893 - protein, 339 aa, unidentified
MLLTPVGIDIAKSVFQVHHVDADTGQIINKAIKRASFLHYFANRAPCLIGMEACGGAQHWARELTKQGHQVRLLSSRFVKAFNIGNKSDAADARAIWLAVQQPGKCVSVKTEAQQAVLAMHRMREQLVKMRTMQINALRGLMTEYGEVMGRSRAVLEREMPGTLHRLSERLPAMLIDTLRDRWNEVARMDEQIARIEQRLRVWLKQDRSCSAIAEIPGVGLLTATAAVATMADPKSFRSGREFAAFLGLVPRQHGSGGKVSLFGISKRGDTYLRTLLTHGARCVLANAKDPGLWVEQLKKRRPTNVVVIALANKLARIIWAVLAHGRTYEKGYASVRPV

SEQ ID NO: 142894 - protein, 400 aa, unidentified
MDRIEHGWVGIDAGKGHHHVVLIDRDGRQLLSRRVDNDELALTGLIETVRDRVMEPTWAIDLADGAAALVIGLLLHRDQPVFYLPGIAVNRASAGYRGEGKTDAKDAAIIADQARMRRDLRRLQVLNEDIAELRLMTAYRADLAADRTRCINRLRSLLLGVFPALERVLDFTCHGPLVLISGFQTPTAIRRLGATRLLRWLERRGVRRPGRLATAAAEAAGQQTIQLPGEAAAASLVARLAQTILELDRQLADVDRKVAASFHTQQDAAIITSLTGIGDVLGAQFLAAVGGSLSGFASADHLAGYAGLAPTPRDSGYRTGNLHRPQRYNRQLQRVFYTSAMISIQRSPASRAFYDGKRAQGKRHTQAVLALARRRVNVLWAMLRDHQPYQERRQPLILAA

SEQ ID NO: 142895 - protein, 388 aa, unidentified
MEAQIVDTMPPVAADHDPVRCLLAIELSKKSWIVAITTALSDKISRYTLDGCDWKGLLELMERIRTRVAREVGRPVEMISCYEAGYDGFWLHRLLEHHGVRSHVIDPASVQVDRRARRAKTDHIDAKRLLRSLMAYLRGEPKVWSVLRVPSVAEEDDRRLHRERDRLIAERGQHVNRIKGLCAIHGIYDYEPMRRDRMLRLEQLHTGDGRELPPRLKAEIARELQRLELILGMLKEIEAERDAIALTEKVSAHTNAKKIQNLVKLKAIGAEIATVLTGEVFYRPFNNRLQVASYVGLTPSPFQSGSKCRDQGISKAGNPKARSTMIELAWLWLRHQPDSPLSIWFRERVGTRKGRIRRITIVAVARKLLIALWRYLETGVVPTGAVLK

SEQ ID NO: 142896 - protein, 364 aa, unidentified
MGIWIGVDIAKHVHWATAIDDVGQVLVDQRVANDPIGIQGLIDGLAGLGGEPVIGLDVVGGIAALAQAMLQAAGFRLVHVSGLAVNRARQGTTGGEHKSDPRDARVIAELVRSRRDLRPIEPVSELELELRLLVGRRGDLQVEQTRRLARLHDLLVGIHPGLERVLDLTTKGGLWLAARDVTPAEIRAVGREGLMAHLQAAGGLSGRQIQTLADRALVAAAAQQLAVPGERLAARLVRELAVEALACRQRLIELDAELDRLLERHPDAALIRSLPGMGAVLTAELIAEAGTLARYRSADALAAAAGLAPVLRQSGKVRFQRRPSAATRPSSGSSTSRRSARCPRPTAAPSTPANAARANATTRL

SEQ ID NO: 142897 - protein, 317 aa, unidentified
METSSTFVGIDVSKAQLDVSVRPLGVKNSFTNDQAGIASLIEWLRPIKPTLIVLEATGKLERELARSLANEEFPFYIANPRQVRDFARASGQLAKTDSIDASLLAHFAEVIRPKIRDLPDQASWELKDLIARRRQIIAMIVIENNRLDRASKAIAPGIVKVVRFLNKQLETLDHDLDRMIERNSVWQAHQQILQSTPGIGPVTSRTLIAEMPELGTLDRKQIAALAGVAPFTCDSGTLKGKRFIWGGRAAVRSALYMAALVASRRNVVIKTFYTKLRNAGKPPKVALVACMRKLLTILNSMIKHKTLWSDNFSTQTA

SEQ ID NO: 142898 - protein, 373 aa, unidentified
MKPYHKYVGLDVHKERNEVAIAESSGEVRLYGSISNDLHALEKLVVKLRGEHVVLHFVYEAGPCGFVIQRRLQQLGEDCLVVAPSLIPRKSGDRVKTDRRDATMLARLHRAGELTGIHVPDPRDEAIRDLVRARTDAVTDRRDNRHRLKAFLLRHGYKYSGKSSWTPAHLRYLRELVLADPAHKVVLEEYLLAITQATERIERLETHLATLAATWRMKPVVDALQGLRGVQLLTAVALAAELGDLSRFRHPRQLMAFLGLVPSEYSSGGTRRQGSITKAGNAHARWFLVEAAQHYRLPPKVSKELAPRQENLPARLREISWKAQVRLHKKYWSMTMRGKRVQTIQVAVARELVGFVWATARQVLPTLPEPVKN

SEQ ID NO: 142899 - protein, 352 aa, unidentified
MPMLEGRVDAVIGVDTHRDSHAAALLNPDGGVRATLEVSSDRAGHARLLQLATAQAPGRRVWALEGTGCYGAGLTGFLVDQGEWVVEIDRPKRPRGRNGAKSDALDAIRAGREALAREHLASPRQRGHREAIRVLHTTRSAIVEAGANARRQLKALIITAPEPLRDTLRGRTWLQQARASAALVAAPSDPVDHRATIRVLRMTAQRVLTARAEAKELEVQLRMLITAVAPVLLAQRGVGPISAAQVLISWSHPGRFRSEAAFAMLAGAAPVEASSGQVVRHRLNRGGDRQLNRALHTIVMIRQTHHQPTKTYTTRRITQGKSQRDIRRCLKRTVARQLYRLLERTAAKQATS

SEQ ID NO: 142900 - protein, 341 aa, unidentified
MKNLFIGIDFSKEKVDVAIISAEGLVETSERVFNEFKNSVSGYKQLVKWVEKNANGIDSSLWLFCGENTGDYSKPLCNHLYGRGFDMWLENSKCIKDASGIRRLKSDRADAAMIAEYAMRNHDRAVGYEPLSESLVQLREYYLYRQMLVRHRCSFEVRRGEKRLMMEKSAAKTVIAQSGKHIVTELNKEIAKIDKKIASLIESSDELSEVYRIVTSVPGIGTQNAVCLMVYTDNFRRFNYDARSIACYYGIAPFGKDSGTSVHVDPHVHYMANRHIKAMLTQAALAAVRFNPIIAQYYQRLIARGKKMPVAMNNVKNKLLHVVTSMVKNKQVYNPEYRFSA

SEQ ID NO: 142901 - protein, 343 aa, unidentified
MTRFVGLDVSQKLTAICVVDDSGRRLWRGQCASDPEQIERTIRRHGGEDARIGIETGPMTPWLVHELRGRGLAVTCLDARHARAVLKMQINKTDQNDAEGLAQIMRTGWYRSVHVKSFDSHRARALLGARAQLVGMTTRLSNHIRGVLKTFGMLPGAGRNLAFDRRVETLLTDRAEVAPIVQPMLAAWRQLRQQTATFDKAVRVLVKSSPTCRHLMGVPGIGVLSVLAYVSMVEDPARFGRSRSVGAHLGLTPKQYQSGEIDRSGRISKCGDALARTLMYEAAVVLMTRVKRAHGLKDWAQAIARRSGAGKARIALARKLAVILHSMWRSGEPFRWSEQPAAV

SEQ ID NO: 142902 - protein, 413 aa, unidentified
MEVMFERVAGLDVGKASVTVCVRTPSARPGRRRGETRTFPTMTRSLAVMRDWLVAEGVTVAAIESTSTYWKPPFYCLEEVMEVWLLNAAHMKAVPGRKTDVRDAEWIAQLLEHGLLRPSFVPPPQIRRLRLLTRYRDQLMADRTRELTRLELMLEDASIKLSAVVSSLKTVSARAMLTAMIEGENDPRVLAQMAKGKLRGKIPQLTEALIGNFDANHARLARSILHRLDLVEIALAELDTVIEAACAPWAHEIELLQTIPGVGVKVAQVFIAETGGDMSRFPSAAHLAAWAGLAPAIYESAGKRSPAGARHGNKWLNHMLVESAGAVGRMHGKNYLAVQHARLTKRRGMGRAQVAVAHSILVAAYWMLKRDEPYRDLGPDWHVRRDAEAHTRRLVAQLERLGHTVALDNTPAA

SEQ ID NO: 142903 - protein, 474 aa, unidentified
MRISREKTKQTDNEDGVAGLPVVRSRVAGIDLGSTSHWVCAPNKDGANREVEQFGATTPELERLVLWLKERSVESVAMESTGVYWIPPHEVLERHGMEVVLVSTRELARVPGRKKTDRVDCKWIQRLHSCGLLAGSFRPNEQVCMLRTLVRDRGNLVAEAADWLRRMQKSLDQMNVRLHRAVSQIYGVTGLATMRAIGNGERDPRKLAQLRNRRCHKSEEEIAEQLSGHWREDHLFSLKQALKMYDAIQERIADYEKEILRKLTEMEKEERRGQQAPKLSNSQKSRTIKTRGQEPMRQALYRMSGVDLTTIDAVGVETVQAVLSEYGPDLSRFPTEKQFVQHATLAPHRPTSGGKPTKKKKRGSASTRVAGALRMAAVTLRHTETALGAYYRQIARRLGPDVAVFASARKLAILIYRLLRWGQPYIDEGAAAYEKRYQEARLRRLASAAKNLGFQLTPQPANIDSLQVSAQAQQ

SEQ ID NO: 142904 - protein, 340 aa, unidentified
MSEITTIGLDLAKHVFQVHGIDAQGTTVLRKRLRRGQLLAFFSRIPRCVVGLEACATAHYWARELGALGHEVRLMPAQYVKAYIKRNKHDAADAEAICEAVQRPTMRFVPVKTAEQQATALLHRGRERLVRQRTMLVNALRAHLAEFGIVAAQGLRHVGDLIAIVRDDCDTRLPDVARQVLQVLANQIEQIETAVAALERQLLAWHKTNPVSQRLASIPGIGPIIATAIATTVADPKVFRSGREFAAWLGLVPRQNSTGGKIRLGGITKRGNRYLRRLLINGASANLLRSKATKADPWVIGLRRRRPPLVVAVALANKTARIAWAVMLREKEYQPRAVAA

SEQ ID NO: 142905 - protein, 353 aa, unidentified
MKKIVKQVVGVDVAQSELVVCLGRMTDDWSAELYANKTFANTKGGMQALAVWVKKQTDPEVAVRFVMEATGVYHEGLAYFLEEKGCQVSIVLPNKISNYMRTLEVKTITDKTSSQAIALFGLERKLDNWKRPKEIFRKLRQLTRERDQIIVERTMVKNQLHAEQTEAYPNKTSLKRIKARITILTKQEKEIKNELAVLIAQDAEVKKMKATISSAPGIGLLTAATVLAETNGFDLIRNKRQLASYAGYDVTEKQSGTSVKGKPRISKKGNKYLRKAMHLPALAAIRHNERFKAIYARLISKHGIKMKAAVAVQRKLLEMTYTLYKTNKPFDKNYLQQKEMNGTKNLERSLQPL

SEQ ID NO: 142906 - protein, 352 aa, unidentified
MKTETTAFNPKLYIGIDVHKKSWTFHYQTDLFDGKTITQPANPNTLVEWVEKHYPSHEVTCAYEAGFSGYSAARLFQKQNWNVLVLNAADIPRPQKQSVVKTDKIDCRNICKQLKNEALKSITIPEEQRESFRSLFRERNNFVMGLRHIKLNIKSYLMYCGITIPEEFDNASWSKNFIEWIKNQRNEYETGSLKISYLLKRYEFMYQESLSVSNQIRLYARKHYKKDYYLLMSVPGIGGITASAILAELGDLRKYNRFDDLASSVGFVPGIYSSGDKTIVKGITPRAKNLLRSYLIEASWQAVRFDPVLQEYYRSHYGKQPNKIIVKVARKLLSRIHAVIKTETPYQIGVVK

SEQ ID NO: 142907 - protein, 377 aa, unidentified
MHSENIAAYVGLDVHKETLAVAIAAPERLGEVRYYGTINNEAQAVRRLFQKLQGLYGNILSCYEAGPCGFGLYHQLTAMNIKCQVIAPSRIPKSPTDRIKNDHRDAISLARLLRAGELTPVWIPDLTHEAMRDLIRARAAAKRDSRVARQRILSMLLRTDKHYAGKHWTGKHRTWLANQSFSQPSQEIAFQHYCQSLEQIEDRILQLDQEISRLLPEWSLCNLVCQLQALKGVGQLIAITLVAELGDFSRFSNPKQLMAFLGLVPGEYSSGNSIRPRGITKVGNSELRRLLYEAAWSYRTPAKVGAWLIYYRPDSVTQYSKDIAWKAQQRLCSRYRSLTAKGKKSQVAITAVARELTGFMWDIALAAQSSFSQQKQN

SEQ ID NO: 142908 - protein, 471 aa, unidentified
MIRSVGIDLHQGRHRARCLDERAQPCDSFSFPTTPEGLAALEERVFRDGANPIIVLEPAGLPWLIVAVYLRSRHPDCHLVKAKTQKVAALRRYLRGPVKSDRLDALTLAKMPFIDPEKLDDIYLPPAKIHALQRLTRQRKRIESDVSGRKIRISAIIDGYLPGVRQAFDNAWSSPFRAFLRSRLSPFAVIRDGEDALHAYLSKASNRSKWSRAQTGEVFLACQSMATVCELSKSAGTVDEEFFTDLQDEITRELRMLEADEVESEALAQRIAGLYRKLHPSDNLCTIPGVGEHTAPIFLATVGDPARFPNQSAFANWEGVVPGARQSSDAQAKGLRMTKAGPSIMRMALYQAGDIGRRWDPQLAAVYHREMVYHGKNHRQAMGAVMSHLGARVLRVLKEDSPYEMRDIEGNPINKNEARRLVLSKYHVSEDIRRERRRRNRKVGKDRETATYRTNEADKAPQPVQVQAVSQ

SEQ ID NO: 142909 - protein, 339 aa, unidentified
MGLYTAFDLHSNNAYLGIIDETGKRLFKKKLPNKMEMIKTTLLPFKAAIEGIVVESTYNWYWLVDMLMEEGYEVHLANPAKIQQYSGLKYSDDKHDAFWLADMLRLGILPKGYIYPKESRPIRDLLRKRSHLVKLRTSLIISLQNIIARNVGSKLKASDIKVLTIDRVKPLLEYNEDLALAGKVSKGAIDSLSQQIKTIEKNIWGRIHLRSPYDHLLSIPGVGPIIGSTIMLETGSISRFPKVGNYCSYCRKVPTGRFSNDKRKGSGNPKNGNHYLACAYSEAAEHAKRYDEESRKFFNRKLKSTNAPIAHNALAHKFSRAAYYIMRDGVDFMPEKAFT

SEQ ID NO: 142910 - protein, 415 aa, unidentified
MIYCGIDWAERTHDVALVDDSGQLLAKRRITDDAAGYQLLLDLLAEHGDTAEEPIPVAIETGRGLLVAILRTGDRKVFAINPMAAARYRDRHGVSRKKSDPGDALVLANILRTDMPMHRPLPADTDLARAIAVLARAQQDATWNRQQISNRLRSLLREYYPAALDAFGPWQNGLCRSEARELLKLAPTPARAARLTRSQIAAALRRAGRSRKLDTETDRLREVFRAEYAHQPQLVEDALGKQMLALLHQLDATCQAAEELAQAVEELFPQHPDAEILLSFPGLGTQLAARVLAEVGDDHTRFADARGLKAYAGAAPVTRASGKKSHIGRRIVKNDRLNHTGYLWAFSALTASPGAGAHYRARREHGDWHAAAQRHLFNRLLGQLHHCLQHHERFDENTAFPAAGASQADAEAAAA

SEQ ID NO: 142911 - protein, 331 aa, unidentified
MKIKQTIGIDISKLTFDVRIYNNQMYASFNNENKGFTEMLKWVTKNNPFKTSETLYIFEHTGLYSHLLSVFLTKHSIPFTIVSGLEVKRSLGIVRGKDDKIDATKLARYAYRLRDEIRTYKLPTQQIQVLKRLLSLRERLVKQRAGYKVSYKEQKRTFTKKENQVIFDVEQQMVSLLSKKIIKVEQAIDTVITSNQNLKTQYELITSVKSVGSQTALFIMVYTHAFTKFTTWRKFAAYGGIAPFPNRSGTSIKGKNKVSHLANKKIKCLLDQCAKSAIQHNQEMKLYYNKKVEQGKNKMSVINSVRNKIIARVFAVVERGTPYVDFLKYAA

SEQ ID NO: 142912 - protein, 344 aa, unidentified
MSQLTRIGVDTSKAVFTLHGVDAADRPVLRINLRRAQMIPFFRKLPPAVVAMEACGSAYYWARELAALGHTVRLVPPQYVKPYVKRGKNDRNDAAAICEAAGRPGMHFVPAKTVEQQAAGMVLKARDTLVGQRTALINTVRGHAAEFGIVAAKGAAKVLELFSAIEHRSDIPPVAKEMFVLLRQQINDINARIAELDVKLNASHKANPVSQRLATIPGVGPITALTLAIEIDPAQFESGRHLAAWAGLTPKEHSTGGKQRLGGISRAGNERLRRLLVAGATAVIQAASKPDSQQMTEWLRALLARKPRKLAATALANKMARIAWKLMTSGQTYRRDATLGVAKV

SEQ ID NO: 142913 - protein, 399 aa, unidentified
MVEATTHVGLDVHKQSISVALLLPGSVKAVQWEMRNEAGEVRRLVRRLRRDADGGAVLCAYEAGPCGYVLQRQLARAGVACQVVAASLIPRKPGDRIKTDRRDARKLAELLRAGLLTEVRPPSEAEEALRDLCRCREDARADLMRARHRLGKMLLRRDLRYVEGRPWTEQHRSWLWSLKLEHAAERMVLEDYLLAVEQVSTRLAMLDAQLKELAEQEPYRERVGWLRCLRGIDTITAISVLAELHGFERFTKPRQLMAYLGLVPSESSSGASVHRGAITKTGNRHLRRLLTEAAHHCRHRPGVGAALRRRRAGQPAAVIALADRAQQRLHRRYSRLLLGRGLPVQKIVVACARELTGFVWALLYLQPRQLISPGDETRARRPSPSAAARGLRAAAGKPR

SEQ ID NO: 142914 - protein, 344 aa, unidentified
MSKVSTIGLDIAKSVFQVHGVNVAGAVVIRKRVSRAKVLEYFGELPPCLVGIEACPSAHHWGRELQALGHMVRLIPPSYVKAYLKRSKNDANDAAAICEAVTRPSMRFVPIKTKEQQTALMLHRTRQLLVRQRTMLSNALRGHLAELGIVSAKGRNGTAELLRISAGDGDSRSPAAVRDILDVLARQYGAIGIEIASIDKSIMALHRACEASRRLAEIPGIGPIGATALVAEIGDWKTFSSGRSLAAWIGLVPKQHTSGGKDRLGSITKQGNRYLRWLLVAGAMAVIRYARKHGTRKRPWLARLMERRPTKVAAVALANKIARMAWAIMVHGERYKEPKLLPAA

SEQ ID NO: 142915 - protein, 413 aa, unidentified
MQRLVERCAGLDVHKDTVTACVRVPAENGERAEHVATFGTTTADLLALRDWLAGFGVTLVGMESTGVYWKPVYYVLEDEFTCWLINAQHLRNVPGRKTDVADATWICQLLEHGLVRPSFVPPREIRDLRDLTRYRKVLINERGREAQRLEKVLQDAGVKLSSVATNILGVSGRAMISALVEGTHDPAVLADLARGVLRRKLPALRGALEGRFRPHHALIVGEILAHIDYLDEAIERLSEEVGRLIAPFAERIELLDTIPGVNRRTAEVLLAEIGPDMSRFPTHRHLASWAGLCPGNNESAGKRLTGRTRRGSKWLRTALIESGKAAARSKGSYFSAHYARIKGRRGHGKATVAVAHSILVVAYHVLARSTPYEDLGADYLLQRDSTEGYKRRLVRQLERLGHSVTLGPLTDLA

SEQ ID NO: 142916 - protein, 426 aa, unidentified
MAVVMIGVDPHKASHTAVAISAAEQSRGQLRVRASAVQAERLLAWARAWPERTWAVEGAGGLGHLLAQQLLSAGERVLDVPPKLAARVRLLATGNINKNDPNDARSVAVAALRSAQVREARRDDHAAVLKVWSKRYRDLGRMRTQVACRLHQVLCELVPGGVPGEISAGRAARLLESVTPAGAVEAARWELAAELTEDLRGVDARIRQTRTKAAAAVRAAGTCLTGLFGVGPVIAAAVIGDVRHVSRFGNRDRFAAYNGTAPIEVSSGGRKVYRLSRRGNRRLNHAIHMAAVTQIRYRHTKGRAYYDKKLAEGKTPKEALRALKRQISDAIFACLQEDARRAAAAAKSPGGQPGNHSATRAAGSHPEHRLFGQATPGPATHPTTPAAPDPAQLPSRASERLSPGPGAARPRSGARRASSTRPRASR

SEQ ID NO: 142917 - protein, 340 aa, unidentified
MHHAAIDLGSRESQICIRQPDGTIVEERKLSTRKLTEVFKTWPTSRVVMEASAEAFKIADAALAAGHQVRVVPGKLVRLLGVGDRGVKNDQRDARQLSQASWQTDVPSVHIPSAAARELKSICGARDVLVATQRNLSNNVRGWLRTQLWKLPGGTMVTLPERLRTHAQASGRELPEHIERQLTMLTQVTEQVQAANKQARRLATEHPVCRRLMTVPGVGPITSLRFVAAIDDPSRFSTAHRVQSYVGLTPGEHSSSQRERKTGITKAGPSELRRCLVQAAWSVMLARRPHPMLEWARQIAQRRNRPVAVIALARKLAGILFAIWRDGTTYEANHGRSALT

SEQ ID NO: 142918 - protein, 330 aa, unidentified
MKNYSDVIGIDVSKLTIDAHIHNRVVHRVFSNTPKGYKALLSWTETYLKEQVYFFCFENTGHYSTNLSVYLSENILDYVEESPLAINRSSGVVRGKTDKLDSAMIARYAWLYKEELILSSPKAQDIQELGRLLSFRDQLVRDRTGKMSSLKEMQTLLSSPSTDDCCKIIKKTISYLTKQIIALENHIKNLMSSDESLQKNYELLNTLKGVGLVLSCQLLYHTSNFKRFDSWRQFSSYCGVAPFEHSSGTSIHRKNRIHHIGDRKMKTLLTLASVSAIQCDQELKQYYKKKVAEGKPKMVAINNVRNKILSRAFAVVKRGTPYVALQKFVA

SEQ ID NO: 142919 - protein, 421 aa, unidentified
MVSEREQELAACVGVDWGDEKHSVHLQAMDGQSVEWLELEQKPDVLHEWVAQLRQRFQGRKVAIAIEQRKGAVIHALMMYDFLVLYPVNPKALARYREVFQTSGAKDDPGDSKLLLDLLTKHRGQLRAWIPDTIEARKLQLFCEQRRKMVNQRVALTNRMTSLLKQYFPQALDWVGDIHSIQCCDFLANWSDLATLQRVPKSTLKKFYYAHNCRKASLIDQRVAEISTARALTNDSAIVEPLSLSVQIYAAQLRTLVRAIQEFDLRIAQLFAHHTDHDIFDSFPGAGDVCAPRLAAAFGTDRSRWNSSAELQSYSGIAPVTERSGKGLWVHHRLSCPKFIKQTFHEFAEQSIRFSVWARGYYDQMKDRGKDHHAALRALAYKWLRILFRCWKDRKPYDEQAYIQALRQHGTSLVLVVENLV

SEQ ID NO: 142920 - protein, 348 aa, unidentified
MQIAVLGIDLGKNSCSVVGLDPSGYVILRRRMHRDRVIKLAARLPACVMAMEACCGAHHLGRILQAHGHEVRLMSPEYVQPYVKAQKNDERDAEAIAEAATRPTMRFVELKSEMQLDVQSLHRARSRLVGERTALINQLRAVLFERGVTVAQGRRRLERYLALVLDRDEAPTLQLSPRMRLLIDDMRAQWCELDRRIAAFDAEFVAAARSDETARRLSTIPGIGAINATALVAAVGDARSFARARDLAAWLGLVPRQATTGGRPRLLGITKRGNKYLRTLLIHGARAALPSLTATEGSLGNWLRGLSARAHRNTVIVALASKLARIAWAVLRSTATYNATLGDQAAAA

SEQ ID NO: 142921 - protein, 405 aa, unidentified
MAQEQRIVIGGVDTHKDVHVAAVIDDRGKILDSSSFETTTAGYRQLLAWLRSYGDLQSVGVEGTGSYGAGLAHHLAAADVAVVEVNRPNRQMRRRRGKSDPVDAEAAARAVLNGEATIVPKAGESLVESIRVLRVAFTSARNSRTRVALQIRDLIVTAPDQLRSVLGPLSTKERVNRCARFRVCGDLADPVEANRRALRTLARRYLALSEEMDDLKLSLDDLTARANPALRAMKGVGPDVAAILLVAAGDNPERLRNEASFAAMCGVSPIEASSGMTVRHRLNRSGNRQANHALWRITTNRLITDAETRAYAQRRTSEGKSRREIIRCLKRYIAREVFRTLTRPEAIPCGVDLHEARTAAGFNLNQVAAALRVDPTRVSRLERALDFDRELANRYAVWLTAQNAA

SEQ ID NO: 142922 - protein, 383 aa, unidentified
MSRLRFVGLDVHAESITVAVAEASGEVRSLGKIANREESIRKLIKKLGAVEQLRCCYEAGPTGYVLYWQLAKLGVECAVIAPSLVPNKPGDRVKTDRRDAEKLARSHRSGDLTAVWVPDQEHEALRDLVRAREAAKKDQTRARHRLSKFLLRHGRRPGEGVRAWTQKHWRWLQSQVQFAPVAQQVVLMDYGHEVEHCGARLQRLEKAIQQAVQEAPVAMRAVIEGLQSLRGVGEITAATIVSEVGQLSRFASARQLMGYSGAVASEESSGERVRQGGITKTGNSHLRRVVVEAAWAYRHGPAIGSTLRKRQKKLNAEVIEMAWKAQHRLHGRYRKLMGRGKNQQQTIVAVARELLGFIWAIGVQVEARMQAWPSAPALPHTGT

SEQ ID NO: 142923 - protein, 349 aa, unidentified
MHFIGMDIHKNYSSVAVTNEQGDLVDRCRVNHRHREELIGYFNQFPSRTQVVMEATCGWGWLSELLQDLGLEVKLANPSKVKIIAESQIKTDKVDALALAQLLRTNFLPEAYLAPPEQREARDLLRYRIGLVYLRSGVKNKIHALLTRLGIYHTYSDLFGKEGRSFLSSLELSQVHRQALDGYLCLIDTTNELIGKAEVKIRKVVKESEDGKRLLTVPGIGFILAYLVLVEIGDINRFSSHKKLCSYAGLVPSVYQSGKKSYHGHISYKANRYLRWGLIEAAQRAKAIDPFLRKKKERIERKKGTSVATVAIAHQLLVAIYHILKEKTVYRSPKLKHRLSGKPVLTLVA

SEQ ID NO: 142924 - protein, 358 aa, unidentified
MILGVDTHLEFHVAVAVDHLGRRLGELSVPTTVKGYEMLLCWAEGFGPVGCAGVEGTSSYGAGLARHLRAKGIEVLEVERPKRQRRGSRRNLEKSDSSDAEAAARAVLAGEASGVPKSGDGLVEMIRALRAARRSAIKARTQAANQLQGMRVTAPEQLRRRLCGLSTKELVCVAARFRLGDDPRDVPTATKFALRSVARRYQVLSAEIAELEAHLDRLVAQVAPELVSLPGIGTENAATLLIVAGDNPQRLGSEASFANLCGVSPVEASSGKVVRHRLNCGGNREANRALYMICLARMRRDRRTQEYVARRTAEGKSKREIIRCLKRYLAREVYRVLVSRGARSSPTGTKAEVHSSAA

SEQ ID NO: 142925 - protein, 335 aa, unidentified
MHYLYYVGLDVSKETFDASLVAFEDANEMAHRKFANSRKGICSCLHWVEKRHGIRLDDVIFCAEDVGSYISEMAVCASDRTLNFNFSLISPLVIKYSMGIARGKTDRVDARRIAEYAITHYRKIALYLPAEKELCQLRTWLILRAHLAKQRVAKLVLLEKLDYKEKFADVSIQRSMLQEEIAYAETHMKTIEREMKELIAADSNICRNYKLLTSIKGVGPITAIVMLCSTLNFTKITDHRKFACYCGLAPFEHSSGTSVRGGCHTSSMANRDIKVQLNRSALIAIRCDPQLKAYYERKVAEGKHKFSVLNAVRAKIAARCFAVVRRGTPYVALQI

SEQ ID NO: 142926 - protein, 514 aa, unidentified
MVSRRVQCGRITLWRVLVCRTARGRDWFQLSACVLFGDAVGTVFPLGRLVLPWTAGHRWAGKFSEIPMLFVMKPLPVLDPQAAAIDVGSESLHVSVAGDTPKVFGTFTVELEALREWFKGQGVRTVAMEATGVYWLYLYEVLEAAGLEVVVVNGRHVQNVPGRKTDMSDCQWLATLHAHGLLRGGFVPPADIRRLQDYQRLRADHIIGAAGQVQKMQQALERMNVKFHDVISDLTGVSGLKVVRAILRGEREPVRLLALCDGQIQRKKSAAVKESLRGCWKDEQLFALRQALELWETFQQKIADCDRELERLLHQLAGPPPSQGGPGGGEPRLAPVKDAGKNAPAIERCQQLLARICGGRDATQIPGLSVYLVLQLISEVGTDMTRWPTEKHFTSWLGLAGGRKQSGKRKGSIKAHRNRAGRMFCAAARALARSMDKALGGFYRRLRGRIGGLAANVALARKLAQLFYRLLRYGMEYVEKGLKAYEVKVWETEARLLRKLAKNQGFILMPATPK

SEQ ID NO: 142927 - protein, 375 aa, unidentified
MTMMHQRQIRYIGLDVHKASISAAIAEESGAPTSYGRIPNDPAAIRTLMTRLAKPQLELRVAYEAGPTGYTLHRQLTKMGIQCMVVAPSLIPKQPGNKVKTDRRDALKLARLLRSGDLTPVWVPDVAHEALRNLVRARADAKADQLRAKHRLSKFLLRQGCWPPLSVRNWSKRYFTWLHQLEFVHLPDRVVFADYLAEVNAAGERIKRLDGALFECAQTSSQVALIRALQAFRGIGFLSAVTLVAETGDLRRFRTAPQFMAYAGIVPSESSSGNKQQRGSITKTGNSLLRHVLGEAAHHARLAPRLTSKVKRRQADMSPEIVELAWRAQVRLHTRYRHLSGRIGTLKALTAIARELAGFIWAAGQVLQELPAAAA

SEQ ID NO: 142928 - protein, 355 aa, unidentified
MQSNKISFKGQNIYVGIDVHLKTWHVTTLTESGYKYSFAQHSDAKELFDRLNKKFPGAHFKSAYETGFCGFSVHYALTAQGFENIVVNPADIPTTGKEKAMKTDAVDSEKIAWSLKRGELTGIYIKDKCYMDDTNLIRLRQRFIRDLSRQKNRTKHLLYTQGVAYPERFSKKGTHWSRNFMKWLREDVELLSEEKRTLMLLCNQVENIRKDILAITREIRRLSTADKYKENFSLLSSVPGFGLITSMSILTEYDNNLMRFPNERKFVAILGLIPTCHDSGEKKVNGVKTFRGNKQLGPLIVEASWVAIRRDYQLGCYYTNCCQSMNPQKAIIKVARKLACKAYAVMKTKKTYVLS

SEQ ID NO: 142929 - protein, 347 aa, unidentified
MRFYTQQHKHYCGIDLHARAMYVCILDQAGTILVHKNLPTTPEAFLRVIAPYRDDLVVGVECIFTWYWLADLCAKEGIAFVLGHALYMKAIHGGKAKNDKIDAHKIAVLLRGGMLPQAYVYPAEMRATRDLLRRRCHLVRKRAELLAHIHNTNSQYNLPEIGKKLAYKANREGVEEHFPDPSVRKTIEVDVSLIDHYDKLLGEVELYITRSAKAHDVQTFSRLQSVPGIGQILALVILYEIQDIARFPRVQDFVSYCRLVKCAKESGGKRLGTSGKKIGNVHLRWAFAEAAVLFLRHNQPGKEYFTKLEHKHGKAKALTVLAHKLGRAVYYMLTREQAFDLQRFVTA

SEQ ID NO: 142930 - protein, 338 aa, unidentified
MNYLGIDHHRQYSHITWLNEKGEVVKSGRVANRRRELEGFLQGARDVRAVIEAGRSSYTMVDILAEVGIETVVAHPKQVRAIARAKVKTDERDSWKLAHLLRTGYIPEVHKRSRENRSSQRVLRQRAFYVGKQTSVKNRLRALLAQQGEEIRQEVERVENLFTDKGMKILRGLALPEREAKLVGALVRTYDHLEERINETNALVKQLYEQMPSAQLIQTVPGFGVFLAVLVAVEVEDIGRFKEVSQFHAYAGVIPSTYSSGERTWHGKIVKEGNRWLRWAAVEAVWPAMRADFSIRCFYDRLKKRKGANSAKVATARRLLTIIYRMLKENRPYIPYKR

SEQ ID NO: 142931 - protein, 341 aa, unidentified
MNVTTIGIDLAKTVFSIHGINQHGKVVVRKRLNRPKLLAFFAQLPPCLIGMEACSGAHYWARELSKLGHDARIIAPRFVAPYRKSSKNDDNDAEAICEAVSRPNMRFVPIKTEDQQAALCLHRIRRGLTKERTAQINQIRGLLAEFGLIIPQGRYHARHRIPEILEDAENGLPMLARRLLNNINQRILQLDEEILAYDREIEAMARRDERAQRLMAIPGIGPQTATAILASAPDPKQFRSGRHFAAWLGLVPRQYSTGGKPRLGRITKRGDKYLRTLFIHGTRAVIAKLGDKNDRLSGWAKELVERRGYKRAAVALAAKNARIIWALLMNQTEFKTQPGAG

SEQ ID NO: 142932 - protein, 422 aa, unidentified
MARTVDIVYPVCCGMDVHKNFLVACIAVTDERSNTEHHIRRFSTFAGDLRKLADWLASFNCRDVCMESCGKYWIPVFNVLEKTCNVCLTHPKYVKAIKGKKTDKKDAKWISELFKCDLVRSSFIPPPDIRQLRDLCRYYVKLTGFASGEKNRAQNCLTMCNFKLDGVFSNVFGKSATRVLDALLEHGNGDFELDGLINVKCKSSPEKIRAALDGELDPTQAEKLKLIRRHMNDINALKAALEEMICKLAAKYQSQIDLLMTVPGISTPLTAIRILAEIGADMSVFETAKQLVSWAGLTPQNQESAGKKKTTRIGRAGAYLKPLLVQIALAVSKSDKYPELKNKYLALKKRRGGKKAVIAIARKLLTAIWHILSKNDPYNAELYRNADKPPANRELTAAQAVAFLRNKGFLIVDEDTGEVVYS

SEQ ID NO: 142933 - protein, 343 aa, unidentified
MNIATIGLDLAKHWFQIHGVDPRGQIVVRRRLRRSEVAPYFRSLPPCLVGMEACATAHHWARELAAFGHEVRLMPPGYVKAYVKRNKNDAADAEAICEAVTRPSMRFVPVKSAEQQAVLMLHRARNLLVRQRTMLVNALRAHMAEFGIIAPQGLRHVEDLVGQLAEEQQRLPELARSILRVIAEQLDDTKARVREIEVRLARWHRDNAVSRLLATIPGIGIMGATAIAATVTDPTLFRSGREFAAWLGMTPRQNSSGGKERLGRTSKRGDKYIRCLLVAGAVAVLRHTRNRTTKDAAWVQGLLARRPAKVAAVALANKAARIAWAVMTHGEAYRCKDAIGQAA

SEQ ID NO: 142934 - protein, 352 aa, unidentified
MAKNDFDELMSIGVDIGKDVFHLLGFDRNGRLVLRKKIKRMELVATFEELPRCIVGLEACMSAHFVSRTLRKMGFEPRIIPAIYVQPFNKGQKNDYNDAEAIAEAALRPNLKTVSEKTQEQLDLQALHRVRSRLVSRRTATMNQIRAFLIEQGITVRKSVAALRTSLQAILDNRDDEMSLRMRKLILGLQQDWIWIDKRIEMTTSEIEGVSKSEASCQRLMTIPGIGPIISTAVVAAVGNGEAYDRGRDFAAWLGLVPRQHSTGGRTILGRITKRGSRYLRMLFVQTAQVIVMRPKNWPKFSFGPWLEAAATRMQHNKLGVALANKLARIAWSVLNSGKDFDWKEKEFATAI

SEQ ID NO: 142935 - protein, 399 aa, unidentified
MTASRAVVIGADTHLDTVHLAALSPTGAPVADAQFPTRPTGYYLAVKWAQSFGTVLRAGVEGTSSYGAGLTRALQDAGIEVAEINHSDRAGRRRRGKSDPLDAYAAARAALAGHGLAVPKDEHTTALRVLLTARRGAVKARTAAINQIKSLLITAPAELRERYRRHTTTTLIRALARCRPAAHDDATTVAVLIGCKTLAQRIVFLEDQDRVVTAELDRLVTTINPALRAAYGIGPDTAAQLIITAGTNPHRLRSEAAFAMLCGTAPIPASSGKTNRHRLSRGGDRAANNALHRIALVRMSSDERTRAYVKAQVAKGRSKLDILRLLKRAVAREMFRHLTSPCAIDDYSDLRPARQAKNITLAVVADHFGLWPNDISRLERGLKRNDTLAASYRHWLTAA

SEQ ID NO: 142936 - protein, 346 aa, unidentified
MDLYIGLDVSLASTAICAVSAQGKVVKATVAGSEPEELVRALRSLPGTVIGVGLEAGPLSQWLHRALVEAGFDAVLMETRQVKGALKAMPNKTDRRDAEGIARLLHMGWFRPVHRKSMSAQETRALLSSRKAIQQALMNIELSMRGVLRNFGLKIGKVAKGRYEGRVRELVDGNPMLEAAATSILTVRKELRKEIAGLEKLLLGHAKSDPVCRLLMTMPGVGALVALTVKSAIDDPDRFRSSREVGPWAGLTPKRDQSGERDVLGHITKAGDAGLRAALFRAATVMLNRGRANWLTAWAWNVAKSRGKKRATVALARRIGVVLHRMWRDGTEFCFKRADAMAAAAA

SEQ ID NO: 142937 - protein, 335 aa, unidentified
MAIVTIGLDTAKSWFQVHGVDESGQVVLRRKLARGRVLQFFAGLTPCVVGLEACGGAHFWARELAKLGHDARLMPARYVRAYVKTNKHDAADAEACCEAVQRPGMRFVPVKSEEQQGMLMIHRSRDLLVRQRTAAVNALRGHLAEYGITAAKGTARARELMSLVDTDERVPAIARDALLQLVEQIRDTERKIEAFDKQILSLARENEVCRRLMTVLTIGPFAATALTATVGDPRYFASGRHFAAWIGLVPKQYSTGGKERFGGISKRGDAYLRKLLIHGARAAVHRVRSHQRPGGWIAGLLARRHFNIATVALANKTARIAWAVMVNGSNYRAAA

SEQ ID NO: 142938 - protein, 427 aa, unidentified
MDYTQNAKIWQVSEQTLILGVDVGSEVHFTRAFNWRGIELSKKPFHFTNDAVGFQSFFRWADAYAKTIKAEKILVGCEPTGHYWFNLAKYVTEQGMTLVLVNPYHVKQTKELDDNSPSKNDRKDPKTIAQLVKDGRYVIPYLPDGVYAELRSAVATRDRIIKELNALTNRIKRMLKMYFPEYLKVYKKFSAESGMLLLEAAPFPADILRLGAEGINQIWRAHKLRAVGMKRATTLVKAAQSSVGLDAGPCVRLELQLLLEDFRTKQAQLEAITTVLEAETLKVPHVEKLLAIKGVGLITVAGFLAEVGEIGRFDSPKQIQKLAGLELKENSSGKHKGRTSISKRGRKRLRKVLFQAVLPLIRSNAEFSEVYHYYTTRQSNPLKGKQAVVAIGCKLIRVFFAILTKGIDYDANRLRSDILRPGQRRAA

SEQ ID NO: 142939 - protein, 348 aa, unidentified
MERVAGLDVGVKQSTLCVVARDAQSMRVVSRARTATTPVAIGDWLISTGIARVGLEAGAQSSWLARELEGRGLTVTVMESRRQRAFGAYSKVKTDERDARLIGEALASGLHTKVHVRSAWSQEVRAMLGARLQLKRQGHQCRQFVRGQLRAVGIELARGSGRAWWAEARAAAVDRGGMLGTSLMAMLAAGEALREQIATLDKEIRRVARQDAACRRMMTAPGAGVLTSLALRASLDDAERFERSAEVGPYLGLTPSRYQSGALDRRGGITKQGDGLVRTYLYEAAVSLLERQKRDCPLRRWGLANQERLGKRRTRVAVARKLAVLMHRLWRSGETFDWNYGKDASTNQ

SEQ ID NO: 142940 - protein, 367 aa, unidentified
MRSIVYVGMDVHKETIAIAVFRDSARNVEFERTIRNEPGKIKKFFNKLKEKGESILSCYEAGPTGFALYRILEEMDITCYVAAPSLLPRKPGDRIKTDKRDAIMLAKVLRNGEIVSVHVPTRSDEAVRNYLRMCNNTKSDLKKQKQRMLMFLLSIGIKYETGKKYWTGIHRKWLKALEFEDELNKSVFDEYYIAICELEEKISKLKEKIEEIAAEARYTEKVSKLRCFKGIDTLTALTFVSEIGDFRRFRKAAEFMAYMGLVPSESSSGDKRRLGSITKAGNSRLRKLLIESSWHYKYYIPSKRLTMRRKGQSSETIAYADKAGRRLNKKYNKLLSRGKISQKIVTAVARELSGFIWGMMAGKTSLV

SEQ ID NO: 142941 - protein, 379 aa, unidentified
MIESLPEAGRGRSIDLRYTETVGQHGRHTQISNKARTVVRVDQTRMMQGRAKKEKKPMTEEAVYVGVDVAKNILDLAVSNSKETRQFKNDHKGILSAISYIASLRPVKIILEATGKYEIPLAAELQASSLPVVIVNPRQVRDFARATGVLAKTDRIDARILALFGMQVKPEVRLLPDQKARDMSSLLARRRQLIEMLTAENNRLLQADINIRPGIEIHIKWLKEAISTINDDLDQQVRSSPSWLEKDRLLKSVPGVGKVVSTTLLIELPELGTLNRRKIAALVGVAPLNRDSGTLRGKRTVWGGRAKLRSVLYMAALVGVRRNPVMATFYERLLKAGKAKKVALVACMRKLLTILNAMIRSKTVWRLNSIFQNVTVEAK

SEQ ID NO: 142942 - protein, 373 aa, unidentified
MGEPSTFVGLDVHRKDIAVAMLVTGPEGPLEWRVANEPSAVIRLAKKLQREGGSPIHCVYEAGPCGYALQRQLQGLGLACDVVAPSMIPIRPGERIKTDRRDARKLAELGRAGLLTVVHPPSEDEEAVRDLCRGRDDARLDLMRSRHRLGKFLLRRGRVFGTGAQRAWSQAHRWWLGQQAFERAAERIMFEDYLLAVEQTEARRRSLELHLEDLAREPRYAEAVAWLRCFRGIDTITAITLLAELHDFRRFRAPSQLMAYLGLVPSEYSSGPRQQRGGITHTGNRHVRRLLIEAAWHYRHKPRVGVALAQRRHGQPATVIALADKAQLRLCRRYRRMERRGKHPTKIVVAVARELVGYLWAALTPATIARVTT

SEQ ID NO: 142943 - protein, 346 aa, unidentified
MEHYVGLDVSLKLTAICVVDQTGSVTREGVVDSDPETIADFVTSNAPSAVRIGLESGPTATWLLTELKQLGLPVICIDARHAKAVLKMQINKSDRNDAAGIARIMQTGWFKEVRVKDLDSHSVRALLASRALLVKIKRDLENQVRGLLKNLGLVIGRAKLNVFAVRAEELIKSRPELMAAVRPLLDARNAIEQQVDDLDRKVMRLARNNAQVRRFMTAPGVGPITALCFLATIDDPTRFKRSRSVGAYTGLTTRRYASGETDWTGRISKCGDKLLRSYLYEAANVLLTRVAKWSTLKAWGIRLAKRSGLRKAKVAVARKLAVILHRMWIEGTEFKWSSKEAANQPA

SEQ ID NO: 142944 - protein, 317 aa, unidentified
MAGEAVSVGVDVAKSSLDVAVSNSTEVRRFANDEDGVSSAADYIAAMNPVSVIVEATGGLEMNLVAVLQSACLPVAIINPRQVRDFARATGMLAKTDAIDARILALFGIRMKPEIRSLPDKEAREMGRLLTRRRQLVEMLTAERNRLLQADDDIRPGIETHITWLEEALSNIDEDVENRIKQSPSWREKANILKTVPGVGKVVSSTLLIELPELGRLNRRKIAALAGVAPLNRDSGTMRGKRTVWGGRARLRAVLYMAALVASRRNPVIAAFYQHLVAAGKTKKVALVACMRKLLTILNAMMRTMTAWRPGMALTEG

SEQ ID NO: 142945 - protein, 304 aa, unidentified
MNGIGIDVSKRQLDVGTTDGEILQVSNSASGFAELDLWLRKHPARQIVLEATGGYEQSVLNFLHNAGHPVVRANALRARRLAQGLGQLAKTDRLDAYALAQMAALVKLPAYQPLEPWQQKMREFVRARRQTMEALTIARQQQEMVTDRELRRLLQANISRLQGIVGRLGKQIAEQVAQQPQLAVLKSMKGVGPGLQAVLASYLPELGRISGKRIASLVGVAPMSHDSGTMRGKRSIHGGRAEIRQVLYMASMSAMRHEPRLRDFYQSLRARGKEGKVAIVAAMRKMLVILNARVRDAQGGSIPA

SEQ ID NO: 142946 - protein, 383 aa, unidentified
MAQVNDLSRSLTAFDPISTLVVVVEMSKASWLVSGVVPGVERQPLKKLEPDATALLRLIERWRSAGWPISRIALAYEAGRDGFWLARWLIARGVEAHVIHSASVAVSRDRKRAKTDRLDAAMLMRVFLGWLRGERGHCGMVVIPTMEEEAARRPSRERESLVNERSRITNRMKSALARLGIRGFKPHLRKAPERLADLRTAEGTGLPANVIEEFRRDMARLALVREQISSIEKTRAERLERAPDTGPHAMVRLLARVIGIGIETADMLVREILSRKLRDRRAVARYAGLTGSPDESGLKRREKGLAKVGNARVRRGLIQLAWRFLMFQKDSALARWYRTRTEGPSGARKTTMIVALARKLLIALWRLVTTGEVPDGVELRPAT

SEQ ID NO: 142947 - protein, 322 aa, unidentified
MTREMIANRSVAGIDVSKTSLDLFIDPDGICSHIDNDEPARARLILQLRDANVALVLIEATGRHHRRIAADLLEAGIPVAVVNPQRAREFARSMGKLEKTDAIDAKMLADFARARTHLLMPKPREKQAELDDLVSRRRALVRVRIAEKNRLADDLPKLAKRQAKTLLRLVDQQIEDLDRAIAKLIEADDDWNNKSEIIESIPGVGATSAHQLIAELPELGNVDRGEIAKLAGVAPLCKQSGKLDGQRSIQGGRADARTALYMAAFNAMQHNPRFKAFAERLKAKGKKFKVIVTACMRKLLTILNQMIKTNTRWNENLAFNFH

SEQ ID NO: 142948 - protein, 430 aa, unidentified
MKNLFIGIDFAAKKFDVAVIYAEGLQEQAPAEYNQFENTDEGFKAFVSWVKKNSHKTKAQDWLFCGEDTGDYCRRLCNFLCRKEYDMWLENPKCIKDSGGLRRAKSDKMDARAIAEYAMRNYDRARLYKEPPKILSDLRELFQYRQWLVRDKVANTLRWKIKKENLEKSSATGFVVRKNQETIKHYEKQIKQVDDKIQKLIKSDEKLLATYKILKSVKGIGPVNICCLIVYTENFTKYDYDPRKIACQCGIAPFGQESGTSVHVSPHVHYMANKTIKALLTQAALAAVRFNPLISRYYNRLIDAGKIHPVALNNVKNKLIHIMTAMVKNGTEFDENYEAKRKTRTALNAESSTVSTNGKGIYTPAEQPTDAVSQLPELPIDGASQLPENSNQDTQMHNDSPQESMATGHAHIPLKGSESCRPIEKSHIPI

SEQ ID NO: 142949 - protein, 411 aa, unidentified
MDAIYPCVAGLDVHKQTVVACVRRLDGRSRVSKQVKTFGTMTRDLLELGDWLSRQGVTHVAMESTGVYWKPVFHLLEGRFTEILLVNAQSIKNVPGRKTDVKDCEWIAQLLQCGLLRGSFVPPVAIRQLRDLTRQRSQLVADRARVANRIQKVLEDANIKLASVATDILGVSGRAMLEAMIRGESDPKVLADMAQRRLRAKLPQLRQALLGKVTNHHRFLLRTLLEQVDSLEKLLASYCERIEEEMAPFASARDRLQTIPGVDQRTAECMVAELGINMDQFPSEGHLASWAGLCSGMNESAGKKRSSRTRKGSRWLRQTMVQAAWAASHTKTSYLGAQYRRLAFRRGRKRALVALAHTILGIVYHLLKKGTVFIDLGPDYFEQRQVERLTHHLVQRLERLGHKVVLEPKVA

SEQ ID NO: 142950 - protein, 348 aa, unidentified
MRFYNKQHKFYCGIDLHARTMYLCILNQEGKIVLHRDIKTDPDIFLKTIKPYRKDIVVAVECIFVWYWLADLCSKENIPFVLGHALYMKAIHGGKAKNDKLDAYKIATLLRGGMMPMAYVYPSEMRSTRDLLRRRTHLARKRAELIAHIQNTNHQYNFADLGRVSRKCDRNKSGVSDRFTDPSVQKSIDLDISLIEHYDKLLNSLEQELSNIAKVHDADSYFRLRSIHGIGRILGLTILYEIHDINRFPRVQDFVSYCRLVKCAKESAGKIMGSSGKKIGNAHLKWAFSEAAVLFLRGNPEAMKYRAKLERKHGKAKSLTILAHKLARAVYIILRKKEVFHPEVFFAK

SEQ ID NO: 142951 - protein, 428 aa, unidentified
MSYRIAGVDVHKKMIVVVIADVMSEGAEYDFERRKFGATPAELQILAEWLTQQEVQEAVMESTAQYWKPVWGALERYWTPECKKRGGAGPMSGTLHLAQAKSNRGPKGRKNDFADAQRLVKRLAAQELVLSFVPPPEQRLWRTVTRKKYQLTRQVVQVKNQLEAFLEETHIKLSSLISDLLGVSGRRILKALAEGETDPARLANLADQRLRATTAQLRDALGACTDLNAVYRRLLQMTLEQLRLLEEQIEQLEKECAGLLRAQRDAVERLAEVPGLGVDSAQQIIAEVGADAANFESAKDFSSWVGVCPGEEESAGESRSSRSPKGNRNLRRLLNQAAQCAVRVKGSIFELVFRRLLPRLGWKAAIWAIAHRLGRLVWKLLHDGVRYIEKGPAVSEKSKKARTARMIKELRAIGYHVQILNPETGVAR

SEQ ID NO: 142952 - protein, 375 aa, unidentified
MNNHSEAFVAFDSSKLRNAVAIADCGRTGEIRFLGEIENTGAATAKLVRKLAAKYERLTFCYEAGPTGYERYRQIKSLGYECIVVAPSLIPKKPGDRVKTNRRDAVSLAKLLRAGDLTAVWVPDRHHEAIRDLTRARDTAVMDLRSKRQQVSAFLLSQDLHYSQGKKTWTKTHLNWLASLKLEYPEQRFVFEEMMLAMRQARERIERLEQAIRAAMPDWSLSEVVTALMAMRGMDLISAATFLAEIGDLSRFQTPRELMAYLGLVPSEDSTGDTIKRGPITKSGNRRARRMLVECAWSYQHPPRVGKDKQEKVAAAPRAVREIAWKAQFRLNRRYRALIRRGKLKTVAITAVAREFAGFIWAVAREANTVRAAAK

SEQ ID NO: 142953 - protein, 411 aa, unidentified
MNPVVGLDISKGESQVQAFLDKGKPYRKSFKLAHTLEGLSSLVTFLEEVKRESGKKPSVILEATGHYQTPVVHYLEERGYLLIIINPLISYKARGSSLRKVKTDAIDAYLLCELFYKEELEPYKKRGVQLLNLRNLTRQHENITGVMIQTKLQFQAVLEQVFPEYKGVFGDLYSVVSLLTLSEFPSSEDILKASEEAITDKIFELCKSRSIKWANEKAIQLKAAAARNPFEKTVYQSHILSLGMYINILLQYKEHLSKLETEIDALAKEIEEYNIIKSIPGIGEKIAATIISEVGEIDRFNNPKKLVAFAGVDPSVFESGKFTATKNRITKRGSSRLRHALYMAVRCAIRDCRKKKTTDEIIPRNKKMREFYDKKREEGKPFKVAIIACVNKLLHWIYALLKNKTTFQDIV

SEQ ID NO: 142954 - protein, 310 aa, unidentified
MTCWIGLDVAKAVLDGVVRPTGEVVQFANDAAGHAALIAWATPLAPTALVLEATGGYERAVVLALAAVGLPVVVVNPRQVRDFARSTGQLAKTDRLDAAMLALFAERVQPVRRPLTDEATAELAELITRRQQLLAMLTMEKNRLPQTRTRVRRDVQAHITWLERRVAETDDDLRQAIEASPVWRVQEQLLQSVPGIGPVVSRTLLALLPELGHLNRKEIAALVGVAPLARDSGQWRGRRVIWGGRAAVRRVLYMAALVASRRNPVLKALYTRLVAVGKAKKVALVACMRKLLTILNAILHTGTPWHAAAA

SEQ ID NO: 142955 - protein, 433 aa, unidentified
MKDAQDEPLFVQRVAGLDIAKAGVEVTIRVPSDTTPGRRQQETRTFAATRAGLLSLADWLRCWGVTKLGMEATGDYWKPVFFLLESRGFDCELYNAAQVKALPGRPKTDRADSIWLAKIVERGMIAASFVPPEPIRRLRTHTRYRRHLTQARTAEKQRVEKLLEDGHLKLSSVISNIHGVSGRDMLDAIAAGQRDPKALAQLARGTMRGKIRRLEEALECSFFTDEHAAVLAMMLAVIDHYSAQIEALTATIEALTEPWLHQIAQLDAVDGIGTICAQDIIAEIGTDMSVFPTASHLVSWAQWSPQVRQSAGRRKGSNATGRGNPYLSAALGEAAISAGRTQSFLGARYRRLTRRMPKKKAVVATGNSMLVIIHALLSDPADSYRDLGADYYEQRMHARRQARNHVKSLERLGYKVTIQAINPDTGELQAATA

SEQ ID NO: 142956 - protein, 344 aa, unidentified
MDLGKKESQIAIVTEAGELVEKRMRTERERLTQYFKDRPPAKILIEASTISEWVARLLEGLGHEVVVADPNYAPMYAQRSRRVKTDRRDALALAEACKLGAYRPSHRTSEEQRHVRAQLAVRDSLVRDRAGLVTLAQAILSREGLQVPTGSSGCFSERVERLGLPPQLAAEIAPLLALLMPLNEQIGLLDEKLSELGRKDDRVKRLMTMPEIGPVTAVAYVATLDEAGRFSGAHQVEAYLGLVPREWSSSEVQRRGHITKAGNSRMRWLLVEAAWRVATHKKRPETQALREWTERIARRRGLRVAVVALARKLSGILYAMWRDGSAYDPAKLKGALRSKVKQVA

SEQ ID NO: 142957 - protein, 421 aa, unidentified
MYNTRVKHQKRSFVNDKALISTVDIAKDELMVYIRCPFGEEVKPFNVANNYQGLKEYWATIMLYQKRYHLQDIIVGFESTGIYSEPLKNFMMDKAVKLVQINPMHTKKMKDITDNSPGQTDRKDTRVIADIIQLGHYLSLIVPDGAAAQLRELAQARENQMVHQTRLINQLEALIFKIFPEFVQIIKNLSTKTAQYLMSKYPTPQRLKGVSLEQLTSEIKMVSRGQLGKDLAQRIYQASRESLGTKEAQESILLEVNYLLGQLIQTAQFIKVLEKKMATALDQIPYAGNLLSIKGIGVVLLGGVIGEVGDFRRYRRQSDLVKLAGLDLYEMSSGKYHGLRRISKRGRWFLRKLLFYGALNTVRTGGILRDYYQGLIGRGMKKIKALIAVSRKLLRIMFALVRDNTYYHQKEAQINSIKVPA

SEQ ID NO: 142958 - protein, 346 aa, unidentified
MEQYVGLDVSLKMTAICIVDRTGKIEREGMVASDPAAIAAFVRLHAPHVARIGLETGATSTWMWTELNKMGLPVICIDARHAKAALKMQINKSDRNDGVGIARIMQCGWYKEVRVKGLDSHAIKAVLVSRALLVKIKRDLENQIRGLLKNLGLVIGRAKMNMFVVRAAELIEDRPELAAAVEPLLKAREAVEKQIADLDRKVMRLARNDVQVRRFMTAPGIGPITALCYLATIDDPTRFKRSRSVGAYVGLTSRRYASGEVDWTGRISKCGDPMLRSYLYEAAGVLLTRVAKWSVLKAWGMRVAKRSGLRKAKVAVARKLAVILHRMWIDGTEFKWSSKEDATQPA

SEQ ID NO: 142959 - protein, 455 aa, unidentified
MDTRIIGIDLAVKGAHKAVVLDQASNTFVSKLLTFHTDPADLDRILDAARAGASEDIRVIAVLEATGMAWYPVGLYLQGHGVEVYRVNGQQVAALRRVYQRHAKSDRIDARVMARLPLLYPERLHRCHFPSGPQMALQRACREVARLKGQVVASKNRILATDQFAWLGWLDILPPYEAAAFWVRAHYYDPWLVLEVGESGLAQAWQAVAPEQPADITWISALVQRAERVIALYGDPNCIDYAQLQASLQREQARLSQAEEQAHQLRLTTVRPLYRQLHPERHLESIQGVGQDSAAVYIAFIGDILRFPSLRNFRGWSGLIPFSRQSAGAQARGLRITKAGPDLVKATAFLDAQVARLWDPQIAAVYYNQMMALGKHHLQAVCACATHLLDRVYVVLRENRPYELRDVDGTPVDKHEARRICLEQYRVPDEVRRRNNYRVRRARKEKRLERRNKQR

SEQ ID NO: 142960 - protein, 351 aa, unidentified
MSEISIIGLDLAKQVFQVHGADKAGRCVLRKQLKRREVLRFFAQLSPCIVAMEACGSAHYWAREIAKPGHEVRLVPPAYAKAYVKRGKSDSIDAEAICEAVSRPTMRFVPVKSIEQQSLATLHRCRDLLVKNRTMLINALRGHLAEFGFIADKGIGNLPDLIKIVDEAPVEALPELARAPLSGFIDGVAQIDRQLAGIAKRLQAWHKKNDQSKRLEGIPGVGLIGATALCALVPDPKLFRNGRHFAAWIGITPRLDGTGGKTRLGRISKAGDGTLRRLFVLGATALLRSLANKTTPLALWMQGLLARRPKRAVTVALANKLARIAWAVMASGEGFKPIAAARLASVAEARA

SEQ ID NO: 142961 - protein, 384 aa, unidentified
MDVLLYCCCGLDVHRDRIEACIQRGIDGEPEVIRQTFGTRKAELQNLAKWLEEHDCYTVAMESTGVYWMPVYETLETQSRYMENLWVVNANHMRNLPGRKSDVADAEWISTLLRHGLLEKSFVPPIAIRDLRECSRLHRTFVQERARYVNRLEKFLQAHGFKFSSVMSDILSVTGRKLLEVLRDTGTLTMEDVERNGRRLKKSADEVASAVCGSLTKAEQRLLGQLLRKVDSCQEDVRSILEDMRLLSSPYQEELAIIDSVPGFDEESAMEIIAEISAEPPEYFSSAERLCSWAGVVPRNDESAGKIKSRKTLHGNRYVKAILCQAAWAAVRTRHSPFHDWFWIHRPKLGQKKAIIAVARKLLKLIYLLLNTKQFYRPPLVAVV

SEQ ID NO: 142962 - protein, 404 aa, unidentified
MWYAGIDWADTHHDALVIDEKGRQVGTLRIDHNPQGMSRLNTFLAQIVGSESKEQMACIIETTHGLLIAQLLEAGWPVYPVNPRTVDRRRSASGAKTDTIDAYLLAKTGRADLADLHRLIPDSEKIRELKLLTRDQDALIQMQTRLVNQLTACLKAYYPVALELFTKLQQKCTLQFLQTYPTPQEAMAASSKQIQEVLRQSKHPNPTTVALTIFEQLHQPHLQADSVTTRAKSRLMVVLVSQLLPLIEQIAQYDKEIDALFLTHADHEIFASLPRAGQHLAPRLLAEIGDDRSRYQNASSLQALAGTSPVLFQSGTYSKAHRRLGCIKPLRNALHQFAWQTTQSEPWAKQYYRHKRAEGKSHTVAVRALANAWVRIIFAMWLHRECYQTATFEQAQQQHARRAA

SEQ ID NO: 142963 - protein, 418 aa, unidentified
MKIVFPTCCGVDVHKSFLVATIIKTPQDSLQPSYQKKRFSTFNSDLNRFADWLHENDCLDVCMESTGKYWVPVFNILEKRGIRVTIANPKWVKAVKGNKDDTKDSKWIGDLFRIGLVKSSFIPNKDIRILRELTRYRYKLTSMKSSEKNRFQNAFTVCNVALDSVVSDMFGKSATAITDYLTSDEDFDPQHCVSLLHRSLKKKAEDVLSSIEGYEITLEQKCRIGIVRDHLHYIEKLIERVDICINTMVEKYDGAISLLRTIPGIDRSSAITVISEIGVDMTQFGSSKRLCCWAGLTPGNNESAGKKKSVRISRAGVYLKPVLVQAAHAAVKDKLNPYYALKYERIAKRRGKKRAIVAIARMILTAIYSMLSTGEIWNPVDLFKVDMPEHLKEQQLQKAMKQAVRFLKAQGLTVLDSA

SEQ ID NO: 142964 - protein, 483 aa, unidentified
MKNQPPQSNKKGSRQRTRQKPWSEMNRKQRREMQRKIQSPDLNLEVVHPDAAGIDIGNEVHYVGVPPNRSSEAVRRFGCTTAELRAMADWLKQCGVKTVAMQSTGVYWIAVFDILEEAGLEVYLVNARETKNLPGRKSDVQESQWLMKLHTYGLLRNSFRPPQEIRTLRTYWRQRNDLVRAAGRHIQRMQKALTQMNIQLANVLSDISGKSGQAIIKAILQGERDAGELAALCNGRVQASPEEVAGSLEGNWQDDLLFVLQQEQDGYEFCQKQMAECDRHLEQYLQQRADRSQGASLPVEKRKERRKKKKGNKPQFDLRAALFRMAGTDLTLMDSVDVMTAMTILSEVGWDMSKWKTEDHFVSWLRLCPDNRISGDKIIGKGRLPTNNRVTIALKMAASTLRTSQTYLGAQFRRLRTGLGPPVATKAMAAKLARLVYRMLRFGMQYVDQGAEFYEAQHRKLQISHLKRKASQLGFQIIEASAA

SEQ ID NO: 142965 - protein, 326 aa, unidentified
MNQVKMYIGIDVAKEHLDVAPFDNQPARVPNNATGIKQLIKRVKATGKTAFLCCEATGGYEQTLLDMACDAGVDIARVNSARVRYFAKSEGHFAKNDKLDAAVITRFAEQKKPAAHQRPTPLVERLQNLLDRRYQLVDFQTQDTNRLHQTSDKESRGFITSTLKHIKEQLAEVDGLIRGLIASDPGQAARAKRLLEVCGIGEVTAAALLGYAPELGRYDEQQITSLGGLAPWADDSGDHRGKRKICGGRAKVRRALYMAAVVAAHRNHVLASFYQGLLKRGKEKKLALTAVMRKLLRLANRLLRDENFQLQTKAKTAKINPAPASE

SEQ ID NO: 142966 - protein, 307 aa, unidentified
MLRPDGKWRQKVVANTPAGFDALANWLTNQGVSELHAAMEATGIYWEGVAEFLSNAGVTVNVINPAQIKAFGVSYPVRTKTDSVDAKLIATFCAERRPEPWRAPPVSEQTLRALVWRLEALQTMQIQESNRLQVAREPVKPGIESHLQWLDKEIQSLIKTIRAHIDSHPDRRQKRDLLDSIPGLGERTIAILLAFPGSPERFHKARQAAAFAGLDPRQFESGSSVKARPKLSRIGHAFLRKAMYMPARVTLYKTSWGRAFLSRLQAVGKRPLLIIGAVMRKLIHVAFGVLKSGQPFNETLHPGHIPG

SEQ ID NO: 142967 - protein, 349 aa, unidentified
MTTQRLSYVGQSVYVGVDVHKDTYAVTCVCNKQIVKTATAKADPAGLTASLSQWFPGARLYTAYEAGFSAFVLHRALTKAGIMNIVVNPASIAVAANDKVKTDRRDSKKLALDLSDGRLQGIYVPTEDEELARLLPRTRAQIVEHRATIARQIKAKLHQFGLIAPASRRLISNRYLREIDAWPLPPDLRVSLTFLAEQWRFATRQLIEMRRLLREQAKAHPAIEQVYRSVPGIGEVVARTLATELGDMTRFANERALFSYTGLTPSAYASGPSVRRGHISRQGSSRVRHLLIETAWRALPRDAVLKEIFDRIAATRGKKRAIVAIARRLTGRIRACFRQGTTYAVGTYA

SEQ ID NO: 142968 - protein, 462 aa, unidentified
MKHNPKREREAKKEHVSISLLERIQPDAAGIDCGQHSHFVAVPPERDPQPVREFRTFTAELHRLADWLAQCGVKTVAMESTGVYWIPLYEILEQRGFQVVLVNARDVHNVPGRKSDVKDCEWLRELHSVGLLRASFRPDAAIVPLRAYLRQRETLVQESSTRILRMQKALTEMNVMLHVVVTDITGQTGLRIVRSILAGGRDPERLAQHRDPRCRASHADIVAALTGNYRAEHLFALKQNFAAYEFLLKQIAECDSEIEALLSELADRQPPPAAPLPDARRKRIPKHAPAFDVRGPLHRLTGTDLSQIDSIGPHAALQLIAEIGTDMRRWPSEKHFTSWLSLAPHNKISGGRLLSSRTPPSANRAAAILRRCAMSLTRTSTALGAFYRRLAARVGKAKAITAAARKLAVIVYRVLSGNLVYNNPGATAYHQLHNARELKSLRKRARLLGFHLVDQTTGEVTV

SEQ ID NO: 142969 - protein, 424 aa, unidentified
MKIPQSTIRLLTGRLVKILLNREVSTMKSNTQNAKIEAITEKTLILGIDVGSETHYARAFDYRGIEYSRKPFKFSNTEEGFVTFKEWILDLKDRYEKDKVVPGMEPTGHYWFNLGKFLQDNEMKPVLVNPHHVKKSKELDDNHPTKNDRKDPKVIAGLVREGRYMIPYLPDGVYADLRTASNIRFQLQAELTRIQNRISRWFNIYFPEYKTVYGKPDAKSGMLILKAAPLPEDILTLGIDGVNQIWRDAKLRAVGKARAKTLIEAAEHSVGSKEGAVSARMEIRMLLEDYESRNTRLQEVMVLIEELVKGIPMAEKLLEIKGVGIRTVSGFLAEVGDISRFNNPKELQKLAGLALVENSSGKHKGETTISRRGRKRLRYLLFEVAMSLVTKNPEFRELHNYYTTRRQNPLKKMQSLMAIAAKLI

SEQ ID NO: 142970 - protein, 338 aa, unidentified
MNPSQTVETYELFVGVDIAAKTAMASTLRPGGKTSRSFTIDQTPEGYSSLLHTLQATGHAPSEVLVVMEATGSYWISLATRLVHEGFAVRVINPAQAHHFAKALLKRAKTDAIDAQTLAQLAMVLRPEPWALPPPIYYALQQRLAQRDDLLNLRQQVRNQLHALVQHPEVIAEVRARMESLLATFEAQLTEVESEITAALSQDSAWAAAAERLQSIKGVGWVTAAWTLVTTLNFSSCDTIDALTAYAGLAPMPRQSGSSVWHRPSIGHTGNGRLRTALYMATLSSAQHNPVIKAFYTRLREAGKPEKVARCAAARKLLHIAWAVVKKDQPFDPNYALG

SEQ ID NO: 142971 - protein, 370 aa, unidentified
MIQHSTQTIWVGMDVHQASITAAILHGDSVEPQVVRLPGDLNAARRLFRRLAEKGVPRACYKASGAGYVLQRTLSDDGFHCEVIAPSLIPSRPGDHRKTDRLDAVHLAQQFRSGHLTAVSVPDVDQEAVRHLVRARLFNRIQITRSKNRITGILRVAGYHFTETETGWTKAHRAWMAKLRRELTGPMQTVLASELQLLEYLEASLSSLEAAITEVSVQSPWREPVEALCCFRGVKTLTAMTIVSEIGDIKRFGSPRQLMSYVGLVPSERSSGERSRRGPITKAGNRHLRRVLIESSQPCRRRAASTLRLQRRRAGQNPTLVGIALKAQHRLERRYAHLARTKHTNKAITAVAREFCGFVWAMLWEVQGRH

SEQ ID NO: 142972 - protein, 333 aa, unidentified
MENIALIGIDLGKNSFHIHCQDHRGKAVYRKKFTRPKLIEFLATCPATTIAMEACGGSHFMARKLEELGHFPKLISPQFVRPFVKSNKNDFVDAEAICEAASRPSMRFVQPRTESQQAMRALHRVRESVQDKVKTTNQMHAFLLEFGISVPRGAAVISRLSTLLEDSSLPLYLSQLLLKLQQHYHYLVEQIKDLESQLKRKLDEDEVGQRLLSIPCVGTLTASTISTEIGDGKQYASSRDFAAATGLVPRQYSTGGRTTLLGISKRGNKKIRTLLVQCARVFIQKLEHQSGKLADWVRELLCRKSNFVVTCALANKLARIAWALTARQQTYEA

SEQ ID NO: 142973 - protein, 335 aa, unidentified
MKHYAGLDLSMETTQVCIVDETGRKIVSMKVESTPAMIAKALHEVRGVERAVIETGRMSPAICHGLRALGIPIVCIDARQAHQSLKALKANKTDPHDAAGLAQLARTGFYKEVHVKSLAAHGVRSVITTRNHLVEARVRLDNMIRGLCAIFGFKPGPGQGKGFIDRVMEAANIPGLGQSITTLLAVRTELMKQIKEMDLVLREFAHRSQTCRQLMSIPGVGVQTSAAFAAAVDETGRFRQSRTAGAYFGLVPRRHQSGEIDWTGRITKQGDSMVRKLLYEAANSILTRSRGSFALKSWAMKVAKRRGLRKARVALARRLAVIMHAMLRDGTLFEA

SEQ ID NO: 142974 - protein, 369 aa, unidentified
MKKNNKNRKDDARRNALQAKSRKTKLTVGIDLGDEWSQCCFLDEEGEIVEGCRVKTTREAMKTRFGELKPALIAIEVGAHSRWVSQLLSELGHEVIVANARELRAITGSDRKSDKVDAEKLARYARVDRRILRPLRHRGEEAQLDLLVIRGRAVLVKTRTQMVNSVRGIVKSFGYRMPKCSAEKFAQLKNLVPAGVKESLAPMMEALEQVQKKIEEYDERVKKLATEKYPETKVLRQVWGVGEITTVSFVLTIEDKNRFGKSRDVGPYLGLRPRRSQSSESDPELRITKAGDCFLRSLLVECGQKILSEKAPDTALKQFGKRIEARGKKKAKKRAIVAVARKLAVLLHKLWVTGEVYEPFPGARERKAA

SEQ ID NO: 142975 - protein, 357 aa, unidentified
MKSQDSNYVGIDCGKKNLEVIRINSEGSYERQQFSTTEIGISKLINWLNPNDVVGLEAGSQSFRIAKSILNKGIQVIVLNPGDLATIYQSLKKTDKEDSLKIARLIQRFPIEELPVVPVPTDEEEDNRRLCSEQENWTRQLTQGKNRLHSLFTQAGLTHITKKHLRTKANRETSVALLPSRYHKEAERILKVLDLVEQNLKLIEEEIKEALRKNQTYTQTIMSMPGIGMITSLAILSYMGDCKRFSSAKQAAYYVGLVPRVDISGDSAYYGRIVNRGCHSIRRVIVQAAWSLVRCQHGGKLKEFYERLYSKKGAKKSIIAVSRKMIEVLYSMIRTGTLFDSMPEEVLNRKLAQYGLM

SEQ ID NO: 142976 - protein, 404 aa, unidentified
MKGPIVSIDVSKGKSDYQAFKNLNVKYTGSRSIKHTKEGFDEIVNLVREMEKKLETEVCVVYEATGVYHRVLKKVLEDNNIKQFIINPLLSAKTRKNDSLRCPKTDKLDPKSIAKTYYSHSLHNSHKQETIYHELRELSRYYEDILVHIRKDKVAFRAQLDIVFPGYDTLFDDLYGPVALAVIEKYPHPEMLQKKKINTVSKVIQSKTCHRQAVSDTMADKAIEYSKTIYSGCDKDDIEVLILQRFIKKLNEDMAEAERTIGEMIKLAQELPDFSIIKSIPGIGDNLAARIIAELGDMTRFKKKNELVAFAGLDPRISESGQDDGDHMHITKKGNKRLRCLLYLAVTCSIRLKRDDNSIKDFYIKKKQQSNPMCSKAAKTACASKLVRIIYSMCKTGELYQYNK

SEQ ID NO: 142977 - protein, 363 aa, unidentified
MAFKIFRKNCCGLDVYKTWIYACIGITDADNRTEYKQARFSSFSKGLQELSSWLAKYSCTEVCMESSGKYWIPVFNILEKTCWVTLAHPKYTKPQKGNKTDRKDAKWICDLFMCDMIKPSFIPPPDIRHLRDLLRFRMKLTYQITGMKNRALNCLTVSNLKLDDVFTDVFGKSSRSIIQQILDHHNVNFDVTPYVDKHCKHPIEEIQTAIDGAICTEQATKLKICLDFIDEQKKHIAELDTEIFRLAEPYTSVLEFMRTVPGFSKEPLTAIRLLSEIGPDMSVFPTSKNLVSWAGCCPRNDSSAQKVKSTRISRAGSYLKPLLVQIANALLKSKEHPEFKERYRRIKARRGHKKRLLHYAVCS

SEQ ID NO: 142978 - protein, 341 aa, unidentified
MEEYIGLDVSMIETSVSIRRDGQRIWRGKCVSDPAVIAQLVRKRAPFAKRVVFETGPLSVWFYHALCSEGLPAICIDARHAKAALDMAPNKTDANDADGLAHLAEVGFFREVRVKGFDNMLTRTLVAARRQLVRITTALSNQIRGLMKTFGLVVPAGKGSNFERNVCRLLADHPGLSEIMLPLLEAWRTTRLQSVELGRQLVAQARQEKACQLLMSIPGVGAITATAFVTAIENPDNFRRSRSVGAWLGLTTRRYQSGEVDYDGHISRRGDRHVRSLLYEAATVILTRSLADSDLRTWGLKLKGRIGFKRAAVAVARKLAVIMHAMLWDDTPFARVAKAAT

SEQ ID NO: 142979 - protein, 338 aa, unidentified
MSEQGHITHELRFDNTQQGATSLVTLAKSVDPHVKAVVEPSANFWIRIYDKLEAEGVEVKLTNPLRTKAIAEARIKTDRIDAKTLAYLLRGDLVAESYVPTRKNRERRALIRHRASLMRIRVDNKNRVHALLDKHELTPSYSDLFGKEGTEWLRSLQLPTPDHQILQSNLQVLETVNAEIRNADIQIAKDATSEEKAKLLMTMPGVDYHAAMVLLSEIGDVHRFSSDEKLVSWVGLAPQVHQSGETNWTGHITKKGSKRARWILGQCAQSTRQHDPRMGEFYDRIERKHGPQKAIVAVARKMLAIMHVMLIRNEPYHGENPELTEQEHKRLDTLANST

SEQ ID NO: 142980 - protein, 462 aa, unidentified
MGSSRGEAHYIDAVEASLDDPGGIEKLACHLECLPEILRNLDCPLPEGGRMLLMIDPMGLVISQNAAAAKALGRLIGTSIAEAALTPQALPAFLDTLGRGKGPVPLAVAARAGHHLGRLLREQGHDVRLMSPEYVRPYVKAQKNDDRDAEAIAEAATRPTMRFVDLKSDEQLDMQSLHRARDRLVGERTTLINQLRAILLERGIVMAKGRRKLELRLDQLLAGEVAISRRIRLLVEDMRAQWRTLDERIGAFDAEFVAIAREDAAMKLLSTIPGVGPLNAIAFVASVGRAETFGRGRDLAAWLGLVPRQMTTGGKPRLLGISKRGNGYLRRMLIHGARAALPSLAKGRTLLGEWLRGLLARTHMNTAVVALAAKMARIIWAVLRSGRPFQVDGRHPVERIVGLGFLHAIGDQGCPLGGAKDTRTSHAGMKIVRFGADHEAIGELVAIADLPAPDSAAEGFIS

SEQ ID NO: 142981 - protein, 379 aa, unidentified
MKKDTRFVGFDVDSEKIAVAVAEPDGEVRSLGEIPNREESVRLLVKKLGPASRLRVCYEAGPHGYGLYWLLTKLGAHCDVVAPTLVPVKPGDRVKTNRRDALKLARSYRSGDLTPVWVPDAEHEALRDLVRAREVAKKDQLRSRHRLGKFLLRRGLRAAAGMKSWTSKHLLWVKTLRFEQPAQEATYLDYLHEVEHAAERVTRLERAIDQAIEVLPADMKAVIAGLQALRGIKQVSAATLVAEVGPLSRFPRPKQLMGYSGMVSSEDSTGSSVRRGAITKTGNAHVRRIVGEAAWAYQYRPAMSPEMKKRQEGLSEEVKEIAWKAQHRLCTRYRRLVAKGKLRQKVTVAIGRELLGFIWAIGTQIEKEQRNAKLGRRAA

SEQ ID NO: 142982 - protein, 357 aa, unidentified
MRKRLNRNKINVNGKTVNVGIDVHKQSWQVTALIEGVVVTAVTIKPSYGVLQKLLVQFKGAKIRIAYEAGPAGFNLYDDLTADGIECIVVPPSLLPVESGNRVKTDKRDSRKLAHYLENNLLKRVWVLSKQERAHRQFVRTRRQLSNHRTDVMRQIKSLLLFHGIPLPGVDTGFWTRTFLTSLRAVETDEYLGRSLNTLIDLYDYLTQQVKQLTKEIRGLARTGKYAQRVKLLRTIPGVGMLSAMEILTELQDVSRFSTADQLAAYLGLTPSQYSSGQHVRMGKITHTGNHRLRTRMVECSWILIKKDHELHKTYEAIKKRRGGKRAIIAVSRKLIIRIRRILLDGVTYRTEYATAA

SEQ ID NO: 142983 - protein, 343 aa, unidentified
MTRFVGLDVSQKLTAICVVDDSGRRLWRGQCASDPDQIERTIRRHGGEDARIGIETGPMTPWLVHELRGRGLAVTCLDARHARAVLKMQINKTDQNDAEGLAQIMRTGWYRSVHVKSFDSHRARALLGARAQLVGMTTRLSNHIRGVLKTFGMLPGAGRNLAFDRRVETLLTDRAEVAPIVQPMLAAWRQLRQQTATFDKAVRVLVKSSPTCRHLMGVPGIGVLSVLAYVSMVEDPARFGRSRSVGAHLGLTPKQYQSGEIDRSGRISKCGDALARTLMYEAPVVLMTRVKRAHGLKDWAQAIARRSGAGKARIALARKLAVILHSMWRSGEPFRWSEQPAAV

SEQ ID NO: 142984 - protein, 413 aa, unidentified
MGYKIAGIDVHKKVLMVVLIDATSPVEKPERRRFTTLPSDLRRLSSWLREQGVQEAVMESTAQYWRTVWLELEPHMLLHLAHAFSNRAPRGRKHDFKDAERLVRRLIADELILSFVPNGEQRIWRSMTRMKVQLTRDRVRLQSQIESLLEEMRIKLSSVVSDLLGVSGLRILRALAAGETEATRLAALGDNRLRCTEEQLLDALTGSSQPMHRAMLALQLERLHLIDTQIAELSNLIAQAMKPHQEAVIRLAEVPGLGVGSAQQIIAEVGAQAGTFSSAAELTSWVGTCPGKNESAEQNHTSRSAKGNKYLRRVLNQAAHAAVKKKGSHFQTVFRRLLPRLGYQSAIWAIAHRLCRVVWKILHEGARFIEQGSEPDAHTKKKRARVLVQALRRLGYDVAITAKHLANQNAMQV

SEQ ID NO: 142985 - protein, 341 aa, unidentified
MKRWIGVDLHKTQFTVCYLHKNGEHKIQVFKVALKDIEAFKKTLSKADEIAVESTGNTGYFAREIKSQVKAVRIINPTQFKIISSSVKKTDEHDAVTIARYLSKGLIPEVRMRTKAESQIASLIGTRDKFVKLRSCLKNKIHNILNANGIVTKREIFGSEKGLDKVLALDIEASYQFELKIIVEQIRSLNKSIDDIDKEMTERGKKLDGHKSLTSLTGIGDISATILLNTIGDVNDFADDKKIAAYFGIVPRIAVSNETSHYGKITKMGSKIARTALVQSTLIAIRYNPYLRKFYFKLKAKKGSGKAIVATARKFLTIIYRTLKNKWVFEDFNKFKLAPSI

SEQ ID NO: 142986 - protein, 309 aa, unidentified
MKEELVYLGVDIAKSYLDAAIGSEKRRFANERIGHRELIKWVKQFKAPVQVICESSGGYERALVQALAGAEVKVSLVQANRVRQFARAAGILAKTDRIDAKVLCTFGKMMRPGTISASQLEQEHLRELESQRRHLTHLLVMEQNRAARVSDSCVRRLNRSLLNQIKKQIQRLDLLIKEHIEASPELSAKAQKLTAINGVGARTAALLLARMPELGQLNRREVAALVGVAPFNRDSGKMRGKRAIYGGRKPVRHGLYMAAVVAARHNPILHAFYLRLRAAGKPAKLALTATLRKLLIALNSALKPDLNYA

SEQ ID NO: 142987 - protein, 326 aa, unidentified
MKLYLGIDIGKSSFTAALCTENLERQIIHPEVMNQADGWQTLKEWVLKQSQEMQATQIQLGVESTGGYEKPLVEWFRSDTNFTITILNPVRVKRFAQSELSRTKNDLNDARLIARYLAIRKPNPTPVTAPEIEELKIMVRHLEHLTRKQADEKTYLETVVEVNIRQQTQQIFQFYQEQIEKVLNQIRKHIDSYPNLQHQSDLLQSIPGIGKITSAILLTECIPSLTPKQQVSHAGLAPRQNQSGKINGKTQLCKTGNKRLRTALYLPTLCAIRHNPIIHEFYQRLIGRGKPKMVAVGACMRKFVHIIVGVLKNQQYFNPFYAKNLS

SEQ ID NO: 142988 - protein, 488 aa, unidentified
MFNGRVVAGNRDGILPRQDFTSIPPKPSPCPEKTGEDMARQTNRFEEVRRFVAGVDLAGHAGHYVCGPRKDDGTHDVERFGTTTNELLRMVAWMKERKVESAAMESTSVYWIPVYDTLESSGIEVVLVDTRTVKMVPGRKSDVKDCQWLQRLHSCGLLHGAFRPPEGFNAVRSVIRERGNVLQMRTQAIQAAQKSLDQMNIRLHHAVSDIDGVTGMRILGAIVDGERDPRALARLRDKRCRKSEAEIAEELTGNWREEHLFNLKQAYRTLCFLDERVAEYDRQIREMYAKIAEGFPPADPPPDGGGKKPKDKADAKAKADLVRICGGFDMTKIGGIGYDSAAAILSELGPDLSAFPTERHFVSYIGVAPALGKSAGKNVSTRKKHKNTSRVGLILKMSASALFRSESALGARIRCVRSRTCSRTAIKDVAREMGKQIYRGLKYGQAYVDEGERAYMDRTRERTIKSMKKKISKLGISAEELGIYAVAV

SEQ ID NO: 142989 - protein, 339 aa, unidentified
MSHIAIDVHKKTSTVAWLDPATGEVGERKIYTTRQEVAELLETLSRPWIVAIEATRQSPAVCDWLRALDSDIHLVEPQRLSLMARLQNAKTDLKDARLMLHAMLHDYLPEAYLAPPEVAEKRDLFHAHNNLRQIATKLRNLLRSLLNKADLDLSVSDLLGTQARPQVEEQLARMAPNRLAAARAYWDLLVTTEAQLAQVDQRIRSEVKADRLGRELVKLPGVGPILAYGWLALLGDLSRFGSYKQLCSYAGLAPRSARSDEFHADGHLPQRCNKALRHVTMLAVQSAINAKAWSRAQGTYERLVKCKPKATAKVAAGRELLRDVYFLGKRTAAASSPAR

SEQ ID NO: 142990 - protein, 387 aa, unidentified
MPQPNDMSRSLITLEQDSTLIAVIEMGQSSWLVAGIVPGIERQPLKKLAADQDGLLQLLHRWRKEAAQAGHPIKRIAVAYEAGRDGFWLARWLRAREIEAYVIHPSSVPVSREHRRAKTDRLDTELLKRAFLGWLRGEPKHCSMAAIPTVEDEDARRPSRERESLVGECTRIVNRVKANLARLGIRGFRPRLAHAPKRLETLRTPEGTAVPANTLAELQRDMVHLRFVKQQIKEIETARAKRLEQASEGGRDAMVRLLARVVGIGIETADMLVQEVFSRKLRDRKAVARYAGLTGAPDESGQKRRERGLAKAGNARVRHAMIELAWGHLLHQKDSALAEWYERRTVDARGGTRKTMIVALARKLLIALWRLVTTGEAPAGLLLRPAA

SEQ ID NO: 142991 - protein, 324 aa, unidentified
MNKNTEFFGIDISKDVFDVVDSSEKHHQFRNDPSGFKKFGKLLDESSHCVMEATGSYYQGLATWLFSQSIDVSVVNPLSVKRFIQMRLKTSKTDKMDALMIRLYGESEEPKLWTPPSKLIIEATELHKLIELLVRQRAGLKNRLHALESKGITKSLVLTTVRRQIRNLGNEIADLELNLESVIKEYEPDLLTRLCSIPGIGKRTAIYLIVITHGFEKFESSRQLIAFFGLDPIIRESGSSIRGKSRISKTGDNQVRKLLFMCAFTACEHNKACREIYQRLTAKGKSKKLALIAVANKLLKQSLAIAKSGLYYDENYRSVNVNLV

SEQ ID NO: 142992 - protein, 414 aa, unidentified
MKLFVGIDVSSEELEACFMNPDGDTLETLKVENNLHGASHLRDRIVAACDKLPASEIHIGLEATSVYSWHPAMYLHEDASLQERKTKVFTINPKLIHKFREAYADLDKTDRIDAWIIADRLRFGRLTTTIVMQEQYFALQRLTRMRYHLVHNLTREKQYFLQNLFYKCNAFRSEVDSSVFGHAIMDMLSEKYSLDEIADMEVADLADYLKEKGRNRFPDPERVARCIQKAARASYRLSKVVEDSIDLVLGTSIQAIRSIQSQLKELDKAIERILAGIPGAQCLRSIPGIDRVYAAGILAEIGDIERFSDQAAVAKYAGLTWRKHQSGGFEAEDTKRIRSGNRFLRYYLVEAANSVKNREPEFGEYYRKKYNEVPKYQHKRALVLTARKLVRLVDALLRNGQLYTPGRKVKPAEH

SEQ ID NO: 142993 - protein, 376 aa, unidentified
MEGALVMNATTFVGLDVHARSIKAVALDAMTGEVRSATFGYDACAVAEWARSIDPAARCVYESGVTGFDLQKKLAALGVDCVVGAVSKMIKPAADRRRKNDRNDAEFLARMLSVGNVVEVWVPDDECEAARDLVRALDDAREDLKRQKQRLSKFLLRHGLVFDEVNAAGQRKGNWTGAYWSWIKSISFGEKADNDAFAFYVDAVRRAEEDKKRLEKLVADEASGPRWKKKVDSMRCLKGVDVMTAADIVFEAGEFARFRNARSFAAWLGLTPSEHSSGEKVAQGGITKAGNKHLRRVMVEAAWHYLNASPHSKGLAPGQAPDPAARRHASKGVRRLVERRAALLERGVHKNKANVATARELACWCWAVGLMAEGAR

SEQ ID NO: 142994 - protein, 312 aa, unidentified
MNHISIGINISKDHLDIHRLPDGASIRLANSKAGHKALIKWLLADVPERVVFEPTGPYHRKLERCLAEAGISYVKVNPRRARRFAEATGTLAKTDRADAMMLARLGAVLDPAATTIRSQTLDVLAELVTARRALVKDRTAARNRQHNLMSALLKAQAELRLKQIDTDLSAIDAECRKLVQTGEDLKTRFDIIISIKGIGDVTAMTMLAEMPELGTMDKRQTASLAGLAPITRQSGKWRGKSSIQGGRRTLRQALYMPALVAVRFNLQLKEKYQSMIDAGKPHKIAITAIMRKLITVANALIRDQRKWTEINP

SEQ ID NO: 142995 - protein, 420 aa, unidentified
MTISNSIPADAVLVAIDIAKVRNEVLIEAPGDKRRRRLQVLNNRAEHDRLIEVLRAYGRPVICAFEATGNYHRPLAWRLAEAGFEVRLVSSLALARTREALHNSWDKNDPKDAQVILHMLGIQATQRYHDPLRAGINDVQELSKTHEAIARAKTEIQHRILTHYLPLYFPEIDRFRGNSRSDWFFAFLDAFPTPASITVLTKEEFVKAAWDVVGRKVSKTQILMDIYETARTSIGLPLPLDAPAIRMFRMVVAEARSLIRQRNEIETQADELLRHSQDYQLLRQIPGIGPINALTIIAEAGDLRRFHHHRQFLKFCGLDLSTQQSGQYRGQTRLSKFGNARLRRTLWIAGQVAIRQRENGFRHKFERYIARDRDNPDLRRKAMTAITAKMARVVHAVVKGGSDYRPFVEGRVPGGRTSVS

SEQ ID NO: 142996 - protein, 376 aa, unidentified
MKKNTKTMRPPQVAAQETATITSTRRTVGIDLGDQTSHYCILDEQGEVIAEGMVRTSEAGLQEQFRRMARARIALETGTHSPWVSRLLEKLGHEVLVANARQVRAIYDNDRKADQIDARTLARLARVDKSLLHPIRHRSAEAQADLAVLRARDLLVAVRSTMINCVRGMVKSVGGRLPSASSECFATKVREQVPTRIRAALLPLLKQIDSATVRIRAYDKAIEKLAQKKYPKTELMRQIPGVGVVTSLAFALTLDDPYRFRKSRDVGSYLGFRPKQSDSGSSRPQLSISKAGDHMVRRLLVNCAQFILGHWGPDCDLRRWGLSLMAHGGKNAKKRAVVAVARKLAVLMHKLWVSGEVYKPLRQASEGTTSQAAPAA

SEQ ID NO: 142997 - protein, 410 aa, unidentified
MDTLIERCAGLDVHKDSVTACVRLPAAGGGREQVLATFATTTADLLALRDWLGALGVTIVGMEATGVYWKPVYYVLEERVQCWLLNARHLHNVPGKKTDTLDAVWICQLVEHGLVRPSFVPPPAIRELRNLTRYRKAQIEERTREAQRLDKVLQDAGVKLSSVASHLLGVSGRAMLQALVEGTRDPATLAELARGTLRKKLPALREALHGRFSRHHALLVGAILTKLDFLDEVISDLSAEIEQVIAPFAAEVALLDTIPGVDRRTAEAIVAEIGVDMSRFGSAARLASWSGFCPGNNESAGRRGPGTTRKGSKWLRTHVVEAAKAASRTKQTYLAAQYARLRPRRGTGRATVAVGHSILVAAFYILDRHQPYRDLGPDYFRRRHSREHHARRLARQLQALGYRVTLEEAA

SEQ ID NO: 142998 - protein, 350 aa, unidentified
MLIIGCDYHPAFQQIAFMDTDSGELQERRLQHREEAEKFYRDLAAERMKVRVGMEASGHARWFERLLSELQFELWTGDAAEIRTKRVRKQKTDRQDAQLILQLLLEDRFPQIWVPSWENRDLRQLLWHRHRLVQARTRMMNQLQAVALNEGLRCRKKLFREAGRKQLEGFRLARWASRRRHDLLELLDRLTPTIAELTQAIEQEVEKCPAAQRLRTHPGVGPLTALAFVLIIGKADRFQCGKQIASYLGLVPLEKSSGNQRRLGHITKQGSSLLRFLLVEAAQVTARSLPDWRSKYYHLSMRRGRKIAKVAMARKLAVRLYWMMRKEWDYGQFTKFGSYAGKPENRDGVK

SEQ ID NO: 142999 - protein, 337 aa, unidentified
MKLTTIGIDLAKRVFQVHGITADGEVVRKRLSRAKLMKFMAQQGPCLVGMEACGGAHHWARELGKLGHEVRLMSPQYVKPYVKTNKTDRNDAEAICEAVGRPGMRFVPIKTRAQQDVQALHRVRAGLIKSRTALANQARGLAAEYGVVLSRGLGRLRAALPAALEDADNALTEVARELLCSQSERLRELDAQIRAYEARIESLHRVDEASQRLAAIEGIGPLTASALRAAVGDAREFRNGRHLAAWLGLVPRQHASGNRQVLLGISKRGDRYLRTLLIHGARAVLSRSAGKTDRRSRWLEALKARRGFNRACVALANRNARIVWALLARGESYRPAL

SEQ ID NO: 143000 - protein, 411 aa, unidentified
MEVVYRRCAGLDVHKQTISACVMISGPGEEPASVEKRTFGTYTSELGELQHWLKGCGVTHVVMESTGVYWLPVWGLLEGTFALMLVNPQHFRAVPGRKTDQKDCEWLAQLLQYGLLRGSFVPPQEIRELRELTRYRVKLLGQRNQVHNRIEKLLQQANVKLSSVATDILGVTGRSILAGLLGGNEDAKSLAGCAKGTLRRKKDQLEQALQAKLTSHQRFMLREFLDDLKFVEGKIARIEETIQERVTPHEEVLNRLNTIPGINRLTASTLIAELGVAMQQFPDATHLASWAGLCPGDCESAGKRKNTRTRKGNPHVRRVLCQAAWAAAHTKHSYPSALFHRIASRAGRNKALIAVARHLIVIAYHLIRDPVVYRDLGENYFDNLHAERTKRRLVKRLEHLGHQVTLSRRQP

SEQ ID NO: 143001 - protein, 358 aa, unidentified
MLFIGDDWAEAHHDIEIEDEAGRVLARRRLREGLPGIATLHELVAQHLNPTAEPDQVQVGIETDRGPWVQALLAAGYGVFAINPLQVARYRERHSPSGAKSDAADAHLLAEIVRLDRAHHRRIAGDSEIAEHVKIAARAHQTMIWSRVRQVNTLRSLLREYYPAALAAFGTDLAGRDALAVLTVAPSPELGRRLSQSRIETLLRRAGRQRNISSTAATIRAALTSEQLAARPGVIGAYTASASALLAVLSTMAAQTEVLAGQVEQGFGQHPDAEIYRSQPGLGVILGARVLAEFGDDPDRYVDAKARKNYSGMAPITKASGTKRVVLARFARNRRLGDALFLQAFAALNNSPRRPRLL

SEQ ID NO: 143002 - protein, 338 aa, unidentified
MKITTVGLDLAKSVFTLHGVDEHGNAVIRKTVRRGKLLELFAQFPACVVGMEACSGAQHWARELRKLGHDPRIMAAEFVAPYRQGGKNDANDAAAICEAVSRPKMRFVAVKSVEQQAVLAVHRLRQGLVEERTALANRLRGLLTEYGVVVGTGLDRLRRALPEIVTSDADAIPSIARAVFTDAHEQLRELDARITAYDRRIAAFARASVPAKRLMKIEGVGPVTATALVASVGDANVFRNGRQFAAWLGLTPRQHSTGGKQRLGAITKHGDVYLRTLLIHGARAVLQVTPNRSDAKSRWVQSLRQRRPDNVAAVALAAKHARISWALLARGKDYEVAV

SEQ ID NO: 143003 - protein, 424 aa, unidentified
MSYRIAGIDVHKKMLAVVVADVEIEGEYQFERRQFGSNPEHLRLLAEWLIEQEVVEVVMESTAQYWQPVWGALERYWRPIWQKREGASPKSGTLHLAHARSNRGPRGRKKDFPDAERLVKRRVANELTLSFVPDAEQRLWRTVMRRKYQLTRNRVQLQNRLEALLEEAHIKLSSLVSDLLGVSARRMLKALGDGETNPGILAAMADKKLRATQTQLCDALGACTELNAVYRRLLKMTLEELQLLEQQVGQLDQEMASLLSQHQDSVKRLAETPGLGVDSAQQIIAEVGATAATFPSAKELSSWVGACPGDEESGGVSKSHRSPKGNRHMRRILNQSANAAVKVKGSIFEIVYRRLVPRLGHKLTIGAIAHRLCRLIWIILCRGVRYEERGPAVSQRSRKHRTNRMIRELRSLGYRVESMNLLPT

SEQ ID NO: 143004 - protein, 478 aa, unidentified
MASQTHRETSQGQRLTRKERKILGRQIWSGSPGLEVVHRDAAGIDIGSREHYVAVGPDRDGQPVQNFGCFTTDLHRLAAWLTQCGVKTVVMQSTGVYWIPVFDVLEQSGFDVWLVNARETRNLPGRKSDVQESQWLLKLHTYGLLRKSFRPTAEIRAIRTCWRERAEYVEQAGTSIQRMQKALTEMNVQLATVLSDLSGVTGMKIIRAIVAGERDGRKLAEFRDANVKASQETIAQSLEGTWLPEQLAILRRQLADWDHVQRQMAGCDQDLAARMKDLPAAEVQPGEPGPPAGRTGKRQRKKSSRNQPNFDLGAELKRVAGVDLTRIDGIREMTVQTVITEAGLDMSQWPTEHHFVSWIGLAPRNDISGGKVLKRRTRKVVSRLATALRMAASTLRESDSYLGAQFRRLRSRLGPPKAITAMAAKQARLVYRMLKYGQEYVDKGTAQYEKKYRLQRIRLITKQAAQQGFALVPLVSPV

SEQ ID NO: 143005 - protein, 332 aa, unidentified
MYLGIDVHKRHAQVAVMDEAGEIVEEVRVENANLDDLAQRYAGGEAVIEATTNYYHIHDTLSEHLDVTVAHPGKLTLIANTDKKTDRIDAKELARMGRLNSVPESYVPTDEIREARALVRGRQKLVENRTDYANKIHGLLSDHGVTRDIKPLSVSGRESLRDLPLPTPWDSLLESYLKLIETLTEEIENLEETIEERAGSLKETQLLMTIPGVSYYSALMIYAEVGEIGRFDRDKEVVSYAGLNPVIRESGDSRIEGGISKRGSRQLRWILVQCARTAVHTCKDEYLKQFYDRLAGKKGSQKAIVATARKLLVSIFHMLDREEVYDPPGVSV

SEQ ID NO: 143006 - protein, 400 aa, unidentified
MDPQIRVGVDVGCRTHHVAIADPEGRILDEFAIPHAQEGFAKFFTRVEQRRCERGLPVAVAMEGLNGYGRPLDRMIQEKGYRLYNVNNLKLARFREIFPGAAKTDRLDTRRILELFHLKDHLSLAKDVLQEVPRVPPENERLKRLSRRRRQVVNEKVRVVNRMQADLQAVCPELLSITNNVGNLWFLRFLSSRDDLRKLARMQKKTVLKIPGIGKKYAGIIEEWQKKAQFSPEVAYVGPMIVSDARRILELLREIAALDEAMEALVGESEIAQRLLSIPGFGTTSAAELAGEIGTLGRFESEASLALYLGMCPPDRQSGQSHGTKSPRQVNWRAKAAMMTAVARHIEKVPESRAYYEKKRAEGKKHNQAVRALGRHLVRVMRSMIEQQRAYELREVSCAS

SEQ ID NO: 143007 - protein, 333 aa, unidentified
MEVVYRCCCGIDVHKKVIVACLVNGGEQELREFGTTTSEIKTLANWLTESGCEMIAMESTGVFWKPLYNLFELMDLDAMIVNAAHMKALPGRKTDVKDAEWIADLLRHGLLKASYIPNREQRELREITRYRKSLTEERCREVNRLQKILEGANIKLDSVVKDITGKSARKLLQRIIDDDIPDSDEVSKLVHGRMRPKLDQIVASIEGITTPLQRKLLAQIINHIDDLNRRIGELDKLVQEYMAEYEAAIEAIDEIPGIARRSAEVILAEIGLDMGRFPSAAHLCSWAGVCPGNYQSAGRRKHGKTTKGNKALKTILTQCAKSAKTVKSSYFFA

SEQ ID NO: 143008 - protein, 343 aa, unidentified
MDYFAGLDVSVKETSVCIVDDAGKIVREARVASEPEALLQVLANNTYRFKRVGLQAGPLSQWLYSVLTEVGLPVICVETRHMRAVLKAQINKTDRNDARGIAQMMRVGLYRPVHVKTLRSQKLRVLLTHRKLLQSKAIAIENDLRATLRNFGLKVGMIGTVKFEARIKELVENVPDLAVLVQPLLIVRQVIREQLGILHRRLLAIVRGDDVCRRLMTIPGVGPVVALTFCVTVDIPARFRNSKAVGAVFGLTPAKYQSGENNRTGAISRCGDEMMRMMLYEAAQSMLVRSAKWSWLKAWAIKIARHRGMKKAIVALARRLAVIMHRMWVDGTEFRWTREVAVA

SEQ ID NO: 143009 - protein, 424 aa, unidentified
MENTAARKRKQVPEGYLVVGVDPHKKRHAAVAITQDFTTRAKFKFDNTREGLELMLNSAKVEMVKSGCRGIIFAIETGGHYWRNVAYFLDEHGTPFRFINQFTLKRRREGKDLNRRKNDYRDGEVAAQLLCTGEFTESKLPQGVYAELRTAHNAYRRLVKERTRVTNLLKGLLDALFPEFTQVFKDPGGLTALSVLSICPIPRVIARMTEDEFEATIEAQHKGRRLMRKKLRALHYSARTSIGIDAGARSLSYEIAFLVEKLELIRQHICSIEGSLVRLVDEAEEGKYLLSIRGLNYIAVAGLLAELGCFKAYRSAKQMIKMAGSNPTESESAGKKKSRTPMSKQGRPVLRYCAWTSVIPMLRFNPDFRIWAKQRRERPVHANPLGGREVVGAALNRLLRLAFALVKNQTYYQDVKPALIPVAV

SEQ ID NO: 143010 - protein, 415 aa, unidentified
MSLKIVYKICCGIDVHKTFVVACIASTNDKGITSYESHRFSTYTSGLKTLLQWLLNRNCKDVCMESTGKYWIPVYNILENDCSIVLAHPKYVKAIRGKKTDKKDAKWIADLFKHDLVAGSFMPPADIRQLRDLMRYRFKLTCFQSSEKNRLQNCLTVSNIQLGNVVSDTFGKSAQAILDKLLENPADTSFDLEPLVYKSLKKKLPELRDAIDGYITPEQAGKLKVIKSHYENLESRKAELEELILALAAPYQQELAILQTAPGIRSDFTAIGIISEIGTNMEAFPSAKHLCSWAGLTPTNNESAGKKKSVRVSKAGCYIKPLLVQCANAVVTSKKHPEIRNRYLRLKKRRGHKKAIIAIARMLLTALYHMLKNGETYNAELYRKSDLPPVDREITVEQAIIIARNQGYKIKSATA

SEQ ID NO: 143011 - protein, 440 aa, unidentified
MAMRKREDLVFPSAAAVDVGASSHWVAVPPHSTDAPVREFGAMTDELNAMADWLLACGVDVVALESTGVYWIPVYEVLEQRGLKVWLVDARQVKYVPGRKSDVQDCQWLQKLMSYGLLRAAFRPAAEVCVIRAVARQREVLLTEQASWVQRMQKALVQMNIQLTEVISDVMGQTGQAIIRDIVAGQREPKLLAKHRHRRVKASEQDIVRALTGNWREEHLFVLQQALAMYDDIARHLRECDAKLQSLLAQRSAASVDLGKAPRAGTKARAEFDVRQQLANWAGADLTRINGLGLDSVMKILSELGADLSRFANVKHFCSWLGLCPSTKISGGKVLSARTKRSANRVRQALKMAAMSLSHSDSALGAFYRRMCSRMDKPRANTATAHKLARMVYFMLTRGEAFVDQGQQRYEEQQRQRSIVALKRRAAALGFQINPARAAA

SEQ ID NO: 143012 - protein, 345 aa, unidentified
MGIDVHKRKWSVATITESGFQRIHTQNASAQELIDFLHRHYPDGEYHAVYEAGFTGFSTYYSLTEMSIYCMVIHAADVPTTQYENVMKTDKIDCVKLAKSLRAGLLKGIYIRPKDSIDDRGVIRMRRAIIKDLSRYKIRVKHLLMSNGVEIPEQFDKRKGNNWSGAFIQWLKSDVKLLSETRRTLDMLIAQVERMRQAQVEATRELRKLSRTERYATNYDLLRSIPGIGGIVAMTLLTEINDITRFNNEKQFASYLGLVPTSHSSGDKTIHGEMTFRGNKELGPMMIEAAWVAIRNDAGLAASFSNYCRKMKPQQAIVRIARKLANIIISVLKNKKKYVPYSCNG

SEQ ID NO: 143013 - protein, 329 aa, unidentified
MNNYKIYFGVDVSKDYFTTTVIFHDKRETFKIASKPEEFEKKIKSYIRNLEKSEVLILMEHTGVYHLPLAEYLAKRDYPVGVINPYSMKNFCEAKMSRVKTDKVDSTHIAEYGKQFFEGKLFKPKTEVQKQIEAKLRILEDFQKQLNMLKNKREALRWIPMEKPDKNIAYYDEVIKLIELKIKELEKEIEKLCKDNYPREYELLSSIPGIKNRAISMILSILRGFEGFESAKQIGSFIGICPSPSESGSTVKGRGGIKKRGSGYVRKILYLCGLSAIRANKYCREFYQRLISKGKAKKLALIAVGYKLIRQAFGVLKSGQPFREDLLTT

SEQ ID NO: 143014 - protein, 460 aa, unidentified
MKDHQETGGSRQQARPASEPLRVVHPDAAGIDIGSQKHYVAVPSDRDGEPVRCFGCLTPELQSLARWLVACGIKTVALEATGVYWIPPMQVLEEYGLEVYLVDARQAKNLPGRKTDVKDCQWLQQLHTYGLLTRAFRPADSICVLRSYWRHRKDLVEMASMQIQLMHKSLEQMNLQLHKVLSDVTGVTGWKILQAILAGERDPVVLAQMKHPLVRSSQDTIAQALTGDWRAEHLFTLRQAVELYEVYQQKIEACDQEIEKYMQSLGARAEAKDLEARKGGTRRKNQVHFDLRGQLYELTGTDLTSIEGIDAMTAQTVVSESGIDMSRFATEKHYSSWLGLCPNHQITGGKVRRRRTRRVRNRAAQALRVAAQSLHRSKTALGAYFRRMRSRLGPAKAITATAHKLAILIYRMLKYGMNYVDVGQEAYEQQYRERTLQMLKRRVKQMGYALVDLHSGEVVS

SEQ ID NO: 143015 - protein, 315 aa, unidentified
MAMRVSQEKMIIGVDVAKNELVIYHEQYDQLEAIPNTKVAIAKWLKTLAGTSAIAIEATNVYHVLFADMAYEAGCEVYVLDGYQLSSYRKSVNIRAKTDAQDARLLARYLKNEFDELRPWIPPSPLYRQLLSLFRRRAALVQARTGLVQSWANETLLKTAFANQINSMKRLEALVEKKIRDVLQEAGLMVQVNRCMKVEGIGFLTAARLVTSYQRGEFSGADAFIAFLGLDLRVSKSGQRDGPRRLTKRGDPEARRLLHNAAMSGSRTPAWKPFYEEQRKRGFSTTQALVMLARKMARVVFALLKNQSEYQTKAA

SEQ ID NO: 143016 - protein, 410 aa, unidentified
MRYYLGVDWADQTHAVWVVEEDGTKIAARTVPHTAEGLSEWGRELDEWRAQGIERWAAIERREGRVVDVLLDHGVVVYPVNPKALDRARDRFRQSGAKSDPFDARVLADFLRTDPAHLQALQPSSEAAQELKLLTEDYQRQIRQQTRLVNQLTHTLKAYYPRALEIAELTTALTREFLHADPTPQAVTALTPRQWQRWARAHHLSEARTQDLWTVLQSPQLPVPAHVVRAKARLMLTLVAQLMPVVAAVGHYREAIEDFFARIPEAQWARTLPIGNHGITAPTLWARLGDAPGRWESFRHLQAHAGTVPVTKRSGKQQRVVHFRFACDKSLRYVVDQVAFLSLLSSAWARAYYDQQRARGHAHHQALRALGAKWLKIIFVMWQRQVPYDEQYHLATMTRQQLRQRQERIA

SEQ ID NO: 143017 - protein, 324 aa, unidentified
MIDGILGIDVSKNTLDVSISSCTKVRTKSFANSSDGWHHLLDWLVAQKIQRVHACLESTGRYSLGIACSLYEAGHVVSIINPAQIRDFVRTKLGRNKTDGIDASRIREYCELFKPSPWAPPSEAHRRLGELQTIRAGIIAGLTEWKNRKNSGIVDTEAQALADATILHFTSQLGAVDKAIALTIDNDSDLRSKRDLLLSINGVGDTLAGVVLAELPGPDVLRSSGEVVAYAGLNPRQHQSGTSVDRATRISKIGNAVLRAALYMPALSAMRYNPVIVALVTRLKSRGRLKPKQIVVAAMRKLLVLCFGVLKTGKPFDPAIAMGC

SEQ ID NO: 143018 - protein, 429 aa, unidentified
MKIIYPRVCGIDVHKKFIVAVICISESVEPVYLKKRFSTFHNDLIRFRDWLIQNDCQNVCMESTGKYYIPVYNILESHISNIVVANPKWVRAVKDEKDDDKDAKWIADLFKLGIVKSSFIPQKDFRILRELTRYKYKLVNMRSSEKNRYQNALTSGNCKLDMVFTDVFGKSASNIIDLILSDNPYTDEDILSKVHKNCKASPDMILNSINGTDLTPVQKSRIELVNNHIKQLSSNIQRLDKLIDLMIEPYEDYISFLCQIPGVSRNSAIIILSEIGVDMNQFTSTRRLTSWAGLTPSSNQSAGKKKSVRISRAGVYLKPCLVEVAHATVKDTNHPYYANKFNKISKRRGKKRAYIAIARKILVAAYHMLLTGEIWNPADLAEVETPVEQRIKYVKNNLKSDIKQLLDIGLTVEELTLMIQQNANNIATQ

SEQ ID NO: 143019 - protein, 417 aa, unidentified
MDVGYRRHSVAIGLPSGEVLEEFEIEHRLEGFAEFFSRIEKHNSKRGCSVAVAMEGYNGYARPLDSMVRQRGYRLYNINNLKLARFKEIFPGSAKSDRIDARKGLELFQLREHLPLAKEVLQEVTGTPQHNEALKRLTRRRRRLVNERVRVVNNLQTDLQAVCPGLLEITSEASNQWFLNFLLSAKTLPQLARLRKASLLKIPAVGRKYASLIEGWQKRSHFGAEVEWVSEMIQEDAQRCLDLEEKIKALETKIEQIAKDSKIATILLSIPGFGAVCTSELAGEIGTIERFGKEGSLALYLGMSTLDNSSGKYQGSKAPKHVNTRAKAAMMIALDRHRKYVPESQRYYEKKRSEGKKHNQAIRALGRHLCRIIYKMLKQEREYQIRSEKGNTKTKVRPRSLLKTQIRRSKILAKEKK

SEQ ID NO: 143020 - protein, 400 aa, unidentified
MYKYFLGIDISKDSFDFSFTDETEKVLYKDHYQMNITDFTKLSEYLTQFSKDEILIVMEATGIYHLTLLSYLLEQGLNVSVVNPLFIHAFTKSMTIRKTKTDAKDAHIISIFAKRNYATIRLSSASDLETIKPIVREKEKLTNQISAIKTDIKSLVNQVFPEMLKNTNIFLKSSLNLLLQAPSKRIIRNLKEKKIASYLACDTNRGAKPKVDAKEILLMAKNSIGINNQSLEKILVSKIKQLEFLQTQLDEFNETIEKFVDEHHHDDMDLLTSIGGVGKPSAASFLTELGDIDNFVTYKQLTAFIGTDPTIYQSGTSVNVKGSISKRGNSHLRRILWHMARAATVWNETLKAYYEKKRNEGKTFKQSVIAVANKLIRIIFSMLKNNTKFESNYQTQGVSI

SEQ ID NO: 143021 - protein, 351 aa, unidentified
MNKVTTLGIDLAKTVFQLHGVDVAGKVVWRREVRRAQLMKFVAQLEPCLIGIEACGGANYWARRFAEFGHQVKMMSPQFVKPYRKSDKNDRNDAEAICEAVTRPSMRFVAVKSVEQQEMLTMHRVREGLMKERVALINRIRGSLSEYGIVIAKDVSNLRRELPGILEDAENELTAVARQLFSELYEDLSAREQRIRQLEHSIRALGSQHDVVRRLQTVPGIGYLSATALYGTVGDAKHYRNGRQLAAWMGLVPRQSSSGGKQRLLGITKRGDKYLRKLLVHGARSITTRAERTPRPPDRWLNELRERRGKPRSYVAQANKTARIAWAIMAKGEVYRAPTTAALEASAAVAA

SEQ ID NO: 143022 - protein, 391 aa, unidentified
MDKAWVGVDVGKEFHWAHALDASGSELLSRRLENDETDVSKLIDEALSLADEIVWTVDQPGGSAALLLGLLWERDQRVLYIPGLSVNRASDSYRGESKTDARDARVIADQARMRPDLSELEPDEEEIAELRVLLGRRRDLVIDQNRTITRLGEALLSLSPALERALDLNRRGPLTLLTYYQSPQRLRRAGHKRIAAYLRSRGVKGFDGVAGKALAAAKSQNISLPAESIAARIVAELAAEILALKDRIELVDEQIERRFFDRPEAKILASLPGMGPLLGAEFLVAVGNLSAFESADHLAAYAGLVPAANDSGKRVGNKRRMRGGNKNLKRVFYQAAFASLRGSPESRAFYDRKRAEGKRHTQALIALARRRVNVIWAMLRDGTTFETRSAA

SEQ ID NO: 143023 - protein, 315 aa, unidentified
MTIVSQNYVGIDVSKNKLDVAMLGRNALEAFANTKRGIASLARCMKQCKPKLIVVEATGGYEETLVLALFEAGLPVALVSPQRVRQYAKAKGLLAKTDQLDAQVLAEYGKNIQPRLFVGKSEERKKLSALVGRRKQLNDMLQAEKNRLRAKDLSLQQSLERIIRCLKAELDNIDQEIEQFLQSHQDLEEQEQLLRTAKSIGRVTAATLLADLPELGQLDRKEIAALVGVAPMNRDSGRKRGYRKTQGGRPEVRSALYMSALTGIRYNPILKAQYDQMLKRGKEKKVAITACMRKMLTILNAMLRDQQPFRQTVAV

SEQ ID NO: 143024 - protein, 417 aa, unidentified
MRVNEKIERITPDTLICGIDVGKTKCCARFCDYRGLEVYHKVWFDKTENLDAIGCQITAAMYKENKTDVIIAFEPTGHYWLNIDKYFKDCGQETVLMPTYTVKQAKEMHDQNPTKSDPKDALLIARLTSEGKYVKPIERDELYQNIYSGYSIYEDIQKEINRIRNKIHVWNDIYFPEVEKVYKIDSVGIKPIYENQLLPNEIKNMTLENFIELMTKDNSRANKKSIMKLKELCEKSNGINSDAFTKKEIKRLYERFMELLKELEENEKELIELASQIDYVEKAVEITGIGYMSMVGIIAETGNLNNYEHAKQVLKMSGLSLKESSSGQKKGKKHISKRGRSKLRRNLKQIGICLVGKNNFFLQLHNYYTTQREHPLTKLISINAIIRKFMYILMAIVRNGNSFDEEKAIRESCISFS

SEQ ID NO: 143025 - protein, 329 aa, unidentified
MNYLGIDVAKAKLDCCLLLEGQRHKSKVVANSDEGVEQLMAWCKKQGFLPADLHAVMESTGCYHEPAACALVRAGMRVSILNPARVREFAKSQGILSKNDRLDAFAIARFGAASKPEPWNPPAPEVGHLQALLSRREAVEQDLQRETNRREKMAFTHPPAAVLASLMEHMDYLEQERDKLSKEIDRHIDQHPDLKKDRVLLQSIPSVGPKVSALMLAILRQGQFVCAEQSAAYLGLVPVERQSGSSVKGRAHLSKNGPSKVRATLYMAAVVATKHNPHIRDMAQRMAQRGKCKMSILGAAMRKLVHLCYGVLKNQTPYQPLYHPKGLTE

SEQ ID NO: 143026 - protein, 459 aa, unidentified
MKSTLVLGVDVSKGYGDFVLLDTCKKVVEESFRLDDNKQGHDILKKQLLHWKKKHSVARLLLVTESTGGYEDNWLRVGKDKALGSFVESYRINAKIIFHEYEAQRRNSIDDGISALTIAEHVVKNLENFSSTNSFNETAYTSARSLVRHYTSLQQECTSHKNGLLKLIYQYLPSLEAVKPREWPSYWLEIFVRYGSRKSIQIAASKGFKQLKRVPKGKAKEIAEALANGIDVRHTPEMVVFAIRSKARQIKRLNEEIQEIKEMIIDQAPVDCDQVDLLKSIKGMGEITPVILLSFIEEVSRFKDAKHMASFFGVQPRVKRSGDGSYKTKMSKQGAGLVRRELYLLAFRTLTTEPYLRAIYAKARKKGMAHDAALGVVMHKLLRIIYGMLISNTRFDPGIDQLNQHQTGEEPKPQKQKKDASRRFQPASMVAPISFRQRRKRKKDYELQADGISESAESS

SEQ ID NO: 143027 - protein, 315 aa, unidentified
MEEVIIDKGCGLDVHKETVVGCVMGSGIKKEIRTFSTMTGDLFRLKAWLSEKGITHVAMESTGPYWKPVFNVLEDSFEVILANARHIKNVPGRKTDVKDSEWICKLLRSGLLAASFVPPKAIRELRDLTRYRRKLTQSISAEKNRVQKVLEDANVKLSSVVSDTFGVSGSRMIEALMAGNLSVDEISDLAIGKLKGKKEDLKKALVGNFQEHHRFMIQASLDHVRSLEKIIANLDQEIDRKLEDYHQEYELLQTIPGVKEQGAASIIAEIGVDMERFPSEGHLSAWAGMSPGNNESAGKKKVERRPMAIRTCGQY

SEQ ID NO: 143028 - protein, 372 aa, unidentified
MRILALDLGKFKTVACDYDEKSGKHEFETIKTNGQEIHDLVLEREPDRVVFEVGPAAGWIYDLVVSMGIEVQVANVNHEGWRWKNTKRKNDRLDALRLAQLSAMNQLPMVHISKRQVRQQRALIMYRQTLVKRCTQIKNSIRAILDREGLKLPPGKKGWTGKQLEELHQMSVPMIKAGINDLWRGLLRVELEALSAMKTYLYEVETKLNRLAKKNKQIILLQSAAGVGPRLAEAVVAFIDDPHRFKSGKQVGSYAGLTPRQYQSGSMDRQGRISGQGNKFLRSLLVEVSWMSLRWNPWAKQTYERICRGSASRKKIAITAVARKLLVRCWAMLRDEEVWQTKHPPRLESAEHSKKEDVRIFSPPNTVATVGG

SEQ ID NO: 143029 - protein, 347 aa, unidentified
MRFYNQQHKYYCGIDLHARKMYVCILDKKGKTKVHKNIKTDPEMLFELIFPYIDDIVIGVECVFCWYWVADLCSEHKVTFVLGHALYMKAIHGGKTKNDKIDSFKIAALLKGGNFPIAYPYPAKMRATRDLLRRRMYIARRCGELVAHIQNTNTQYNLPAFAKKISRKYNRQGVAERFEDPAVRKSVEVDLAMIDALNPILAQLEWYIEKTARQHDYKTLYLLRSIPGVGQILGLVILYEIHDIKRFPRVQDFSSYARLIKPVKESAGKWAGKTNKKIGNAHLKWAIKEAAILMLRESGQAKDYLSRLQKKYNKGKALGILTHKLGRAIYYMLKNNEAFKMERFFIQ

SEQ ID NO: 143030 - protein, 464 aa, unidentified
MSKDTKLKQTKSKKISKKIKIPTHLAHINKMAAGIDIGSSSHFVAVPEGCDESSVREFPSFTSDLHALADWLKQCGIETVAMESTGVFWIPLYELLESRGFEVKLVDARHVKNVSGRKTDVLDCQWLQQLHTYGLLSAAFRPKEQICALRAYMRQRSMLITSAGIHIQHMQKALSQMNLQLHNVLSDITGETGMKIIRAIVAGERDPMKLASYRDKRCKNTLEVIAKSLTGSYREEHIFSLTQALELFDHYKEKILVCDQKIEKQISLFQDVAQEKQNNPKSVHRIKSRPHRKNKLSFDVKSHLIRITGVDLTAIPGIEAASALKIISEIGLDLSRWKSSKQFASWLGLCPGNKVSGGKQLGGKSKRTSNFAASTLRIAASSLHSSQSALGAFFRRLKSRLGAPKAITATAHKIAIIMYEMIKNQTEYNEIGQDYYEKQYRERLIKNLNSRAKMLGFELKEVTC

SEQ ID NO: 143031 - protein, 362 aa, unidentified
MNRNTGMSAGQIIGTMNGLQVMGLDIAKHVFQLHTVDMGTGEIANVQIKRAKVLEYFVNKPKSLIAIEACGGAHHWARELTALGHSVRLLHAKIVRPFVSGNKTDATDARAIWLAVQQPGVKFVGIKTAAQQATLTLHRQRELLMKMRTMQTNALRGLLYEFGATLAQGRKALFKDVERALEELSTQLPQMVRDSLREQVGRIKEMGEAMLEIEKRLALQLKADPQMQRIAQIPGVGLLTATAAIATMGEASAFKSGREFCAWLGLVPSQTGTGGKVRLGGISKRGDTYVRTLLIHGARSVLSHAKEPSPWLQQIKERRPANVVIVAQAAKMARTIWAVTAKEQSYQRGFQSVRPSAAMHAA

SEQ ID NO: 143032 - protein, 351 aa, unidentified
MKDIIKQTVGIDCGKQELVAAIGIMDSSFQVSIKATAAFSNNEPGNKQLIDWALKYIDPKVGIQFVAEPTGVYHERFCYYVTSMGYNISVVLPNRAASFLKTLKGKTINDRISASGLAIMGLEKNLDNWQPPNTIMNQLKQLCRERVELIEDITSIKNQIHALTSSAVCSGTTLERQQQRLHLSEVQLKEIEQEMKAIVAANIDLKQRFANVCTIKGVGIITAITVVAETNGFNLVRNQRQLVSYAGLDVIKKQSGTSVNSPARISHRGNRYLRKALHFPSLAAIRSDENTQNIYARLLSRHNVKMKAIVAIQRKLLVLIYTIWKKNEPYNPKFLEQSNKTALTELVHDRS

SEQ ID NO: 143033 - protein, 349 aa, unidentified
MLADEVDYVVGVDTHRDQHVLAVVAASSGGVLAQRSVRSNARGYAEAMRFAGDHASGARVWAVEGAGHYGAGFARYLNGRGETVHEVGSTVRGERRLQGKDDLLDAIRVARSALASTARALPRSGERQEALRLLLLARRSAVDVRRIAIVQLRSVIVTAPESLRDELRRLPLGELLRRCSRFRRSSSRTPDQLATILVLRSLAQRIQAATRKATELEREILAHVRALVPELLDEPGVGPIVAAQLIVTWSYRGRVTSEAAFARLAGVAPLPASSGLTTRHRLSRGGDRQLNRALHTVILHRRQHDAATKDYIARRITEGKTTRDATRILKRYLARHLYRLMQNASPTMT

SEQ ID NO: 143034 - protein, 380 aa, unidentified
MPVYVGIDYHKRYSVYCVVDNDGEILMRGRIEHARPQEFVELVKRWPGCRVVFEATMNWGWLYEILEQKVEEGNIVLANPYKTRIIAEAQVKTDKVDAHILAQLLRANLVSGSHIASKPTRECKEVLRQRCFFVRQRTMLRNRIHRLLGGQHGVKLPQCSDLFGRKGMEALEALELPAPAGLLLKQQLAILRELEARVREDEKALEKMMGETAELSYVRSIPGMGPILASVVVSEIDGIGRFPSAQKLCGYAGLCPSTSSSGGKTYQGKLMRACNKWLRWAFVEAAWVSVGCSPYFGEFYKNKRSLGKKANTAILAVARRMARITWQLLTEKREYANFYTTQTNRRQPAGRQSSSAGLAKEWKGSTNNFPSRSEIGLVGR

SEQ ID NO: 143035 - protein, 456 aa, unidentified
MDDGRGRRRRVRAHLKRVNLFAAGIDVGSRSHFVAVPEDLDGEAVREFAAFTGDLHRLAAWLVSLGIRTVAMESTGVYWIPLYEILEDRGLEVLLVDARHVRNVPGRKSDVLDCQWLQELHTYGLLRGAFRPPAEMVRLRTYLRQRERLLAARADAIRHMQKALRQMNLLLDTVVSDIAGMTGMAIIRAIVAGERDAGRLAALRDRRCRAAAPEIAGALQGHYREEHLFELHQAVERYDFFGAQIAACEAAIHRHLGRLGDDGEAAATVPVARKPKGHSKNDLSFEARALLYRLAGVDLTEINGMSESTVLAVLSETGTDMSAWPTEKHFASWLALSPGTKVSGGKRLSGRTRASANRAAAAFRMAAYALAHARCALGAFYRRLRARLGAPKAITATAHKLARIFYHMLRNKTPFVDTGQDYYERQYRERLTHALKKRAADLGFDLVPLAPATSTA

SEQ ID NO: 143036 - protein, 388 aa, unidentified
MAQTSDTLSHPIALDYDSTLVLAIELSNTSWVLAAQVPGLPRVKAKQSIEPTAEALLAAVDGYRDRARAAGKTVRRVVATYEASWSGFWLARWLARRGVETHVVQPSSVPVDRRARRAKSDGIDAELLLRTLLAWLRGEPRVCSMVPIPDEVDEDERRRVREREDLVAERVSLVNRIGAVLATLGVRDYNPLRRDRRERLDAIRTALGDPLPPHARARILRMLDRLELVCAQIAELERERDAVLDEEAPGKAEEMIQQLAGLRGIGVQSATVLVREAFVREFANGKALGSYAGLTATPFSSGGTEREQGIDKAGNRRLRTVMIELAWLWQRYQPGSAQVIWFRERVGGTGKRMRKVMVVAMARRLLIALWRFATQGVVPEGAVMKPVS

SEQ ID NO: 143037 - protein, 342 aa, unidentified
MSNVYVVGADVHKINTQLVCLNRFGKMVDKKRIPSDKVIEFFNNHPKVLIGMEVSIGSQHLAKELEKQGHRVKVMPANNIQGFYTGPKNDTRDANAIAQAAMMEFVDGIQMKPDEALITQGYLKQRYLIVKTRVALCNQLRGILAEQGIKFPQGEENLTNDAKFLLKDVNISIHLKILIKASLKNISFQNQMEEQLNKKLEEIAKNNEAAQTIQSIPGFGPINSLAFIVSIGSIYAYKSGRDVSAFLGLVPKQNSSGEKISLGRITKKGACYTRTLLIHGARAFVINGMKFDKNKLWLETVKARRGFNKATVAWANKMCRIAWSLLKNNTTYERILMPQIAA

SEQ ID NO: 143038 - protein, 344 aa, unidentified
MSKHSIRAGDVAGLLVRLAQLKEKARGRTGRDFPIIAIQEAGLDGFWIHRVLQSEGIESHVVDAASILTSRRRRRAKTDGIDGETLVRTLLAYKRGEPRVCAMVKAPTPEEEDRRRICRERKTLVGERVEHVNRIKGLLFAQGVSDYEPLKRNRRARLEELKTGDGRALPAHLKAQISRELDRLELVLPQLKAVEAERDALLKPVSEGCPTPAAMLAQLKGMGPEFTAILWSEGLFRSFSNRRQLAAYAGLAPTPWQSGTVAHEQGVSKAGNPRLRTTMIQLAWLWLRHQPTSALSVWFQERVQSNGGKMRKTTIVALARKLLVALWKYSTSGVVIEGAAMKTI

SEQ ID NO: 143039 - protein, 426 aa, unidentified
MRVMYERVAGIDVHKDMIKVGIRTPGHRAWTRTSEVLEYRTFYGVLQTMARDLRKREITHVVMEASGVYTEPVYYALMEQDFEQVAVIGPAHAKALKGHKTDAKDALRLAELFECGLLRGSYIPSQALKDLRDLTRYRAKTVQGRTSEIQRLAKALESAGIKLDSVVSDLTGKSAGLMIGALIDGERRGRVLADLAIGRMRTAGKLADLSQALAGRFTDHHAVLCRLHLDRIALFNTAVAGLEAKIAVKVTAYQRELDLLKSITGFGDAVACAWLAEIGPAPHEYFASCEKLASWVTLCPGNHMSAGKRKHGRTGNAGTYIKPMLVQAAWSAIKSQGRLQARYHKLVRRFGGPKNPAAVKKAILAVADTLLKIAYQVLRSGRPYEDLGADFYTQRESPEQRRAYLLRQLEKLSPGCTITITPAEAA

SEQ ID NO: 143040 - protein, 410 aa, unidentified
MKVAGIDVHKKVLMVVVVDATAPEEKPTRRRFVTMPSELHRLLTWLREQAVEEAVMESTAQYWRSVWLELEPHMRLHLAQAFSNRAPRGRKHDFKDAERLVRRLIADELILSFVPSGEQRIWRSLTRMKLQLTRDRVRLQNQIECLLEEMRIKLSIVVSNLLGASGLRILHALANGETDPKRLAQLGGERLQCTEEQLVDALTGRAQPVHGAMLALQLERLQLIDQQMERLNSMIAAAMKPQQDAVMRLAEVPGLGVDSAQQIIAEVGAQAGTFASAAELTSWVGTCPGKEESAEQNHSSRSAKGNKYMRRVLNQAAHAAAAKKGSHFQIVFRRLLPRLGYQSAIWAVAHRLCRLVWKILHEGARFIEKGVEVHPREKKKRAQMLARALRKLGYEVTITPLNQLVPKPAV

SEQ ID NO: 143041 - protein, 346 aa, unidentified
MDQIIRIGMDTSKHFFQLHGVDVAERPVLRKRLGRKQMMAFFAKLPPTVIGIEACGAAHYWGRILGELGHEVKLIAPQHVKPYVMRNKNDGRDADALCEATGRPRMRFVPVKTAEQQAALMLAGIREQLIARRTQLSNAIRGYAAEFGVTAAKGLDKIEPLLAQMARDESLPAVARELFAMQGREYARLQVELKAIEVKLRAWHRANADSRRLAGIPGVGPIGATSLVMKTPDPRAFPSGRHFAAWLGLTPKDHSTAGKTRLGKITRAGDERLRSVLVAGATAVIQQAKHGRGHPSPWLIALLKRKPAKLAAVALANKIARIAWKLMVTGASYDGARMPGASVAAA

SEQ ID NO: 143042 - protein, 342 aa, unidentified
MEKVSIIGLDLAKRSFQAHGALADGGVGFRKKLSREKVLAFFAEQPRCVVAMEACGSSHHWGRAIRDLGHEVRLIPPAYVKPFVKRQKNDAADAEAICEAASRPTMRFVAVKTQEQQGRAMLFRTRDLLVRQRTQLINALRGHLSEHGVVAAQGPANVKVLEEAVEDQTTSLPLLVAELARVFLSQIEGLSERISELEKVTAHEAACGETTRRLQTMPGIGPITALAIETFAPPMDVFKRGRDFAAWLGLVPRQHSTGGKQVLGKISKMGQRDIRRLLIIGAMAVVRSASRKGAPEGSWLQRMLARKPKLLVAIALANKMARSVWAMLAKGEDFRVPTVAAI

SEQ ID NO: 143043 - protein, 345 aa, unidentified
MQITTVGLDIAKRVFQLHGVDAAGKAVLRRKLQRSEVLAFFKALPPCLVGIEACGTAHYWAREIRELGHEVRLMPPSYVAPYVKRGKTDAADAAAICEAVTRPTMRFVPIKTAEQQAVLMLHRTRDLLVRQRTMLVNALRGHMAELGIIAPQGIARVADLMVVLLGEDTTDVPALAREALRGLAAELEALDRRVKEIEVAIVTWHKDNEASRRLATIPGVGPITASAIVATITDPFQFHSARHLAAWIGLVPRQHSSGGKQRQGGISKQGDRYLRRLLVLGATAVIRHSRSKSTAEAGWLKSLLERRPARLVSVAQANKTARIVWALLVNGEAYRMPAAVPSGAA

SEQ ID NO: 143044 - protein, 349 aa, unidentified
MSMVCGLDLHREQITFDALVVESGESWCGRVWQPDRERFRRWVVHDVTRRAQGGPVASAVEGCTGWRYVVEEITAAGFEAHVAETADTKAARSRKHRAKTDRTDARLLRELLAAGELPESWIPPTVVLEWRERVRLYKSLIDQRTTWCQRIHAELFQHGVSVPEGAIRTAPVRVRIGDKDVQLSVAAQQRIRVGYQMIDATDTEAMPLKRALTRFGERQPACRALVNAQYGIGGLLAVAVWSELGDCQRFSRSRQAVRHTGLDVTVDASNRRRANGYLARQGPQTLRWALYEAAKNSSHQRSPDHAYYARLKDRHGGKIAAISIARLFTRRCYHILRDIDPDLVYAMPT

SEQ ID NO: 143045 - protein, 328 aa, unidentified
MTNIDQHGKVHLGIDVSKRTLDVCILREDALEGESFAVTNDQEGVEEILSRLAEKPGASVELAVMEATGRYERLAATMLAASSISVAIVNPRQARDFAKAIGQLAKTDKIDAFVLARFARAVEPRASVIPDEEAQALQGILARRRQLIEMLVSEGNRLQMTSVKALAKRIRAHVQWLEKEIERIDSDLDRAIEDNAAFKANEALLRSVPGVGRVLSRTLLAELPELGTISHRRLCALVGVAPFNRDSGKMRGKREVWGGRAPVRATLYMAALVATRHNPAIKEFYGRLLEAGKPKKVALVACMRKLLSILNALMRDRAIWRCPHALTP

SEQ ID NO: 143046 - protein, 350 aa, unidentified
MSDTILAIDLGRYKSVACTYSPATREHAFRTIDTTPEGLTRLLGRHPGAVVVIEACANAGWVHDLAVAAGHAVKVANTAAEAWKFRHLKRKTDRDDAVRLAELEAIGQLPTVCLPDPPTRQRRMLIAFRQELVGRRVAAQNRIRALFAGQGLPVPRGHRAWTAAGLKGIEAQARPLGECGPAELWRGMLQLAVAEYRAAADRIAEVERALDALAEADPATALLETTPGMGRRTAEAVAAHLGDPGRFASAKQVGAYAGLVPKQYQSGETDRTGKITRRGPALLRKLLVECAWCMLRYNPWARATYARLTGGGKGRRKPAVVALARKLLVRCWAMLRTGTPWRSDPVPAAG

SEQ ID NO: 143047 - protein, 347 aa, unidentified
MRFYTKMHKHYCGIDLHTKMMFVCILNNQGEIVLHQNIKAKPEPFFKLIADYKEDLVIGVECIFSWYWLADECEKRGLAFLLGHALYMKAIHGGKTKNDKLDSEKIARLIRGGNFPMAYVFPAELRPYRDLLRRRNFLVRRRSEALAHIQLTNYQYNLPPFEKQISKKGNRADLGERFKDPTIRKNVDIDLAVADHTHVLINQLENYIVKHVKNFDPRTYYRLQSVPGVGQVLALVILYEVGDLSRFPSSQSFCSYARLVKCPKESAGKLYGYGGGKMGNAHLKWAFSEATVLFMRESDRAKAFVAKHEKKHGKGKAISILTHKLGRAIYYMWKRNDAFDENYFFKS

SEQ ID NO: 143048 - protein, 423 aa, unidentified
MAYRIAGIDVHKKMLAVVVSDVEVDGEYRFERVRYGSTPEHLRLLAEWLITQQVEEVVMESTAQYWKPVWGALERYWKPICQEREGAGPKSGTIHLAQAQSNRGRRGRKKDFPDAERLVKRLVANELILSFVPDAEQRLWRTVTRRKYQLTRSHIRLQNQLEGLLEECHIKLSSLVSDLLGASARRMLKALAEGETNPAALAAMADRNLRATQAQLCDVLGACTELKPIYRRLLKMFLEELQFIDQQISKLDQELANLLSRHNDAVVHLAEIPGLGVDSAQQIIAEVGAGAATFPSAKQLSSWVGACPGDEESAEVSKSHRSPKGNRHMRRILNQAANAAVKSKGTIFEIIYRRLVSRLGHNQTIGAVAHRLCRLIWIILHSGVRYEERGPSVSAKTRRHRTNRMIRELRILGYRVEPLVTTG

SEQ ID NO: 143049 - protein, 521 aa, unidentified
MSRPRGAGPARARKGFVLQKPHGLLTPRVQAVGPEPFAILAVDCAKARSRYLLADFYGRTLLEPATVAHSRGDLQAAIDRVRQAMRQHQLGDLVVAIERTGQYHRPVQHAFRQAGFETRLVHPFTSKQYRQPADPGNKTDDTDLAGICRATTHGFGLLEPPWPDDYLTIQLLRRHRRDLVDKNATLQCQIREVLHAAMPGYAECFCHLWDDSPAPLVFARHTTSAQAVRQQGLAGLQQIAVQAGLRCREDTFHKILTWAQQAPPDAGHSLERRRILARLDDDRLAKTREILELERDLAHLVVHTPYLLLMAIPGINVVTVADLAGELGPIALYLNANAVTGRAGLMPSRYQSDQVDCANGPLRRRGNRRLRAVLMQTADNLVQCNHYFRARAGQWTRAGKDPRWVRVKVAKLFSRLAFAMVAGRQWFPHPCCQQRHYVIGKLLSFHSEHATELKALRHDLEVAAEQLPPKQRAIEAEPLQQQLDALAKRRGVQPLAAIIPLVLARLAGRVVQSRPSESAGP

SEQ ID NO: 143050 - protein, 322 aa, unidentified
MSELLIERFVGIDVSKGSLDLFADPPTASLPRQSAYEDSALKALCDGLAAVAPTLVVVEASGGLEQRLASELAARGVPLAVVNPRQVRNFARASGELAKTDAIDAQVLCAFARAIRPHARPPKDADTQDLADILARRRQLVDMRVQELQRQHTAKSRPLRKSLSEHIAWLDKRIERLDEDMGQRLMKSDVWRARDDLLQSIPGVGPVMSRTMLGLCPELGALNRREIAKLIGVAPLANDSGKHRGRRRIWGGRADVRRVLYMATQAAMRHNPAIRAFATELKAKGKLPKVVIAACMRKLLTIMNTIVKTGQPWRQPAAPGTP

SEQ ID NO: 143051 - protein, 401 aa, unidentified
MIDTSDIGVFLGLDVGKGEHHACGLRPDGKSVVDKPLPNSEPKLRAMLQKLTAKYGRVLVVVDQPASIGALPLAVARDTGCQVAYLPGLTMRRIADLYPGEGKTDARDAAVIADAARTMPHTLRSLELADETVAELHMSVGFDDDLAGEVTRVVNRLRGLLTQVHPSLERALGPRIQHPAVLGLLERFGSPAQIRKAGRRRLVTVLRPKALRMAERLVADIFTALDEQTVVVPGTDAAAVIVPKLAANLSSLLDQRKQLASSIEELLEAHPLSKLLTSMPGIGVRTGARILIDVGDGSAFPTAGHLAAYAGLAPVTRRSGSSIRGESPSRRGNKHLKRAFFLSAFAALADPASRAYYERKKAEGKRHKQALMCLARRRVDVLFAMLRDGTFFAPQPVPQTA

SEQ ID NO: 143052 - protein, 351 aa, unidentified
MDEKSEVSKVVGIDQGDVWSHLCELDSAGQLVGRERIRTTRTAYDKRFGGSSSRRLVLEVGPHSPWSSRLLEELGHEVIVANPRRVKLIAQADRKTDRVDAETLARLGRADPALLAPIRHGAESFQRDRALLTVREGLVRSRARLIVQARGLVKSVGERLPASSTPAFPRRVREAGLDGLLPGLSVLLEVVDVLSERIRRLDQDIEHACEQRYPQTRLLRQVPGVGPITALAYVLKVEDPTRFAKSRDAGPFFALVPRERSSGDRRLQLRIPPRGDARVRRLLVQAAQYILGRFGPDSDLRRFGLAAERGGKQAKKRAVVAVARKLAVLLHRLWVTGEVYQPLRHAEPQTL

SEQ ID NO: 143053 - protein, 423 aa, unidentified
MISFPKRERAQRAAACVGVDAGKFAHTLVVRPTGQPDSKPLSFPTTRAGFEQAVAFIRQQVPGARTGAVLVGIEFAGNYGFTFAHYLRELGFAVVSVLPAHTKRWKDVAHNQPLKTDAKDAGTITDLLAQGHFVGFPFLEPAYADLRYLVTARERLAVLRRGAITQLRALLQVVFPEYETIFPLVSQRTAVLLLRAFPGPQQLLAAPKAKVLRVLRAGSRGHLGAEIYERLVVAARASLGLPGAQVRLRQEIVLTLDRLALFEQQIRALEVELVAALEAVPETPYLLSIPKVAAVTAAVFLGSIGDPRAYDAGAQILRVAGLSLVERSSGVLHGTKRISKRGRPLLRATAYLFAVRSITTGGLFRADYEALCARNGGQKLKAIVAVMRSGLQLLYSIARDRRRFTVEPPPRRRARPTLEVTPA

SEQ ID NO: 143054 - protein, 422 aa, unidentified
MNYKQNEKINQVKESTLVVGIDIGSTTQYARAFDWRGIELGKVFPFSNSREGFESFKAWMQHLQDKYKKLDAIVGIEPTGHYWFDLGAYLEDEGILLVMVNPYAVKQTKELDDNSQSKNDRKDPKVIAKLVTEGRYSAPYTPDGVYAYLRIMVANRKRLIREMTQIKNRFARWFAIYFPEYTDVFGDYEAQSSMLLLKKVCTPEAIVELGAEKINQIWRDAKLRAVGMKRATTLCETAKRSIGLKKGSSAARYEMKLLLEDYEYKKAQLDAVMEEIEKLCRKIPESEQMLAIKGIGVITVAGFLAEVGDVRRFESPRQIQKLAGLSLRENSSGKHKGQTTISKRGRSKLRAVLFNAAIPLIAKNPEFKSLHEYYTTRANNPLKKKQSVIAISCKLIRVFYAILANGVTYDAQKMLSDIHRQP

SEQ ID NO: 143055 - protein, 344 aa, unidentified
MQITTIGLDLAKSIFQVHGVDATGQVVVRKSLRRSQMLAFFTKLPPCLVGIEACGTSHHWARELIKLGHEVRLMPPAYVKAYVKRGKTDAADAEAVCEAVARPTMRFVPVKSPQQQAALSMHRTRDLLVKQRTQLINMIRNLLAEFGVDIPKGLERALLMARQIVDGKAPDVPIEAAKILGTLSQQVLTTHVRLREIDRDLAVLLRGNEVARRLMTIPGIGPVGATALAASVTDPHQFRSGRQFAAWLGLTPLQKSSGGKERLGRITKMGDKYLRKLLIVGMTSLVRRAKYNPGKIDPRLADLLTRKPTRVATVAMANKTARIIWAIMARGETYRAGHRPTLAA

SEQ ID NO: 143056 - protein, 459 aa, unidentified
MAQRKPKSSRSKPTLPPQLAAVNLHAAGIDIGAEAHWVAVPPSDDLQPVRCFGACTADLEALADWLATCGITTIALESTGVYWIPLFELLETRGFAVLLVDPQQVQKIKGRPKSDRHDCQWIQRLHTFGLLAGAFRPADQICVLRSYLRQRAMLLTSAAQHIQHMQKALTQMNLKLQHVVSDITGVTGLAILRAILAGERDPAKLAQLRDYRCKHDEATIARALQGTWRDEHLFALAQAVALYDVYHQKITECDQHIEAYLQTFADRSDGQPLPPPARPRKRGGNQPAFAVREPLHRISGVDLTQIEGIDETTSLVILSEIGLDMSRWPTVKHFTSWLGLCPHHRVSGGKVLSRRTKPCANRAATALRLAAACLHHSQSALGAFFRRMKARLGTPKAITATAHKLARLVYSMLKHGTAYVRQGMEEYEQQYRDRMVQNMTRRAKALGYTLVKATEGTPV

SEQ ID NO: 143057 - protein, 410 aa, unidentified
MRRISNRVAGLDVHRDSVTACVEIFDGVEVSVIKERFSTTVKGVRGLGEWLADADGELVVMESTGVYWKPVFYGLEGRFDDMWLVNAHHVKNVPGRKTDMSDAEWLADVAAHGMVRASMVPEPEIRALRELTRYRKTQIVARGVEMQRLEKVLQDAGIKLTSVASKVWSKSSRAMIEMLISGQVDPEVLAELAKGRMRPKIPALVEALEGRWGRQHSVVAKAIIAHIDFLDTTIDELSDEIVEATRPFDELVRLWSTIPGVSTRTAEMMVAEIGADMGRFPSAKHLAAWAGLAPASHESAGKRRPAGTRQGSRHLQGALVEAARAAARTKGTFLSERYKRIARRRGPNKAAVAIAHSMLVAAYHMAITGEIYRDLGSGYYDNRKDPKAKVNRHVKELQAAGYTVNLTPAA

SEQ ID NO: 143058 - protein, 356 aa, unidentified
MDTVTATDVIVGVDTHKHTHAAVALNGLGAQLGTTTIPVSRKGYHELEVWARSFGCVRAFGIEGTGSYGAGLSRALLARGHTVVEVNRPNRQLRHQHGKSDPLDAESAARAVLAGQATACPKSGTSTVEMIRQIKIVRDTAVKSRARAMITLKTLIVNAPAALREQLDCLGGRIALVRHLVSLRPGPMTSTTASTKAALRALARRWLMLDAEIKQHDAALDALTDACAPGLKAAHGIATGTAAEMLILVGDNPERIRSEAAFAKLCGACPVPASSGKTTRHRLNRGGNRQANAALYRVVIVRLRSHPPTLAYLRKRLAEGLTKREIIRCLKRFVAREIFAHLCGRHRRAASLLVAT

SEQ ID NO: 143059 - protein, 346 aa, unidentified
MEHYVGLDVSLKLTSICIVDRTGKVEREGVVASDPEAIATFIKLHATHVVRIGLETGATSTWLWTELNKIGLPVICIDARHAKAVLKMQINKSDRNDAAGIARIMQCGWYKEVCVKDLDSHATKALLVSRALLVKIKRDIENQIRGLLKNLGLVIGRAKMNMFAVRAAQLAEDRSELFAVVDPLLKAREAVEQQILDLDRKVLRLARNNAQVRRFMTAPGVGPVTALCFLATIDAPARFKRSRSVGAYAGLTTRRYASGEIAWTGRISKCGDKMLRSYLYEAANVLLTRVAKWSALKAWGIRLAKRSGLRKAKVAVARKLAVILHRMWIDGTEFKWSSKDAADQPV

SEQ ID NO: 143060 - protein, 347 aa, unidentified
MLADEVDYVIGVDTHRDEHAVAVVDAIGGIVMEAVTAATDAAFARLLERLEADAPGRRVWAIEGSGSYGAGLVRFLGDRGERVLEVHRLTRDRRSHAKTDAIDAVRAARTALSRDLQATPRIGGGREALRVLVATRRAAVDSRRVALQQLRAFLVTAPDPLRRELSQLTEARLLARCARLRLQARHDRAGRALILALRTCAQRALQARDETDMLDEEITSLVDELAPGLRDEPGVGPISAAQLLIAWSHPGRIRSEAAFARIAGTAPIPATTGRSVRHRLDRGGDRQLNRALHTIVLSRRQRQHPATIAYIQRRLAEGKTTREATRCLKRYTARHLYRRLNAIAAAP

SEQ ID NO: 143061 - protein, 351 aa, unidentified
MMLLGVDYHPSFQTIAFLIEETGEYDERELSHSNGEAEKFYRDLKQQGISVRVGMEATGYSRWFERLLAELGFELWIGDPAEIKAKRVKKQKYDREDARLLLRLMRENNFPQIWVPSAENRDLRQLLWHRHRLVQMRTRIMNQLQALAMNEGKRLKKKLWSEQGRAVLEKLALGPWASRRRQELLELLDRMNPKIDELTAAVEREAKKRPDALRLMSHPGVGPITALAYVLIIGTPARFPRGKQIGTYVGMIPSEGSSGGKQRLGHISKQGSSLLRFLLVEAAQAAARIDPDWRRRYIHLAMRRHKNIAKVAMGRRMAIQLYWMWRNGCEHSQSGKCGSYVGQLGTGHGGK

SEQ ID NO: 143062 - protein, 413 aa, unidentified
MSNPYAAFVGIDLGSESHQLCVIDAQGNILGREHIEHSGAALAQMLTRLSDLTGAAAPESIAVALEAPRGAVIDVLLERGYATFSINPKQLDRFRDRYSVAGAKDDSRDAYVLANSLRTDLPHYRLLKPDHPLIVRLRELSRAEDALKQDWRRGANQLWSFLQRYFPGLLRLSPAADEMWLFELLEKTQGLPSQAVRWSRKRWDALLQSHRIQRFSAEQLQQQLQQPLLLAAGVELALAEQVLLLLPRLRLLHQQLSDLAKRIDLVLEEMAQQENFPEHRSVQILRSIPGVGRVFTATVFSEATAPLLERDYHGLRALAGIAPVTQQSGKTKIVSMRRACNGRLRNAVLHAANIHVQKDARAKQTYARLRAQGNSHARALRGAADRLLDLICILLRSHQRYDPQRRLCPIAVA

SEQ ID NO: 143063 - protein, 484 aa, unidentified
MHLQITNKLTLAFDAFRFSFESAGALELPNEYSGLATEAAPILPSQSSGMHVPLHKLAQWSGMMNQLTDTQYTAYVGIDWAAAKHDICVQAADDGRREFACISSQPEGIETWAQDLYRRFGGPIAVALELSKGPIVSALQKYDFFVLYPINPSTLAKYREAFTPSGAKDDPTDAELAVDLMTRHPERFSPLKPQSVDMRKLIGLVEQRDKFVSDQGRLVNRLGHALKQYYPQVLEWFSEHNTVVFCDFLSQWPTLNQAKRARKASLERFFRSHHVNSAELIERRITAIKSAMPLTLDAAVIEPHRLQVEILVEQLRITIKALKRFDDEIAVTANKLPDYDLLFSPLPGAAKVLAPRLLAAFGEDRQRYPQADALQKYSGIAPVTKRSGKTTWVHWRWQCPTFVRQTFVDWAAQTINKSAWAGAYYRQQRAKGCSYHVAVRALAFKWIRILHRCWQDRIPYDESKYLEALRRKGSPLLKYLAEAA

SEQ ID NO: 143064 - protein, 444 aa, unidentified
MAGSGMILIREVADAPVIMGISKPAGLKSPRGEVKSVNPLFVGIDVSSKNNVAYLMKPDGSKHSSFSVQNNLGGAKLLSERIVSALSSMRLSDVVIGLEATSIYGDNLVYALREDGGLGRFRRKIHVLNPKQVKKFKEAYPDLPKNDWVDAFVIADHLRFGRIAKEVYMDDYRYQALRTLTRARFDVIQNLTREKQRFANYLFLKCSGMAQDKGIQNTSATTIALMERFETVDNLANADLDDLTAFVAETGRGRFADPESTAKAVQAAARGSYRLPKTVNDTVNQAMAVSIASMRALKEQVKVLDKAIEQQFEIIPNTLTSIPGVGKVYSAGIIAEIGDIHRFASQASVAKFAGLVWTQHQSGEFEAEHSRMIKSGNRYLRYYLLEAANSVRRCDSEFRRYYDLKFKEVNKYQHKRALALTARKLVRLVFRLLKDNRLYIPPEG

SEQ ID NO: 143065 - protein, 368 aa, unidentified
MPNLNIGVVTSGAHIRQSAVVTPLALVIKLGIDVHAKDYVVVRQVDEAVSQPAQRFNLEGLLGFARRQVAVAQSVHSCYEAGPFGYVLHRQLSALGVHNLVVRPRDWSTYGERVKTDQRDASALCSCLDRHLAGNQGALAVVRVPSEAEEQARAIARQRQSLVRERVRLTLQGKSAALLRGHQLRGEWWRVSTLTKLAPDLPPELLTLLQRWQQVILLLDAQAQALTEQLEQAAPPELPCGLGSMTWEILSREVGDWHRFRNRRQVASYTGLCPGEHSSGASRQQGSITRHGNPRLRHLLIEAVWRLLRYNPEYRGIAKWRDQFTAVRVTQARKKKIVVAIARQLAVDLWRLGTGRTTPAALGLQIPS

SEQ ID NO: 143066 - protein, 347 aa, unidentified
MLADELDYVIGVDPHRDTHALAVVDVRSGGVVFEATAVADGEGYAYVLRLADQHAPGRRAFAVEGTGSFGAGLARFFVSHEQRVLEVGRLRRERQSGKSDALDAIRAARSVLGQTRPAGPRAGGEREALRALSAAREGAVTARRAGLCQLRGLLVSAPDPLRAELRSLTRARLLRRLAAVRPERCQDPELRGTLLALRALARRVTALTAEERELAREIETLTRKLAPQLLEQPGVGPLAAAQVLISWSHRGRIRSEAAFARLAGCAPIPASSGQTVRYCLDRSGDRRLNRALHMILVTRRRAHPPTIAYINRRIQEGKSRREATRCLKRYLARNLFRLLENGAPLQT

SEQ ID NO: 143067 - protein, 366 aa, unidentified
MKKSSTVRVNGNMIFKGHKLMIGLDLGDRWSFYCVLDEAGKIILEQKVATTPEAVKQAFAKIPRSLIALETGTHSPWVSRLLTELGYKVIVAHAQKVQLITKSSRKDDRHDARTLARLARIDPELLGPVRHRSAQAQIHLTVIRARAELVRARTALVNAARGLVKSYGQRLPKCGTQQVSRELGAGLHAELREVLEPLLKEIESLNECIQEYEVRMEKIAKESYPQVELLKQVKGVGTQIALTYVLTLEDPHRFPKSREVGCFLGLRPGRRDSGESQPQMHISKEGDRYLRTMLVQGAHYILGPFGADSDLRRWGLKLAARGGKSAKKRAVVAVARKLAVLLHRLWVSGKVYEPLRNNQKVIPAAA

SEQ ID NO: 143068 - protein, 438 aa, unidentified
MSDKVIFNLDELFISVGIDVGADFSWMSIALPNQQFVGKPYKILHNSMNSLAAAVSKIKEAEELYSLESRIFLESTGIYHYPLFCYLRDKGFNCSVINPIITKNSTNINIRKVHNDRFDSKKAALVGLKSDLKVSLMPSDLALNCRNLCREYYDLMDCRSAYVNKLQGELRMAFPQYLGIFSKVTINTSLTLLEAYTSPSAFIEADKQEIIDIIKSTARFGLTYAQDKYHAIIKAANEANEFGYIIESNIKRIRLYISFIRKYDEEINGILESMRELINANEGTDFVKQIHLIETFKGAGFLSAVSLMGEIGDFSAFSKPKQLFAYFGLDPAVKQSGKFEGTKIQMSKRGSAIARRVIHTLTLQSISVSRTGEAKNPVLRDYYLKKCGAKPKLVAMGAVSHKVCNMIFAILRDNKPFKVITPQEHMKQYNAAKCDTAA

SEQ ID NO: 143069 - protein, 377 aa, unidentified
MSKLRFVGLDVHAETIAVAVAETAGEIRSLGVIPNRLESVRKLIQKLGPVQNLRACYEAGPTGYVLYWQLTQMGVACEVIAPSLIPTKAGDRVKTDRRDAEKLVRCYRVGELTPVWVPDADHEALRDLVRAREAAKKDQLRHRHRLGKFLLRHGKRPTDAGKAWTQKYLNWIRIHVHFEQPALEAALQHYREEVDHIAERLAQLEQAIDEAVKQAPPEIRAVIEALQALRGVAQTTAATVVAELGSLSRFASPSQLMGYSGLVSREHSSGNRVQRGAITKSGNAHLRRVLVEAAWAYRHRPNVQGQVLRRQKSLALSEEAKQIAWKAQQRLHKRFTRLTARDKQNNVVAVAIARELLGFMWAIAVHTEAQHKQAKAA

SEQ ID NO: 143070 - protein, 365 aa, unidentified
MNFIGVDLHKKVISVCVIVQEGRSRKVLERATLACADTGSIVRFFRRWRPFQMAVEATASYEWFVQLVEPLAERVVLVHPKKLRVIAESKHKSDKLDAFVIAEFLALDMLPEAFRPTARQREHRTLVRQRAYVQRRITSAKNKLRHVLARYNADVRGLFSAAGRQYLAEFALSAADRFLAEQLLEELSQHQARLKAADRQLRAFAKAAPIAEREARDVLDSVPCVGPVTIEVVLSELGDVRRFRSAKQVTSYAGLAPGQRASAGHRQALGITKEGSRLLRWALVETAWRLVVKTRRWGLVYEQLQRRTGAKKAIVAVARRVLCVLTALLRSGQKYRLASDEMPPPMVRPASRRAVLGLAAQAGLA

SEQ ID NO: 143071 - protein, 508 aa, unidentified
MRSLLQGWNPVEWSTCRNVSPIRVEGRPIRLGPLPDEPQRRPRPDVADNLATVEVELPELSLMLGVKVPRLVLLVVHPNDDAEEDRDDGHAASIPSSVRSVGLDSMAVRARDLPHVVIVDYAELMKASRRATHQRRQVMERPSMFVGMDVHKESIDISLAEGGRLGEVRHYGVIAGDLEALAKVVRVLRAPDRVLHFVYEAGPCGFGIHRYLTAQGEDCAVVNPSSVPKRSGDRIKTDRRNGEALARLHRAGELTAIYIPTTDDEALRDLVRAREDGVTLSTQAKHRLKAFLLRQGRRYPGRAGWTQPYRRWLADLSFPLAPQHIALQEYRDTIDEAERRVERLTDQLRQLTPAWRWAPVVDALQALRGVSFVTAVGLVVEIGDIRRFTHPRHLMAYLGLVPSERSSGPSVRRGGITKAGNPHARRLLAEAAWAYQGAPRVGRRMLDRQEAFPTSIRAIAWKAQLRLTSRFRRLVARGKAKPKVATAVARELTGFIWAIAWEVPAPAA

SEQ ID NO: 143072 - protein, 423 aa, unidentified
MDVMYERVAGLDVHKETIVACVRITAGGKVSRECRTFETTTAGLEALLGWLTESECTHVAMEATGVYWKPVWNILSEGKFELMVANAAHIKNVPGRKTDMNDAMWIADLLACGLIRASFVPEQEIQELRSLLRTRKQLTHEQTRHVQRTQKTLEEANIKLDSVISDIMGVTGRRMIEAMIEGQRNPFKLAELADRRIKASRKELYDALHGRLTDHHRFMLRLHLRQYDALAGAIDEIDQEIDAAIARMDAEVVAGQATFCSLIALLCTIPGVSELSALTILAEIGTDMGRFPTAGHLVSWAGLCPGQNESAGKRKSSRLRKSAPWLKTTMVQCAWAATRKKDSYYRAQFNRLRGKHGQKKAICAVAASMLTAVYHMLQDGTHHQDLGANHFDIRSTEIRAKRLAAQIAKLGFAVELRPMAEAA

SEQ ID NO: 143073 - protein, 338 aa, unidentified
MSLYAAIDLHSSNSVLAVMDGDGKPVLRCRRPNDLPRLLSDLAPYRDELVGVAVESTYNWYWLVDGLMDHGYAVHLVNTTAIPQYDGLKHGDDDSDALHLAQLMRLGLLPEGHIYSREQRGTRDLLRRRFSLVRQAARLMLSIQSSFSRSTGKQLSVNKLRQLSPSQLVDLFPELSTRYGVLIQFKLWLTLQDQIKALETWIRKDLARPDLLVRLQSVPGIGPILGMTILLESGAIERFESVGDYASYCRMVESVRLSNGKRKGHGNRKCGNRYLCWAFMEAANYAVRFDPLIRRWYERKRARKHRVVAIKAVAHKLARACYHMLHEGTTFDLARAFG

SEQ ID NO: 143074 - protein, 366 aa, unidentified
MKKSSTLAIEGIEIFKPNQLTIGLDLGDRTSRYCILKEAGEIILEQELATTPKGFEQVFRKIPRSRIALETGTHSPWVSRQLTELGHEVIVAHARNVQLISQSTRKDDRLDARTLARLARIDPSLLGPVRHRSAKAQIHLTVIRARAVLVSARTALVNAARGLTKSYGARLPKCGTEQMNREITKNLKPELREALEPLLAEIESLNARIAEYDTRIEQMAKQVYPEVARLKQVKGVGPLIALTYVLTLDNPHRFRRSRDVGCFVGLRPGRRNSGMSEPQLHISKEGDRYLRTLLVQGAHYILGPFGQDSDLRRWGLKLSERGGKNAKKRAVVAVARKLAVLLHKLWVSKEVYEPLRNNRQAMAQVA

SEQ ID NO: 143075 - protein, 448 aa, unidentified
MDEHDFTLGVDLACSAAHVATLADTAGRLVWSNHRFRTATVELERLWAKVPAGARLQLVIEPTRNAWVPLAAWFRARGVTVILVPPEQSADLRRYYQKHTKNDRLDSVLLARLPLLHPNGLNVCHDLGPADPLRRTVRRRAKLVRQRITSLNRLTALLELLGPGYNDAFSGALATKTAQAVLSRYADPRKLLRTPATRLVQVVSQASRGQHGPILVNQLRGAAAEAMALYGMAGVDFAELAADIEAEMRSITTLQAELDQLDTRIQRLYLDADPDQIVQTAPGVGPVLAPAIHGLFGDPHRFANLAAARAFTGLVPDTNESGISQAPARPTKAGDPGLRTALFLAANLARQTDPTLAAKYRRLVVQRRLHHNFAVCHLAAILATRIVACLRAGTPYQIHGLHGHAITAAQGRVLCQELRVQPHERPRPPRRQQKAGQATSEVAQRLTA

SEQ ID NO: 143076 - protein, 346 aa, unidentified
MLYCGLDLSRKRTDFHVLDRSGVVVEAGAVGADADALAGLARRLGVYELQVRATVESMNGARFVHDELERHGWEVLVADAAKVRGLAPLACKTDKIDARVLAELTCRDLVPAIWLPDPDVRGARERARFRLHLVRHRISLKNRIHQTLVTHGVPCPVSDLFGHAGRQKLERMQLPEPWAGTVQASLRLLDELAVEIDQIERELRVLGADHRYVPLLTRVPGIAWVLGYTIAAEIGDIDRFASPKKLAGYSGLCPRVYQSGNSDRRGPITKTGPKYLRWALIEATSHACRHPAYAARYQHTKIRLGRQRGPKVAQVDLARRLSEAIWYMLTRNQPFAPAGATEVLAA

SEQ ID NO: 143077 - protein, 365 aa, unidentified
MREASVTSERMSVGLDVHARSVVGAALDGVTGAVLQRRLTPDPAEVLAWVRSLPGPVRVTYEAGPTGFRLARVLAVAGVECVVAAPSKLQRPSGDRIKTDQRDALHLAKLLKLGEIVQVRVLSVEQESARDLVRAREDVRGDLMRSRHRLSKLLLRQGIVYSGGRPWTGAHDLWLRRQQLDGVGLRLAFESAYESMLFTVSRRERLDAAIEAMAASSEFTDVVHRLSCLRGVSVLTGFGLAVEVGDWHRFTGSTIGAYLGLVPTEHSSGSSRSQGSITKTGNAHARRLLVEAAWHHRKTYRTPGAAMRTRWELAPPAARTRGHEGNRRLHQRWQTFTDRKKKPVVANVAIARELAGWCWSLATLE

SEQ ID NO: 143078 - protein, 409 aa, unidentified
MRYYLGVDWADQTHAVWVVEERGTKVAMRTVPHTAEGLSEWGRELDEWRAQGIELWAAIERPEGRVVDFLLDHGVVVYPVNPKALDRARDRFRQSEAKSDPFDARVLADFLRTDHLHLHALQPSSEAAQELKLLTDDYQRQIRQQTRLVNQLTTTLKAYYPRGLEVAELTTALARAFLQAYPTPAALTALTERQWQRWARAHRLSEARTRELWAVLQRPQLPVPAHVVRAKARLMQSLVAQLALVVEVVGAYREAIEDFFARIPAAQWIRTLPIGDHGITAPTLWARLGDAPGRWESFRHLQAQAGTVPVTIRSGKQRVVRFRFACDKSLRYVIDHVAFLSLRWSEWARAYYDAQRARGHSYRQALRALSAKWLKIIFVMWERHVPYDEQYHLATMTRQQLRRRQKQLA

SEQ ID NO: 143079 - protein, 325 aa, unidentified
MIEYQNYIGIDIGKFNFVVAVYNRSVTKEYENTADGIAKFLNDYKAILSNSLIVMEPTGGYETELLYILCDRNYATHRADTRKVKKFIESYGNGAKTDVLDAKALAHYGQERGKTLTLFLPQSMKSLELFRLAQRRNDLNKMLVAEKNRFKLPSSKTIQISCKNMVKVLSKQISAITEQIKVIIDADPILKEKQKILKTIPGIGNIIGSELLILLPELGGQMTRRTIASLAGLAPRAKDSGKFKGYRRTGHGRSGIKPLLFLAAMAARNSKSHLKEFYEKLLARGKKKMVALTALMRKILVIANAKLKALASIKGGSEAMEVPCC

SEQ ID NO: 143080 - protein, 429 aa, unidentified
MHRKKSKANRSKSTNFQALPVINADAAGIDVGAKEHLVAVPCARDPQPVRTFQAFTPELHELAGWLKRCGIKSVALESTGIYWISLYEVLEQYGFEVRVVNARHVKHVPGRSKTDVLDCQWIQKLHSFGLLNGSFRPDHQIRKLRTYMRLRDNLVASHIEAVHHMQKALFEMNVQLTNVISDITGETGLHIVRAIIAGERDPKELAALCSSRIKAPRETVAKSLHGNWDEALLHCLKSALECYEFIERQIQECDLCVHRQLSQMDARAPLPKPAVTLKAQLHRVCGVDLTKIPGIKEQAAQVIISEVGLDMANWNTEKQFCSFLGLCPDNSVSGGKVLRRATRKVYNRAADVLRLCAQSLTHSKSALGAKYRRLRARLGAPKAIVAMAHHLARRDIVKCCVSETGASLFKCLTKRPVGFVLRRRRNGHR

SEQ ID NO: 143081 - protein, 337 aa, unidentified
MKEITTAGLDLAKNVFHVVGLDGKGREVERKMLRRAQVAVWFANLPPCLIGMEACAGAHEWARRLRALGHEVRLIAPQYVKAYVRGNKNDYNDARAIAEAVVRPQRFVAIKTVEQQDVQALQRMRSAAVAERTALCNRLRGLLAEYGIVLPQGVARLRRRIPELLEDGKTALSPLFRQLLEHGYRQLQEADLHIAFHTRLIEQRAREDEAERRLQTIPGFGPVTASAFHAHLGNGCAYRRGRDVSASLGLVPRQHSTGGKPVLLGISKRGDAHLRSLLVHAARAVLRLAHRKTDRLSRWAVKVKAERGANKAAVALANKLARIGWSVLRHGTIYQAA

SEQ ID NO: 143082 - protein, 346 aa, unidentified
MHATTVAVDLAKTVFELAFANAQWHIVARQRLNRRQFARFLAQQPATHLVMEACGTAHYWGRVAQQHGHTVSLLPAGYVRPYVRRNKTDRTDADALLEAVRSGEIPCVPVKNVTQQALVGVHRVREQWMTTRTARINVLRGLLREQGILLPASARGAVQAVPSVLDDTDAPLPAPLRHALRLVYEEVRDLEDRIEQLEAELKTLADTDPVIVRLRSIPGIGLLTSTALVGTVGHIHAFRRARQFASWLGLTPREHSSGPRRRLGGISKRGDVYLRCLLTHGARAVLHAAHRRATAAQPLTRLQQWALNLQERRGHNKATIAVANKLGRVVWAVWHRDLPFADAPAV

SEQ ID NO: 143083 - protein, 339 aa, unidentified
MKYTPVGVDIAKHVIQIHFINEHTGEVVDKQLRRQDFLTFFGNREPCLIGMEACGGSQHWARELTKLGHKVRLLQARFVKAFVMGNKNDVMDARAIWMAVQQPGKEIAVKTEEQQSVLVLHRTRMQLVKFRTAQINALHGTLLEFGETIHKGRAAMEREFPEALERMKERLPPYLITVLENQYNRLNELDSLIEDIEKQLTSVARQNETCKRLLDIPGVGPLIATAAVATMGEASAFKSGREFAAYVGLVPKQTGSGGKVRLLGISKRGDTYLRTLFIHGARAVALVAKEPGPWITELKKRRPASVAIVAMANKLARTVWAITAHDRKYDRNHVSIRPY

SEQ ID NO: 143084 - protein, 343 aa, unidentified
MEYYVGLDVSLKQTSICVVDQSGSVVREGVVDSDPEAISVYVRSKVPGAVRIGLETGPTSTWLWTELKRLGLPVICIDARHAKAVLKMQINKSDRNDAIGIARIMQTGWFKEVHVKDIDSHTVRALLASRALLVKIKRDLENHVRGLLKNLGLVIGRATFNVFAVRAEELIEGRPELIAAIRPLLEARNAVEQQVSELDRKVMKLARHDAQVRRFMTVPGVGPITGLAFKATIDDPARFARSRSVGAYVGLTCRRHASGEVDWSGRISKCGDAMLRSYLFEAAGVLLTRVPKWSAVKAWGVKLVKRNGLRKAKVAVARKLAVILHRMWVDGTEFNWSKKEIAA

SEQ ID NO: 143085 - protein, 267 aa, unidentified
MMDNTLPPLGIDVSKLTLDARLLSQHRPAPARRFANSPDGQTLLAQWLESQGINRVHACLEATGTYSDAIATFLFEHGHQVSVVNPARVTAFRLSEGIRTKTDRHDALVLARFCEQKRPALWRPTPAEIQRLQGLLGRLDDLQLTVQQERNRFENLRLDAQIRQEIAAHVSWLQQQRERTLQCAITHVQQSPHLQQACDRLDSIPGIACLTAMRLYSVYFDQHRFRGAPQLVAYAGLCPAQRLSGTSVHGKPPSRWQAMLRCVNGST

SEQ ID NO: 143086 - protein, 445 aa, unidentified
MHYKRLLALIDSVSSHLSVGLDVGADFTWMSIALPNGSFTGKPFKIVHSDPGSRDLAVAKIKEAQETYSLKSRCFLESTGIYHIPLLCFLRDKGFDCSVINPIITKNSTNINIRKLHNDKFDSKKAALVGLNVSLKTSIIPDDSVVDLRNLVRDYYYFKDLQSAVALKLTAELKVSFPAYAKVFSKITTQSSLKLLSAYPLAKDMLAASKDDIVEIIRSTARFGEAYALRKYNAIIAAAQDAAVFGRALPSNAVRIRLYIDTYQEYQKHLDALLKALHETVDRLQDTLVYDQICLLQSLRGIGFLSAVVLIAEMGDFKLFSSPKKLYAYFGLDPAVKQSGKLNGDKVHMSKRGSSLARRVLHMAALNNVKVDKRSGTPVNPVVYDYYARKCSGKKKPVAMGAVMHKICNIIFAMLRDNKPFEVIPPEEHCRRFAAEHPDKIRKAA

SEQ ID NO: 143087 - protein, 409 aa, unidentified
MRIIGLDIHRAFAEAVAWDEGKLKRLGRVDMRRPLLEAFAKKLSKEDVVVVEATGNAASVAAVIAPHVKKVVIANPKQVRVIAHAKIKTDTIDASVLAQLYASGFLPEVWIPDEPTQALRRQVTRRNQIVRQRSRLKNIIQSIPHSHLIPSCPHADLCGASGRAWLFHQVLPEDERLAVERHLREFDRLGEDLKVIERDLARSALRDEGVKRLMTIPGVDMVVALAIVAAIGDVGRFEQSQKLVSYLGLNPSVRQSGPGPAYHGRITKQGRGHARGMLVEAAWAAARAPGPLRAFFLRVRARRGQHVAAVATARKLAVLIRHLLSKGESYVWARPALHARKLRDLELKAGYKAERGQRGAAHAYNIKSHRDQERRWVEQAETAYARFVAGWNPRGPKQARTGAATEGRR

SEQ ID NO: 143088 - protein, 420 aa, unidentified
MNTSVSLQIGIDWADQKHDYCLCPYSGSPSEATSRREFGVVASSPAKLHAWIARLRERFPVGIIEVCVELTRGQLINALKEYEFIRIFPLNPISSSRFRECLYPSATKDDVKDAGLLLSILQKHRDHLRELSIESANCRLLDGLVQARRTSVDQQTVLVQKLTSNLKEYYPQALGMIGDLSERMSRRFLKKWPSWEELKSVRAQTLRKFYYANQSRSEKCIQERLDLQRASRALCADTTTLELGRMQTLSLIEQLETIDKIIREYDKRIGVAYQQHERFVIIDSLPGAGKVMGPRLICAMQANLPQCRNATELSSYSGIAPLRQKSGNSSRISKRFRRPKFLHQTFIEWAKCSVKYSKWAKAFYEHRRHTLGHEYWAIIRALALKWIRILYKCWESNTEYDEEKYIQTLKKRGSKLAGMI

SEQ ID NO: 143089 - protein, 391 aa, unidentified
MDNAWAGIDAGKEFHWARVVGIEGETLLSRKVENDEADLRKLIGEVLPLAEEITWATDQPGGTAALLLALLWERNQKVIYIPGLTVDRARDTYRGESKTDAQDAYVIADQARMRGDLSELQANEGELAELQLLISRRRDLVTDRSRTITRLREALLALFPALERTLDLNNSSALTLVAHYQTPTALRRAGYKRVATYLKNRGIKRADTLAKKALAAAESQSAVLPAQDVASAIVAELAREALVLKQRIERVDEELKHRFFIRPEASILTSLPGMGPVLGAEFLVAAGDLSAFSSADQLAAYAGLVPAAHDSGKRAGNDHRMRGGNKVLKRAFYQSTFASLRTSPVSRAYYDRKRREGKRHTQAVIALARRRVNVLWAMLRDGTTYKAPSAA

SEQ ID NO: 143090 - protein, 428 aa, unidentified
MKRKAAVCLPFILTRGLLWFLPEQSRTNGRDTRVPEALQCKQFELANTPMKTELYVGLDVDKEWIVTAVAEWGRNGPVHDLGAISNDLHALEKLLARLRKRYGPDVRICACYEAGPWGFGIARRLHQLGVECTVVAPSLTPTRSGDRLKTDKRDARKLARLLRAGELTEIYIPEPTDEALRDLCRARSDAVDDRRRSRHRLKAFLLRHGYRYEGKSAWSAAHERYLRELVLPHPAMKVILEEYLISVQLASERIARTEAAMSDLLGKWRLEPAVRALMAMKGFQTVAAMIVVSELGALDRFTHPRQVMAYLGLVPSEKSSSDRRRQGSITKCGNAHARWLLVECAQHYAAPPKVSKELSRRQQNQSRAVRLISWKAQNRLHQRYVRLMARRLQRNKVIVAVARELCGFIWELLRSQECYHAPCPSGMN

SEQ ID NO: 143091 - protein, 409 aa, unidentified
MDVIHPKCAGLDVHKDSVVACARIGTGPKIAREVKTFGTTTRDLLALSDWLTAQGCTHVAMEATGVYWKPVWHVLEGSFELILANAMHVRNIPGRKTDVNDATWIADLLAHGLIRSSFVPAAPLHELRDLTRTRTQLVREKARHILRIPKTLETANLKLASVLADILGVTGRRLLDALAAGESDPDRLADLAHDHRLKASRAEFVEALHGRMTPHHCFMLALHLRQIDALDTAVRELEARLEDALGPFRPALARLTTIRGIGDTAAHVLIAEIGIDMSHFPTAGHLISWAGLCPRLHESAGKRRSTRTRHGNRWLKTTLVQAAWGAVRHPHGGYLRAQFVRLRSRRGPKKAIVAVAASILTAAYHVLRDGVEYRDLGADYFDRRDKAKLANRLIARLHDLGLRVEVRAA

SEQ ID NO: 143092 - protein, 355 aa, unidentified
MTVTIVEEACPVTCRAAVTGGVDTHADTHVAAALDPVGGLLGVAEFPATTAGYARLLGWLGGFGTVCLVGVEGTGSYGAGLARYVTAAGIRVVEVDRSDRQDRRRQGKSDPLDAVSAARAAQSGRASGAPKGRDGAVEAIRTLMVARRSAAGERTRTINQARALVLTGPDDLRARFAKHKPAALITGLAALRPRPGDVAGHATRIALRELGRRAQFLDGQLVRLDELIVPLVTARAPGLLAVYGAGPRTAALLLIAAGDHPERLRSEAAWAHLCGVAPIPASSGKVTRHRLNPGGDRQANHALWRIVFTRLGSDAPTRAYAERRTAEGKSKAEIIRCLKRYVAREVYRQLRPAVG

SEQ ID NO: 143093 - protein, 436 aa, unidentified
MRQQNISTPSTPPVYAAFVGLDWGDEKHALSLCAAGATVIERTTLPQTPEALADWANVLRSRFPSGKIALCLEQARGALLAGLMQYEHIVPYPVNPKTLARFRQALYPSRSKDDPIDADLLLDLLLKHREHLRAWQPDTVQTRQLALLNEQRRHFVDHRTALTNELLSHLKAIFPQALELVGQSLASRLATDFLKKWPTLQAVQKVKPAVLRQFYYGHNSRSQELITGRLERVKNAVALTSDPALLAVHSLAIQTLAGQLQALRPFLDQHEQQIAELFAAHPDAALFDSLPGAGSALAPRLLAALGSDRSRFPDALSIQCYSGIAPVTERSGKTQYWVHLRWSCPKFMRQSWHEFANCSLKFSTWARACYQDLNKRMDHHEAIRKLAYKWQRIVWRMWQERQPYDETRYLRSLQKRGLKSTPTWCPNPSPLPVNKK

SEQ ID NO: 143094 - protein, 348 aa, unidentified
MQVYVGIDVHKAKWVVSITTETFFYKTISVEPKAEALIAYLEHHFKGCTIHCTYEAGFSGFGLQRALRHEGMNCIVVNASDVAISQKDAVQKSDRSDSRNLCFQLRSGNLTGIYVPSQQQEQLRSLFRQRNTVVKLLREAKVLIRAQLAYYGIALPTQYDNTIWSKQKLQWIKERTWNYSTGRESLHSKLRLYEFAYRELLHISNELRAYVRKTYKTDYYLLRTVPGIGPLTAIALLSEVGDLRRFPSANHLCSYVGLVPSIYSSSDTVISRGLTPRSKNLLRSYLVEAAWQAVRTNMELQGYYLSHKGKPANKRIVKVARKLLLRARAVLVSGVPYKTDIVLTEKAL

SEQ ID NO: 143095 - protein, 352 aa, unidentified
MTVTIVERPAHPRVITGGVDTHAEVHVAAALDPVGGLLGVQEFPATPAGYAQLLGWLGGFGAVCLVGVEGTGSYGAGLARHITAAGVRVVEVDRADRQDRRRQGKSDPLDAVSAARAAQSGRAAGAPKGRDGAVEAIRALMVAKRSARAGRTQTINQARALVLTGPDDLRIRFCAHTPAGLVAELAALRPRPGAPVGYPTRMALRELGRRAVFLDAQLQRLDELIVPLVTARAPGLLALYGVGADTAAMLLIAAGDHPERLRSEAAWAHLCATAPIPASSGKVTRHRLNPGGDRQANHALWRIVFTRMGSHPATRAYVARRAKEGLSKKEIIRCLKRYVAREVYPHLRPGAG

SEQ ID NO: 143096 - protein, 366 aa, unidentified
MKKASIIGLDLAKRSFQAHGALADGSVAFRKKLTREKVLGFLAEQPSCVVAMEACGSAHHWGRAIRDAGHEVRLIPPAYVKPFVKRQKNDAADAEAIAEAASRPTMRFVAVKTAEQQARAMLFRTRDLLVRQRTQLINALRGQLSEHGVVAPQGPANVAILAQAIDDITPSLPLLVVELARVYLDQIEGLSEKVAGLEKAIACEAKRGAMTRRLQTMPGVGPITAMAIETFAPPIEVFRRGRDFAAWLGLVPVQHSTGGKQVFGKTSKMGQRDIRRLLITGAMVIVRWACRKGAQEGTWLHRMLGRKPRMLVAIALANKMARSIWAMLTKGEDFEVLWLRPSDPRSRLSGQGNVGRVRRSKNGKGK

SEQ ID NO: 143097 - protein, 422 aa, unidentified
MKIVYPICCGVDVHKTFLVATIITSKGITPHYSKKRFSTFNNSILQFKQWLIDNNCFDMCMESTGKYWVPVHNLLEDTIHITIANPKWVRAIKGNKDDTKDSKWIGDLFRLGLVPGSYIPKKPIRILREYTRYRSKLVSCKSSEKNRFQNALTVCNVALDAVVSDMFGKSATNITDYLISSDSFDPEYCTSLLQKSLKKKASSVIESIEGYQITQEQKERIVIVRSHLNYINNSIDKLDLALDKIVKPYENTIELLCTIPGVDRQSAITIISEIGTDMSQFSNSKRLCCWAGLTPGNNESAGKKKSVRITRAGVYLKPALVQVAHAAVKSDKFPYYKTKYERIYKRRGKKRAIIAIARMILTAIYHMFTTGEEFNPCDLYKIDMPQEMQNKQKEKAVKEAVRFLIAQGVIKDSDISIQESNH

SEQ ID NO: 143098 - protein, 402 aa, unidentified
MKRVCGLDVHKDSIFCATYQGKKYGPVLEYTSLTPSIMAMGQALHSEGVESIAMESTGMYWIPVWNILEDMGFTLILVNPFLIKQMPGRKSDVKDAQWIATLLYKGLLRGSLIPCKEIRELRTYSRKYIKLQQRQTSVLQDMERTLEICGIRVTSFVSNISGKSVLNVIRQIVQGETRPESLLDSIHGRIVNTHSKKTIKESLTGFITEHHRFILELSLQEYEQMMKQSDQCLAKMYELCNVHYKKELQLLLSIPGVSDISAIIVLAETGADMNAFENSGKFSGWTGLRPRNDESAGKYKSTATTKGNRYLKAVLVQIAWAASRVKESYFKEKFNRLAMKKTKKKALIAIARKIGVVVWNILYYDQPYDPLKLPAYDPEIILSKLAYHQRESERLQKLRGTS

SEQ ID NO: 143099 - protein, 410 aa, unidentified
MSVLDVALDPATVIVAVDPGKVLNRVWVSDGSGLLAEPASLPVSREGISRLDRLLAEHHAAEPVIAVEATGSLHRSWVLELEQRHPGSVRLFAPSETKAARIQLGSGRFKTDDRDCAALTYLARQGAGRRHVEQTAVDALRAAVRHRRGLVTDKRVAQQRMHDQLNALCPGLSAPAGHGRCLPLDSPTGQAVLACAAAFAGRAPRLQSLICRAPGRLSTSTAQYWVQRWRGCLPPPADADQRARWLGRDLVRYRCLQIDIAAVDEQITGLLAATDGQVLTTLPGVGTLRAAAFAAHSLPVDRFPDAEHLYSATGLAPALYQSATLHRRGRISRQGLAEHRDALMGIAWGLSQRSPSFIERDAELRARGMAPIQARVALARHACRLAYRLLRSQQPFDEQRYRRGRLGRER

SEQ ID NO: 143100 - protein, 355 aa, unidentified
MKYYTSTTQYNCGIDLHAHQMYVCLMDREGHKLVHTNIRHNDFEFFLKLVGPYRHDLTVCAECMFGWYWLSDACQAAGLTFVLAHALYLKAIHGGKNKNDRIDSEKLAHLLRTNLIPPAYVYPAAQRPLRALLRQRILYVWRRSELLSRIQSHQLAHNRPTLRQTRPNRDPWETRLLAQEDNPIRQLALQNDLALIRHYDTQITTLEAQLQRLTRATAARDYTLLQTVPGIGEHLGLTILYETGDIQRFPTVKNFLSYCRLVKGTVASAGKIKGLRGAKLGNAYLRWAFGEAAIIAKRDPALIGPLAQRLEARMNGNKFKANTVLAIKLARAVYFMLRSHTVFDPERLVAALTHK

SEQ ID NO: 143101 - protein, 411 aa, unidentified
MRLFVGDDWAEDHHDVEVMDGSGKMLARRRLPEGVAGITQLHELIGRHLGEDADAAEVVAGIETDRGPWVAALIAAGYTVYPVNPLQASRYRERHGVSGAKSDGADAHMLADMVRTDSHQLRPAAGDSPQAEAVKVVARTHKTLIWERTRAVQRLRHQLREYFPAALAAFEDLDAPDALELLAKAPDPARAAKLTRAQIAAALKRARRRAIADKTDAILTALRSQQLGQAASLTAAYAATARSLIAVITVLNEQVKVLQRQVGEHFGRHPDAEIYRSQPGLGAILGARVLGEFGDDPHRYTSAKARKNYAATSPITRKSGKKKIVLARFIHNDRLIDALMAQAFAALTASPGARAYYDQHRASGAEHNDALRRLANRLAGILHGCLKTRTLYDEATAWSHRENLPQSGVAA

SEQ ID NO: 143102 - protein, 311 aa, unidentified
MTDDSIGIDISKDKLDCHRLRDGAFEQFPNTKAGFRNLRRWIGPDLPARVVFEPTGAYHAAFEAALADHLPLVKVNPKHARRFAQSKGQLAKTDRADARILAQMGAAHGLEPDAPVAKDRHVLRELQAARAALIKDKVRLKNQLDRQQQRLTQKLTRRRLRQVVADIAELDHAIRAQLETCPNRKRALHLIQSIKGIGAVAAMTILIEMPEIGNLRKKAVASLAGVAPITRQSGRWRGQAFIQGGRKPLRDALYLPALVAIRYNPDLKAQYQRMKAAGKPSKVAITAIMRKLLILANTLVKENREWTEIRA

SEQ ID NO: 143103 - protein, 315 aa, unidentified
MRSTVAQSVGVDISKDTLDVAIHPGGESFRITNNPEGHRALIKRLKGFDIARIVFEATGAYHRLFQQAMVEVGLPWVKVNPCQARRFAQATGKLAKTDRCDALMLARMGAVLDLEPRAPASKTVEALRELVNARDALIKDRVAALNRQAIAVSPLIKRQLAQRLRQIDGQIEAIDRRLKTLRNADSDLCQRFDILTSIPGIGEVTANVLVVETPELGRLEHAQAASLVGLAPVPRDSGQTHGKRSIRGGRPRARQALYMPALNAIRLNPEFKAKYEAMVKAGKPAKVAIVAIMRKLLILANALIRDRRKWAPANP

SEQ ID NO: 143104 - protein, 370 aa, unidentified
MRKKILYIGLDVHKKTIDAAVATGRSNGKVRSYGKINSSLDALDKLIAKLQGPGVELRFVYEAGPCGYQIHRHLSSKDSHCSVVAPSMIPKRSGDRIKTDRRDAINLVRLFRAGELTSIYVPSVDDEAIRDLIRCRDDIRRLERKARQRLLAFLLRHGYQYSGKKHWTKGFYNWLAMIKFPHPAQQITLQEYIDTTNECGERIKRITQQIQTQIEAWGRLPFVKAYQALRGVSLIVSTTVVAELGDMNRFSTPKQLMAYLGLIPSEHSSGNTVRRGSITKTGNSHVRRVLIEAAWTYKMPARVSTILLKRQQGLPKSVCDISWKAQTRLCARYRRLIARGKSRQTVITAIARELSAFMWAIDKQVQLADV

SEQ ID NO: 143105 - protein, 368 aa, unidentified
MLEQSHYKVGCDAHKHYSLFAVLDHRGKPVEQTRVNHVPGAIRAFVSRFPPGTPVALETVGNWYWIVDEIEQAGCVPLLAHAQMAKKMMGHVHKTDKLDAQGLAILQHLGSLPTVWIAPGEIRDERELPRTRMALSKVRTMLKNRMHSTLAKYALSLDTQSDIYAPKWRPQLLELICSLPDETRRCMRQELELLDQVQEQIHRLEARILERVQVTPTIQLIQSVPGPAKILSIVIDREVGSIDRFPSPHHFASYSGLVPKVKASGGKTHYGKMIKAANNYLKWAFIEAANVVVRKQHHPNWRQKYVVALFERTRQRKGHAVAVGTVARYLAEATYWVLKKGEPYREPVPQHPVGRKSAVSPKQGQVRT

SEQ ID NO: 143106 - protein, 381 aa, unidentified
MLYVGIDVAKNKHDVTVIDNTGKMVLKPITITNRKQGFELLHNTLKQLNQNCLIAMEDTGHYALNLLTFLHQKNYQIYTYNPLLIKEFTKSLSLRKTKTDKKDARTIALKLLSDPNRALFMHDNRQEELKIMTRHMNRLKKHQSDWKVQYTKCLDIIFPELHQVVTKHSDYVYELLKCFPSPEKMVTAGFNKLIEIKRLTAKHALDILKLAPDSIGTTSFARELELIEIIENIQHYEKLIKQAEKKIDELMAELNSVITTVPGISNRLGSVILSEIRNINTFNNPAQLQAFAGLEPAIYQSGQLDTRGKMVKRGSSHLRWALIQAAIKVARYSPAFKVYFRTKLAQGKHYNVAISHVAKKLIRVLFHLLQNNEASEEDKLR

SEQ ID NO: 143107 - protein, 337 aa, unidentified
MTTTSKNTTSQRESNENTFVGIDVAKNELVVHILPSNQQLTVPNSSKGIKELMTLFKQNSPQQVVLEATGGLERELLINLVANGITTTFINPRQARDLAKGLGELAKTDAVDARMLARFAQLQCLPVRPLPSQEIQEMNDLVTRRQQLIQMRTMEANRMHMARQKSIKKSIEKIIEAFDKQIDTIDVRIEQMIANNHDWNEKDKILKSVPGVGAKTSQVLISALPELGTLNRQEIAALVGVAPFCHDSGKKSGARSIKGGRADVRSALYMATFSAVRYNKTFKEFFDRLIANGKKYKVAMVAAMRKMITVLNVMIKTKTLWKESNMQMQKEEKMPDV

SEQ ID NO: 143108 - protein, 351 aa, unidentified
MPSKKDAAVVHAIGIDTGKNTLHMVGLDEKGAIVLREKVSRNRIAARLVNVPPCLIGIEAGMATHYMSRELVELGHQVKQVPPAYARPFRQGHKNDFRDAQAVAEAVQRPSTRCVPIKTDDQLDLQALHRVRSRLIGDRTAVINQMRGFLLEHGIPVRQGPRFLRQQLPQILAKCTDVLSPRMVRIIGGIVEDWNYLDERIERVTDEIEGLARTDVSCGQLMTVPGIGPIIASATVAAIGNGTAFAKGRDFAAWLGLVPKQMSTGDRTILGRITKRGNRYLRTLFVQGARAILLHPTSWAKHSFGPWLTAAARRLHRNVLVIALANKLARIALTVLVQGRRYETRIEPVAA

SEQ ID NO: 143109 - protein, 362 aa, unidentified
MRIIGCDLHARQQTLAMLDTTTGEVVEVTLKHEGDNVREFYSSLPRPVRVGIEATGSMQWFLNLMEELGIECLVGHPAQIRAAAPRKQKNDRRDAELILKMLVEGRFPAIWLPSKELQDLRALLRHRHQWVRMRTRIQNALQSIALANGLRRGTALWSHDGQSRIASLPLAPHTAYRRSELQGMYEKFEAEIEKLNQRVEEQACKRPGARLLMSHPGVGPITALATEVFLGDPARFADSKALASYVGMIPREYSSGGRQRLGGLSKQGNPLLRFLWGEAGAHAARKDPELQRFYRRKLVQKGLGKASVAVARKLGIRLWIMLRDQIEYNEFCRRGQKQQKSSDACVGMPETRYGAKSHRPID

SEQ ID NO: 143110 - protein, 357 aa, unidentified
MFFIGIDVHKKQTQICILTDKGEPRLEIRVLTMRADFSDVLGSYLPARIVLESSTPSEWVARHLESMGFEVIVADPGFAPMYATRDKKLKTDKRDARALAQAAKLGAYKPAHRLSDEQRALRTQVQIRQTLVQTRTKIINQIGAVLLAQGLRVKTGAAEHFAQRVQAVEMAQELGELIAPLLSILTPLNERIEQLDKELTKRAKSDEQAERLQQIPGVGPIISLMFLAVLDGAARFEGSHQVMSYLGLVPREKSSGEKQMRGHITKAGRRQMRVLLVQAAMGIMRLRKAETARLHQWAEKIAQRRGKRIAAVALARRLAGVMWAMLRDGTPYQAEPARRRVSARSETKQQSSPSLAA

SEQ ID NO: 143111 - protein, 310 aa, unidentified
MSGVNAAIEVGKHKLEIALGSAGELWSEDNEARAIKGLVKRLVKAGCARVLIEGGSYQNVLVAALRSAELPVVIINPRRVREFAKSMGQLAKTDRIDARILALYGERVQPPLRELPDQQSQALRALSVRREQLIEMVVMEQNRLEHAPQALHHALRAHIDYLRKQIKRADDDLDRAVRESPLWDKYELLSSVPGVGPVLSRALLSDLPELGRLNRGEIAALAGVAPFNQDSGTYRGQRKIEGGRPRLRRVLYVATVAAVRCNPVLKPFYRPLRTRGKSPKVALVAAMRRLLLILNAMLKTHTSWRPPCPA

SEQ ID NO: 143112 - protein, 338 aa, unidentified
MAIKVVGLDTAKHVFQVHGADASGKTVLRKRLRRSQVAEFFSGLPACVVGLEATRGAHHWARVIGSFGHEVRLIAPQFVKPYVKGQKNDVQDAAAICEAVSRPEMRFVPQKSVEQQDLQALHRIRSRLIGCRTQLGNQIRGLLAEYGIILPLHLSHVRLQLPHFIAEDHPQLTPFGRELFLSLYEELCAIDRRIQAAEERIQRVFQEQEACQRIAAVEGVGPMIATAVVAAIANGRAFRNGRQFAAWVGLVPRQHSSGDKQRLGGISKRGDPYLRMLLIHGARSVVYRAASKTDSRSRWIAEKQRERGTTKACVAVANKNARIIWALLARNESYRRAA

SEQ ID NO: 143113 - protein, 472 aa, unidentified
MGNSSTKGRKKTGKKDGRRYTTGELETMPLLYPNLAGIDVGSREHYVSVPGDRSETPVRTFGCTTPDLVEMANWLKLCGITHVAMESTGVYWVPVATILEAAGLEVAMVDARESHRLSARKTDVYDCQWIRQLYACGLLRGAFRPAADILPLRSYWRQRQELVSLCATSIHHMHKALELMNLQLHKTVTDIAGVTGMKIVRAIVAGKTDPQGFAHLIHPSCKSTPDDFVKALTGHYAGDQLFALRQALRRYDMYQEQIAELDAELHRATQALAPAQNWDPDTAAPAPKSRDGKRRKNQSHFNLAAEVQRLAGVDLTRIEGIDALTAFTVITEQGRDMSRFPTAKHFASHLGLCPNHQITGGRVRKKSTRRVQSRASHALRLAAQSIARSQSALGGFYRRLRSRCGAAKAIVATAHKLAKTIYKMLKHGEEYVARGQEDYEKQYRERLLKNLARQAKTMGCEVLVLDTGEVLS

SEQ ID NO: 143114 - protein, 311 aa, unidentified
MNNTIGIDISKDTLDAHRLADGQHKQFLNGKTGHAQLVKWIGKQSDPLIIFEATGAYHRQLERVLGTHIIPFVKVNPKQARRFAQASGKLAKTDRVDCEMLAKMGAALQLMPKPFTAENLYDLRELLSARRALIKDRTAAKARKATVINALIKQQLEKRLRQIKNDIAKIDALMLDVAREDQYMSERLDILFSIPGIGVITALMILVDMPEIGALNNKQVASLAGLAPISQSSGKWMGKARIQGGRPNLRNAIFMPALVAIRHNADLKTKYDQLVTAGKEKKVAITAVMRKLLVLANALLRDNRKWAEKAA

SEQ ID NO: 143115 - protein, 435 aa, unidentified
MNTFQDMDAVTVGIDAAVTANHHVVVRRPEPGGVGGVVDEFTVAPTLDGLARLSRRLADRDVRLAVAEPTSMTWLGLSIALDEVGIDLALVGSRHVARLRGAVSGKNKSDVIDAQLLSRAGELFALRPATLPDAATLALQRACRRRHKLLIEANRCWRRIVALGRWAFPDTWNALGGSRAAILAVLRRWPHLETLSRARVGSITDEIAAHTRGVGDVTARATKVRDTARDWAAFWHGHLDLDALAWEVTDLLDELAELDARVAGAGAQATRWWQARDDELLLSVPGVGPTVAPTIRAFLGDGSRFPAAKHAASFVGTAPSNWSSGTVTQPSRAITKEGPPAMGSPLLPPPPGSSTDHPRPAPRRHRRPSPPHTRAAVHLGRHQQHPRAGPLRRHPSAAGNTRSSTTTAPAALSRRSPSIAPGSSVARRRATKHSR

SEQ ID NO: 143116 - protein, 331 aa, unidentified
MYVGVDYHKHYSVTTMMDERGRIVGRQKIRNDPQSLLAYAASLPEDSKIALEATNGWYYFYELLEEHCGQIVLAHPLKTRAIAEARIKTDSIDATTLAHLLRTDLLPTSYIAPREIRDTREVLRYRASLVSLQTSLKNRVHAILDKNGIRIAASNIFGKKAVAHLRELPVRACYRQEIDGYLRLMESLGLLLAEVDEKIRELVHLSPDATLLLTIPGIGYYSALLITSEIGDIHRFSSGKKLCSYAGLVPSVSSSGGKTRYGAITKQGSKWLRWILIELSHHFTTSSPRMKAFYGRVAYKHGKNTARVAVAREMLKIIHIMLTKRRAYIRE

SEQ ID NO: 143117 - protein, 340 aa, unidentified
MKKFSRKKHFVGIDISQEVLDIALINEDSYGSFEDKQVGNSFNGFEQMYDWLIKRKVKIEECMFCMEHTGTYGLLLFAWLSQMGLDYCVEPGLKIKRSLGLARGKNDKIDARRIADYAYTNKAKLEHFELPSTLIIQIKQFLTYREQLVKIRTSLKNSLKSHKICQKVSGVSLISNEITVQIKDYEKRVKDIESQIIKLIKTDPEIKKNFDLTTSVKGIGLVIGTFILVTTNNFTGFENGRKYACYSGISPFGYSSGSSIKGRTQVSQIGNKKMKSLLSNGANSACKYDPEIKSYYKRKKAEGKDHKLIINAISCKLVNRVFATVKRQTPYVNIYQQNFV

SEQ ID NO: 143118 - protein, 335 aa, unidentified
MHYLYYVGLDVSKETFDASLVAFEDANEMAHRKFANSRKGICSCLHWVEKRHGIRLDDVIFCAEDMGSYISEMAVCASDRTLNFNFSLISPLVIKYSMGIARGKTDRVDARRIAEYAITHYRKIALYLPAEKELCQLRTWLILRAHLAKQRVAKLVLLEKLDYKEKFADVSIQRSMLQEEIAYAEIHMKTIEREMKELIAADSNICRNYKLLTSIKGVGPITAIVMLCSTLNFTKITDLRKFACYCGLAPFEHSSGTSVRGGCHTSSMANRDIKVQLNRSALIAIRCDPQLKAYYERKVAEGKHKFSVLNAVRAKIAARCFAVVRRGTPYVALQI

SEQ ID NO: 143119 - protein, 440 aa, unidentified
MQKVITFEQVNYSAAGIDIGSEKFFVSVDGQQVENFETYTSDYYRCISYLKQHCIERVAMEATGVYWISLYSLLEQNGIKVCLVNPRETRSRKGHKTDVQDCRWIQRLFSAGLLKESFIPQGLLFEIRYLVRERMDIIEMGSTYVNKMQRCLELMNIKLTSVISQIHGKSGLRMIRAILEGERNPGALLLLCDERIINKKANRVLQALEGNYNNTYLFMLKQNLKLWEDHQQQITDIDGCIEQLLLSLTRDKKVDDEKVGRAKKIRHHQPQIKNLHEMMVKLFGVNVSSVSGINDYTLLRLVGETGADMNRFPSVKHFISWCGLAPGHYQSGKFRKNKRMPCSKTGQIFKELAQGLENSKTIAIGSFIRKLKAKRNAPVAYKAGARKIAEAYYNALTKGTDYVEHGIKKYEEQLRQRERAILKKLAKKHNMQILEKEEAA

SEQ ID NO: 143120 - protein, 456 aa, unidentified
MKTMNMNFKHNQLTLCFVADVHSQKHHFLVSIKETRTILKEFIVENSTAGFIQFITLVKLFSAKFRTQNVIFAFEPTSVYWMNFAYAFYQDISTSFLNKQILFVSPEIVAYQRKVDDPAGNKDDHKDPLTISKLVWDNKTSKAILLPEKIFNLRELTRQRNSLVKIRSSLKTQLRNKIIIIFPELLNIFSDILTASARYVISNFTTPENITKLPIQTFTQILLKISKKKLSTHKIELLYSYAQSSLGIKGNKNGLISNIKYILEQIELYDKLISQIENEIEYYLKSIPQTLTQIKGISTILAASIIAEIFPISRFSNSSQLVKYAGIDPTHSTSGISLKKLSYIAKKGDVYLRLLIIQTAFSCINHNQYIKRYYTNLINYGHKPKRVAIVAVANKLLRIIFNLLKYNIKFDPSKIGMGPKKIVEVVPFKFKQNNFHSLEKAKTKFLLKEKAREKLF

SEQ ID NO: 143121 - protein, 381 aa, unidentified
MEKNTTFVGLDVHKNSIDVALADAGRRGDVRFYGSIGGDLDSLHKVVRKLQSTGATLRFVYEAGPCGYDIYRSLTKVGFDCIVVAPSKIPRKSGDRIKNDRRDALNLARLHRAGELTPVYVPTAEDEAMRDLSRGREDAVKAHRVSRQVLLAFLLRHGYRYSGVSYWSKAHWRWIADIKMPHRAQQIALQEYVHAVHEQFERVQRLTGQIQELVAQWHLAPLVKALQALRGVSLIVAATTVAELGDLTRFDSAKQLMAYLGLVPSEHSSGETVKRGGITKTGNSHVRRALTEAAHTYCHPARESRVLLARLEDLPQEVRQIAWKAQIRLCGRFRRLMARGKNRNTVIKATARELAAFMWAIARSLVPLREAEVIQRSHSDL

SEQ ID NO: 143122 - protein, 312 aa, unidentified
MEAKFVGIDVSKARLDVDCLPVSTARQFSNDAGGIAALVEWLLGSGVERIVVEATGGYEIAVASALAAAGLPVVVVNPKRVRDFAKAQGVLAKSDRLDARVLALFGERIAPPVRALPEAAQRDLTELLDRRHQLVSMRAQEQARLATVLPVARGDVEQHIAWLDQRIRKHETVLLKRLRANEIWDAKVKLLDSVPGIGPVNLFTLVGRLPELGSLNRQQIAALVGVAPFNDDSGKRRGQRYIRGGRAEVRCALYMATLTAKRCNPVIAQMFERLIAKGKPFKVAMTACMRKLLTILNAILKSTQPWENRLAT

SEQ ID NO: 143123 - protein, 418 aa, unidentified
MKVYRNCCGLDVHKQTIAACLIREDITGSTRKEKRIFGTMTQHLRELAQWLVEAKVSAVAMEATGVYWVPVWNVLEGEGLQLVLINPEHYKAVRGKKTDLKDGERIAELLQDGRLEGSYVPPPELRLLRDLTRYRIKLVEHQCSIACRIQKLLEQCNIKLGSVASNVLGVSGTAMLHALAEGESNPERLADMAKMQLRKKLPALRLALDGYLLPHQRFLLGEMLDELSYSQNKIARLEAEIELQMQPFQKALQAWMSMPGIKHRVAWTLVAEIGPDVQAFPSAAHLASWVGVCPGNHESAGKRQSGKSRKGNRWARHALCEAAWAASKTKNTYLAAQFRRLAAARGMKRAVIAVAHTILNTGYHLLQRGTVYEDLGPNYFDQRHKLRTTKRLVKRLEALGHKVVLESTLSSGSNEVGD

SEQ ID NO: 143124 - protein, 365 aa, unidentified
MKERKKAETRYVGIDLGKRTYEAAFVEKGGVKISNGKTCVTGRQALYKKLRPSDKVALEAGNLAFIIAKELEASVGCLVYVLNPSHLPLIYGSMKKTDKEDSLKLAHIVEDFPEERLPLVPVPSDEEMGRRKLLARYRRAQQSRVRDINRLHGLFLAQGITTIRKQDLSTGKARKESIKALTGTELEEAEYLVECLDLHEGQIGVLQGRIEKESAGDEVMQRLQSVPGVGPMTAFGFASHVAVGRFENASQVSNYLGLVPRVYISGETVRYGKITKRGNGYIRALLVQAAWALTNTKQGGKLKERYEYMTIEKSVSKKKAIVAVARRLSELLYTLMKNGTRYEERGFRPGKGTEGEKLAEMALSA

SEQ ID NO: 143125 - protein, 331 aa, unidentified
MEILDTVGIDMSKLNFDVRIHSTQSYAQFENSNKGFKQLLNWAYKNSSFSSENIFFVFEHTGLYSHKISVYLTEKKVAFALIPGLEIKRSLGLARGKNDKVDATNIAKYAYRLREEIKPYEMPSEQVQALKRLLSLRDRLVKQRAGFKASLKEQKRVLVKKENHILFTSQEKMIDCLTKQIGILEEEMMGIINSDEQLNEQFKSIISIKGVGKQTALFMIAYTHGFTKFKNWRKFASYCGIAPFPKLSGTSVRGKTKGSNLANKKIKSLLDLCAKSSIQYNLEMKNYYNKRVDGGKNKMSTINIIRNKLLSRIFAVVNRRTPYVDLMKYAA

SEQ ID NO: 143126 - protein, 410 aa, unidentified
MKIAGIDVHKKVLMVVVIDASTPQEKRWRRRFTTMPSELHRLLIWLREQGVEEAVMESTAQYWRSVWLELEPHMRLHLAQAFSNRAPRGRKHDFKDAERLVRRLIADELILSFVPNGEQRIWRSMTRMKVQLTRDRVRLQNQMECLLEEMRIKLSIVVSNLLGASGLRILQALARGETDPKMLAQLGDERLQCTEEQLVDALTGRVQPMHRTMLALQLQRLQLIDQQIAQLNGLIAQAMKPHQEAVMRLAEVPGLGVDSAQQIIAEVGVQASTFPSAAELTSWVGTCPGKEESAEQNHSSRSAKGNKYLRRVLNQAAHAAVTKKGSHFQVVFRRLLPRLGYQSAIWAVAHRLCRVVWKILHEGVRFIEQGREPDPQATKKRAQMLARALRKLGYEVVLTPINQVAAPNAT

SEQ ID NO: 143127 - protein, 313 aa, unidentified
MTTSGAWIGVDICKTYLDVGSTTGTPVRAANDADERAALARRLKSDNVRGVIVEATGGLERALVQALEAEGVPAAIVNPARVRKFAEGTGQLAKTDRIDAVILARFGAYMQPAPTLLADAPRQQLRDLIAYRSQITREITARSAQIRLYAAPGLLERAKAAIEALRCERKALEREIEALIKSQDAMRALHRRLVTVPGIGLIGAATLIAELPELGRLSRRQIAALAGVAPFPNESGDRRGYRAIRGGREEVRQALFNCARVAIQHNPVAKPFYERLRARGKAHKVALVATMRKLLTILNAMLKTSTDWTCKPA

SEQ ID NO: 143128 - protein, 406 aa, unidentified
MTITLLETDPVVGGIDTHQDLHWAAVVDHTGHVLGTEAFSTTRSGYRAMLVWLRSKGDVCRVGVESTGSYGAGITRHLALAGIPVLEVTRPDLESRRRQGKDDSIDAVAAAHAALWGQRVQVAKDRDGAVEALRTLRTTRRSAVKARRATLQLLHNTIVTAPDEIRDQVRNMTRMQRLRTCASWRPDVIGYRDPATSAKIALKALARRILMLNDEIADLDRLIEPLVEELASALLALPCIGVESAGEFLVTAGDNPSRLRSEASFAMLCGASPIPASCGKTNRHRLNRGGDRQANSALHMVVVSRMRTDERTPAYVERRLREGLSKKEIVRCLKRLWPARCFVPWSSRARERLRSPPAVHIGQPAASRSHEVHDRASSDKSQSERARSRRQGRQPRVAGAARSEAP

SEQ ID NO: 143129 - protein, 405 aa, unidentified
MAQPRQRVPVGSTPVVIGVDPHKRSHTAAVLDGQRVLDQRRVPATRTGIQQLRRWAEQWPERRWAVENAYGLGRSLSRALLEEGETVLDVPPALSRRVRLLSGRSGRKTDAADAISTARAATGPGVRLISQSDGAHDVLRLLIDRHRDLVARRTQCVNRLHVLLAELLPGQVRRGISSDDAAGLLRRVRSPVGADATRRQLARDVLDEVRSLERAIRHLDDQLEAAILATGTSLLQLHGVGTVVAATLLGHIGDIRRFPTAGHFAAYCGVAPLEASSGDVVRHRLSRLGDRQLNAALYVMALTQAGSHPLGRAYYQRKQAEGHSKAEALRCLKRRLADVVYRCLRRDAEAHDTRAAEGQARPSITPVPTWQRTKNARRGLHHGKRNSSQTNSSPPRAQRGESSSP

SEQ ID NO: 143130 - protein, 408 aa, unidentified
MEVLYPRCAGLDLGKDALVACVRIHGREVQQECRTFGMTTRELLALSGWLTGYGITHVAMEATGTYWKAVWHLLEPAFALVLANAAHVKGVPGRKSDVNDAMWIADLLAHGLIRGSFVPPEPIQDVRDLTRTRKQLVREIAQHTQRIQKTLDIANLKITGLISDVLGVTGRSILRALIAGETDPVRLADLARGTLKAKRAALIEALTGRVTAHHRRLLKLHLHLIEQLEAAVAEIDQQLGETLAPFREAVTRLDGVPGINTIAAQAILGEIGLDMTRFPTHEHLVSWACLCRRLDDSAGKRKSTRTRKGACWLKTVLVQCAWAAVRTKDSYLRAQFLRLRARRGPKKAIVAVAASILTAIYYIVRDGVEYRDLGGRYFETLDQAQITKRLVQRLERLGYRVELQHVAA

SEQ ID NO: 143131 - protein, 427 aa, unidentified
MRFIGLDVHRDFCEVAISEGGKARRAGRVAARPAELELFAQSLAADDRVVLEATGNALAIARILAPHVGEVVLAHSRKVRAIAEAKVKTDAVDACTLAELLAADLVPRVWIGDEQTRLLRRLVSRRRQLVKQSTRTKNEISAVLLRNLKGRPPVSDVFGKAGRAWLATLELGIDERETVDSGLRQLDFLQSELTHVDRAIAEQALASPEIRRLMTVPGVDVTTAAALMAAIGDVARFPTPRHLVGYLGLDPKLRQSGLSNPRHGRISKEGSAAARHALVEAAWSAAKTSGPLHAFAERTAARRGRQIAAVAVARKLAVLAWHLLSRGEDYAYQRPSVVRRKLRRLELKTGAPRAKRQAGAAPLWGSRGQDDLERELARQAELAYQRLVSDWKRTRPKQGAGATPGHASRGPSSGQAARQDTAPRPAL

SEQ ID NO: 143132 - protein, 345 aa, unidentified
MTNMNYIGLDVHKKTISYCVKDAAGQVHREGKIGSTRRELDCWIKTLPQPRMIAMEATVFTGWIYDHLLPHAEKVKVAHPLMLRAIAAAKKKNDKIDAGKIADCLRCDFLPECHMVSTEIRDRRRILRYRHLLVRQMVQMKNRVSGLLMETGVEHNKQRLHKVRYFHELLSTNQEVHPCIRPLLKISRETIERCQKTEYALISSLQRDPMLAERIKRLRTIPGVGPITALTWALEIGDVSRFRTIKQAISYCGLCGEEKSSADKVMRMPLSKQRNKHIQHVLVEAAKLAPRQCYELALVHEKEMQKGNRNRATLAVARKMVAYLLAVDRQQRDFVPAEERQAGAA

SEQ ID NO: 143133 - protein, 401 aa, unidentified
MAAGQVWAGVDVGKEHHWVCVVDDSGKVVLSRRLVNDEQPIRELVAEIDELAERVLWAVDLTTVYAALLLTVLADAGKTVRYLAGRAVWQASATYRGGEAKTDAKDARVIADQSRMRGQDLPVLHPNDDLISELRMLTGHRADLVADRTRTINRLRQQLVAVCPALERAAQLSQDRGWVVLLARYQRPKAIRQSGVSRLTKVLTDAGVRNAASIAGAAVAAVKTQTVRLPGEEVAAGLVADLAREVIALDDRIKTTDADIEGRFRRHPLAEVITSMPGMGFRLGAELLAAVGDPALIGSADQLAAWAGLAPVSRDSGKRTGRLHTPKRYSRRLRRAMYMSALTAIRCDPDSKAYYQRKRDEGKRPIPATICLARRRTNVLYALIRDNRTWQPESPPNIAAA

SEQ ID NO: 143134 - protein, 351 aa, unidentified
MIVLGADMHKRSHTIAAVGSTTGELLGERTIQVGVRGFGALLVWARGLDGERVWALEDCRHVSGSFERFLIERGERVLRVPTRLMADARRGGRERGKSDSIDAIAVARAAVREGLRALPAAQLEGPELDLRLLVDHRERLVRQRVGLNNTLQWHLHDLWPELTLPASALFSTKWGTRIGRRLARAEQSTRVRIARDELRRLRELTQTIKALEAEIAELVASIAPQLLSEPGFGPLTAAKLVGEIAGASRFASDAKLARSAGLAPIPISSGKTNRHRLDRGGNRQLNAAIHRVAVTRARCHPETQTYITRKTAEGKTHREAIRCLKRHLARRIWHLLQPPTTATGTLAPSTI

SEQ ID NO: 143135 - protein, 397 aa, unidentified
MTTAAVEVIGGVDTHADTHHAAVIDTNGRQLGDAKFPATAAGYVALCAFLAACGTVTRVGVEGTGSYGAGLARHLRAVGLEVVEVIRPNRQARRLRGKSDPIDAYAAATTALAEAVHPVPKSADGQVEAIRYLLVARRSAVKARTAAQVQIKTLLITAPEPMRHRYRDLSDKALIDALARTRPTAAHPIAQALKSLGRRHEQLTAEIAELEATLAPLVKAANPALAATKGIGVITAAQLLVTAGDNPDRLRSEAAFAALCGASPIPASSGKTTRHRLNRGGDRQANAALHRIALVRMSYETRTRDYVAKKRSEGRGTKEILRCLKRAIAREVFTLLTSQGQIPTIDDLRPLRHERGLTLSHAAEHFGVWPAVISEIERGTRRNDELTATYRQWLLTA

SEQ ID NO: 143136 - protein, 347 aa, unidentified
MEHYAGIDVSLECSSVCVVDASGGIVREGKVASEPAALIAWFGSLGFGLERIGLEAGPLSQWLFAAMRDAGLTVELLETRHVRDAFKAMPVKSDRNDARGIAQLMRLGWFRPVHCKSLAAQEVRALLTARKLVQSKLHDVEMSLRGILRGFGLKVGRTTPMRFAGRIRELVAGHTTLEVVAEAMLSVHAILRREFSGFERRVRAMARCDVRVRLLMSAPGVGAIVGLTYVSAIDDPARFTSSKQAGPHFGLTPKKYQSGETDWSGRISKIGDATVREALYESAHLILTRPIKGCPELKSWAMRIAKRAGMAKAKVALARKLAVILHRMLADNVPFNPNAKAAKLGTI

SEQ ID NO: 143137 - protein, 342 aa, unidentified
MNEYDGKQFVGIDLHRQRSVIVRQSESGEQLSAVRIVNDPVGLGLQLEDAGADPEVVLEATYGWYWAVDVLQARGAQVHLAHPLGVKGFRYRRVKNDVRDAGDLADLLRMGRLPEAWIAPPATRELRELVRYRAKLVAIRSGLKAQVHAVLAKAGVLIAVSDLFGVGGRKRLAKVPLAAAYAERVRSLLELIDVLDSHETRFAGLIAKRLNTDRGYQAIQQLPGIGPTLAAVFVAEIGDVHRFAGPAQLCSWAGLTPRHRESDTVVHRGHITKQGSKLVRWAAIEAVQRHQTTAKISADKDRIEARRGKNIAKVAAARKLLTLVYYGLRDGHIRALDRDRAA

SEQ ID NO: 143138 - protein, 482 aa, unidentified
MTPRKQKNLRHMTLRKQKNVRQPPSAALRVTRPHAAGIDVHAAIHWVAVSPADAPPPAANHPANLPAHVRSFGACTADLIALADWLAQCGVTTIAMESTGIYWIPLFELLESRGFEVLLVDPRQSRHAPGRPKSDVLDCQWLQRLHSYGLLTASFRPADQVVVLRSYLRQRQMLIRYAGQHVQHMQKALEEMNVKLTEVVSDVTGDTGMAIIEAILRGQRDPLALAKLRHYHCKRTEAEIARALYGNWRAEHLFALKQAVTLYGFYRQQMQECDVQLQAHLATFADRSKGQVRPKRQRRYLKRCAKKTNEPGFDLSTALYQMSGVDLTVLEAINATTALVILSEVGPDVSRFPTVKQFTSWLGLSPQHQGSAGKIRSRRVPRGANRAGRALRMAVQSCHHAKHALGAFYRRIQARVGAPKAIVATARKLAERVYRLLRYGEEYVCQQIEVYEAAYQARVVKGLARRAAELGYRLEPAMTAST

SEQ ID NO: 143139 - protein, 332 aa, unidentified
MSNIIGIDVSKASLDCAYLRDADQKRTKRLRCDNVVSCFASLVAWAEARSGLPVESLAFVIEPTHVYHEQLARFLYNTGATVYLVNPGRVRKFAEGIGILSKNDLVDAELLVRYGLLARNLIAYEPVAQEVTDLRSLLNRLDVLERNLRSELNRQEKVGKTMVFHRLERQSIARAVKRLKAEVITFKRAIRECIKSTPSLQQSFNLLCTIPGVGAKTAWIMIVILASRPFISAPEVASFLGLNPIEKRSGNSQYRRPRLSKSGSGHYRQKLYFPAMVATRKNPDIKALYERLLAADKTKMCALGAAMRKLVHICYGVIKNQTPYQVQTTQSS

SEQ ID NO: 143140 - protein, 349 aa, unidentified
MVIIGTDSHKHTHTCVAADELGRRLAERTVAATGAGHLELLAWAARFTDRSWALEDCRHLSRRLERDLLGAGEPVVRVPPKLMAGARRSSREPGKSDPIDALAVARAALREPGLPVARLDGPEREVRLLVDHREDLVAQRTAHENRLRWHLHELAPGGEPAPRTLGRLPVLDALGARLGGIDGPVARIARDLVARIRELTTAVTALERELAALVRPLAPTLLALQGCGVLTAAKLVGEVAGIGRFRSAAAFARWDGTAPVPVWSGDTTHVRLSRGGNRQVNAALHRIAVTQLRLPGPGRDYVARRRAAGDSWTEALRALRRRLSDEVHRRLRADEPVHMSRPAAHQAAA

SEQ ID NO: 143141 - protein, 388 aa, unidentified
MPQPNDLSRSLVALDQDNTIIAVVEMSQSSWLVAGMLPGIERHPRKKLEPSPPERLLGLLHRWRDEAAKAGRKITRIALAFEAGRDGFWLARWLKARGVEAHVIHPSSVAVSREHRRAKTDRLDTELLKRGFLGWLRGERGHCTMARIPTIAEEDAKRPNRERECLVRERLRIVNRMKATLARLGIRNFKPTLRKAAERLATVHTPEGSALPPNALAELQRDMARLGFVISQIKEIEEARQKRLEQEPQTEPHAMVRHLARVVGVGVETADMLVNEVLSRPMRDRKAVARYAGLTGSPDESGAKRREQGLARAGNARVRRGMIQLAWRFLRFQKESALARWYQARTADSRSGTRKTMIVALARKLLIALWRFVTTGETLEGVILRPAS

SEQ ID NO: 143142 - protein, 443 aa, unidentified
MSKKGNSHLRGQRGQAFADLIRGIPSEQILCVSLDISKYFHVVMMHNGLGEIVKPAFEIDFYQSGFDQLCQVIDQATDETQAQVVLIGMEPTSHYFENLARHLLQQPRPVTLINSFAVKQNRGQQMMHREKTDPIDCGAIGDLLRRGEGTPYKPVTGVYLQLQQLDRVRLSKAKIEGMLKNQVIAHLDRIFPGLVILGKAARERYTPLFQVNFWQCQTLQHLIRVCPNPHQLVSMTPAQLVQAFRAQNYRLGHKTAAKIIARAHKALLPDPELVAIRCELLQHDLRLLEVVQAHIAEIEQRLSDLVAQTPFRVWIPLKGLSAVQVASLAAAIGDPNNYCHAGQVFRRSGLVSGRNDSGNRQRKGQGNSIVKVGDVYLRRSLMNAVTTLLLHQPVLGRYHRKLCRKKHPGVARVATARKMVAILWATLRDQYPVSLISCKGAVM

SEQ ID NO: 143143 - protein, 295 aa, unidentified
MIVIGVDVHKHSLTAVAFDEIGRQLGERSGPVEDGEVVSWAEALGEERLWALEDCRHVTRGLEQLLMEAGERLVRVLPRLTAPQRRRCRVRGKSDRINALAVARAALQEPLLDGPRVGEETLRELKLLVDHRDDLVAERRRCQQRLRWHLHELDPTLGVPLGALDRSVWLDRLTRQLARREQTTQVRITRDLLGRCRTLTRQVAELDRELQTRTQALAPRLLALAGCGRLSAAKLLAEIGPIDRFNSDAQLARHAGVAPLDASCGKHQRHRLDRGGNRQLNCALNRSGFHAGCLV

SEQ ID NO: 143144 - protein, 346 aa, unidentified
MSTKYIGLDVHQATTTMFVLDQQGKVIEQMVMQTDGHQLRERIASITGKKELAFEEGTMSDWLYYILKPVVHRLVVCDPRAIRRMAGASKNDAIDARLLANELRMNNLRPVFHQTSALEALRASWRSYEQLTRDLTRTKNRLKALYRSRGIRTEDSLYEPESRAALLERLDHRELRQRAGLLFEQLDFLAQQKERASQHMVSCARKHQGYRLIKSVPGFGPVRAATVLSTVVTPHRFGNKRKFWSYCGLAVVVRTTGDWKMGPNGLVRVEQKQTRGLNKNRNAAMKEAFKSAAIQAIKASPFQEFAEAYRQRGLAESLTRVVVARKLAAIVLTIWKKGEMFDRNKL

SEQ ID NO: 143145 - protein, 334 aa, unidentified
MYYSFFIGIDISKKTLDFAVRDREKFLFHIEVVNSPAGLIDFQKECIAKGIDLSQSLICCEHTGVYSQNIQALSTENNLALWLESSLRIKRSLGLQRGKSDRIDAIRISEYAFRYADQATIWQPERQTISKLRQLVSLRKRLLNAKNALKVPINEVSAFQNKKLQKEMEKLNRKPVEALEKQIADIEKKIEVLIKEDDSLKHLFDLVTSVDGVGKVVFCEMVISTNEFKLFSCPRKFACYSGVAPFEHTSGTSIRGGTRVSHLANKQMKKLLHMAALSVVSSKGEMANYYHRKVEQGKNRMLVLNAVRNKIIHRVFACVRDDRKYEKNYIPTLA

SEQ ID NO: 143146 - protein, 511 aa, unidentified
MPLCQPGPGRPIIIDEAYALSYTRIVQKPSRAVVPAPQERRQIKMARKVKKVKGKGHKDYPQSLKTIQPHSAGIDLGSREHWVAGPPSKDGKPNVERFGTTTPELLRLADWLKEQGVETVAMESTGVYWIPLFEILDNRQFEVVLANARQISHVPGRKTDMLDCQWLQLLHACGLLRGSFRPSDDICQLRSLIRERNTMVQQRSDWVRRMQKNLDQMNVCVHHAVSDITGVTGMSIIRAIANGERDPHVLARLRDSRCRKSEEQITNELTGNWRPEHLFNLCQALKMYDQFCTVIADYDSEILSYLEVIQPTDNNDKFAPPPASKSKAMNLTKRGQEPLRQALYRLCGFDLTTIDGIGVDTASVLVSELGLDFTVFPNERHFVSYLKLAPNLSISAGKKVPKKFKASTCTRVATALRMSALTLRNSKTALGAFYRRISRYKGASVAVFATARKLAQYVYRLVCYGQSYVDSGAQAYEARFNLRRVNLYTKILNDLGYKVQTLTKDEAIDTC

SEQ ID NO: 143147 - protein, 440 aa, unidentified
MSKRAYRATRVNDVNWDLLAQGKKGLGITLGVDVGKFSLWAVCRWADGRFERPWRVQNPHEIPTLLALLKRVSVGRALVAAMESSGTYGDALRQALADDQIKLQRVGGKAAHDYAEIFDGVPSQHDGKDAAVVAELAALGKAVPWEYQPADPWEQELAYWVEWMVAHRQMLTIWQGRLEGLLARHWPEATQVLKLSSVTLLRVLKHYGNPKTLAADPEAGKRLARWGGAFLAPEKIEQLLAAAGASVGVRLGHWQQRQIQDYAEQALAARHEANRAQRRLRSLAEGHKVLQAQGKVVGVPTACVLWVSTGDPRKYHAAGAYRKAMGLNLVEHSSGTYQGRLRISKRGSARTRQWLYFAVLRLVQKCGVRPWYEAKKVHDEDDARRAVVAVMRKLAVALYYVGVHNEEFQPRRLFGRICGCRSSPAKPKTRTRSKPMAEKV

SEQ ID NO: 143148 - protein, 342 aa, unidentified
MAVMGGMDIHRKQLTFDYVDLDSGEAVRGRIVPADREHLREWLRRFAGQSQVAFAVEGCTGWRYVVEELQRAGIEAHLAEPAETAARRGPKRRAKTDRSDAQLLRELLTDGRIPESWIPPEPVLEARAVVRLYKDLLDERTGWLQRVHATLFHQGVPNLDVTTMSDAGRQRLADAQLSPATRSAVDAGMRQVDRLTEELSRTREQIALIARRQPACRALQAAHYGVGPLTSVAIWSEMGDCRRFHSSDDAVRHAGLDVTVYSSDGRRTAGHLARQGPVVLRWALYEAAVYAGRPSSPDYPYFRQVKARLDGQLALLSVARKLARRCHHTLRGLGDQVLAPAA

SEQ ID NO: 143149 - protein, 422 aa, unidentified
MFSESQDDEQIIERVAALDIGKAEVVCCVRLPSPGPGKRRVQEVTTHTTMTRSLTELANRLVGLGVERVVMEATSDYWRPPFYLFEAHGLQPWLVNAKDVKHLPGRPKTDVLDAVWLCKVAERQMLRPSFVPPHEIRRLRDLTRYRVDLVGARGAEKNRVEKLLEDACIKLSVVASDIFGVSGRAMLTAMIAGERDPKVLADMARSRMRPKIGQLEEAFTGYFDDHHRFLLARMFGRIDAIDADIDALDAEIEAYLAPFGEAATRLDEIPGIGPVAAAIIIAEIGVDMTRFPTPGHLASWAKFAPGIRASAGKNKGNGSIGHGNRYLARVLGEAAVAASRTDTFLGARYRRIARRRGKKKAIVAVGRSLLVAIWHVLSHPETRFVDLGADHFDRHVDTATKKRNHIRQLEALGYRVTVEPAA

SEQ ID NO: 143150 - protein, 338 aa, unidentified
MALYSAIDLHSNNNVLAILDEADRTVRLKRLPNDLPTVLSELAPYRDQLAGVAVESTFNWYWLVDGLLEHGYPAQLVHAAAVPQYAGLKHGNDDTDACHLAKLMRLGILPLGHVYPREQRPLRDLLRRRSQLVRISVSVMLSMLATWSRYTGQCLSMKAFLQLPPEQIKQALPDPSARIGLKVQFTLWKSLHEQIERIETWVGKQISTAPALEAVRSVPGIGKILGFTIVLETGAIERFASVGDYASYCRMVNADRLSNGKKKGEGNRRSGNRYLAWSYIEAANFAIRWSPQIRRWYDRKRSKRHRMIAIKAVAHKIARACYHLLRDGTRFEVQRAFG

SEQ ID NO: 143151 - protein, 375 aa, unidentified
MANVRFVGLDVHAETITVAVAETTGEVRALGTIPNRPEPVRRLVRKLGPLHHLRVCYEAGPTGYVLYWQLVGLGVHCDVVAPSLVPTRAGDRVKTDRRDAEKLARGYRAGDLTPVWVPDAEHEALRDLVRAREAAKKDQLRARHRLGKFLLRHGRRRPAHLKMAWTAGHMDWIRAVRFESTAQQIVLADYLHEVERVATRIAHLNQAILEAVRTAPPQMRAVIQALQALRGVAAVSAATIVAEVGQLSRFENPRQLMGYSGLVPSEYSTGARRRLGAITKTGNAHLRRVVIEAAWAYRFGPAVREPLRARQVGLDPAVTEIAWRAQKRLHERYRTLVAKGKNNNQVMTAVGRELLGFIWDIARTVEQQVPIAATA

SEQ ID NO: 143152 - protein, 364 aa, unidentified
MNKCHLNTELSSLEGTRSEFNRSTAAIKLGIDVHQDFYVVVKQEGGTNPKPAQRFQKEAFLHWVAKLTKEGAEMHAVYEACGFGFELQRQLTALGIHCYVVCPQKLDERNKRVKTDRVDAKALCLKLDRFVEGNRDALALVRVPTQAEEQKRAIHRQREQLVKARKRLEAQGRSLIVNHGIEPVNKWWKRRTFAALQVPAWMKELLQNTQPILLALEEKIRALTAQLQEAAISRQPRGLGLLSSVVIDREIGNWDRFKNRRRVSSYTGLCPGEYSSGNTRVQSCVTKHGNPRLRAALVETAWRLVRFQPEYRAVKKWRHLLAKGALATGAARKKAIVAVARQLAVDLWRIRTGRVAIETLGLIN

SEQ ID NO: 143153 - protein, 367 aa, unidentified
MEKVSTTGRKQSSNFSQQKLTIGLDLGDRSSCYCVLDETGRIVMEQKVSTTPKALQAAFGAMPHSRIALETGMHSPWISRLLSALGHEVIVAHARNVRLIGESRRKDDRLDAQTLARLARIDPQLLCPVKHRSAKAQADLTLIRARAGLVRARTALVNTARGLAKSYGERLRGCNVRNMNPEKAAGLSPELQTALEPLLVALESLSQQIGEYNERIEKLAQESYPQVALLKQIKGVGTLIGLTFLLTLEDAHRFRKSRDVGCYLGLQPGRRNSGQSEPQMHISKEGDPYLRTLLVQGAQHILGPFGVDCDLRRWGLKLAERGGKSGKKRAIIATARKLAVLLHHLWVSGEVYQPLHNSNQKVMLAAA

SEQ ID NO: 143154 - protein, 383 aa, unidentified
MNQVKYGCGIDIAKEKFDACLGLFDINQGFTKVGTKQFSNTSKGYTQYMEWVKKQCKHSLPVLHLMEATGIYYENLALYLYNKQESVSVILPNKAKKYKESIGLKTKTDGVDALGLSRMVCEQVLPLWQTANPKFYELRLFTRQLESIVVQTGSVKNQLEAVSLSMYPSKQIEKLLKQQIKFFDKQKAELLQTISKIVEEDELLKRKFANILVIKGLGIQAVATIIAETNGFELFKNISQLVSYAGYDVIENQSGKHIGKTKISKKGNGKIRRCLHFPALVVVRCKVKPFVQLYERVYQTSNIKMKGYTAVQKKLLVMIYTLWKKDELFNENYQQDKISKEDEKEFSFVSASQKQKQKKVAPVKTEATQDKHPSKNRSMPSFV

SEQ ID NO: 143155 - protein, 339 aa, unidentified
MELYAGLDLHSRNTYIGILDKDLKRVFKKRVPNHLDSILQTLDPFRDQIKGFVVESTYNWYWLVDGLMDNGYSCAHLANPAAIKQYEGLKHSDDQHDAFFLAQLLILGILPQGYIYPKPERPVRDLARKRMFLVQHKTAHILSLQSLIARCCSSKITANDIRNLTTEELALWLKEEHLVLSAKANLDTINFLKQTIKGLEKAIKKKVKLKKSFQYLKTIPGIGDILAMTIMLEVGDIKRFAKVGNFASYCRCVSSQRLSDGKSKGRGNRKNGNRYLSWAFVEAAQLTRRYNERFRKYYNRKVSQANTSLATKALSNKLARICYYLIRDQVPFREELFGR

SEQ ID NO: 143156 - protein, 346 aa, unidentified
MTILEDTRVITGGVDTHADMHVAAALDPLGGLLGVREFPATAAGYADLLSWLGGFGDLALVGVEGTGSYGAGLARYLAAARVRVVEVDRADRQDRHRAGKSDPLDAVSAARAALSGRAAGAPKGRDGAVEAIRALMVAKRSARNERTQAINQARALIVTGPDDLRARFARHSAAALAEAIAALRPRPGDAAQYAVRVALRELGRRVEFLDGQLDRLDDLIVPLVTARAPGLLSLYGVGPDTAALLLVAAGDHPERLRSEAAWAHLCGAAPIPASSGKVRRHRLNRGGNREANHALWRIVITRMSAHPATRAYVERRTKEGLSKKEIIRCLKRYVAREVYHHLRADR

SEQ ID NO: 143157 - protein, 338 aa, unidentified
MTQHKIIGIDLAKNIFFLFEINHKGKNLARKKLQRSKLLNYVANQSPCIIAMEACSGAHYWAREFEKFGHEVLLYPPQHVKNQRRKQKNDYNDAEAIAELALYQRAHPVPHKSIEQQDIQSLIRMRRLCVTERTRLINQVRGLIAEYGIIIPKGKASFRQAIPEVLEDAENQLSPILRELLSRQYERYIYIDEQISWFEEKLNQTVKQFDNAKRLMSIPGFGPLTSQAVAVWLGSGQQFKTGRDASAAMGLVPKQDTTGGNVILLGITKRGNTYIRSLLVHGARAALRRAKFKSDKLSQWMLELQERRGPNRAAVALANKLMRIAWAVIAKNEEYQPA

SEQ ID NO: 143158 - protein, 472 aa, unidentified
MKSKSSRKRNPVDPVAEEIPDAEHELAIERVAAIDVAKASGKVCVRLPGKTGRRFSRVWDVPARTGAVSELAEQLIESGVEKVTVESTSDYWRIWYYLLEAAGLDVQLVNARDVKNVPGRPKTDKLDAVWLAKLTEKGLLRPSFVPPAEIRQLRDYTRLRVDLTRERTRYWQRLEKLLEDALIKISAVASTLDTLSTRDMIEALIAGERDPGRLADLARGKMKAKRSELIAALDGRFDDHHRELARMLLDQIDTLTAQIAALTSRIEQLLAAMPDTRSRGDGGTGGDPDRPSTGHGVEPETAARFTDATLLTPVERLDEITGIGELNAQVVLAEVGLDMTRFPTPAHLVSWAKLCPRTIQSGPVTRGGKTGRGNPYLKGALGEAAAAAARTDTFLGERYRRIVKRRGKLKALVVVARAILVVIWHLLANPEARFRDLGPDYHTQRIHTERKLRNHIAQLTAMGYQVTLEPAA

SEQ ID NO: 143159 - protein, 410 aa, unidentified
MEVLFDRVAGLDVGKASVSVCVRTPGARRGRHSETRTFKTTTGSLRVMRDWLLESGVTIAAIESTSTYWKAPFYCLEEVMEVWLLNAAHMKAVPGRKTDVRDAEWIAQLLEHGLLRPSMVPPPAIRQLRMLTRYRVQLMGDRTREAIRLEMMLEDASIKLSSVASSLTTVSARAMLAAMIEGERDPLALAELAKGRMRSKIPDLAQALEGNFDDHHAQMARAILGRLDLVEQSLVELDAVIAAKCTPWQHEIDLLQTIPGVGEKVAQVIVAETGADMSRFPSAGHLAAWAGVAPGIHESAGKRTPTSKRHGNKWLTAMLVEAAGSVARMHQSNYLSAQHARIAKRRGTGRAQVAVAHSILVSSWHMLTKDEPYQDLGADWLARRNDEAHTRRLVAQLERLGHTVQLDAAS

SEQ ID NO: 143160 - protein, 339 aa, unidentified
MNRIVVGVDIAKRVFQLHWVEPATGEIVSLQLKREKLLEHFANRSSCVIGMEACGGSQHWARSLHNLGHEVKLLSARMVKPFVGGNKNDAADARGIWAAMQQPGIKWVAVKSEEQQAVLALHRMRQQLVKFRTAQINGLRGLLTEYGEVMPQGRAGIKRDIPGALGRLSDRLPAIVIDTLREQYARLGELDERIAQIEQRLRQWQREDLAAQRIAAIPGVGLLSSTAAIATMGDAKAFKSGREFAAWLGLVPRQTGTGGRVRLLGISKRGDKYLRTLLIHGARSVLTHSKSPPQWLTELVKRRPKNVAVVAMANKMARTIWALSAYERAYQTGYVSRPV

SEQ ID NO: 143161 - protein, 371 aa, unidentified
MLVADRPPAPVAIRTDLGAIFVSMELSKSTWLVTSLSPGAGERMSRHTIRAGDIAGLFGRFALLRAKAKKRAGQDFAIVVIHEAGLDGFWIHRVLHEEGIESHVVNPASIATSRRKRRAKTDKIDGEALVRALLAYKRGEPRVCAMVRAPSVAEEDQRRLNRERSVLMGERTRHINRIKGLLFSQGITTYEPMRRDRRERLDELRTGNGRMLAPHMRAQIVRELGRLELVIAQVKELETERDAVLASEASDRPMAMLTSLKGIGAESAAILTSEGLFRHFDNRRQLAAYAGLAPTPWQSGSIRHEQGVSKAGNARLELPWQENFSWRCGNTPPPAWSSKARSSRPPDHALSLPRSPISSADPGCEPKRLLA

SEQ ID NO: 143162 - protein, 369 aa, unidentified
MTKTTYIGLDVHAETIAVATADDGRHGEIRFYGTVVNTADGIMRVAKRLSASGARLEFCYEAGPCGYGVHRLLKKLGHGCAVVAPAMIPRKPGDRVKTDRRDAEMLARLWRAGELTPIWTPDEEHEAMRDLIRARKQAVDALKVAKQQLLSFLLRHGLRYGGATRWSKRHWRWIDELRKFRYPHQQLAFEEMKRAIRQIKARVDTLDQAIADTVQIWRFGPLVEALRALRGVDTTVAATLVAEIGDINRFTNPRQLMAWLGLVPSEHSSGNTTRRGRITRTGNALARTMMVEASWSYRHPAREQYRYLKRSAQLPQEIRDVGWKAQVRLCKRYRDLSKTGKPQPRVLIAIARELAGFVWDIARKTPLAV

SEQ ID NO: 143163 - protein, 400 aa, unidentified
MLSIGIDVSKGKSTVCGMKPGGEIVYTPFEVQHTREGMSELVSLLRSSGEEVRAVLESTGSYHCPVEAALLENGIFVSVVNSLRMKRFCSQSIRKVKTDRIDAMQIALYGLAYWQELQPARLPEDTYRELQLLARQYYQMTSMLIKAKVDFNALCDQVLPGMQELMSDHAGRHKLSDFVLRYCHTTHILEMGETRFRKDYCKWAEKKGYRNCERMAVLIFATAQNGIPVLPNAPSTQIVITEAIRVLHTVEASRDAILTQMQAFAKTLPEYSLVREMLCIGDTLAPRLIAEIGDVRRFHSKRALIAYAGIDAPPYQSGKFCANNRHISKRGNRYLRKTGYEVMQSYVMHKPANDPIFTFIEKKRGEGKSGKLAMVAGLNKFLRVYYGKVTELYRSLPAIE

SEQ ID NO: 143164 - protein, 320 aa, unidentified
MSPNTTNTMTETNSVVHAGLDIAKAQLQLHLENQQHVLPNTVTGHQRLIRLLRVVAGAHVVCEATGGYERKVVAALHTANLPVSVVNPAQVRHFALAQGQRAKNDPIDAALLTAYGHALRPNATPVPQAVLAELRELVQWRDHLKEQLVRARQPAEHATLAFVHRQQSKEATHLEKQMAAVEKELAAALTRHPRWREQVQRLAELDGVGTLTAVSVLSQMPELGHLNRGQAAALAGLAPWTRQSGPWEGQRHIGGGRAVVRRALYMSAVALARQTGSTLGKFYARLRAAGKPAKVALTAVMRKLLLQMNQVLKYHVPDPA

SEQ ID NO: 143165 - protein, 307 aa, unidentified
MPRTIIGCDLSRACLDLHCLPNAASSQVSNHRDAVNAWVGSLEPEAFVVFEATSGCDGALIAALIDRGIAFSRVNPRQAREFARATGVLAKTDRVDARVLAQMGSVLELPITRPVNTTRLRLADFLRRRRQLVEMRKAEKLRLYSAGQDEIASQIEAMIDLLSRQIADLDRTIAGLIAEDRTLSFQARLLSAVPGIGPTVLATLLGELPELGTLDRRRIASLAGLAPHARESGTWRGARRIWGGRRKVREALYIAALTASRRVPSLIAMRDRMREKGKAPKTILIAVARQLLVILNAMLRNGAPLRA

SEQ ID NO: 143166 - protein, 377 aa, unidentified
MHDEELVVIGGVDAHADTHEAAALDQRGALLGTERFATTFTGYGKLLDWLRAFGAIELVAIESTGSYAAGLTRYLREHGVAVVEVNRPHAHTRRRRGKSDPIDAEMAARLALAGKATTVPKQTDGIVESIRLLRVARSSAVKARSATMVQLSELIVTAPQELREQLSQRRTIRGKAALCRRLRPNPIELDRPTQAAKLALRSLARRIDALDAEIADFDVQLERLVRAAAPRTTQLLGISTGHAGQLLVTAGQNIERLRGDAAFAALCGASPIPASSGRTTRHRLNYGGDRDANRALHMIAVCRLRHCDRTRGYAQRRTAEGKTKREIIRCLKRYIAREAYHALRADLADLQAATPPPRHAIAITCGAGFIGRNRRKL

SEQ ID NO: 143167 - protein, 328 aa, unidentified
MECLSVGIDVSKRELVIAVHPTGDQWTTATTPAAIATVVKRLQTLGPRIIVVEATGGYERALVAALAVAELPVAVVNPRQVRAFAQAIGRTAKTDAMDADVLALFGGRLDPAPRPVTDVATQALAALVARRRQLLEMIGMERGRLEHAPPTGHLTRELRRHIRWLERRVTDVDDEIGTCIAAHPTWRVQEELLRSVPGVGPTTARTLLGELPELGQLDRRAIAALVGVAPFNCDSGQQRGQRHIWGGRASVRATIYMAALSAARYNPVLRVFYRRLRDAGKPAKVALVATMRKLLTILNALLKHQSHWTTQVASTPASLSGPARAATV

SEQ ID NO: 143168 - protein, 346 aa, unidentified
MKDNNAKGEVKVIGIDLAKQSFQIHGVDVNGQAVIKKKLSRNQLSEFVAKLPSCLIGMEACGGSHYWVRVFTGLGHTVRLIAPQFVKPFVKSNKNDAVDAEAICEAVQRPSMRFVPSKTLEQQDIQSLHRIRSQAVARRTALANQIRGLLMEYGVVIQKGISYVRKQIPMILEDADNELTFLFREMLNELYDEMAHLDERISKLEDKLTILSAQNEDCQRLLTIPGVGLLSASAMVAAIGDINVFKNGRELAAWIGLVPRQHSTGGKPTLLGISKRGDSYLRTLLIHGGRTVVRVADKYQDRRNQWIAELDKRRGKNISAVAVANKNARIAWALLSKKTTYQASMG

SEQ ID NO: 143169 - protein, 406 aa, unidentified
MNLNAVGIDVSKRKSTVSVLRPGGEVLMKPFDISHRTADFQTLADKLKALDGETRVVMECTGHYYEPVARELSQAGLFVSAVNPQIINKFQGQGNPLRKVKTDKADSVKIARYTLDNWANLKQYTLMDELRSQLKNMNRQFDFYMKHKTAMKNNLIALIDQTYPGANTYFNSLAREDGSQKWVDFLDTYWHVDCVRKMSLQAFTEHYQKWCSRKKYSFRKSKAEEIYGIAKELVPVLPKDNFTKCIIKQAVAQVNAASQTVEQLRSLMNETASKLPEYPVVMAMKGVGPSLGPQLMAEIGDVTRFTHKGAVTAFAGVDPGVNASGDYSQKSVHASKHGSPMLRKTLFQIMDVLIKTKPDDAVYLFMDKKRAEGKPYYVYMTAGANKFLRVYYGRVKEYLSALQESY

SEQ ID NO: 143170 - protein, 388 aa, unidentified
MAYVGIDLHKNASQVCIYDEETEGYIERRVRTDFDGLRRALEQHSGSKVLLEASTESEWVAQWLEELGYEVVVADPNFAPMYARRNRRIKTDRRDARALCDACRHGTYRPSHRRSAERRRWQAQLRVREALVRTRTKFISQTRALVRQRGYRVPSGAARTFATRVEALELPSDLMELLDPLLSLLSELNGRIGECDERLKQIVRNDEVVQRLCTTVGVGPVTAVSFVATVDRAERFESARSLRCYLGLVPREHSSSERRQLGAITKQGNTRTRSLLVEAAHCILRNRREETAHLRAWAERIRARRGLRIAAVALARKLAGILFAMWRDGTCFRAPPARLTTSPAPAGLGFTSLSESYGCVSTDMGLGLGSPTDRWCRTPHPKLILRPT

SEQ ID NO: 143171 - protein, 342 aa, unidentified
MDVSVIGIDLGKNSCSVAGMDEAGSVVFRRRATRLGVVEIVRRHPGCIVAMEACCGAHHLGRVFLEEGHEVRLMSPEYVRPYVKAQKNDDRDAEAIAEAATRPTMRFVPVKSQEQSDLQSLHRARERLVGDRTALVNHLRALLLERGLIVAKGRAKLRSEVDEFLAGAAPELSPRIRILVVDLIEEWNRLDARIKAFDAEFVALARTDPAMRRLSTVPGIGPINATALVAAVGDARAFGKGRDLAAWLGLVPRQATTGGKPRLLGISKRGNRYLRKNLVHGARAVLPKLAERDTPIGRWLRDLLARQHKNVVVVALANKLARICWAVLSGGHGFAEEVAEMH

SEQ ID NO: 143172 - protein, 332 aa, unidentified
MYSFFVGIDVSKETLDVAYYAMSKPRYAGQFSNQIAGFRNMIRELKKVTSAVPEDWFICFENTGTYSKTLLNWLFSQGIACREENALTIHKSKGLQRGKDDKIDARVICQYLYLHREKLAPTKPTNPAIYQLKKLLSRRNLLVRKKSALQVSLKEQRKEYDPDIYRFLVKQNNQLLDMIQQQIKQVEQLINKLIKKDPKLEDQYNLIQSVKGIGPIIAAYLLAYTENFARFKNARKFACYCGIAPFPNSSGKTLKGKNKVSHMANKQIKALLTNGANAAVRWDNEMNLYYHKKIGEGKEYGTVINAIKNKIVARAFAVVSRRTPYVCLATYA

SEQ ID NO: 143173 - protein, 428 aa, unidentified
MSNQEIIRRRRYCQIVKEITGSDQYLVVGIDVGKDKHHAFMGSATGKSLFRKLIFENNIAGFSRFLETAEAIKVQNGLSKVVYGLEPTGNYHKPLASHLIRCDCNVVLVSGVAVKRNRELLDGRWDKHDTKCAANIADLISRRRCLYYDSPSPGIIELRSLLSLRRRLKKEEHSLRMRIRNNLLAQYFPELDCFYNACESESLAIVKWCLNPDKIAGMDFESFFQMVTRTRRGTAQQLRLRKIHQQAIESVGCPMASAATFEAQLLVEKLKQVRRQLKETETAIKDVALEFAEYNYLLTIPGFGPYVSARVLASIGDPFRFENRKQLIKLAGYDLCAKRSGKTSDKAIPVISKKGNGELRYALYQAAKVASARVDLFRTYITRLIRGRERERGIKTKMRVKLAAKMLIIAWTLMKEREVFDPAHLNIE

SEQ ID NO: 143174 - protein, 377 aa, unidentified
MKSIVYVGIDVHKDSYTLVCLKPNLEGEDQIFGTMKIQSDYHRVLQYLERMQKILGEDVEFICAYEAGCMGYSLYHQLTGKGVKCFIIAPTSLLREKSRRIKTDKRDAINIAKSLAYGTGRHVHVPSAEDEMVQQYIRMRDDHKKIFKSLKQQILALCLRSGNNYSGMTNWTKAHLEWLLKLELDWLLRETLDEYLATYGQLSDKLAAFERRIEELAKSDRYREDVGKLSCFVGIKTYSALAILVETGDFERFPSAGKYAAYLGLVPGERTSDEDRNVTGITKSGNSHLRRILIESSQSLCKGAVGYKSRALKTRQKGNSSQTIAYADRCNERLRRKYYQMMRKGKNRNVSVTAIARELACFIWGMMTANTKARDAA

SEQ ID NO: 143175 - protein, 334 aa, unidentified
MEEAPSSSSRLTFSLGIDVGKSALELALRDGKDTVAGTTVSNNPEGHKNLADWLQDRGAEPENTCVCMEASGDFQEAVARFLHEEGYRVSVVNARRIKGYAASQLQRTKTDAADAALIARFGWREDLRAWEPPSASESRLQELTRARQALKKEKTRTQNRLDEAEDEAVRRAHRNLLDEIEQQIEDLEEEIEEHVEEDPELKGRCSLLDTIPGVGLQTAAVVISELGSPERFDSARQAAAYAGLVPSHHQSGTSVRGTPRMSKVGNGRLRRAMYFPAMTALRFNSAVKAFGDRLKERGKEKMVVIGAAMRKLLHICYGVLKSGRPFDASLHPGT

SEQ ID NO: 143176 - protein, 335 aa, unidentified
MMKKRYFLGNDIAKETFDFCLLNSAKVCLWQGQFPNSDAGFKALLEGLKARGFKLKQIHFALEATGVYGRALMATLHAAGLAVSELNPAQVKFFGISYNKRTKNDSLDAKLIALYCLERRPMATRPLRPVEQQLKMLVHEREARVNEQTRERNRGQTDQAQPGSLPPILLRQRQQRLAQLQTQIAQLDSAINALLDSDPKLVHQASLLTTIPGIARCTAAKVLAQLAGKEFSSARQLAAYAGLTPAECRSGTTFYGKTRLCKIGNSFLRKALYMPAAVARRWCKPLAKWADLLQARHLRPLAIRGALMRKLLHLIFGILKHQQPFNPNLLPCPKQ

SEQ ID NO: 143177 - protein, 394 aa, unidentified
MKLVGIDVGKNSHHFCVMDKETGEFNVAPSSFSNNKEGFDFLINSLKPYSKKSILIGMEDTGHYHVALLKFLLSNGYTVALINPKTTDLTRKMEGGITKNDKLDTITICDVLDTPERKKQYRITKVDRFDLYEQRQLTRHHHNLKEELNVYCNRLQKSIDLVFPEFNTLFSSKYGIVYMNLLKTFGSAEAIASTDIRTIRKCFEIEGRGKRISLTPEKLKECAKNSIGISSEVETIQIKHLVRQITLIKEQIAEIDKKIEEFSITNNSPILSIPGISHFSGTSILAELGDIGNYSKPSQIIKFAGVAPYHYESSQYNAQHTGITKKGSKYLRKTLYQIILPVIKNNPVFKKYYLLKISQGKGHRCAQGHCIRKLLRIIYHLLETGQSFDPALLR

SEQ ID NO: 143178 - protein, 341 aa, unidentified
MHQITTIGLDTSKNVFHVVGINQAGKTVIRKQLRRQQVLQFFAQLPVSLIGIETCGGSHYWARELTKLGHQVRLVPARDVKALVRGQKNDYHDAFAIAEAVGRPQQRFTPIKQEGDHDAQILHRLRRGYVNERTAQSNRMRGLLMERGVFIAKGLAPLRRRIPELLEDADNTLSALVRDILYRALQHLYELDGEIEHCDQQLKELVRNDETCQRLMTVPGFGPMVASSWRARMGECRQFRRGRDAAAACGLVPQQHTTGGRPKLLGITKRGDKELRTLLVHGARSVVQHAHKKDDALSLWVCQLVARCGYNKATVALANKMARIAWAITVHKTDYVPRMAA

SEQ ID NO: 143179 - protein, 491 aa, unidentified
MSQRRLVGIDLGIASAHTVRVLREDGGEVCRRRCWPRLDSLLEVEAAALAGAPPELRLEVVIEPTGPAWLPIAVFFTSRGHTVHRVSSAKAADLRRFLSRHAKSNSIDAQTLARLPLVDPGGLRALRLPERAAASLDRQVRATDRLTRQAAERKRRLKDLVRQLLPMTPLQGDLGRADLAVLERTGAHPGRLLALGRARLTRLICTASNDHLGEERAQAWLDAAHLALELYGDHPALAFDDRASEVVTEVRLLRAIEAELPAHESAREQAYRQVDPDQLARSLPGVATVGGPALAALVGDARRFPDGASFRSFTGLAPRASETGETDRKGQPMSKAGPRLLRTTLLRAAEIARHLDPQLARLYYVQVVERGACHLKALCVVAAHLGERAWVVLARGTPYKFCDIDGTLVTPEEAKALAANWKVPDEVRQRRRSRKSRKQGGKAPHQVHQGPAARARGAHTRRPSPEPIVTSDLTPIKQVLTVLQERINVPS

SEQ ID NO: 143180 - protein, 340 aa, unidentified
MQAITVGLDIAKSVFQVHGVDADGQVVIRRQLKRRYVLAFFEKLAPCLIGIEACASSHHWSRQLRALGHTVRLMPPAYVKPYVKRQKNDATDAEAICEAVGRANMRFVPTKTPEQQSGLVLHRTRHLFIRQQTSVINAIRAHCAEFGIVAPVGRRGVEELLNAIANEKRVPEIARACLLALGAQLRTIKEKIVEFDRMIRAWHRSCETSRRLDEIPGVGPALATALVASVADPRTFRSGRDFSAWIGLVPKQNSSGGKLKLGSISKQGDRYLRGLFTAGALAVIRYAKIHGTGHRPWLTALLARRPTKVAAIALANKIARMAWAMMARGECYREPVALAA

SEQ ID NO: 143181 - protein, 387 aa, unidentified
MQSVTSATAVATTARANNITLFASLELSKSKWVVTINSPDSEKFSKHVVEGGGGACLLDLLSRSRAKAEQRYGVQIKAIVIQEAGLDGFWIHRLLLANGIESHVVDAASIAVDRRHRRAKTDAIDGETLLRTLMAWARGERRVCSMVRAPSPEDEDRRRLTRERGTLLKERIQHTNRVRGLLSGQGVRDYNPLRRDRFERLEALRTGDGRELPPMLKAEIRRELDRIALVTTQLAAVERARDALIHTDAEEHNNPAALLLKLKGLGPEFASLLWLESLFRSFGNRRQVAAYGGLAPSPWQSGNVERDQGISKSGNRRLRKTMIELAWFWLRHQPDSALSRWFQARVGAAKGRIRRIAIVALARKLLVALWRYATQGVVPEGAVFKAA

SEQ ID NO: 143182 - protein, 350 aa, unidentified
MTRNTVQAQSVREIVAGIDTHQDSHHVAVLDTAGRLVADQAFPATAAGFAALLSWIGVFGTLLRIGVEGTSSYGAALTRFLLAQNVSVIEVPPGDAAARRRRGKTDAFDAEAAARRALDEQSPRIPKDTTSTVEALRLLSTTRNLLVKQQKEITGQVDQFLITAPDTLRDLPREGTRRTRMRRLAALPDSTSGDVVTDTLTRLLRQHATRWLTLDSDATAIEKTLRELIELRAPRLLEVYCVAAVTAAQLLVAVGENGHRIRSEAALAKLFGAAPQPVSSGKTNRHRLSRGGNRQANCALHQIAIARLGHEQRTRDYRDAHLAAGKTTKDTLRLLKRALCRELFPHLCRP

SEQ ID NO: 143183 - protein, 338 aa, unidentified
MTVYAGLDVSDKSTHICVVDGEGAVVWRGVCATDPEVLAATLQRRCLGLIRVVLETGPLSAFLYHGLVERGVPVVCICARHAKGVLSVRANKSDPHDAEGLGQLARTGWFKAVHIKDDATHLDRAQLKVREQLIKAHRAMANQLRGLLKLFGLRMGKATTPGRRAERLEALLAQKPALRPILAPLVAGLAALEEQIAASSRSLKARAKADPVCARLMSVPSVGPIIALTYKSSIEDPGRFARSRDAGAYAGLVPRRYQSGERDTKGRISKAGDPMLRSALYEAANNLLARVKRPSPLQTWGRALAASKGAKRARVAVARKLAILLHRLWQSDTSFQWA

SEQ ID NO: 143184 - protein, 341 aa, unidentified
MLKFTIGADISKDKINFALRFLNDYLLDKEIENTTSALNKFIKEVRSFVKSMAKEKKSEYSLEFIMEHTGIYGNLLIECLAGHKITMYVISGLEIKNSTGISRGKSDKIDAQRIADYGVRFADKLKPYSLCDKVLSELKGLNTKRSQLVKLKSQLTQANGDNKKFQSKDLLKKLSKIDEAVVKALIEAIDKIETEMLELVKSDETIYENYMIAQSVPGVGKLISIAFICTTNNFTKFESAKALGSYCGVVPFTKESGRYKGKDKISPIANKTLKKLLHLGAVASISGKNPFASYYQRKITDDKKNKMLALNNVRNKIVKTLFACIKNKTKYKPDYIFTFAA

SEQ ID NO: 143185 - protein, 326 aa, unidentified
MTVYLGIGIASKKFDVAELCDGKYRCKAFENSSAGFLALYKWLGQSTMPDIHACLEATGDYGTSLATFLYENKIKVSVVNPARIKGFGASELSRTKTDKADSKLIARFCKAAVPDGWKPTPAPVRKLQVLVRRISALNGMLRMECNRRENADAHIQASLDRMISLLKTEIEVVRQEIKDHVSSDDELKKQDALIQSVPGIGAVSSNLILSFMSGKGFRKAKEVTAYLGLNPRHHQSGSSVRGKTRMSKMGDARLRSALYMPALVALRYNPDIKAFGQRLLLAGKPRMLVVGAVMRKLIHIVFGVLKSGTAFSSRIAAHSVVTSRPQ

SEQ ID NO: 143186 - protein, 315 aa, unidentified
MVEQVVVGIDVSKAKLDVALLPGGEQFTVSNDRHGIGELLRRVSPLAPSRVVLEATGKLEQLAVSELAAAGLPVVVINPAQVRHYAKARGKWAKTDPIDARLIAEFARDLEPELRPLPDAETQALAALCQRRNQLLEMEQMEKSRLQRAPRANQKSIKAMLRFVRRQVEQVEKQIEHSIRHSPLWQAKRELLESMPAIGKVNSSTLLARLPELGQFTRQKICALVGVAPYNDDSGQWHGRRHIAGGRAGVRQVLYMATLSAVRCNPALRDYYQRLLGRGVEPKAALIAVLRKMLTILNAMVRDNTPWRPPCPIPA

SEQ ID NO: 143187 - protein, 365 aa, unidentified
MKCIDVSSTELSSHEETRCQFNGGTGAIKLGIDVHQQFYTVVVQEGGLSPKPPQRFAKEGFLHWAAKLKHRTEQVHGVYEACGFGFTLQRKLAELGIECHVVCPQKLDEQNRRVKTDGLDAKALCLKLDRFVQGNSDALALVRVPTEEEEQLRAIHRQREQLVKARKQLEAQGRSLMVNHGIEPVQKWWKRRVFAKLEVPVWMKELLGNSQPILLGLEEKICALSVQVQSAAALNQPRGLGKMTSVVIDREIGNWQRFNNRRQVGSYTGLCPGEYSSGNTRVQSCVTKHGNPRLRAALVELAWRMVRFQPNYKPVVKWHHTLAHGALATGAARKKAIVAVARQLAIDLWRIRTGRCTAQQLGLTL

SEQ ID NO: 143188 - protein, 353 aa, unidentified
MNQELRRVIGGVDSHADNHQAAALDERGRLLGSKSFAVSAAGYRELQAWLASFGLIDRVGVESTGSYAAGLTRHLLAEGVRVLEVNQPHAHSRRRRGKTDAIDAELAARHALSLASAVTPKQSSGIVESIRQLRVARGSAVKSRSAAIVQLGDLVRTAPSELREQLAIRSTVKGKAALCRRLRPDSDRLSEPANAAKLALRSLAGRIAGLAEEIAELDRQLAPLVATAAPRTTALLGISTGHAGQLLITAGQNIDRLHSEAAFAALCGASPIPIASGKRGRYRLNPGGDRQANRALHMIAVCRLRHCPKTRAYAHRRSSEGKTKKEIIRCLKRYIARQTYATLREDLRSLAIA

SEQ ID NO: 143189 - protein, 374 aa, unidentified
MVWAPPSYCRCLRCTLGECQIDDPIVTIETEAIVERTVIAIDIAKKVFQLHWVDMDTGCIERLQLKRAKLLEWFANRTAALIVMEACGGAHDWGRALLELGHEVRLISPRKVRPFVQRNKTDAADAQAIWTASQQPGMRFVPVKTEAQQIVLSLHRLRAQLMKTRIMQTNELRGLLYEFGIVLPEGHAALLKALPDAMCDSKTRLPAMLMDSLDEQLRRVQQLQADIGLIERRLSQQMREIPACKAVAAIPGVGLLTATAVVASMGAPTAFRDAREFAAWVGLVPRQTGTGGRVRQLGISKRGDAYLRTLLMHGARAVVIRSKDGPTWPWLQALLQRRPYSVAVAAVANKLARTIWAVLARGKAWRPEAWQAAH

SEQ ID NO: 143190 - protein, 353 aa, unidentified
MGHKYVGLDVHQSSTVAVVQDEQGKSVMESILATEAEAIRDFLKGLRGTIHVTFEEGTQAAWLYEIVKPVVAEVMVCNPRRNKLLAVGNKADRVDAQKLAELLRCRQLKPVYHGTPGVRLLKELVHSYDSLVSDTTRVMNRVKAVYRGRAIGCAGRDVYYQRNRGQWLEKLTEAGVRQRAVFLYQQLDTLRGLRREAKKAMLKESQRHRAYATLKQIPVLGPIRIAQILAKVASPHRFRTKRQFWAYCGLAVVTRSSADYQFRGGKAEKRQRAPMTRGLNPNFNHRLKYVFKSAAVDGIHQAPFEGYYARLLVKGMRPEMARLTLARKIAAVTLTLWKRGERFDELKVSEQAA

SEQ ID NO: 143191 - protein, 321 aa, unidentified
MQSSDFIGIDVAKATLEIATADATSPTQTITNDRTAISTWLATLPATAQLALESTGRYHELAVALAGGRGLPVYLVNPRALHHYAKAVHRGAKTDRLDARLIARYLAHEHAQLRPYTPPSAAVQELLRLQRRRAQLMVTLTSLRQSLADLDVCRREQRDALQGLRKLVAAVDARSAELLAAEPARADLAQRLATIPGFGPLNSRHYATLLPRLAPPRLSALISYVGLDPRPRDSGTFRGQRKLSKHGPAETRRLSYLAAMAAARYDDDWKNLKDQLIARGRSTTEAFCILARRLLRIAYALYRDGGVYDPAKLAPEGGQTT

SEQ ID NO: 143192 - protein, 421 aa, unidentified
MTVYLERGYNRKEYQWFYKQYQNIYSKEIFMIYVGIDVAKDKHDCFITNSDGEALFKSFTIPNNRKGFETLFQKVQSVSDDLTKVKVGLEATGHYSYNLLGFLLDKGLPTYVINPLHTNLYRKSLSLRKTKTDKVDAHTIASMIMSDVNLKSYSDTSYHNEELKSLTRYRFDKVQERAKLKTSVSRLICILFPELEKLVPTIHMASVYALLSEFPSAHAVASAHLTRLTNLLSESSHGRYGKDTAVMFREAARNSIGSNMPAKSLELKHTIKLIQELTSEIDEIETEIKSIMDEVNSPILSIPGINYRMGAMIIAEIGDFSRFDSPDKVLAYAGMSPSTYQSGQLDNCYSHMEKRGSRYLRYALYNATKYVCHWDESFGTYLAKKRAEGKHYNVALSHATKKLVRTIYAMEKTGQSYSSAP

SEQ ID NO: 143193 - protein, 424 aa, unidentified
MNLTQNDRLKQVTSDTLIVGVDVGSQTHFCRAFDWRGFELSRRVFKFSNTGMGFLTFLRWTEELMNKTEMKKVIVGCEPTGCYWLTFQKFLQDHDIQLVTVNPFTVNRSMELDDNSPEKSDLKDPKTIALLVKDGRFSTSYLPRGVYAEIREASVCRDQIMKQHVRLSNQIQGWLQKFFPEYFECYTDWDSTSGLMLLREAPLPQDILKIGAGGINQIWRDAKVRAAGIKRAQTLVEAAQNSVGLEAGEAARLEIWVLVNDYILKAEQLKRLDEYLEEKIKEVPNVEKLLAIKGVGMSTVIGFIAEVGDIGRFTDPKQIQKLAGLEIVKKSSGKKKGQPRISKRGRRKLRRTMYESARALMTWNPAFQDVFLYYRNRTKNPLGGMQAKIAVACKAIRIFYVVLQTGCDFDEEKFRKDIIRPEAA

SEQ ID NO: 143194 - protein, 351 aa, unidentified
MRYIGVDVGKKRCQACIMDEQGVVLDEFPFENNRVGIGRLLERVPDRTCKAVLESTGNLWLSIYEALEGHGVEVKLANPYRTKAIASARNKTDKLSARILVHLLRADLIAECYVAPPETRRVNALLRQRASLVRMRTMVKNRVHSLLDRYGYRPRWRDAFGVAGMRWLKGLEMDPVDRCILDTHLRHMECLNGEVGVLDSRIASHAMESEDALLLMTMTGIDYYGAMLIAGEIGEIQRFPSPKRFVSWIGLCPSLHQSGSSTHLGRMKKDSNRRVRWMLVQAARSASRTDPRMRQLYERIASRQGDAKAVIRVANKMATIIWHMLTKRQPYKQMKEELYRSKLKKMARIAG

SEQ ID NO: 143195 - protein, 312 aa, unidentified
MDLLVVGIDVSKDRLDVTVRPTGESVTFRRTGGGIDDLIARLKSLAPKMIAIEATGGFETVVVAGLAGAGLPVVVVNPAQVRAFAQALGKRAKTDPIDSAVIAHFAEATKPKLRQMADETTRLLAHLVARRRQIVEMIAAEDQRARRMNDKRLTKSVARLRKALEKELSELDALIGDQIRGSAVWAEKEDLLASVPGIGKTIARTLIAELPELGSLDRRKIAALVGLAPWTRQSGQWRGKSFIGGGRKSVRNSLFVGAMVAARFNPPLKSFRDKLVAAGKSKLVALVAVARKLTTILNAILRDRRPWQPIPA

SEQ ID NO: 143196 - protein, 457 aa, unidentified
MSKAKRPSRRREMSPVHAHAAAVDIGATLNVAAVGPDRDPEPVRSFGTFTADLHRMADWFERCGVRTVAMESTGVYWIPAYEVLEQRGFAVVLVNARDAKHVPGRKTDVSDAQWLQRLHEYGLLRASFRPDAEIAALRDYLRQRERLLDYAAAHIQHMQKALTQMNLQLHHVVTDITGATGLRIIRAIVAGERDPAVLAALRDYRCKTSEETVRQALVGNDREEHVFALAQALELYDTYQAKVAACDARIEAALNRLQADCPVPATPLPAPRHQAQTHNALAFPAREALHRILGVDLTQIHGLGPYLALKLVGECGTSLSAWPSAKHFTSGLCLAPSNKISGGKVLSSKTRRSNNRAAALLRLAAVAVGRTETALGAFYRRLSGRVGKAKAVTATARKIAVLFYNTLRHGTAYADPGASYYEERYRQRVLASLRRRAKSLGYVLQATDPTPAVAEVS

SEQ ID NO: 143197 - protein, 362 aa, unidentified
MQSTPLIAFDQHAATTVAAVLLVGQRMPALHTLTSDSPTILRFVKKLQREVGAVRCCYEAGPCGFELQRALTTDGIACDVIAPALIPRRAGDRIKTDRRDACQLAVLYRAGALTAIHVPTAHEEAVRDLLRCREDIRADLLRARHRLSKFLLRHGRRYTATKSTWSLRHHAWLRAQTWPLPGLTQTHEAYLRAVDEAVARLRTVDAQLQDLVLLEPLRDRVQRLRCFRGMDDITALTIAAELGDARRFPSARGLMAYVGLVPSEHSSGARRARGAITKTGNAHVRRVLVEAAWHYRHHPFIGKQLRRRQLGAPPAALIPAWSAQQRLYRRYQRLAARGKPKQHVVTAIARELTGFVWATLTQ

SEQ ID NO: 143198 - protein, 340 aa, unidentified
MNATTYGLDIAKRVFQMYWVDAQTGEIANRKFGRDDLIAFLAQRPAGRVALEACGSAHWWARKIRALGHEVVLLHAQFIRPFVQTNKTDAADARAIWTAVQQPGMRTVAAKTEDQQVMLSLHRMRSLLVKFRTMQINQLRGLLYEFGVTFRAGRVAGLDEIRKRMAELEDTLPRSILLNLLEQLRRITLFEEDIDQLEKRIGAWQKQEAACRAISEVPGIGRLTATALVATIGDAKTFRSGREFAAFLGLVPRQNGTGGKIRLGSISRRGDPYLRTLLIHGARSVLCHAKVPTGWQKAIQERRPANVATVAMANKMARIAWAILAHGTPYEAHHVSNRPA

SEQ ID NO: 143199 - protein, 377 aa, unidentified
MGEDTAFVGLDVHKETIAVAVAEDRRGGEVRYLGEIANTREAMRKLVTKLLKAHATLRFCYEAGPCGYGLHRQLTEMGHDCVLVAPSMTPSRPGDRVKTDRRDAVLLARLHRAGELTAVWVPDEGHEAMRDLVRARTAAMEGLRRARQQLTGFLLRHDRVFRAGCNWTKKHRVWLATLRFEHPAHQIVLQEYIDAVDDAGHRLSRIEGQIRTLVPTWSLAPVVAAIQAMRGISFIAAVTVMAETGDLNRFDTPRQLMSYLGLVPSEYSSGPRTARGGITKAGSKDARRVLVEGAWTYRAHAAVGAVHMERLEAVTKDVRDIAWKAQIRLCARYRRLVARGKQPTLVVTAIAREMAAFIWAIARTVTPKPPAAPAAIC

SEQ ID NO: 143200 - protein, 401 aa, unidentified
MNATSVICIGIDVSKDKSDICIKDKLGNDLVKRFKIANTKADLGILYETIERIRSKIPGNSDVVFGMEATGIYSLPLYSALERDGHKVKLYNPIQTNGFRKMNIRKTKTDPIDSAIIADMLRYSEPPQVNAIKDLNLYQLRELVRIRDRLIDKQTVCKVQLIRNIDTVWPDYSSVMKRATGATSIAILKKYSVPSKVRAESFENFYELVKKKSRSKIFRTTAEEIYTHAGNILTIPELDSIISVEIKTLITELELYDEQIRSIEKRIDQMMKLVDSKIMSIPGIGDTLGPMILGEIGDADRFSNAKKLIAFAGLDPVVSQSGRFENRSGPISKRGSPLLRKALFLAANVARQNDDNLKRFYDKKIGEGKHHFSALNAVAAKLLRITYWVLKNNKEYQTQVN

SEQ ID NO: 143201 - protein, 427 aa, unidentified
MPYKIASIDVHKAMLAAVNSDVEVVGEFEFERRQFGTTDGGLHQLVDWLIEQQVDEVVMESTAQYWKPVWAALERYWKPVVQKREGARPTTGSLHLAQAQSNRARRGRKRDFTDAERLLKRLVANELVLSLVPDPEQRLWRTIARAKKQQIGNRVQLQNRLEALLEEAYIKLSCFVSDLLGLSARRMLKALADGETDPEAVAALADNRLRATPNQLSDALGACRELNPVYRRLIKAVLEELELIDKHISRLDQEMADLLRPYQEQVQRLAEVPGLGPDSAQQIMAQVGATAATFPSGKALSSWVGVCPGDNESAGVNSSSRCPKGNRTMRSLLNQAANAAIKYKGGIFQIIYRRYVSRLGHKQTIGVVAHRLCHLIWKILHQGVRYDERGPDVNRRSQHQRTRRMIYELRKLGYRVELANSQSPVQA

SEQ ID NO: 143202 - protein, 315 aa, unidentified
MKTMDGIFVGVDVSKATLDVAIWEAEQSWQVRNDSAGIRKLIGRLQELEVSLVVIEATGGYEKLVVAELVLSKLPACVVNPKRVRDFARSAGQLAKTDKIDAHILAQFAQAVRPTPRPLRTEEEERLSALVSRRRQVIDMLTAEKNRLATAHLATRKRMEKHIEWLQQELADIESEIDQFIQDTPLWKQKDELLRTVPGIGEVTAYTLLADLPELGTLDRQEIAALVGVAPLNKDSGVKRGKRRVFGGRQTVRNVLYMAALSAARFNPKIKAFYERLIKAGKEKKVAIVACMRKLLIILNAIIRHQRPWQLNFHS

SEQ ID NO: 143203 - protein, 350 aa, unidentified
MLIIGCDYHPGFQQIALVDTETGELEERHLAHRQGAEQFYQELKQRNVAVRVGMESSGHSRWFERLLRQLEFELWIGDAAEIRTKRVRKQKTDRQDAQLLLRLMMEDRFPRIWVPDAANRDMRQLLWHRHRLVQMRTRVMNQLHVVALNEGLRRKKALWRTAGRKELEAIALAPWASRRRQDLLEVLDQLTPKIQELTRALEEEVEKRAVTRRLMTHPGVGPLTALAYELVIGTPERFHCGKQIASYVGLVTEEKSSGDRRRLGHISKQGNVLLRFLLVEAAQVTVRSHPEWRSTFFHLAMRRGRKIAKVAMARKLAVHLYWMWRQGRDYGQLQKLGSHAGEPGNRHGVQ

SEQ ID NO: 143204 - protein, 429 aa, unidentified
MNSTQNKKIEQVKETTMIVGIDVGSEKHYFRAFNWRGIELTRKPVAFSNSMEGFNSFYNTIVELMQKSELEEALVGIEPTGHYWFDLGQFMGEKSIKFVMVNPHHVHKTKELDDNSPSKNDRKDPRVIAGLVRDGRYFYSYMPTGVYAELRNASNRRFVLVEEQTRAKNRLQKWIAVYFPEYKGIYTHIDAKGGLLVLKQAPTPEEIVKLGEEGIIKIWKDAKLRRNGNKKALKILNAAMRSIGLRTGLTEARMEIQDLIEDYELQTKRLERVNDLIKELCQQIRYADKLLEIKGIGITTVAGFIAEVGDITRFDSTKELQKLAGLELVADSSGKHNGKTKISKRGRKRLRYLLFEAAISVVGKNEEFKEIHRYYTTREKNPLKKMQSLIAVACKLIRVFHVILTKGVSYDASKMLEGIRHPGEQLKAA

SEQ ID NO: 143205 - protein, 348 aa, unidentified
MKNKSFVGIDISKNVIDVSIFREDTNIKMFPHEVFNNTRKGFGDMCSWLKKSRVVLSQALFGMEFTGCYSLDLEKFLTSKNYSFCMLSTRIVKHHPMGTIDKRDKNDSAKIADFLYRYDGTECAKPYKLPSKAMQQLKQLVNERKFLVEQRTNFMNRMQMFETKEDSAMYESYIKKLNHDIEKIDQEECELMSKEEDVFDTFQNLLTIPGIGFVNATNIIAITRNFTAFDTARQYARYVGVAPCRHTSGTSVKWRARPSAHCNGQVKADLSMAALRAVEYDVEMQMFYNRKLGGRKDSDTKRKALNAVKFKLIRRMFAIGKQKRKWEVLNTSDDRKNLHIEKSKASEL

SEQ ID NO: 143206 - protein, 369 aa, unidentified
MVPSSTDRVVIAVDPHKASWTAAVIDSALQPLDVVRVDVSADGYRQLRRFAQRWTQPVWAIEGAAGLGAPLTQRLAADGIEVIDVPAKLAARVRLLSAGHGRKTDEADAVSVGIAAVTATRLNTAAVDAAIIAMRALVEHRDDLVKTRTQTVNRLHVLLTHLTPAGAPRGLTADRAADILRQIRPRETAAKTLRSLALDLVAEIRQLDRRIAKAATDIAAAVEASGSTLTDLSGIGILNAAKIIARVGTIDRFRSADAFATYTGTAPIAASSGDVTRHRLSRAGDRQLNCCLHTMAISQIARDTPGRDYYRRKRAAGKSHREALRCLKRRLSDVVYRQLMHDAARREAGPGGHLGAALTSSAVSSNPTC

SEQ ID NO: 143207 - protein, 462 aa, unidentified
MARATKPKKSLKRRHEPVKLELPVELKSVNLNAAGIDIGSKRHFVAVPQGRDTVSVKQFGVFTEDLEEMAEWLYQCGVTTVAMESTGYYWIPVFELLEGRGFEVKLVDARQTKNVSGRKSDMLDCQWQRELHTVGLLKGAFRPPDEVCVIRGYMRQREMLVQASTMHIQHMQKALTHMNLRLGNVVSDITGVTGTKIIKAIIGGERNPQVLASHRTEQCKQSQKTIAKSLRGNYRAEHLFALKQAFELYQIYQEKLSECERELMQVVQQQPHKTEEEPPPADKKLRTRDKVRGDVDVRSELYKQTGVDLYRVPGLGPETLLTLRGEVGIDMTPWKTEKMFSSWLGVCPGTKESGGKVLSRRSKRSRNRAAAAFRIAAASLRNSPSALGAFYRRIRARSGEAKAVTATAHKLAKIYYRLLKYGEAYVEVGEKAYEERYQQQRVKALKKQAALLGFTLVATALS

SEQ ID NO: 143208 - protein, 340 aa, unidentified
MLTIGLDVHQARTSVCVMDGKGNILREQEVKGGYGAVAEALAKLKKPFQVCYEASTGYGALHERLSPLAAKIAVAHPGRLRLIYQSTKKSNRVDARKLASLLHLNQVPEVHVPGQEVRSWRGLIEHRRSLVDQVVGVKNQVRALLRGQGIKGPPGKRMWSATGLAWLKEVPWPTEMEAFRLEILLDQLSDLIKKLDRVTRMLDAIGEKHAGVKLLMTIPGVGPRTAEAFVAYVDDPHRFGCGTIGAYFGLVPREDSTGDKRRLGHITREGPPTVRKLLTEAGWRGSRESATIKDVFERHLRGDKGRRKLAIVATGHWLCRVMLAMLRSGEAFREKEAAKQ

SEQ ID NO: 143209 - protein, 353 aa, unidentified
MKLIGCDFHPSWQQICWVDTETGQTEEHKLVHAPGEAEKFYRRFASPARIGMEATGNCQWFVEMLAALGHEVWIGDAAKIRASDVRQQKHDRRDAALLLRLLMENRFPRIWTPSSAEKDLRQLLIHRHKLVRLRAQTKNGLQHLAMNQGLQKKRRLWSKAGQEALRELALEPWASRRREDLFSVLAMLDRQIESLDLAVKQAAEQNENAKLLMTQPGVGPVTSMAFVLTLGDVSRFPRGKQVASYLGLIPREYSSGGQQRLGPISKQGNRFMRMLLVEAAQVAVRCDPQLRREYLQRCHHDKPKGVAKVAAARKLAIRLYWMLRTQKPYPEIVHVESSSRVPLASAPADKPKA

SEQ ID NO: 143210 - protein, 316 aa, unidentified
MTGTPTYAGIDVAKDRLDVVLRPSGEYVEATNDERGIRSVVRRLRKGDVALAVLEATGGLEQPAAAALALAGVPVAVVNPRQVRDFAKATGKLGKTDRLDAAVLAHFAEAVRPEPRPLADEHARELSAVVLRRRQLLAMTTAEANRARTAPKAVKKRIEAHLRWLRKELARVDGELKQVVEESLVWKERAALLMSVPGVGPTLSATLLAELPELEHLDRRRLAALVGVAPLNRDSGTLRGIRTVWGGRSGVRTTLYMATLCATRHNPAIREFYGCLVASGKPKKVALTACMRKLLTILAAILRNRTPWQPRLLPDS

SEQ ID NO: 143211 - protein, 323 aa, unidentified
MQITTIGLDIAKTVFQLHGVDSEGRVVLRRKVRRDQLLGLLGGLEPCLIGIEACATAHHWARQLTALGHEVRLMPPTYVKAYVKRNKNDAADAEAICEAVARPTMRFVPVKSADAQSVLMLHRARHLLVRQRTAQVSAMRAHLAEYGIIAPKGRAHVRELVEALDSDDTTIPDLARQTLQLIAGMIEELSAQIRRIETELMAWHRATPASQRLETIPGIGFITATALAATVGDARVFRSGRQFAAWLGLVPKQNSSGGKERLGGISKMGDRYLRHLLVVGATAVIRFARRKPTALTGWVNRLLDKKPARLVSVALANKLARIA

SEQ ID NO: 143212 - protein, 445 aa, unidentified
MGQRTIGIDLAIRGDHVARIFDDGRPHAKPIRFRLTSDSLSSLVARLREELPAESTITAVMEPTGMSWFPVARWLEKAGIKAIRVKGQRVRALRRYLSEHTKTDAADAYVLGAIPLFGGVPVDPVYVPNADRHALQRLTRQRERLEDEVSTIKRRLIDLVRWACPAIEAVLPDFRTNLALAILHDLFNPTTVIKARRTTLLGFIAKHASGNHPHSGPFADKLVDGLKAAAMETRRLHGDAVNFEHLQLEAAIEIDRMRLLESQLGRLGREIEELYNKLHPSDALRTIPGIGHALAPLILGVLHEAQRFAGLHQLRGFCGLFPRTNSSGGADRPGQSITQSGNNRIKRALYLAADAARRIDPGLAEVYWRLMVRKGHHHKQALCGVATRLVNRIGKVLRTGEPYELRDTTGKPITIADGRAIIAEQFSIPAEIRNTRRRHRAESLS

SEQ ID NO: 143213 - protein, 444 aa, unidentified
MKIKQLDTILAGFAALDLGATSIHAATADTPVAVFGTTTAELRRLCAWLTTHGARRVAFEATGVYWVPVHDQLQAAGFEPMLFHGAHARNLPGKKSDFSDCQWHAVLFSHGLLRACFIPAEEVRALRAYARLREDHLEQAAMCVAHMQRAFDCMNVRLHTVISQLHGVSGLRVIEAILADERDPKALAALCDAQILKKHGAAVIEASLEGHWQEHHLFALRQALEAYRFHHGQIAGCDARIEAQLRALGAARPEVAPVDQKKIKKVRHNAPRIEGLHGHLHRLCGGRDASVLPGLTPLGWMKLAAELGPDLSAWPNAKAFTSWLGLAPNRHQSGQRRKRVPRRHTRAGQIFREAAQSIARSKHLALGGHYRRLRGRRGEAVAMVATARKVAELYYLAMTRGLDYVEQGLERYEAHCREQEQHRLRKFAARLGFNLVPKTEAKNN

SEQ ID NO: 143214 - protein, 317 aa, unidentified
MSFVGIDVSKKELVLFHWESNTSWKAAQNPQGWAEVLARLQELLVVRVALEATGSYERGIADLLARAGTHVMRLNPRMARDLAKGMGYLAKTDRVDAKALAEIASIRPKHPRWEPPTQADDELRHLVEWRLDLVETCTQEKNRLQITASKFVASALTQLIKQLDKAIDKVEKEVKARVKAKRELQLDADLLESEKGIGWITAISLLVLLPEIGSATRGQISLLAGLAPLADDSGDRKGKRHIRGGRKTARTALYMATMSATTHNPEIHAFYHRLKDVKGKEPKVAMTAAMRKMLVRLNAKLRDAREERRRENLPKAA

SEQ ID NO: 143215 - protein, 412 aa, unidentified
MDAAYYVAGIDVHKKMLAVVVANVREREWQFVCRRFGTTVSELQNLSAWLRERAVEEVVMESTAQYWKPVWLALEGQFHLWLAQARSNRGPRGRKTDFRDAKRCVSRLLSDDLRLSYVPDAEQRSWRTLTRTKYQLTRDRVRLQSQLESLLEECQIKLSSVVSDLLGASGQRILRAIATGETDPAQLRALGDKRLHATDAQLRDALSGQPQPTHRALLTLYLQRLDLIETQIAELEKMIAEAMKAHEAAIVRLSELPGLGVDSAQQIIAEIGPSAAAFPSAGQLASWVGVCPGSEESAGETNSNRSAKGNRAMRRLLNQLAHAAVRKRDCYLQILFKRLSVRLGYAKAVWAVAHRLCRLIWKVLHEEVRYVERGPTVSALTLKRRKQRLVTQLKKLGYSVQLTPVTTSEMGL

SEQ ID NO: 143216 - protein, 312 aa, unidentified
MYYIGIDVSKKDLSVFDGKKDSKFINKEGLKSFKKYLKKKVNFSDLVIIFEPTGVYSLYLKEFCAQNSIKAYIVNPKKSHNFTRALGKRSKTDKIDACTLYQFHKHIDSKDIKVPKIDQQAKVLASYLVSYEFALKQRVALSNHLESLRDKELITLMRKDLKRAKKLEDKIFNDILEYVSKNQNLKEDYQRLLTISGVGDKTAIALLTLFKTYQGTNRAQITALVGLDSTKRESGTSVRGRAKISKNGKGIYRKIFYLPTICATVHNQKIRVFYQRLLAHHKIKKLAVIASMRKILLIAHAMYRDKTEYVAA

SEQ ID NO: 143217 - protein, 339 aa, unidentified
MFYSGIDQHKRDSFITTYDDGGPIVNQERVPNTPLRVQRYFAQFTGPHKAVVESTGSWYWLADLLRDLNVELSLAHATRLKAISAAKVKTDKVDSDILALLLRADLIPEAHMICPAQRAPRDLMRTRLRLVDKGASCKNSIARLLEKFNVRSVYELDDLYRLQAHCHEAQIVLVHEQIHTLESTLHHYLIPNPHVQRLLWIPGIGKVNAFSIYTEIDGIDRFPTAKQFFSYCRLVPGAANSAGRTKHRSGSKAGNRYLKIAFSHAAIRAVQYYPEIRAFFKAKARRKPIKIARTLVALEIARIVYQVLKTGNNFNQCFKNKPLSRTKQSQWPRLASPPA

SEQ ID NO: 143218 - protein, 409 aa, unidentified
MICIGIDWADDQHGVCIRDAQDRRILAEFTITHDAEGVKQLDEMVTALGFQPSDCLVAVETPHGLLVGYLLQTGYTVYAIPPLAVDRYRDRHRLSGAKSDKIDARILSDILCVDREYHRPIPADSPLAQEIKWLSRQRQRLVQEQTRFKNQLTACLKAYYPAALGLFSGLDCAITWAFLRAYPNAEVAAQASLAELEAFFAQQGYTCKRQIPEIYARLQAPTIPVAEWQVRALQRQMLLLVDLLATLTPQIKAYEKELSRLLDQHADAFIFRSLPNAGDVMAAWLLGEFGDCRDKFENAGAPQALAGSCPVTVQSNKRRQVKFRVGCCKSFRNAVQQFARLSARGKKGSSWAKGYLSDQLARGHSVSRATRALGNRWVAIIFRLWQDRVAYDEKVHLNNRARRGSRLAA

SEQ ID NO: 143219 - protein, 416 aa, unidentified
MGHVVIGMDPHKRSATIEVLDERECVVATGRFGTDRDGYRQLLAAGRKWPERCWAVEGCQGVGRHLAQRLVADGEAVVDVPAKLSARARVFSTGQGRKTDATDAHSVAVVALRTPGLRAVQVDNATVAIRLLADRRDELGAARTLTVNRLHRLLVELIPGGAKKFLSAPQAKALLATVRPRDVVGKTRRQLAVELVGELEATDKKIKAAKKQLTELVEATDSTLLELNGIGPSGAARLIGDIGDVARFPTRGHFASWNGTAPIDASSGEQNRHRLSRAGNRRINRVLHIMAIVQLRNDTEGRAYYRRKLAAGKTPMEAMRALKRRLSDIVYRQLVNDQKRLRQTVQVTGPGGQAGAATGSSAADSNPNVGASEKSRPGRAAATLRRPTSGTPDRFSGRSRRPVTAPTRSRGQAQSA

SEQ ID NO: 143220 - protein, 365 aa, unidentified
MASVAHLAPIHLGLDVHRDTISVGILGPGEEVPAVDKIAHDEPSVRRLVGRLGDRRRLRACYEAGPTGFELARLLHSMGVSCQVIAPSLIPKAPGDRVKTDKRDCRRLARLYRASELVAIRIPTPAEEAVRDLCRTRGDMVEDRMRARHRLSKFLLRHGQVWRAGKAWTLAHERWLVTQHFAEPALQTTYDHYRAVLASRDAQLEAIQADLASWQDRAPFAEAVARLSAYRGVTRLGALHLAAEVGDWRRFARASQFMGFCGLVPSEYSSGQTTHRGHITKAGNVHLRTQLVESAWAYQHRPSVGARLASRQQGLDPQVVARAWAAQLRLCGRFRRLAARKPSTNIVAAAIARELAGFLWAEMTA

SEQ ID NO: 143221 - protein, 421 aa, unidentified
MNIQPVELELAACVGLDWADQHHLICLQATQSTQVESRRLDQKPDALHEWIAQLRVRFAGANIGIAIEQSRGAVIHALMMYGFLRIYPINPKALARYREAFRVSGAKDDPSDAELLMDLLRLHRVRLRAWLPDSVETRRLQILTEYRRKLVNNRIRHTNRITSLLKMYFPQALDWAGALDTVQACDFLQSWPTLTAVQQIHPAQVRAFYHQHRCRNRILIERRLAEISGARSLTDDPAIIETLSLAVQADVAELRAILEWIAHFDQIIAQYCALHPEHDLFESFPGAGAVYAPRLLTAFGQDRARWNSTADFLCHSGIAPVTKKSGNSRSVHRRLACSNFIRQTFHEFAAQSIRYSSWARAYYDQMRARGLKHPAAVRALAFKWIRIMYRCWKDRKPYDEQIYLTSLRAKQSPLLKDSPEG

SEQ ID NO: 143222 - protein, 371 aa, unidentified
MKQFSKFVGMDVHKAMIAVSVAEANGGEVRYLGEVANTPDALVKLVRQLRKGDAQLSFCYEAGCCGYSIHRQLTELGWDCQVVAPSLIPRKAGDRVKTDRRDSMMLARLHRAGELTAVWVPDGAQESLRDLTRAREDMKEMQKKAKQLLSAFLLRHGHAFDGKSNWTQAHFRWLETIKFTLPTQQIVFQEYIDTVTGLTRRVNAFDKHIASAAAESVFWPMIEGLMALRGVSLLTATTIAAEVGDLRRFPSAPQLMAYLGVVPSEHSSGGSKSRGGITKTGNAHVRRVLVEAAWTYRHHARKTAHLERRAERTTVEVQEIAWKAQVRLCARYRVMNGRGKLKVQTCTAVARELAGFIWAIGQALPATVAKA

SEQ ID NO: 143223 - protein, 376 aa, unidentified
MREKLRFLGLDVHAETIAVAVAEPDGEVRSLGTIANREESIRKLIKKLGPVEQLRACYEAGPTGFVLYWQLTQLGVECAVVAPTLVPKKAGDRVKTDRRDALKLARSHRSDDLTAVWVPDEDSEALRDLVRAREAAKQDQLRARHRLTKFLLRTGQRPPLGLKAWTEKYVEWIQQVHYTHPAREATLLDCLNEVQHMEQRVKRLEQSILEVVKLAPASVQAVIQGLQALRGVAHISAVTIAAELGNISSRFESARKLMGYSGVFPSEDSSGQRIRRGSITKSGNAHLRRIVVESAWSYRHRPSIGARLRKRQEGVPAEITEIAWKAQNRLYKRYMKLMAAGKDQRKVMTAVGRELIGFIWAIGVKAEAACMQQKAA

SEQ ID NO: 143224 - protein, 341 aa, unidentified
MSDYSYFCGIDLAKNHFSLHAVDQNGKVILHKSVTRSKLLTTIANMPLMRIGVEACGGAHYWAGTLNKLGHDARIMAVKYVVPYRTKGKNDLNDAVAICEAVQRPSTRFVPIKSPDQQAILSVHRMREHWVRERTALMNRMRALLSEFGLIIPVGRSSLMKHVPLMLEDAENELPHLARTVIADAYHHLGELNQRIADTEQVFDSFAKVSANVQRVMKVRGIGPQTATAILASIGNGSQFDKSRDFSAWLGLVPKQYSTGGKPRLGRITKHGDKYLRTLLVHGARTVIANLGDKQDKLSQWCRGVLERRGMNRAIVALAAKNARIIWSLLHNQTEYENYAA

SEQ ID NO: 143225 - protein, 309 aa, unidentified
MSISPFWLGIDVSKRTLDLSDDKTLHRCIGNTVPEIAALMDELRDQPVRVIFEATGSYDRRLQQALAAAGIGFVRVNPARARDFAKAAGFLAKTDAVDARMLAEMGRRMDLAETALESAERHRLIALNRRRDQLVDMRQQERVRKSEELDPESLNGIKRHLAWLDGEVRQIDKAIATQIAAHALLSHVNRLLRSIPGVGAVAATTLMALMPELGHRPAKTVSALAGLAPFNADSGQMRGQRHIRGGRSRVRRALYMAAITAIRSNTRFAADYTALRNRGKPAKLALVAIARKILVTANAIVKTEQPFRA

SEQ ID NO: 143226 - protein, 404 aa, unidentified
MSVDDGLINGARSPSCDVAAKDEQRRFPMANVEKDFAKGKPVYVGLDVHKREWTVTVVCQGEELYHATVVADCAGLVRLLRRFEASEVHTVYEAGPTGYWLHDALTEAGFDSIVTPPSLVPRIGGRVKTDGRDSRKLASLLASGFLKRVHILSSEERAYRQLLRTRNQIERHRKQTQAQIKSMLLFHGKKAPRTLLERWSQTHVDWIAHLEWDNPALKTSMGALVQLYRSLNDQLKAMTAAIEELAQTEKYRERAALLTQIPGMGIYTAMSILIELQDVERFRRAEQLASFLGLTPSQHSSGEHVRLGEITHCGNPRLRTRFVESSWTLIRYDMAMRTVYERIKHQTGSGKKAIVAVARRLALRVRRILLDRTAYRYGDGRRPQFAKDKAREIKKLVVRRAHLV

SEQ ID NO: 143227 - protein, 337 aa, unidentified
MEKILLVVGIDISKDKFHVCVKVKTADGNVKIMGTHSFSNDGKGFIELASWVFKRTKEGYTVNYIMEATGSYYEDLAYYLYEKGNRVSVVLANKIKYFAKSLNLKTKTDKVDSALIAEIGIERELFAWVPMSAQYKEVRDLCREMLSLKKEKTRAMCQLHAMNYSHEKTTSVVKIKNTQIEFYEKSILLIESEINRIVDADADLKQRVEKIKKVKGLGLITIIVVLCETNGFLLFNNIRQVVSYAGLDIEMKESGNFKGKTKISKKGNARIRQCLFMPALSATMCNEKIKELYERINERNPQTKRKGVVAGMRKLLILIFILWKKNEEYDSNHVWKQ

SEQ ID NO: 143228 - protein, 378 aa, unidentified
MNADKTRGHGSREGEQAVLLVGMELSLKKWRLAIAAAGAVRHRQVTIEGGGYSELHAVVAQARERFGLGSQGQVILCYEAGREGFHPCRVLREAGYEVWVVDSSSIEVDRRQRRAKNDVLDAGRLVALMQRHWRGERALRVVRVPSREQEDERQRSREREELRVERGRLRMRMQSLVFTQGEREFPKSVSAIERWLERHAEQLPAHLLKRLQREWQRLRVVAQQLHGVESELRQSVESGATRSDQAAARMCQLKGIGECSGWVMGTEVFGWRKFNNRREVGAITGLVPTPYDSGESRREQGISKAGNKRVRRVLIEVAWKWLYYQPQSASAQWFLQRFGAQGKRSRRIGIVALARRLIVELWHYVEHGVVPRGAQLKA

SEQ ID NO: 143229 - protein, 320 aa, unidentified
MKTNYSRVIGVDVASEELDIDDSEQKIAQAVPNTVAAVAKKLVARIKSPSNTLVVCEATGGYEHVLVDAMHEAGIPVCIANPRQVRDFAKGHGYLEKSDVIDARMIRRFGEDVEIHLTQQRCPEEKRHQALVRRRCQVIGLLNAERNRLAQTHDCYACELIELTILHLQTQLKSIDEQLEALLTERAKTDPKVNILLSVPGVGSITASTILAELPELGTLSRAQIAKLVGVAPIINQSGKSDKKRRARGGRSQVRCVLYMAAMSAAQHNPVIKRFYSGLRSRGKLAKVAQTASMRKLVTILNDMVRNGESWRKADVSLSK

SEQ ID NO: 143230 - protein, 426 aa, unidentified
MGKGKYRAVFIKDVDASGLKKALSDQRCVVGIDVAKADFFASVMDASRQVRVTVKWTHPADSREFVEFVSMLSEDATVELAMEPTGVYGDALRERLLRRGHALYRVSPKRAHDAAEVYDGVPSLHDAKSAAIIARLHQDGASEPWPVLSDHERGLTAALRVLELHDKQMQRNIGQLEACVSRHWPELTTIMSLTRATLVELLATYGGPAAVARDPDGARELMRRVGRHMLASETIEAVVASAHSSFGMGQTDEETRMVRAIAAECRRHQLASNKARRRVERLSVSDGASLNIGKVVGKTTAAVLTASVGTATKYETASAYEKSFGLNLKEKSSGRRKGALHITKRGPGVARRYLYLAVLRLLQTDEVIQAWYAKKAKRDGGCKQKAIIAIMRKLVRALWHVARGNAFDSTKLYDVSRLELEEVPTM

SEQ ID NO: 143231 - protein, 348 aa, unidentified
MQHVAIDLGGRESQLCVRTSDGKILREEKVPTRHLGIFLERQPHSRVILETCAEAFHIADLALSNAHEVRVVPATLVRSLGVGARGIKTDRRDAQVLSEVSCRIDLPSVHVPSDLARQRRSLCGLRQALVSSRTALVNTARGWGRTQLLKVASGQTSTFPERVRKAGKAHKDGVPEALERLLKVIDSLNEQIALADQELKELAEKDPICVRLMSVPGVGPVTSMRFVSAIDEVSRFPSAHAVQSFLGLTPGEHSSSERKQRTSITKAGPAAVRGALVQAAWTLRRSRPLDPICLWAKSIELRRGKFVATVAVARKLAGILFAIWRDGTQYSATHGMRESDVTATPSPS

SEQ ID NO: 143232 - protein, 353 aa, unidentified
MSSLTDLREVVDVVIGVDTHVHTHSAAAVDARTGGVLDEITVEATAEGYAQLVEFADEQPALRAWAIEGTGGHGAGLTRHLERGEEIVIELDRPERAKRRHGAKSDPLDAIRAAREALARPRWGAPRSGGDRQALSVLLAARRSAVEAATVAQRQVFSLVIAAPEQIRERFRGQKLPAMIRTAAGIRVHPSWDVETTTTVITLRTLARRARALAEEAAEHEKALRAIVRSWRPDLLDQLGIGPIVAATVLCAWSHPGRIHSEAAFAMLAGVAPIPANSGQVTTRYRLNRYGDRQLNRALHTIVLSRIRYDQATRDYVERRTRQGKTTREIKRCLKRYIARDLYRRLENHPAPA

SEQ ID NO: 143233 - protein, 363 aa, unidentified
MVIVGIDAHKQLHKALALTDAGTILDQWQGPNSPQGWHSLHQWATTFADARQWGIEGAWNYGRGLAQYLVAAGETVYEINPRWTAQRRGKARKPGKSDHLDAHAVAQLVREDGTTLPQVNADDETAILDLLVTEREGALAEATRLRNQIHQLLLQIDPEYKVHLPSLKTQAGLGILATYTTTSQHALDQQRAAVIRRIAERLHLALTQAKELADQIRTHAQVHYTPLTQLRGVNLLTAGALAGILGPGRRFLTDAQLAAHAGVAPLEASSAGRVRHRLNPGGNRRLNAILYRIALTQARCYGAAQAYLARRQAEGKTRREAIRALKRYLVRAIWRLWQECQSSSAQHACPKRAPSTHLRARGV

SEQ ID NO: 143234 - protein, 413 aa, unidentified
MALKIVYPICCGIGVHKSFVVAVIAHTNDEGITEYIRRRFSTFTNNLKELAQWLEYHPCFDVCMESTGKYWIPVYNILEASCNICLAHPKYVKAIRGKKTDKKDAQWIADLYKHALVSGSFIPPLKIRQLRDLFRYQMKLTQLQTSEKNRYQNVLTWSNLQIASVVSDVFGKSAQSMITSILANPEEPLVFETFLSRAGRPMKASIEELTLATDCDITTEQANKLRVIKAHFDALTFCKNSLEQLIQELGQEYEAQQKLVQTVPGFKNPMTALRILSEIGVDMNQFPTVGKLCSWAGVVPANNESAGKKFSTRISKGGQYLKPLLAQVANAIVRSEKNPEIRNKYLQLKKRRGHKKAIMAICHRLLVAIYHVLKKNKAYNPELYNQVEYVTPNKTITLQEAARYAQSHGFKIV

SEQ ID NO: 143235 - protein, 356 aa, unidentified
MSRILAIDLGKFKSVTCLLDSDTNQTEFWTMSTDRHYLLAVLKNYHPDLVVIESCGLAGWVHDICTEEGYEVLVCNPNQEAWKWKRIKRKTDRDDALKLAKLAALEQLVPVYIPCRQQREYRRLVKYRQVVLGRINRVQNNIRAIFAQRGMEMVRGQKMWALERLELIAQHRKPLADCSLDDLWRGELDLELNQLEHLRQHQHQIHKQLQAIARADERVQLLQTIPGVGRKTAEVVVAYLDDPHRFQNARQVSSYAGMVPRRYQSGEMDRQGRIHKRGPRQLRSALVEAAWLMLRYNPWAKSVYDRLTSGQKTRKKKAIIAVARKLLVRCWVMLLRKEPWNKETMIRQPAGIGIAV

SEQ ID NO: 143236 - protein, 453 aa, unidentified
MSPPLHEPPRLRTVGIDLAISAVQVAQVFDDGRPVGKPIRFRLTPADMKRFIAAVKAGVTGEVRITAVMEPTGMAWFPVAAWLQRAGVTVIRVKGQRVKALRKYLREHVKSDAADAHVLGAMPGFGGRGLDPVHVPAPEQHALQRLTKQRHRYQELVCSARRRVLDLIRWACPALEATLPETTTQLTLAILAELLDPRKVVAIRRDVLARFLSRHASGNHPKSGPFIDGLVDKLKAAAEETIELHGDSVDFAALQFEVAQEVEHVRLWERHMGEIERHVEKIYEIVHPSNALRSIPGIGPTLAPVLIGALGDAKRFRNEDHIRGFCGMFPAQSSSGGLDKPGQRITKSGNDRVKRALYIAADVARKIDPDLAAVYWRLMVKKGHHHKQALCAVATRLVNRIYRVLKTGEPYVLRDQHGAVITVPEAKRIVIAEFTVPIEVRQSRRKHLIQQPT

SEQ ID NO: 143237 - protein, 330 aa, unidentified
MQKVQHIIGADLSKKTIDLLCHLKETHLKIDNNLQGFKKLLKWISQQQINPVELIIVIEHTGLYSFCFENFLHQHQIPFTKVSALAIKQSIGLVRGKSDKIDASRIAAYGYEKKDKLCAEPPIGKELQRLQLLYATRGRLVKQKAGLINAVKEYKNIGLLQNDPVLQSQQRLIKSYEKEIAKLEAQLDNVFKSNPSLQKNHLLLQSIKGVGKVLATATIIKTRNFTRFTNARKFACFCGTAPFEHTSGTSIKGRTRVSHLADKQMKTLLDLSAKTAIQHDKELKKYYLNRTQNGKPKMSTINVVRNKILYRMFAVIKRQTPFIENYVHAA

SEQ ID NO: 143238 - protein, 400 aa, unidentified
MDAPRLFLGVDIGKTGHFAVALDAGGQTVLQRAVTNDEPALKDLVCWALERQAALVVDQPGGTAALLLHLCWQEGVAIGYLHGLAMARARDFYAGEAKTDPKDAFVLADVARAHPQRIVWLTPTSEARARLELLCGYDADLRGDANRLTNRLRSLLSTYWPALEQAYGQLATPGLLALLQKYPGPATLTKAGSARLAKLLNAHGVRKAATVAERLLAAAGTQTTIVAGAGTATGLIVELARELERVLARREELEEEIERSFFGLPEAAILRSLPGIGPRLGARIAVEIGDISHFSSPAQLAAYAGLGPTPRQSGTSIRGSVASRCGNHRLKNALFLAAFASLRHPASRTYYDRKRAQGKKHNQAVLCLARRRVDVLHAMLTRREMYRDSRPRASAQGAAA

SEQ ID NO: 143239 - protein, 341 aa, unidentified
MEPAVTIGLDIAKSVFQVHGVGTTGDVVVQRRLSRSKVLRFFARIPACLVGLEACGAAHYWGRELRKLGHDARLMPPSYVKPYVKRQKNDAADAEAICEAVTRPTMRFVEIKSAEQQSAMVLHRVRLTLMRQRTQLSNAIRGHMAEYGLVAPVGRNGLAQLITVIGNRADDRIPDLARGCLAMLVSQLQMLNEQILETDRHVRASARATEVGRRLMEVPGVGPVLASALVAAIPDPRSFKSGRNLAAWIGLVPRQNSSGGKERLRGITKQGDRYLRQLLVVGALAVIRYAQRHGTRRPWLVQLLARRATKIAAVALANKMARMTWAIMVSGERYREPQVTA

SEQ ID NO: 143240 - protein, 335 aa, unidentified
MKKVFVGIDVSKKWIDACVTIDGKTLLHQQFDNDKTGFRKLVSWLKPYGPLSEWLLCMEHTGIYAQPLWYYLTEKQITYAVVPGSVISTGLQIRRGKNDKIDAADIARFTMRYADELKPHRLPAKVVGRLKMLFAYRDRLVKAKKMISVPATEARDFAAAESKEVRTDSSSLVQIIEARIKKIEKLMLQIINADEQSARLYKLITSVPGFGLVTASYLLIITQGFTILSNSRKLANFGGVAPHPHTSGSSIRGKTRVSPVADKRLKALLSNGTGSLLQYNKDIRQYYERMTAKGKHENLVKNNIKNKMLHTVCAVVKRGTPYVDNYMPQWSNRVA

SEQ ID NO: 143241 - protein, 345 aa, unidentified
MEVYIGLDVSLTSTAICVVTAHGKVVKETTAASEPEELVSVLRGLSGNPVAVGLEAGPLSQWLHKHLTEVGFETVLMETRLVKGAMKAMPIKTDRRDAEGIARLLQMGWFRQVHCKSLSAQEMRALLTARKSIQKAMLDLELSIRGVLRNFGLKIGKISKGRFEERVRELSVGNPMLEAAANPILTARRSLRDELAGLEKLLRAHAKSDPICRLMMTMPGAGAIVALTVRSAIDDPERFHSSKDVGPWAGLTPRRDQSGDRDVVGQITRAGDEALRTALYQAATVMLNRARPNWLTAWALRVAGRRGKKRATVALARRIGVVLHRMWRDGTEFRFTREEAMAASA

SEQ ID NO: 143242 - protein, 411 aa, unidentified
MHNRQNYLYVGVDLHKEHHTAVIINCWQEKLGEIQFENKPSAFSKFLLEVETYVSDGLSVVFGLEDVGGYGRALAKYLVDHEQVVKEVNPALSFLERKSQVMIQKNDSWDAECVARILINKLNQLPDAKPNDLFWSIQQLVSRRNALVKAQSALKNQLHIKLNHHYPSYKKFFSELDGKTALAFWEQYPSPSCLEGMNIKRLTAFLLDVSNNTCSVRKASEILRLVKEDGQTMKEYQEMRNFLVRSIVREIEFKKKEMKYIERELKQLVNLLDYQLETMPGIELVTASALIAEIGDARRFPNANKLARFAGIAPVYFGSGGKGKTHKSKQGNRALHALFYNLAVQQVQVAKGSKLPRNPVFHAYYQKKLKEGKTKGQALVCIMRRLVNIVYGMMKYKTAYELPVVEEKEEV

SEQ ID NO: 143243 - protein, 374 aa, unidentified
MKTYDYTNKVVYVGLDVHKKTYSCVSICDGEVVKRDTMPADHGLLLRYLKNTFAGTASIKTAYEAGFSGFCLHRYLIENGIDSIVVHPGSIEVSSRNRVKTDKRDALKIATQLSVGRLHGIFVPSSEQEDQRNATRLRLNMVKLRHQIGSEFKALLFTHNLIAGDDDTPLSQTWILKKLSVIESGNYPRYFKYSINQYAQQWEQLNARLKEITKVLKQQSEENMDLQQIYESVPGIGPINGRVLANELGDMKQFHSEKRLFSYTGLTPSEHSSGEHTRLGHITRQGNPILRGILIEAAWMAIKQDDSLDQVFQRLAKKSGKKRAIVGIARRLIGRIRSCINTGSLYQKNSKQETDFSQEKVARPRSTRLCVHNT

SEQ ID NO: 143244 - protein, 316 aa, unidentified
MSKRSTDHAGIDTGKRRLDAALNKRGEELQVENGPEGHRRLSAWLRKHGVKRVGIEASGGYEMDVVAHLRRDGFTVVVFQPAQVRAYAKFHLQLAKNDKIDARLIAACTAAKESIHAAPDPRLAPLAAHLTFIDQIVEDIACCKTRLETCRDPRAQVYWKQEIARLGKLQKAEIALLEEAIRQHRDLAARLDLIASVDGIGLKTAIVILVRIPEIGRLSREQVAALVGLAPYDDDSGSRHGHRHIRGGRKRVRWGVYAAALPASLLHNPQLMAMYQRLRAAGKEHKVALVACARKLVIFVNTVVARGTPWLPQGAF

SEQ ID NO: 143245 - protein, 398 aa, unidentified
MEAAHGVVVGFDVGRYSHHMTAIDAHAGEVTASKPVGQDESEIRSALEPYAGTDAIAVVDQPGDLSSLLFAVAREMGLDVGFITPKAMAKGIDLYGGEAKTDRRDSFVMADLALRIPSLVHGVSARRGDAEELAALMSYDRELTDDARRAAARIHGLLLATCPALNGVFAGQRVKRRLPLALLARYGGANGLASAGKGRVRRWVGAQRGFGHRGPLFVEEVFSAIASQSVEIVSSAFYDELIKIEAASLRSALDARERVGRRVDELLASMPDARVLLSMPGLGRVTAATFIAEVGDISRFSSAAKLAAYAGLAPRVRQSGRSLNSVTKPRAGNKRLKRAWVLSAARSIDFCEESRAYYDRKRAEGRCHYSAVIALARRRINVAYAMLRDGQRFESRLG

SEQ ID NO: 143246 - protein, 405 aa, unidentified
MNFVIAFDVSMGKSNLVVYDHNHHCHFEGELEHTQAGFRALKQRINAIQEQAGHLPAIVFEATGVYSSPLERFLKSNDYPYSRLNPLEAKLQTAAMRRQKTDIGDAHELAKSHYRVVRQETFQQADYYDQLRGLGRYCEDIEKEISQHNNRLHAFLQMSFPLVEKVFARSSALFLNIVQLFPHPAYLVEVSKEELLNHIKQATRKRMSEQEIEKKATLLLAAAENSYPSIGPGDVRCQHLKNYAERLLELRTQKKEVIKQMVALSKDRVEFQVLKSFPGIGDQTAVQVISELGDIRRFQNAKQINAYIGIDIRRHQSGKLQYQDKINKRGNKRLRKILYFMVMNMLSKRKKASNTIVDHYDQLKKQPNGKPHQVAVIACVNKFVKVAFHLIQHGLLFHYESGKAS

SEQ ID NO: 143247 - protein, 362 aa, unidentified
MYEIIHLFIIIHSMEKLYVGVDWHKRTSTWVAINEARRQVYERSWGCTPEDVHAAISSLPAAPEQMVLGVEPVCGWRWMTQLCADRGIRDVRVANPKRLREIAETAKKTDKNDAHTIAELLRMDYLPCAYRASDEVYALRLLARQRTFFTRLGIATKCRIHGVCTALGATQTAERPLHKAGRIAISNGSNEELREMYALMDEIAARKERIERKIAGVVGDTQLYRIVSSIPGIGPVTGAAIIAEAGDFARFHAPSSLISYAGLYPRERSSGGAQRLGGMSKEGSRTLRYAIIEAAMRVRDTERSRNLYTHYDAARNRRKKTPKQARVVLAHKMLTILWYLVGRGVCYDDRAVKPAQREMTSS

SEQ ID NO: 143248 - protein, 335 aa, unidentified
MYEHYIALDWAKSNMALARMTEKSNKIKVIESPSDLSGVKEYLKGLKGQKVFTIEETTSAQWLYCELKPFVTKLIVCDPHRNRLLSEGAKNDKIDATKLVHLLKANMLKEVYHSGEEVIYLRKLVSGYEDLVKSAVRLKNQRSALFCAEGLDHKRDEFSSRAASGHFVLKEIDEQIKLNESIKRKYEKEFLKLSRRFKEVRLLKSLPGIGDVYAVRILASVVNARRFKSKGHFLSYCGLIRHDKISGGRSYGKRGSRYYRPLKQVFKMASHTVTQERCSNPMKELYEYLIRERGKSPEMARYAVARRLAVLSYGILKTGDRFDPNRRREQKREGR

SEQ ID NO: 143249 - protein, 359 aa, unidentified
MRTEITKKSFDGQHFYIGIDVHKKSWKVTIMSEHYEHKSFSQDPDAAILSNYMHKYFPGGIYHAVYEAGFCGFNICRQLNCLGIDCIVIHPADVPTTRKEKLQKTDKADSRKLAKTLRAQSLSAIDIPSRELEADRALVRQRYRITKDLSRVKNRVKSLLYQFEIIIPTRFTQAQTRYWSRPYLDWLKSLELEEPSLKLVIHNYISEGEKLRQEVLLLNKQIRQLSKEERYKKKYELMISIPGIGFLTTMFILTQLGDISRFKRLDDLCNYVGLVPRMWGSGEKMQTGKMIKRGRKDIKIMLIEASWIAIRHDPALMHKFNELSVKLHKNKAIVRIARKMLSRIRYVLINEQPYCIGVC

SEQ ID NO: 143250 - protein, 332 aa, unidentified
MTTPLPALGIDMAKSTFDVHLLTDTAANSHHFVNTPQGFAALAQWLKQRGIERVHACMEATGTYGDALALFLYQAGHTVSVVNPARVVAFRLSEGGRTKTDKQAAKLIAHFCVQKRPVAWLPTPKELEQLQVLLMRLEALQVMERQEANRLENSRLDAQTRQEIETHRQDLQARIQGVKKRLHTHVEQHETLKEHCALLISLPGIAELSAARLLAEIVDIKRFKTVKQLVAHAGLAPGERSSGTSVHGKAFIGKAGRSKLRKSLYMCAVVASTHDPAIRAYAQNLRQRGKPAKVVLTAVMRKLLHMVYGILKTEEVYDPAKAFLKTAVKAVV

SEQ ID NO: 143251 - protein, 347 aa, unidentified
MYQDNVIALDLAKNVIQVCILDKQNQIKSNRELRRQQVLGWLAKQSPSVVAMEACGSAHYWAKQARALGHQPVLLSARFVKKFVEGHKTDKNDAVAIGIAVRQPSVKPVAIKSNDQLALQALEKMRQHYQDVAIATSNMVRAIVYEFGMVIPQGEKAFRERIPDILEDAENGLPMMLRVPLHQQYQFWISLKQQVREAEKQLRAQLKTHEQCNELQKLDGVGPVNALNLYLALGTRGEAFKNGREAAACIGLTPKQHSSGGKVVMLGISQRIAKKQLRANLIQGALAKIKVVAKRPPKNTREVWMKQLIERRGLRRAAVALANKTVRMAWAMVHYQQRYQAPESVAS

SEQ ID NO: 143252 - protein, 332 aa, unidentified
MYLGIDVHKRDAQVAVMDEAGEIVEEVRVDNANLDDLARRYAGAQAAIEATSNYYHIHDTLSKHLDVTVAHPKELTQIADTDKKTDRVDAKELARMLRLNSLPESYVPTDEIRQARALVRGRQGLVETRTEYANKIHGLLSDHGVGKDVKPLSVKGREFLRELSLPAPWDGVLESYLDVVETLTAQIETLEVEIEEFAGSVEETQLLMTIPGVSYYTALTLYAEIGEIERFDRDKEVVSYVGLNPVIRESGDSRIEGSISKRGSSRVRWLLVQAAHTAVHTCKDEYLRRFYERLAGRKNAQKAIVATARKLLVSVYHMLDRREGYDPPGVKA

SEQ ID NO: 143253 - protein, 442 aa, unidentified
MARKPSKQHLTLVHTDCAGIDIGSREHFVAVDDRHDKPVRKFATFTDDLHKLADWLESLNIKVVAMESTGVYWIPIYEILDARGFDVRLVNARSTRQITGRKSDVMDCQWILQLMSYGLLRSAFRPDDLTCVARSLFRQRSHKVRDQAKTLNRIQKALAQMNIQLANVISDISGVTGMKILRAINKGERDPYVLASLSDPRIKASQETIARSLLGNWRKEHLTALKLELALYDFLEKQIAECDEAIVEVIDQMPVLDVSPPKPQKTLRSPHRTAAQQTQLHQALCRVMGVDLTAIPTIGVDTALVIASEVGADLSRFPSSQHFCSWLGLAPPTRISGGKSLSGAGPKIHNHAGQALKQAASNARNDKGFIGASHRARLTRMDTSCAIKATAHQLARLIYLMLTKKKAYVEQGLAEFEARSQDRQLRALQRKARKLGLQLVAA

SEQ ID NO: 143254 - protein, 343 aa, unidentified
MNDITTIGLDTAKSVFQVHGVDADGEVVLRRQLKRRQVLAFFAKVSPCLVGIEACGASHYWSRELTKIGHTVRLIPPRYVKPYVKTQKNDATDAEAICEAVTRPNMRFVPTKTTEQQSILMLHRTRHLLVRQRTATINAIRSHLAEFGIVAGVGRNGVEALLKILADEQDDRVPDVARDCLMALGVQLEMLKRQILELDAKILATHRRNELSRRLEAILGVGPCIATALIASIPDPKAFRSGRQMAAWIGLVPKQNSSGGKDRLGGITKAGDRYLRSMLMLGALSVIKRAKQLGYTRRPWLAQLIARRPVKVAAIALANKIIRMVWAMMVRGENYREPVALAA

SEQ ID NO: 143255 - protein, 367 aa, unidentified
MKKISTVATRQSRNFSQQKLTIGLDLGDRSSWYCVLDETGEIVLEQKLSTTPKAMREVFGGMARCRIALETGTHSPWLSRILTELGHEVIVAHARNVRLIGESRKKDDRLDAQTLARLARIDPKLLCPVKHRSAKAQADLTVIRARAGLVRARTALVNTARGLAKSYGERLRGCNVRNMNPEKAEGLSPELQRALEPLLASIESLSERIREYNEGIEKLAQESYPQVALLKQVKGVGTLIALTFLLTLEDPHRFRKSRDVGCYLGLQPGRRNSGQSEPQMHISKEGDPYLRTLLVQGAQHILGPFGIDCDLRRWGLKLAERGGRNGKKRAIIATARKLAVLLHHLWVSGEAYEPLHNCNRRAMPAAA

SEQ ID NO: 143256 - protein, 315 aa, unidentified
MTTSMERFLGIDVSLAVLDVHVRPDGTARQFANTPEGIAALVEWARSLGPTLIVLEASGGYESAVLTALSLGALPVSLVNPKRVRDFAKARGRLAKTDAIDAAILADFAETLRPPVRPVPDAEAQKLQALLTRRTQLIHMRTMEKNRLAALTNSRVRRSVQNVIRTLEREVRQADKDLGEAIRACPVWAAKDELLQSIPGIGPTVSRTLLAEMPELGTLTREQAAALAGVAPINRESGQHRGKRMIAGGRALVRSMLYIASQGARQGNATLRAFAERLKALGKAPKVIRIALARKLLIIANAVLRDNKAWTLKTA

SEQ ID NO: 143257 - protein, 467 aa, unidentified
MKNYDYNLFVGIDVSKGKADAAVLAVPELRSVKPRFLRKKLSFKFIKSDVVEFLNTVRKYSSDPHCLHTYFALEVTGIYSTNVYSFIKQNCNSDEEIHQLNTDFVNKWRESHNISKSDPLDAQTISTIIGTDDDVRYVSDSVFENKNGYQDLKALVHRHYQIKKLHSQETNRLIALCDCYFPELQYVFEPKSAAFLAVLSQYPTSHDIINASKNEVFYLVYEATKHRCSLDKIDKLFNYAQDTLVPHVSDHIRCVISNTVESIVNIRTQLKLIEKDIRKLAATFNVYSLLMSITGCGPLTAAVIIAETGDIFRFKNADHYVSYSGSSPRNKRSGKSVEIMGKISKKGSKYLRHALYMIAEFARRHNPVLKHLFERVKNGNKKRHKLAVIAVANRIARYIYSIMKNESSFVIMHENIMRLPEETRNTFFNSISLDFPKNTRKQIYQYSDVNGEIHRFVYKNETTESIA

SEQ ID NO: 143258 - protein, 284 aa, unidentified
MERILGVDVSKDYLDTDTLPPTQQRRFTNDPAGTAELVEWARGFRPDRIVFESTGPYQKAAVGALLAAALPAVVVNARQVRDFAKALGILAKTDTIDAAVLARFGQVVPTIVRPLPTPEIQAFQELYDRRGQLVRMLAAEKNHRYAATSAKVIKNIDAHIRYLENQIETLEDRMDQFVQNSEAFKARDEILQSIPGVGPQVSRTLLAYLPELGQGTRQQLSALVGLAPFNDDSGTQSHTRHIRGGQASKVALIAVARKLLVLANALVRSMKPYDPANSVCLPSP

SEQ ID NO: 143259 - protein, 386 aa, unidentified
MTQVSDLSRSLVALKQDSTLVAVVELSASSWLVAGLVPGVDGKPLKKLEPEPEALVGLVDRWRAAALKAGRVIERVVLAYEAGRDGFWLARWLRARGIEVYVIHPTSVAVSREHKRAKTDRLDAAMLLRVFVGWLRGERGHCGMVAIPTADEEDAKRPSRERESLVGESTRIINRMKSSLARLGIRGFKPQLRKAAQRVAALRTPDGLAIPPNTLDELRRDLARLALLREQIAAIEAARLERLAQAPERGPHAMVLLLARIVGVGVETADMLVQEILSRKLRDERAVARYAGLTGSPDESGSRRREKGLARSGNARVRRGLIQLAWRLLLFQKDSALVQWYRARTVAPGVRKTTMIVALARKLLVALWRMVTTGQAPQGFVLRPAA

SEQ ID NO: 143260 - protein, 351 aa, unidentified
MLIIGVDYHPSDQYIAFADTETGECGERRLNHSEGEAEKFYRDLQSRAASVRVGMEATGYSRWFERLLAELGIELWIGDAAEIKTRRVRKQKTDSNDARLLLRLLLEDNFPRSWVPSPENRDLRQLLWHRHRMVQMRTRMMNQLQALAMNEGQRRKKKLWNEQGRAQLEGLPLAAWASRRRKDLLELLDRMNPTIEDLTRAIEREARRRSEAARLMTHPGVGPITALAFTLIIGTPQRFGCGKQIGSYVGLIPAEDSSAGHQRLGRITKQGSRLLRFLLVEAAQAAARGDTDWKRRYMHLAMRRERNIAKVAMARRLGVRLYWMWRNGWEYAEWVKFGSNAGQLGTGHGAK

SEQ ID NO: 143261 - protein, 359 aa, unidentified
MLTQSNKIDFNGQHFYVGLDVHLKSWKVSIMTEKLTLKTFSQDPKPELLHHYLVKNFPNGIYHAAYEAGFCGYWIHNKLTALGIDSIVVNPADIPTTDKEKVNKTDKRDSKKIARSLRNGDLKGIHVSSLKTLEDRCLVRMRRTLAKDLSRNKNRIKSFLYFHGIDMPEALNKSATHWSKRFMNWLRSIEFTESSAKKSLSLLINESQHLRLTMLDAIRGIRELAQSEEYCNLVKLLRTIPGIGTLTAMIILTEIETISRFSGFDQLCSFIGLIPSTNSSGEKEITGKITHRGNNFLMSIIIESAWIASRWDLALNKSFHDYCKRMEPNKAIVRIARKLLNRIRFVIKNNQPYVCSVIK

SEQ ID NO: 143262 - protein, 416 aa, unidentified
MSTTDPLASPVDPCGFTYVVGIDVGSEHLLYTICQPDKRAVVKPSQINNDRVGFGQLDQALHALGSEPSRILIGLEATSRYNENLYQFLAEQGSTLCLLHPRQTHQFAQQRGLRAKTDRLDASTIARLLLSGEARVGYVPDELIASYRELERLHSQLTAESARYQNEIHALLTVLFPEFTQVFADPCGATALGVLKRYPGAAAIATAGVEALTATLRELARRRYGRPTAVELVRLAERSAASGVATSARALSLKVLCDQLEHTLVNLAHREQELDRVLGGDEGASRLSSVPEFGRQTIAVLRAELGDVTRFSRIDQAVAYVGLDLEVRQSGKWKGQVKLSKRGSGRVRRVLSMAALRSLTLPDSPFAAYYHRLVARGLKGRKALMAVMRKMLLVACHLLRSNESYDPAKVCAVTGP

SEQ ID NO: 143263 - protein, 503 aa, unidentified
MPLEQHGSRKAIEHWRGFDSSPLGQNRPTASLGGRAQKGYEMPGRDEIASSGNSRGQLAGLPIIRPNVAGIDLGSERHWVCAPTRDRSGREVASFGATTAELLRMAEWLKARQVESVAMESTGVYWIAPHEVLEAQGLELLLVDTRQLAQVPGRDKKSDPTDCEWIQRLHSCGLLRGSFRPEEAVCILRTLVRDKANLVAETGDWLRRMQKSLDQMNVRVHRAVSDINGATGMAILRAIAGGERDARKLAKFRNARCGKTEQEIAEQLSGHWREDHVFSLQQALKMYDAVQEQIAAYEQEILRKLDEMEREQPPEPTAPPLQNANKARMIKKRGQEAKRQALYRMSGVDMTQIDAIGVETVEVVLSEYGPDLSRFPTEKEFVSHVTLAPHVPKSGGKPLKKKKRNSASTRVAAALRMAALSLRHSQTALGAYYRRMAQRLGGDVAVFATARKLATLIYRLLRWGQRYVDEGAAAYENRYRQHRIHRLATTAKELGYQLTPVSA

SEQ ID NO: 143264 - protein, 370 aa, unidentified
MSSVSHQGFTHLGLDVSKDWIAVAALAPDRDRATVQKIFHDEVSVRRLIGRFDDRSRLWACYEAGPTGYDLYRRLVGMGVRCDVIAPSLIPKRRGDRVKTDKRDARHLAGLHRAGQLTPIGVPSPAQEAVRDLCRTRGDMVEDLTRARNRLTKFLLRHSVVWRDGSNWTFKHQRWLAGLRFDDQALAATFAHYRATVELRDNSLAAIEEDLAPYCDRAPFGDQVHHLAAYRGVTRMGGLCMAAEVFDWRRFPAARSFMSFTGLVPSENSTGLSEHRGNITHAGNRHLRAQLVEAAWAYQHRPHVGAGIAARHDGLPPEVIARAWAAQVRLSTRFRKLAARKNVRSVVAAAIARELAGFLWAEMTADSIAP

SEQ ID NO: 143265 - protein, 314 aa, unidentified
MKKAVEIFVGIDVSKAWLDVAEHEREETFRASNDDAGIADLVKRMKALKPRLIVVEPTGGFEKLLVAELTHAGLPVVVVNAKRVRDFARATGRLAKTDKLDAKVLAHFAAAIRPAVRRLPSAEEERLTMLLTRRRQIIDMLTVEKNRLVTVRAKMRSDIEAHIEWLANNLEELDKEIEDFVESTPIWKEKDNLLQSVPGVGPVTSATMLGMMPELGKLNRQEIAALVGVAPVNKDSGRKQGRRRIYGGRADVRSVLYMAALSAKKFNPVIKKFYERLIKQGKEKKVALTACMRKLLVILNAMMRSNQPWRSLCA

SEQ ID NO: 143266 - protein, 369 aa, unidentified
MKNSMTYVGLDVHKDSIVIALADEGRGGEVREYGTIQGSVSALDSVIRKLQSRGKRHFEFVYEAGPCGYEIYRHLSAKGLNCTVVAPSKVPKAKGDRIKTDRRDARKLARLHRAGELSPVYVPREDDEAMRDLTRAREDAKIAERKARQQLNAFLLRHGFRYGGKSHWTRPHFRWISGIAMGHPAQQVVLEEYVGTVQSCTERVERLTGQIREFVPQWRMAPVVDALQALRGVSLIVAVTTIAELGDLSRFDDPNQLMAFLGLIPSEHSSGERVKRGGITKTGNGHARRVLVEASWAYRFPARVSPRLLVRHEHLPQDVREIAWKAQLRLCARFRRLMARGKPKQVVTTAIARELSAFMWAIARQIPVN

SEQ ID NO: 143267 - protein, 401 aa, unidentified
MEGPIVSIDVSNGNSHYMCFIKNNKRFGKVKKIDHDIEGFKRLLEDIQKLEAETNEKVCAVFEATGVYTKPLERFLSKNSIKTYIINPLESARKRKEEIHNKKTDKLDPISISKVYYDKEEMMELKKTDETYNWLRKKNRLYEDQLNHLRKYKVTFQNQLSICFPGYLDLFKDGYSDIPMTILKKYPHPDLLKNKKAETVARYLEKNTCHTHKVSLEYALKIIEFAKKTYPGCEKDDVEVEIFKILLDKVIETQRECEKTLNEMITVASTLEEYRYISSIDGIGPNLAARIIAEIGDIEEFKSREALVAYAGLDPHIYQSGDQDGKHLKISKKGNKYLRCLLFLAVGCSIRGAKDNPVNRFYQKKKQQSNPLNSKAAKTACTAKLLKIIYGICKNKTTYER

SEQ ID NO: 143268 - protein, 348 aa, unidentified
METIYERVGALDVHKAQVTACVRVPDSAGRRDPQLAEFSTTVAGLMALRDWLAAYRVTHVAMEATGVYWQPVWHILEDDFELTLCNARHVKQVPGRKTDISDAQWLCQLMEAGLLRGSFVPPKPQRQLRTLTRYRKTQIAERQREANRLHKALEDTGIKLDCVASDILGASGRAMLDALVSGTTDPEILADLASSLTGVARRTAEVMVAEIGVDMSVFPTAGHLPSWAERCPGNDQSAGKRRSGRTRKGSKWLGIALEEAALAATRTKNTYLAAQYQRLRPRIGHGRALGAVKHSMLVAYWHMFTTGETYRELGGNYFQTRDPERITKRLIAKLQELGHAVTLEPAAA

SEQ ID NO: 143269 - protein, 338 aa, unidentified
MTCYSGIDLHSNNSVVVVSDVADRVAYQRRLPNDLGRILAALEPYRAELAGVVVESTYNWYWLVDGLQAAGYRVHLANTTAMKRYEGIKHSGDETDAAYLAHLLRLGILPTGYICPAPERAVRDLARKRLQLVRTRNAQVLAVENIVARQTGAGISANAVKRLEGETVAALGLPEDVTAALAANVAVIQTLNAEIGKLEARLRQRVRLRPPFRVLITAPGIGEVLATLIMLETGPIERFAAVGNFASYARCVDSKRMSNGKKKGEGNVKNGNKYLAWAFIEAANFARRYCPEARRFHDRKRAQTNGIVATKALAHKLARACYHMLKDGQPFDVKRCFA

SEQ ID NO: 143270 - protein, 351 aa, unidentified
MSSEANLAIAVIGIDIGKNSFHVVGQDKRGAIILRQKWSRGQVEARLANLPPCLIGMEACVGSHHLSRKLQMLGHNALLMPAKYVRPYSKGQKNDFRDAEAIAEAVQRPTMKFVATKSTEQLDLQALHRVRERLVSQRTGIINQIRAFLLERGVAVRQGLRFLRAELPRILAAPCDALSPRMLRVIEDLAGDWRRLDERIEGLSSEIEALARQDKGCERLMTVPGIGPIISSAMVAAIGTGDAFAKGRDFGAWLGLVPKQISTGDRTILGSISKRGNRYLRALFVQAAWVVLVKIGPKHWARYGLKSWIEAAKKRLHHNVLAIALANKLARIAWSVLAHGRTFEASKIGAA

SEQ ID NO: 143271 - protein, 424 aa, unidentified
MASHQFAAFVGIDWGDQKHAVCLRAEGVEVEHELSQKAAEIDAWATELRTRFGGRPVAVCLEQSRGPLIYALLKYEFLVLFPLNPLQATRYREALYPSGSKDDPLDARLLCRFVETHHGHLRAWQADDEATRLLRLLAEDRRRFVDQRTAHKNQLRQRLKEFFPLVLELLRGGDLEDEWFLQLLIKFPSHAELRRASPRTLERMLPKRHRLPDDEPLDPRVAQIRAAVPLVTDGAVVKAGRLQVMELTRLILRLNATIAEYDRELAAELARHPEAELFRSFPGAGAALLPRLAAAFGTNRERYTDAQELQQLSGIAPVQIRSGKSCSVRRRRACPKFLRQTFHEYADHSRKRSLWAKAYYRMLRGRGLRHNAALRALAFKWLRILFRCWQTRTPYDEHRHLAQLRLKQSPLLQFLDPPNPAEQT

SEQ ID NO: 143272 - protein, 401 aa, unidentified
MQETTQHDAVDVFVGVDVGKGQHHAVALDRNGKRLYNKALPNDEVKLRALIAELKTHRRLLFVVDQPSTIGALPVAVARAEGVLVAYLPGLAMRRIADLHAGEAKTDARDAAIIAEAARSMPHTLRSLRLADEQLAELTMLRGFDDDLAAQVTQTSNRIRGLLTQIHPALERVLGPRLDHPAVLDLLERYPSPSALAAANEKTLANRLTKLAPRLGKNWAAEIVQALNEQAVIVPGTQAAAIVMPRLAQQLAALRKQRDEIAAEVERLVLAHPFWPVLTSMPGVGVRTAARRLTEAAPKAFATAAHLAAYAGLAPVTRRSGSSIRGEHPSRRGNKVLKRALFLSAFAALRDPVSRAYYSRKIQQGKRHNQALIALARRRCDVLFAMLRDGTIYPPKSAPNA

SEQ ID NO: 143273 - protein, 348 aa, unidentified
MNYVGIDWAYGRAAFCALSESGEIEAEGLIPADEDGLARLALRLGPEVKGCVEMMSGAIWVKEQLELCGWSMQVAHARKVRDIAPLACKTDKVDARVLAELCRRDLVPEVWVASAEDRAIRERLRRRAHLVKLRTSHRNRIFGLLTQFGLKVSFTRLCQPGALELLERRGVPEVWRDSIAEHLAQIDELQRRIGPIDRELRPIADSDPRAKLLQTIPGVGPLIGLTFASEIGDVSRFASPAKLVGYAGLAPRIIQSGERSATGRLSKAGSRSLRWAAVEAATQAWRPTNPFHPYYRRLASRHGVNPARSAVARKLLICSWHMLSRGQVFQPSSPTPTAATNSPRFLAA

SEQ ID NO: 143274 - protein, 413 aa, unidentified
MQVLYERCCGLDVHKKTVVACVLITSPDGQVQKQGRTFATTTASLLALADWLASLDISHVALESTGIYWRPVFNLLEEGRTIILVHAQHMRAVPGHKTDIKDSEWLADLLRHGLLKASFIPSKPTRDLRDLVRYRKTLVQERAQEVNRLHKVLETANVKVSSVVSDVLGKSGRRMLAAIIEGASDAEALADLARGTLRHKLPQLQEALHGQIESQHRVLLGQIFAHISFLEHSLEHLQQEIEQRLCPFEEAMQLLLSIPGIQAITAAAILAEIGVEMSRFPSAKHLASWAGVCPGNKQSGGKRLSGKTTKGNVRLRAVVVEAVWNISRMKDNYLSAQYHRLARRLGKLQAAIAVAHSLLIVIYHVLRDKKPYHDLGTDYFDSLDKERLTRQALRRLEALGYAVTLTPKEEVVI

SEQ ID NO: 143275 - protein, 331 aa, unidentified
MSTSEKGELMSEPVLGIDIAKQKFDAALLIRGKLKHKTCKNSTDGFETLSQWLRKQGVNHLHVCLEATGSYGDELALYLHDAGHTVSIVNPARIKGFAQSELLRTKNDKMDAGLIARFCLAMRPEPWLPPSVEIRVLQALVRRADALVSMRTQELNRLGTAASAVGPSIQEHIAYLNEQIEKIKQQIAGHIDGSPELKGKKALLHSIPGIGPATIAAILAEINIFERCDEVRKVVAFIGLAPKEALSGSSIKRKPRLCKIGHARLRKALYMPAVVSIRYNPVIVTFYSRLKSKGKNGKVIVCAIMRKLVHIIFGILKSGKPFDPNYKPHFA

SEQ ID NO: 143276 - protein, 403 aa, unidentified
MISVGIDVAKGKSTVCIVRPFGEVLMKPKDFKHTQSELKVLADKMKMYDEEIHVIMEATGTYHLPIKSYLEEKNYDVRVINPLEMKRYRCQGIRNPKTDRIDSMIIAKYGIDNWYYQPKELEMEGERAELKFLGAQYFSIMKTRQDRMLKLYNIMERSLPGMYGVLDDFNKATGKDKQSDFVYDFYHLDMITKYSEKKFYEKYYAWTKKKGYLFSEKEAGQLYLIAKEGIPTIKPSENTKLVVREAVNILREVNASLYSILTQMTEIAKQLPEYEMVMSMKGIGSSLGPRLMAEVGDPRRFHNAKALIAYAGIDVDPYESGTFKGTERHMTKRGSKIMRKIGYEIMDAVNKHQKIYAGDPVCEYFLKKREEGKPYRVAMFAAYNKFLRIYHSRVSALLNETEA

SEQ ID NO: 143277 - protein, 406 aa, unidentified
MLVVHDRCCGLDVHKKSITACLLTPEGKETLTFSTMTDDLFRMAQWLQERGCTHVAMESTGVYWKPPYNVLELHEFEQVLVVNAQHMKAIPGRKTDVKDAEWIADLLKHGLLKGSYIPSREQREQRELVRYRKSLVQERTREVNRLQKVLEGANIKLSSVATNVLGVSGRAMLDALVAGTESPEVLAELAKGRLKDKKGHLIQALHGLLGEHQKMMIRTQLGHIDYLDGQIAELDKKIEEQMHPFEADLERLDSIPGIGRTTAEAILAEIGTKMDRFPSAAHLCAWAGVAPGNHESAGKRKSGRTTQGNPALRYTLVEAARAAARTKNTYLSAQYHRIAARRGANRAAVAVAHTILTIIFYMLTRQEDYHDLGADYFDLRRKERTVNTAVKKLENLGYTVTITPVA

SEQ ID NO: 143278 - protein, 344 aa, unidentified
MSKLDTGGIEVSAKELVVALRREEAREPLRSFANTAEGHQALICYLRRAGRVVRVCLESTGLYGLDLALALSAQAGIEVMVANPRAVRHFATALMQRSKNDQLDAGVLEQFAARMPFRAWQRPSPAALALHALARRLGQLVEMQTAEKNRQHAAELSQALPAAIRRDLARSLRAQARAIERLTREARKVIAPEPDLTERFALLDSVPGIAETSALQILAELAVLAPDLEARQWVAYAGLDPREYRSGTSVHKKTRISKAGNKYLRRALYMPALVAVQHDPHLRAFYQHLLARGKFKMQALVAVMRKLLHAFHGMFKTHQPYDGSKLFQRQLTFAQEVPLATIAA

SEQ ID NO: 143279 - protein, 429 aa, unidentified
MAIVAGCRTGDGRAELDVIVERCAGLDVHKKTVMACVRKPKDGKRVSVRREFSTFTCGLHQLRDWLASEGVTQVAMEATGIYWRPVWYVLEEMADLELLLANAQHVKNLPGRKTDAKDAEWLAQLLECGLLRGSFIPTPVMQRLRDLTRYRTKLTEDRAREVQRIQKVLEDAGIKLDSVISDVLGKSSRQMLEALIAGERDPEVLAELSKARMRAKIPDLRLALVGRFGEHHALMARMHLDHLDHLDEMIDRLDQEVAREMAPFAEAAGRVVSVPGLGQHTTQAILAEIGIDMSRFPTAAHLASWAGMCPGNHESAGKSRSGRPRKGNAALRAVLCEAAWAASHTKDTYLAAQYQRFLRRFGKKGQKKAIFALAHTILVIVWNILSDGGTYEELGYDYFERRIDTEEKKRRLIRQLESLGVHVTVEPAA

SEQ ID NO: 143280 - protein, 346 aa, unidentified
MEHYVGLDVSLKLTAICIVDRTGKIEREGVVASDPEAIAVFIKSHAPHVARIGLETGPTSTWLWTELNKMGLPVICIDARHAKAALKLQINKSDRNDAVGIARIMQCGWYKEVRVKDLDSHAIKALLVSRALLVKIKRDLENQIRGLLKNLGLVIGQAKMNVFSVRAAELAEARPELAAAVEPLLKAREAVGRQIADLDRKVMRLARNDAQVRRFMTAPGVGPITALCFLATIDDPTRFKRSRSVGAYAGLTTRRYASGEIDWTGRISKCGDKMLRSYLYEAANVLLTRVAKWSALKAWGIRLAKRSGLRKAKVAVARKLAVILHRMWIEGTEFNWSSKEAANQPA

SEQ ID NO: 143281 - protein, 348 aa, unidentified
MMMKKVHVLGIDLGKNVCSLVGLDEAGAVVLRRRAKRETLIALAAKLPSCIIGMEACCGAHHLGRLFADRGHDVRLMSPEYVRPYIKAQKNDDRDAEGIAEAATRPTMRFVDVKSQEQLDMQTLHRSRDRLVAERTALINQMRAILLERGIIVPQGKRALERHLAILTDENRDASGLSPRMLTLVADARAQWLELDRRIAAFDSEFAAFVKESQDARRLLTIPGVGVTIASALIAAIGNAEAFEHGRDLAAWLGLVPRQSTTGGKPKLFGISKRGNKYLRKLLIHGARAALPHVAERDTPLGRWAKGLLVRTHLKVAVVALANKLARIAWAVLRRGEKFEVAGSPVAA

SEQ ID NO: 143282 - protein, 384 aa, unidentified
MFKHNILFIGLDTHKVATEVAYIEDQRGAEPMHLGRILSNKQSIKKLVRQMESKYPHATLHFVYEAGPCGYWIYRYITSLNHCCYVIAPSLIPKKPGDKIKTDKRDALKLAKLLKSEDLTPIYVPEPEDEAVRDLSRLRQTAMEDLKDAKYQLKAFLLRNNILCKTKDNWSLKHLRWLTELILPTPCQQIVLQEAIQTISERTNRLKRLDNELEHNVKKWRYYPVVKAIQAMRGVKLLVATGVIAELGDLTRFDHPRKLMSYLGLVPSEHSSGSKRHLGAITKCGNGRARRLLVEGAHGYRYEANISKEMQLRQEGLSKEIIDIAWQAQLRLCRRYQKLMHRGKHRNVVVTAIAREMIAYIWAISREVVLSPVNKKLRIARMPS

SEQ ID NO: 143283 - protein, 341 aa, unidentified
MNNCHSGIDLHSNNNVTGVVDQEGKVLFLRRMPNDLSTVIKVLEPYREQLQGIVVESTFNWYWLVDGLEDAGFKVILANPAAMKQYEGLKFTDDKSDAVWLANSLRLGLLEHAQGYIYPRDQRQIRDMLRKRVQLVQQRTAHILSIQNLTARNTGGQIKSDTIKHLNDADIYHMFPEVHLAMPAIANLHVIQVLSHEVDILQKEIYKEAREYEGLSLLMSVSGIGQIIGLTILLETGDINRFADVGNYASYCRCVESKRTSNNKVKGRGNRKCGNRYLAWCYAEAAHFATSYNPLIMQYFQRKQAKRQKAVAYKAVSHKLARACYWILKTGKPFEVERAFS

SEQ ID NO: 143284 - protein, 401 aa, unidentified
MNAVGIDVSKGKSMIAIMRPLGEVVATPFEVGHTATELNELAKFILKISGETRVVMEYTGVYFEPIARALYDAGLTVCVVHAQLIHNYGNNTIRKIKTEKADAIKIANYALDNWSKLKPYTPIDEVRRQLKAYSRQYRKFNKLKTMLKNNFIALTDSTFPVVNELFTSPPRKSDGHEKWLDFAMKFWHAECVCSLSQKAFTERYKKWCHKAGYYFLESKAEEIYAASCGHIGLLPKDEHTEQLVQQTIIQLTNICSSLSVIENKMTELAGLLPEYPVVMEFRGVGRILGPQIMAEVGDVLRFEKKESLVCFAGLEAPPYESGKFESHNRTISKKGSPHLRAALFQVMDCLLKTQPVNDPVFQFIDRKRSEGKHYYSYMCAGSAKFLRIYYARVKEYLTALE

SEQ ID NO: 143285 - protein, 269 aa, unidentified
MSEVVLGIDVSKKTLDAALVFDNRTLCKQFKNSLTGFDLLAVWLASFQIKQVHACLEATGVYGEAVALFLHERGDRVSVVNPLRIKGYANANMQRNKTDRLDARLIASFCQTQKPDAWQPPSEEVKQLQSLVRRVEVLAEMLQAEENRLANAASEIKPSIERIIGLLTEEIKELERQIKRHVDQHPNLKEQNQLLQTIPGIGRRTANLLLSEIEFERYSSARSLAAQAGVTPRKRQSGTSLKQTNLSRTRQRSNQTSIIFSGDSGKAAQ

SEQ ID NO: 143286 - protein, 341 aa, unidentified
MDKLDFVGLEVSKQELVVALQREGQRKARKTFANTPPGHQALIHHVSHPGRKVRVCLESTGLYGLDVALALHRAGLEVMVANPRAVRNFAKALMERSKNDQIDAGVLLEFAIRMPFQAWVAPRPAVLQLHALARRLEALTDRQTAEKGRLEAAQATDTLLPALRRDLERSLRSLRRALARLSGEAVKIIDQDPGLKLRFELLISVHGSIAAASAIRILAELAVLSEDLDVRQYVAYAGLDPRECTSGTSVHKPPHISKAGNAHLRRALSMPALVAIRHQPNLRAFYLHLRAQGKPKMVALVAVMRKLLHAIFGMFKHEQAFDGAKVYALPAPEISTKEVAA

SEQ ID NO: 143287 - protein, 420 aa, unidentified
MKLTYPVCCGVDVHKTFLVATIIKTTKGVQPSYQKKRFSTFNSDIRRFKQWLLDNSCFDVCMESTGKYWIPVFNLLEDQINVTIANPKWVKAVKGNKDDAKDSKWIGDLFRLGLVPGSFIPCKEIRILREYTRYRFKLTCCKRSEKNRFQNAFTGCNVALDAVVTDMFGKSASSITDYLITSDEFDPETCKSFLQKSLKKKADAVIESIEGYQMTSSQKERMLMVRSHLEFMQQSIDSLDSKLDELTAPYENAVSLLCTIPGVDRASAITIISEIGTDMTQFNSSKRLCCWAGLTPGNNESAGKKKSVRITRAGVYLKPALVQCAHAAVKSTATPYYKNKCERLAKRRGKKRAIIAIARMILTAVYHMLSTRETWNPCDLYKIDMPKEMQDKQKAKAVKQALKLLISQGVISPESAPTAV

SEQ ID NO: 143288 - protein, 343 aa, unidentified
MRKITTLGIDLAKDVFQLHGVDELGAVVLRRQVRRGQLMGAVAQLPPCLVGMEACASAHHWGRQLGRHGHTVPLMSPQFVKPNVKSQKNDQADAEAICEAVQRPSMRFVPLKSFEQQDFQTAHRARQGLMQERTAIINRMRGLLGEYGVILARKPATVRREVPEVLGDAQNDLTVVARELIAELLEHFRDLEQRIARIDAVIERLGSAHETVRRLQTVPGIGLLTATALVAAVGDARAFKNGRQMAAWVGLVPRQISSGGKARLVGITKRGDRYLRTLLIHGARVITTCAERQKRPAHQWLNAVRERRGKQRAYVAQANKNARVAWAVMTSGQSYRAPTVMAA

SEQ ID NO: 143289 - protein, 396 aa, unidentified
MVVQSGRVVIGMDPHKRSVTIEVMAGDETILGGGRFATDPDGFTAMRQYVRAWPQRVWATEGCSGIGRHVALRLLAEAQEVVDVPPKMSARARVFATGQGRKTDATDAHSIALVATRMAGLRPVVDDEQLAVLRTLADRRRSLGEEHTRMVSQLHHLLLELVPGGAKTSLSAAQAKAILAKIRPRDAAGKVRRRVAAELVADLERTYRRKKAADKELRELVLATGTSLLDLTGIGPSGAARLLVEVGDITRFPNRDHFASWTGTAPIDASSGDHVRHRLSRAGNRQINRVLHIMAIVELRNPGIGRDYFDRKKAGGKTSMEAMRALKRRLSDVVYRAMLDDAIAHVTGASGTGPGGHRGTSLTSSAAGSHPHTDTSDQPLPGPATHDPRTALPAAS

SEQ ID NO: 143290 - protein, 317 aa, unidentified
MQLPLILGVDVAKSSLVGVFHGQSGAGRSLANSSGAISALLAELPAGSIVAMEATGSHHRLLAQMAHAAGMRVYVLNARDVYYYAKALSGRAKTDRLDAAVIARYAAEHHARLHPWQPAAGVEQQLHELLQRRACVTRLLVSLRQTLGDVASLQTARLQLEDGFERFFEELDSQLQALVASDARLGCGVARLRTITGFGPQASVALGALLSRIEFANADALVAYSGLDPRPCDSGQHRGQRRLSKRGPAWLRRQMYLVAFAASHSKALGPLYKSIKAKGFAPTQALVILARKLLRVAFAVWNARTDFDPLRLQPNSA

SEQ ID NO: 143291 - protein, 416 aa, unidentified
MDDEVYYERCAGIDVHKNFLVVCLRIGRKAEVRTFGTLTHEIRDIVAWLKDNGCQMVAMESSGSYWKPLYNIFEQEGLPAMVCNAYHIKNVPGRKTDVNDAQWIAKCLSQGLLNPSFIPDREQRELRDMTRFRKSQIEERSRNLNRLQKFLEGANIKLGSWVSEIEGKSATALLELIIEKPCFTIDDVSGRMHRGMKSTAEELFYALEGSITPTQREFLTHVMSVIREQSVQIEKTDAMIQRSLSDNYKEAVKALCAIPGIGKISAEQILAETSTDMSRFKNQHSFSKWAGVCPGNNESAGKRKSGKTPYGNKTLKSTLTQCAQSAKKNKNSFFSAQYSRLVSHRGKNRATMAVAHSLLIAIYFVLNGFVFEDLGADYYLKFNREKKINSHVKQLSKLGVIIPDDVLRDAIYPPGA

SEQ ID NO: 143292 - protein, 431 aa, unidentified
MEVFKMKCNQNQRILQVSESKIIIGIDVASEIHYARAFDHRGIEQAKVFRFTNNREGFEAFVKWIDAVKAKSGKKDTIIGLEPTGHYWFNLAQHIKSQSMKIVLVNPFAVKRSKELDDNNPTKNDRKDPKTIAMLVKDGRYMEPYIPEGVYAELRVAMNTRWQIVKNLNSIKNQIDRWLRIYFPEFLQVFADWEGVAALIALHEFSTPAQVMQKGVAGIVERWKQDKIRAVGIKRAERLVEEAKASTGITEGLISADIELKILLEDYDRKMAQYTALMDMVEKLMPQIPGVAEVLKIKGIGLVTAAGFIAEVGDISRFSHPKQIQKFAGLNLRENSSGKHKGKSGISKRGRKRLRAILFRAMMPLVAKNKEFKAIHEYYTTRQNNPLKKIQSLILLCCKLIRVMYAILAKAVRYEPEKLLSDMRKDELFAA

SEQ ID NO: 143293 - protein, 326 aa, unidentified
MTSLPSPTSDDRLTVGIDVAKATLEVAISGRAKTLAFANDEAGSAALLAELSGLRVSLVLFEATGGFELACATALQLAGLAVAVVNPRQARDFARAMGHLAKTDRIDAAVLAEMACTLLARGDLSKLVKPLPDARQLELQALVTRRRQLMAMKLAEDHRMKMPGVRQRRSLNTIIKASDREIARVDRDLQALVGANHAELAALLDSVKGVGKATISTLLAEVPELGKLSGREVSALVGVAPINRDPGTMRGKRSIFGGRPDVRRVLFMAALVASRHNPVIKTFYQRLLATGKPKKVALVACMRKLLTILNAMVRSGKPWNQALHMG

SEQ ID NO: 143294 - protein, 354 aa, unidentified
MKRTTKYVALDVHQATTVASVREESGRVIARSVVPTDAGALTEFVRGMRGTRHVTFEEGTQAQWLYELLAPLVDRVVVCDRRGAPRQGNKGDQVDADQLSELLRRGALRAVYHGSADRATLKELTRTYRNLVEDSTRVMLRLKALFRARGIPTAGTAVYHSRHRAHWLARLLEAGARFRAEALYAELDVLRKLRPKAKAAMVTEARRDPAWPVLRTIPFLGSVRVALLLATMQTPWRFRTKRHLWAYAGLAVVTRSSADYTIVAGQAVRRRRSPMTRGLNRNHNRVLKDVFKGAATAATARPGPLQAFYRSVVARGTREELARLTLTRKLAALTLRLWKKGERYDPTKLTTPAR

SEQ ID NO: 143295 - protein, 405 aa, unidentified
MAVLFLGVDWGETHHDLCLLDQDGNVLTARRVGDGLAGVGELHVLVAAHAQDPAQVAVGIETDRGLLVGALLAVGYQVYAVNPHTVSRYRGRHGSSRAKSDRGDAKVLADLVRTDRHNHRAVAGDSPLAEAVKVLARAHQSLIWTRQRHVNALRSALREFYPGALAALGTQLAEPEALAVLELAPTPEQGRRLTRVAVRRTLVGAGRRRNLQARVVAVYDALATPQLAAPEQVEAAYREVVSSLVAMLCCLNEQVAALERQLAARFGTHPDAAIVRSLPGLGVVLGARVLGEFGDDPARYATAKGRKAFAGTAPVTRSSGLRTVVVARAACNQRLVDACYLWAFAALTASPGARRCYDAHRARGATHHQALRALGNRLVGILHGCLAGRITYQEAVAWPAAKTAA

SEQ ID NO: 143296 - protein, 313 aa, unidentified
MTKTTKTNPIDYIAIDVSKATLQIQDDQLAFAVDNDSEGHSKLLKHIKTRKNPLVVFEATGGYERGLCEFLREETIPLTMVNPARVRDFARSEGVRAKTDPIDTKMILAFAKSKALCAMETPSETCTKLAALLERRGHLVEQLAREKNRLQNSEKLILRSIQRMIKILEKEISALDKAIDELVSSEPGLQSRSKLIQSIQGVGKITAWTLLAYLTEIEHLNRNRLVALAGIAPFNRDSGKFSGKRSIIGGRAKVRRCLYMATQSAANCNPIISVYVKRLRERGKPYKCAIVAAMRKLLLHIQSLIKNPKLSTC

SEQ ID NO: 143297 - protein, 335 aa, unidentified
MVEFNYYIGIDVSKLTLDISVLCKDAKLSKTAHYKIENTEKSIAQFVKKTLSKYELKQILFCFEDTGIYSVPLSYYLNNNELNYWKIPTLEVKRSKGISRGKDDKIDSKDIAFYACTHLHKFRPSKMPSESIQKLRLLFTEREKLLKSQSSLEKTLENKDFLPKEVYKVVETANKSVIKKLKEVIKSIENEMVKIIESEKKLSRQYELITSIPGIGKQTAIYIIIATKGFESFKNWRQLACYAGVAPFPYQSGTSIRERNKVHPLADKKLKSLLNMCALVAVRHDKELKAYYEKKCAEGKSKMLVINNVRCKLLARTFAVINRNSPFINTYKFAS

SEQ ID NO: 143298 - protein, 369 aa, unidentified
MIVIGADTHEQSHTVGAVGAATGRVLGDRTVKAKRRSFDDLLVWARGLGAERVWAIEDCRHVSGALERFLLRRGERVVRVAPKLMAGARRSARERGKSDVIDAVAIARAAVREGLDTLPVAQLAGRELDIRLLVDRRERLVAQRTALINDLRWHLHDLWPGFEIPARALTAGRWQQRIAGRLARAEQTARVRIARDELRRIRQLTRSIDALERELAVLVADLAPRLLAEQGCGVLTAAKLVGEIAGVARFATDAKLARIAGSAPIPASSGRIDRHRLDRGGNRQLNCALHRLAITKGRLDPQTAAYLARKQSEGKSRREALRCLKRHLARRVWRLLQPPPTQQTPRPSTRPRTAITIHCNVPYSRFSLT

SEQ ID NO: 143299 - protein, 309 aa, unidentified
MLTAEADKVRPRWWSNTAAGVQALLAWCAKHGAQPAQLHAILEPTGLYHEQAATALPQVRVSLVNPAQARDFAKALALRSKNDALDSYVLARYGQTLSPALWHPAPLHARQLRALLTRREALSKDLLRELNRKEKSQFSPSAPLVDGSIDKAIAFLREQIKQIERAIDQHIDNHPDLKQDCELLNSIPAIGPQAGNAILAVMHNRHIDSAQSLAAYLGVVPVQRQSGSSLNSCARLSKAGPSQVRATLYMAALVGTRHNPHIRALYQRLLKAGKSKKAALGAAMRKLVHLCFGVLKNRIPYQPNYAMNG

SEQ ID NO: 143300 - protein, 334 aa, unidentified
MGKITTVGIDLAKNVFSVHAIDDAGGVVLRRVLTRAQLPAAVAQWPACVIGIEACSGAHDWARRFQQFGHTVRIMAPRFVSPYRKSGKNDGNDAEAICEAVQRPNMRFVPVKSVDQQAVLALHRVRHGFVEERTATINRVRGLLAEFGVILAHDARHVRHAATAAAETLPILARHCVEDLRDHLRVLDERIAQYDKELEHLARSDEAVVRLMGIAGVGTLTASATVASVGPAREFANGRQFAAWLGLTPKQWSTGGKSRLGHITKRGDPYLRNLLVMGARAVLQMATRRDDKMSRWALALKERRGYHRAAVAIAAKNARIMWALLAREATFKAA

SEQ ID NO: 143301 - protein, 426 aa, unidentified
MKEHIDYLSTLFVGIDIASRIHVISALDFNQDFFIRMKPFENTKEGAGIVEKMIADVLADNHQFRYVVIGMESTSFYGVHLANYLSTSALLAPFSVRVYCLNPKEVKNYKKSFNDIGKNDGIDSFVIADFARVGRISVKPWRGSQYLALQRLTRHRMHITECITREKTYMLNNIYLKFSEYALLWNGEHPFSNKFGATAEAIHTEYTTNEDIVNSSIEELVEFINSKSKGRIADPEVTAKIIQAAARNSYRLDKCLYEPLTISIASSFNCISSFEKELKAIDKAILQTVQGLNPQEYTVLNSIPGIGKVYSAGILAELGSIKAFQNANQLAKYCGIVWNYNDSGDFESEDSRMSKAGNHYLRYYIIEVTGSVINHCLEYKAFYQKKYAETRKHQHKRALALTSRKFIRLLFGLLDKGQLYSPEKSR

SEQ ID NO: 143302 - protein, 339 aa, unidentified
MPIVGGLDIHRAQITFDYLDLRTGEETRGTIRPATREVFRQWLGQFGRKQVAFAMEGTTGWRFVVEELEAAGMEAHLAEPSETRARRGPKRRAKTDRADARLLRDLLLTDNLPESWIPPAHLADLRTTVRLRKALVDARSGWNRRIQAQLFHHGLPSAPHLQTLIGRQYVSTVDLPAAGRQVVEVGLRMLEVFDEEIEVLDHQLEHFARRQLGCQVLQREWGMGPITSTAILAELGDTRRFTSSRQSVRFSGLDVTVEESDGKRTRGHLSRQGSPVLRWALYEVAANAWRKASPDHEYYLEVKRRLGGKRARISVARRILRRVHHELTNAGDDAFADVA

SEQ ID NO: 143303 - protein, 312 aa, unidentified
MGGGFVGIDVSKDRLDVAFRPGGEHLQVGNDPRGMARLVRMLERSQPQLVVLEASGGYEAALFERLSAKQLPVALLNPRHVRQFARASGRLAKTDAIDAKVLAHFAEVMKPEPRRMADAETRKLRVLVGRRYQLIQMMTGELHRQSRSLAALREGFVATIRCFKKQIASIDKQLATLIQETPALREKAELLRTTPGIGVVASATLLARLPELGTLDRKKIAALVGVAPFNRDSGKLKGKRAIWGGRSDVRGVLYMSALVAVRRNPPLRDFYRRLRQAGKTPKMALTACMRKLIVILNALVKHRTPWALAASC

SEQ ID NO: 143304 - protein, 360 aa, unidentified
MKVQRTSIGLDVHARSVLACGLDGDTGEVHQRRLCPDHREILEWIVGLPAPVAVTYEAGPTGFGLARALIGAGIDCRVAAPSKLVRPAGDRVKTDARDAAHLARLLHLGQIVEVAIPTQAQEAARDLARAREDCRQDLMTARHRVSKMLLRQGIVYYGGQAWTGKHELWLRGQHFDNQALTLTYEAALDAMVTCVGRRDRLDEAITAMAVDSEFTPVVHRLGCLRGISTLTAFGLAVEIGDWHRLTGRSIGAYLGLVPCEYSSGDTRTQGGITKTGNTHARRLLVEAAWHHRAPYRPGRDLRRRWDAAPVSARERGHAANHRLHHRWVSFQARKKRPVVANAAIARELAGWCWSLAVMPD

SEQ ID NO: 143305 - protein, 330 aa, unidentified
MKEQLYGGLDIHKESITGCILDEQGIVIREHKFPVKQEAVGRFTEGIPSTDIIFAMEACGMWQGVYQMFSNLGYIVKLANPKKTHDIACKKKTDKIDAKTLADLLRTRYLPEVWIPTDEILHLREITRHKSRLTRMRVQIQLKIKSTLLRRGIPYSKNIWRQTALKELEKLDPQLKSLIHLYQVFLDEEKIVKKRIETIARNKKETALLLSLQGIGALSALIIYAEIGDIHRFDSPKSLVSYAGLCPGVYQTGETQRTVKNTMVNKWLKWIMYECSGKAKIIDPRFQQYFYQMEQKTSYQIARRATARKMLTIIWHMLMKKEPYRYSISS

SEQ ID NO: 143306 - protein, 386 aa, unidentified
MTAHRVITPPGADDEAVRCYFAIELSKASWIVAVNTPLADKISRHRLEACDGRGLLDLIADVRGRVERTLGRRVEVLSCYEAGYDGFWLHRLLEANGVRNFVIDPASLQVDRRARRAKTDRIDAERLLRALMAYLRGEPKVWSVVRVPSIGAEDARRLHRERARLVTERVQHVNRIKGLCATDGIYDYEPLRGDRLERLERLRTALGSELPARRKAEIKRELQRLELVLTMIADLEAERDAIATAKASTHPNAKKIQDLTKLKAIGPEFATVLVGEVYYRDFDNRRQVGSYVGFAPCPFRSGDLAREQGISKAGNAKARTTAIELAWTWLRHQPDSALSLWFHQRVGSMKGRIRKITIVALARKLLVALWRYLETGVPPQGAAFKA

SEQ ID NO: 143307 - protein, 330 aa, unidentified
MNSICLSTDQLTAALPVLGLDVAKKSVQAELRTNGKRVRFGFENNPKGFAQLARMLKEQGAPKVWAGLEASGPYSHALALWLHGQGHRVSLLNPRRVKQYARSAGNRNKTDLLDAAIIADFVCAHLPAAWQPPTLEVAQLQALVRRREELSLMLQAEKNRLEGVASHVRCSLERIIDTLSAEKTRLEKLITQQIRSHQQLSRDHQLLCTIKGIGSLTAAILLAEMARPGQVERARQAAAHAGLAPRREQSGTSVRRNRGLGKEGNRYLRKALYMPALVAIKYNAPLRHFASRLRTAGKPKMSIVCAVMRKLIHIAFGVLKHQKPFNPSLA

SEQ ID NO: 143308 - protein, 361 aa, unidentified
MKKPTHHLIAEAPRKRGQVELTIGIDLGDVWSHYCTLNQQGEVVDRGRFRTTAKAIEKWFAPVPHARVAMEAGVHSIWISEQLEQLGHEVIVANVRELRAISHSDRKSDDVDAEKLARYARLDPEILRPISHRTVEQQEALTLIRARELLVRLRTAAVNAVRGLTKACGHRMPASSTKCFAQRGQAAMPPGLKLALGPILAQIAEMTLKIKQYDRDIQRMTQTEYAETQPMMTIHGVGHITALTFVLTLGDKSRFGRSRDVGCYLGLRPKRSQSGERDPQLGITKAGNAYLRSLLIECANHILRPHGRDSALRQWGLHLAARGGKQAKNKSVVAVARKLAVLLHHLWTTQEPYVPFYQQAV

SEQ ID NO: 143309 - protein, 328 aa, unidentified
MNQNILGIDISKDTFNVTLIGGKNGKASTQFANSPKGYHALMHWLHKQKAPLIWAAMEATGRYWEKLAICLHKQGQQVSVINPKRIKRYAQSKLLRNKTDKLDASLIADFCRTQTPYLWEPPREEMHELQMLTRRLKGLIESRTREENRRQAGDHSSFMENSFKEMIEYINNKIQEVEIEIEALIEAYLYLKEMRDLILTIPGIGKKTAARILGEVGDISRFKDAKALIAYAGLSPERCDSGTSVHKPTRLTKTGNRALKSALFFPALAALRFNPIIKALAERLKEKNKPKMVIVGAAMRKLLRLVYGVLKTKTPFDPSFIANQQIGT

SEQ ID NO: 143310 - protein, 345 aa, unidentified
MYRTKVGVDLAKKVIQVCIYRDKKVLSNVEMTPDEFLCWLINAKPVTIIFEACGTSNYWMQRAIEAGHDARLICAKLVSTVRQNQKTDKNDALAVIQAALLPDITFISGKSIEQQQLQSIQRLRELAIRQRDASRKQIIALLLELNFRSPNNGAGMIRKIEDIVEDGENGLPIALRQALNAAKEQFECMVKTIETHDKCLEKSIQIHHDCKKLLKLEGVGPINAVNLYVSLGCAELGTFSKGKDASACIGLTPIQHSSGGKVKLGTIGKKCKNGMLRSQLIGGAMSVVRQVVKREAKTKKEMWLKALAERRGNKCAAVALANKTVRTAFAMLTQETEYKAELLAV

SEQ ID NO: 143311 - protein, 473 aa, unidentified
MGKGSGSSGMTRGDRRRNARRERLRGLLPRDGAVIGIDLAEDKQALAVIDHDVRVLARKTVRVKAFRLGEALDWAVGQARAKGFAAVTVACEPTGPRWMQVQRLCGERGLPLVCIQPLVSHIAREQQDYTTHKTDESDCVMIARLAVELHCYIPEELDEAWADLRHLGRRRAQLITAATASVQRIRDFLSVAWPTVMETCAQPLESRTWLAAVQLVTSRCGGRPEKLAAMGQEAFTALVRGAVAGWGGKKVRGTISARVFAALADTEGVVAWSRRGLLRRVADELGDLQRTRAQLRGVEAGMVMVLDELGLSRLAGIPALTAVGAAAILAETGDPRRYDGSSSLVKHAGLSPSDNASGTFLGDAHISRRGRPGLRLTVWRAVWPMLRFNPVMAAKYQAMTRAADAAAADAGPQQGTAAQAAARARRAKARVACAASLLRWIYCMVVHETSWDPGVASGAAGGHDAPQAQAEAA

SEQ ID NO: 143312 - protein, 433 aa, unidentified
MRFFTDPHQNYCGIDLHARSMYLCIQNREGKVVLHKNMRARPEPFLKAIEPFREDIVVGVECIFTWYWLADLCAEHNIPFILGHALYMKAIHGGKAKNDRIDSRKIAALMRGGTFPVAYVYPAKMRATRDLLRRRNHLNRRRAELLAHIQNTNSQYNMEPFEKNISYKKNRAGVVEQFLDPDVRMSMQANFELIALYDDLKNRLELHITKNAKHHDPQALYRLRSVPGIGPILSLVMLYEIEDINRFARVQDFASYARLVKCARESAGKRYGTSGSKIGNVHLKWAFSEAAVLFLKGNPEGMKFKNRLEKKHGKGKALSILAHKLGRAVYYILKRDQAFDMNKFLKNRPGGSGQARRLTGAVKAEPKCVPKLCGQTTCGIHGQRRGNPQRLIRWSFRSPQKEHGTAQMSCSFPEPDSQLVGAMRSTRRLNGTA

SEQ ID NO: 143313 - protein, 355 aa, unidentified
MTMLADDYEYVIGGDPDRDTVDLAVLDTATGGVRAHIASSADGAGYSRMLDWARQHAPGRRVWALEGTGSFAAGLSEALAQAGEDVVEVGGVKRVRGAKNDRIDAVRAARAALARDHQASPRAHGLREAIRALTATRESVIVSRTKAINELKSLIVVAPEHLRATLRGLSLTKQLARIEATTTTNAATVEHRITVLTMQSITARIRFLSGQLADLDPELGRLLSQHPAGSALLAQPGVGPVVAAQLLLSWSHSGRVRNEAAFASLAGVAPLEASSGLHTRHRLNRGGDRALNRALHTVAITRMRTHPETRAYEIRRTAEGKTHRDVRRCLKRAIARKLYRVMESAARASVEPTMT

SEQ ID NO: 143314 - protein, 420 aa, unidentified
MYNELLAQSYYVKLKIFKLMKVSGLDVHKDSIFCAIYDGKKFGEVQEFSTFTECIRTMGDHLKYEGVKKIAIESTGIYWIPVWNILEKMGFDLMLVNPYLIKQMPGRKSDIKDAQWIAKLLHKGLLRSSLVPDKTIRQLRTYSRSYVRMQSMITRVTQEMERILETSNIRITSLVSCNNSVSIHRVIEKIIAGEDTVEELACCIHGRIIKSKGALVKLSLDGHIEEHHRFSLSLAYERFKLFTMQLNMLEGKMEEICEQNYSKQMELLMSIPGIGKQAAMQIVAETSGDMQAFENSGKLTGWTGLRPRNDESAGKYKSTATTKGNKYLRRIMVQCAWAAARTKGSFYKSKFDQLSIRKSRKKALIAIARKLLTVIWHVLNEREPFNPQFLPVYDPRRMEMKMKYHRREIDKLEKLGYSIA

SEQ ID NO: 143315 - protein, 339 aa, unidentified
MRLYAAFDLHANNNFHAVMDQDGRRVFHKKLPNDLELILEVLKPRQSEMVGVVVESTYNWYWLVDGLMGAGYRVHLANPSAIKKYEGLKHSDDRHDAFWLADLLRLGILPEGYIYPKGERPVRDLLRKRGHLVRLRTSLILSLENMIMRNYGRRLRVNDVKRLREDRVSPLFEGNDDMVLAGMVSKETIDFLTRRIHTIERAVEGKVKLKEPYRYLLTLPGVGRILALTIMLETGPIGRFAKVGNYVSYCRKVSSQWTSNGKKKGKGNKKSGNRYLAWAYSEAAELGRRFDPKARAYYNRKMQKTNFMVAHSALSHKLARAAYFIMRDQAVFRPEKLFV

SEQ ID NO: 143316 - protein, 341 aa, unidentified
MKSVLAIDVAKGKSMVSLITNCGEVLIEPYEIYHSKFDFDYLNQTISKLNLDNISVIMESTGIYHRPVERYFLENNYKVYTINALYSKMYKRNLRKTKTDKLDCLSLSELFFTTDFKQYLKPDDLYLNMNALSRQYFALSELSTNLKNRYKNLVYLCFPEYELLFKNQMIYSDIALEFISKFPHSEIISNTRIDCLQFFFKNNHFRCWKSKAIKIKEQAILSYPSVSKDDEMVSNLSQVVMLIKSYENEINSLKTKLINYGKQSKYFNQINSIFGIGDFTASLIIAELGDINRFNNIKELTTYCGLDPSIKQSGKSINIKGPISKSGNKYMRKILFVSIPT

SEQ ID NO: 143317 - protein, 349 aa, unidentified
MNSTTVAVDLAKNVFELAAADGQWRIVERHRLNRARFSRFFVHRPPCQVVMEACGSAHYWARRIRAEGHSVRLLPAHDVKRYVGRSKTDRADAAALIEAARSAQIREVPIKTVEQQQLQFLHRLRSQWLSTRQRYLSTLRGILREFGVMIPLGASAAKTQVALALAQADSDVPQGLRPALAEKLREIAPLEEKILSVERQLAALTRADERAQQLREIPGVGLLTSTALLSSVGDIQRFPSGRHFACWLGLTPTERSSAERRRLGKISKQGDVYCRTLLVHGARSALLAAHRTQRAGKPLDRLRRWALNCERLRGHNKATVALANRLARIVWATWKYERAFDGNWGNQAA

SEQ ID NO: 143318 - protein, 317 aa, unidentified
MKRSEVSTKSAGIDVSKATLDVALAEGEERLQAANAADAFAALAVWLESHGVRRVGLEASGGYERAAAEALRAAGFEVVVHQPAEIRAYAKFKRIRAKNDRIDAKVIALATAQVEGVRAANDPRLVELAEWFTAYEQAADQVAQMKTCLEQVTIAELRAGKLEQIRQAKLWKARLLREILKRIQACPDLARRFALLQSLPGCGPVVAAALLVRMPELGALPRGRAASLIGVAPWDRDTGQSRGARRIGGGRSRPRRFLYIASLAASRFDPGFRAFVQRLKAAGKEPKVALTALMRKLIEAANLVLTRGTPWVQTSAS

SEQ ID NO: 143319 - protein, 387 aa, unidentified
MDMDVMYDCCAGLDVHQGNVVACILHGKRTSTRPKAELRTFGTTQSQLNQLADWLKSFGCQIVAMESTGVFWKPIWHVLADQFNIILANPQRIKGIPGHKTDRKDARWIAKLLRLDLIPASFVPDETIQDLRDLTRARKHLIESRNKQKNRIHQVLQCGGIKLTTYIQDVFGKSGRNMLDLLVNGEVITPEIVKPLVYTTLKKKVPQIVDAMNGFMRGHHRFMLHEILTIMDAFDASIADYESQIDILLQQYEAEVQLLTNFTGIQRESAGIILAEIGTDMSVFEDERHLASWAGLCPGNHESAGKRYSSKINHGNAYLKRILCQASWAASRSKNGDLGNFFRQKSRQRGPKKAAVATAHRMLRQIYFALLNYQEAKKRTLAATSVR

SEQ ID NO: 143320 - protein, 309 aa, unidentified
MKEQLVYCGVDIAKSHLDAAIGKEKRCLPNDATGHRQFIKWIKQIEAQVQVICEPSGGYERRLIRALVGAQIKVSLVQANRVRQFARAAGILAKTDTIDARVLCAFGEAMRPQTFSASALEQERLRELESQRRHLTHLLVMEQNRAARVSEVLVRRLNRRLIHQIKKQIEQLDLLIQEHIEASPELSHKASKLTAISGVGERTAALLLAQMPELGQLNRREVAALVGVAPFNRDSGKWRGKRAIFGGRRFVRHGLYMAALVAARHNPILRPFYQRLRVAGKPAKLALTATMRKLLIVLNSALKPQSIYA

SEQ ID NO: 143321 - protein, 332 aa, unidentified
MSKFSNFLGIDVSKDYFDAVVILNCDKNNTIHNQFSNNNKGLRELVKWLKSNQSTNLNTLVCLEHTGMYGKLIIQDLLSKEFKLWVEMSLKIIRSIGVQRGKNDKIDAERIAFYAMKNQEEAQIYQAPRKIIDQIKKLISLREHLITTKAMLVRNSNELKGFEPELSKIHKKFSKSTIKGIETDLKNIELELDKIVKTDENLSNLFEKATSVTGVGKVTALFLICYTNEFKMYETPRQLACYCGVVPFEHTSGKSVRAKPRVHYMANKKLKKQLHMCAISSIRADGELKEYFNKKVAEGKNKMLVINNVRNKLIHRICACVNKNKLYEKKTA

SEQ ID NO: 143322 - protein, 353 aa, unidentified
MTGTKYIGMDVHKESISIAVRNAAGKLVMECVIETKANIILDFIHGLRGELQVTFEEGTWATWLYDLLKPHVTKLVVCDPRKNSRQGNKNDRIDARELADRLYMNKLSSVYHGGAGVRTLKELARSYLTISKDLGRVMSRVKAIYRSWGIPCAGKQVYAPRHRAEWLAKITELGVLRRAEFYYQQLDALRVLRQAVRRDLLAESQKHKASKLLRQIPSIGPIRAALLIALIQTPHRFRSKRPFWKYSGFAIEMHSSADYRSVKGELHKSRKQISVRGLNRDCNHDLKNLFKSAATIASVKPGPFQEFYAALVAKGMRPEMARLTLARKIATIVLIVWKRGVSFDAQYLKSQAA

SEQ ID NO: 143323 - protein, 310 aa, unidentified
MNDTIGVDISKANLEVWRLSDRKHMRFSNDTEGLKALCKWLGIATVRVVYEATGRFHRDLEAAVSKAGHGPVKVNPSRARRYAQATGNIAKTDRVDARMLAHMGSTLALEPTPVRSKSMHEIKELHVARVALIKDRTACRNRLDTARNKIVVAQLKARERQIDRQIAQIDAELVRLIKADPELARRYEILVSILGIGPVAATAMIVDMPELGTMTPKEAASLAGLAPVTRQSGCWKGKARIFGDRHGLRTLLFMPAVIATRYNAPLRKIYLALYEGGKPWKVAITAVMRKLIVLANALIRDDRKWAEIAP

SEQ ID NO: 143324 - protein, 357 aa, unidentified
MGTITLGVDLAKRVFSVCEMDGAGHVLRRQELKREAFSAWLCQQPAGTVVAMEACSGAHHWARRCFALGLQPKVIAAQFVGPFRKSRTTKNDHNDAEAIATAARQGNMRFVPVKSVEQQARLAWHRAREGYKAESLAIGNRLRGLLAEFGVVVANSDVALRRVLADLEAQDGLPGELRELLCDLAAHWAQLRARIDACDARIDAHARQDARCIRLRSMVGIGPITADAVVATLGSATDFRNGRQLAAWLGLVPMQHSTGGRARLGTISCRGDAYLRTLLIQGARSSLQRAKAVATEQATPEQLWIRTLDRRMPFGKVLVAIANKHARQAWAMLARDVDYDPHACLQHPRHQPTAQAT

SEQ ID NO: 143325 - protein, 350 aa, unidentified
MIIVGVDAHKRTHTLVAIDGSGSKLKEKTVAATSGGHHEALNWAISRFSDDLMWAVEDSRVNTRLLEHDLLGAHQRVVRVPTVLMAKVRRSARTWGKSDPIDALAVARAALREPNLPVAEHDTETWELKLLMDRRDDLVGQRVAVMNRLSSRLHLIDPQVPAWNLKRSPGRQALQQWLTASADTLISELALEELADIDRFSHNIDALYNRISKRVALLGSTLTGIAGCGDLTAARLICGTANVTRFRNEAAFARYVGVAPVPAWSGSTHGRMVLTRSGNRAMNSALQTIAVVQIRLDTPGRRYYLRRLEGGDTKAGARRCLKRKICRSVFTRLLADHRRRQHADPRHSVV

SEQ ID NO: 143326 - protein, 350 aa, unidentified
MGGEPVWTREVGIEGITLLLLGVNMIYLGIDVSKKKLDAKLMLDPAEVKFRSKSAANTAQGVAELLAWTLRQGNCTIAEVHAVLEATGVYHELAATAMYDAGARVSVVNPAQLKEFARGLAVRSKTDGIDSAVLARYGALTHPAPWQPEPPQVRELKALLGRLDAIEADLRRELNRQEKSEHSPVPQEVRDSLANSVAFLRQEQARLQRRINDHIDGHPTLRQDRALLQSIPAVGDKTAFRMVALLRSRTFTSAAQVAAYIGLVPVEHQSGSSVHKRPRLSKAGNGRLRAALYMAAVVATRHNPHIRAQYQRLIACGKSKMSALGAAMRKIVHICFGVIKHQTPYLPQRT

SEQ ID NO: 143327 - protein, 344 aa, unidentified
MQITRVGVDLAKNVFQVHAVDRSGRCVWKRQLKRSNWPGALFKKVEPGAEIGMEACGGAHHWARVLRDRGYRVKLIAPQFVKPYVKSSKNDATDAEAICEAMSRPGMRFVTIKTLEQQDIQALHRVRSSVIEQRTAQANQIRGLVAEYGLVAPRQLASLRRAIPVWLEDAENGLTDRFRHLLSDLWGELLRLDERIKDLDRQVARVADASEDAKRLKTLRSVGPLVATALVAHFGDGRQFKRGRQAAASIGITPRHRGTGGKNRIYGITKRGDPYLRSILIHGARSVVSQAHKKDDPLSRWLTELAEKTHPNVAAVALANKTVRIAWAMLRNGTDYDPKLAAAA

SEQ ID NO: 143328 - protein, 345 aa, unidentified
MHYVGVDYHKKSSYVTVMDERGRVVKEGQIANTQEALAALLDGTAEGASAVLEAGRNWPVMYDWLDELVDAVTLAHPAKVRVIAEAKVKTDRIDSRMLAHLLRADLIPAAYVPGAVTREQRRRLRQRMFLVRLSTMVKNRVHTLVDRHPELSRQAGGWSDLFGKAGRAWLEQLELPEGEAHLLRTDLDLLAVIQEHIKSSDRWVSQLARKDARAKLLATLPGIGDFFAVLLAVEIDEVGRFLRPEKLAAYAGLVPSTYASGGYVHHGRITKRGNKWIRWACIEAVYPATRQDPALAALYQRLKATKGANVAKVAVAKRLLTIAYRVLREGRPYRPAEEQAALRRR

SEQ ID NO: 143329 - protein, 365 aa, unidentified
MNNRRSQAIDGEAKAKPKVIKLGLDLHVRQVTECRQLDGSTPKPAQQWGPWKLLDQIKDWVQAGIKVYSCYEAGVCGYWYHRELIKAGAVNFVVVPRTLENQRNKHQKTDRLDARALLDRLESYLNGNRHAMSIVAVPSLEEEQQRSVVRYREQLMRDRRRAEARGRAIALVQGIEVPVGWWREARWQEFNRQLPEWISLQVGHWREQAVALDCQERKIRRELEKSLGMELPLGIGALSWIILQRELRGWDRFHNRRQIASYTGLCPGIHNSNGRGREGSINRCGNSVVRFTLIEMAWRLLRWQPNYGPLQKLRKAFVSKRAKRRLIVALARRLAIDLWRWATGRATAQELGLQLASSMEQKAPP

SEQ ID NO: 143330 - protein, 350 aa, unidentified
MMIIGCDLHTRYQQIAMLDTESGELVERRLEHENGEARAFYAALVGAVRVGIEATGHTHWFEAMLAELGHELWMGDAAKIRAAVVRKQKTDARDAAHLLELMCSERFPKIWRPSQAERDLRQLVWHRQKLVWMRGAVKNQMHALAMGEGVCRKKKLFTTKGRKELEGLTLGPWASYRRQELLRMFDELQASVERLDQAVEQAAKSQPLAVRLMTHPGVGPVTSLAFVLIIGPVDRFAGSRQVVSYLGLNPQEHSSGGKQRLGSISKQGNPMMRSLLVEAGHTAARMDPQLRRVYQRLKFRRGASVAKVAVARKLAVRMYWMLRRTADYAQLVRMQGSPWATLVEKDSSLG

SEQ ID NO: 143331 - protein, 359 aa, unidentified
MAIVAHLYRFIVGVDTHAKNHVLSILECATGAEIVCQTFANTSQGHVRAQAWITKHTRADLREVLVSMEGTASYGTRFRVALEQAGYRVVEAPRLLVRGRKKLAKNDVIDAFQIAARTLGKDETELTIPKQGDYREALRILVAARKQLTRATTVNINSLTALTRCTDLGIDARRALSVKQVHQIAALEEQPGDAIDVLVAKQEAKRLAKTIIDARTQLAENQNQLAMIVQLVTPALLEMPGVGPVTAAQMIISYSHVGRIKSEAAFAALAGTSPIPASSGNKVRYRLNRGGDRALNNALHTVALVRLRNDDQTRAYMKKRLAEGKTKRETIRLIKRYLARKIYRLLTKELTRTQVTLAA

SEQ ID NO: 143332 - protein, 340 aa, unidentified
MSQLYVGSDLHGNNNLVGIVDEGGKRIFKKRIANETRLILGALKPYQEEIVGVVVESTYNWYWLVDALMDEGYKVHLANPSAIQQYVGLKHSDDKHDAFWLAEMLRLGILPEGYIYPKEERPVRDLLRKRGHLVRLRTSLMISLQNIVSRNVGRKVNVKDVKALKEDRIRPLLEMNDDLALAGRVSKEAIDHLTHQIYRIDWVVQKKIQLKPQYRYLPSLFGVGKILSLTIMLETGPISRFPTVGDYASYCRKVPSRWTTNGKWKGSGNRKNGNKYLAWAYSEASEFARRLHPEARAYYQRKMQKTNAAVAHSALAHKLTRAAYYVMKDQVPFEPKRLFR

SEQ ID NO: 143333 - protein, 410 aa, unidentified
MEVLFPHCAGLDVHKDSVVACVRHMAGGKVSTQVKTFQTTTQSLMILSEWLAAEGVTHIAMEATGVYWKPAWHILADGEFELVLANAAHVKNVPGRKTDVNDAAWLADLMAHGLIRASFVPDEPTQQMRDLLRTRKQLVRERVSHVQRIQKALEDANIKLDSVVTDILGLSGRRIIEALIAGQTVPQALASLAHRNIRASSGELEAALRGRVTRHHRFLLKLHLDQIDALAAAVARIDEEVSANAAPFRAAIELLSTIPGISRLAAEVMVSEIGIDMSRFATAGHLVSWAGLCPRNDESAGKRRSTRMRMGAPWLKTSLIQCAWAAARTKNSYLQAQYLRLRSRRGPKKAIGAVAASILTAAYHMLKNGAVYQDLGASYFDRQAQNVQAMRLANRLKKLGFDVQLTPAAA

SEQ ID NO: 143334 - protein, 338 aa, unidentified
MMKNAASLKPFGQCHGLGIDVSKASLEVVGISEDDAWRRSVANQFSDIEALARSLIKAGYPGKIICESTGHYHLLLALVFARHGLDLRIINPLQSSKHQTARIRKTKTDPVDGYVLATMCETERDLPRAANWQPKQVLARLRQGQLQSLDKQIQRLSQSLASYRETYEKLGLEAGDAIETIDHALNQLRRAKRQLEAELDSAYLELAEASDVDQLKAIPGYSDLVASMIAGAFDRDVKSERSWIAFAGLDISIRESGTWTGRGKLTKRGNSFFRKRFFSAAWGAMMNYAEVREYYDQLKSRGRHHVEALCIIARKLLRIAYAILVNGKTYDPKIAFPG

SEQ ID NO: 143335 - protein, 377 aa, unidentified
MKKPIRFVGLDVHAETIAVAVAEPSGEVRSVGTIRNRPEAVRRMVRKLGPAAQLRICYEAGPCGYVLYWQLTELGAVCEVVAPTLVPVRAGDRVKTDRRDAEKLARSYRSGDLTAVWVPDAAHEALRDLVRAREAAKKDQLRARHRLQKFLLRRGLRPPEKIKAWTAQHLVWAKTLRLEQPALAATLLDYITEVEHARERIERLERAIDQAIEAAPAAIRAVIEGLQALRGVARISAATIVAELGQLSRFHRPKQLMGYTGAVPSEHSSGERVRRGTITKTGNAHLRRILVEAAWSYRHRPNVGSELRRRQANASEEVKEIAWKAQHRLHYRYVRLMARGKIKQQVVTAVARELAGFVWAIGVEIEKQLVSRPARAA

SEQ ID NO: 143336 - protein, 451 aa, unidentified
MLPSVTPPNETESLISVNPDAAGLDIGHDEIWACVPAERATPAVRPFATYTPDLNALADWLVACDIKTVALESTGVYWIPIYEILEARGMQVYVVNARHLKHVPGRKSDIQDCQWIQRLHTYGLLTASFRPVADICAIRSYVRQRAMLIEYRAAHIQHMQKALQQMNLQLTQVLSDITGKTGLAIIRAILAGEHDPRQLATLRDERCAKTEAEIVKALTGHYRAEHLFALQQAVALYDMYTTQIQECDTELERLWTALQPPRDQDLPPLDTRDKRNTHSKNAPTYDARTLLYEVVGVDLVAISGLNASTVQTILSDTGLDLSAFPSEKHFCSWLSVAPRNDISGGKVLRSRTLKSGNRAGQAFRLAAQAVSRKQDEFGAYYRRQRARLGPEQAIVATAHKIARAYYHVLKHRTPFRSLSADAYEQQVRQREVAHLKKKAAKLGFTIVETPA

SEQ ID NO: 143337 - protein, 389 aa, unidentified
MQDIQPILNCCCGVDVHKNMIEACIINGTDEAIIIRKQFSTFQSELQEFVLWLYENDCYHIAMESTGVYWIPVYEAIEDFSPYYENIHVINAHHFKNLPGRKTDVQDAEWIATLLRHGLLKGSFVPPRDIRDLREFSREYKNSKSEEVRCKNRIEKFLQRHGFKLSSVLSDITGVSGMGILQALAVKGSLSVYDVKSALRGHTKHSSQEILHAVCGKLNSNECFLLDDYLEQLAHVRKHIDKLVAKMREIADPYSQQIEQLCSIPGIDNVSALLIIAETGVDFERNFKTPGHLSAWAGLKPRNDESAQKFKSRKILPGNPYLKSILVQTAWAAVASRNSSFHKWFWSHQLILGKKKAIIAVSRKILVLIYILVVRGELYNPDIACAKTN

SEQ ID NO: 143338 - protein, 357 aa, unidentified
MAKSIKVLATGLNVIGLDLADVNSDWAGLDQDGKVVRRERVRTTESELRSVFGALAATTIVLEVGTHSAWVSRVLKSLGHEVVVANARRVALIHRNKRKNNRIDAEFLARLGRADKELLFPIHHRSVAAQADLAVLRTRDVLTRSRTALVNHVRGICKSFGVRIPKCSADAFVTRASAVVPKELSGATSIVLDQIAGLTAKIKELNKTVTSMMDRHPEAKIVSQIPGVGELTALVYVLTIEDPRRIRRSRSAGAYFGLVPGSDDSGEKHQQRRITKEGDPFCRRLLVCAAQYILGHFGKDSDLRRHGEAIAQRGGKNAKKRAVVAVARKLAVVMHHLWVHHETYVPLFNSAKNDIAA

SEQ ID NO: 143339 - protein, 353 aa, unidentified
MSSDKYIALDVHQATTVTSVLNAAGREVDQSIIATKSQPIRSYLEGFSGPLHVTLEEGTYAAWLYDLLEGRVAELVVCDPRHNALLKEGSKTDRNDARKLADLLRAGMLRPVYHGRHSLRPLQELVHSYEALVEDTTRAMNRIKALYRRRGIDCAGRGVYTQKQRASWLEKLPAGASRLRGELLHEQLDHTRSLRRKARLALLKESRKHLISARLREVPGLGPLRVARLIAWIQTPHRFRTRRQFWTYCGLGLVIFDSSEYRLIQGRVVRRAQPVKIRGLNRNHQPRLKEIFKSAALSAIRQPGPLKEYYDARVSQGRDPALLRLSVARKLAALVLSLWKKGGRYRAQDVKQA

SEQ ID NO: 143340 - protein, 333 aa, unidentified
MNVAGIDVGSEKLAMVIGKDGRLHKPRDFINESTGHAAIINALRSAKVPRVCIEATGVYHLDLAVALHDAGIEVMVVNPKAARRFAEAMMSRTKTDPVDAALLAEFAARMPYVAWVRPSDEVLALRAYARHLAALTKLRTQLKNQLHAWQQSGTVPAAIVAAVLEHIKQVDAHIESMRGKALDLVGSHASLQKPYELLLSVKGIAEASAIALLGELLVLPEGMSARQWVAMAGLDPRHSQSGKSVNKKPRISKAGNRHLRMALYMPSLSACRHDPHLRGFYRHLIDHRGLKKLQAVCAVMRKLLTALHAILKTAKPFDGSRLFALQQEAPANA

SEQ ID NO: 143341 - protein, 349 aa, unidentified
MHARSVVAHALDTITGEILRARLCPDPVEVTRWVKGLPGPAAVIYEAGPTGYGLARVLGSEQIRTVVAAPSKLQRPAGDRVKTDAHDAEHLATLLRLDAFTAVTVPDEATEAARDLVRAREDCRADLMRARHRLSKLLLRHGIVYSGGKAWTGTHQAWLRRQRFDSVLTQAAFDEAYDTVASITARRDRLEQRINVLAGDSQYTAVVRRLGCLRGISTLTGLGLAVEIGDWTRFSGNSIGAYVGLIPSESSSGQSRSQGPITKTGNSHVRRLLVEAAWHHRVRYVPGKTMQDRWDLASPAARARGDLGNRRLHQRWEQFQTRKKRPTVANTAIARELAGWCWSLAVLDP

SEQ ID NO: 143342 - protein, 351 aa, unidentified
MTIVANTYTHVIGIDTHARTHTLTVIAAATAARGATAAFPTTARGLSRAGSWIARHGSHLATLVVIEGASSYGALIAHAVSQAGYRVAEPLPIPKSLRAGRGKSDPIDAALIASSVLHADVGELRNPRDDQGVRAAATVLLAGRELLTRHRSASVNALTALVRLHDLGIDARRPLKDAQIATIAAWRDRTEDIATATARVEARRLARAIIQANLDLADNHDQLHSLVLASPVAPLLAEVGIGIVNAAIILTAWSHPGRIHSEAAFASLAGACPIPASSGNRTHHRLNRGGDRRLNRALHSIVLTRKRHDPATRDYIARRTAEGLGRRAIDRSLKRYLARHLYRALEHPSAY

SEQ ID NO: 143343 - protein, 416 aa, unidentified
MNKRTYRSKKVKQINWNQLKESLSGEKISLAIDIAKQKQFAMLSNEDGSVSALFSWLHPEETPDVLGAMANLCCPVTVIVESTSTYGDALRYQFRQLGFEIHQASAKRVHDAKEVYDGVPSLHDAKAATIIARMYRDGLTRPWRELTEEERHLNALRIEYDMHKTQYQRNLNRLEAYLSRHWPEVTYILDLGSVSLESLLMKYGSPAQVACHAKVAAKELKRASRSMLAPQKIAQVIACAKSTTGMPCIESERRCLQALASEMGHSRMQINRVKKALEETIDDDVQLVEMGRMIGRVTTAILMSFHLDPRNFKCPRSYQKAMGLNLKEKSSGRHFGQLKLTKRGNSKARMYLYFATLRMIQKDPVVKAWYLNKRHPKAKNKTVIAVMRKLSKALWHVAQGQAFDANKLFSVAHKVS

SEQ ID NO: 143344 - protein, 348 aa, unidentified
MLHAGLDLSRKRLDYCLLDERGDRVEVGGVSPDGDGLRGLARVVGLRHGPAFVRAAIESMNGARFVHDTLERCGWEVEVADAQKVKGLAPLACKTDRIDAWVLAELSRRDLVPAIWLPSFDLRSERERARWRLFLVRKRSSLKHRVHAQLLAFGHACPVSDLFGRRGRELLERLDFPEPWRGGVMAAVAMIDELDRQISDIDRELRRLGADHSYIPLLMTAPGVAWVLGYTIAAEIGDIHRFTSPKKLCGYTGLCPRVYQSGGTDRRGHLTHAGPKYLRWALMEAATHACRHRVYRERYLTTKRRLGKQRGAKVAQVDIARRLAEAIWHMLTRQQPFAPASATLSLVA

SEQ ID NO: 143345 - protein, 330 aa, unidentified
MTHYIGIDISKAKLDLAWLKDIEKPKVKTKVFKNDSTDFLKLIDWLKSNVTEDLSDIHIILEATGVYHENIAYYLHDQGLSISIVNPAFVRSYADSLGSRHKTDKQDSILLARYAHSAKPNLWTPPPAEARHLKSLLSRLDALQQDLMREQNRQEKADATDTAVIVKTSIEQMISALKEAIANLNDDIDTHVEDHPNLKQDQVLLQTIKGVGPATSRQMLSLMHNKSFTKASQAAAFLGLIPKQVQSGQFRGKTRLAKNGSSAIRAKLYMAAVVSTRWNPDIKAQYERLLANGKCKMQAICAAMRKLVHICFGVLKHQMPYQPQIAKTAA

SEQ ID NO: 143346 - protein, 341 aa, unidentified
MKNLFIGIDYSKKKFDVSLLERYKMQEIKHEYFENTPEGCKAMLKWIQLQTTIPPEEWLFCGEHTGLYGVLLTEFLVKKKFFVWIENPMQIKLSTGLKREKNDKVDSQEIARYAYRFQDKARCFQIQDKSLKSLQLLLSFRDRLMRNKHSILVAAQEIRAVLKRDTTARYIYEQTKRDVERLNKEIKDVESRMKEIIQASEELKENYLLVTSIKGIAMINTVALMIHTDNFTRFQNCRQLACYAGVVPFEKTSGSSIKSGSHISHLANIQIKTLLTQAARSAVLYNPELRQYYERKIKEGKLEQIVINNVRNKLLHRIFAIVQKKQPYQVNYINSLNKNVA

SEQ ID NO: 143347 - protein, 327 aa, unidentified
MRQHKSSTEKVKTSVAFDVCKATLDGHILVDGKVFSVPNADDGFDQIAAILADYHISLVLMESTGGYEDAAACFFQSIGYDVVVVNPRHARRFAQSMGIMAKTDRIDAAVLAQFASVLDSLPDRERYIRPLTDETRKFLSRMVTRRRQIVELITVEKQHLSCADDYSRQSINMVLPFLQAQLKDINDDISFYVKKNFSYLSKILSEIPGVGKQAVGVLIGDVPELGRIDNRQLSAVIGVAPFNHDSGKMRGRRFISGGRKQVRNVLYMGIISATRFNPVIKAFYERKLNEGKPKKVALIACMHKLLRIINAMVRDGTSFNPSLHTVS

SEQ ID NO: 143348 - protein, 336 aa, unidentified
MKYSGIDLHSNNSVVTVTDEEDRVMSEKRLPNDLATILGFLLPWRDELVGVVVESTYNWYWLVDGLQEAGYRVHLAHCSAIKKYEGLKHSGDEADARHLAHLLRLGILPTGTILPREQRALRDLGRKRMQLVRSRTQHILAVENITARERGARISSEQVKRLSVETIDQMPVPEDVALAVKANVAVIHTLSVQIDLLEKRLQKAVPRTEYDLVTTIPGIGRILATTILLETGPIDRFASPGNFASYARCVDSQHTSNGKKKGEGNTKNGNKYLSWAFIEAAHFAMRYCVEAKRFYERKKSKTNNVVAIKALAHKLARACFHMLKERKPFDVTRCFA

SEQ ID NO: 143349 - protein, 320 aa, unidentified
MGEDDLKDSNECFIGIDVSKDHLDIAIRPSQEKLRVLNNDEGVSTLVERLRQLSSTLIVLEATGRYHRLALGQLLAVGLPAIAINPRQARDFAGATGQLAKTDRIDAQVLAEFAEKIRPEVRGIPDEATQELEALSIRRRQLVGILSSEKNRIHTAPKAIRPRIQKHIHWLEKEILQLEKELDQRIRSSPAWREKEDLLRTCKGIGPVTTHTMLSCLPELGTLSGRRISALVGVAPFADDTGDYKGRRHIRGGRLDVRAVLYMATLTAIRHNHVIREFHRRLITAGKAKKVAITACMRKLLITLNALVRDKKPWRPDFVS

SEQ ID NO: 143350 - protein, 438 aa, unidentified
MEEAGDEPLFCERAAGTGIGKQVISVTIRVPSDTRRGGRQQETREFGTTRRQLPEMADWLRCWQVERAGMEATSDYWKPVYFLLEREGFDCLLYQASQVKALPGRPKTDRLDSAWLARITGQGSLAGSFVPPEDVRRLRTRTRYRRRLIQARTAGKARCEKLLEDAHLKLSSVISDIHGVSGRDMLRAIIAGERDPETLAQKARTRMRRKIAQLREALDCSFFTPDHAFVLQMMLGNIDHYTAQTGVLDERIAILCEPYERQAAQLDGIPGFGVTSARDLIGEIGVDMTAFPAAGHLCSRARLAPRVRESAGRRKGKNATGRGNPYIGGTLGEAAAGAGRTQTFPGARYRRLCTRMPKKKAQGAIMRDQPGIAHALLSDPGAGYRDLGTGYYEQRERTRRRASSHVRSLERLGYKVTIEPLAPDADAETGELITRTAS

SEQ ID NO: 143351 - protein, 287 aa, unidentified
MKKVSKRAPQMEAKHNSNSAMTVGLDLGDRFSRYCLVNAQGEVVEEGRIQSSEEAMRRHFEGELRLRVALECGTHSPWVSRLLSELGHQVVVANARKIAMITASTSKNDRNDAEQLARLAAYDPRLLSPLKHRSPQRQQDLNLIQVRATLVRARTMLVNALRGLVKSAGGRLASCSTESLAVRAPAHIPSALAAAAPPLLEQIAALNGQIAGLDREIEKLREKYPEIGVLRTVPGVGPVVAAAYVLTLHCCDQANNRSAGAWLGLRPRQNQSGDSDPQMRISKEGDR

SEQ ID NO: 143352 - protein, 430 aa, unidentified
MKSNTQNAKIEAITEKTLVLGIDVGSETHYARAFDYRGIEYSKKPFKFSNTEVGFATFKEWILDLKERHEKDKVVPGMEPTGHYWFNLGKFLQDNEMKPVLVNPHHVKKSKELDDNNPTKNDRKDPKVIAGLVREGRYMIPYLPDGVYADLRTASNIRFQLQAELTRIQNRISRWFNIYFPEYKTVYGKPDAKSGMLILKAAPLPEDILTLGIDGVNQIWRDAKLRAVGKARAKTLIEAAEHSVGSKEGAVSARMEIRMLLEDYESRNIRLQEVMGLIEGLVNQIPMAEKLLEIKGVGIRTVSGFLAEVGDISRFNNPKELQKLAGLALVENSSGKHKGETTISRRGRKRLRYLLFEVAMSLVAKNPEFRELHNYYTTRRLNPLKKMQSLMAIAAKLIRVFYVMLTKGVNYDPKKMVSDIKRPAVYLQAA

SEQ ID NO: 143353 - protein, 340 aa, unidentified
MTITTIGIDLAKNVFAVHGVDQNGKTVLVKSRVIRAALPGLIAGLPLCVIGMEACSGAHYWARLFRQYGNEPRLMAAKFVSPYRMAGKSGKNDAADAQAICEAVRRPHMRFVPVKDESRQAMQCLHRPRQGFIEEKIATYNRLRGLISEFGVIAPQGTDALRHIVSAQKNSLPLQVQQCVDDLLEHVDRIEANITEYDQILPRIAKTDHRSQRLMKLKGVGPTTTCALVACIGNAHDFKNGRQLAAWLGLIPSQYSSGRKSKPGRITKAGDSYLRTLLVQGARSVLIGAEKRTDSFSRWGCSLVERRGYWRAVVAIAAKNARLCWASLHYGDDFRLYSAS

SEQ ID NO: 143354 - protein, 349 aa, unidentified
MRCFQPPAGTRFYAGVDLHARAIFVVVLDHDGRVVFAKNLPANPDAFLRAVAPFRDGLLVACECMHCWYWLADTCRQHHISFVLGHAYSMKAVHGCKTKCDRTDAEAIARLLRGGNLPPAYAYPSERRGLRDLLRARLRLVRQRARLYGHVHTARRQANLPPASSDVKYRCKRAACTADIADPFVRRRVETHLALLEPLDTTIRRLEKEISDAAGQIFPAELAVLQSAPGVGKVLSLTILLEIDTIGRFGTRQQFCSYARLCGAVQTSDNKRAGDGNRKAGNAWLKWAFSEAAVLSAQKDEQIGALLQRLASKLGKAKAYSALAHKLGRAFYHMLHTREVFNVIRFVRH

SEQ ID NO: 143355 - protein, 302 aa, unidentified
MGEVSTIGLDIAKSVFQIHGVDVEGAVVIRKRVNRAKVFEFFAARPSCLVGIEACPTAHHWSRRLQALGHTVRLMPPSYVKGYLKRSKNDANDAAAICEAVTRPSMRFVPTKSEQQQSILMLHRSRQLLVRQRTMLSNAIRGHMAELGIISAKGRNGTTELLDILANERDGRIPTAARFSLDVLARQYAVLMTEISVIEKRIHAWHRSCEENRRLQEIPGVGPIVATALIAEVGDWKAFSSGRGLAAWIGLCRGNIRLAARSDLAESQSRAIDICDGCSSPALWLSFAMRAGTAQRGCGWFA

SEQ ID NO: 143356 - protein, 343 aa, unidentified
MRTITTIGLDIAKSVFQVHGVDAVGQVVIRRQLKRRYVLTFFQKLPSCLIGMEACASSHHWSRELQALGHTVRLMPPAYVKPYVKRHKNDATDAEAICEAVTRPNMRFVATKTPEQQSCLTLHRTRHLFIRQQTSVINAIRAHLAEFGIVAPVGRHGVEQLLTIAADANDKRLPEVARACVSALGAQLRMLKAQILEFDRMINVWHRSNEASRRLDDIPGVGPALATALIASIADPKAFRSGRDFSAWIGLVPKQNSSGGKDRLGNISKRGDRYLRSLFTTGALAVIRYAKIHGTRHRPWLTALLARRPTKVAAIALANKMARMAWAMMARGERYKESAALAA

SEQ ID NO: 143357 - protein, 430 aa, unidentified
MEASIATTGALTAYIGIDWADQKHAIALRSAAEPNKIEHQLIDQKPEALMEWIGGLEQRFGTQGKILVCLEQSRGALIYHLMDYDFFELYPVNPLQLARYRETFSPGGAKDDRPDSELLCELLYCHRERLRVLKPDSVLGRKLNFFNQGRREAVEQRNRLSNAIKSQLKVYFPLVLELLDQDTSTALAADLLLGWPTLEAIQKQPAHRLRKFFYGHNCRGEQRMLKRLELVQKAKPLTQDSAVIEPAALRVQLLARQLKHLLPDIARYEDKIAQLFAAHPDRFLFENLPGAGEALAPRLASAFGSEPQRWESALEIATLSGIAPVRRASGMKSGKKGQRKASVHFRQACPKFLRQSFHEFAGCSIRYCSWAKAHYDTLRARGKGHHAALRAVAFKWIRILFACWKQRTPYDPQLYLQALQRRGSPLANPC

SEQ ID NO: 143358 - protein, 328 aa, unidentified
MPMYQLGIDVSKNTLDLCLLREGIKGKIKTRKLKNTADAAKVVTEWLKRQSCELGEVHIIMEATGVYHEPLAYGLHFAGARISLANPHRTREFARGMNILTKNDKVDAWMLACYGSLKEPEAWTPPPESVRYLRALLRRRDALVADSTREKNRLEKSVFTDSPNAVRASIEHMLQELNNEIEHLDVLIQEHIETHPELNQDFRLLTSIKSVGYLLELNMLAILKSHSFESAEQAAAFLGVVPVERRSGTSVKGKPKLSKIGPPEIRTKLYLAALCGLRFNPVMKQMYTKLCQRGKSKMCAIGALMRKLVHWCYGVLKTQLPFDAEYNQ

SEQ ID NO: 143359 - protein, 376 aa, unidentified
MGKRSTRHGGEVCGVDLGDRYSRLCIVAGETGEIVEEGRIATTEVALRRRFASVAPMRIAIEVGTHSPWVSRLLTECGHEVIVANPRKVRLIYSNRRKNDAIDALYLARLARTDPTLLAPIRHRGQESQHDLALLRSRDALVRARTQLINHVRGAVKATGSRLPRWSAEAFARKAGGALPPGLVTVVGPTIEVIGSLTAQIREYEHKLNALAEAYPETSRLRQVKGVGVITSLAYVLTLEDPSRFARSRAVGPYLGLIPARRDSGESSPQLRISKEGDAFLRRLLVGSAHYILGPFGEDCDLRRHGMKLGAGGSKKDKKRAVVAVARKLGVLLHRLWQSQATYDPLYNAKRDANASLAACRKDTTPVREKATARNE

SEQ ID NO: 143360 - protein, 334 aa, unidentified
MEQITTVGIDLAKRVFALHGVDAGGRVILRSIVRREQLLEAMAKLPPCVVGMEAGSGAHDWARQLQRLGHTPKLMAAKFVSPYRRKGKNDGNDAEAICEAVSRPGMRFVPIKSLEQQALLSLHRVRQGFIVERTATINRLRGLLAEFGVVLPVRAVVVRREACKAAESLPALGRRAIEDLLAHLRTLDERIAAYDRELEQQARQCEPARRLMKIRGIGALSALAIVATVGNARDFRSGRQFAAWLGLTPRQHSSGGKTRLGHITKRGDAYLRCLLVQGARSVLHTASRHADGMSRWAQTLEARRGYHRTLVAIASKNARIAWALLSRNEVLRPA

SEQ ID NO: 143361 - protein, 377 aa, unidentified
MWSASSEAQDGGVRVTVGVDTHTDQHVGVALDQFGRRLGTRSVPTTPAGFAELVAWARDFGAIEQIGIEGTGSYGAGLTRWLRARGLAVIEVERPHRHDRQARRRRGKSDPLDAEAAARAVQAGTGSGQPKAGDGQVEMIRTLRLTRRSAMKARTQAANQLHALVVTAPDDLRARLRPLPMAGLITLVAAFRPVRAGPVLSTPVAAAKLALKGLAIRYRQLSAEIDALDVHLGQLVATAAPELLAVKGVGTDIAGALLVAAGDNPDRLRSEAAFASLCGVAPIPASSGKTNRHRLSRGGDRDANRALYLLTVGRMGWDPATRTYVTRRTAAGLSKPEIIRCLKRYIARELYRILTASAASPPHSTDGDVAPSSAIAS

SEQ ID NO: 143362 - protein, 441 aa, unidentified
MAKIVNPNAAGIDIASAVHYVAVPEEKCKENVRSFKSFTRDLHKLASWLIECGVDTVAMESTGVYWYHLYTILLDYGIEVYLVNAYHVKNVPGRKSDVCDAQWLQELHSSGYLKACFQPDNLTRALRNYVRQRKILVRDMSTETLRIQKAMVQMNIKLHDVIRDIHGVTGTSILNAILAGERDAEKLAELNNYRIKASKETLTKSLEGNWREEELFNLAMAYKRYKFNKSLLLDCDRECEKIVAQLAKCTVPDKEIKPLPRAKNQPTFNVRKYLYHTYGVDVTMIYGFKQTSALTVLSETGPNIKEKFPTLKQFLSWLNVVPNNKISGDKIISSRVKKKKNNAGQTFREAANTLWKAKNPLGDYLRTKKSKSGSGQAIVATAKKLATIFYKMVTEKVEFDPYILDGNRQKYLRNKAKRLKKALENVSCLISDYEQFEGAVR

SEQ ID NO: 143363 - protein, 362 aa, unidentified
MSQTFQSFIGVDLHKCTVTLTAVDPGGEKRARLKISTKSTGKIEDWLLALPRSTHMAVEACPFVEWFIDRFRACVDRIDIADATELANRRGKRRKNDPNDSLDIAKRLARGECPLGYIAEAELMQLRKLGRHWRHLSRLLSRTKHSMKSMLNAANIRGPKFDGASAQRWLLANRDMLKPVQQQTFADFIDVLMLTERHRERLRREIIFATRSERFAPLVALLLSVPGIGEIWAAIIAAEIGPFNRFPNADTLEFWAGLTADLKESAGRTQSGNITKAGSVTLRWALCQAAVTLCQCDARQEATRQRLVKRIGKPKANVAMGRRLLRILYAMVRDGKPFERGPARDRTSAANKARLGRKKQAA

SEQ ID NO: 143364 - protein, 388 aa, unidentified
MEARTVNNPPSAASHDETVRCVLAIELSKKSWIVAVNTPLSDKVSRHTLEACDWKGLLELIARIRTRVMALNRPVEVVSCYEAGYDGFWLHRLLEAHGVCNYVIDPASVQVDRRARRVKTDKVDVGRLLRSLLAYLRGEPKVWSVVRAPSIAEEDDRRLHRERDRLINERVQHVNRIKGLCAVHGIYDYEPLRPNRLARLEQLRAVDSQELPPRVKAEIVRELQRLELVLNMIKTIEAERDAIVSAGKSSMHANAKKIQDLIRLKSIGPEIGTALVGEVFYRQFNNRQQLGSYVGLTPSHFQSGPMSRDQGISKAGNPKARTVMIELAWLWLRHQPNSPLSIWFRERVGTAKGRIRRIAIVAMARKLLITLWRYLETGVAPTATVLKG

SEQ ID NO: 143365 - protein, 447 aa, unidentified
MAQRKRPTTQSAITLTHPNAAGIDIGSAAHFVAVPPDRDDQPVREFASFTADLHRLADWLDACCVDTVAMESTGVYWIPLYELLESRGFTVLLVNARHVKNVSGRKSDVLDCQWLQQLMSFGLLHGAFRPADQVCVLRSLTRQRTMLLRSQGRFVQHMQKALTQMNIQLANVISDVAGETGQRILHAIIAGERDGLALARLRNARIRASEDEIAKSLQGTWRDEHLFALKQALDAFDFCGAQLAECDAQVQAQLQALHVREDDPTKGKKRGRARNAPKFDLRTQLFQMCGVDLTRINGIDVTTALVVVSEVGADMGRFPSDKHFASWLGLCPGTKITGGKVMSGKTKRCTNRAAQALRLAAAALRSSQSALGAYYRRMCARMDKPKAVTAAAHKLARLIYAMLTNGQEYTDQGQDYFEERYRQRVLHNLAQKAKAMGMQLVPSDNTA

SEQ ID NO: 143366 - protein, 344 aa, unidentified
MSSVTPKTVFVGLDYHAESVQVCVLDRDQKQLANRSCPNDWRAVVAAVRQGCGENVNVQAAIEACCGAADLADELIAQAQWSVNLAHPGYVARIKQSPDKTDFSDARLLADLQRVGYLPRVWLAPEEVRELRRLVRYRQALTKERKNLKLQIGATLREARQKPPAELNSWTKAWRAWLEETAVLSRNARWITDHRLTRLAALAKEIRAVERRLEQQTAQDTLVRKLLTLPGIGLVTAVTIRAEIGRFDRFRTGKQLARFCGLTPRNASSGQRQADAGLIKAGNPQLRTVLVEAAHRLIRYDERWTRLSAKLSRRGKPTSVVIAAIANRWVRRLFHQMQPGQLAA

SEQ ID NO: 143367 - protein, 408 aa, unidentified
MGRAAEVVAPSSSIRTDGGCPVVQVNDLSRSLAAFDPISTLVVVVEMSKASWLVSSVVPGVERQPLKKLEPDATALLRLIERWRNEAVRVGRPISRIALAYEAGRDGFWLARWLIARGIEVHVIHSASVAVSRERKRAKTDRLDAAMLMRVFLGWLRGERGHCGMVAIPTMEEEDARRPNRERESLVNERSRIINRMKSALARLGIRGFKPHLRKAPERLAGLRTAEGTGLPANIIEEFRRDMARLALVREQISSIEKTRAERLERAPDTGPHAMVRLLARVIGIGIETADMLVREILSRKLRDRRALARYAGLTGSPDESGLKSREKGLAKAGNARVRRGLIQLAWRFLMFQKDSALARWYRTRTEGPSGARKTTMIVALARKLLIALWRLVTTGEVPDGVELRTAA

SEQ ID NO: 143368 - protein, 452 aa, unidentified
MSDQLLMDVVNKNAAGIDVGSRSHWVAIGQNDQHIKEFGVYNENLHQLADWLEQHHIKTVALESTGNYWQNLYAILSSRGFDLTLCNGKFTKNIKGKKTDVQDCQWIQKLHSLGLLSSSFLPDEDTEVLRTFTRHRDNLIKQAAAATKKMQKYLRLMNIRLDVVVKDVVGLTGLKIIRAITLGESNPQKLASLRHYNCRKSEEEIAKALHSNGRKDYLYALKDELDTFEFIQKKIRECDDQIADKLQDIIGKDPEKLELDIDKKPYKRLNKNAPKNIDLNLKSYQMSKGIDLLAIEGMSYNTVLTIMSEVGYEGIKNFKTAKHFTSWLRLSPNNKISGGKVLSSKIGKGSSRLKIALRNAANAIGNLKDSTPLRDFFHRISFRKGRVAAITATARKLAIIIWNMIVKEQPYHNPQGYLYLDQKRKLGLVKRMQKQINKFGLTNDDLELITTG

SEQ ID NO: 143369 - protein, 423 aa, unidentified
MTQFAAYLGIDWADKKHDLCLVDAATGHKTKLVLAHTPQAIAAYFTNLRAQYPGQLIAVALEQSRGPLLFALLQYDFLVLYPLNPTTLAKYREAFTPSRAKDDPTDAAYAAELLMKHNDRLKAWHPDDPQTRTLRYLVEHRRRLGGDRTRLTNRMTSLLKCYFPQVLSWFPDLATVLVADFLLRWPALEQLRGVKRTTLLNFFRAHHSVRTDTLEKRLAAIKESVPLTTDRAIIDSSVLMISALAAQLKTTIAALQQFDDEIAKLCVAHPDFPLFASLPGAGAVYASRLLAVMGTQRDRWTTAAELACLSGIAPVMERSGQSVWIRWRYFCPKFMRQSFHEYAGESVKHSFWARAYYEQQIGKGKSRQAAVRALAYKWIRIIWKCWQTRSTYNEVKYLEALRRKGSPLLAHAVKNTACVNKSS

SEQ ID NO: 143370 - protein, 493 aa, unidentified
MGACGLESGDVVLAAIPIRKMTIGIAQTLLLVIEWRIAMPKRTTGDRPELKTVSVGAAAIDIGSKMHMAAVNPACTDVPVRSFGTFTQHLYDLADWFKACGVTSVAMESTGIYWIPVYEILEQRGFDVILVNARYAKNVPGRKTDVSDAAWLRQLHSYGLLRGSFRPDAEIATLRAYLRQRERLVEYAAAHIQHMQKALMEMNLQLHHVVSDITGATGMRIIRAVVAGERNPNVLATYRDVRCHSSPETIRAALVGNDRDEHIFALTQSLELYDIYQAKMLDCDRKLEVLIAALSNKGEKPVGKLSKPRIKTKQVNTPTFDVRTALYGVLGVDLTEIHGLGPSLALKLVGECGTDLRAWPSAKHFTSWLCLAPGNKISGGKVLSSRTRRSSSRAAALLRLAATTVGRSDTAIGAFYRRLSSRAGKSKAVTATARKIAVLFYNTLRHGMSYRDPGADHYEQQYRNRVLANLQRRAKSLGFLLQAIPGDADPAVS

SEQ ID NO: 143371 - protein, 431 aa, unidentified
MSQFLNDFVVGIDVSSEFSIVAMLAPTGDLIRKPFRIDHNPTGFHKLLDILNKEEERLNRKPIYFVESTGIFHLPLFFFLKSNDLKGFVLNPLCVHSTKNFDLRKVKNDNKDAEAIARLAKYQDIKVSIVPEPQILALRMMTREYYAVSDMLTEMKNRLCTDLYLLFPGFLNVFSGPFGKTALAVLKSYPSPRAIRDADTDVLTLLIAKTSRKSPEWASQKVALLLECAQLASSMPSEFSLLDTKIKFHIDGIEHMQASLNGIEAQIHTMIESDEFPAKAQRNIELLDEIPGVGFLTAATLIAEIGDFSLFNSPKALSAFFGLDPSVNQSGKFNGDRNKISKRGTRIGRRILFTIAMASIRTTRNGKEINPVLRDFYTSKCVSKKKKVALVAVMHKLLHYIFAVLRDQKPFEIRKPEDHQSWRQAKLEQAS

SEQ ID NO: 143372 - protein, 337 aa, unidentified
MTLYCAIDLHSTNNVPVVIDENDKILFQKRLPNDLTVVHSALAPYQSELHGVAVESTFNWYWLVDGLIDHGYRPVLVNTSAVKQYEGIKHTNDHSDAFHLAHLMRLDILPTGYIYPREERAVRDLMRKRLQLVRHRVTHMLSAQNQLWRSTGVNTTTKLIKQADFSLLNLVEDRHIKMAIKSNLMIIQALNQQIDLLEKTVKRQAGLKPEFQSLLTMDGVGDILGLTIALEIGDIRRFPRVGNFSSYCRCVDSSRLSNGKKKGDNNRKNGNKYLSWAFIEAAHSIIRHNKTAHRFYQRKRAQKNGALATKALAHKLARAAYYMIRDREPFKLDLLFR

SEQ ID NO: 143373 - protein, 345 aa, unidentified
MQCMYYIGLDVHQRTISYCLKDDGGRIHPEDSIPATRVDLDRWMKTLPQPWTAAMEAAMLTGWIYDPLKPHAASRKVTHPLMLRAIAAAEKKSDRIDASKICDCLRCDFPPECYMAPTAIRERRRTLRYRNLFVRQMVQVKIKISALLTEAGVSYKKQRLHKASYFRELLATNPDIDDGLCSLLRLCRETVVRLGKTESALVRSLERDSLLVERVERLMTIPAVGPITALTWALEIGDVQRFSSIKKAVSYWGLCGAEKSSANSMQRTPLSKQRNKHLQTTLIEATKMAPRNSPELAMLCDRGKQKGDANRATLHVARKLVAHLVAVDRRQKEFLTVVRENRTAA

SEQ ID NO: 143374 - protein, 313 aa, unidentified
MAEVNAAIDVGKDQLQIALGSEGELFSEPNQPRGIKRLVQRLNEAGCVRVLVEGGSYQSVLVAGLRAAELPVVIVNPRRVREFARSMGQLAKTDRIDARVLALYGERIAPAVRELPAEQNQELRALWVRREQLIEMLVMEENRLEHVPPKAKVVAHNLRSHIDYLRKQIKQADDDLDRTVRNSQLWEKYELLTSVPGVGPVLSIALLSDLPELGRLNRAEVAALAGVAPFNYDSGSLRGQRRIEGGRARLRRVLYVATVAAVRWNPVLKSYYQRLRAARKPAKVALVASMRKLLTILNRMLATKTPWSPPCPV

SEQ ID NO: 143375 - protein, 355 aa, unidentified
MDSKKYIGMDVHKESISIAVMNDAGKIVMECVIETKANMILQFIDGLRGDLQVTFEEGTSAAWLHDLLKPHVTKLVVCDPRKNASMREGNQSDKIDARRLAELLRLNHLNPVYHGEHGLRSLKELVRSYLTITKDLVRVMTRVKAIYRSWAIPCTGKQVYAPRHRAEWLAKINEPGVRRRAEFYYQQLDALRTVRQEVRRELLVEGKKHKAWKRLCQIPSIGPIRSAVLLGILQTPHRFRTKRQLWTYSGFGIETQSSADHRSVDGQLQRAKKQSSIRGLNQNCNHDLKNLFKGAAIVASSKPGPFQEFYSALLTKGIRPEMARLTLARKIATIVLIVWKRGACFDAQHLKPQTA

SEQ ID NO: 143376 - protein, 355 aa, unidentified
MNDAKYIGMDVHQATISVAVRDSDGKLAMEAILETKAETILQFIHGLRGSLHVTFEEGTCAAWLYALLKPHVTQVLVCDPRKNALLKVGNKSDRIDARKLAELLRANLLSSVFHEDTGLRAVKELARSYLTMTKDLTRVMVRLKALYRSWAIPCATKQVYAPRHRAEWLAKIREASVHRRAELYYQQLDALRSLQQQVKKELLIEGRKQNAMKLLRQIPAIRPIRAVLLLALIQTPHRFRTKRQLWSYCGLALETRTSAEYRVVHGQLQRSKKPVAIRGLNKNHNHDLKNLFKGAALRAAAVEKPFQEFYAALVAKGIKPEMARLTLARKIAAITLIVWKKGARFDAEQLKQQAA

SEQ ID NO: 143377 - protein, 340 aa, unidentified
MLAVGVDTHKESLAACAVNEVGRPVAERTFANDSRGHEVLRDWLKELPEPRRVGLEGAANFGAGLARVLLEADEDVREVPSILTRRERRRTGRHGKSDPIDALAIARVVARDEQLPPALPSRASEDLKALVDYRDQLISERTRVQNRLHADLQILAPGYRAKVRRLTTRPQRARAAELLSAAPGIRAELAGRRLERLEELDADVATLTRRIETAVRTSGTRLVSIVGVGAITAAKLLGETGDPRRFRSMGGFAMACGAAPIPASSGQTNRHRLNRGGNRQLNRALHTIALVQARVDSRARTFVVRKQAEGKTWLESIRCLKRHLADVVYRRMVDDLVAGT

SEQ ID NO: 143378 - protein, 355 aa, unidentified
MKYYTSTTQFNCGIDLHAHQMYVCLMDREGKKLVHTNVLDNDFAFFLKLIQPYRHDLTVCCECMFGWYWLADACQAAGLTFVLAHALYLKAIHGGKNKNDRIDSEKLAHLLRSNLIPPAYVYPAEKRPLRALLRQRLFFVWRRSELLARIRSQQLAHNRIPPKQTRRNRDPWEQQLLAAEDHPLRQLALKNELAMVRHFDHQIAQLEVELQRQAKKSAGRDYALVQTTPGIGAILGLTILLEIGEIARFPTVKDFLSYSRLVKGTVASAGKIKGLRGAKLGNPYLRWAFGEAAVIAKRDHALIGPLAQRLEAKMGGNKFKANTVIAVKLARAVFFMLRNKTVFDAERLTQALTHD

SEQ ID NO: 143379 - protein, 310 aa, unidentified
MDRIIVGIDVSKDRLDVAVRPSGEAFAVSRDAAGVEQLVARLRKLSPHLVALEATGGFETVVAAALGAAGLPVVVVNPAQVRAFAKALGQRAKTDPIDAGVIAHFAEATNLEPRPLPDEQTRLLADLVGRRRQIVAMIGAERQREQRVTAPRPRKSIARLIKALEKELASLDADIDDAVQGSPAWRAKEELLTSVPGVGPVITRTLVAELPELGQLGHKQITALVGLAPFTRQSGKWRGKSFIGGGRTAVRAAIFMGAMVAKKHNPVLKAFFDRLVAAGKPKLVALIAVARKLLIILNAIVRDNRPWQTA

SEQ ID NO: 143380 - protein, 530 aa, unidentified
MTRHVRTNRSQRRKPRSKSNRRSRQNVQKPNGVIGPRVQKVGGERFAIVCVDPAKHRSDWMMADYFGNLLVEPQKVEHRAASFRLAVERIRQAQEQHDIQDIIVVVERTGNYHLPPKRAFARAGYETRVVHPFATKHYRVPADPGNKTDPTDLFAQHRAAMAGFGLCEFELESPYRELQLKSRHRRNLVGKATAIACQIRENLHLAMPGYAKMFDRLFQHQTALAMAACCDSPAKLIELGQAGLSQHLRKKKIRHQIRTIEKVLAWASQAAHEHIKDGPLHHAIWTDLHELYQHFQRQIFTVEQELVGLLVQTPYVRLLAISGINVVSAAEYAGEMGPITGYANANAITGRCGLYPSRHQSDETDRDRGPLIRQANRRLRCALMRIADNLACHCAYYRGQADLDESRGVDKRASRVKIAKRFSRLTLACVGGDEPMQHPCFQKPDSILEKLRCFHQEHQIPIDLLLVNLETAVGQLPYKTCNHEAEIVADVLQQHARRRRVPAPIGDVLPAVLARLNIRTTEANKNGDRS

SEQ ID NO: 143381 - protein, 405 aa, unidentified
MAEGRFAGVDWASEEHAVCVVDETGRIVDGSRFTHTETGLQALCSRLEQLKVTLVAIERPDGLLIERLLDAGLTVIAVHPNQVRAAGPRYSVARGKSDGFDSFVLAELARTDSHRFRILVPDSDQTKALRVLTRSRQDLVRTRVALANQLRDQLACFWPGATRVFTHIDSKIALAFLRRYPSPADARGLGEQRLQAFLTKHGYPGRKPASELIGRLRAGAEGRAGELETQVRREIVLALVSALEPIVERISELTIEIRHALEAHPDGEIFRSLFIAKDSWLTAATMLAEIGDCRDRYPTYRALAADAGQCPVANESGKAKRATFRWACDHRLREAFNTLADSSRHHNPWAQDIYTRAKARGATHAHASRILGRSWSQIIWRLWHDHDTYQPTKHTARQKLIAAEA

SEQ ID NO: 143382 - protein, 348 aa, unidentified
MLADQLDYVVGVDPHRDTHALAIVDVRTGGVVVEASVEASSIGYARALELARGQAPGRRSFAIEGAGSFGAGLSRFLSGEGERVLEVGRLRRERRSGGKNDALDAIRGARSVLAESRAAEPRAGGEREALRALMAAREGAVKARRAALCQLRALLITTPESLRSELRPLTRAQLLRRLGSARPDRRRDVELRGTLRALRALARRVRQLTSEERELADEIERLARALAPQLLEQAGVGPLTAAQLVISWSHQGRIRNEAAFARLAGCAPIPASSGQTIRYRLDRGGDRRLNRALHMILVTRRRSHPATIAYIERRVQEGKSSREASRCLKRYLARNLYRLLEQGAPLAA

SEQ ID NO: 143383 - protein, 333 aa, unidentified
MNNYAVYVGVDVSKHSFTTTLLFNEIRKTFKVPSKPEQFESRLRPFLEELGVDKSNVLIIMESTSNYHLPLAEYLAERQYNVGLANPFSMKRFMDAKMSRAKTDKVDSYFIAEYGRQIFKGPLFKPKTEAQKEIEARVKTLERFNKQLTMLKNQREALSLIPMKGLKKILAHYDRIIESIEKEIEVLEKEIRELCKKHFPEEYRLLKSIPGIGERAIAIVVSILRKFEGFKRAKDVGSFVGLCPSPVESGSSVRGKGSIKKRGNPYVRQVFYMCALSAVRSNPYCKDLYERLLERGKSKTEALVAVAHKLLRQCYGVLKSRTPFRVKEKEVTP

SEQ ID NO: 143384 - protein, 342 aa, unidentified
MHKPSEVFACCGIDVGAAQLVVALESIGGGWRQRSFPNRTRGHQALILWLQKDGTRVRVCLEATGLYSLDLALALHAASGIEVAVLNPKVVNRFAATLCRSKTDPADAQVLAEYARRMPFQPWHPPQAAALELRTITRHIAALTQQHTRQSNRLHAASASTTGSRWVRQDLKRSLRDLQRRVEKMRRAALALLEQDVELRPRFALLLSMPGIGEISALHLLGELALLAPGLTVRQWVAHSGLDPAHHESGTSVHKRSRISRAGNRYLRRALYMPALVAVRHDPHLRAFYQSLVARHKAKLQALIAVARKLLHAIFGMFRWQSTYDGSRLLPNIELPGLAVVA

SEQ ID NO: 143385 - protein, 323 aa, unidentified
MQGKKLSEPSAETKVYIGIDGCKAWLDIYLHPLGHRLRVANSREGLKQLKKTLAASSVALVVVEATGKYHRLAHRSLHAWGLPVAVVNPLRSRLFAEASGALAKTDRLDARMLAVFAESLEPAPTPPLPERVEALQELVSARRAATGEATALANRLGASQTVFLKRQLTSLLSKLKAHIARLDAEIERRIAAEPILARRYRILRSIPGIGPVAAASLVAGLTELGLYSNKAIAMLAGLAPIACDSGNMTGQRRIRGGRSHLRPPLYMAALAAARVNPDLAAFYKRLREQGKASKVALTAVMRKLVVLANTLIREQRLWQPTQP

SEQ ID NO: 143386 - protein, 455 aa, unidentified
MQVLFERCAALDVHKAFVVACRILTLANGKTELQTRTFETTTAALLALRDWLAAFGCTHVAMESTGEYWKPVYNILEGAFELWVVNARHYKNVPGHKTDPKDASWLAELLRHGLVKPSFIPPRPQRDLRDLTRQRANLVVERADVVNRLQKVLEGANIKLTCVATDVTGVSARAMLAALIEGKADPATMAELACGRMRTKRAALEEALSGFVRDHHRFLLSTHLTHIDFLDEQIQVFNQQIEAQLGQMSAPTDPPAPSQGGSPTQSEPPPTSASSSCSEEGERAPLAYEKAVQSLTDLPGIAQRAAQAILAEIGTDMNRFPSDAHLTSWAGVCPGNHQSGGKRYSGKTNPGNAALRKALVQAAAGAVRTKETSFRALYERLVHRRGKQRALMAVARKLLVVIYHLLKYQRPYKELGADYFDTHRREAITNRLVQRLSKLGYYVTLQPCQQAPAVA

SEQ ID NO: 143387 - protein, 390 aa, unidentified
MTLFVGVDIAKETHYAAMTNQHGVILIEPFPFQNSKSGFELFLGSILSFLQESEKLIIGFESTAHYADNFIHFLVSNNLFFKVINPLVTSSLRNANIRNTKTDSIDALLICSTLYKEEQKNTLHRDETFSEIYSLCCSRRNLTRMRTKAKIQLVSYMDRIFPELAPFFKNNLHINTSYALIKEYPLPQSIKKVRIDVLTRLLTKASHGRYKKDKALELKKIAGESIGIPSHSFALQAQMAVNQIELYDEQIASIDKQLEAFVNNFDTPLKSITGLGHLEISVILSVTNNLNNFDSPSKVLAYAGLDPVVRQSGKWHASKSRMSKRGNSLLRYTLIWASYNVCKNNKTFMNYYLKKTSEGKSHYAALGHCAGKLVRVIFKLIKSNESFNLD

SEQ ID NO: 143388 - protein, 310 aa, unidentified
MNAFVFVGIDVSKAQLDVALRPTGRLSAANTEAGIAEVLTRLQAVSPTLVVMEATGGLEIPLTEALASAGMPVVVVNPRQIRDFAKATGQLAKTDALDAQVLAQFAEVMRPQPRPLLDAETRALAALLTRRRQLVEMLTAERTRLMSVHTPVRKSLRTHIAWLELAIQQTDTVLTEAIHQSPVWREKEALLQSTPGVGPVMTTLLTNLPELGALTGKQISALVGVAPFNRDSGTLRGTRTVWGGRAQVRAVLYMAALVAARFNPVIRAFHQRLCAAGKAKKVALTACMRKLLIILNAMMKHRTWWEHTTG

SEQ ID NO: 143389 - protein, 356 aa, unidentified
MNNISKLDFTGQHLYIGMDVHKKSWSICILTDQFEHKTFTQPPDVGVLVSYLKRNFPGATYRAVYEAGFSGFWTHDRLREQGVDCIITNPADVPTKDKERAGKTDRVDCRKLAHCLRSNQLDGIYVPSRAAIEDRSLLRTRCSMVRKQTRCKNQIKSLLAFYGIHIPEELAQSRWSKKFINWIDAIRMERASGNYSLKAYLDELNHIRRILADLNRNILALSRTDEYRANVLLLRTVPGISTLTAMILLTELNSMNRFSSLDKLASYVGLIPNTNSSGEKNTTTGITNRRNPALRGILIESSWVAVRKDPALIMAFDKLCKHMTKTKAIVHIARKLLNRIRYVLKNQQEYVPAVVQ

SEQ ID NO: 143390 - protein, 345 aa, unidentified
MKKVVAGMDLHSNNVMIGIMDMDGKRLAHRKVDCDLKEVVKFLAPYKSRLEKAAVESTFNWYWLVDGLKALDYPVVLANPARIEQYSGLKHADDTNDAFFLAELLRLNILPTGHIYDPDLRPVRDLLRRRMMLVHQRTALMLSFKSLYARTTGLEMGLGRLKELGVKEAQKLYENPANQLIAGMQIQHIDYLSQSIEKIEKVVLDCARHLPFYSKLTTLPGVGKILGMTITMEVGDIKRFASPGEFASYCRTVEAQRTSNDKKKAENNSKCGNKYLAWAFVEAANFARRFSPECRAWFDRKAAKTSNVIATKALACKLAKAAWHVMADGTDYQGTRMFGPAAKNQ

SEQ ID NO: 143391 - protein, 309 aa, unidentified
MTIPPACVGIDVSKAVLDVFDRNCGLRRIANDAETIERFVAGLDPDAFVVFEATGRYDARLRRALEAAGIRFARVNPEHARAFARATGRRAKTDAVDARMLADLGLRLAPRPAEASDPARVDLQLADRRRDQLVAMRVAERVRLVDCDDEAMRTDLEGHIAFLDAAVSAVEARIAAMVKADADLTRLARRLRTVPGIGPVVAARLLAALPELGRRSPKAIASLAGLAPHADDSGGRRGKRVISGGRRRVREALYMAAVAASRGKTRLGAFYRTLRDAGKPPKLALLALARKLVVILNAVARDDQDFRIA

SEQ ID NO: 143392 - protein, 344 aa, unidentified
MWIIGCDFHSGFQQLAIFDNRTGEFQERKLLHPGEACEFYRSLTEPVLVGMEAGVPCQWFRRLLSECGHELWVGDAAKIRAAETRKQKTDRRDAELMMILMREGRFPRIWMPTEEERDVRQLLMDRHHRMRRQAKAKNQLQSLALNQGLQKGRRLWSAAGLQQLRELPMMEHAARRRDELLRVVAELDGQIAELDVLVRRQAECRADAKRLMTHPGVGPQTALGMVLTLGEVGRFPSAKQVASYLGLVPSEYSSGNKQRLGHISKQGSSLMRFLLVQAAQTAVRGDAQLRRAYARLAAKKSRAVAKVMVARRLAVRLYWMLRNDWTYAELARHAGEPGSFCGEQ

SEQ ID NO: 143393 - protein, 344 aa, unidentified
MKEVITIGVDLAKNVFQVHGVDAEGAAVVGRQLRRSQVLPFFRKQPSCLVGMEACATAHHWARQLIELGHEVKLMPPHYVKPYVKRSKNDAADAAAICEAVTRPTMRFVAVKSVEQQSVLMLHRTRELLVRQRTMLVNAIRSHMAEFGIVAPVGIPRVKELFAVIADADDDRLPPIARACLEGLAKQFMSLHEEIAIAERRIHAWHRLNEASRRLETIPGIGPITATALAATITDPSVFRSGRELAAWIGLVPRQNSTGGKERLGRISKQGDQYLRWLLVAGAMTIIRHAKRRGTSNLPWLANLIASKPTKVAAVALANKMARIAWVLLRTGQDYQKPALTHGT

SEQ ID NO: 143394 - protein, 423 aa, unidentified
METMHERVAGLDVHKATIVGCVRVWTGHKVERECRTFEPTTAGLQALLAWLLECRCSHLAMEATGVYWMPVWKILSDGDFSLIVANAAHIKNVPGRKTDMNDAMGIADLLACGLIHASSVPEEDVQELRSLMRTRKQLGREQTRHVQRIQKTLTEANIQLDAVLSDIMGASGRRVIEALISGVRDPRKLAALASTRIKATPKQLYDALHGRLTDHHPFLLKVHLQQWDGLDATIREIDQEVAARIARLDQEVKAGEAPFCDLIELLSMIPGVSTLSATTILSEIGRDMSRFPTAGHLVAWAGLCPGQNESAGKRKSTRLRKGAPWLKTMLVQCAWAAKRKKDSYYKAQFFRLQSRRGPQQAICAVAASILTAIYHILKDGTAHRDLGADYFNRRSTEGQAKRLVAQLTKLGFQVQLQRTAEAA

SEQ ID NO: 143395 - protein, 396 aa, unidentified
MPATTRHARVPALPESTTGQAPLLYLALDLGERHWTLAFTVGRGQRPRVRTIPAGDLERLTTELAAARRRFGLPPEAQVVSCYEAGRDGFWLHRALLAAGVTNVVVDAASIEVPRRARRAKTDRLDARKLVTMLGRYIEGERPVWHVVHVPSEADEDRRHLERERETLVADQTGLVNRIQGLLATQGVRLALRGDVPAQLAAVRRWDGTPLPPELCARLEREWMRVEAVRTALRALTTTRHRRVTTPTPLAADTAAVHLTRRLAALGAVGETTAWLLATEMFSWREFRNRRQVGGFVGLTGTPDQSGDRMREQGLTRNGSVELRARVIELAWGWLRYQPASALSQWYRQRYGGGNARLRRIGIVAVARRLLIALWRYAMGGPPPAGAHLKDDAVAA

SEQ ID NO: 143396 - protein, 485 aa, unidentified
MVTSMPTEAFLGVDWGGSEHQLCAVDDTGEVLIRRRVGHTTDGLAVLDDTLAELSVLRVRVAIERGEGLLVEHLQAAGITVYCVSPKLSSRARERYRLADTKSDAFDAFVLADTLRQQHDQWRPLAARSEQTALVASLSRDRERITLMQRAVESRLRATLEAYHPAPLHLFSSLDRDIALAFIRDYPNPVAASRMTVDRMARFCRRHHYSGRVDPAVLLARMQPHLLAGSPGTTAGKQVMALHLVDQLEMLNQQERDFNVHLAAAVAAHPDGALFTSFPGIASVIAGVMIGELGDDRARFPAPGALLAESGLAPVTRASGRTRQVRFRYAANKHLRHAIDWWMTVAAREDPWSKQVYDQARAAAGLGPKGWRIGALDGDSDEGERRFAREHASYLLTNPDMLHYSVLPNHQRWARFLGALRYIVVDEAHRYQGVFGAHVAQVIRRLRRLAAVLLDEQVEHDRVGDHRYEIADGVGRVDDRAVDED

SEQ ID NO: 143397 - protein, 346 aa, unidentified
MRFYTKQHQFYCGVDLHARSMYICILDQAGQILLHRNLPAEPDAFLEAIKPYREDIVVCAECMFSWYWLADLCGGENIPFVLGHALYMKAIHGGKAKNDKIDSRKIAALLKAGLIPQAYVYPPEMRATRDLLRRRHYLMRRRADLLGHIQNTNAQYNLPEFGRKIAYKTHRTGVAEQFSDPDVSMSVSADLELIDHYDQLMKRLELFILKNARHHDPRALYLLRTVPGIGVILSLAILYEVHDIARFPTVGDFASYSRLVACAKESAGKHYGTSGRKIGNMHLKWAFSEAAVLFLRGNPQGMKYRKRLEARYGKAKSLSILAHRLGRAVYFMLLRHKVFDMKQFLD

SEQ ID NO: 143398 - protein, 358 aa, unidentified
MVTVGEHVYFIESRGDETMKRYLGVDLHRNCFTVCTLKEDGQSELRKWSIQSLGDFAQGVQATDAVAVEATGNARYFCQALKERGCRLVVVNPQQFQVISRSVKKTDARDAKTLAEFLAKDMLPEVRMKEALPAEIASVLQTRDKLVKLRTTLKNKINNLLAARGILIRKESLSTEKGLEQALSADVGELARLELGVLVEQIRHLNQSIAKLEAAIKQQGPKLPGYENLKSIKGIGDIGGSILLSTIGDIHDFADEGKLAAYFGIVPRVSNSNETERSGRITKRGNKLGRTALVQCALIAMRYSPYLANYYTRIKAARGTGKAIIALARKFLGIIYKTLKNDWVFEDFPKFVFAPTAG

SEQ ID NO: 143399 - protein, 338 aa, unidentified
MKLYAAIDLHSNNSVLVILDEMDRTVLQRRLPNNLEQICQALCAHREAIEGIAVESTYNWYWLVDGLMEAGYRLHLVNTTAVQQYDGMKYREDTHDARWLAHLLRLGILPQGYIYPKAERCLRDLMRKRSQLVRARSQQIVSVENALSREVGTHPSSNRIKRWQESDVDDLPLAELSQLAVKSNLAVMHCADEQIERLEAAILAKAKLRPEYQYLLTVRGIGQVLSLTIALETGDVKRFPTVGDFSSYCRCVGSEHRSNGKKKGSGNVKNGNRYLAWAFVEAANFAVRYDPTVKRFYQRKCARTKPVVAIKAVAHKLARACYHVMREQVPFDVQRAFA

SEQ ID NO: 143400 - protein, 375 aa, unidentified
MSNVRFVGLDVHADTIAAAVAEPDGEVRPLGVIPNRLESIRKLVAKLGPVDQVKACYEAGPTGYVLYWQLNGLGVSCEVVAPSLTPVKAGDRVKTDRRDAAKLARCYRAGDLTPVWVPDAAHEALRDLVRAREDAREDQQRARQRLGKFLLRHNWQRPKDIKENWTQKHMTWIKSRVRFEQPASQAAFLDYVHEVEHAADRLERIEKAIDDAIAAAPPEIQQVVQALQALRGVGKIVAVTVVAEVGSLSRFANPRQLMSYAGMVSCEYSSGNRIQRGGITKTGNAHLRRVIVEAAWAYQHKPWIGGWLAQRQQGLDEEIKAIAWKAQWRLCMRYKRLAAKGKNKPQIVTAIGRELLGFLWAIAVRTERRAAAQAA

SEQ ID NO: 143401 - protein, 370 aa, unidentified
MKQPTTLFVGLDVHKDSIAVAHVVDDRAAEVIYVGAIGTRQSDIDGLVRRLQSKAARLVFAYEAGPCGYVLYRYLTKKGLQCLVVAPSLIPKRPGDRVKTDRRDAVELARLLRSGDLTPVYVPSVEDEAIRDISRAREDAIADVKAAKFRLQAFLLRLGLHYSGRANWNAAHLRYLAKVVCPTPAQQIVFQESVRAVDQQVERVRRLEAELEEQVPSWRLYPLVQALQALRGVQNTVATIMVAEIGDLTRFDNPRQLAAFLGLIPSEYSSGERRRQGSITKAGNGHARRALIEGAWAYRFPAKVSAHIQKRIENLPKPIQDIGWKAQVRLCKRFRRLTSRGKHPNVAVTAVARELAAFMWAIAKEVPIAV

SEQ ID NO: 143402 - protein, 365 aa, unidentified
MKIIYWIGVDDHADKWTIAQYRGGEARPSKEFELVPDEKGYRRLLAYLKGLDGEVRIVYEAGPCGYELYRRLTKAGYQCQVAAPALTPKKPGERVKTNRRDAAKLGHYLRSNELTFITVPDEERESLRDVIRSREAAQKDVGRTKKRIVHLLLRYGQRYRDGQAWTKRFWAWLKSVELAGVNSQFVLDDLISELEHRIAQVHRYDEQIELAAQKPEYKAYLDGLRTLRGINTLSAMTVLSELGDLRRFPTAPQLMAAIGVVPSESSTGDKTNRFSITKTGNAHVRRIAVEAAWNYRRRPTAGRTIQARRKGQPKEIVAIAEKCEKRLNSKFFRLTSRHKKSTVAVVAVARELLGFIWAIGQIAHP

SEQ ID NO: 143403 - protein, 373 aa, unidentified
MPRYSTAFGMDVHLRSTTVCALDAETGEAVTRRFRGNPWGEVAEWMSGFPGPSLAAYESGYLGFAPQRELSGLGVDCVVAAVSRVPRSAADFSSKNDRNDAARMAKAILSHDVTPVWVPSPEIEGLRDLAGAHDAATARLAAAKQRLLAFLARRGYAYGGTTPAGNPRRYWTYDFLRWLDKVRPADDGGIRALAALRNEVEAAAETRDDLLAEYRAAVAAGPLSAEVEALQSIKGCGFALAAAFASEVGDFSRFRSGRQVTSYFGLAPKQRSSADSVRLGGISGAGNALVRRLAVEGSWSYVQASHQPKLMPKGSGVPLEVRMHGRKGSERLLRRREEMLARGMPQAKANAATAAELVRWLWALGAMCREATE

SEQ ID NO: 143404 - protein, 368 aa, unidentified
MPVTSGWEGKDTRLSMVVVGIDPHKRSHTAVAVDEAGRKLGQLTVNADDEGFLRLWAWAARYGTQRQCLVRWAVEHGRGVAGRLVRALVGQGAAVVWVPPKLMAQCRASARTRGKSDPIDALAIARAAIREPDLPAVQLDETAAELRLLSDRREHLVRSRTELINQLRWRLHDLNPALDAGATALTGPRTLTHLASALAVLPASVSCQLAADLVADIARLGEQIRHLERRLHALVTPLVPALLAIVGISTVTAAKILGEVGGITRFRSPAAFALHNGTAPIPVWSSGKPQYRLNRGGNRQLNAALHRIAITQLAHHQPARDYRDRWKTHHPHATTKAAIRALKRHLSDVIYRALLTDHLQQHPTPPTT

SEQ ID NO: 143405 - protein, 341 aa, unidentified
MSSLVCGLDVHKDSVYATVMSYGGEVVERRKLLDKDEVVSFLGRYPIDKVAMESSTSIVPVYRALRGKGYNVLVSHPKKTRLIAESRIKTDRVDSWALTELARLDALPLSYVPPDDIAALREKVRRWAFMVRMRSKLKVKIKAHLTINGLTPPSEYGLFTRKGLEWLHGLQSDAVESYLPVLSTLTLQIERLSKELRRMAPEDEDVRLLMTIPGVGYYSALLVKSEIGTIDRFPDGEKLCSYAGLVPSVSSSGAHKRYGSITKEGSRWLRWIMVESVRIHLKYDTGITRAYHAIAERKGSGIAKVAAARRLLMCCYAVLRNHEPYHDPAGHYQPSRSGRGE

SEQ ID NO: 143406 - protein, 382 aa, unidentified
MFTERTSIGLDVHARSVVASAIDVVTGEIVQGRLTPDHGHILSWIAERAGPVAVTYEAGPTGFGLARMLTGAGIRCVVAAPSKLQRPSGDRVKTDARDAAHLARLLRLDQVSAVTVPSVAQEAARDLVRAREDARGDLMRARHRVSKLLLRHGRVYADGPAWTGAHQAWLGRQRLDGRDGSEGSPAAHAALESDCDAVWAVTARRDRLDATIAELAQASEFTPVVRRLCCLRGISTLTGFALAVEIGDWHRFTGATIGAFMGLVPSEYSSGASRSQGGITKTGNSHARRLLVEAAWHHRARYRVGKTMLDRWALADPAARARGDAGNRRLHRQWERFIARNKRGTIATVAIARELAGWCWSLAVLDELDKLDKLDDLDKLDE

SEQ ID NO: 143407 - protein, 462 aa, unidentified
MARRKRKISLPSDALPPQLATANLHAAGIDVGAEEHWAAVPPCDDPQPVRRFGANTADLEAVADWLWDCGVTTVALESTGVYWIPLFELLETRGFQVLLVDPSKMPRNGRPKTDVHDCQWLQRLHTYGLLSACFRPEDQVVVLRSYLRQRATLLADAARDIQHMQKALTQMNIKLQHVVSDITGVTGLAIIRAILAGERDPTQLARLRAPRCKQDEAAIAAALQGTWRAEHLFALQQALERYEFQHRQLAACDARIASHLETFADQNHGAPLPPKRGQRRRHRHRPAFDPREPLHRMTGVDLTRIEGIDETTALIVISEIGLDMSKWPSEKHFTSWLGVSPQRRISGGKVLSSRTRPTTNRAAAALRLAAASLHHSKSALGAYFRRMKSRLGTPKAITATAHKLARLIYSMLKHGTAYVTQGLEAYEQQYRARVVKNLSRKARELGYELVKPVEATSETSLA

SEQ ID NO: 143408 - protein, 313 aa, unidentified
MDIVVARCAGLDVHKDTVVACVRTPGSEGQRAEQVRTFGTTTVELLALRDWLVAEEVSLVGMESTGVYWRCVYYVLEDALACWLLNARHLRNVPGRKTDVADAAWICQLVEHGMVRPSFVPPKPIRELRNLTRYRKAQIEERTRETQRLDKVLQDAGVKLSSVAGDILGRSGRDMLTALVAGTRDPGVLAELARGKLRQKLPALRQALAGRFGAHHGLLVGQILAKLDFLDEAIAQLSAEIDRVIAPYQPQVALLDTIPGVDRRTAEALIAELGVDMARFGSAARLASWAGMCPGQHESAGKQRSGRTRKGPK

SEQ ID NO: 143409 - protein, 362 aa, unidentified
MTQIMRIGMDTSKSVFQLHGVDAAERPVLRKKLRRNQVLEFFGKLPPTRVGMEACGAAHHWAREIGALGHEAVLLPPQLVKPYIPRNKNDAADADGICEAMSRPRMRSVPVKTAEQQAALMLVGVRDQLVARRTQLSNTIRGYAAEFGLVAAKGLDKIEPLLARIAAARLPDLAKEMFATLGADYAELGMRLSRLEGRLRAWQRQDETSQRLMEVPGVGPIAAALLVMKVANPRAFRSGRDFAAWLGLTPKDHSTAGKQRLGVITRAGDEALRRTLVVGATAVIQQIRRGRGRGSPWLTALLARKPPKLAAVALANKTARIVWKLMVSGEHYDRERAAAARAERSAALAEGFALRSALAVTT

SEQ ID NO: 143410 - protein, 381 aa, unidentified
MTEVTLVKNLNPEAPLMYMAIDLSHKSWKLAFSDGVKLRFYNIEGKNLQALKEAIDKAKTKFGLSNDCQVVSCFEAGRDGFWLDRHLKSQGIDNLVVDSSSIEVNRRKRNAKTDRIDARKLLGMLIRHVGGERKHWSIVQVPDEQSEDLRRIQREMERLIKERCGHTARMHSLLNLHGIVVDRIGGKGWATQITRLRDWQSQPLKPHLRAELLRENERLILLREQILTLEQEKQRMLEQAIETYPVLNQVKQLMLLRGIGKASAWLFVMEFFGWRQFKNRKQVASLAGLTPTPFSSGDDSREQGISKAGNRRIRYMVIEIAWLWLRYQPQSELSQWFEKRFAKGGKRMRRIGIVAMARKLLIALWRYLEYGEIPKGAILQS

SEQ ID NO: 143411 - protein, 442 aa, unidentified
MSNAVYSSQSEFAAFVGIDWADRKHVWALQVSDSLLFEQGELDHTPEAVEQWAAALARRFPGRLVAIAVEQSRGALCFMLSKYEHLVLYPVHPNSLASYRKSFRPSGAKDDPDDASLLLDLLVRHRDRLRRLNPDTVETRTLQFLVEDRRKLVDERTRISNRLTDYLKLYFPQMLDWFDQVRSPLVVDMLERWPTLEELQRAKASSLRQFLTRHNCRSQSKIQERLERIRRAVPATRDAAVLTAGRSAVTTLVQLLRQLNGAIRAYDEQIQQRAQNHPDFAIFDSLPGAGPALVPRLMVALGTQRDRYQSAYQIQCYSGIAPVVESSGQQLWVHWRWCCPKFLRQSFHEWALHSIGFSDWARAFYDQQRSHGKSHHTAVRALAFKWIRVLFRCWQDRTPYDETKYSHALQQRCRKPASPQPVAVDLQLKKVAGFWKLSANPS

SEQ ID NO: 143412 - protein, 399 aa, unidentified
MAGPSLWAGIDAGKLDHHCVLIDASGERLLSRRVRNDEAPLTALIDDVIALADGGLVQWAIDLNGGGAALVISLLLARDQHLLYIPGRIVHHASAAYRGDGKTDAKDAAIIADQARMRRDLPEFRHRDEFTVELRTLCARRTDVAADRNRAINRLRAQLLEYFPALERAFDYSHRKGALILLTGYQTPEALRRIGRTRLEKWLRGRNAYNSVAIADRAIAAANAQHVVVTGQRLGSTIVARIAQQILDIDAELSDLDDMIEERFSQHQQAALIRSMPGFGPLLGAELVAATNGGLDSFHSADRLAAVAGLAPVPRDSGRISGNLKRPRRYDRRLLRVFYLAANNSIKTCPQSRAYYDRKRAEGKHHRQAILSLARRRVNVLWAMQRDNTAYQSTAKTAA

SEQ ID NO: 143413 - protein, 459 aa, unidentified
MSKKHSSHLRGERGQVFAELIRGVPAEQILCVSIDISKYFHVAMIHNGLGEIVMQPFEVDIYQSGFDQLCQTMEQAQAQTQAQVVLVGMEPTSHYFENLARHLSAHSQPVKLINSFSVKQNREQQLMRREKSDEIEVAAIGDLLRRGEGTPYQPVGGIYLRLQQFDRARLGKLKIATMLKNQIIGHLDRIFPGLLLLDEAARKRYTSLFRTDFWQCQTLQDLIRVCPNPNELVKMEPIELVHAFHAQGSRLGPAVAAKIIARAHATLLPDPELAGIRCELLKHDLTLLENTQAYLSQLEGCLVELVAQTPYQIWTKLKGLSAIQVASLAAAIGVPTHYTAAAQVFRRSGLVSGRNDSGKHQRRGKGNHILKTGDVYLRRALMNAVATLFLHQPSLMRYNKHLQITKHPGVARVATARKVIGILWAILRDQSSNTLIPLKVPRCKPSSSTRRRPSPTYSL

SEQ ID NO: 143414 - protein, 343 aa, unidentified
MKIYALGIDLGKTVFHLVGLDASGQVVVRKRCSRTQLLAFTANLQVQLIGMEACSGSHFLGRALRAQGHEVRLMPAQYVKPYVQTNKSDYIDAEAIAEAVQRPRMRFVPIKTEEQLDLQALHRVRERWVMRRTAVVNQIRSLLLERGLTLPKGRSHLDEQLPRILEDAELNLSGSFRVLLAQLKLELEQLAGRIEQMDTVIQKTAKENEACQRLTQIPGVGPVTATALIGAIGNASAFGKGRALSAWMGIVPGEHSSGGKQKLLGISKRGNKYLRRLFVQGARSVLQQRHKQAPGLRDWLAQLLARTHQNVVVVALANKLVRMAWAVLCKNERYRAPVLAVTT

SEQ ID NO: 143415 - protein, 363 aa, unidentified
MGDARAVAVGLDVHKSSVRLAAVRAGEVVRELSLPFDHERVERELRAWPGARVVYEAGPTGFGLYRHLVGAGVDCEIVAPGLVPSRPGDRIKTDRRDARKLAALHASGLLTAIFVPSPELEALRDLVRAREDARLDRMRARHRLGKFVLRHDRRMPTTCWGVTRRGWLGRQVFELPGQQQAFDDYLFAVDQIDRRIDALESELDRLAHAGPHAELIARLRCIRGIDTVTALGLVCEVGDFSRFRTAEQFMSFVGLVPSERSSGQGRRQGSITKAGSTHARRLLVESAWHARRRPTVGYELARRHRGQDPGVLERCWRCQQRLHHRWRRMSGRGKPHQKIVVACARELAGFVWAIATDQPMRTT

SEQ ID NO: 143416 - protein, 338 aa, unidentified
MKITTIGLDIAKSVFHLYAVNKMGRYVKKKQLKRQQLLQYLARFEPCVIAMEACGGANYWAREMKDLGHEVKLIAPQYVKPYVKGNKNDYNDAEAIAEAAQRPTMRFVPIKSVEQQDIQNLHRQRERIKKARTALVNQVRGLLAEYGIVINKGVAAVRKGLPGILEDAENGLTTLSRELFADLLEELRVLDERFKQSEKQIEVSNRGNEVCQRLDEILGVGSITASAAYAAAGDGKDFVNGRHFSAWIGLVPGQHSTGGKTTLLGISKRGNAYLRTLFIHGARAVLRHSANKTDRFSLWAQALLERRGHNKACVAVANKMARMAWVIMAKGEPYRVAT

SEQ ID NO: 143417 - protein, 350 aa, unidentified
MAHPVAKATGRCKVALYVGVDLHRDYSMVTVLGARGKPLRQLRLRNDTLGDFLASLREKPAVVLEACRNWGYAVELMEPHARQVLLAHPKKTKAIASAKIKTDKIDSETLARLLRSELVPTSYIPPQEIRDLRDLLRHRAGLVRLRTRIKNRVHVVLSRYGLVSPFSDLFGVAGRRWLRALSGLRPTHREMVDRYLRVIETLEAEIGPLSEEIEALVEDDAQAQLLCTIPGIGRYSALLIMAEIGEPDRFPDPKHLASYAGLVPSVHASGGRVRLGGITHEGSAWLRWILIQAAPKAVKGSPRLASLYQRVTRRRGAQKAKVAVAHEILCIIWHMLHSGQPYQERSRKHH

SEQ ID NO: 143418 - protein, 402 aa, unidentified
MNCVGIDVSKGKSMIAVMRPFGEVVVSPFEVRHTANELSELAGLLKSLDGETRVVMESTGNYHAPVAWLLHDAGLYVSVVNAMLVHDYGNNSLRRGKTDKKDAVKLANYGLDHWLTLPRYVPEEDTRLMLKTCYRQYQQYSKVQTMLKNNLISLLDTAFPDANRLFTSPPRADGSEKWVDFVATFWHCECVCGLSKKAFTAKYQKWCRKHGYNFSQDKALDIYASACGRFGVMPKTNTAKLLVEQAISQLQTTSAALAALKQEMQSLAASLPEYPVVMGMFGVGPTLGPQLIAEIGDVRRFHSKKALVAFAGIDAPPYQSGQIDVRSRSISKRGSASLRRTLFLVMGVLLQCAPIDEPVYQFMNKKRSEGKPYRVYMMASANKFLRIYYASVKAYLDSLEHD

SEQ ID NO: 143419 - protein, 471 aa, unidentified
MPKRGIRKHDAQVRGRTAPKRGKAKTARAVTLPVILPDTAGIDIGAMEIFVAVSPHRDTEPVRSFGTFTRDLEKIAEWLKGCGVRSVAMESTGVYWIPLYQILVDQQIEVCLVNAREFHNVPGRKTDVEDCRWLQYLHSVGLLRGSFRPEPVICAVRTLLRHRQNLVELAAEHVMHIQKAMEQMNLKLTQVISDIMGVTGTRILEAIIKGERDPRALAQMCDKRIHSSEDTVMKSLEGDYRREHMITLEQSMAGYRFYQQQMAELDQKMEEFLEAVPAKIDLQSHPLPESAKRQKRQHNAPAYDLRSHCYRAFGVDLTQIPGFGAPTAQVLLAEVGPDLTKFPSASQFANWLTLCPNNQITGGKIQSAKTRKGKSRAALALRQAAQTLEHSESYLGQFFRRMRKIGRAEAITAVAHKLARIFYTLVRTGREYDESVLAKAGVRQSVRQEAKLRRQALQIGFQLVPLQGATP

SEQ ID NO: 143420 - protein, 408 aa, unidentified
MQVLYPRCAGLDVHKDMVMARVRCVSEPPHDEVRSFATTTLALLEMADWLMEHAVTHVAMEATGVYWKPIWHLLEEHFELVLANAQHIKNVPGRKTDVNDAAWIADLLAHGLIRSSFVPPTPIQELRDLTRTRKQLVREISQHSLRIQKTLEDANLKLGSVLSNILGSSGRAILAALVQGETDPEKLADLAQGAARKKRAELVEALRGRIRTHHRELLRIHLNLIDALNQALVEVDARVGKTLTPIQESARLLTSLPGVSELTAQVMVAEIGVDMTRFPSSAHLISWAGLCPRSDESAGKRRSTRVRKSGTWLKTALVTAAWAAVRVKDSYLQAQFLRLKARRGAKKAILAVAASMLTAAYHMLKDGVEYRDLGADHFSRRDRSKAIQRLVRRLNDLGCDVQLTAQAA

SEQ ID NO: 143421 - protein, 353 aa, unidentified
MTDGLVVGVDTHKDVHVAAVLDRLGRRLAVRQFPATDAGNAQLAQWLAGLGQVADAGVEGTGSYGYRLARLLADRGMQVWEVNCPNRSRRRRKGKSDPVDAENAARAVLAGEAAAVPKDRRGFVGELRLLAITRRSAVKARTQASNQIKAFLLDADDELRARLHGLRKARFGRACAALAPADALRRALAALGRRWLALDAEIRELEAQITALISTHAPGLLARHGVGAVTAAQLLVTAGGNADRLHGDAALAALCGASPVEASSGKTSRHRLNRGGDRAANNALWVIAHVRTISDPRTRAFVAKRTATGNSRREIMRMLQRYIARELYPLIIDALRTAAADGCSPALTLSPGM

SEQ ID NO: 143422 - protein, 400 aa, unidentified
MRVVFGIDVSKASSEVAILVNGEKVHGYTISNDAIGFARLLGDLRTVHKPEIIFEATGVYSRRLQTFLDDNGYAYTRLNPLETKKQLDSLRVRKTDQIDAEKLAQSQFVLNRKPTYVQEEVYQNLRDLSRFYQNLTEDIVRAKNRLHRVLQVTFPELENILSTPSGEQYWNLVIAFPCKDCVLELSNDELSKSIRLSTSKRISDKRVAYLAEKLIALANQSYCAVKKTSPILEEVRYYTKELLRLSEQRQAVLDEMVELAQPLPEYDILLSIPGIAETTATSIIGELGDIRRFQSANQINAFIGIDLRHYESGNFLAKEHITKRGNPYARKILFKCIHNIASASHTNPCHIADFYEKRKRQSQTTSTKPHTIASIHRLIRTMYYLIMHNKLYDYASTQNR

SEQ ID NO: 143423 - protein, 483 aa, unidentified
MKPKQLGSNKKAGSRPTPDHWHQMNHKQRREMLRKIQSEDLTLEVVHPDAAGIDVGNESHYVAVPSTRDSQPVRRFGCTTAELKAMADWLKQCKIRTIAMQSTGVYWVSVYDVLEEAGLEVYLVNANETRNLPGRKSDVQESQWLMKLHTYGLLRNSFRPSREIRTMRTYWRQRNDLVRAAGRHIQRMQKALTQMNIQIANVLSDVSGMTGQAIVKAILAGERDPYQLAALRNWRVKASKEEIAHSLEGNWQEDLLFVLKQEQDGYEFCLKQMAECDQQLQQYLQQQEDRSQGVSLPEEKRKERLRKKKKGNTPQFDLRSELFRMTGTDLTQIDGIDVTTTMTILSEAGWDMSKWKTEHHFVSWLRLCPDNRISGGKIIGKGRLPTNNRVTNALKMAASTLRLSNTYLGAQFRRLRTKLGAPVAIKAMAAKLARLVYRMLRYGMRFIDQGAEFYESQHRQLQINYLKRKAANLGFQIIEAPAA

SEQ ID NO: 143424 - protein, 325 aa, unidentified
MSSHEIVGIDVAAKTLAVAGTLAALRPEYGNDAAGRRDLVKALRRSRRPVRAVVEATGIYFLDLACELAAAGIEVMVVNPRASHHFAEAVLQRRKDDRVDAAMLREYGQRMAFVPWTPPAANRFALRAIAREVRAQTKATTAAKNRLHAMAATSLVPAALMQALEQQIAAMEALIADLVGAAVKLIEADPELRQKFERTDTIPGFAAKGAVTVLAELAVLPPMSAAQWVAQAGLDVREVSSGTSVQRPAKISKRGNKRLREALFYPALTAARCCPEAGAFVARLVARGKTPLQAQVALMRKLLHAIHALWKNDEDFDAQKLFAAA

SEQ ID NO: 143425 - protein, 385 aa, unidentified
MHAPNVSTPIAGHIGTIFVSVELSQKVWLVTLHSPDKDRMSRHKVEAGDSAGLLSLLDRVRERAGRKLGTVPGVKSCYEAGYDGFWLHRLLQAKGIENYVFDPASIAVEQRSRRAKSDRIDGEQLVRTLMAYLRGEPRVVRIVRVPSPDQEDARRKTRERDRLVGEQTGHSNRIKSLLRLHGFAVGNPRRRDWLKWLAGQRDWQGQPVPPQILAEIEREHARLMVVAEQLAALEKTAAPAQTPAVVEMGRRQEMLFRLKSLGPAFTSSLTGEVFYKDFTNGRQVGSYFGLAPSPWKSGGIDREQGISKAGNPRARQKAIELAWLWVRHQPDSALTLWFRERTAKVNKRIKRITIVALARKLMVALWRFLTTGLVPTGAKLKPVTA

SEQ ID NO: 143426 - protein, 410 aa, unidentified
MGYETINRRVHVMTRKNTLKSLPTDTEFRVVGLDLAKSDVSVAAIPVDNNTPSLVDQMTYADLLDWAGKISPTLFAMEPCNGYSLLCLQLENLGHEIKVISGSTVSMWINTHLSGQKTDLNDAIALARLAVSDAELTPIRHKSITEIRIQTVQAVRQQLMSQRSKSIVSFKALAQQWGIPCAAGHRNLKKLRESIEAKVDLITRPVANAMLFLLDAVKSLDRQIGQLNQTLQELVMSDERGRLLQSVLGVGTQISARVITVVGNVERFNSPRSLVAYVGVAPRNFITGHKNLTKKKHGNCPDLSHKGQGKISRRGDKLLRSLFIQGAACLYMQFCKDQLPECQLKRWILKQLAMQKPYGKLMVSLAAKLIRIVWAVLTYREKFNIQKAGMTRSMWSEMALETPLNKEVPA

SEQ ID NO: 143427 - protein, 358 aa, unidentified
MNHIKSNKLDFTGQPIYIGLDVHKKSWSVSIFSRYGEYKTFSQPPEVGKLISYLGRHFPGAQYYSVYEAGYCGFWIHDQLRERGIQCIVVNPADVPTKNKEQRSKRDRIDCRKLARSLRNGEIEGIYVPSRSKLEDRSLIRTRQSMVRKQTRCKNQIKGMLFFYGLRLSEEATWGHWSRRFIQWIERIRMERASGDIALKAHLEELNHLRQLIASLNRAILRLARTEAYRPLVHLLKTIPGISTLTAMILLTELGEITRFPSMDELSCYVGLIPDIQASGEKEYVGGVTQRRHSQLRWLLVEASWIAVRKDPALLMAFQGYCKRMRKTKAIVKIARKLLNRIRYVLKNQAEYVPCVIQ

SEQ ID NO: 143428 - protein, 309 aa, unidentified
MGTFVGIDVSKDRLDVHVLPQDEAFTVERNGKGLAELVERLKPFAPSLVAVEATGGFEMTTAAAVAGAGLPLAVVNPAQIRHYAQALGKRAKTDPIDAKVIARFAADVKPEARPLPDEQTQLLAELVSRRRQIVEMIQAERQREKRITVKRLKKSIARVVTALEKELVEIDSEIDDMIRGSPVWREKEDLLASVPGVGNQTARTLLAELPELGTLDRKRIASLVGLAPYTRQSGQWKGKSMIGGGRSSVRSALFVAAMVAGRHNPTLKAFRDRLVTAGKPKIVAVIAVARKLLTILNAILRDQRPWQPT

SEQ ID NO: 143429 - protein, 473 aa, unidentified
MRRLLGIDLAITAENRACITDETGQVIAERGFGRTRSELESLHEVATDGMNEGDELVVVMEPTANAWVAPAALFSSKGAVVHLVPPEQSADLRRYYAKHVKNDRIDAKLLARLPLLHPEGLHRARLPEGARGTLRRVVARRARLSAECARHRCRIRSLVQLSMPAMPAALGEELGKGALAVLGRYGDPRSLIRLGRARLTQVLIKATRGAWRAERAEQVLGAARDAVELWRGLQGCDFAEVAEDLASEVRLIRALESELRELDVRAAGLLDEIDPAGLHRSMPGFGERTATTVAGRLGDVSRFSGASKVRSFAGVIPGTNQSGEAESRPHLTKAGDRVLRHALFMAAETARRIDPQLAAIYHRQVIERGSHHTKAVCAVATALATRLVAVLRDGRPYEIRDTDGTPVDARDAKTIIAERFSVPPDIRAARRQPRSAQRMKGRLVHGIRSKASPPSPPVDEASATDATRVLIGG

SEQ ID NO: 143430 - protein, 368 aa, unidentified
MGEPITYVGIDAHARELHVALLRSDLPQPIVWSSPNESRAIERLCRRLEREAPGLIECCYEAGPTGYVLQRRLTTARIHCRVIAPSLIPEKPGDRIKTDRRDARKLAQLLRADLLTEIDPPSEDAEAVRDLVRARDDARVDLMRSRHRLSKLLLRRGHVYPREPWTAAHRRWMQQIEWSHAAERHVIRDYELAIAYLEARLSELERAMEDIGSTAPYQKAVAALRCFRGIDTVTAVTLLAELYDIRRFAHPRALMSFVGLVPSETSTGERQKRGGLTRTGNSLVRRMLIQTAWQYHHTPRLGRALRLRRAQQPAAVLAIASQAEQRLCRRYQRLCARQKPKPLVIAAVARELVGFIWAVLHLPDAQRA

SEQ ID NO: 143431 - protein, 413 aa, unidentified
MQRLFRVCAGIDVHKRSIYVCLLRAPAEVALAGEVRTFGTTTHELLGLLDWLTQEQCESVAMESTGVYWKPVFNVLEGALQVVLANAQHVKGLPGRKTDVQDCEWLAELHLHGLVKPSFIPTPDIRELRELVRTRTTLTRDRARHVNRIAKVLEDANLKLGSVASDILGVSGRAMLDAIVAGQTDAAELAALAVGRLRSKKTELQQALQGFIKPHHRLLIQTHLKLIDAFDASLAALTVQIEECMRPFAETRERLDEVTGVGPEVATVFISELGADMTRWPTPAHAASWAGLCPGHHESAGKHTSGRTRHGNRWIKQAFAQAGWAASRAAGTYMQAHFRRLCSRRGAKKAVMAVAHSQFIRCVLLSASPGECYQDLGGDYFDRRNEQHVTQRLVNRLQALGYRVTLQPLEPPA

SEQ ID NO: 143432 - protein, 359 aa, unidentified
MVKYRKKTKMRKLDSITCDDKAYVGLDVHKRSIHGAVRINGKQISTFVMPAKKDAVIKTLEPLAAGLEKIVYEAGPTGYSLARSLQEIGWPIEVIAPGKIPKEANQGSKSDRLDCKKLAEFAEKNLLKAVAIPTEQEEADRQLTRLRDHLKKKDKRTKQQIKSFLLQHGLKEPNGLSNWSQCGIDELAELELNSELRFVLDIFLEELKDLKNHLKITHNRIKQITKAERFEKKIALLKTHPGVGPQTSIKFLTEVYQPGRFTEYTQVARYTGLAPRVRQSGEKRREGPLIKAGQAPLRCMLIQAAWAWVRYDPHAAMVYRRLLKNTGKTQKAITGIARRLAVDLWCMLMRNEVFRTAAV

SEQ ID NO: 143433 - protein, 333 aa, unidentified
MDLMHPRCAGLDVSKRDAKVCVRVAGSGRAAATSTVTTWSSVTGQILALREHLIGEQVTLVVLEATGDYWKPFYYLLEDGPFEVLLVNARHVKNLPGRKTDVSDAAWLAQLGAHGLVRGSFVPPEPIRRLRDLTRTRTTVVRERGREYQRLEKLLEDAGIKLTSVATDISGVSGRAMLEALIGGQRDPAALADLAKARLRVKIPALTEALTGRFTEHHAFLARLHLNLIDSHTAMINELTTRIEVVIEPFRRVRDLIDTIPGISTTIADVIIAETGADMTRFPTPGHLASWAGTCPGSNESAGRVKSTKTRPGNPYLKGALGIAAMSAAKSKE

SEQ ID NO: 143434 - protein, 358 aa, unidentified
MNNLNGNKLDFTGQPIYIGLDVHKKSWEVSIYTRHGEYKSFSQPPQAPALAHYLRHHFPGALYHAVYEAGCCGFWIQNQLVQEAIDCIVVNPADVPTRNKERRRRRDQVDCRKLARGLRNNELEGIYVPPRATLEDRSLIRTRLSMGRKQTRCKNQIKSMLLFYGVVIPEDKEMGHWSRRFIRWIEGIRLERASGDMALQIHLEELSHLRQILAKLNRAILALSRTEQYRRWVSLLRTVPGISTLTAMIVLLELGEIMRFPSLDHLCTYVGLVPDTQSSGEKEHVEGITQRRHSHLRWLLIEASWIAVRKDPAMMMAFNEYCKRMRKSKAIIKIARKLLNRVRYVLKNQVEYVTCVIE

SEQ ID NO: 143435 - protein, 384 aa, unidentified
MKKNSIVAVELKKPRHRKGAKGRASQRSRSTPAPQQTIGVDLGDKSSCYCVLDAAGEVQSERTVATTKKGMTQTFGRIGPSRIALEVGTHSPWVSRLRRDLGQEVMVAHARRVRAITASSRKDDRMDAPLLARLARVDPGLWCPIRHRGERAQQHLARIKARAALVEGRTALVNTARGLTKSSGERLASGDTDRMGVHQLEGLPAEMQAVLRPVLEVVEAMTEQIQGYDSQLAEIARSEYPETALLEQISGVGPLIALTFVLTLEDPQRFQRSREVGCYLGLRPTRRDSGESQPQLRITKEGDVYLRMLLVQGAHCILGRRGPDTDLKRWGLKLAERGGQNAKKRAIVAVARKLAVLLHCLWVSGEVYEPLRHSQARAAQKIAS

SEQ ID NO: 143436 - protein, 346 aa, unidentified
MQYYTERHRHTCGVDLHGRNLYLCVLDPDREIVLHRRVDCDEKKLLRALEPYREDLVVGVECMFKWYWLADICDELGIPFVLGHALEMKAVHGRKSGNDRLDAERIARLLGSGMFPVAYVYPKKMRSTRDVMRRRSYMVNQRSSLITHIQVTNQQYNLPELGKISKPNNREGIIEQFQDPAVRASIEADLAVIDIFDVVIRRLERTIIKAARGHDGHAFALLKSVHGIGDIIGLTLLYEIHDIGRFDSLGGFLSYCRLIKCDKTSNGKKKGSGKRKQGNHHLKWAFSEAAALFLRANPDGKKLHSRLLKKHCKGKALGILAAKLARSVYFMLHRNTPFDMERFIRA

SEQ ID NO: 143437 - protein, 407 aa, unidentified
MDVLHPKCAGLDVHQQTVVACARTGAGKAVTYDVRTFGTTTAELLALSDWLTAHGCTHVAMESSGVYWKPVWHVLEGHFELVLANARHIRNIPGRKSDVNDATWIADLLAHGLIRGSFVPPEPIQELRDLTRTRQQLVREIAQHTLRIQKTLENANINLTAVLADVLGSSGRAILRALARGERDPERLAELASDRVKASRAELVAALHGRVPPHHRFMLTLHLTQIEALEAAVREVEARLGDALAPFRAALDRLITMPGVSETVARVIVAEIGFDMTRFPSAGHLVSWAGLCPRLHESAGKRLSNRTRSSNPWLKTTLVQAAWAAARKKDSYCRAQFLRIKSRRGPKKAVLAVAASMLTAAYYMLKHGVDYRDLGADHFDRRDKAKLAKRLIARLHDLGLTVEVRAA

SEQ ID NO: 143438 - protein, 359 aa, unidentified
MQTQSNKIDFNGQKIYAGFDVHLKSWTVTIMTEELTHKTFTQPPNPEVLYNYLLRTFPGGTYYSAYEAGFSGYWIHNKLSRLGVNSMVVNPGDIPTTGKEKVMKDDPRDSIKIARSLRNGDLKPIHVPSLKTLEDRGLVRTRATLVKDLTRYKNRIKSFLYFRGIELPEAFGKPQTYWSNRFNKWLEDIEMAESSGKDSLNALLAQSKHLRASVLHVTRQIRELAKTECYKNQQELLRTIPGIGLLTAMIILTEIETIDRFANIDQLCGFIGLVPSTNTSGDHEVIGNITPRGHSVLRNAIIESAWVAARLDPALNKSYHDYCKRMEPNKAIIRIATKLTRRIKFVLKNNQPYVCSLVK

SEQ ID NO: 143439 - protein, 355 aa, unidentified
MDNRKYIGMDVHKEAIAIAVLNAAGKLVMESIIETKANTILEFLKGLRGELHLTFEEGTWASWLYDLVQPHVKRVVVCNPRRNALLKEGSKSDRVDARKLAELLYTKMLRPVYHRDNGMRAVKELARSYVIISKDQARVMTRVKALYRSWGIACSGKQIYTVRHRASWLGKIKEPSVRRRAEFYYQPLDGLRSVRRQVRRELLLESGKHKASKLLRQIPSIGPIRAALLLALVQTPHRFRTKRQLWTYSGFGIETHDSAEYRYVAGQLERSKKPQQVRGLNRNYNHDLKNLFKSAATNAVAKSGPLQEFYLALVKRGIRPEMARLTVARKIAAITLAIWKKGVSFDAEHLKQQTA

SEQ ID NO: 143440 - protein, 442 aa, unidentified
MSAFPRLGLHRLGFSVRAFACDRTAKPINPRAARHNGWASRSRDTWVMLLSVQHHANVERFSEHLPQREGWPMATTVRYVGLDVHKASITIAVAESDRAPAQLYTTVPNDWPQLRKALTRLSPTLSALRCCYEAGSIGYHLYRRMNKAGIDCMVVAPSLVPTQSGNRIKTDRRDAKKLAHFLRSGDLVSVYVPDDECEALRDLERAREDAVRAQRVARQHLQNFLLRQGRPYHSTQWTWDHLDWIRKQKFDNPMRRQVLCDYIKVTEDAGARLKQVTADLEQHAQQTRLWPLIKALQAFRGIRLVTAASVVAEIADFRRFESARKFMAYLGLVPSEHSSGDSNRRGRITRCGNRWVRTLLVESAWHYRFAPKMSRQLRARNQGVAPGVQRIAWKAQHRLHRRFYRLTARGKRPQQAIVAVARELAGFLWAVGQEKEFLIDAT

SEQ ID NO: 143441 - protein, 317 aa, unidentified
MTKISTAVAGIDTAKDKLDVAVHGRTERWQVENALRGWRRLRAALTKAGVGRVGIEASGGYERGVVKHLRAKGFTVLVLQPIQVRAYARLHLRRAKNDALDAVLVAACAHAIEGPRIEPDARLDELADHLTFVEQIEEDIARLKTRLEHIHDRRMRKIVVTDIARLKARRTAELLRIVNRLRAHGDLGRRLDLVLSVPGIGERTAFALVVRMPELGRISREEAAALAGLAPFDDDSGKYKGQRHIAGGRGRLRRSLYAAALPAAFRWNTALINLYARLIARGRAHNAALVACARKLLIYANTVVARGTPWVNKPAAI

SEQ ID NO: 143442 - protein, 310 aa, unidentified
MEPKVFVGVDVSKDSLDVAIGSQKNIITFANDQKGADVLVKKLSRIGPELTVFESTGGYELLATSSLAEAGLPVVIVNPRQVRNFAKATGILAKTDAIDARVIAHFAEAVKPNVRPLKDRETSELTALVTRRRQIIEMIVAEGNRFKLASKRNKKDIKDHIRWLKKRMDKIESDIGKMIQRSPIWRCKDDILQSVPGIGPITSASLICDLPELGVLSPKKIAMLAGLAPLNCDSGKFKGRRRIWGGRASVRSGLYMATLAATRCNPAIKGFYQRLTAAGKCHKVAITACMRKLLIIVNAMLRDQTLWQQN

SEQ ID NO: 143443 - protein, 346 aa, unidentified
MSHKTAATVAHTIGIDTGKNTLHLIGLDDQGAIVLREKIARGRIAARFANVPRCLIGIEAGMATHYVARELIALGHDVKQVPPAYAKPFRQGHKNDFRDAHAIAEAVQRPSTRCVPVKTDDQLDLQALHRVRSRLVGQRTAVINQIRGFLLEHGIAVRQGLRFLRQQLPDIMAKRSDVLSPRMVRIIEDLSSDWRRLDERIEHVTKEIEVLAHGSESCRQLMTVPGIGPLIASAMVAAIGNGAAFAKGRDFAAWLGLVPKQMSTGDRTILGRISKRGNRYLRTLLMQGARVILLRPANWAKHSFGPWLTAAANRLHHNVLATALANKLARIAWTVLVQARSYEARV

SEQ ID NO: 143444 - protein, 367 aa, unidentified
MKQVTTFVGIDAHKKDLFIAMLIGDQSTPVTWQLANEPNAVRRLVRKLEREAPGPVRACYEAGPCGYALQRQMTTTRVRCQVIAPALVPRKPGERVKTNRRDARKLVELLRAGLLTEVRPPTPEEEAVRDLCRARDDARTDLQRCRHRLGKLLLRRGLHYCGRNWTRAHRQWMASLTWTHAAERVVVEDYLLAIDQVEARLRELDAHLTETAQTDPYREPVGWLRCFRGIDTLTAIVILAELHDFRRFQSPRALMAYLGLVPGEDSSGEKHRRGRITRTGNTLVRRLLVETAWHYQHRPTVGIALTRRRQGQPGRVIAIADKAQQRLCRRFRKLAAEHKPAPKIAVAIARELAGFLWAALQPPVVAN

SEQ ID NO: 143445 - protein, 351 aa, unidentified
MQMKQVLKQVSGIDVAQKELVVTLGRMYSDLTIELYAYKVFKNTKTGIISLLKWVKTLSDKEVRVHFVMEATGVYHQNFAYYLDEKGYDLSVVLPNKISNYMRTLDVKTITDKTASQAITQFGLERKLDFWKRPKKVYKELQQLTRERDQIVDERSIIKNQLHAENAEAEPNKRSLKRMKARIKFLNSQEKEIKIDIEDVVNNEPMLKQEIDNICTIPGVGSLTATIVLAETSGFELIRNKRQLTSYAGLDVREKLSGTSVKGKPKISKKGNRNLRKAMHLPSLSSVKYNKNHKELYVRLVSKSGIKMKGLVAVQRKLLELIYVIYKNRTTFQENYEQEKRANNFQLVDAL

SEQ ID NO: 143446 - protein, 378 aa, unidentified
MKTYFIKPTMTAHTLPTPAAPRKTAMPPHQPLPRAVIDPARPLLKLGLDVHLDFLMAVVQKDHANPHAPRKFTNDELLVQVDQWIAEGYQIFCVQESCGFGFTLHRRLVEAGAQSFLITPVALNGARKTDKLDARALCLRLSRWLDGNRDELTPIRIPTQAEQRRREATRRRQFLAREIRALANRGHGQVAEYCHVKLMHRWWGARNWKKLQAMDPWVLALLTDLRAIIDALEKQLRALEAAVKARVREQPRPKALGELTLVTLDGEVCDWHRFSNRKQIGSYTGCCPGEHSSGGKRRVGAIDRMGNGRMRALLVEAVWRFLRWQPQWKAAQRMKLKLADGTSMRKKAVIALARQLAIDLWRWRTGRATMEELGWVAA

SEQ ID NO: 143447 - protein, 419 aa, unidentified
MEPNRFRHYIGIDWATEAHRICLLDHNGQLGAKVSIPHSGAGLDQLLEWLASHGVEPAFAAVAIETPRGALVETLVERHYAVFAINPKQLAHFRDRYTSAGAKDDDRDAWVAASALRTDEKAFQRVTIDAPEVIQLRELYRTADELREEIQRLTSRLREQLNRYYPQMLALYPSADQPVLWDLLELAPLPATAHQLTRPQVETVLRKRRIRRFTAGQVLEQLRATPLTLANGAAAAASEHALILVAQLRVIYELRKQTLKRLAGIVKKMRQTTTGSGAPSDAAIIASLPGAGILTTAALLSESSRAVAQRDAPALRAYAGVAPVTQQSGKSLKVSMRYACNNRLRNALYHFAMGSLRDPVARRHYDRLRAEGHSHARALRGVADRWITVLMAMLRSGTRYDATRRKAWSAADAAAGATA

SEQ ID NO: 143448 - protein, 320 aa, unidentified
MSFLITIGVDIAKLKFDVACLAAGKYKHKTFTNDTPGHVAFATWLVALCGDVKPLICMEATGSYSLPLADFLAHQGHAVSVVNPAKIHAFAKSELSRAKTDKADAKLIARYALTMNPPLWTPPPANIRELHALVRRVEHLLEMIRMERNRQDTANAKVADSINTVLAILEAELQATRKAIHDHINNDPGLKQRGDLLATIPGIGDASVAHLLIALSQHHAFINAKQVVAFAGLAPALRQSGQWSGNTHIAKNGDALLRKALYMPALCALRFNPPIRVFCQRLKANGKNGKAIACAAMRKLIHIAFGVLKSGKPFDPNYAV

SEQ ID NO: 143449 - protein, 400 aa, unidentified
MRKPKQRQTKPRQSKQRKPNDLSRSLAALDLDRTLIAVIEMGASSWLVAGLVPGVERQPLKKLKTDEYALLALLERWRGEAVRSGYAITRIVVAYEAGRDGFWLARWLRAQGIEAHVIHAASVAVSREHRRAKTDRLDTELLKRAFLGWLRGERDHCKMVAIPTVAEEDARRPGRERESLVGDATRIINRIKSALARLGIRTFNPTLKKAPVLLNDLRTPEGDPIPPNTLDEIKRDMERRHLICEQIRRIEQERVKRLEQAPDTGPNAMVHLLARVTGIGIETADTLVREVLTRNLRDRRAVARYGGLTGAPNQSGSFNREKGLARSGNPRVRRCMIGLAWRFVRLQKDSPLVKWFELRTANARGSRKTMIVALARKLLIALWGLVHEGVVPEGIVMRPA

SEQ ID NO: 143450 - protein, 408 aa, unidentified
MKTLHQRCAGLDVHKQEVVACLRLVTQGRVHREVRRFPTTTRGLLELAAWLEAARCTIVAMEATGVYWKPVWHILDGSFELVLANAAHIKGVPGRKSDVNDATWIADLLAHGLIRASFVPPQPIQELRDLTRTRKQLSREIVRHTQRLQAVLEEANVKLASVITDILGASGRRILKAMITGETDPSHLAELGSRRLGCSRDTLVEALDGRVRDHHRFLLDQHLKTIEQLEETMAAFDARIEAALAPFRDTVERLTQVPGLSTRAAEVVIAEIGLDMSRFPTAGHLLSWAGLVPALDESAGKRRSTRVTKGAPWLKPVLVQCAWAAANTKNSYFEAQFLRLKGRRGPKKAAVAVAASILTTVYHLLRDGTCYQDLGPNYFARRNPARTARKLADRIRSLGYIVEIRSAA

SEQ ID NO: 143451 - protein, 346 aa, unidentified
MLYAGLDLARKRICFDARRPDGEIVDRGASPTDSEGLDRLAQRLLAHDPQVLAVVESMNGARFVHDQLELHDIDVQICDAERAKGLAPLACKTDKIDAGVLAELARRDLVPEIWLPDPGTRADRERARFRLHLVRKRTALKNRVHSTLIAWGKPCPVSDLFGRRGRGLLGRLSIPEPWRSTLQASLQLIDSIDGEITAQERELRLIGAEHPYVPQLTTVPGIAWVLGFTIACEIGDITRFPSPKKLTGYTGLCPKVNQSGEHDWRGPMKKNGPRYLRWALIEAAQHAGRSPHYRELYERTRKRHGPQRGAKVAAIVVARKLSGAIWHMLTNDEPFAPGSAAGTLAA

SEQ ID NO: 143452 - protein, 338 aa, unidentified
MMQFKFFVGIDVSKDTLDFSVVTEGKEILDFKIENSLRAIKAALLNLKKIKGYELSQVVFCLEYTGLYNNHITHCLHSIDAHIWVEKAIQIKRSSGLQRGKSDKVDAQRIAFYAFRNQDKARLWVAPRAVIQQLKRLTGVRQRLLIMVAQLNKPIQESKRFDSKEVFDVIKKSCQSSLKAIKVDLKKVERKITEVIKADASLSHLFELITSVDGIGSVIACEMILTTNEFKNINDPKKYACYAGVVPFEHTSGSSVRGRNRVSHFANKNTKRLLHMASLSIIRYQGELKTYWQRKLQEGKHKMIILNAIRNKLIQRVFAVVKRGTKYEKIYSHVLQGS

SEQ ID NO: 143453 - protein, 375 aa, unidentified
MATIARLGIDTSKSLFQLHGVNEREEAVLRKQVRRGQFLAFIAKLAPTEIGLEACGASHHWARQLQALGHVVVLLPPQHVKPYVGLNKNDKIDAAAICEAMSRPKIRERFVAVKSAEQSAAQMLLGTRDGLLHRRTQLSNTIRGHAAEFGLVTPKGLAHIQPLLERIAADQTVPALAKELFATLGQEFTELRPRIAQLDKKLKAFQRSNELCRRLVEVPTIGPVIASSMVVKISNPAAFRSARRCAAWLGLTPKDHSTAGKMRHGGITRAGDEGLRAALVSGATAYIQQVKRGRTKPSSWLTQLLKRKPEKLAAVALANKTARIAWKLMTSGQRYDRARAEAREGLGAAQHGGSAPSPSLHPHSADHGASAMTAA

SEQ ID NO: 143454 - protein, 316 aa, unidentified
MNETVVEKFVGIDVSKATLDVCIEPLGQTLHVAYDEAGIKQFVGRMEEIIPTLIVVEATGGLEVRIATELVSKGLPVAVINPRQARDFAKATGQLAKTDQVDAAVLAAFARAIRPQARPLKDADTCALDDMVSRRRQLIDMRVQETLRLGTAASKPLQKSLNSHIAWLDKRITEVDNDLTKRLRGSDIWRTKDDLLRGIPGVGAVTTRTMLAKCPELGTLNRREIAALAGVAPLANDSGKHRGKRFVWGGRAEVRAVLYMATVSAIRCNETIKTFAERLKSAGKQPKVVIVACMRKLLTIMNSMLKNNSPWNSKIA

SEQ ID NO: 143455 - protein, 344 aa, unidentified
MMIIGCDFHPSWQQVAWLDTATGETGERKLVHADGDAERFYRQLPAPVLIGMEATGNSHWLVDLLSELGHELWVGDAAQIRASYVRQQKTDQRDAAHILKLLVEGRFPRIWMASSEVRDLRQLLVHRYKLVLIRARVKNELQHLCLNKGVQRKRKLWTKAGQQVLRELPLKAWAGRRRDDLLGLMAMLDQQIQPLDEAVKAEAQRDKMALLLQTQPGVGPITALAYVLTMGDVTRFPRGKQVASYLGLIPREHSSGGRQHLGAISKQGNRMLRMLLVEAAQTAVRLDPEFRKEYWHRCHQKPKAVAKVAAARKLAVRLYWMLRTNVAYPEVVRNREQPEGAPGR

SEQ ID NO: 143456 - protein, 388 aa, unidentified
MSGQWPWAGKMRRLFSLCRIGVGNDALPERTQGCTTTRRTAMKKVSVIGMDMGDQNHKAVGLDENGDIVDRTEVPCTPERVCAYLKGHPGALLVIETGTHCRWVSRIGGELGHEVLVGNARKLRMIWSNSRKNDWNDAEMLARVARTDRSLLAPVRLRSDGNQKLMRLIKSRDLLVKSRTGIVNQIRGFCKAEGARLPKCSAEVFVRMEREVCAPAREATKPLFAVLKELNKKIKLYDNMIETSVKAQRGDEVELLNTVAGVGPVTAAAFLAAVGDPATFGSARDAGAFFGLVPRQDQSGQTDKQMRISKEGNAMVRRLLVTAANYIMGPFAKDSDLRRHGMKLAERGGKSARKRAKVAVARKLAVVMLAMLKNRTDYRPLSEETTVA

SEQ ID NO: 143457 - protein, 323 aa, unidentified
MSIFVGVDVAKRSFDIATMLPNGKKRTKAKLPNDPGGFAQFSDWLERHAVPGAWIVMEATGTYHEALAEHCHTQGYRVCILNPAVIAKFADVELRRVKTDKADAKVIAAYSQQNAASLRQWEPEPPAQRRLRALVRRLDDLKEMRQMEQNRLDVAQDAVQQSIRDVIGHITEELEKTRKAIEQTIDDDPDLRKRRDLITSIDGLGETTAALLLAELGDPLKYQSSSAIVAFAGLNPMVHQSGELTGQSTISRTGASRLRAGLWMSGTVSIRHNPVVKVLAERLSSRHKAYKQIVCAAMRKLLHLVYGVVKSGKPFDPQIPLAG

SEQ ID NO: 143458 - protein, 366 aa, unidentified
MKKSITPIGTPVGIDVHKRRCKVVEFHQGEIKVRKPMGNTREDWLELLTELPPDAEIGLEVSTAGYFAMSVLEAAGWRERAHWVHTAGIDSNRRQKNDRLDAERLARKLAAHHVDPLPEAWFPPPAIRALRLRARQRCWLALLRTQAKNHVQSLLEMHGLQIPGSDPFGTAGQRWLAAQKLPPPLTESIPQTLRLLGLLEEEIHTSEQYLQAADKQFPELMLIRTIPGIGPILAPVIWSEIGTIERFRSAKALANGTGLVASFYDSGEVKTTGPITHQGSRWLRWAFVTAANVAIQGRNPFARRYHRLRRGKKANVAKAAIAHSLARCVYGVLKHGCPYREDRWGRKVGALEPETRAGARSTKTAL

SEQ ID NO: 143459 - protein, 314 aa, unidentified
MAMEQRCLGIDVSQAVLDAHLVPSGETWSVSNDARGIKGLVGHLKAARDVLVVIEATGGYQHEAAVALSRAGASVAVVHPRQVRDFGRATGQLAKTDRISAEILAMFGERLRPEARFVPDEELELLAALIQRRRQLLEMLVAEKNRLRVTRAAEVHRELKTHVRWLEKRLKDADKKLDEAVRKSPMWRAKDEILKSTPGVGSVVSRTLIGELPELGTLNRKEIAALAGVAPFARDSGTLRGKRTVWGGRAPVRSALYMAALVGVRHNPVLRKMYQRLLGRGELPKLALVACMRKLLVTLNAMLRDGTRWQEVRA

SEQ ID NO: 143460 - protein, 412 aa, unidentified
MTDGTRRWFAGVDWGSEKHQVCLLDAGGTVVGERAFAHDGAGLVAMCDWLVSMAGHPGTVAVAIEVPHGPVVDVLLDRGFAVHAINPKQLDRLRDRFSVAGAKDDRRDARVAAAGLRTDPHLFRPLQVGDPAVVELREWSRLAEELQQERVRLANRTRQQLWRYYPQLLELTDDLTAEWILELWAMAPTPTRAARLREATIAKLLRQHRIRRLDAAGVLGVLRQPAITVAAGVTEAAVLHLHSLLARLRLANTEFRQAERKLDGLCAGLSQDAGAAAHGPCDAAILRSLPGVGTVTLATLLTEAGDPLARRDHAALRTLSGVAPVTKRSGKTRVVVMRYAAQVRLRQAVFHWARVAILHDPKSRSRYDALRARGHSYGRALRGVADRLLGVACVLLRRQILFDADHGKPAAA

SEQ ID NO: 143461 - protein, 352 aa, unidentified
MKSTQTTATPKLFIGMDVHKKSWTVHFKTDLFDNKTVTMPADPDELISYVRKHFQDHEVSCCYEAGCCGYWIARALLSHGWEVKVVNPADVPRNNKQDWQKTDRIDSRNLCKHLSDDNLKGIYIPGEEQEQLRSLFRRRIHLARNLRSIKNHIKSQLLYFGIKLPDQYDNPNWSREMKTWIGNLKWKFSSGGESIKSRLKQLEFMWYEELHISNELRAYCRKHYRKDYYLYKSIPGIGGITAAGILSELGDIRRFNRLDELAAIVGLVPGIYQSSDHTINLGLTKRSNHQLRSLLVEASWVAVRTDMALQQYYRRHAYKEPNKAIIKVAHKLLSRMRAVINSEVPYQLGVLK

SEQ ID NO: 143462 - protein, 387 aa, unidentified
MLQVNDLSRSLVAFDPISTLMVVVEMSKASWLVRSVVPGVERQPLKKLEPDATALLRLIERWRSEAVRAGRPISRVALAYEAGRDGFWLARWLIARGIEAHVIHSASVAVSRERKRAKTDRLDTAMLMRVFLGWLRGERGHCGMVAIPTMEEEDARRPSRERESLVNERSRIVNRMKSALARLGIRGFKPHLRRAPERLACLRTAEGTGLPANIIEELRRDMARLALVREQISSIEKTRVERLARAPDTGPHAMVRLLSRVIGIGIETADMLVREILSRKLRDRRALARYAGLTGSPDESGLKSREKGLAKAGNARVRRGLIQLAWRFLMFQKDSALARWYRTRTEGPSGARKTTMIVALARKLLIALWRLATTGEVPDGVELRPAA

SEQ ID NO: 143463 - protein, 430 aa, unidentified
MKSNTQNAKIEAITEKTLVLGIDVGSEMHYARAFDYRGIEYSKKPFKFSNTEAGFVTFKEWILDLKERHEKDKVVPGMEPTGHYWFNLGKFLQDNEMKPVLVNPHHVKKSKELDDNNPTKNDCKDPKVIAGLVREGRYMIPYLPDGVYADLRTASNIRFQLQAELTRIQNRISRWFNIYFPEYKTVYGKPDAKSGILILKTAPLPEDILTLGIDGVNQIWRDAKLRAVGKARAKTLIEAAEHSVGSKEGTVSARMEIRMLLEDYESRNIRLQEVMALIEELVAQIPMAEKLLEIKGVGIRTVSGFLAEVGDISRFNSPKELQKLAGLALVENSSGKHKGETTISRRGRKRLRYLLFEVAMSLVAKNPEFRELHVYYTTRRLNSLKKMQSLMAVAAKLLRIFYAMLTKGVDYDPKKMVSDIKRPAAYLQAE

SEQ ID NO: 143464 - protein, 360 aa, unidentified
MPGRRFLIVDHLVKEGNVIAVGIDTHKESLAICAVDDLGRQLGELSVRNSPQGFRRLERFLAGLPSPRRVGIEGAGGLGAPVAHALAAAGEEVVEVPARLTARQRRRLRRLGKSDPADALAIARVVVSEQDLPAAIHGELTTDLKVLCNYRAQMLGERTRQSNRLHADLAALSPGYGAQLPAFDSAVRQRRAATLLAAQGGVRARLAERRLARILAITLEIDALEGQITALVGSCGTRLTAICGIGSLTAARLLAECGDARRFRSAAAFAMAAGVAPITASSGKVQRHRLNRGGNRQLNLALYTIAFVQSRCDTRAQDYLERKRADGKSWREAMRCLKRQLANVVYRQMVADLNEGRLTT

SEQ ID NO: 143465 - protein, 402 aa, unidentified
MGKLYVGIDVSKDRSSASGIDDYGKSCFEISFDMDGTGFAELLKAIEANSDGDEDVVAAMESTACYHINLYSFLSAKGFETIIINPLLIANFAKLSLRKTKTDKKDASTIAQFILAHKDSVNQLAVSQDQQDIRDMARERESLCHQISAAKVEIRRLLHITFPELESMCNPFTKVMLHFIQRFPSARLVNMAKPNIIAKTLQEKPCSCRIGFTPSEIIEIARKSIATVSPGKEIILSGKIDTLSHLQKRRDELSKALTKYCESSIVEDLKIVTSIKGIGNNTATTFLAEIGRIDNYVSHKNLIAFAGIDPTVYQSGKYEGASKISKRGNRHLRRVIWLMTMRVINHNSMFRNYFLKKRSEGQPFKKAAFATTKGRRNNDAPSEKMRTEITSFLSPYAPSSSP

SEQ ID NO: 143466 - protein, 308 aa, unidentified
MATSSYVGIDVSKARLDVAKLGGEVWQADNTPEGIAQLVQQLANIQPELIVVEATGGYQRNVVDALFHAGLCVAVVNPARVRQFARACGLLAKTDTLDALVLAEFGQRVQPKHYEGKNEAEKQLSALLVRRKQVEEMLKAEQNRLRTISPVLRGSVERMIAVLKEEKKRLDEQIRELMNEHQAWQEQTEILGSAPGVGPVTTATLLADLPELGKMDRKKIAALVGVAPMNYDSGKKRGYRKTKGGRSDVRSVLYMSTLVATRYNPLIQSQYQQMLKRGKLKKVALTACMRKFLTILNAMMRDGQPFRV

SEQ ID NO: 143467 - protein, 454 aa, unidentified
MRKPQVVPDEDHEVIYERVAAVDVAKASGVVCLRTPDPARPGRFVNRIWDNVPAMRAQIAELGAELLRCRVQMVTLESTSDYWRIWYYVLESAGLAVQLVSASQAKNLKGRPKTDKLDAMWLARLTQWGMLRPSFVPPAAIRRVRDFTRARQDLVAERTRCLQRVEKLLEDAMIKITSVARDGMKAKSVVAMVAALAAGQRDPRALADLARGPLRARRDQLAQALDGMFDSHHGMIARSLLDQVAFLDWQITLMEDQAIAALAGVPESWGVDADGQAGPQAGTSPGSPVLAAAHRLAEIPGISLWLAIVIIAEIGLNMTCFPTPAHLVSWMGLCRSAASSGTRHGKGKPKKGNSYARAAAGQAAIGAARTATFLGERYSRIARRRGKAIAQAAVARSIMIIAWHLLNDPQARYRDLGPDFYASRINRDKKIRNHIRGLQALGLTIAITGDEQAA

SEQ ID NO: 143468 - protein, 402 aa, unidentified
MNAVGIDVSKGKSMVAIMRPFGEIVSAPFEIKHTASGINSLVELINSVEGESRIVMEHTGRYYEVLAHQLSEANLFVSAINPKLIKDFDNDSLRKVKSDKADAVKIARYTLDKWQNLKQYNVMDELRNQLKTMNRQFGFYIKHKTAMKNNLIGILDQTYPGVNTYFDSPARSDGSQKWVDFASTYWHVDCVRKMSLNAFIDHYQNWCKRKKYNFSQSKAEEIYGKAKELVPVLPKDDITKLIIKQAVDQLNSASITVESLRTLMNETASKLPEYPVVMAMKGVGTSLGPQLMAEIGDVSRFTHKGAITAFAGVDPGVNESGSYEQKSVPTSKRGSSDLRKTLFQVMDVLIKTHPQDDPVYQFLDKKRAQKKPYYVYMTAGANKFLRIYYGRVKEYLSSLPES

SEQ ID NO: 143469 - protein, 345 aa, unidentified
MQIRSIGIDLGKTTFHLIALGSRSQVVIRKKFSRSQLLAYTANLPGALIGMEAGVGAHFLGRALRQQGHKVRLIPAQFVRPFVKSNKNDYRDAEAIAEAVERENMRFVPIKTEDQLDLQAVHRVRDRLVARRTSVINQIRAFLLERGISFRKGPASLRRQMPEILENADAKLSTRMRYVLDFLWQEWRGLQLQIETLNAELERIASSDPACVRLQQIPGVGPLVSTAVVSAIGNGAAFKKGREFAAWLGLIPRQWSTGGKPKLLGISKRGNPYLRKMFIHGARAAVLRVKRDGSTLGNWMSGLETRAARNVVIVATANKLARISWAVLASGNSYQPRHHATALSN

SEQ ID NO: 143470 - protein, 344 aa, unidentified
MQIKSIGIDLGKTTFHLVALGAHSQVVIRKKFSRQQLLTYAANLPSCLMGMEAGVGSHFLGRALREQGHEVRLIPAQFVRPFVKSNKNDYSDAEAIAEAVERENMRFVPIKTEDQLDLQALHRVRERLVSRRTSVINQIRAFLLERGISFRKGPASLRRQMPEILENADERLTARMRRLLDFLWQEWKHLQLQIESLSEDLEKIANSDAACARLQQIPGVGPLVATAVVSAIGNGAAFHEGREFAAWLGLVPGQWSTGGKAKLLGISKRGNPYLRKMFIHGARAAVLRVKREGSYLGQWIGGLESRAARNVVIVATANKLARISWAVLSSGENYRPRPALAVAS

SEQ ID NO: 143471 - protein, 444 aa, unidentified
MAMRKRDDEVFPNAAGIDIGASSHWVAVPRHLAEQTGCEPVREIGAMTDDLNALADWLLACGVDTVALESTGVYWIPVYEVLEQRGLKVWLVDARQMKYVPGRKSDVQDCQWLQKLMSLGLLRAAWRPDGEVCVVRAVARQREVLITDQATWVQRMQKALVQMNIQLTEVLGDVMGMTGQAIIRAIVAGERDPKMLARHRHCRVKASAEDVTKALTGNWRDEHLFVLGQALAMYDDIARRLGECDAKLQTLLGERGRARVDLGRVPKAGSKSRVEFDVRQSLANWAGVDLTRINGLGVTAVMKLLTEIGPDVSRFASVKHFCSWLGLCPGTKISGGKVLSSGTKRSANRARQALKMAAMSLSRSDSALGAFYRRLSGRMDKPRANTATAHKLARMVYFMLTRGEQFVDQGQQRYEDQQRQRSIAALKRRAAALGFQLNPTTVAV

SEQ ID NO: 143472 - protein, 445 aa, unidentified
MSNAAAAAPSEPEWAAFAAIDWADQKNFWRLLPAARQKSEAGELDSTPEAVEVWAANLQQRFGGRPIAVILEQTRGPLVYMLTKYPHLVLFPVHPTTAARYRETFAPSGAKSDPSDTDSLLDLLLRHRERLHPLRPDTVETRLLHFLVEERRQTVDEKTRANLRLTDCLKLYFPQLLRWFDDVTSPLVGDLLERWPTLEQLQRVHPGTLRRFFHEHNCRSEEKNAERMAAIQQATPATQDQAVREACVLMAHSLVAMLATVRAQIDVFDKRIAELEADHPDRALFRSLPGAGDALVPRMIVAFGTQRDRYQSAYELQCYSGIAPVTEASGNSQWVHCRFICPKFLRQTFHEFAGCSIQQSEWARAYYDHLRKDKNKSHQVAVRSLAFKWLRIIYRCWKDGKPYDEAVYMQSLRRRGSLLAEVLGTPSGVGWKSVAGFQKLSENNA

SEQ ID NO: 143473 - protein, 446 aa, unidentified
MRALPEEIPDEEYEQILERVCAVDVAKESGMVCTRLPGGAGGRRTSRVWQVPATTNAVSDLAAQLVDQGVEKVTVESTSDYWRIWYYLLEAAGLDVQLVNARDVKNVPGRPKTDKLDAVWLAKLTEKGMLRPSFVPPAPIRVLRDYTRMRVDLTRDRTRNWQRLEKLLEDALIKVTSVASKLQTLSTRDMVEALIAGQRDPQALAGLARGRLRGKHAALVEALTGRFDAHHGELARILLDQIDRLDSQITQLTGRIEELVGEIDRAALPSPSDSTDNGRDAPAVSALRRLSEIPGLSVETAQLIIAEIGLDMTRFPTAAHLVSWARLCPRTIQSGTSTSAGKIGKGNPYLKGVLGLAAATAARGGTTFLAERYRRIVKRRGKGKALVAVARSILVIIWHLLADPTARYHDLGLDYYDTRVNTNRKVNSLVRQLESLGHTVTLQPAA

SEQ ID NO: 143474 - protein, 429 aa, unidentified
MNSTQNKKIEQVKETTMIVGCDVGCEKHYFRAFNWRGIELTRKPVAFSNSMEGFNSFYNTIVELMQKSGLEEVLVGIEPTGHYWFDLGQFIGEKNIKFVMVNPHHVHKTKELDDNSPSKNDRKDPRVIAGLVRDGRYFYSYMPTGVYAELRNASNRRFVLVEEQTRAKNRLQKWIAVYFPEYKGVYTHIDAKGGLLVLKEASTPEEIVKLGEKGIIKIWKDAKLRGNGHKKAMNILNAAMRSIGLKAGLTEARMEIQDLIEDYELQTKRLERVNDLIKELCQQIRYADKLLEIKGIGITTVAGFIAEVGDITRFDSTKELQKLAGLELVADSSGKHNGKTKISKRGRKRLRYLLFEAAISVVGKNKEFKEIHRYYTTREKNPLKKMQSLIAVACKLIRVFYVILIKGISYDSSKMLKDIQHPGDQLKAA

SEQ ID NO: 143475 - protein, 347 aa, unidentified
MSICMIGLDTAKTVFQIHGVDEAGKAEIRRKLRRNDLIAFFEKQAACTVVMEACGAAHHWTRMLTGLGHSVKLIAPEAVKPFVKKGKKNDAVDAAAICEAASRPDVKFVPAKSVEQQGILALHAARSLLVKQQTMLANAMRGLAAEFGLTVPKGIHKLDELMAVVDADEIIPKRAKQAIAGLHDYCNNLSDGVETFETEIVAHARRDETARRLATIPGIGPITASLIAATVGDISLFKTARQFAAWLGLVPRQSSTGGKTRLGRITKTGNREIRKLLVLGATSMVYRADGWNSAVGAWLRSVLERRPVRLVTVALANKMARIAWAVMTRKEVYRPKGGVAAVAQAAA

SEQ ID NO: 143476 - protein, 348 aa, unidentified
MTTTVYCGVDFHARVQTVAYCVIADGEIHLHELDHRKDDVRGFYSQFSGEVVVGLEASGYSPWFERMLEELGHSVWLGHAAEIRRFAKRRQKNDRRDAELILDLLLKGEFPLIHRPTADSLEVLRMLRYRHRMVKMRTMIVNNLQALAIGSGLSLQSRLLTRSGRLRLLATQMSPVMSRQREEWLSLVDTLNARIASVEKWLEQQAQSNSRVQLLRTQPGLGLLTSLGLVHSMEPVSRFCNQRKVAAYFGMDPMERSSAEKRRYIGISKAGSRLVRFLLVEAAQTAARKDQELKRFYQRLVARRGRQKALVAVGRKLLTRSYIMLRDGIDYAEFLRRGVEARPARRDA

SEQ ID NO: 143477 - protein, 481 aa, unidentified
MATTRTSGLNRKQRRELARRLQAADPGLEVMHPHAAGIDVGNSTHYVAVRPDRDPDPVRRFDCFTADLHRLADWLQHCGVTTVALQSTGVYWIPIYEILEAHGFEVYLVNARHTKNLPGRKTDVQESQWLLKLHPYGLLRNSFHPSAEIRVVRTYWRQRGDHVRAVSTCIQRMQKVLTQMNIQLANVISDLSGWTGQRIVRAILAGERNPETLAALSHPGIHATHAEIAKSLEGTWQPDLLFVLKQEVDLYDTYQLRIAECDQELERHLKTFADKPPDPPADPEPFPTLAPSDARAHQHHPKRRRKAGSHAPQFDLGRELHRISGVDLTRIDGIDVGVAQTVISEVGLDMSRWEDEDHFASWLGLCPDNRITGGKVLRRGTRHVINRAATALRLGASTLLRSQSYLGAQYRRFRGKLGAPKAITAMAHKLAVLVYRMLRWGHAYVDKGLQYYEERHRQQQIHLLKKRAAKLGLQIVEPQVA

SEQ ID NO: 143478 - protein, 370 aa, unidentified
MCSSTLPGTTPVARARSRPVGEVVLGVDTHRDAHVAAVLSLAGAVLATAEFPATAAGYRDLLKWARKWGSVGRAGVEGTGSYGASLSRYLLAQGVDVVDVNWMDRADRRRRGKSDPLDAQNAARAVLSGRARARAKTGDGPVQIARMYKLTKASAVKARTQAINQLKAVLVTADPALREELAGLGNAELLRICARFADASSREEVGEESVLQATRVTLRLLAHRIGQLSEQIRDVETRLARLVECHAPQLLDVVGIGPDTAVTLLITVGDNPERLDSEAAFAALCGVSPVERSSGHRQFRRLNRGGDRQANAALHRIVFTRLRVDPRTQDHYERRIKEGKTRREIVRCLKRYAAREVFHLVRKLQSGTRS

SEQ ID NO: 143479 - protein, 487 aa, unidentified
MSENSGGAGRFDRSSRRVIVLRLSISAVVFDPDKQSGPRCVEVSFFVALGNGEHGWQCLDYTCGVTIACFIEEVMMQVMIERGAGLDVHQETVVACVLIGAPGRRPTRQVRTFRTMTRDLEALRDWLTELGVTHVGMESTGVYWRPVYAVLEGDFELIVGNARHIRNVPGRKTDVKDAEWIADLVRHGLIAKSFVPPPPLRELRELLRYRRKLTESQAAERNRLLRLLETANIKLASVASDVFGVSGRAMLKALIEGVASAEEMAALAKGSLRRKHAELVLALHGRMQEHHRFVLMMQLRRLETAEQDIAALDQRIAEKLGPYGAQHLLLMQIPGVDWLVAAVLIAEIGIDMSVFLSASHLAAWAGVCPGNQESAGKQRSGRARKGNIHLRTILVGAAVSASRTRGSYLKDKYHRLKARRGPMRAALAIAHKILVAAYHMLAKGIAYQDLGETYLDQISQTRTAANLKRRIERLGYQVTLEPKAQAA

SEQ ID NO: 143480 - protein, 409 aa, unidentified
MNHNQKMELIQNATCIVGIDIGKDIHVATILNNKGLELKKGIKIANSVESINLFEQELKEHNPQQVLIGMEPTGNYYKPLAYYMATKRYTILTVNPYHTKLSKEIGTNNRSKNDVKDSALIAKLVVQGSFTKGILLVKKYAELRKLTTLRLTQVQEQTRATIRLKTLLNEYCPEFEKTFSKIVGNTSLEFLQEYGFEGLRSNEGLEQKINFIVKRSRGRIKFERAQFIVERLTKTIGHNEGIEAAQIELNFLIEQIVLFKKNISSLEGPIEDLLMTLPETSFVIGIKGIGVITLATILGQIGSFEQFTNAHQIEKLAGLNLVQNESGKFIGKITLNKRGRDVLRHMLYMIALNLITNNADFKALYKHKVEVQKKPKTMALIAIAQKFIRVMFSMVKNKSAYKSEFIIVR

SEQ ID NO: 143481 - protein, 361 aa, unidentified
MKTTKISNTKRYEVIKLGIDAHARDYHVCRQVEGATPQAVQKMNLEALLRFVAKQLEQAKAVHTCYEAGGFGYHLHRKLTSLGATNVVVQPQDWDERGKRVKTDRLDALALCQRLDRYVRGNRKAFSIVRVPTEVQERERALSRQRSQLVRERTRIQAMGRSLLATQGIHVSGRWWRGRTWASVQEQAPQWVLERLAVFIRLLEPLEREELALGEAIKEAGKAAPVLPKGVGPLTFEVLRREVGDWSRFNNRRQVSSYTGLCPREHSSGGKRRGGSVNKSGNPRVRAMLVEMTWRLIRWQPGYHALRKWQPVLCGPSRNPAARKKAVVAIARQLAVDLWRLFTGQTKVENLGLTCLAESAP

SEQ ID NO: 143482 - protein, 355 aa, unidentified
MSSEKYIGMDVHQATISVAVMDSTGRVIMESILETKASTILEFVGGLRGTLSVTFEEGTWAAWLYDLLKPHVAHVLACNPRKNAALNQGNRSDKIDARELANRLRLNDLKPVYHGENGIRMLRELARSYLTIVRDLSRVMNRLKALYRSWAIPCTGRDVYYTRHRSQWLEKIREAGPRRRAERLYQQLDMLQYLRQQARRELLAESRKHSITAKLRQIPALGPIRCALAVALIQTPHRFRSKRQLWKYCGLALETRITGEYVYVHGERRRSKKQLSIRGLNKDHNHDLKGLFKAAATRASVIPGPFREFYQRSLAKGIKPTMVRLTLARKIAAITLTLWKKGENFDVEKLKSQAA

SEQ ID NO: 143483 - protein, 342 aa, unidentified
MKITTVGIDLAKNVIQVHGINEQGKKAFNKQLQRKHVLTHFAQLPPCLIGMEACSSAHFWARKLQSQGHTVKLMAPQFVKPYVKTNKNDAADAEAICEAVTRPTMRFVPIKNGEQQAVLSLHRARQGFVKARTAQANQIRGLLMEYGITIPQGISHVTKRIPELLEDAENELPGVFRQLLQRPGNHLKALDRQVTELDEQIQTWHRGSEASKKLARIPGIGPLTASALVASIGDARSFKNGRQLAAWLGLVPRQHSSGGKPRLQGISKRGDTYLRTLLIHGARSVIRVATGKTTPVHCWAVNLVERRNKNVAAVALANKNARIVWALMTQNREYQSDFVRTV

SEQ ID NO: 143484 - protein, 413 aa, unidentified
MDVVHSRCAGIDISKKDAKVCVRVQGRGRRSAAATVTTWGSMTNQILALREHLLAEEVTCVVMEATGDYWKPFYYLLEEGLTVMLVNAHDARNVPGRKTDVSDAAWLADLGAHGLLRSSLVPPPPIRRLRDLTRARTALTRDRSRQVQRIEKVLEDTGIKLSSVASDIVGVSGRLMLQALIDGQNNPTVIAELAQRRLRAKIPVLTEALNGRFTAHHGFLISMHLKLIDEYNQALGELDDKIAEALAPLAAARELLVSLPGFSRIVAEVFLAETGGDMSVFPTAAHLASWAGTAPGCNESAGRVKSTKTRPGNRYLKGALGVAAMAASRSKGTYFSAKYRRIASRRGPMKALVAVEHSMLIATWNMLTNGEFYRDPGADYFTARQPAKTKARAINQLESLGYHVILQPLSDTA

SEQ ID NO: 143485 - protein, 412 aa, unidentified
MRVIVERCCGLDVHQETVVACLLIGASGDRPTKEVRTFRTVTRDLEALRDWLAAAGVTHVGMESTGVYWRPVYAVLEGHFDLTVGNARHIRNVPGRKTDVKDAEWIADLVRHGLIAKSFVPPRPLREMRELLRYRRKLTESQAAERNRLLKLLETANIKLASIMSDVFGVSGRAMLRALIDGQASVEAMADLARGQLRRKRSDLILALEGRMEEHHRFLLATQLRRLEAIEQDIAALDLRINERLEPYRMPHALLTQIPGVDWLVAAVIIAEIGVDMSVFLSVYHLSAWAGVCPGSHESAGRQKSGRARKGNVHLRTMLVGAAISAARKRGSYLKDKFHRLKARRGAMRAALAIAHKILVSAYHMLAKGLAYHDLGEAYLDQIGQSRTVANLKRRLERLGYHVTLERTTQAA

SEQ ID NO: 143486 - protein, 356 aa, unidentified
MAEGTWVGLDVHARKVVAGVLDARTGELRSLRAPTLPAETVEWLREFPAPVRVGYEAGPTGYGLARACLEAGIACTVAAPSKIQRAPADKVKTDRRDAERLARLLRLGGLVAVRVPEPYEEAARDLVRAREDARGELMRARHRLSKLLLRHGLVYDASAWTFAHDAWLRRQRFDSRPLVIAFDECYGAVLQAKTRRDALDQAIAELADEPPFAAIVGRLCCLRGVSTLTALALTVELGDWGRFRPQSLGPFLGLTPSEDSSGERRRLGAITKTGNTHARRLLVEAAWHQRRPLRESTTLERRRRSQPAAVRARADQSARRLHQRWHALERRGKRRTIVAVAVARELAGHCWALATM

SEQ ID NO: 143487 - protein, 398 aa, unidentified
MICVGVDVSKGKSTVAAIDENGEIFMKASEYEHTEIGMTELIQKLRTLKEEPRIVVENTGYYHWPLVNSLMDAGFFVCVVNSIIVSKFAKVQMRPGKTDRLDAIMLCRFGLAHWTKLVQCQPDEERRTLLRLYSREYSYAVHLVVEQKVHFTSLLDKVMPGIKMLLEDKGGRSKLSDFALEFWHFENISKQEPDSFTKRYCKWAKEKGYHANESKAAQIHALSQNGIPALPCTDAVKQLVQEAARVLKRLEESVNSILAQMNALASTFPEFEVVSEMKGVGKHTASRLIAEIGDVRRFHSAKALTAYAGLDAPPYQSGEFESHNRKISKRGNKYLRKVGYEVMASLMSTKPVEDHAVYLFICRKKAEGKYYLSAYMAGLNKFLHIYYARVCEVMKEPT

SEQ ID NO: 143488 - protein, 403 aa, unidentified
MELLIGIDWSQDHHDVRVLSEAGASLLRFQIPHSPAGFDRFEERIAQFNVPPTHCLVALETAHNLLIDFLWAHQYQVYVIAPSVVHAAKGRFTSSGAGNDDKSAFLLADLLRTDRHRFTPWKPDGPLVIQMRAKLSLIDSLSHSITRYTNRLHAVLQRYYPQACSLFSNLHTPISLHFLIAYPAPDLAHALSFSQFARFCRDHHYPFPHRLPELYACLRTPALRPNPAIIPAYQEETGFLAQLLLTLLERKEQTLHEVRALFAQHPDAPIFSSLPGAGPLLEAKLLVMFGDQRERFPSPAAIQALAGTCPVTDQSGKRRRVYFRKACNHDYRNTAQQFAMESAMHSEWAATYLADALARGMSKSHAYRCLANRWLAIIWHLWQTRQPYDEAFHLQQVNQHRKR

SEQ ID NO: 143489 - protein, 343 aa, unidentified
MTCFVGLDVSQKMTALCVVDNAGRRLWRGQCPTVPEEISVLLRRHAGDDARIGIETGAMTPWLVHELRNLGLEVVCLDARHARAALEMQINKTDQNDAEGLAQIVRTGWYRSVHVKSFDSHRARALLGARTQLIGMTTRLSNHIRGVLKTFGLLPGAMRGLPFDRKVEALLVGRSDIALIVRPMIVAWRQLRKQITAFDKVIRALVRSNSACRLLMSVPSIGVLSSLAYVSTVEDPGRFSRSRSVGAHLGLTPRQYQSGEVDRSGRISRCGDTLARTLLYEAAVVILARVKKASSLKEWARAIAKRSGNGKARVALARKLSVILHSVWRSGKPFRWSEPANAA

SEQ ID NO: 143490 - protein, 356 aa, unidentified
MEMLLTPDEKGTSMTEIMTIGLDLAKTVFQVHGADGEGRAVLRRRLRRGRVLGFFAAVPPCLVGLEACASAHYWARELQALGHEVRLIPPQYVKPFVKTNKNDAADAEAICEALLRPTMRFAAVKSADQQSVLMLHRARELLVRQRTMLINALRGHCGEFGIIAAQGARKVAALIEVIEDPDDHRLPALAREALLSLVAQLRATDERIAELEKELTAWHRSSEASLRLAAIPGIGVITATALVATVGDARQFRSARQFAAWLGLVPRQQSSGGKDRLGRISKRGDGYLRRLLVHGARTVLHWSRRRKKARSDWLEALLARRPTNVALVAMANKTARIVWAVLSRDQAYMPDRQAAA

SEQ ID NO: 143491 - protein, 415 aa, unidentified
MWFAGIDWADEHHDVAIVDEAGQQHGTLRVAHSAAGVEALVTFLRGYSQRTARADALPAPAPDPEQVACIIETTHGLLITALLEAGFPVYPVNPKTLAHWRKPAGAKTDRIDADLLARKGRSDLGELRRLEPDSPLVQELKLLTRDQDALVQTQTRLVNQLTACLKAYFPSALTLFGKLHQGATLAFLQRYPTLEQAEAASVEELTAFLRAQPRFPSPAAAAQRIHGCVHQSHLRADPVTTRVKARLTQALVAQLVPVVEQIAAYDAEIERLFRRHPDAALFVSLPGAGKRLAPRLLVGWGDDRGRYTSAQSMQGLAGTAPVAFQSGKYSKAHKRYACIKPRRNALYQFAWQSTREAWALAYYQRKRQEGKSHSVALRALANQWVRLIHAIWHTQRPYDEAVFRAAQQAHALPAA

SEQ ID NO: 143492 - protein, 299 aa, unidentified
MQIRSVGIDLGKTTFHLVALGDKGKVLLKKKFTQRQLITFTANLQTTLIGLEACAGAHFLGRALREQGHDVKLIPAQFVKPFVKSNKNDFLDAEAIAEAVDRQNMRFVPIKTDDQLDLQALHRVRDRLITRRTSVINQLRAFLLERGLVFAKSPAKLRERMPEILENAEEGLTPRVRNLLALLWNEWKDLEQQVVDLNHEVELIASSDAACLRLRQIPGIGPLVATAIVASIGNGAAFHKGREFAAWMGLVPKQYSTGGKAKLSGISKRGNRYLRKILIHGARAMVLAVSESGFPWARG

SEQ ID NO: 143493 - protein, 357 aa, unidentified
MQNKNTEVNFSNQRFFIGLDVHKKSWKITLRTNQMELKTFSMDPRPEELLKYLQRNYPNGEYLSVYEAGFCGYWIDKQLRQLGIQNIVVNGADVPSKSKERINKDDIIDSRKLARELENGTLKGIYIPNDFYEGIRSLCRLRYSVTKEQTRIKTRIKSLLTYYGKGFPENYECKNWSGRFINFLEGIEFNQVTAKQTLNHLLKELKDKKQRLAEIIRQLRDSTKEAGIGGKIKQLMSIPGISFITAITFYTEIMDMKRFKRLDELCSFVGLVPATHSSGDRERILGLSNRQSKYLRNLLFESSWVAVRNDPALTMKFGELTQRMVKQKAVVRIARKILNRMRHIWLNDTEYVIALIQ

SEQ ID NO: 143494 - protein, 364 aa, unidentified
MQKISTMRRSGKNIFRGQLTIGLDLGDRFSAYCILSEAGEIVLEHKLATTPEAMKQVFGSMPRCRMAMETGAHSPWVSRLLAELGHEVIVGHAQKVRLITKSRRKDDRLDARTLARLARIDPELLSPVKHRSAQAQLHLAEIRARAGLVSARTALVNAARGLVKSYGERVHKCDTRQFRRETSGLSTGLREALEPLLSQIESLNESIQKYDRRIEKMAKETYPETSLLKQVKGVGDLIATTYVLTLEDTHRFRKSRDVGCFVGLQPGRRNSGESEPQMRISKEGDEYLRTLLVQGAHYILGPFGEDSDLRLRGQKLSARGGKNAKKRAVVAVARKLAVLLHRLWVSGEVYEPLRNSRKAMSTAA

SEQ ID NO: 143495 - protein, 310 aa, unidentified
MMASLDVFVGIDVSKDRLDVHVRPLGVGFSVSNETTGHAALIARLRPLRAKRIVLEATGGYERALWLALSEAGLVAAVVNPRQVREFARAAGRLAKTDRLDAAVIAHFAETFVPRPGKPDPVADRLGEHVRYRRSLQEEIVALEHQRRRLETPALRERAERRHAALRAEVKEIEREMRAIVDGDPGKKALFACLTALKGVGLVLACTLIANMRELGTLTRHQAAALIGVAPLNHDSGVRRGYRAIAGGRRRVRNVLYVATLSAVRSNPVIREFYRRLSADGKPAKVALVACMRKMLVMLNGRVRDHLATA

SEQ ID NO: 143496 - protein, 433 aa, unidentified
MLKINYMSTLFVGIDVSSKTNAVYAMDFEENKYISSSFGNNQPGADKLVNMIAECMHKHKNLNTILIVLESTSVYSVHISNFLSTSEVLMPYKPYVFCVNPKATSNYRKSYIGMEKTDPTDAYLIADFGRVGRTKKLEPWRGGQFISLKRLTRHRMHLSECITREKTYMVSNLYLKFSELQLLEGDDKPFGSLYGATSSAVLTEFLSPQEIIDMPEEDLLTFLAGKSRNRISDLSKTSELLRKAARDSYRLDKCMYEPLSISLASSFNCIHAYQKEIKLIEQAIEKCINGMNPNALLILQSIPGIGPIWASGILSEIGDITVFHSSDALAKYAGLYWPKGDSGDFTSEDNKMSKAGNPYLRCYLGEAANSVRKHIPEYADFYARKYAEVTKHQHKRALALTSRKLVRLVFGLLVKNQLYTGEKLDTEYNIESN

SEQ ID NO: 143497 - protein, 370 aa, unidentified
MGNRSMFVGLDVHKETIDVAVAEGGRQGEVRHYGVIGPDVEALDKLVRALQAPSRVLHVVYEAGPCGFGIHRHLAKRAVDCVVVSPSMVPKRSGDRVKTDRRDSVALARLHRAGELRAIHIPDAADEAMRDLVRAREDAVVVGTQAKYRLKAFLLRQGRRYPGRAGWTRPYRRWLADLSFPSAAQHITLQEYRDAIEETERRLERLTDQLRQLAPTWRWAPLVAALQALRGVSFITAMGLVAELGDLTRFGQPRELMAFLGLVPSEYSSGPRVRRGGITKAGNPHVRRLLAEAAWAYQGIPRIGRQHLYRQEQLPKVVCDIAWKAQLRLTGRFRRLLARGKSKPKVATAIARELTGFIWAIAREVRPASA

SEQ ID NO: 143498 - protein, 445 aa, unidentified
MKVMHERVAGIDVHKDMIKVAIRFPGEKGTRKTEVLEFRTFWGVLQEVARELRRRGVTHVAMEASGVYTEPVYHALCEQDFTEVLVINPKHVKALKGHKTDARDCRRIAELLECGLLRGSYVPSAEQKEMRDLTRYRKKLVQARTSEIQRMQKALESAGIKLGSVLTGITGVSATAMIDALIDGERRPQVMADLARGTLRAAGKQADLKMALAGRFTAHHATLLRMHRDQVKLNNHAIAGLDEQIAAAAGRWQREMDLLMTIPGFGPVAAATWIAEIGPGPHKYFDSHDKLGSFVTLAPGNYVSARKRRHGRTGDAGTYIKPALIEAAWGAIRVRGRLQARYNRLVRRFGGDKNPGAKKKAITAIAHTLLKIAYQVLRSGEPYAEPGADFYTRRNSPASQQAWLLRKLEQLNPGATITITLPGAAPPDGGAAPADPPGAALTLPR

SEQ ID NO: 143499 - protein, 355 aa, unidentified
MKKEAIQYLALDVHQTTVVGTARDEQGTIRMRATVPTEAKAIVGLVRSLGPRVHVAFEEGTQAQWVHDLVEPHAEKVIVCNVRGRSETSNKSDKIDADGMSELLRLGSLKSVYHGGSSVLTLKELVRCYTNLVEDSTRVMLRIKALFRGEAILTPGASVYRPSERKKWLAMVKSRGKRMRAESLLQQLDALFELQPKAKAAMITEARRQPGWKTLRSMPFFGPVRVALLLAIIATPNRFRTKRQLWPYIGLAVVTRSTADQEFVDGKLQRRRRAPMTRGLNRNHNPALKNVFKGAANAAAAKPGPLKDFYDACVARGVREELAKVTLARKISSIALRLWKKGELWDPKKLTMQTI

SEQ ID NO: 143500 - protein, 343 aa, unidentified
MTFVGCDLHTRQQQVAVLDTTTGEIHEHRLPHDGTAVEAFYASLPRPVTVGIESTGYAIWFHTLMQRLGHTVLVGDSAKIRAMVVRKTKTDRRDALHILDLLCHDRFPTIWVPDPATRDLRTLLMHRIRLVRIQTMLKNGLHAIALNQGLACGSKLLRKAGLAQLQALALPLYTAQRRDQSLALLGALRTHLDQLDDAIAAAARAHPDAPRLLTHPGVGPLTALATVVVLGTVSRFPDSKHVVSYVGLAPALNASADKYRLGKITKQGSTLLRFVLGQAATHAARLDPDLKRTYFTLVHRRGRSKAKVAVARKLLVRLFIMLRDQIDYDEFRRRGRVPVVAPA

SEQ ID NO: 143501 - protein, 400 aa, unidentified
MGQPLWAGVDAGKSDHYCVVIDADGKRLLSRRVANDEAALLELINAITALADGSELTWAIDLNAGGAALLIALLIGAEQRLLYIPGRTVHHASGGYRGEGKTDAKDAAVIADQARMRRDLQPLRPEDDIAVELRILTSRRTDLVTDRTRAINRLRAQLLEYFPALERAFDYSASKAALILLSGYQTPDGLRHAGAARLAAWLRKRKARNADAVAAAAIEAAKSQHTVVPGQQLAAAMVARLAEEVMTLDTEIGDTDAMIEERFRRHRHAEIILSMPGFGVILGAEFLAATGGDIAAFGNTDRLAAVAGLAPVPRDSGRISGNLKRPRRYNRRLLRACYLASHIAIRTDTASRIYYDRKRAEGKRHTQAVLALARRRLNVIWAMLRDHKLNRPGESGDFLV

SEQ ID NO: 143502 - protein, 426 aa, unidentified
MFHDDMHVVHGRCAGLDVHKAQVTATVRLCAGAGEPVIETREFSALPSGLDGLVAWLRSHAVEAAAMEGTGVYWRAPWERLTQAGIHAELFHAQHVKQLKGRKTDIEDSRWLATICQFGLGRPSLVPQGEFRAARGLSRHRRTLIQERSRVRNRVQKVIDGAGIRIGSILSDVFGTNGRTILEGLVAGASREDILAGLTRHVAVKIEALGDALSLSLGDWERTILSDLMDAEGTLNKRIAVVETTLIEGLAPHRRALDILQTLPGVDAVAAASILAETGPDMSVFGSAHAFTAWAGLSPGNNESAGKRRSGATRKGAKHLRATLVEAAHAATRTSHCQFPGYKRAIAARRGHKRAIIATAHKMARILYVMLRDATPYRDPGTDYEALLVNRNASRWLRQLARFGVLQEDRTGVLRVNWDALRPQAA

SEQ ID NO: 143503 - protein, 533 aa, unidentified
MATKRNSRKSRTIRPAVLGKPNGVIQPRVQAVGPERFGVVAVDCAKARSKWMLCDFYGNVLVPPTVVEHGRAALQIAVFQLREALEKHDIRDHIVAVEMTGVYHRPVQRAFRQAGSETRLVHPYASRHYRLPAHADTKTDDHDLEGIFRAAVNGFGLLEPAWDETYLQLQLLTRHRRDLVEKRAKLQCQIRQYLERCMPGYAVLFPDDHLWVRPMPLFVARRGGLAEAIRRAAIPGVEQWLREEKLRAQSRTVERIVAWAADAAEPDPLASHLNRVWCALHDDWLAKTRQIEAVEREMAEILVKTPYVLLLSHPGIGVLSAADLAGEMGPIEHYAHAKAITGRAGLFPSRYQSDEVDRADGPLAHHRNARLRAAWLRVADNLIKCNAHFRGKFQLWKQRGVDARDNRCRVANRAARTVFQMVSGQRLYHHPSRLDRGYVLDKLLTFHREHGTTPLEILRDLRHAAGQIPRHEHAAEAVPLQRILRRAQFSRRPGPQTIGDIVVAVLARLGADRLQSEGEAPSLDADVFETSTR

SEQ ID NO: 143504 - protein, 509 aa, unidentified
MNVNTNNAKNQSKEKRIEKTTRAEIRRRKKADEKQEKSKKKKTITRTFPETQNQELLLQHTDEILKNLKAHTWRDLETAGKFSKNDKLSFISDDMLVVGCDIGSETHYARAIDTRGRELSKKPLAFDNKEEGFQKAKDWAVTLAARNEKKQIVLGLEPTGHYWFVLATWMVSNGISVVQVNPYAVKQTKELEDNSQLKDDTKDPKLIANLVKDGNYGMPYLPEKLYADLRRFSMFRDQLTEDRIRDINRLHREMKIYFPEYKETFGKLDGAFSLELLKKAPFPKDILELGADGIRNIWHEAKLRGRGYSKANEIVRLAKGSVGLKDGAGAAKEAVRWFAEKIAELSEQLTDIENKLHEKCREIPHAENILEIPGIGETIMAGILAEMGDINRFDDVKEIQKLSGMGLVACSSGKHKGETKISHRGRKRLRYWLFQAAKSAVSHGNEFKKLHAYYTTRPGNPLKKMQSLIVIACKILRVIYAILKKGIRYNPEKMLKDIMFPTEQQSVVA

SEQ ID NO: 143505 - protein, 434 aa, unidentified
MSLRGSVAGQSPRGMEAFLKITCGIDWAENHHDVALVDDTGKLVAKRRISDDAQGYSRLLELFADAGDGTDEPIPVAVETARGLLIACLRATGRKVYSINPMAVARYRERHTVARAKSDHADAVALANILRTDARAHRPLPADSELVQAIAVLARAQQDAVWMRGQLSNQLRSHLKQYFPAALAAFQVRGVGLDSREARAVLAVAPDPAAAAKLSAARLGSVLRKAGRQRNIEAWAGRLRTIFTGDYLRQLPVVEQAMGCQARALVLQLDAACRAADDLAEAAAAAFAEHPDAAILTSFPGIGPVTGARVLGEIGDDRARFSDARGLKSYAGSAPITIASGKSRVVRHRKVKNQRLAAAGYVWIFGALPTPGIKEHYDRRRAAGDRHAAAMRNLFNRLLGCLHHCLHHCLQTGQTFDLDKAFPPPTGQHEPVAA

SEQ ID NO: 143506 - protein, 351 aa, unidentified
MIIIGVDYHPSDQYIAFVDTETGEYGERQLNHSAGEAEKFYRELAARGVSIRVGMEATGYSRWFERLLTELGIEVWIGDAAEIKSKRVRKQKTDREDARLLLRLLQENNFPRIWVPSPENRDLRQLLWHRHRLVQMRTRIMNQLQALAMNEGQRRKKKLWSEAGRAQLEKLALAPWASRRRKDLLELLDRMNPPIQELTGAAEQEAEKRSEVLRLMTHPGVGPLTALAFVLIIGTPERFQCGKQIGSYVGLIPEEDSSAGHPRLGHITKQGSSLLRFLLGEAAQATARCDADGRRRYMHLAVRRQRNIAKVAMARRLAVRLYWMWRNGWEYTEWVKFGSHAGQLGTGHGVK

SEQ ID NO: 143507 - protein, 340 aa, unidentified
MTITTVGIDLAKNVFAVHGVDQNGRTVLVKPKVSRAALPELIASLPPCVIGMEACSGVHYWARLFRQYGHEPRLMAAKFVSPYRMAGKSGKNDAADAQAICEAVRRPHMRFVPVKDESQQAMQCLHRTRQGFIEEKTATYNRLRGLISEFGVIAPQSADALRHMVSVQKSSLPLQVQQCVDDLMEHVDRIEANITEYDRILSHIAKTDHRSQRLMELKGVGPTTACALVASIGNAHDFKNGRQLAAWLGLTPSQYSSGGKSKFGRITKAGDSYLRTLLVQGARSVLIGAGKRTDSFSRWVCMLVERRGYWRAVVAIAAKNARLCWASLHYGDDFRLYSVN

SEQ ID NO: 143508 - protein, 348 aa, unidentified
MSIIGGLDVHRAQITFDWVDRDSGEARRGRITPATGPRLRSWLEQLPGGGGFAVEGCTGWRFVVEELQRAGFAAHLAEPAETASLRGPKRRAKTDRADARHQRELLEQGRLPESWIPPGWLLDLRTTVRLRKTLADQRTAWQQRIHAVLFRHGLPKPAQALLSGATRGWRERVAVPAASRQALAVALRQVDLIEVELGALDQWLAALARRQPGCRALVGAHYGIGVVTAPTILAELGDARRFAGGDQVVRYTGLDITVYSSDGKRSPGHLSRQGPEVLRWALFEAAKAAARPSSPDYDFHQQVKARQGGNRATLAVARKLARRVRHTLVALGEDAMAAPEGLAGPAAA

SEQ ID NO: 143509 - protein, 387 aa, unidentified
MTRVVIGMDPHKRSVTIEVMAPDETVLGGGRYATDEPGFTALLREAQRWPERVWAVEGCSGIGHHVATRLLAQGEQVVDVPPKLSARARVFSTGQGRKTDATDAHSIALVGTRMAGLRPVVDNQQLAVLRVLADRRRTLGEDHTRMVAQLHHLLLELIPGGSKKDLSAAQAKALLVKVRPRDAAGKTRRRVAAQLIADLERVYARKKAADKELRELIEATGTSLLTLNGIGPSGAARLLIDIGDIIRFPNKGHFASWNGTAPLDASSGDQIRHRLSRAGNRQINRTLHIMATVQLRNPSEGRAYYDRKKASGKTSMEAMRCLKRRLSDIVYRHMVDDAVRAVTGPGGQAGTATQSSAAGSHPHTGSSDKSRPGPATPDPTTVRRAAS

SEQ ID NO: 143510 - protein, 307 aa, unidentified
MKFYGVDVSKDTLDIACDGKVVQIGNDKKSIRLFVKSLPVGSVVAMESTNRYHLTMADACYVAGMAVYVVNPRMTRHYREALNLRGHTDKMDAKTICSYIKHHHEDLRPYVPKSADQRRLQGLVRRRAKLVGVKVQLRQSLQEIKELKSDLDAMLKRIDRMIAHIDVLIDRQLEGNAGRERLATITSVGPVVSAALVADLDAGQFASADAFVAFYGLDPVPNDSGRSKGKRKISKKGHRLGRTLLYVAALSAASSKAWKPVYEHILAKGLSRVQALVCLARKIARTAWSIYTHKTIFQPERLVAGLT

SEQ ID NO: 143511 - protein, 316 aa, unidentified
MPRKRILVKSIDTSISYQVIGIDLAKHLVSACLITGAGEIFGIDRLTYDDLLKSAERMSPTLFCMEPCPEVHYLAEKLQGYGHHTKVIDGAAVKEYIKTHFGGQKTDLNDAQAIAFLSLDTNLPEITPKNTSNSVLSSIQAVREQFRKEYIQSFVSLKGICQRWGLPISKGVMNKNKVEELVSESKKIPQEVKDWLLELLQSCRELQKRLNKISKYLKEYADNDEICQKIMSVPGIGPITATRLKATIGDIQRFEKPKSIVAYYGLVPKSKATGHNEKKGGITRRGDRVARSLLIEGAGVVLNLAAKGFLLSLIHI

SEQ ID NO: 143512 - protein, 346 aa, unidentified
MRFYNRPHTYYCGIDLHVKTMYVCILDGTGQVLVHSNVPSTPAAFLEAVAPYREGLVVAAECMFTWYWLADVCAADGITFVLGHALAMKAIHGGKAKNDRTDSHKIAVLLRGGMLPQAYVYPSAMRSTRDLIRRRLHLVRKRGQLLAHIQNTRAQYNLPVFGRKLAYRANRDGVVEHFPDPSVQKSIAVDLALIDQYDALVIDLDLTIVREAKRHNADAFHRLRSVPGIGKVLALTILYEIHDITRFDRVQEFASYARLVKCVKTSGGKKLGTGGAKMGNVHLKWAFSEAAVLFLRHTEGKKLIARIEKQHGKGKALSILAHKIGRAVFYMLSRGTVFSMEKFLAA

SEQ ID NO: 143513 - protein, 344 aa, unidentified
MKLSRIGIDLAKNVFQLHGVDRKGEAVWKRRLKRDQWLKVLLDQTEPGCEIGMEACGGAHHWARELESRGYTVRLIAPQFVKPYVKSNKNDANDAEAICEAMSRPNMRFVTVKSIVQQDIQATHRIRSELMTQRTAKANQIRGLIAEYGLVAPQTLRALRATIPDWLEDAENGLSDYFRSLLHGVWSDLVILDDRVLELDRTILTLANSNEVTRRLQQLRGVGPMVATALVATVGDARQYHKGRQMAAAIGLTPRQHSSGGKDRLLGISKRGDVYLRSLLIHGARAVVSQAKHRDDRLSQWATGIAQRRHPNVAAVALANKNARIAWALLRHGGTYRRPATDTA

SEQ ID NO: 143514 - protein, 351 aa, unidentified
MKTNTPALTQTQDRIQQLKLGVDWHAEHFRVVRMCDGQTPQPAQRFTPDGFLIFVQKQLTLADGVFVVYEAGPGGFHLHRQLTALGATVWVVHPQKLDPQHKGVVTDKTDARELVLKLDRYLGGNRKAMSVVRVPTAAEEQRRALSRQREQLRRERQRLAAQGRSLCLTQGLRLRGEWWAQKLVLPEWLEPRLAVWRKLIAAVEEQLDALTKQVEALAPKVRPKGLGSLTLGTLLAELCDWSRFQNRKQIGSYTGLCGGVSSSGQSHCDLSITKAGNARVRWTLIELAWRMVLYQPQSVAVQRWKHILLNPKAAARQKKRALVALARQLAVDLWRWQTGRVTPEQLGWLMV

SEQ ID NO: 143515 - protein, 398 aa, unidentified
MICVGIDIAKGKSTVCFLKPGGEVLKTPYDMEHTAEEITKLIRDIRSYDEEVRVVLEATGHYHLPVVAQLLEANVFVCVVNALRMKKFCSQDIRKAKTDKIDAAKIAAFGLPYWQDLQAAKPTDEVYRELRLLSRQYFQLTSMLVKAKISLNNLLDNVMPGITDLLYDREQNHKLTDFVLRYLHFDKISAMGERKFTTDYCNRAKKQGYRMYERQAEEIFALVQNSIPALPMTASTTIVVKEAIKVVRELENSRASILAQMQTFAKSLPEYSLIREMACVGDTLTPLVIAEIGDVRNFHSKHALIAYAGIDAPPYQSGGFCGTERHISKRGNGYLRHVGFEIMQCKLRLKPEGDAVYDFIQRKRSEGKCGKEAMVAGINKFLRIYYGKVTELYRELEA

SEQ ID NO: 143516 - protein, 414 aa, unidentified
MRRYGAGGEAEHHRRWTKPMEPPMPVPNDPGRCRTALDPESTLIAVVEMSQSSWLVAAIVPGLERHPLKKLAVDEAGLLRQLERWREEAARAGRRVTRIAVAFEAGRDGFWLARWLRARGVEAHVIHPTSVAVSREHRRAKTDRLDTELLKRAFLGWLRGERGHCSMAAVPTLEEEDARRPNREREVLVAERTRVINRIRGCLARLGIRAFKPTLRRAPERLEDLRTPEGDALPPNTLSELRRDMVRLRLIRDQITEVEAARTERLEATPAEGQTAMVRLLARVIGVGVETADMLVHEILSRGLRDRRAVARYAGLTGAPDESGDRQREKGLAKAGNARVRRGMVQLAWRFLVFQKQSALAQWYRARTADARPGTRKTLIVALARKLLLALWRFATTGQPPAGIALRPAMTAAG

SEQ ID NO: 143517 - protein, 386 aa, unidentified
MAEVLEKLTGKLDAPTVSTSAQENRRGSTVRPNLDRLTVGVDLGDRWSQYCILGLEGETLAEGQLRTTQEEVREFFQALTVARVVIEVGTHSAWVQDVITEWGHEVLVANPRLMEGSKRRKRKSDRIDANKLARLGRVDPQSLYPIRHRSREVRQDLVVLRARDALVSVRTELINTTRGLVKSMGTRLPGCSSPSFAEKVKDAIPVEVREALLPLVQLTETVNDCIARYDQRIEELGQKKYGYTTLLRQVKGVGPITSLAYVLTLEDPQRFSSSREGGPYLGLVPKQEDSGDCQPQLGISKAGDRMLRRLLVGSSQYMLGAFGPDSDLRRYGLRLCERGGKNAKKRAVVAVARKLAVLLHHLWVTGDVYEPLHHTGAETRTAPAAA

SEQ ID NO: 143518 - protein, 371 aa, unidentified
MIAVIEMSQSSWLVSAMVPGLSREPLKKLDAVAGLLLLQLQRWREEAQAAGHAITRLAVAFEAGRDGFWLARWLRAQGIEAHVIHASSVAVSRTHRRAKTDRLDTKMLKRAFLGWLRGEAGHCTMAAIPSQAEEDARRPSREREALVGERTRIRNRMKALLACLGIRGFNPVLRKAPEQLEALRTPEGTPLPPNAHAKLQRDMARLQLVKQQIREIEAQRLAQLAQAKTDRRCAMIRRLASVHGLGLETADLLTSEVFLRNLRDRHALARYAGLTGSPDESGKRRREQGLARAGNARVRTAMIQLAWRFLSYQKDSALAQWYCQRTEALGGKPRTARKVMIVALARKLLITLWRMLTTGEIPQGLVLKPAA

SEQ ID NO: 143519 - protein, 346 aa, unidentified
MEHYIGLDVSLKLTSICIVDRRGKVEREGVVASDPEAIATFIKLHAPHVVRIGLETGATSTWLWTELNKMGLPVICIDARHAKAALKMQINKSDRNDAVGIARIMQCGWYKEVCVKDLDSHATKALLVSRALLVKIKRDIENQIRGLLKNLGLVIGRAKMNMFAVRAAQLAEDRSELFAAVDPLLKAREAVEQQILDLDRKVLRLARNNAQVRRFMTAPGIGPVTALCFLATIDDPARFKRSRSVGAYAGLTTRRYASGEIDWTGRISKCGDKMLRSYLYEAANVLLTRVAKWSALKAWGVRLAKRSGLRKAKVAVARKLAVILHRMWIEGTEFKWSSKEVADQPA

SEQ ID NO: 143520 - protein, 334 aa, unidentified
MTRQGEEKTMDDTVGIDISKDSLDAYWLSKRKHKQFANTKMGLSALIRWIRQTGRLLIVFEATGVYHRLLETGLATHNIPFARVNPRQARRFCEGTGQLAKTDRVDAAMLAKMGALLELEADQPKSETLHDLKQLATARLALIKDRTAAKARLAATHHCLTVHCEAMSREGHSLLSRQIKRRLKQVERDLSQVAEAIDAIVAADNELRVRADILMSIPGIAKITAYAILTEMPELGHLSGKQAAALAGLAPISRQSGKWRGKERIQGGRASVRRAVYLPAVVATRFNPDMKAKYEQLVSIGKCKKLAITAVMRKLIVMANALLRDQRKWGEYPA

SEQ ID NO: 143521 - protein, 355 aa, unidentified
MKRGHFIGMDTHCQFCELAVVNHSGAVVRRERCATCIPDVLKLIEQVPRPRSLVIEEGPLASWLWRNLHEAVDQLVVSEPRRNRLIAKDGDKDDDLDAEKLAQLLRGGYVKAVHQVQTLERALLKQYVSLYYHRVRQRVREALRISSLFRQHGVMIRERAFVAEADRAALLARLPEVCRFQEAVAQCWTAYDALVEQEEQWRKQLLALARQEEVVQRFQAVPGYGWLRAVTFYAYVDTPWRFRSKAALWKYLGVGLQRRHSGNGPEHLGVPVFMHRPLKNVVLGAALSAVLSGNNPFADLYRRYCEQGLSSKLARRNVARAQAATLWGLWKNGSAYRPEWVGVAAAAAAAVPVSG

SEQ ID NO: 143522 - protein, 428 aa, unidentified
MAEDTTLTSQTWLVAIDIGKAFHAVLVEGGDGKRQQFRMANHVEDYDRLVVFLRGLPGPARIALEPTGDFHRTLAHRLLREGFSVVSVSSVAGARYREALFNSWDKNDPKDAHVILQLLKHGLVQHYHDPLLAGDHDLQELAKTYHQIVLARKRLADSLLNHYLPLYFPEMGRYWESTRVEWFVAFLEQFPTPAAVQALPKEAFVRAAWSVVGRKVNKQAKLEELYELAQRSIALPVAVDSVAIETFRLQLAQLRRLAELRQTLEARAHALLKDRADFQRLCSLPGVAAILALVILAEGGDLRRFPHHRQFLKYCGLDLAKCQSGQFRGREMLSKRGNARLRMAFWMAAQRAVRMNENSFRDKYERYTRHDSGNPDVRRKALTAVAAKMARVAYAVVKHDQPYHGYHEHALPSGSIPLKRAVGARATP

SEQ ID NO: 143523 - protein, 342 aa, unidentified
MNQAQAYHFIGLDIHKRSVAFCEKSVTGQTVAHGTIAARRQELVGFALSRARPWVGGLEATLFSGWVYDVLVPYAVELHVGHPKRLKALSKNKNDRIDAELLASLLRADLFPSCHMASPQVRELRRVLRYRNFLVLEATRMKNKATGLLMEVGVEYAKSKLHGKKYFSELLDSLEEVPGSVRELLRMTRMSLEVFAGAQRRLLDALTRHAALRERLELLKTVGGVGDVTALTWALEIDDPYRFSRIKDAQSYCGLCSAEHESAGKQWRMPLSKERNPHLQTILIEAAKLAPSRHRHLQKVHDEALQKPGGNRNRATLEVARKLTAYLLAVDKSGRPFIAPDC

SEQ ID NO: 143524 - protein, 414 aa, unidentified
MLFVGDDWAEDHHDMEVLDEAGRRLGRARLPEGVAGIDRFHALVGRFADPDDESGAGQVLVGIETDRGPWVAALVAAGYRVFAVNPAQAARFRERHAISGAKSDTGDAHVLADMVRTDAHQLREVAGDSALGEGVKLLARAHQSLIWERTRHLLRLRAGLVEYFPGVLAALAAGGLDLGDRDALELLATAPDPDTAAGLPAEQITDLLSRGGRRGDLPARAEAITAALGAPQLTQPPVLAGAYAIVTRSLVAVLTSLAEQVTELESQVGAYFGQHPDAEIYRSQPGLGVILGARELGEFGDDPHRYTSAKARKNYAGSSPITRASGRKSVVLARHVRNRRLADALHAQAFSALRASPGARAYYDALRARGIGHHAALRQLSNRLVGILHGCLKTRTLYDEHAAWAHHQDQQKVA

SEQ ID NO: 143525 - protein, 408 aa, unidentified
MNAVGIDVSKGKSMVAALRPMGEVALLPQEFLHTEVGLEQMAYAIIALGEDTRVVMEATGRYHEPVAAALHEYGIYVSVLNPLFIKQSGGGSIRKVKTDKADAMKIAKYGLDNWVDLREYTPMDTVRQQLKLCSRQYNLYMKTVVSLQNNLISLTDKTFPGVNELFSSPERADGHQKWVDFVMTFWHCDCICRVSEKAFTERYQKWCKRKGYHFSTEKALDLYAGSCGHFTTLPKNDNIKLLITTAAQQLLAGKMTLAALRAEMTRLAMQLPEYDTVRAMYGVGQTTAAQLMAEIGDVRRFPRRSSIVGFAGVDPAVDQSGKHSAKSVPTTKRGSPHLRKTLYQIVCTYLKKSPVDEPVYQFLDKKRSEGKPYFVYMTAAQNKFLRIYYARVKECLEAFDAQQDTSQR

SEQ ID NO: 143526 - protein, 358 aa, unidentified
MRFYTQQHTHYCGVDLHTKTMFLCILDNQGNIVLSRNMLANPKTFLKAVEPFRQDLVVASECIFTWYWLADLCQREGIAFVLGHALYMKAIHGGKTKNDRQDAHKIAVLLRGGMLPQAHVYPKDKRATRDLLRRRTFFVRKRAELLTHLQNTSWQYRLEPLGRRIANRSGREGIVEAFTEESVQVSVAADLELIGYYDRVIHRLEEHLTKTARIDDGKTYDLLRSIPGVGKILGLVLLYEIDAIGRFGSVQQFCSYCRLIRPKKTSAGKPAGLPSYKKIGNAHLKWAFSEAALLLVRESKPVKAHLERLSTRHGKGKALGILAHKLGRSIYYMLKRDQHFDLARFLNTAPPHEASAAA

SEQ ID NO: 143527 - protein, 472 aa, unidentified
MRDAIGIDPDSKGFICAHVKASAPVKTRGYLATEADLGTFVKWVKGEGNVIVAIEGSNGLSKPLEKKLREAEIVFYSFKPADTEKFRKAVLGQNKDNQKDAESVARYAMALEAQGKLDGYRRVWFADAELQLLSRGYERKSQAMTAETNRLWKLIRHASSELYLALGGNHPEVEVKQNMLKNQGMLALLGQHPNLGEWKDLSEEQFLAAMGGNHNGRRELIKQLRKVAGNLTPVRQAMALMIRDSARTIQRLRREEDDIRKMLEELTKDSPAVQALEEKRGIGTITAATMIAEIIDIRRFSREDNLAGYMGLGMRERSTGDTTRMVPSQLFNHRLKDAFMTAARNYVLFNPDSHLTGYYRNLVKAGMTPLEATKRVARALVRVIFRELYALQGTEANPQKVEEAKKGESDVASGVTRSEQTKTIYSASPVACYFVGTEWRWVACQTLRRGRRSGATSLCKAIYRSPLGVPGL

SEQ ID NO: 143528 - protein, 368 aa, unidentified
MNRCHLNTELSSLEGTRRQFNGGRCAIKLGIDVHQDFYVVVEQVDGTNPKPPQRFPKQAFLHWAARLKENTGAEVHAVYEACGFGFSLQRQLAALRIHCHVVCPQKLDERNKRVKTDGLDAKALCMRLDRFVQGNRDALAIVRVPSEEEERSRAIHRQREQLVGARKRLEAQGRSLMVNRGLEPVQNWRKPHTFASLDVPQWMRELLGNSQPILVALQQKIAALTLQLQSVAAPNQPSGLGLMTSVIIDREIGDWHRFNNRRQIASYTGLCPGEYSSGNTRLQSCVTKHGNPRLRAALVELAWRLVRFQPNYKPVVKWRQILAPQPRGALATGAARKKAIVAVARQLAVDLWRIKTSRLRAEQLGLTI

SEQ ID NO: 143529 - protein, 330 aa, unidentified
MYDHYIGLDWAKTNMAVARMTKHSSEISAVDVKSDIKELKLMLKSLKGTKVLTFEESNPAQWLYTELRDSVDKLVVCDPYRNHLLKDGGKNDKIDAKKLVTLLKADLVKPVFHCNDDFIYLRKLVSGYGDLIRCGVRFKNQRSAMFSAIGRDVGEKLENPYEQFVLSGLTEGIEFYEKRRLLFAQEFRKARDKFETIKHLESIPGIGLVGAVTIVATIVDARRFKHRNDFLSYCGLIKHDLISGGRSYGKRNPRYCRRLKSVYKTAALVCMQERESSHVLRKYYLDLIEEKKYPEHQARHALARRIATLSIGTMKSGVKLDVKQLEHKKI

SEQ ID NO: 143530 - protein, 391 aa, unidentified
MIYVGIDVAKDKHDCFITNSDGEVLFKSFTIANNREGFETLFQRIQSVSDDLTKVKVGLEATGHYSYNLLGFLLDNGLPTFVINPLHTNLYRKSLSLRKTKTDKVDSHTIASMIMSDVNLKSYSDTSYHNEELKSLTRYRFDKVQERAKLKTSVSRLICILFPELEKLVPTIHMASVYAMLSEFPSAHAVASAHLTRLTNLLSESSHGRYGKDTAVMFREAARNSIGSNMPAKSLELKHTIKLIQELTSEIDEIETEIKSIMDEVNSPILSIPGINYRMGAMILAEIGDFSRFDSPDKILAYAGMSPSTYQSGQLDNCYSHMEKRGSRYLRYALYNATKYVCHWDPTFAEYLAKKRAEGKHYNVAISHAVKKLVRVIYAMEKSGQVYNKAS

SEQ ID NO: 143531 - protein, 336 aa, unidentified
MNTISTVVGIDISKKKLDVALLVNGKIKAKVVENSATGHQCLLDWLDKSKVPRAGLHVCMEATGVYYEAVASALHDAGLTVSVVNPGCIKGFGQSENLRNKTDKADAALIARYCAAMSPMRWAPPPLEQRQLRAWSQRIQALKDMRQQESNRLESYTVSGMSEVAEHARSLIAWLDAEIKQLEHDVDDHIDRHPGLKHDAELLTSIPGIGNTTAARLLGQLGDIRRFGNAKRFAAFLGVTPRQRSSGTSIKGRTMMSRTGSVALRTALYMPGMVASRYNPLLRPFAQRLAATGMAKKAVIGAVMHKLAHFIYGVIKTNKPFDPNYLAKGLAIQDGI

SEQ ID NO: 143532 - protein, 458 aa, unidentified
MKNRSRTKSKRQNQPSAQFLEKLNLNAAGIDIGATEHYVCVPADRDPKPVRVFATFTGDLLKLRDWLKACRVDTVVMESTGVYWIPLFQILERAGLAVKLVNARHVKNLPGRKTDMRDCQWLQQLHTYGLLTASFRPSDDICVLRSYLRLRDNHSRAAARHVLHLQKALQQMNLPLHHVISDVTGVTGLAILQAILAGERDPHKLAARKQYQIKSSRDQIAKALVGDWRPEHLFALRQALEGYKFYQSQIAACDQAIENVLAAFEPKIDPTQKPLAPAKPSQKKASDPLAQMRTPLYQMCGVDLTVVPGLGVLSAQVIVSEIGLDMSKWKSEKHFASWLGLCPEHRITGGAILKRHTRIVINRASIMLRRAAATLHRSPTALGAFFRRVSARRGAAKAVTATAHKLAKIIYRLLKFGQPYVETGQEQYEEKYRARLLKHLQKSADTLRLQLVPKQPST

SEQ ID NO: 143533 - protein, 319 aa, unidentified
MHCIGVDVSKQELVTYDGEKERIFPNDHRLSQFRRFIKATPDALIVFEPTSSYSRRLETFCRTEKIACCQLNPRVVPHFRQVGRGRSKTDKTDAELLYRYGIERGHAEAAQLTHDALAQAVATHLACYRVVQKARVAYQGLVEALMQDPATSKSLLRELLSEIRELKKKEALHLTHAQAVIATDEEAAMRLEAVLTIPGIGPITALTLQTLFRKSPQADRRQIVALAGLDPIQYRSGTSVHRKTRISKRGNREVRKRLFEATLSAARFNPTIRVMYERLKEEGKPDKVARVAAARKLLLIAHAIYKSGEPFCSPALKEA

SEQ ID NO: 143534 - protein, 341 aa, unidentified
MKKFIRIGVDLAKNFFQVHGIARDGAEAVSRKLTRAKFRAFFEGVAPCRVGMEACGSAHYWGRELKRMGHDVVLIAPIYVKPYVKRGKNDAADAAAICEAMSRPDMRFVPIKSADQQAVLMLHKTRELLVKQRTMIVNALRGHLSEFGLIAAKGIQRVHELVAMALGEEGFPEAARQAVAALAEQSEQLDGAIDGLEKQIAQSGARNPMVRLLKEIPAVGPLISSAMAASYPDPSVFKSGRDFAASLGLTPSQHSSGGKEKLGSITKKGNRYLRKMLVVGCTSVLRVAHKYKGALAEWIVAIKAKKPERVAAVALANKLARVCWAMLSTGEGFREELYAKA

SEQ ID NO: 143535 - protein, 342 aa, unidentified
MEYYVGLDVSLKRTSICVVDQTGSVVREGVVDSDPEAISVYVRSKAPGAVRIGLETGPTSTWLWTELRRLGLPVICIDARHAKAALDMAANKTDANDADGLAQLAEVGFFREVRVKGFDSMLTRTLVAARTRLVGITTELSNQIRGVMKTFGLLVPAGKGSIFEKNVRSLLADQDGLASIVLPMLEAWRGIRIRAAELGRQLVRDARQSQACRILMSIPGIGAITATAFSTAIERPDNFKKSRSVGAWIGLTTRRYQSGEVDYDGHISRRGDRHLRGLLYEAAAVILTRSSTDSTLRTWGRKLRERIGFKRAAVAVARKLAVIMHTMLKTGELFNPNAGAIA

SEQ ID NO: 143536 - protein, 356 aa, unidentified
MTSSVKYIGMDVHKESISIAVRNSAGKVVMESVIETKASMILQFIDGLRGELQITFEEGTSAAWLYDLLKPRVTKLVVCDPRKNKSMREGNQNDKIDARRLAELLRLDHLTAVYHGEHGLRTLKELVRSYLTITRDLARVKSRVKAIYRSWAIPCTGKQVYAQCHREEWLGKITEPGVRRRAEFYYRQLDVLRGLRQEVRRDLLAESKKHKAWKRLGEIPAIGPIRAAVLLGILQTPYRFRTKRPLWNYGGLAIERHSSADHRSVNGQLERSRKNVLVRGLNRNCNHDLKNLFKGAAAVASSKPGPFQEFYTALVAKGMRPEMARLTLARKIATIVLIVWKKGVCFDASHLKPQTA

SEQ ID NO: 143537 - protein, 367 aa, unidentified
MKNVTTYVGIDAHKKDLFIAMLVGDQKTPVTWTVPNEPNAVRRLVRKLEREAPGPVRAFYEAGPCGYALQRQLTTPRVSCDVVAPALIPRKPGERVKTNLRDSCKLVELGRGGLLTAVHPPTPAEEAVRDLARARDDAREDLQRCRHRLGKLLLRRGLHHQGRNWTRGHRQWLNSLTWTHAAERAVVDDYLLAIDHTEARLVELDAQLATIAETEPYKERVGWLRCFRGIDTLTAILILAELHDFRRFPSARALMAFLGLVPGEDSSGEKHRRGRITRTGNALVRRLLVETAWHYQHRPSVGVALTRRRKGQPSRVMAIADKAQQRLCRRFRRLAEHHKPAPKIAVAIARELAGFLWAALQPPVVAK

SEQ ID NO: 143538 - protein, 383 aa, unidentified
MSSSQSTTARSIIYLGMDVHKDSITIAVLPAGAKAPTRIERLPNDLAKLKRFLDRLGREGELRACYEASGAGYVLHRALQEWGYTCDVIAPSLIPKRPGVQRKHDKRDASELARLYRAGELTPVRIPSEAEERVRDVVRCRETFQREILKSRHYILKFLARRGLVFREGTNWCTPHLRWLQHLTTEQSPLAPADRLVFREYHALLEYKLQRRDDLDREIAHLAELPTLAPMVRRLQCFRGIALQGAMVLATEIVDWRRFERPTQLAAYLGLVSREDSSGDRERKGSLTKAGNSHCRHVLIQAAWSYHHRPAISMDLKRRQAGQPPAVIAHAWKAQHRLHQRYNHLAYRKQRQIAVVAVARELVGFLWAVMQDCSSIASVEVAA

SEQ ID NO: 143539 - protein, 395 aa, unidentified
MQVMNPVCCGIDVHQKSIVCCILDGPLTSNEPKKYQTSFGTTTKELKAALDWLLEHQVTHVFFESTGQYWIPLFNIFSDSDLELVLANPQHIKNVPGRKTDVKDAEWIAQLGRCGLINQSYIPSQEVLQLRYLTRYRISVKQRLTQIKNHIHVILQRANIKITSYLADIFCKTGQALLTLFINGEVINEDNVESCIHGRIKASTRQLIEAMEGKLSTVDRFLIKECIEEYKLQKKISDELNKEINEYILDHFPEEYQLLLTIPGISDNCCATILAEIGPNVEAFKTDKNLASWAGMCPGSNESAGVKKSSHTTQGNKYLKQALVMSVLSVQRAKEETFLLFYQRISSRGSKMKAIIACGHKMLRIIYKILQSHRPYNSQKALGLRQQTNALSLTI

SEQ ID NO: 143540 - protein, 350 aa, unidentified
MIIIGCDYHPGFQQIAFVDTETGDYGEQRLEHSEGAEKFYRDLAAQGKKVRVGMEASGHARWFERLLAEVNFELWIGDATEIARKRERKQKTDRQDAQHILQLLMENRFPKIWVPSGENRDLRQLLWHRHRMVQARTRIMNQLQAVALNEGLRCKKKLWREKGRQQLEAFRLAPWASRRREDLLQLLDRLNPTISDLTQAIEQEVEKCPEARRLRTHPGVGALTALAFVLIIGRTERFQCGKQIAAYLGLVPLEDSSGNRRRLGHITKQGSSILRFLLVEAAQVTARSVPEWRNKYFHLAMRRGRKIAKVAMARRLAIALYWMWRKGWDYEQLRKFGSHAGQPGHRDGVK

SEQ ID NO: 143541 - protein, 339 aa, unidentified
MNSVAVGVDIAKTVFQVHYIDRESGEIVNKPIRRAKFLEHFANRPACQIGMEACGGAHHWARQLTKMGHQVKLMPAEFVKAFNIRNKNDAADARAIWLAVQQPGKSVAVKTEMQQAMLALHRMREQLVKFRTMQINSLRGLLTEYGEVMGKGRAALDKAMPEVLGRVAERLPAVLIDTLREQWSGLTRLDEQVAEIERRMREWVKEDQAVKAISEIPGVGLLTATAAVAMMGDAKAFRSGREFAAWAGLVPKQTGSGGKVDLHGISKRGDSYLRVLLIHGARSVLTHAKEPGPWVEQLRKRRPFNVAVVAQANKTARMIWAILAHDRPYRKDYVSVKPA

SEQ ID NO: 143542 - protein, 343 aa, unidentified
MKLSREKIDLAKNVYQLHGVDRSGKTVWKRRLKRHQWLKVLLDRAGPDCVIGMEACSGAHHWARELQSRGYTVKLMPPQFVKPYVKSNKNDARDAEAICEAMSRPSMRFVTVKTVEQQDIQATHRIRAELITQRTAKANQVRGLVAEYGLVAPKHLSSLRAAIPCWLEDAENGLTADFRSLLQGVWGDLRALDDRVGEMDQVIKRLAENNEDCVRLQQLRGIGPMTSTAMVATVGDARQYHKSRQMAAAIGITPKQHSSGGKDRLLGISKRGDVYLRTLMIHGARSVVARAKHKDDPLSRWVTGIATKRHPNVAAVALANKTARMAWAMLRNETDYDPDFAIR

SEQ ID NO: 143543 - protein, 438 aa, unidentified
MDIVHPHVAGIDVHKKIIWVAVRLPGETPGERKVIVKRFRTFWRQLQKMAAWLAELGVTDAAMESTGVYWWPVYHALVQAGTEVCVCNAAHMRNVPGRKRDISDCQWIAELHEFGLLRASFIPAAEVAGLRQRTRYRKRLIEQRASEGQRLSKVLEDAGIKIDSVASELLGKSGRAMIEALIAGERNPGRLAELARGVLRRKTDELQMACDGRFTAAHAQMCRLHLDAYDHFTAQIAVLDELVAAAAAPFERLIARLVTIPGIGPRTAQVIVAETGGDMSRFASPARLAAWAGLAPGDNESAGKRKKAATRKGNQHLRTAMTESAWATAHTSTRPGARFRRLARRFGRGNEKKAATAIAHTLICIAWAVMQNDSDYAEAGADYYDRRDARNHEHIVRHHQQALTRLGYQVQLIPPGDGSPPPSPSAPPPATPPPGKAA

SEQ ID NO: 143544 - protein, 350 aa, unidentified
MLHAGLDLSRKRLDVCLLSEHGELVEEFAVPPDADGLRGLVRHVGDHGAPVRGVIESMTGARFVHDTLEHLGWEVLIADAQKVKGLAPLACKTDKIDARVLAVLSERDLVPAIWLPDPRVRAEREQARFRLHLVKHKSMLKHRIHSTMLSFGHPCPVSDLFGVQGRELLERLQIPDPWRQTVDASLQLIDDLERQIAQINRDLKASGAEHPYVPLLLTVPGIGWVLAFTIASEIGDITRFATAKKLCGYTGLCPRVNQSGEKDRRGPLTKQGPKYLRWAMLESTMHALRHPAYAERYQRNKKRLGRQRGARVAQIDIARKLTEAIWHMLTNNQPFAPTPASGGAAFRLAA

SEQ ID NO: 143545 - protein, 338 aa, unidentified
MQTYAGIDLHSSNNFIGVINDKDKILYGKRHANRLDDVLRALDPFKDSLKGVVVESTFNWYWLVDGLQEHGYRLHLANPSAIQQYEGLKHTDDPWDSFWLAHMYRLGILPEGYIYPKEHRAVRDLLRRRLLFVRHSTAHILSLQSMISRNLGFKMSNNELKKLKPADIESLFDCSNLVFMANNSLAAIEFLKKITKGIEKKVKSQVKLRKEFEMLLTIPGIGNILGLTINLEVGDIGRFPKVGDYSSYCRCVESKRLSNGKKKGENNKKNGNKYLAWAYVEAAQFARRYCVKAQSFYQSKEAKTKPVVAIKALSNKLSKASYYIMSDQVAFDEEKLFG

SEQ ID NO: 143546 - protein, 421 aa, unidentified
MSYRVAAIDIHKKVLMVVVASGADQVEDAAGEALEFECRRFGTGNAERRHVVSWLKERGVREVVMESTAQYWKPVWLELEPHFEKLHLAQAYSNKAPKGRKSDYRDAKRLARRLLADELLLSFVPEPEQRLWRTLSRSKHQLVRDRIRLQNQLEALLEEARIKLSSVISDLLGVSGRRILAALAKGTTDPAKLAELGDVHLKCSQQELMDALTGSPEPLHLQVLQLFLDRLELLDQQIQSLDALLAGELKRHEAAVIRVAQIPGFGVDSAQQIITEVGVDAETFPSAAQFSSWAGTCPGSEESAGQNQSSRSPKGNRFVRRILTQAAKAAVKKKGCHFQTVFRRLSPKLGYKGAIWAIAHRLGRLLWKILHDHISYLEQGQETNPKAKKRRAQKLAQALRKLGYQVSLTPINPQLRLEAQA

SEQ ID NO: 143547 - protein, 431 aa, unidentified
MLKINPLSTLYVGIDVSSKSNYVCALDFYKNKYINSSFANNQPGAEELALKILECLKEHPDITTIVAALESTSVYSIHIANYLSSCEELMRFKPYVFVLNPKCTANYKKSYIGLGKSDPIDAFVIADYARAGNIESEHWRGSQFLALKRLTRHRLHLVECMTREKTYLVSNLYLKFSELQMLEGDDQPFCDIYGATSSSVLMEYFSPEEILDSSEEDLIAFLAKKSRNRIKDISKTADLLKKAARDSYRLDKALYEPLNVSIASSFNCIETFKREIKVIDNAIEKEIKGLNPNAFIILQSIDGIGPVFAGGIIAEIGDITAFHSSDALAKYAGLTWKSNQSGDFDGEDTPMIKAGNRYLRYYLGEAANSMRKHNVEYGTYYRKKYNEVPKHQHKRALALTSRKFVRLVYGLLARNQLYSGVSLDTSIKDSN

SEQ ID NO: 143548 - protein, 347 aa, unidentified
MNFYTQQHKHYCGIDLHAKAMYVCILDQRGTKLVHKNLSTTPEAFLRVIAPYREDVVVWVECLFTWYWLADLCQKEGLAFVLGHALYMKAIHGGKAKNDKIDAHKIAVLLRGGMLPQAYVYPAEMRATRDLLRRRCHLVHKRAELLAHIQNTNSQYNLPEIGKKLAYKANREGVEDHFPDPSVRKTIEVDVSLIDHYDKLLREVELYITRSAKTHDGPTFSRLQSVPGIGQILALVMLYEIQDIARFPRVQDFVSYCRLVKCAKESNGKRLGTSGKKIGNVHLRWAFAEAAVLFLRQNQPGKEYFAQLEHKHGKAKALTVLAHKLGRAVYYMLTRKQAFDLNRFVTA

SEQ ID NO: 143549 - protein, 345 aa, unidentified
MQPMYYIGLDVHKRTISYCVKDASGKIHAESTIPATRVDLDRWMKTLPQPWTAAMEATMFTGWIYDHLQPHAASLKVAHPLMLRAIAAAKKKNDRIDAGKICDCLRCDFLPECYMAPTAIRERRRTLRYRNLLVRQMVQMKIKISALLMEAGVSYNKQRLHKAGYFRELLATNPDIDKGLRSLLRLCRETVVRLQKTESALVRSLESDSLLVDRVERLMTIPALGPITALTWALEVGDVQRFSSIKKAVSYCGLCGAEKSSANSMQRTPLSKQRNKHLQTTLIEAAKMAPRNSPELAMLYDKEKQKGNANRATLAVARKLVAYLVAVDRRQKEFLTVERENRTAA

SEQ ID NO: 143550 - protein, 339 aa, unidentified
MDKYAVSGIDVSAKELLVGLQREGSKNEAERKFANTPSGHQEVKRYLRRAAARVRVCLESTGLYGLDLALCLQADSRLEVMVANPRAVKDFAKALLKRSKSDPIDTWVLTEYAARMPFRRWQPPSPAALSLTALARRIHALTESATREKNRLHALSATDTSLRVLVTELKRSLQWIERSQARLTRAARKVIAAEPRLERRFRLLLSLPGVGESSALQLLGELALIPADAEVRQWVAYAGLDPCECSSGSSLRKRPRISKVGNRHLRRALYMPALTAAHHDPAFGSYYRHLQQRGKCKMVALVAVMRKLLHAAFGMFKHDALFDGTRVFGRPAAAIGAAA

SEQ ID NO: 143551 - protein, 395 aa, unidentified
MFIVGIDIAKRSHEAIIIAEDGQVVRKAFSFRNNCTGYNLLLEQVRRLTLVKSQIVFAMESTAHYWLALYARLLKDGYAVMVLNPIQSHSLRELYIRKAKTDARDSLIIADLVRFGRCKASNVPQDKILALRELCRSRAYLVDMAADLKRKLIALLDRIFPEYESLFDSVFSKASIAVLSKYSTPQKVKNANLRKLTDLLMESSNGHFGEWKAHQLKEAACSSFGIDDSGGVYSTLLGMFLEQILSLTAQADSLEKQISVFFQEFNNPLTSIPGVGTVLAATILSEIGDITRFSSAAKLLAYAGLDPSVKQSGEFKSNQNRMSKRGSPYLRRAIWLASTVAVHRDPMFQTYYEKKISEGLHYMNVIGHVSRKMTAVIFAVLRDGQPYQPILQSAG

SEQ ID NO: 143552 - protein, 329 aa, unidentified
MLEEIKIIKEDGVLEVAPIFVGIDVSKARLDVAVRPSGQSESASNDQAGIEALVKRLGEIQPTLIVLEATGGIERGLTRALTSAELPVVVVNPRQVRDFAKATGQLAKTDGIDAVVLARFAEAVRPALRPLPDELTLELRALIARRRQITEMIVAERNRLSGVSKAIRKRIDAHIRWLEAELERADNDLDQSIRQSPVWRENEDLLRSVPGIGPVISRTLLAELPELGELNRKQIAALVGIAPLNCDSGTLRGRRVIWGGRASVRAVLYMAALVASRRNAVIRAFYKRLRNAGKAPKVALVACMHKLLTILNSMIKHKTRWSENILQTT

SEQ ID NO: 143553 - protein, 356 aa, unidentified
MARFSLTDLKSFITNDPTHPFWMGIDVHKKSYAIALLRNDGEYFTWSASASPEKLLQQIVDLKIQLGGVCYESGPTGFTLARTLSKSGILVIVGAASKVPRSVTPGSKTDRLDCMKLAHFVSKGLIKPIAIPTEEEEYKRSVLRRRNQVVDNIRRCKQRIKSFFLYHGFEAPESIRLWRSDSFQALDSISLPKELKFTLDSHVRELKSLQEELSTLKKQLYDITHSSQNQKTMSVLTSVPGVGDVVAATFLLEIFDPKRFNRGEEIASYLGLAPSVHHSGEKTPRGHLMPVGQTRLRSLLVEAAWVWQTIDNYANKMYNKLLSRTGVPQKAITAVARKLAIILWRLSIEQRVYRSV

SEQ ID NO: 143554 - protein, 375 aa, unidentified
MNSIIYLGIDVHTTNFTFCALSVTLGEAPKVIAENQTEADGICALEMVEYLKNQYGEDTNVICGYEAGCIGYTLFHTLDSHGIECKILAPTTMPSTRGKKRIKTDKRDARVIAENLAYNTCSFVTVPEDGDMEIRDYIRMRDDHKLALKKIKQQILAFCTSHGYRCDSKHWTIAHIKWLRSFECTKLHREIINEYLITFDCLTEKLERFEARITELASGEKYQQDVKNLSCLLGIKTIGALSVLVETGDFTRFPTAQKYASFLGLVPGEHSSAEDVNHLGITKAGNTHLRKILIEASQGICKGTPGYKSKDLKARQQGCDAKVIAYADKANERMRRRYYKLISKGKKRNVAVTAIARELACFIWGIKTGNIEIAS

SEQ ID NO: 143555 - protein, 323 aa, unidentified
MKKFIGIDISKKTFDIYFEQEGKGSHVKLNQTEEDYKILLHLIDHEAICIMEATGNYHLKLAGYLHQADIKVVAENPLKIKRFSQMSLQRTKTDKADAKLIYEYGRLILSSTEPHFWQPDAAEVGHLKQYDTIRNQLIKQRTGLSNSEEALTALTNLNEDVTSVLNDMVTAVDKAIKQLDKGMLNLAKAHHAKTFELVTSVPGVGAKTATMMICLTDGFQKFTPAHVKQFISYIGISPRTFESGTSVKGRAHISKVGNSRLRSMLYMCSWTAKRSNQQCAALYERLHEKGKPEKVMKVAICHKLIRQIFGVIKTGVPFSNEFA

SEQ ID NO: 143556 - protein, 412 aa, unidentified
MQDILTCVMGLDVHRDIIVACLVKGAVDAEPEAETRTFSTLIPEMQKLRDWVIEAECRNIAMESTGIYWQPIYEMLESCFDGEISILVVKARHMKNVPGRKTDMKDAQWIATLLRAGLLKGSFIPDKTFRELRHLTRYRKSVVHDITAQKNRIDKFLQSSGFRFTAFLSDTFGASGRNIIRHLIERGSIDREALDKCLKTKTRNRIDEILVALNGSLSVHQRRFLNIVFLHLEDLEAHKHTIEDEITEEVLKHTDALNLLCSIPGIDVTAAAAIVAEIGTDMSAFPDSQHICSWAGLSPGNNESAGKRKSVHINKGNPYLKSMLCETAWIMASHRKLYLSGWYWKVKQRKGAKRATIALARKVLSIIYTMLKTGTPYSEECFEQRRQRCERKRANRMVNELQKLGYTVVAPD

SEQ ID NO: 143557 - protein, 351 aa, unidentified
MKTTTLVKTETQARIAQLKLGVDWHADHFRVVRMCDGQSPQPAQRFTPASFLPFVQKQLTLAEGVFVVYEAGPGGFHLHRQLTALGVTAFVVHPQKLDPQHKGVVTDKTDARELTLNLDRYLRGNLRAMSVVRVPSPAEEQRRALARQREQLRRERQRLAAQGRSLCLTQGLRLRGEWWKAPLTLPDWLETRLAVWRQLIRAVETLLEDLTKQVEALAPKQRPKGLGPLTLGLLIAELCDWSRFKNRKQIGSYTGLCGGVSSSGQSHCDLSITKAGNARVRWSLIELAWRMVLYQPQSKAVQRWRHLLLNPKAATRQKKRALVALARQLAVDIWRWQTGKVTPEQLGWVMV

SEQ ID NO: 143558 - protein, 339 aa, unidentified
MEKSKEIQPHAWILGIDVSKQSIDACLIRTSDGQLFESKFHNNLSGFRHLKRWCKELKCECDSTTLCCLEHTGMYTRLLVHYLIGREVHVWLESSLQIKRSQGLVRGKSDKIDAQRIARYANVHQNKAKIMELGVLTLEKLKDLQANRKRLMKALQSLRTSVQELKSFDPSIGKVLEQTNREAIRGLEKSLDKVDEQILAFINEDHDLKQKYDLMLTVKGVGKVLAAMLLVYTHGFNRLTDSRKLACYSGVAPFVYESGTSIRGKTGVSKFANNDLKQVLHMAAISSVQHNSELHQYYQRKVAQGKNKMSVINAVRNKLLHRIVAVIKRGTPYELKLKS

SEQ ID NO: 143559 - protein, 381 aa, unidentified
MTQVTLNVNNSKHEERLFMAFDLSHKTWHIAFTDGTHNRYCTVKDKNLAALDEAIKAAKKKFKLSEDCPVFSCYEAGRDGFWLDRYLRKKGINNLVVDSSSIETSRRHRRVKTDKVDAKKLLSMLVRHYNGERKHWSIVNVPSEEAEDLRRIQREIDRLIKEKGQHSARMRSLLNLDGIVVDTIGGKDWEAQLEQLRDRENKPLRPFKKGELLRENERLELVKKQINALEKEKQRLLEEELDTYPELKKVKQLMLLKGIGKASAWLYILEFFGWRDFKNRKEVGALSGLTPTPFSSGTDNKEQGISKAGNKRIRFMTVEIAWLWVRYQPQSELTQWYKERFAQGSGRMKRIGIVALARKLLISLWRYLETGEPPKGAILSF

SEQ ID NO: 143560 - protein, 412 aa, unidentified
MSLPECDFYVGIDWAAETHAVCVQDAAGKITAQFTIEHTADGFATLLARLGRLASDPMQVSVALERPDGRLVDALLEAGNPVVPVSPNAIKTWRDGEVLSGAKSDAGDAAVIAEYLRLRSHRLRPATPFTPATRALRTVVRTRDDIVAMRTATANQLTALLDAHWPGATKVFADIESPIALEFLTRYPTAKHAAGLGEKRMAAFCVKHGYSGRRSAAELLTRLRAAPAGTTDPDLVEAVRDAVLALVAVLRTLGETRKDLDRSVTAHLGERPDAAIFTSLPRSGQINAAQVLAEWGDSRQAYDSPDAVAALAGLTPVTKASGKYHAVHFRWACNKRFRKAMTTFADNSRHQSPWAAEVYRRAIQRGHDHPHAVRVLARAWVRVIYRCWLDREPYDPARHGNANKINSGQLAA

SEQ ID NO: 143561 - protein, 350 aa, unidentified
MQIIGVDLHTRQQTVAMLNVETGEVVEKTLQHEGESVREFYSTLPGPTRVGIEATGSMQWFLELMEELGIDCQVGHPAKIRAAEPRKQKHDRRDAALVLQLLIENRFPSIWMPSSEQRDVRALILHRHQWVRIRTRVQNALQAIALSHGLRRGSSLWSEAGQHAIASLSLTRYAAERRTALQSLYRHLEEQIDDLDRKVEELAWQRPQARRLMTHPGVGPITALATETFLGEPKRFVDGKAVASYVGLIPSEHSSGGRQRLGRLSKQGNPLLRFLWCEAVGHAVRKDAELQRFYQHKLVQKGLGKAKVAAARKLGIRLWILLRDQIDYQEFCRRGQLRQKHGGAHAGMPA

SEQ ID NO: 143562 - protein, 347 aa, unidentified
MRFYTKQHKAYCGIDLHARSMYVCILSQDGEILLHRNMKTSPETLLKAIAPYREDLVVAVECIFTWYWLADLCAQEQIPFVLGHALYMKAIHGGKAKNDKIDSQKIAVLLRGGMLPQAYVYPAEMRATRDLLRRRMHLTRKRAEMLAHIQNTNSQYNLPEIGKKLAYKANRAGVAERFPDPAVQKSIEVDLGLIGYYDQVLNDLELTLVNTAKQHNAQTLYRLQSVPGIGKILALVLLYEIHDIVRFPRVQDFVSYCRLVKCTKESAGKRYGTSGAKIGNAYLKWAFSEAAVLFLRNNPAGQKYVARLEKKHGKGKALTILAHKLARAVYYMLRRDTAFDLQKFLNG

SEQ ID NO: 143563 - protein, 358 aa, unidentified
MADKVTVAAVVGGVDTHKDLHVAAVVDQNNKVLGTQYFATTRQGYRLMLAWMTSFGALKRIGVECTGTYGSGLLRYLQNAGLEVLEVTAPDRMERRKRGKSDTIDAECAAHAAFSGIRTVTPKTRNGMIESLRVLKTCRKTAISARRVALQIIHSNIISAPDDLREQLRNMTRMQLIRTLGSWRPDASEYRNVTNVYRISLKSLARRCLELHDEIADLDVMIAAIVDELAPELIKRNAIGYESASQLLITAVDNPQRLRSESGFAALCGVSPVPVSSGKMNRYRLNRGGDRAANSALHIIAIGRLRTDDKTKEYVARRVAEGHTKMEAIRCLKRYISREVYTLLRNQNRQVNSIPIMA

SEQ ID NO: 143564 - protein, 486 aa, unidentified
MANRKQSTFERLSSDRLNRQQRRELARKLTAENPGLEIVNRNVAGIDVGNESHYVAVAPGCDPQPVREFGSWTADLERMADWLTACGVEMVVMQSTGVYWMALYDSLEARKFKVCLTNARHTRNLPGRKSDVQESQWLLKLHTYGLLRDSFHPPEEIRALRSLWRLRDRHVKEAGRAIQHMQKTMTMMNVQLSNAISDISGATGQAIIRAILNGERDPWKLAKLRDRRIKATEEEIARSLEGNWRADNLFELKQAVDAYDFIQNQIAECDQRLQTLLAALPERDVRGTEVQAEAPLRESVRRKQKRKKSRADGNAPRFDLQAELKRVCGVNLTSIDGIDIMTAQTIVAELGTDYSRWKNESHFTSWLGLTPSRDISGGKIVKQESRKIKSPVATMLRMAASSLIRSESYLGARYRSLRTRLGAGKAIKAMARYLACLVYRMFTHGQDWVDRGTKEFENKRTQRELLSLQRKAANLGYRIVAEPASA

SEQ ID NO: 143565 - protein, 410 aa, unidentified
MEVVHARCAGLDISKKDAKVCVRIAGSGRRKTTETVTTWGSMTNQVLALREHLVAARVTCAVMEATGDYWKPFYYLLEDAGFELMLVNARHVKNLPGRKSDVSDATWLAQLGAHGLVRGSFVPPEPVRQLRELTRARTAITRERGREVQRLEKLLEDAGIKLSSVASDITGVSGRAMLRAMVEGQRDPVVLADLARRRLRSKIPALTEALTGRFTEHHAFLAGVHLDLIDRHTAAIEEITARIEVVIEPFQAFRELIRTIPGIDTLTADVVIAETGADMSRFPTAGHLASWAGTCPGSNESAGRIKSTTTRPGNPYLQGALGAAAMTCARTDTYLGARYRRIAGRRGPQKANVAIQHKMLITIWHMGTTGTLYDDPGADYFTRAHPERAKNRAIHQLEAMGYRVTLDQAS

SEQ ID NO: 143566 - protein, 376 aa, unidentified
MGTPSAQTLDDVGVREIFQELEEVPLMTMVGGLDVHRAQITFDYVDDDGLVHWGQIRPATRKTLRGWLAEHCPDGDAEFALEGCTGWRYVSEELAGAGVGVHLGDPAEIAVLRGPKKRAKTDRADARLLRTLLLQGRFPESWIAPAHVLEIRTLGRLYCTLMDERRAWQQRIHAQLFHQGCPPVRALLSVTGRAALAGAELSAVGGQYVDTALGRIDELSTEIEPLRAQLVNFARHQTGCQALPRHYGIGWLCAAIIWAEIGDARRFSSSDQLVRFAGLDVTVYSSDGKRSPGHLSRQGSPELRWAAFEAAKCAARRGSPDYGYYRKLAAKRDGHNGKNPTLAVERKIVRRCHHTLRELGDAAVALPVAEPQEVAA

SEQ ID NO: 143567 - protein, 366 aa, unidentified
MEKVHFTRLAERLSNLSEVTMTEIKYCVGVDIASSTFMASVGEMPWKVILKPEMFENTEDGYQALLVWFAQHHLSVSETVVCMEATGVYSEGLAYFLYTQGYRVAVQSPLEVKRTFKPYGPKSDAVDSLQIAEYACRHTDKLSFWKPRSEILEQVKALLAVREQFVSQNTAHKNALQAIRRKVVRTPFAEQAYLQLIEQVKQQIKAIDTEVRRLLESDPTFKEMLLLLLSVPGVGLLLAAHFILLVQFSLEYKVLTSFLGISPNEHSSGTSVFKHATSRHFGPSAIRKLLYLAACSVCAHRPQFGKYLARKTKEGKPARLVLNNVENKLVRIMCAVLKSKTAFIENYYSVQPLVFQKTLTVSSSSQ

SEQ ID NO: 143568 - protein, 465 aa, unidentified
MRTDKKLWRNGKARKELARRLQSENPGLEVVHPQAAGIDIGNGAHYVAVRPERDPQPVRRFECFTADLHRLANWLQSCGVRTVALQSTGVYWIPLYDILEERGFEVYLVNARHTKNLPGRKSDVQESQWLLKLHTYGLLSNSFQPTSKIRILRTYWRQRLQHVTGAATCVQRIQKALTQMNIQLANVISDLSGVTGQLIVRAIVAGERDPRKLAELSHPRIQASRGEIAKSLEGNWRQELIFVLQQEIEMYDTYQRRVAECDQELQKHLSAFADTVSPPVQEELPPKKNKKQNKNNPHFHLAEELQRISGVDLTRIDGVDVIVAQTVISEVGLDMSRWKTAAHFASWLGLCPDNRISGDKVLARGTRHVLNRAATALRLGASTLLRSQTYLGAHYRRLRSRLGAPKAITAMAHRLARLVYRMLKYGQQYVDKGAEYYEKRNHQQQIEFVRKKAAQLGLNVTPAHA

SEQ ID NO: 143569 - protein, 344 aa, unidentified
MKTNYIGADVDCMMTELAVERNGVIVARDRVPTDIRSLSGFLNSITGKKIMVIEEGTMAGWLYRNLKSKVDEFIVCDPRRNKLISCDGDKDDTIDAGDLAILLRGGYLRKVYHTDDEDRLALKEVVALYHDRVRESVRQMNKLRDCCRSHGIKIPAGTVKHLPVRAQWLKQIGPSVLARQLSIRWIGFDAVATQVKMARQEMNRRSKSYPIIGFWKDLPGVGPIRAITLFAYLDAPWRFGGPKKLWKYCGIGLKRFASGSDKEGRPKAGNLRLFRGVNRRLKDAIMGAALSAICQSSNPFADNYRRMVRNGVTPSNARHTVARKMLSVMWGMWKTSCRYDESLV

SEQ ID NO: 143570 - protein, 356 aa, unidentified
MQSKAISFKGQKVFIGIDVHKKTWSVTTLLEVGMPKTHSQKASAKELFDFLNRHYPDGEYHAVYEAGFSGFSTYYALKEYGIECSVVNAADVPTTQYESVMKSDPIDSDKMARALRAGMIKGIYIRERDNLDDRGLVRLRKSIQQDLTRYKNRVKHMLHANGVEIPEQFDRSCNWSKAFINWLREDVVLLSSTRATLDMLLDQVETVRQNLLNITKKVRSLRNKKEYADMYDALTSIPGIGPICAITLLTEIYDVKRFKNERQFASYLGLVPTCHCSGEKASFGEMTFRGNKHLGPLLIEASWVAIQWDDALSVAFTNYRRKGLMPQESIIRVARKLSNIIFSMLKTGNHYAPANA

SEQ ID NO: 143571 - protein, 407 aa, unidentified
MPLFVGIDVSSKNLEACLMDDAGETLATRTVTNNLPGATELKAVILQHVKKDDSIQIAMEATSVYSWHPAMFFHEDPELKQRQTKVFTLNPKLVKNFKRAYAEMDKTDPKDAWVIADRLRFGRLPKSVIQSEQYLALQRLTRMRYHLVHSLTREQQVFLNHLFFKFSAFNLEVDTSAFGHAITELLLEAYSLDEIAQMPLEDLAKYLQTKGRGRFSDPEDVAASIQKAARDSYRLSKCVEDSIDLILGSSIEIIRHLKRQIKDLDKAIARVLDGLPNTLETIPGLGPVSCAGILAEIGDIERFENQAAIAKFAGLFWPRHQSGDYEADDKMLARTGNRYLRYYLVEAANLVRRHEPEYRAFYQKKYREVQKHSHKRALVLTARKLVRLIDALLRNDQIYAPKKKVTR

SEQ ID NO: 143572 - protein, 391 aa, unidentified
MIYIGIDVAKDKHDCFITNSDSEVLFKAFTIANNLDGFNDLYQKIESVMDDVTKVKVGLEATGHYSYNLLGYLIDKGLPTYVINPLHTNLYRKSLSLRQTKTDKVDARTIASMLMSDVNLKSYSDTSYHNEELKSLTRYRFDKVKERAQLKTSVSRLVCILFPELEKLVPTLHMASAYALLSEFPSAKHVATAHLTRLTNLLSESSKGRYGKDTAITFRDAARASIGSNMPAKSLELKHTIKLIQELDSEIDEIENEIKIIMDEINSPILSIPGINYRMGAMIIAEIGDFNRFDSPDKILAYAGFSPSTYQSGQLDGAYAHMEKRGSRYLRYALYNATKYVFHWDPTFAAYLAKKRAEGKHYNVAISHAVKKLVRVIYHLEKTKQQYIKTA

SEQ ID NO: 143573 - protein, 353 aa, unidentified
MLAELVDHVIGIDPDRDWITAAVVDANTTGVIATAKFAANNDGYDEAVEWADIHTAAGDRGWVVEGSGSYGRGLTAALSRAGEWVIEFDRPHQRPTKDGAKTDELDAVRAAREALGRRQLHTPRTHDGHREALRVHTVTRAGVVRARTAAINELKALVLTAPDELRSDLRGLTTPALIRHCAAFRTTPKRPIAEQCVRNTMRVVARRVQHFNDEIEVHDAAMKQLVDEAAPQLVAEPGVGYVTAAMFIIAWSHPGRCRSEAAYARLAGVAPLPANSGQSQDRHRLNRYGDRKLNRACHMVALVRMHHHEPTKAYIARRRAEGKTDREIRRCLKRYIARNVWRLLEHQSPKITP

SEQ ID NO: 143574 - protein, 361 aa, unidentified
MKKPTHHLIAEAPRKRGQVELTIGIDLGDVWSHYCTLNQQGEVIDRGRFRTTAKAIDKWFTDVPHARVAMEAGVHSIWISEQLEQLGHEVIVANVRELRAISHSDRKSDDVDAEKLARYARLDPEILRPISHRTVEQQEALTLIRARELLVRLRTAAINAVRGLTKACGHRMPASSTKCFAQRGQAAMPPGLKLALGPVLSQIAEMTLKIKQYDREIQRLTQTEYAETQSMMTIHGVGHITALTFVLTLGDKTRFGRSRDVGCYLGLRPKRSQSGERDPQLGITKAGNAYLRSLLIECANHILRPHGRDSALRQWGLHLAARGGKQAKNKSVVAVARKLAVLLHHLWNTQEPYIPFYQQAA

SEQ ID NO: 143575 - protein, 354 aa, unidentified
MAEALKNSIAFVGIDIGKNSFHVVGLDGRGAIVLRQKWSRGQVEARFANMPACLIGMEACVGAHHLSRGLQKLGHDARLMPARYVRPYSKGQKNDFRDAEAIAEAVQRPTMKFVATKTADQLDLQAMHRVRERLVSQRTGIINQIRAFLLERGVAVRQGLRFLRSELPGILAGPSDALSPRMVHIIEDLAGDWHRLDERVEGLSKEIEAIARRDSSCERLMSVPGIGPIISSAMVAAIGAGDVFTKGRDFAAWLGLVPKQISTGDRTILGKISKRGNRYLRVLFVQAAWVVLIKPKSWERHGLKSWIEAAKKRLHRNVLAIALANKLARIAWSVLAHGRNFEATKFGEAAAQST

SEQ ID NO: 143576 - protein, 360 aa, unidentified
MLYLGIDQHRKQLTVSLRDEAGDVVLRRQVSTRWERVRAFFDELRKRAEAEGGFVAIVEVCGFNDWLLKMLREYGCREIVLVQVEKRSKKKTDRRDAYQLSGLLWVNRQRLLAGQKVEGVRRVVPPTDRDAEDRQLTALRQRLGQLRARTINKVKHLLRKHNLEQEQPAKGVDTKRTRKWLAALSLGPIDRLEMDLFLQQWDVFDKQIEKLDAEICPRQAQSPAAAVIATVPGVAAYGSLALASRIGAIERFPRPASLANYWGITPGCRNSGEATDRLGSITKQGSAMARFILGQVVLHVLRRDPSMKAWYGRIKKRRGAKIARVAAMRRLATIIWHMLKNNEPYLVGGPPQRKLECQTA

SEQ ID NO: 143577 - protein, 433 aa, unidentified
MEVVFTEDILEVSCGLDVHKEMVVACIISKQEPSVKTKNPLLIEIKTFKTLPDDLAHLKRWIEDHGCHDVAMESTGVYWCPIYDVLETAFGGNINILVVNARHMHNTPGKKSDIKDAQWISKLLRAGLLEGSFIPEAAIRDLRDLTRYRKHITEDITTQKNRIEKFLQRKGFKISTFLSDVFGVSGRNLLSILTGKGEITPDDIRNELRGTAKRKTEEMLYALNGRLDLNSRQYLSRMLEMLDSQLSHLKDIEADIDSEASAFNPQIELLRTVPGIGETAAKAIIGEIGVDLSKFPTVAQFCSWAGLAPGENESAGKKKSTRVNFGDPYIKSIMCECAWGMIRTKDSYLSKFYWKLRVRSGSQKAVVAVARKMFTVIFFMLKNNEVYSEAHYEEAKKKYEESRKRKLFAEASKLGFILTPAGLPDVKSEELVG

SEQ ID NO: 143578 - protein, 345 aa, unidentified
MEPMYYIGLDVHKRMISYCVKESSGRIHSEGSIPATRLDLDGWLETLPQPWSAAMEATLFSGWIYDYLKPHAAALKVAHPLMLRAIAAAKKKNDRIDARKICDCLRCDFLPECYMASTEIRERRRTLRYRNLLVRQMVQMKNKISVLLMAAGVSYNKQKLHQAGYFRELLATNPDIDEGLCSLLRVCRETVVRLQRTESALVRSLERDSLLMERVERLMTIPAVGPITALTWALEIGEVQRFSSIKKAISYCGLCGAEKSSGSTIQRTPLSKQRNKHLQTILIEAAKMAPRISSDLAALYDREKQKGNANRATLAVARKLVAYLVAVDRREKGFLIVKNENRTAA

SEQ ID NO: 143579 - protein, 358 aa, unidentified
MKKIVIGIDISKEKIDATAIDVRDSQLGVVKLDYQVYENRPMGYRRMLVWARHLIKGIGLDDVLFCCETTGGYDRCLCDYIYAKGLDIWREGALQIKRSMGVRKGKDDKADSLMIAEYAMRHIDKAVIYETPDEKVRELKALFLYRHKLVQERTEKKVRASELKATAAKSGSMRFIVRDAMKGVRALDKSIRDCEKQILALIDSDEDLKRNYGHIDSIPGISIVNATAFIAYSNNFRSITTANKIASYWGCASFREQSGTSVDKKAYVKCFSSSLLKATLTQAAECSIKEHGIYNDYYLRLKAEGKPYGIIVNNVRNKLIHLVFSLITNDMDYEKNHEFLRKKRKSEQGMPDQLEIIN

SEQ ID NO: 143580 - protein, 355 aa, unidentified
MTSTKYIGMDVHKESISIAVRNSAGKVVMECVIETKASMILQFIDGLRGDLQVTFEEGTSAAWLYDLLKPHVTKLVVCDPRKNKSMREGNQNDKIDARRLAELLGLDHLTPVYHGEHGLRTLKELVRSYLTITKDLARVMSRVKAIYRSWAIPCSGKQVYAARHRAEWLGKINEPGVRRRAECYYQQLDALRVLRQGVRRDLLAESKKQKAWKRLCEIPSIGPIRAAVLLGILQTPHRFRTKRPLWNYGGLAIEMHSSADHRRVHGQLERSTKNVLVRGLNRNCNHDLKNLFKGAAAVASSKPGPFQEFYTALLAKGMRPEMARLTLARKIATIVLMVWKRGVNFDAQHLKPQTA

SEQ ID NO: 143581 - protein, 342 aa, unidentified
MNTLYVGIDVSSKSNVIYLMLPNGDKHSNFSVANSHEGSTQLVKRIHSALTSHSLDTVLIGLEATSVYGDNLVYFLREDATLAPFNKKIHVLNPKQVKKFHDTYNDLPKNDYVDSFVIADCLRFGRINKEVYMGDYRYKALQNLTRARFFAVQNLVKEKQRFMNVLFKKYSTMTQEKVFSDTFSTTALAVYDEFESAEALANMDLHELTDFIMKKGKNRFPDPDAVAKAIQKAARSSYRLPKTVNDSVNQVLSISITSMKALESQIKEFDKAIKAQMELLPNVLISIPGIGPVYSAGIMAEIGDINRFNSQAALAKYAGLAWKQHQSGGFEAEVTRLIPSGN

SEQ ID NO: 143582 - protein, 339 aa, unidentified
MKLYSGIDLHSTNSYLAIIDETGKRVFKEKLPNDIATITEKLSFYSGTLEGIVVESTYNWYWLVDGLMAEGFTVHLANPSAIQKYTGLKHADDKHDAFWLAEMLRLDILPTGYIYPKEERPIRDLLRKRSHLVRLRTSLLISLQNIISRNCGGKLKSSDIQCLSEDRVHPLLSGNDDLALAGQVSKNSIDYLTRQIRVIESFIEKRLKLTGGYKNLVTIPGIGRILGLTIMLETGPVERFEKVGNYASYCRAVASKWTSNGKAKGKGNKKNGNKYLSWAFSEAAELARRYDEQARTYYNRKLRKSNFMIAHSALAHKLARAAYFIMRDEVTFLPEKIFG

SEQ ID NO: 143583 - protein, 356 aa, unidentified
MPELWEGTDAGKAAHRCTVIDTDGTKVLSRRVPNDEPEILELIGDVLALAEDGSVTWAVDLNAGGGALLIALLTGHRQRLLYIPGRTVHHASRGYRGDGKTDAKDAYVIADQARMRRDLPPLQEWDEIAVDLKILTGRRYDLAADRTRAINRMRAQLLEHFPAVERTFDYAASKSALVLLTGYQTPASLRRVGPSRLTTWLKNRKVRGAQAIADAAVAAAQSQHTAVAGESTAAAVVNALARAVLALDDEIAGIDTQIAVRFREHRDADVILSMPGMGPLLGAEFIARTGGDVDAFGSAGRLAGVAGLAPVPRDSGRISGNRHRPHRYHRRLLRVFYLSAQIAARFCPTSKTFYDR

SEQ ID NO: 143584 - protein, 349 aa, unidentified
MLIIGCDFHTRYQQIAMAKEETGELLLERRLDHRSGEAHAFYRSLQAPVRVGIEATGPIHWFERLLAELGHELWIGDSARIRASDVRKQKTDQRDAALILDLLLAKRFPKIWVPTPTERDFRQLLVHRHKLVCLRTTLGNQLHALAMSQGLCRKKKLFTRKGRVELAGLTLGLWASRRRAELLKLLDQLESQIAELDHAVLEEAERREDAVLLMTHPGVGSVTSLAFVLTIGSVTRFCCSRKLVSYLGLNPSEESSGGRRRTGAISKQGNTMLRWLLVEAAQKAAQCDPALRQDYQRLKFRRGHAVAKVAIARKLAVRMYWILRSGAGYAPLVRMQGSPRGTLVHASTP

SEQ ID NO: 143585 - protein, 392 aa, unidentified
MNHNLKEFNYLVQEIKKAEKNLSSKPAIFMESTGVYHIALFHYLKKFFNDVFIINPLITNSNKNSSIRKVKNDKKDAISIAHIGKFQNIKYSTDIDLDYYLLKSLVREYYKLRDDCSQYKKRLSADLRVIFPNYNTIFRDANSKTSLAILNKYPSPLLIVKDPKDKIIDLLRDNARRSNEWCKNIYLKLISVAKEAIAIGVGLDKLSIKIRANISLINAINLEIKSLLESINNLIDSDELNSNIKENISLLKTIPGIGILTAITLVAEIGDFRRFKTSKHLVAFLGIDPSINESGNFKGSRNSLSKRGSSIGRRAIYTAALSSIGIKRNGEANNKIILEYYKDKLKTKKPKVALGEIMHKMVRYIFSVMKNKRPYEERHPKIHCRMYLNHTA

SEQ ID NO: 143586 - protein, 312 aa, unidentified
MKTPKPKSSPAYAGVDIGKASLDLSLAGQPPCRHANNAALIKVLKKLPVPVQVICEPSGGYERDLLQALWAGGLAVSLVHAARVRAFARAQGLLAKTDPIDALVLREFGELLQPGTLAAPSPRRERLAALVQRREQLVNLLSTEVQRLAQTHDGVVRKLGCHLLKTLERQVEQLAEMIAAQIAADATLKAQSERLQQVKSIGPVTASTLLAELPELGTLSRNESGALAGVAPYNRDSGLHCGRRTIRGGRVRVRRVLYMAAVVAARFNPIHKAFYERLLLVGKPKKLALTAVMRKLVVLLNHLLKNPHFKLA

SEQ ID NO: 143587 - protein, 324 aa, unidentified
MQGKDTPEAKAEVQVYVGLDVSKAAIDVYLHPLGHVFRIANTNQGLRQLKSRLACLKVVLVTIEATGKFHRQAHRTLHAAGYPVAVVNPLRSRLFAEAIGKLAKTDPIDARTLAVMGESLKLAASPPPAALIAELQELVLARRAAVTEKTALENRLGAAQSRFLIAGIKKLLTAVERHVAHLDAEIDRLIADDPALARRQEILTSIPGIGRVVASTLVACLAELGMLSSKAIAMLAGLAPVACDSGESKGRRRIRGGREHVRSPLYLAAVSAVRCNPDLKAFYRRLRDEKAKPAKQALTAVARKLVTLANTLVHDDRLWVEKPA

SEQ ID NO: 143588 - protein, 302 aa, unidentified
MPARRISSRCASETKLGQVRVRAAVGQVDGLLEWAARWPERRWAIEGATGLGHLLAQQLLAAGERVLDVQPKLAARVRLLNTGQVNKNDPNDARSVAIAALRSPDVRVVRAEDETAVLKLWARRHRDLSRARNRIACRLHAVLCELVPGGFGKEITAAQAIRAVDAITPLGATAVARLELARDLIEEMRAVDDQRRTTKARLTRLVAASNSSVPTIYGVGPIIAATVLGYVGDVRRFPTRDRFAAYNGTAPIDVSSGNNNVQRLSRRGNRQLNHALHMAALSQIRYPDTVGRAYYDRKVAEA

SEQ ID NO: 143589 - protein, 335 aa, unidentified
MMKKRYFMGMDVAKISFDFSLLSKEGALLWRGHWDNEPQAIEGFLAQLRTRGWKFSQLHVGLESSGVYGNKLLAALHEAGLAVSVLNPAQVKFFAVSVLRRTKNDRVDAGIIARFCLERKPLSTRPLRRVEEQLKLLVHERESRVAEQTRERNRAKKDPFQIALPCLICRQRLHRLKQLQNEIRQLDCAINELIANDEYLKTQTRLLCSIPGVAQTTAAKLLSELAGKEFHSARQLAAYAGLTPSEFRSGTSAYGKTHLCKIGNAFLRKALYLPAAVAKKWCLPLKPWITLLEQRKLAKRAIRGAIMRKLLHIAFGVLKHQKPFDPCLVFLPKTI

SEQ ID NO: 143590 - protein, 342 aa, unidentified
MKDTMIGVDLAKSVFQLHGASMAGHLKFRKKVTRVQFRNFMAKHEPAVVVMEACGSASYWAREMVKLGHEVRLIAPQYVRPFVKRQKNNAADAEAIVVAAQRPEMRFVEPKSEDQQACAVLFRVRERLLDQHTELVNALRSVLYEYGHVFPKGIAHLRRIEVVLADPAIDLPALVRDECHDLLEQISEQTVRIEAKTAKARGLAGTNDTARRLQTLPGVGPQTALAISGFAPPMDSFKRGRDFAAWLDLVPRQYTSGGKERLGRISKAGQTDIRYLLVIGAMSRLTVLARKSIQEGSRLARMLHRKPLMLVAIALANKMARAIWAMLTKKEDYRDPARAVFA

SEQ ID NO: 143591 - protein, 343 aa, unidentified
MTVYCAVDFHARQQTISYCDTSDGEIHRHELHHQRDDVRGFYTQFKGEVIVGVEASGYSAWFEEMLEELQHTVWLGNPAEIRRKAPRRQKNDRRDADLILDLMLKGDFPHLHRFSAESRLVLRQLRYRHKLVKVRTIAKNSLHALSINAGLPLKRRLLTQRGIERLQALALPPVLAQQRTEWLQLVALLNQRIATVEAELAQVATGDQAVALLRTHPGIGLLTALALRYTLMPVARFSTTRKVTAYVGFDCMEDSSAGIRRLGSISKAGSRLLRFLLNEAGQMACRQDPDLKRFYHRLAYRRDRPKAKVAVARKLLVRSFIMLRDQIDYAEFLRRGVAARSAR

SEQ ID NO: 143592 - protein, 357 aa, unidentified
MNNHTVQDFVVKGKEVFVGLEDSKTTWKLAVRCEKMLVHQSAMEAKYPVLKQYFANRLPDCTIHLIYEAGFKGFNLFDRLSEDGIDCVVIPPHMVTEPKVNKVKTDKRDARRLASVLENHDFKDSCHVPDKERREDRQITRTLIAVQKDIIRTRTRIRQFLQFHGIAVAIEKNQWGRDDFRALKNLVLSEPLRISLSVLLTELEQLWEHQLTLRRALRELCRKERYKRAYEIARTLPGIGWYTAIRFVLELGEDLSRFTSGKKIAGFLGLTPGEYSTGATERKGHITGMGPGFVRATLIENSWAAIRRDPVLLGKFHRVWKTTGSKKKAIVAVARMLIVRFRACIISDTPYAIGIVH

SEQ ID NO: 143593 - protein, 360 aa, unidentified
MSESYAGRQYVGIDLHRRRTVVVRMSAEGQRLGSMERIPSTPEALRSVMEAAGPAPMVVLEATYGWYWAVETLQGLGAEVHLAHPLGVKGFSYRRVKNDERDAADLADLLRMGRLPEANIAAEPVRALRELVRYRAKLSRWRTSAKSSIHAVLAKRGVVVPMSDLFGAAGNELLDGLVLEPAYAARVSSLRDLLRMLETEITGFDYVIAELLAGHRGYRTIMGISGVGPVFAAVFVAEIGEVGRFAGPEKLASWAGLTPRHRESDTKVHRGRITKQGSTLVRWAAVEAVQRSSEPRITQVRTRISDRRGRPGQPGSGRNIAKVAAARTLLSLVYYGLRDGHIRALDNPPVLDSATALQPA

SEQ ID NO: 143594 - protein, 346 aa, unidentified
MNTTTIGFDIAKTVFQVHGMDERGRPTVRRQIRRADLMKFFANLPPCLIGMEACASAHFWARKLSSLGHTVKLIAPQFVKPYVKTNKNDARDAEAICEAVSRPSMRFVLAKTVEQQALIALHRVRQGFVQARTGQANQLRGLLAEFGIVLPKGMSHLHGRTPGILEDAENGLPGVARELFARLFVNLRELGAHITELERQIRAAHRDDDASQRLEAIPGIGPLSASALVASIGDAKAFKNGRQLAAWMGLVPRQNSSGGTTRLLGISKRGDTYLRTLLIHGARSVLRQRRCAVKSSEDRLVRLAERRHPNVAAVALANKNARIVWALLAHDRQYKPDFHRASLAVA

SEQ ID NO: 143595 - protein, 347 aa, unidentified
MNYYAGIDVSLECSSVCIVDGAGKIVREGKAETTPEAVMAWLASFGHPIERIGLEAGPLSQWLYRGMSETGLAIELLETRHVRNAFSAMPVKSDRNDARGIAQLMRLGWFRPVHCKSMEAQEVRAILGARKLLQSKLLDVENSLRGALRNFGLKVGRTTARNFAGRIRELVAGQPSLEVIGAALLSVRDALLRELNGFEKRVRTMARTDARTRLLMSTPAVGPIVALTYASAIDDPARFKSSKQVGPHFGLTPKRHQSGETDRSGRISKSGDAAVREALYQAAHVMLTHPIRGCTALKSWAMRIARRAGMKKAKVALARKLAVIMHRMLADNVTFNPAPKALSATPA

SEQ ID NO: 143596 - protein, 340 aa, unidentified
MKLSRVGVDLAKNVFQLHGVDRSETVVWRRRLRREDWIEVLRERAEPGCEIAMEACSGAHHWARLLQGLGYQVKLIAPQFVKPYVKSNKNDAADAEAICEAMGRLGMRFVPVKTVEQQDLQALHRVRASLVEQRGAKANQIRGLVAEYGLVAPRELLHLRRALPHWLEEQSNGLTARFRALLQGLRDELIALDERIAELDREIERIARSEPAAKRLMQLRGVGPVIATAMLATVGDARQFRNGRQMSASLGLTPKQHSSGGKERLLGISKRGDAYLRSLLIHGARAVIRTARAKDDRLSQWVIRLADRRHPNVAAAALANKTTRIAWAMLSRGTNYQPAI

SEQ ID NO: 143597 - protein, 425 aa, unidentified
MKINEIQRKEKVENVAVLGCDVSSERIDCYSEVSGMSVEIQIKNDTVDIEKNLDEFGRFVHDQGYENVLVVAEPSGPYGELMFRIALQKGMNTAWVSGEAVKKTREIENNSHSKTDPIDCRAIYSLGFRGKTLAHRQFGAPYEALREWNGIYEVADKGVVRARNETVDQLKRMFPDYSFKKDFLFGNSGRALVELYGANPYNIVSVGKSRFFTRMKNHVKGIRRDTLQRLYNQAIASAATAKRQTTADILETRLRQHYEDFLVHHKRKMDARKAMCELYEKLRQFDAKLPAEIPRVVTTFYLARIVAETGPLSDFQTVKQLFKYAGLDLQVRQSGKFKGKTKLSKRGRTALRKVLTFAVLPLVKKNGLYGKMYHSIKDKREMPGAKAMTIIAKKFLKMIFGIYRSGAEYDASRVFECHSQHKKAA

SEQ ID NO: 143598 - protein, 338 aa, unidentified
MPLYGGIDLHANNSVVVLLDEQDQVIYQRRLSNHLPTILEQLAPYHSDIKGVVVESTYNWYWLVDGLMEADYRVHLANPAAMQQYSGLKYTDDHSDARWLAQVLRLGVLPAGYIYPKAARAVRDVLRKRAHLVRQHTANVLSVQNILARNTGSRFSAKRIHEFTKADLEGLLPEANQVLAVTSSLALLDCLSQQIKTLEKAVTKSLKHTPAYEQLLTVDGIGTILAQTIGLETGDIGRFPTVGNYASYCRCVKSTKISNGKRKGQGNVKNGNPYLEWAYMEAAQFAIRFNPTVQRFYQRKHAKSHLMVARKAVAHKRSRACYDIMRDLVPFAVHKAFG

SEQ ID NO: 143599 - protein, 351 aa, unidentified
MSADRSHLGPDDIAVGLDLGSQGHQAVILASDGRRLTSFRVDHSRAGLAELVRRATPERWHARRAVYAFEATGHLWEAVAYVLREQGLPYVLVNPLATFRVREARQMGRDKRDVTDADQIAHLLRTGMTTRTQLEPEPYLMLRRAWGAFLRLRKERARLKTLVSHQLYGAFPELLGVWSDIFAPGALAVLRVGLTPFEIAALSLCDFASQVADARRGRRVWRFKVAQAHAHAQSTVALPHGAVPMMREIRRVIARVDLLSDQMTDVETEIRTLLPTLDEAAYLMTMPGVGWTTVAGVIAEIGTIDKYRHGRQLVKLAGLNPSRHESGAMRGRTMLSRRGRAGLRTVVYLAT

SEQ ID NO: 143600 - protein, 343 aa, unidentified
MRTITTIGLDIAKSVFQVHGVDAVGQVVIRRQLKRRYVLAFFQKLPSCLVGIEACASSHHWSRELQALGHTVRLMPPAYVKPYVKRHKNDAVDAEAICEAVTRANMRFVATKTPEQQSCLTLHRTRHLFIRQQTSMINAIRAHLAEFGIVAPVGRNGVAQLLGVAADANDKRLPEVARACVTALGAQLRMLKAQILEFDRMINAWHRSNEASRRLDDIPGVGPTLATALIASIADPKVFRSGRDFSAWIGLVPKQNSSGGKDRLGNISKRGDRYLRSLFTTGALAVIRYAKIHGTRHRPWLTALLARRPTKVAAIALANKIARMAWAMMARGERYKEPAALAA

SEQ ID NO: 143601 - protein, 410 aa, unidentified
MEVLHAHCAGLDVHKDSVVACARHMVDGKVTTAVKTFKTTTQELMALSGWLSTEGATHIAMEATGVYWKPVWHILSDGEFELVLANAAHVKNVPGRKTDVNDAVWLADLMAHGLIRASFVPDEPTQQMRDLLRTRKQMVRERSSHVQRIQKTLEDANIKLDSVVTDILGLSGRRIIEALIAGQTMPQALATLAHRRIHATVDELEAALRGRVTAHHRFMLKLHLDQVDAIDAALARIDEEVNANVERFRVAIEMLSTIPGISTLSAEVIVAEIGIDMNHFPTAEHLISWAGLCPKNDESAGKRRSNRMKKGAPWLKTTLIQCAWAASRKKNSYLQAQYLRIRSRRGAKKAVVAVAASMLTAAYHMLKDGTLYQDLGPNHFDTRAKGKHVQRLVTRLQNLGFDVQITPLAA

SEQ ID NO: 143602 - protein, 344 aa, unidentified
MTVKCMAGIDLHSNNLFCAIVDMKGKRVFEKKLPCELASVLAALQPFKKRLEKIAVESTYNWYWLVDGLQDHGYPVVLANPAAMKQYDGLKHADDKSDGFFLAEMARLNILPTGLICDRAVRPVRDLLRRRMGLVHKRTSVMLSLKSLHTRMTGRDLSTGRIKAMEPQEAETLFEHPADQLITRLDLQLVEQLSRSIEQIEAAILATVKGRADYQVLQTMPGVGKILGLTITLETVDPKRFEGPGQYASYCRCVDSRRLSNGKKKGENNGKCGNKYLAWAFVEAANFAQRHDAGCRKFYDRKKAQVNGIVATKALACKLAKAAWHMMSQNTHYDAGRMFPGVKK

SEQ ID NO: 143603 - protein, 359 aa, unidentified
MTVTMTYVGLDVHARSIHAAAIDVMSGELRRARFGGGSDEVLAWLVELPQPLRGCYEAGPTGFALYRAAEAAGVPIEVIAPSKTPRASGDRIKSDRKDAELLARLLLAGQLKAVTVPPPAFEAARHLARCREQARSDLMRCRHRVSKLLLLHGRVYDAGAWTKTHRGWLERQRFDEAATELAFLDTLAAVDGLVARKAALDERLSRLALEGEWWPTVARLRCFRGIDTLTAFVLALEIGDFARFQRPAQLSSWLGLVPSLDQSGESRRQGAITKTGSGYARRLLVEAAWHYLRQPGPGVALTERRARQPDHVIQIALRAQRRLHRLHQRLRERGKPANVTTVAVARELACFLWAAAVAD

SEQ ID NO: 143604 - protein, 345 aa, unidentified
MKIHTIGIDLGKTVFHLVAVNTKGEVVVRKKCSRTQLLRFTSNLRACLIGMEACGGSHFLGRALREQGHDVRLMPAQYVKPYVKTNKNDYIDAEAIAEAVTRPTMRFVPIKSDDQLDLQSLHRVREQWVKRRTGVINQIRGLLLERGIILRKGRKYLEASLPGILEDGENKLSGVLRGLLRQLQTELQYLHGQIEECDQLIECIASDLEPCQRLMAIPGVGPVIATATIAAIGNGGAFKKGRGFGAWLGLVPGEHSTGGKQQLTSTSRRGNKYLRKLFVLGAHTVLLQRAKQSSGLSTWLASLIARKRKQVATVALANKMARMVWAVLFKAEAYRPPLVSQPNAA

SEQ ID NO: 143605 - protein, 412 aa, unidentified
MEVLYACCCGIDVHAKMLVACVLKPGKKEVRTFSTMTEDLLHLLDWLRQEGCTHVAIESTGVYWRPVFNILEGAMEVILTNARDAKGYKARKTDVIDAEWLADLLRHGLLKPSFIPPRPIRELRELTRYRESLVREQTALANRIQKLIESANIKLGQVASDALGVSGKLMLRALAAGETDAEKMSHLAHTSLKRKQPQLQQALEGRMTQAQRWILGQLLDQYAQVEAALQRAEERIGQEVDNSADPFVPEAVQLLDTIPGVGETVAQIIVAEIGVDMTRFPTAHHLASWAGMCPGNNESAGKRKSGKTTKGSRYLRAALVQAAWAATHQKGTYLAAQYKRLVRRMGKKKALVAVGHSILIMGYHVLQTRTKYQDLGGDYFDRRNVDKQRKRLIRQLESLGVKVTVEEIKEAA

SEQ ID NO: 143606 - protein, 387 aa, unidentified
MHTVTSTTVVATAARANDITLFASLELSKSKWVVTINSPGSEKFSKHVIEGGDGAGLLELLSRLRAKAEQRCGAGVKVVVIQEAGLDGFWIHRLLLAAGIESHVVDAASIALPRRHRRAKTDTIDGETLLRTVMAWARGERRVCSMVCAPSPEEEDRRRLTRERDTLLKERIRHTNRVKGLLSSQGVRDYHPLRRDRFERLETLRTGDGRELPPLLKVEIRRELERIGLVTTQLAAVERARDALIRADAEGPNTPAALLLKLKGIGPEFASLLWLEALFRSFVNRRQVAAYGGLAPSPWQSGAIERDQGISKSGNRRLRKTMIELAWLWLRHQPDSALSRWFRARVGPAKGRVRRIAIVALARKLLVALWRYVTQGVVPEGAVLKAA

SEQ ID NO: 143607 - protein, 423 aa, unidentified
MEVLHECVAGLDVHKDNVVACVRTVSGDKTTREHRTFDATTDGLLALLEWLTSCRCELVAMEATGVYWMPVWRILSDGAFKLIVVNAAHIKAVPGRKTDMKDSTWLADLAAFGLLKASFVPDEEQHELRALMRTRKQLVREQTRHVQRIQKTLTEANIKLDSVISDIMGRNGRRMIEAMITGVRDPRKLAALADQRLKATPKQLYDALHGRLTEHHRFLLQLHLGQWDGLDATIKGVDREVATRVSRMDTEVTAAKANFSDLIDQLVTIPGVSRLSALTILSEIGTDMSRFATAGHLVAWAGMCPGQNESAGKRKRTRLRKGAPWLKTMLVQCAWAAKRKKDSYYKAQFFRLQSRRGPQKAICAVAASLLTAIYHMLKDGTIHQDLGSGYFDQRPPEIKVKRLVNQIAKLGFEVTLQPIAKAA

SEQ ID NO: 143608 - protein, 347 aa, unidentified
MLIIGCDFHPGFQQVAIFDNRTREIQEKRLQHREEAEQFYRSLAGQEVLVGMEACGHYPWFERLLAELGMELWFGDAARVRASVVRRQKTDRRDAEHLLNLLRQDRFPRIWVPSLEVRDVRQLLVHRHKQVQARTRTKNQLQAMALSHGVQKKWKLWTKAGRAELEQLPLLPYAAQRRKRLLEALDGLEAEISELDRRVAEEAGQRPEAVRLMTHPGVGPVTALAMVLTLGPAERFGSAKQVGSYFGLIPSEESSGGKQRLGRISKQGSSFLRFLLVEAGQTAARLDPQLKRFYRRLAMRKNRSVAKVAVARKLATRLYLMLREDWTYAQLSQAVMQVSPSHSVAGE

SEQ ID NO: 143609 - protein, 338 aa, unidentified
MVLYAGIDLHSTNSVVVVLDETDKVVRRGRLKNHLETVAAWLEPYRDALAGVVVESTYNWYWLVDGLKERGYTMHLANTVAIRQYAGLKHRDDVSDARWLATLLRLGQLPEGYIYPPKERAIRDLLRKRTQLVRQNTSNLLSIQNLFSRNTGTSISANVAKRLTPDEVDEVFEDPNVALAVKSNGAVMSGLREQISLVEDSVYGQVRLRKPYRRLTTVPGIGKILAMTIMLETGDIDRFDDVGHYVSYGRLVGSSYGSNGKRKGSGNTKNGNAFVCWAFIEAANFAIRFDGTIRRFYDRKKSRTKRIVALKAVAHKLARACYHMMKDDTEFEVRRAFL

SEQ ID NO: 143610 - protein, 456 aa, unidentified
MGHARARKVPAQLVEDEDYQLRYERVAGIDIAKAKADVCTRLPPARDGGRRASRLEEVPATARDILALAGRLLADRVQLVVMEATSDYWRIWYYLLEAAGLTVQLVNPAHARQLAGRPKTDRLDAQWIARLAEMGLLRPSFVPPPEIRALRDLTRTRLQLVRDRTREWQRLEKLLEGALIKLSSVVSRLARAKTARDILEALADGQRDPKTLAALAAGQIKGGREAVGRALDGMLLGEHHPRLIRVHLDHLTFLDRSITAVEDEIDAALAAIPAAWGISADGVPSPDPGPGAAALPAVERLAEIPGVSPKLAMAIIAETGLDMTRFPAADHLVSWAGLAPVARQSGPRNRKPKKGQGNDYLKGYCTQAANGAARTETFLGERVRRLSRRLGGNRAKCAVARSILVIIWHLLADPTARFTDLGPDWHDRKTDRDRKIRAHLRQLQALGLEVTITPAA

SEQ ID NO: 143611 - protein, 435 aa, unidentified
MEKIRTNVAGIDIGAKKVFTAVEGQPVVSHFTFTEDFILLRDYLLKHNVKTVAMEATGVYWVILYDLLKEAGIDVWLVDGRQTKQVPGRKTDVKDCQWILELHSYGLLSRCLVVDEDIKELRSYVRLREDHINSSAMHINQMQKALTLMNIRLKEVLSQVHGASGIAIIEAILNGERNKNVLVNLCYTSVLKTKKELILKALEGRYTETGIFALKQAYDGYKFYLGQIAECDKRIDIVINRIGQSGKGQDVKKKRKAIRHHKPVVEQLGQNLINIFKGKDATVISGITDYTWMQLLSEVGHDLSRWPTEKHFASWLGLSPGQNNSGKKKRNAKKTGRPLAGQIFRTIAQGLINSKNIAIGAFGRRLRGRKSSGIAIKAMARKVAILYWRVMVKGVDYAETGIKKYEENLIANKMKTLNRLAKELNYEITGNVQFT

SEQ ID NO: 143612 - protein, 346 aa, unidentified
MKQVIRIGMDTSKHIFQLHGVDADEQPVLRKRLRRKEMVLFFAKLPTTVIGMEACGAAHYWARVLSGLGHQVRLIAPQHVKPYVKRNKNDGRDAEGLCEAMSRPTMQFVPAKTEEQQAALMLAGVRQQLIARRTQLSNAIRGYAAEFGLTTGKGIDKIEPLLAQIAQDSRVPDLARELFAFQGRDYAQLQTELKVIEARLMAWHRTNACSKRLAQIPGVGPISATALVMKTPDPRAFPSGRQFAAWLGLTPKDHSSGGKTRLGKITRAGDEVLRSLLVAGATAVIQQACKARGRPSRWLLDLLKRKPPKLAAVALANKNARIAWKLMATGESYDSARMAGISASAA

SEQ ID NO: 143613 - protein, 408 aa, unidentified
MKTLLRRCAGLDVHKVEIVACLRLVEKGKVARRVRRFPTTTQGLLELVEWLEGAGCSHVAMEATGVYWKPVWHILDGHFALILANAMHVKAVPGRKSDVNDATWLADLLAHGLIRASFVPPTPIQELRDLTRTRKQLTREIVQHVQRIQAVLEEANVKLSSVISDIMGPSGRRILTAIIAGETDAEKLAALGSERLGCGRAALSEALKGRIREHHRFLFAQHLRTIEQLEESVAAFDARIAGALAPFRDVVERLNEVPGLGRIAIETIIAEIGTDMSRFPTAGHLVSWAGLAPRLDESAGKRRSTRIRNGAPWLKPALVQAGWAATRKKNTYLQAQFLRLKSRRGPKKALIAVAASILTIVYHMLRDGTFYRDLGPEYFARRSPAKLAANLANRIRNLGYHVEISTAT

SEQ ID NO: 143614 - protein, 343 aa, unidentified
MQAITTIGLDIAKSVFQVHGVDPDGHVVVRRQLKRRYVLAFFEKLAPCLIGIEACASSHHWSRQLQTLGHTVRLMPPSYVKPYVKRQKNDATDAEAICEAVSRANMRFVPTKTPEQQSGLVLHRTRHLCIRQQTSVINAIRAHCAEFGIVAPVGRRGIEELLNVIANANDEQVPEIARACLSALGDQLHRIKAQILAFDRMIGAWHRSCAASKRLDEIPGVGPALATALVASIADPRTFRSGRDFAAWIGLVPKQSSSGGKPRLGSISKQGDRYLRGLFTAGALAVIRYAKIHRIGHRPWLTALLARRPTKVAAIALANKIARMAWAMMARGERYREPAALAA

SEQ ID NO: 143615 - protein, 425 aa, unidentified
MPRRTVAAVIREQASGGAVVTQIDNYDQVDVFVGLDVGKGEHHAVALDRVGTKLYDRALPNDERRLRAVIADLQIHGVVLLIVDQPATIGALPIAVAQAAGALVGYLPGLAMRRIADLHPGEAKTDARDAAIIAETARTMPHTLRSIQATDEQVAELTMLCGFDDDLAAQITQVGNRVRGLLTQIHPALERAIGPRLNHPAILDLLQRWPSPAQLRAAGEKRIATRMLKLAPRKGRDWAHEISTALDQQSVVVTGTNAAALVIPRLAAQLATLRKQRDEVAAEVEGLVDAHPLQPVLTSMPGVGVRTAARLLTEVVGKHFPTAGHLAAYAGLAPVTRRSGSSIRGEYSSRRGNKVLKNTMFLSAFAALRDPDSRAYYDRKIRQGKRHNQALLALARRRSDVLYAMLRDGTLYQPTNDRSVIVEAA

SEQ ID NO: 143616 - protein, 387 aa, unidentified
MFAASERANAGTPKRTKLRPGDRVRGKIISLGGETVFLELEGGQEAMLDLVELRDGKGQLQAKVGDVVDAVVADLPRGSRMVVLRRSLSRAKLSELVAQLPTCLIGMEACSGAHEWARRFLASGHTVKLMAPKFVTPYRKSGKNDGNDAEAICEAVARPNMRFVPVKSLEQQSDLSLHRVRVGFVEERTATLNRLRGLLAEFGHVLPLRAVEVHRRVPLLLEKLPARVAACARDLLEHAARLAAKTQQYEHEIRAHVRSNALAARTQMRMGIGPITASALVATVGNGRDFKNGRQFAAWLGLVPRQYSTGGKTRLGHITKRGDAYLRTLLVMGARAVLQRAASLTDPFSLWAMALRERRGYHRACVAIAAKNARVAWALLSKEPTAT

SEQ ID NO: 143617 - protein, 407 aa, unidentified
MDVIYPRCAGLDVHKQTVVACVRIVGDGPLMQEVRTFATTTSGLLALCDWLDSLGVQHVAMEATGVYWKPVWHVLEGHLELVLANAAHVKNVPGRKTDVNDATWLADLLAHGLIRASFVPPTAVQELRTLTRTRKQFVRERASHVQRIEKVLEDANLKLSVVISDILGKGGRAVLQALIDGHSDPEVLASRITTRVKASRAELLEALRGRASSHHRFMLKVHLSHIDALDQAIAAIEKEVGLGLEPFRQAAKLLSTMPGLSAVSANVVVAEIGIDMSRFATPAHLLSWACMCPRNDESAGKRRSTRLRRGGKWLKTTLVQAAWSAIRVKGSYLQAQFHRLRARRGAKKAIVAVAASMLTAAWHMLRDGTEWHDLGAAHFDRADATKTANRLIRRLQQIGYVVQATPA

SEQ ID NO: 143618 - protein, 360 aa, unidentified
MAFATLPRKGHYPPFDHVVGIDTHRDFHVAVALAPNGARLGDLTLQASSEGYEQLMNWSEQFGVRPVFAMEGTGSYGAGLCRVLLDAAYDVIEVNRPDRAARRRHGKDDPVDAEAAARAFLAGTANIVPKSGGDQVEMIRLLKVAKDSAIDGRTRALNQVRSLLVTAPVALRERLKGLSRSELIAACASFRSGVLDGPMAAAKRALRSLARRIQALDAELEALMSDLDALTQAACPGLRQSYGIGVDGAAVLLSAVGDNPERIRSEAAFAAICGASPLEASSGNRRHHRLNRGGNRQANATLHRIAVVRLRWHEQTKAYAERRKAEGLSNKDILRCLKRFIAREVFHLLMGKPPRRTAAG

SEQ ID NO: 143619 - protein, 338 aa, unidentified
MALYCGIDLHSRVCWIAILNEELKVIRLTKVDNDLEAILRVLGSYREELEGIAVESTFNWYWLADGLQAEGYRVHLTNTCAVKQYDGLKYADDKHDARWLARLLVLGILPEGYIHPRQGRAVRDLLRRRSFLVRKRTSMLLAMRGAFTCRTGLTTTTNDVKKWTEADVEPYLDDPVEVLGITCMIEPINALNVQIKRLEKEVLTRARLRDEFALLQTVWGIGRILSLSVMYEVGDIGRFARVGKFASYCRLVKTARLSVGKSKGSGNAKNGNPYLSWAFSEAAHFAIRHHDDAKRFYQRKKSKTNGIIAVRGLAHKLARASYYVMRDQVEFDPTKAFG

SEQ ID NO: 143620 - protein, 388 aa, unidentified
MQIVVDRAAAPTAIQTDLRAIFVSLELSRSTWLITSLSPGGGEKMSKHSVQAGDIAGLLRRFAQLKEKARARTGRDFPIITIQEAGLDGFWIHRVLQSEGIESHVVDPASIATSRRRRRAKTDKIDGETLVRTLLAYKRGEPRVCAMVKVPTPEEEDSRRLCRERKVLTAERVLHVNRIKGMLFCQGISGYEPLRRDRHERLEELRTGDGRPLPPHLKAQVNRELDRLELLLKQIKAVEAERDALLVAAHTPAAVPASMLLNIRGIGPEFAAVLWSEGLFRHFDNRRQVAAYAGLAPTPWQSGAVDREQGVSKAGNPRLRTTLIQLAWLWLRNQPHSALTLWFHERVNRNGGRLRKTTIVALARKLLVALWKYVNAGVVIEGAAMTTA

SEQ ID NO: 143621 - protein, 344 aa, unidentified
MKRIAVDLAKSVYQVAESIQVGRVDRRKRLDSRAFAQYVQEQLEPVEWVMEACGTAHHWGRLMQEKGHRFVLLHPRYVRPYRRRNKTDRNDCDAILEAARCQEIRPVPVKSMQQQQVQQLHKLREGWKKSRVQRINLLRGILREAGVDAPNGIKPFLRQACELVEVRALRGALQVVLAEINLYEQSMRECEEQLARWHADDEIVHKLDEVSGIGLLTASALKTAVGKPERFASGRHLSAWLGMTPNEYSSGERRRLGRISCKGNVYVRTLLIHGARAALLAAKRCKARTPERLTHLQRWALDTAERIGHNKAAVALANKLVRICWAVWCHERQFSGNWHSIKPA

SEQ ID NO: 143622 - protein, 433 aa, unidentified
MLTEFAALVAIDWADQKHVWALQKVGSSEWETGTLDHTPEAVEVWASELRLRFGGQPVAVALEQSRGPLVFTLTKYDHLVIFPVHPTTLANYRKSVRPSGAKDDPSDARLLLDILTLHRDQLRRLNPDTPETRTLQFLVEERRKLVQEKTRYSNRITARLKMYFPQVLHWFDVGSTMAADFLERWPSLEQLQRARPAAIERFFVDHNSRDRERMAQRWEQIRKAVPMTLDAAVLTACRTAIVAWAALLKQVLTAIALYDEKIDELARVHPDYALMNSFPGAGSALAPRLIAAMGSQRERYQTASEIQCYSGIAPVVASRGQQRWVHWRWACPKFLRQTFHEWALHSIPYCPWAREYYEQQRAKGKRHNTAVRALAFKWIRILFRCWKERQPYDESIYLRALDARRPQTQLAAPAVELQRKNVAGFLKIAIKEA

SEQ ID NO: 143623 - protein, 347 aa, unidentified
MSITMIGLDTAKSVFQIHGVNETGKVELRRKLRRSDLIAFFEKQERCTVVMEACGAAHHWARILSGLGHTVKLIAAEAVKPFVKKGKKNDAADAAAICEAASRPDATFVPVKSVAQQGILALHTTRSLLVKQQTMLANAIRGLATEFGLVVPRGLHNLEPLVALVEADEAVPAQARRAIAELYKRFGELATGIQAFETAIVAHARSDATARRLATIPGIGPITASLIAATVVDISRFKTARQFAAWLGLVPRQNSTGGKTRLGRISKAGNREIRKLLVLGATSMVGRAEGWHSAVGSWLRDILQRRPVRLVTVALANKMARIAWSVMTRNEVYRPQGGVAAKAQAAE

SEQ ID NO: 143624 - protein, 395 aa, unidentified
MNDMITNHADIDVFIGIDVGKHNHHAVALDRDGKQLLSKVLPQNETKLRALLGRLAKHGTLLVVVDQPATIGALPVAVAYLPGLAMRRIADLHPGEAKTDARDAAIIADAARTMPQTLRGIRVADENVAELSMLCGYDDDLAKQATATSNRIRGLLTQIHPGLETVIGPHLDHPAILALLAKYPTPKALKRAGKRRVETLLRKQAPRAWKRWAAAIFTALEGQTVVVSGTDAAGLVLPQLATSLAQTRTSRDDVLARIEELVEAHPLFGLLTSMPAVGVRTAARILTEVVGKDFESAGHLASYAGLAPVTWRSGTSIRGDHSSRRGNKILKRALFLSAFAALKDPLSRAYYDKKRAEHKKHNQALIALARRRCNVLYAMLRDGAYFHASEEATAA

SEQ ID NO: 143625 - protein, 337 aa, unidentified
MGNYYFLGIDVSKRNLDCCLFCNGVVVRQDVILNYQKSIEKYLFDICVDQDTEPDCLVICAEYTGMYIYPLIVACQSKDYKLWIEDPTQIKYSSGLQRGKNDKIDAQRIALYAYRYVDRIKVYSRPSVSIEALKLLSTELSMLCNDRQKYQAQLSDQKEYMADNIYKSKLKRLSLLMKQLDKAIKSIEDEIEIIITKDELLFHQMKLLMSVEGIGRKTSLKMILETHAFTRFPDSRKFCCHAGVVPFSYLSGSSQHSRNRVSQRANKSIKSLLHLAALSAIQNKKSELRIYYDRKVAEGKNKMSLLNAIRAKLIARMFTVIKNDKLYDFNYINQYSK

SEQ ID NO: 143626 - protein, 347 aa, unidentified
MRFYTKQHPFYCGIDLHARTMSVCILSQDGEVVLHRNMQARPDALLKAIVPSRDDIVLAVACILTWYWLADLGAQAGLPFVLGHALYMQALHGSKATHDTMDSQKIAVLLRGGMLPQAYVYPAAMRATRDLLRRRTHLMRKRAELLAHIQNTNSQYNLPEIGKKIAYKANRDGVAERFPDPAVQKSIEVDLALIGHYDQLLRDVELSILKTAKQHNAQTLYLLRTVPGIGEILSLVLLYEIHDITRFPRVQDFLSYCRLVKCTKESAGKRYGTSGTKIGNAHLKWAFSEVAVLFLRANPAGQKYLTKLEKKHGSGKALTLLGQKLGRTVYYMLQRQTAFDMGKFLNG

SEQ ID NO: 143627 - protein, 319 aa, unidentified
MNATAKVETYAGIDVSKTSLDVGIMGATQVERYSYDAAGIEAVVEVVQRHEPRCIVVEATGDLEKELVTALVVAGLPVAVVNPKRVRDFARAAGRLAKTDRLDALILAQFGQVFRPALYQAQNAAAEQMSAWVSRRKQLVEMLVAEKNRLKSTRDATVRQQIEAHIRWLEGEIAALSDKLNQLVAADPQRQATGVMLRSVPGVGQVVTVTLLAELPELGQLNRQQIAALVGVAPLNRDSGQRRGKRHVAGGRASVRRVLYMAAMTAVRCNPVIKPFYQRLLAAGKEKKVALVACMRKLVVIMNAMVRDRCAWMAYQVVP

SEQ ID NO: 143628 - protein, 406 aa, unidentified
MATPEQVDVWVGLDVGKEEHFAEVLDDAGERLFARSLVNDQAALEALLDRASKHGTPGLVIDQPGSIAQLALAVARSRQVPVAYVPGLVMRRAADLYPGEAKTDKRDAFIIADTGRTRRKQVQWLDATSDELLERLRVLNGFDIDLAADQTRLTNRCRDSLASVSPALERAVGSRLGHAGVRDLLAKCPTPSALKAAGRARVVHALRARSPRLADKVADDVMAALGAQDLTMPAEATIGRVISELASELDRLSARRDALVAEIEEAFMAHPFGELLSTLPGIGPRTGARILAEVGDGSRFEDGDRLASYAGLAPVTRQSGKSINGESKSRRGNHRLKNAMFLAAFASLRSCESKAFYDRKRAEGKRHNAAVICLARRRCNVMLAMLRDNQPYKEGYGPAGPLADAA

SEQ ID NO: 143629 - protein, 342 aa, unidentified
MKVTTVGLDLAKNVFQIHAVDGRGKVVVRKQLKRDQVAPFFAKLEPCLVGMEACASAHHWARKLQGFGHDVRLIAPQFVKPYVKANKNDAADAEAICEAVSRPSMRFVAVKNVAQQALLAMHRVRQGFIKARTAQGNQIRGLLGEYGLIIPQGIGHIAKRVPSLIEDASNELPGTFRVLIDRLLEHLKALDQQVAELEAQITAWHRESEASRRLEQIPGVGPITATALVATLGEARNFSNGRQVAAWLGLVPRQHSTGGKVTLLGMSKRGDSYLRTLLIHGARSMILALRRKANPQGWLHDLLKRRNANVAAVALANKNARIAWALLAHDRSFRADYAAAPV

SEQ ID NO: 143630 - protein, 409 aa, unidentified
MDQLIERCGGLDVHRDTVAACVRVPGPNGKRQQEVRTFGTTAAELLALRDWLEAHGVTHVAMESTGVYWKPVFYVLEEAFTCLLVNATHIKQVPGRKTDVKDCVWIAQCLECGLLRGSFVPPAPIRELRDLTRHRRVLIEERTRAANRLHKLLQDAGIKLASVATDILGVSGRAMLEALVRGTTDPDVLADLARGKLRKKLPALRHALAGRFRPHHAFLVGQLLAHVDYLEEAISLVSAEVEARLVPFAEPLTNLDTVPGINKRTAEVLIAELGVDMSCFPSDRHLASWAALCPGNNESAGKHKSGKTRKGNRWLRAALIEAARGAVNTKDSALRARYRRVMRHRGHNKAVVAVAHAMLRAIYHILAESTTYRELGADYYDRRHQQRVTRRAIQLLERQGYRVVLDTAA

SEQ ID NO: 143631 - protein, 346 aa, unidentified
MTIVGCDFHPSWQQVAIFEFSTGEIVEHKLVNGNGEAERFYRSLPVPSLIGLESCGNSQWFVELLERLGHQVWIGDAAQIRASYVRKQKTDRRDAAHILNLLMEGRFPRLWVPSDEQRDLRQLLIHRHKLVEIRSRVKNGLQHLAMNRGMQKKSRLWSEAGQKAFRELPLEGWAGCRREDLQRLRAMLDEQIGKLDEAAERAAYRDEQARLLMTQPGVGPITSLAFVLTIGEVARFKRGKQVSSYLGLIPREHSSGGKQRLGAISKQGNGFARMLLVEAAQTACRLDEGFRKQYQHRCHSKPKGVAKVAAARRLAVRLYWMLRTKMPYPEIVRIENSPRVPLDGAS

SEQ ID NO: 143632 - protein, 354 aa, unidentified
MSEKLNSEIAVIGIDIGKNSFHLVGQDRRGRIVLRQKWSRGQVEARLANLPPCLIGMEACVGAHHLSRKLKAFGHDARLMPAKYVRPYSKGEKNDYRDADAIAEAVQRPTMKFVATKSADQLDLQALHRVRERLVGQRTGIINQIRAFLLERGIAVRQGLHFLRAELPGILAKRTDVLSPRMLRVIEDLAGDWRRLDERIDALSDEIMTLARQDKGCERLMTIPGIGPIISSAMVAAIGSGDAFSKGRDFGAWLGLVPKQMSTGDRTILGSISKRGNRYLRTLFVQAAWVVLVKIKPEGWERYGLKSWIEAAQQRLHRNVLAIALANKLARIAWAVLHEGRAFECVKTNASQPV

SEQ ID NO: 143633 - protein, 358 aa, unidentified
MAGPQPIVADVYTYVVGVDTHAATHHYAIIEARTGGLIDHAEFPTHTAGLLRAADWIARRTAKATAGEVDRVLVSIEGTRSYGAQLTAVLSQTGYRVVDAPTPKRERGSGKNDQIDAVVAARGSLHKHLDQLADARSGETSATLQVLLSARNSITGERTRAINALTALLRVHDLGVDARRKPTRQTIRSIAAWRTRRGDTPTQAVARREAIRLATRILALDAEATSNDKQLHDIVAATAPTLLDLPGVGPVNAATVLTAWSHPGRVRNEASFAKIAGVCPLEVSSGRRHEHRLNRTGDRQLNRALHSIASNRMKYHPATRDYVARRTAESLTKPRIRRCLKRYIAREIYRHLAALDTL

SEQ ID NO: 143634 - protein, 350 aa, unidentified
MTTIARRITGGVDTHLDVHVAAALDERGAQLGVESFAATAAGYQELLDWLEGFGTVELIGVEGTGSYGAGLTRHLLSHQIAVVEIDRPNRQRRRRTGKSDPHDAVAAARAAQGGDATGSAKTRDGNVEAMRVLRVARRSARGNRTQALNQMRSLISTAPEELRAELRGLSIYKVLTVASAYRHTGRTDVTTVTKLTLRTLARRALSLEEEVKEIDRLLKTLVVETAPELNAIDGVGTDVASAILVAAGDNPERLKSESTFAKLCGVSPLDASSGKQQRHRLNRSGDRQANSALWHIVFTRMVNDPRTKHYIERRMKDGRSKKEAIRCLKRYVAREVFAALPRSQFALDNP

SEQ ID NO: 143635 - protein, 345 aa, unidentified
MQIKSIGIDLGKTTFHLIALGNRSQVVIRKKFSRAQLLVYTANLPSSLIGMEAGVGSHFLGRALREQGHEVRLIPAQFVRPFVKSNKNDYRDAEAIAEAVERENMRFVPIKTEDQLDLQALHRVRDRLVARRTSVINQMRAFLLERGISFRKGPASLRRQMPDILENADAKLSTAMRRLLDFLWQEWKGLQLQIETLNSELEQIASSDPSCVRLQQIPGVGPLVSTAVVSAIGNGAAFKKGREFAAWLGLVPRQWSTGGKAKLLGISKRGNPYLRKMFIHGARAAVLRVKREGSSLGTWMSGLETRATRNVVIVATANRLARISWAVLASGNDYHPRHRVLAVSN

SEQ ID NO: 143636 - protein, 346 aa, unidentified
METYIGLDVSLASTAICTVSAQGKIVKETTAVSEPEDLVATLKAIPGAVVAVGLEAGPLSQWLYRHLTDAGFATVLMETRQVKGALKAMPIKTDRRDAEGIARLLQMGWYRPVHCKSISAQEMRALLATRKTVQQAAMNLELSIRGVLRNFGLKMGRVAKGRFEARVQELTEGNPMLEAAATPILASRRMLRQELASLEKLLRNHAKEDPVCHSLMTMPGVGPVVALTVKASIDDPERFRSSKDIGPWVGLTPRREQSGERDIIGQVSRAGDVGLRTALYQAATVMLHRGRKNWLTAWALNVAKRRGKKRATVALARRIGVVLHRMWKDGTDFRFTREEAAHVATA

SEQ ID NO: 143637 - protein, 402 aa, unidentified
MNAVGIDVSKGKSMVAIMRPFGEIVSTPFEIKHTSSDINSLVKLIKSIEGESRIVMEHAGRYYEVLAHQLSEANLFVSAINPKLIKDFDNDSLRKVKTDKADSVKIARYVLDKWQNLKQYSVMDELRNQLKTMNRQFGFYMKHKTAMKNNLIGILDQTYPGVNTYFDSPARSDGSQKWVDFASTYWHVDCVRKMSINAFIDHYENWCKRKKYIFSKSKAEEIYGKAKELVPVLPKDDITKLIIKQAVDQLNSASITVESLRTLMNETASKLPEYPVVMAMKGVGTSLGPQLMAEIGDVSRFTHKGAITAFAGVDPGVNESGSYEQKSVPTSKRGSSDLRKTLFQVMDVLIKTHPQDDPVYQFLDKKRAQKKPYYVYMTAGANKFLRIYYGRVKEYLASLPES

SEQ ID NO: 143638 - protein, 373 aa, unidentified
MANVQEGFAKGKPIYAGIDVHKKDWIIRVRCQGEEIYRAAIPADPERLIELLKRFKASEVHTVYEAGPTGYGLHDALSKAGFDSMVTPPSLVPQIGGKVKTDQRDSRKLTEMLAGGFLKRVHIPTPEERAHRQLLRTRNQIKKHRKQTQNQIKSMLLFHGKQPPPRLREQWSQEYLRWIKTISWEFEALTISMTVLLDLFHHLDKQLRELNKELTALANTEKYRERVRLATSVPGIGIYTAVAMSVELQDVQRFRRGDQLSSFLGLTPSQHSSGQSTRMGRITRCGNPRLRELFIESSWTLIRYDPGARSTYERIKHQTGSSQKAITAMARRLALRVRRVLIDKKPYRLGNGKPLVAGVSNKQRANRLVLNRT

SEQ ID NO: 143639 - protein, 341 aa, unidentified
MEHIAIDLGSRESQICVRNDAGRILDETRHATSTLRGYLKGRPAGARVVVESSAEAFAVADWATELGHEARVVPATLVRALGVGERGLKNDVRDARKLSEMDCRMPVPSVHIPSLKRREHQARLTARNALVQVRTKLINTVRSFVRMQALGPIRATPKTLPAAIRARLQSEPQGVPDYLQALLQQIEHLNEQIAEADRAVHEVAHSDEVCKLLMTMPGVGPVTALSFAAAIDEVARFEDRSRLSSYLGLVPGERTTGFKTRRTAMTKAGPTRVRWTLNQAAWTLVRTQPRSPLGQWYPTVAERRGKKIAISALCRRMASVLYAMWRDGRGYEPNRTQARHG

SEQ ID NO: 143640 - protein, 352 aa, unidentified
MIIIGVDFHPEFQQIASVDTDTGEFQEKRLAHPEEAEKFYRALTGPKVRVGMEASGHARWFERLLAELHFELWIGDAAEIRAKRVRKQKTDRQDAQLILQLLLEERFPQIWVPNWENRDLRQLLWHRHRMVQARTRIMNQLQAVALNEGLRCKKRLWRERGREQLEAFRLAPWASRRRRDLLELLDRLNPIITELTHAIEQEVEQCPAAQRLMTHPGVGPLTALAFVLIIGKADRFQCGKQVASYLGLVPLEDSSGNRRRLGHITKQGSSMLRFLLVEAAQVTVRSLPEWRSKYFHLAMRRGRKIAKIAMARRLAVRLYWMWRKGWDYEQLTKFGSHAGQPGNRHGVQSNTE

SEQ ID NO: 143641 - protein, 343 aa, unidentified
MQTVTAIGLDIAKSVFQIHGIGAGGQIVIRRKLKRRYVLMFFQKLPRCLVGIEACASSHYWSRELVALGHTVRLMPPAYVKPYVKRQKNDAADAEAICEAVGRANMRFVATKTPEQQSCLMLHRTRHLLIRQQTAVINSIRAHLAEFGIVAPVGRNGVEALLTIVGDPNDQRLPDIARACVAALGVQLRALKAQILEFDRMIMAWHRSSETSRRLDEIPGVGPALATALVASIADPRIFRSARDFSAWIGLVPKQHSSGGKDKLGSISKQGDRYLRSLFTAGALAVIRYAKIHRTRHRPWLTALLSRRPTKVAAIALANKIARMAWAMMAKGERYKEPVALAA

SEQ ID NO: 143642 - protein, 399 aa, unidentified
MTTEYAITLGLDVGKSTHHGCALTADGQRVYDRELPQDETALRKVITNLQQHGSVLVVVDQPNTIGALPIAVARDLGAGVAYLPGLAMRKAADLYPGRSKTDARDAFIIADTARTMPHTLRAVDRNSEVLSALKVLSGFDEDLARESTRAINRLRSLLVQIYPSLERVFPGVVLTRAIVLDLFIRYHGPAGLKAAGKAGVKRWARNHSRKDPGPLIDQVFTALSEQTVTVPGAEAVELVIPRVAAQIKELKHQRDIVAEEVEKLVDDFPLSTVLTSMPGVGVKTAAQILLAAGDMSAFPSPGHLAAYAGIAPVTRRSGTSIRGEFPARAGNKRLKNALFRSAWVASCHDPLSKAYYERKRAEGKRHNAAVMCLARRRLNVMYAMMKTGTLYEPRISAAA

SEQ ID NO: 143643 - protein, 371 aa, unidentified
MYIVGIDIGKNHHEASIVSPEGKQISPSLRFATTHKGADSLMSFIFKNIGNSPCVFGMEATGHYWYPIYSFLKAKGYTIYVINPIQSDSLRKMYIRQTKNDSIDSFLIAEVIRFGQFGTTSMADENILAMRQLCRYRDSVISSRTEIKLRIGTIMEQIFPEYEKQFSSLWVSTSMGILEKYLTPENIENAPIDELFEIIKDKSHNRLTRAKAISIKEAAADTFGIKIAQDAFSFQLKQLIDRMNFLDKQIEALDCQILEYYENFDCYLHTIPGIGMIAAATILAEIGDINRFKSSSALVAFAGIDPTVRQSGEFSSTHNHMSKRGSPYLRHAIFLAATTCSFHNSPLNAYYKKKRDQGKHHLTATGAVARL

SEQ ID NO: 143644 - protein, 329 aa, unidentified
MHITTLGIDVAKSVFQLHGVDARGRAVLSRRVKRQQLLDTVANLPACVIGMEACGSAQHWGRAFEQLGHTVKLMHPKYVKPYVKTNKNDGRDAEAICEAVGRPTMRFVSIKTVEQADMQALHRTRSLFMKHRTAVINQIRGLLAEYGLVIAQSPEKVRPAVVRFLDDAASGLTAFARDTFSELSEQLTELDARIERVTHRITRVYRTHPVCQKLAAVPGIGPLTATVLLATVGRPQAFRNGRHLAAWLGLVPRQYSSGGKERLGGISKRGSRYVRTLLIHGARCRAASRATDRYAGTVAVCAHTPQRDQCGRSGLSQQKCPSDLGLVGS

SEQ ID NO: 143645 - protein, 408 aa, unidentified
MEVLHPHCAGLDVHKDTVVACVRCVSEPEHHETRSFATTTRELLALGEWIASHGCSHVALEATGVYWRPVWHVLEGQVELVLANAHHIKNVPGRKTDVNDAMWIADLLAHGLIRSSFVPPQPIQELRDLTRTRKQVVREISQHSLRIQKVLEDANIKLGSVLSEVLGVSGRAMLGAIIEGERDPHKLADLAHGTARRKHDALVEALHGHIRPHHCTLLKLHLNLIIALEHTVAEVDAAVGKCLDPIRQCVCLLTTMPGVRDTVAEVIVAEIGIDMTRFPTPGHLVSWATMCPRNDESAGKRRSTRLLKGNNWLKTALVTAAWAAVRTKNSYLRAQFLRLKARRGAKKAIIAVAASMLTAAYFILRDGVPYRDLGPNHFDRQQRGKTVRRLLRRLHDLGYNLPLQNQPV

SEQ ID NO: 143646 - protein, 312 aa, unidentified
MEAKFVGIDVSKARLDVDCLPVSTARQFSNDAGGIAALVEWLLGSGVERIVVEATGGYEIAVASALAAAGLPVVVVNPKRVRDFAKAQGVLAKSDRLDARVLALFGERIAPPVRALPQAAQRDLTELLDRRHQLVSMRAQEQARLATVLPVARGDVEQHIAWLDQRIRKHETVLLKRLRANEIWDAKVKLLDSVPGIGPVNLFTLVGRLPELGTLNRQQIAALVGVAPFNDDSGKRRGQRYIRGGRAEVRCALYMATLTAKRCNPVIAQMFDRLIAKAKPFKVAMTACMRKLLTILNAILKSTQPWENRLAT

SEQ ID NO: 143647 - protein, 398 aa, unidentified
MICRPGPTIHLDTHRSGERDLVGAWLRGPVPVLSAVPARAFPPLAAETDEGMAMTTMTERKRRVTGGVDTHRDVNVVAALDERGSELGVQSFATTPAGYRAALRWLRRFGTLEKVGVEGTGSYGAGLTRYLHSEVIEISCPNRQRRRSHGKSDPVDAIAAAKAVLSGEAVIEPKTRTGKVEAIRALRTSDRSARHARIKALNQMRALLLTGPEELREQFRGTTPWRMVRIAVRLRPGDPTTAVGATKYSLRLLARRVLELEAEMAALKSILRPLVASTAPELVSRHGVGTDTAGALLVAAGDNPERLSDERSFAHYCGVSPIDASSGTVVRKRLNCGGNRFANEALWRIVMVRMVSDPATRLYMERRVKEGKSKREAMRCLKRYVARELYPLLASIGP

SEQ ID NO: 143648 - protein, 451 aa, unidentified
MANSKTRADRIISRQLSHCTVEAAHLSAVGIDVHHDQLICCFQKLDPIAGELTSEHRSFGTTIPQLLEFAAWCRVRESSVILMESTGVLWFSPYRSLEDVGFDNDTLALVNARDVKAAVGRKTDAQDAKRLAEYARLGKFHKSFVPSRPFRDMRMVSRDIIRLSDDISRQKNRYNKNLNSVGCRATSVFSDMHGKAAGKILDAYIRGDRDFEEIVRSARKQLRATQQEILEAINFAMSDALRELLRSSYEHLQYLIARRDSQIALLERMQAPYQEYIDRLMTIPGVKELSARLLFCEFTNEQQSFPDAAHFASWLGLCPGNNKSAGKSSSGKTPKGNRWARKTLTEVAHGIGLMKRGALKALFQAFKERRGARRAVVAIAHKVAMIMFAMIWDGSEYVETTCSALRDTRVKRLLQTSKNLREQRTVITLSGQIVDKDTGELIGQLSVDAAT

SEQ ID NO: 143649 - protein, 383 aa, unidentified
MMKQNIIFGIDVSSKSSTVCVVIDRIKQGETFKITNDSFGYQDLLDRLNQYLITPLVVFEATGVYSLSLQAFLEDYHIKYLKLNPLKAKKLMDNNLRHNKTDKVDTYRLALIQFNAPQKLRAPQPKEYHELQNASRYYEELTQALIINKNQLHRNLQSTFPQIESILSTSSGRVYWTIVSLFPHAQYVLDHNENQVFQSLLAISGIGRQRAHYLTTRLYALARQAYPYDNESSITIRAIQRNIANLLSLSAERDNVINYMEKLAMQANARSLNIYESIPGIAKTTAVRLVAELGDLRRFDTSAQIDAFVGIDPGRYQSGEKDSHLGITKHGNHLARKILYRTITQMETVKATQPCHITDYYDKKNDLQIAGAIRKSPLHQFIN

SEQ ID NO: 143650 - protein, 387 aa, unidentified
MRRSKSRIVGLDVHPDSFAGAILQGMDPWKARVVSTSTRVALPLLEKWVLRHTREEDILVMEASGNAFCVAERLRALKHKVVILESHRAGKVGKTYCATDRVDAIKIARIYLSALSPVVWQPDTKTRERREVFSAYQAVVKEGMRLKQQIKSMLNEHCVRLEKGFRLSHPSAIVRLLQRRKWTPAQKMLLQQLHAGLVGARARRQQLRHYMAQEVLAQKELLRLTRLCGINLITLYGLIAAIGEIQRFATARKLSAYFGLNPSVEQSGNYEGSGALKRHGRGAIRALLVQSAKKLLQVDNPLQKWGLAIAMRRGRNKAAVAVARKLCVAVWHVMQGHVIGAIERMDTLHTKLHKLATDLGLSAIKQLGYDTKEAFVQKKLFLLRSYA

SEQ ID NO: 143651 - protein, 411 aa, unidentified
MLKIVYPICCGIDVHKTFVVACIASTNEKSVTTYQTKRFSTYTRNLRELAAWLESNNRRDVCMEATGKYWHPVYNVLELTCNVVLAHPKYLKAIRGKKIDKKDAKWIADIFKHDLVSGSFIPPADIRQLRDLMRYRSKLINFTTGEKNRAQNCLTTSNVQLDHAFSDVFGKSATAILDYMLEHPDETDFDVTPFVDRRCKTPIEEIQLSIDGTISHEQAEKLKVIRAHMGSLELCKLNLESAILTLAEPYLPQMELIASVPGIRYFSAIAVIAEIGVDMSVFPAAKHLCSWAGLAPQCNESGGKRKSSRVSRAGAYIKPLLIQCANAVVTSKKHPEIRNRYLSIKKRRGHKKAIVAIARMLLTAIYSILSKNEPYNPELYRKSDPDPIDHKKAAIQLLQKRGFAISPPSVP

SEQ ID NO: 143652 - protein, 400 aa, unidentified
MRVVFGIDVSKASSEVAILVNGDKVHGYTIPNDSIGFNRLLGDLKTVHNPEIVFEATGVYSRRLQAFLEDNSYAYTRLNPLAAKKQLDSLRVRKTDKIDAEKLAQSQFVLNRQPTYVQEEVYQELRDLSRFYQNLTEDIVRAKNRLHKVLQVTFPELESLLSSPTGEQYWNLVIAFPCKEMVLELSSDDLSTVIRNSTSKRISDKRVTYLTEKLTDLAHKSYCAVKKTSPMLEEVRYYAQELLRLSERRQVVLDEMVSLAQPLPEYEILLSIPGIAETTVTSLIGELGDIRRFQSANQINAFIGIDLRHYESGNFLAKEHITKRGNPYARKILFKCIHNIASASHTNPCHIADFYEKRKRQSQTTSTKPHTIASIHRLIRTMYYLITHNKIYDYNLATSQ

SEQ ID NO: 143653 - protein, 402 aa, unidentified
MIVTLDIGKGSHYGYFRAPDGQEVEPFVFYQSYDSFHSFWKKLSRFKKAHGCRQVIVGFESTGPYAEPITHFLKQRPVTLVQINPMHSKRIRELTGNSPNKTDRKDPRVIADVIMLGHALRVVIPQGSSAHLRRLTQARERAIKDRTAMLNQVQHLVFVIFPEFLQVIKNISCKTGLYLLRHYPTRQAIAALGEEKLTTIIKQVSRGRMGQGHARELFHSAQRSVGINEGQDSIVEEIGHLIDKIARENDFIDRLQCQMRAHLEQIPYSSCLLSLPGVGLITVAGLIGEVGDFRQYRTVAEITKLAGLDLFEVSSGKHQGRRRISKRGRPLMRKLLYFAAINAVKSTGIMHQPYTQMVERGMPKIKALVAISRKLLRVMYALARDQSMYMEKCDHNRYQFAA

SEQ ID NO: 143654 - protein, 350 aa, unidentified
MLIIGCDYHPAFQQIAFMDSTTGDCGERRLEHREEAEKFYRELAAQGMKVRVGMEASGQARWFERLLGELNCELWSGDASVIHAKRVRKQKTDRQDAQLILKLMLKDDFPQIWVPSGENRDLRQLLWHRHRMVQARTRIMNQLQSVAINEGLRCKKRLWRESGREQLEAFRLAPWASRRREDLLKLLDGLNPTIAELTQAIEQEVEKCPAAQQLRTHPGVGPLTALAFVLMIGRADRFQCGKQIASYLGLVPLEDSSGNRRRLGHITKPGNSLLRFLLVEAAQVTARSLPEWRRQYVHLTMRRGRKIAKVAMARKLAVRMYWMMRKEWDFGKLTKFGSHAGKPGTGDGVK

SEQ ID NO: 143655 - protein, 456 aa, unidentified
MAKRKQLRRRKRQNRPAPVINPNAAGIDVGATEVYVAVPTERDSDPVRTFATFTRDFHELADWLEVCGVKTVAMESTSVYWIPLYTVLEERGIEVCLVNARHLKRVPGRKSDVFDCEWLQYLHSVGLLQGSFHPSEAVAAVRTVLRHRTSLVQMAASHVQRMQKAMTQMNVQLHLVISDITGLTGLAILDAILAGERRPEVLAQLRHRNIKAKEKTIIKALEGTWRREHLFTLRQSLAAYRNYQTQIEQCDSELQDMLGTFESWRDPDAPPLAGEPKDRPDPRGFDLRAEFHRIFGVDLTQIPGVGVQTVYTLFAECGRDLSAFPTAGSFASWLGLCPDNRITGGKVLSTRTRKVNNPASTALRMAAQSLHRSESCLGDSYRRMRYRLGPPKAITATAHKLARIIYHLVSTGQAFDDSVLAQDEHQTRSRKTRRLKSLAQALATNSSPSRPVKVVS

SEQ ID NO: 143656 - protein, 335 aa, unidentified
MEQLIERCAGLDVHKKTVAACVRTPGQDGQRQQHTRTFQTTTKGLLALRDWLASQQVRVVGMESTGAYWKAVYYRLETTMDCWLLNARHLRNVPGRKTDVADAAWIAQLVEHGLVRPSFVPPPPIRELRNLTRYRKTVIQERTREAQRLEKLLEDAGIKLSCVASDILGVSGRAMLQALVAGVRDPQLLAELAKGRLRAKLPQLQEALVGRFGPHHGLLVGEMLARIDAADATIERLSAEISRVTTLYTAILELLQTIPGVNRRTAEVILAETGGDMRQFPSAAHLASWAGLCPGNNESAGKHHSGRTRKGSKWLRGALVEAAHAAARTKDGNVN

SEQ ID NO: 143657 - protein, 391 aa, unidentified
MIFVGIDVAKDKHDCFILNSEGTVLADVFTIANNRIGFETLLSRIQSCSQGESKIKVGLEATGHYSYNLLGFLLDSGLATYVINPLHTNLYRKSLSLRRTKTDRIDARTIAMMLMSDVDLKSYSNTAYHNEELKSLTRYRFDKVKERAKLKSSVARLVNILFPELEKLVSSLHIAVVYALLSNYPGASYIANANTEELAEILCTASKGRYTKSKTAEIQVAAGVSIGSKMPAKSMELKHTIALIRELDKEISEVESAIDKITSQMDSPIFTIPGIGRHMGAMILAEVGDFSNFASADKLLAFAGLSPSTYQSGQLQNCYAHMEKRGSRYLRYALFNAAKYVCLWCPTFSAYLEKKRSEGKHYNVAISHAAKKLVRLIFAMQRSGKAFLADY

SEQ ID NO: 143658 - protein, 350 aa, unidentified
MLATAQTAIAVIGIDIGKNSFHVVGLDDRGAIVLRQKWSRGQVEARFANLPPCLVGMEACVGAHHLSRKLKEFGHDARLMPAKYVRPYSKGQKNDFRDAEAIAEAVQRPTMKFVATKTADQLDLQALHRVRERLVSQRTGVINQIRAFLLERGVAVRQGQRFLRAELPRILATPPDVLSPRMVRIVEDLAGDWRRLDERLEILSDEIEAIARQDAGCERLMSVPGIGPIISSAMVAAIGAGDVFTKGRDFAAWLGLVPKQMSTGDRTILGKISKRGNRYLRVLFVQAAWVVLVKVKPTRWGYGLKRWIEAAKKRLHHNVLAIALANKLARIAWSVLAHGRAFEASTLQAA

SEQ ID NO: 143659 - protein, 342 aa, unidentified
MDHFAGLDVSVKETSVCIVDDTGRIIREVKVASEPEALLKVLGNPGYRFKRIGLEAGPLSQWLFSALAEAELPVVCVETRHMQAVLKAQINKTDRNDARGIAQMMRVGLYRPVHVKTLRSQKLRMLLTHRKLLQSKAIAIENDLRGTLRNFGLKVGMVGTVKFEARIQELVENLPDLAVLVEPLLIVRRALREQIVILHRRLLAIVRDDEVCRRLMTTPGVGPVVALTYRATVDVPARFRKSKAVGAVFGLTPSRYQSGEIDWSGRISRCGDEMMRVMLYEAAQSMLRSKKWSWLKAWAMQIARRRGMKKAIVALARRLAVIMHRIWVDGTEFRWTREPVAA

SEQ ID NO: 143660 - protein, 365 aa, unidentified
MKKIAYVGIDYHINSLSIAVVIEGQKRIYDTIRIKNLDKIITKYMKKLSQHYDIRACYEASSNGYAFQRKMSNWGYHCDVIAPSLIPKKAGDRRKNDFRDARDLVQNYAAGMLSVVHPPSEDEEAVRSLIRCRTAFKDNAKSVKLKINSLLLSQDLRWPQSKWTFAHRKWLSELQLSNTHLQQVLEEHLGLLNYIETRLNYLESQIEQIANSDIYAPSVKKLRAFKGIGTLSAMILISEITDFRRFATPGALMAFLGLIPSENSSGDKRVDGSITKAGNRRCRTQLIESVQHYVKSPYISLQMKQDLSQTDSHTANTAIKCLKRLHKRYWALTMKGKIHPVAITAIAREFLGFIWAVMQPEPLAV

SEQ ID NO: 143661 - protein, 370 aa, unidentified
MEKYKYVGLDVHKETIAVSVADPDGGEVRYLGEVPNTADSVVKLVKRLSKEGAKLSFCYEAGPCGYGLHRHLLDLGQVCQVVAPSLIPKKAGDRVKTDRRDSLNLARLHRAGELTAVWVPDGAQEALRDLTRAREDMKHIQLQAKQRLLGFLLRHSKRFEGKDNWTKAHFRWMEEVKFELPVQQIVFQEYVDSVQAMTRRVAAFDEQLESAARDSVFWPVIEGLMALRGVKLITATTIVAEIGDLRRFANAPQLMAYLGVVPSEHSSGESKSRGGITKTGNGHVRRVLVEAAWQYRYPARKTAVLQRRAERASEQIQEIAWKAQKRLCARYRLLEARGKLKVQVCIAIARELAGFIWAIGQALPQPAAKA

SEQ ID NO: 143662 - protein, 338 aa, unidentified
MNYVGIDHHRQYSHITWLDERGEVVKSGRVANRRRELEGFLQGARDVRAVIEAGRSSYTMVDVLVDLGIETTVAHPKDVKAIAKAKIKTDERDSYKLAHLLRTGYIPEVHKRSRENRCSQRVLRQRAFYVGKQTAVKNRLRALLAQQGEEIRSEVERVENLFTDKGMKVLKGLALPEREAQLVGALLRTYHHLEERINETNALVKELYEKMPSARLIQTVPGFGIFLAVLVAVEIEDLGRFEDVSKLHAYAGVIPSTHSSGDRSYHGKIIKEGNRWLRWAAVEAVWPALRADFDIRNFYDRLKKRKGANSAKVATARRLLTIIYRMLKENRPYIPHKR

SEQ ID NO: 143663 - protein, 463 aa, unidentified
MPKARKSRKKLGLKVDVSAGLETLHHHAAGIDVGNAEHYAAVPVGRDPQPVQTFGSFTADLHRLAKWLKACRMETVVMQATGVYWIALYEVLEGYGLQVKVVNAKYTKTLPGRKTDVLECQWLQKLHTFGLLNNSFLPPEEIRVLRTYLRQRENLVAAAGTCIQQMQKVLTQMNVQLANVISDLSGMTGMAILQAILDGQRDPQQLAALADPRVQASRKEIAQSLAGHWREDLLFVLRQVHGLYFTYLESITACDQRIEAHLKTMPAKVDVVAQPLPEARPKDRLPNRKHIPQFGLREELYRITGVDLTRIDGIQVQTAQVFISEVGVDMTRWPTEHHFSSWLGLSPNNQITGGKVIRRGTKKVLNRAATALRLAAQTLHRSQSYLGAKYRRLRAKLGAPKAITAMAHHLARLIYRLLRFGTQYHDKGVQQYERKYRETEMKWLQKQAAKLNMQLIPTGALTK

SEQ ID NO: 143664 - protein, 410 aa, unidentified
MAYKVAGIDVHKKVLMVVVCDTEQAELGFQRKRFGTTTYDLQQLSAWLRERGVQQAVMESTAQYWKPVWFQLEPHMRLALAQAFSNRAPRGRKHDFRDAERLVRRLVAGELILSFVPEPEQRTWRTLTRMRVQLTRDVSRLRSQLECLLEEMGIKLAAMVSDLLGVSGVRILRALAQGERNPQKLAALGEESLHCSEKHLIQALTGHPQATHRQLLGLYLDRYQFLKEQIQRLDEMIAQAMKPHEEAVIRLAAAAGFGVESAQQVIAEVGADAGMFPTAGHLAAWAGTCPGQEESAEENHSSRSPKGNKYLRRILNQCAHAAVKTKGSHFQIVFRRLLPRLGYNGAIWAVAHRLCRLAWKILHDNVTYVEQGDSDPATKKRRAQALVRKLRNLGYQVNITLISQPAAVTT

SEQ ID NO: 143665 - protein, 347 aa, unidentified
MNYIGCDSHISSLDCAVVNERGQETKKQRMNTGVKELMEFVKSIPKPRTIIIEEGTLAGWLLEVCTAHGEKLIITDPKRNRWIGRAGQKNDTIDATKLAHLARGGYIKEIHHPIGHRRRFRELALSYHDTVKSQTRIKNKLKAKFRQNGIRCSGETVYSARYREEWKKKLPQDKLVQVMVAGLWQQLDQVQEVQEELLGHIREQSRHYSEIKRFKQMPGIGTVHAATISAIVETPHRFAHKKKLWMYAGLGLAEKASGEKVYSRSLTRTYNRLLKNALKQAAEAAIIAKDNQFRRQYLRLTIEQGIPSHRAKLTVARSILATIYGIWKSGEDYDPNIDKRRAESNKT

SEQ ID NO: 143666 - protein, 352 aa, unidentified
MAKNDFDELMSIGVDIGKDVFHLLGFDRNGRLVLRKKIKRMELVATFEELPRCIVGLEACMSAHFVSRTLRKMGFEPRIIPAIYVQPFNKGQKNDYNDAEAIAEAALRPNLKTVSEKTQEQLDLQALHRVRSRLVSRRTATMNQIRAFLIEQGITVRKSVAALRTSLQAILDNRDDEMSLRMRKLILGLQQDWIWIDKRIEMTTSEIEGVSKSEASCQRLMTIPGIGPIISTAVVAAVGNGEAYDRGRDFPAWLGLVPRQHSTGGRTILGRITKRGSRYLRMLFVQAAQVIMMRPKNWPKFSFGPWLEAAATRMQHNKLGVALANKLARIAWSVLNSGKDFDWKEKEFATAI

SEQ ID NO: 143667 - protein, 276 aa, unidentified
MENVALIGIDLGKHSFHIHCQDRFGKALLRKKFNRTKLIESLATFPVCTIVMEACAGAHYMARRLAEFGHESKLISPQFVRPFVKSNKNDFIDAEAICEAACRPSMRFVTPKTESQQTLGALHRVRESFVRDRVKASNQIHGFLLEFGISLPVGHAAIKRLPSVMAEHELPARLITMLERLHAHFKYLEQQIAEIDKELASQLGDDDLGQRLMTIPGVGPITASVLAAELGDGKHYRCSRDFAASVGLVPRQYSTGGRANLKGISKRGDKNLPDYP

SEQ ID NO: 143668 - protein, 311 aa, unidentified
MDATVVVGIDVSKDRLDVHVLPSGENFAVARDEEGVSKLVARLAALGPYAIAMEATGGLESLVAASLNGANLPVIIVNPAQVRAYAQALGKRAKTDAIDAAVIARFVEATKPVIRALPDADTVLLAQLMTRRRQIVQMIVAERQRQTQLPTRHLRRSAARLIKALQRELDVLDRDIDSSVRGSPIWREKEELLRSVPGVGPIIARTLLAEMPELGTLTRREIASLAGLAPWTRQSGRWRGKSFTGGGRAPVRTALFMAALVGARFNPILKAFHQRLIAAGKPKMVALIALARKLLTILNAILRDNSPWQSA

SEQ ID NO: 143669 - protein, 404 aa, unidentified
MLFVGIDWASRAHELCVVDEQGAIVERFGFAHSEHGIGGTLERLAKLCSPREVPVAIERPDGLLVDRLLEAGHEVVPIHANAFHAARPRWEGAGSKSDPGDAYRLSDLLRTDYHRLRPIQPLDQATRELQALVRLRDDHVKARVAATNQLAALLGAHWPGAAAIFGRLDSEIALAFLDRYPTPQGTQRLGESRLASFLRRHSYCGRRSAEELLTRLRQAPQPVHALDAHIVAELVQAQTRLVRTLLASIADLDRAIAAAIDQHTKAQLLRPLPRVGTINLGQLVAEVGPLLDRTQSADQAAALCGAAPVTKRSGQQRAICFRYATNAKARKALTIWADNSRHASTWAERIYRDARARGCRHPHAVRILARAWLRVIWACWHTDTPYDPARRRGQERHLAPQSLT

SEQ ID NO: 143670 - protein, 357 aa, unidentified
MNRTHTLSFADSHFSVGVDMHRKNWKVSIRSAGIELKTFSMNPSPLELLAYLHARYPGGIYHIVYEAGFCGFWALRVFQQHHVDCIIANPADVPTTNKEKTNKSDPIDSRKLARELEHNSLHGIYIPSLEQEELRMLMRLRYRIVQQQTRTKNRIKGLLHTQGVDIPLQFTGNKRWSHAFILWLKSLPMSTSAGTFTLHNLITQLKELRQHNTNILKQLRTEATQATIAPLINALLSVPGIGFITAMTLYTEIMEMKRFPNENHLASFIGLVPSLQSSDTTIYANNLTVRQNSFLRSLMIEAAWTAVREDPALTVKFNHLAQRMKSQDAIIRIARTLVRRIRHVWITHEHYVYSLVA

SEQ ID NO: 143671 - protein, 343 aa, unidentified
MFYVALDVSLRSVAVCIIDQDGKVKLERSVPSDVPDLIRCLREFGQPIHQVGLEAGTLTQHLTYGLREAGFDVVCMEARQVNAALSAMRNKTDKHDARGIAQILRAGWYSRVHVKSVEAHHTRALLTSRKVMQRKCIDLENEIRGLLKVFGVKLPMRLSRGAFDEAVRDTIESDPALSHALLPMLQARGVLFDTFLELDRRVKRKAREDAVCRRFMGVPGVGEITALSFKAAVDDPARFKSSRTVGAHFGLTPRRFQSGEKDNPGGISHAGDRDMRAALYAAANAMLMRSIAWSSLKAWGVRLMKTKGRRRAIVAVARKIAVVLHRMWADGSDFRLGSQEAAA

SEQ ID NO: 143672 - protein, 317 aa, unidentified
MDVAFKSFVGIDIAKRTLDVHVLPERTSLKPPNDSKGRGQLREKLPPPGECLIVVEATGGYERALVAELIDAGHQVAVVNPRQVRDFAKACGILAKTDRIDAAVLARFGQAVVPRTQTKIPEKQLELQDLVVRRRQLVELRTAEMNRKENVASKFVKKSLQESVDALTKQIRRFEKRIAALVQSDDEWKQKAEIVQSAPGIGPGTSATLIAEVPELGKLSRRKISALVGLAPFNRDSGEFRGRRAIRGGRSSVRCSLYMATLSARRSNPVIRAFSDRLKALGKKPKVIITACMRKLLVILNTMVKNKTHWNPAISTT

SEQ ID NO: 143673 - protein, 342 aa, unidentified
MKFYCGIDLSARDCHLCVIDQELKIVVQQKLRNELPKIVQLLEPYKANLKIVVESTFNWYWLIDGLQAAGFDVVLAHTLGLYLITGAKVKTDRRDAYSLAKLLLVGAVPAAYIYPAETRPVRDLLRRRLHLVQVRAGEYGSLRRLLLRQGILSSRQQEIKTATEAELEQWFEHPLVRLHARQELRRIALYSEQIAELEKTIMGLAQTEQAYELLLQLPGVGQTIALTILYEVGELTRFANVKVFSSYCRVVPGIAQSGNVTGRGRASKQGNHYLKAAFSQAAVHAVRCYPKVRRYYERQLKRHQGRGRQMICYNIIAHKLAQATFHVLKEQTEYREELLFGR

SEQ ID NO: 143674 - protein, 341 aa, unidentified
MKQIIRQSIGIDISENDFHACHYVLDLRGRTIRKGKVRVFKNTLPGFKSFLTWVEKIRASCSVELSLVMEATGVYHEQLAYFAHERHHVVKVLLPNTVKAFARSLNTLSKTDNIDAQVIAQMGVERSLRTWQPMSPLMQELKSLSRQRQAFIKHKIALSNQLHADLKRARPVKNNIKRDKLMIAQYNKHIAQIEKEMEQLLKDDQPLKVNIKRLCTVPGVGFITAATVLAETDGLVLFNSESQLISYCGYDVKRQDSGSSVRGKTSISKSGNSHIRGVLYMPSMSSMQLEGPFRDCYYRVVDRTGHGKMGLVAVQRKMLKVMFACHKKQEDYDPTYHANRA

SEQ ID NO: 143675 - protein, 345 aa, unidentified
MALFVGLDVSLKTTSICVVEADGSQVWEGKAESEPTALIKALIGWREQIALIGIEACPLSEWLYGALVESGFQIVCIETRHAQRFLSSRPNKTDRSDARGIAEMMRLGHYRAVHVKSKASQILRTTLIARRKFVDHMLAIEDTIRGLLKVHGLKLGLVHRARFATKVEAALADAPELRLAIEPLLDVRNAMRAKKALLDRQLSQMARKDEVCRRLMTVSGVGPIVSLSFKATIDDPARFKDSRAVAAHLGLTPRVYQSGEIDRSGNISKCGDKLMRHALYEAANSHLRIAKKWSVLRTWGIKLAKRVGAKKACVAVARKLAIIMHRMWVTGADFRFVQPSASNAT

SEQ ID NO: 143676 - protein, 413 aa, unidentified
MDVFCGIDWAEDHHDIALADRDGKLLARRRISDDAAGLTALLGLLTEHGDSADDPVPVAIETPRGLLTACLRATGRKVYPINPMAVARYRDRHSVAGRKSDHGDAVVLANILRTDRHVHRPLPADTELAQAIAVLARAQQDAVWARTGAHNKLRSHLREYYPAFLAAFADVRGGITRPEARTILAAAPGPAAGAALTLTQLRTLLKKAGRRRGIDAEATRLREAFGTPQMRQLPLVEQAMGRQALALLRQLDAACASADDLEQATVESFNQHPDAGIITSFPGLGPLTGARVLAETGDDRSRFQDAKGLKAYAGAAPITRASGKTTAVLHRRIKNQRLAAAGYVWAFAALTASPGARAHYDRRKADGDRHAAAQRNLFGRLLGCLHHCLATSQHYDENTAFPAPAPTAHAKAA

SEQ ID NO: 143677 - protein, 505 aa, unidentified
MERLCKGRRPGRAELNSPWKISMKPKQQEKNKKAICRPTQNNWHAMNRKQRRELTRKLQSEDLSLEVVHPDAAGIDIGNESHYVAVPPTRDSQSVRRFGCTTSELKEMAVWLKQCAIRTIALQSTGVYWIAVYDILEEAGFEVYLVNARETKNLPGRKSDVQESQWLMKLHTYGLLRNSFRPSQEIRTMRTYWRQRNDLVRAAGRHIQRMQKALTQMNIQLANVLSDVSGMTGQAIVKAILAGERDPYELAALRNWRVKASEEEIARSLEGNWQEDLLFVLQQEQDGYEFCQRQMAECDQRLQQYLQQLEDRSHGAGLPEEKRKERLRKKKKGNAPQFDLRAELFRMTGADLTQIDGIDVTTTMTILSEAGWDMSKWKTEHHFVSWLRLCPDNRISGDKIIGKGRLPTNNRVTTALRMAASTLRLSNTYLGAQFRRLRTKLGAPVAIKAMAAKLARLVYRVLRYGMTFIDRGAEFYDAQHRKLQINYLKRKAANLGFQIIEASAA

SEQ ID NO: 143678 - protein, 386 aa, unidentified
MSESSALSSSSASSSSMYYVGLDVHQKRSSICILDSAGKQVKRLEVKGSWAQVVQAVAQVPGPFSICYEASCGYGYLYEKLAPLPRARHVAVAHPGQLRLIYRSKRKNDRVDAAKLAKLLYLDLVPQVHVPRADVRAWRALITYRHKLISKRVAVKNQFRALLRGLGIIALPGKRLWSGKGLKWLKEQSLSESDALRRDMSIEELEEVNQKIRRVEKELNRRADAHPGVTLLRTIPGVGVRTAEAVVAHLDDVSRFSRTKQVGSYFGLVPCQDQSAGRERLGHITRDGPPAVRKLLCEAAWQGIRRSPALKEFFERVTRGEADRRKIALVATAHHLARVMAAMLRTGETWREQVRPDSMKKEKKKNEGRAAPGGCPASPPRKTTAA

SEQ ID NO: 143679 - protein, 373 aa, unidentified
MPKYSTAFGMDVHLRSTTVCALDADTGEAVTRRFPGNPWGEIAGWMDGFPGPSLAAYESGYLGFAPQRELAGLGVECVVAAVSKIPRSAADSASKNDRNDAARMAKAILAHDISPIWVPSPEVEGIRDLAGAHDGATARLATAKQRLLAFLAKRGFVYGGTTPAGNPRKYWTYDFLRWLDKVRPEDDGGVRTLAALRNEVEAAAEARADLLSEYRAAVDASPIAAEVAALQSIKGCAFALAAAFSAEVGDFTRFRSGRQVTAYFGLAPSQRSSGDSVRLGGISGAGNALVRKLAVEGSWCYAAARHQPKLMPRDTGVPLEIRMHGRKGSERLLRRREEMLERGMPQAKANAATAAELVRWLWALGMMCREGAE

SEQ ID NO: 143680 - protein, 386 aa, unidentified
MTVVVGIDVAKDKHDCFILNSEGVVLEDVFTIPNTLEGFTRLLSKIQSHTTPRDKIKVGLEATGHYSYNLLGFLLNNGLTTYVLNPLQTNLYRKSLTLRKTKTDRVDARMIASMLLSDVGLKPYTDTAYHNEELKSLTRYRLDKVQDRAKLKSSVSRLVCILFPELEKLVSTLHMASIYALLEEFPGAKQIANANLLATASKGHYGREKAVEIRDTARASIGSHMPAKSLELRHTIHLIRELDREINDIEAEIQKIMDELDSPITTIPGVGLQMGAMILAEVGDFYNFDSPDKVLAYAGLSPSTYQSGQLKNCYPHMEKRGSRYLRYALFNATKYVCIWDPTFAAYLAKKRSEGKHYFVAISHAAKKLVRLIFALERSGQSYRQAA

SEQ ID NO: 143681 - protein, 338 aa, unidentified
MKLYAGIDLHSSNNYISIIDEEDQRLFQKRLPNNLEIILPALEPFKEALEGVVVESTFNWYWLVDALQDHGYKVHLANPAAIKQYEGMKVIDDKYDAFWLAHLKRLDLLPEGYIYPKEERQVRDLLRRRLLFVRHRTSHILSLKSSISRNLGVSMSVREIKKLECKDTEKLFDDAYLALAAKNSISLIRFLTERVKEIEKEVLFHVKVRPEFRSLLTMPGIGKILGLTIMLEVGDIKRFPTVGDYSSYCRCVKSERSSNKKKKGEGNRKNGNKYLAWAYVEAANFAVRSYPEFQSFYNRKKSKRNGIVAIKALSNKLARGSYYVMRDKVPYEASKMFR

SEQ ID NO: 143682 - protein, 357 aa, unidentified
MDSRRLHRKTVGTPTLRRSVMTTLTFGLDIAKNVFQVHGVDGQCKLRLQRKLRRGEVLRFFARLEPCLIGIEACHSSHYWGRELSKLGHQVRLIPTQYVKPFVLGGKNDANDAAAVCAALRRADIHSVAIKSAEQQSVQSLHRMRERLIHERTAKSNQIRSMFAEEGFVFATSIGKLRSSVASLVGNPNATVTPLLRRLGAMYLEQIATLERWLAELTTQLRDIFSQREDCQLLASVPGIGPVVATALVGTVGDPRQFKNGRQFAAWVGLTPRQRSSGGKVRLGRISKRGDTYLRTMLVQGARAVMRFMGRRADRQALWLQRLVQRRHQNVAVIALANKIARIAWAVLARRIAYSPA

SEQ ID NO: 143683 - protein, 408 aa, unidentified
MKTLHKRCAGLDVHKAEVVACVRLISKRKVEREVRRFPTTTQGLLALAEWLESAGCTDVAMEATGVYWKPVWHILEGRFALILANAAHVRNVPGRKSDVNDATWLADLLAHGLIRSSFVPPPAIQELRDLTRTRRQLTREIVQHVQRIQAVLEEANIKLCSVITDIMGASGRRMLKAMIAGETDAEKLAALGHERLGCTRAELVEVLTGRVREHHRFLLGQHLRTIEQLKDSVVAFDARIEAALSPFHDIVERLEEVPGLAATSTETVIAEIGTDMSLFPTAGHLLSWAGFAPRLDESAGKHRSTRIRKGAPWLKPVLVQAAWGAARKKNSYFQAQFLRLKARHGAKKAAIAVAASILTTVYHMLRDGTCYQDLGPEYFTRRNPAQAAARLANRIRNLGYHVEIRAAA

SEQ ID NO: 143684 - protein, 310 aa, unidentified
MKGTIVGVDLAKNVIQVCVFKNNKVHSNTEMTPNEFIDWLANLAPVTIVFEACGMSNYWKQKAISFGHEAKLISAKLVSAVRQNQKADKNNALAIVQAALLLEVNFITGKTVEQQQLQSIMRLRELAIKQKTAMSNQLTLLLAEFNLMVSSRNGGLRGVIESTLENAENDFSSEFRAALEAAWQQYLSVVTSITTYDLCLEKSLVTHPEAQKLLKIEGVGTLNAITLYIALGCADIGVVSTGKDASACIGLTPIQYSSGGKVKLGSIGKHVKNSILRSQLITGALSAVSQKRSQDDGQNRLRHAHTGYRV

SEQ ID NO: 143685 - protein, 389 aa, unidentified
MKIYVGIDIAKLNHFAAAISSDGEIIIEPFKFTNDADGFQLLVSKLESFDKNSLIIGLESTAHYGDNLVRYLVTELYQVCVLNPIKTCQMRKNNVRKTKTDKVDTYVITKTLMMQANLRFVSFFDLDMMDLKTLGRFRQKTIKQRTRLKIQLTTYVDQVFPEIQYFFKSGLHQNAVYALLKEAPSPKEIASMHMTHLANLLKVNSHGHFTKEQAKELRVLAQKSVGANDSAISIQITQTIQQIELLDSQLEKIEAEMTDIMKFNDSVIMTIPGIGYINGGMILGEIGDIHRFSNPNKLLAFAGLDPSVYQSGNFQAKTTRMSKRGSRVLRYALVNAAWNVVRNNATFKAYYDAKRAEGRSHYNALGHCSGKLVRVIWKMLTDNVEFNLK

SEQ ID NO: 143686 - protein, 337 aa, unidentified
MKLYCAADLHSNNHFLTIIDERDKRVLEKRLPNDLAVTLQTLEPYRADISGVAVESTFNWYWLVDGLMEAGYPVMLVNTAKARQYEGLKHTDDRYDAFWLAQQMRLGILPTGYIYPKEQRALRDLLRERRRLVRQRTTHVLSTQSTLWRHTAVRLPSKVILGVSKKPWPELPDANVELGVRAHRATIKVLTTHLEGIERTVLKSLQPRPEYQMLLTVPGIGPVIAWTIVLEAGDLRRFVNVGHFASYCRCVDSSRTSNERKKGENNVKNGNPYLAWAFFEAAHFAIQFLPVAKRFYERKAAQRNPILAMKALAHKLARACYYIMRDKVPFDAARLFA

SEQ ID NO: 143687 - protein, 342 aa, unidentified
MKFYCGIDLSARDCHVCVIDEQLKVMVQQKLRNELPRICQLLEPYKAKLKIVVESTFNWYWLIDGLQAEGFEVVLAHTLGLYLITGAKVKTDRRDAYSLAKLLLVGAVPAAYIYPVETRPVRDLLRRRMHLVQVRAGEYGSLRRLLLRQGILSSKQQEIKTATEAELEQWFEHPLVRLHASQELQRIALYSEQIAELEKTILALAQTEQSYELLLKLPGVGQTIALTILYEVGELTRFANVKVFSSYCRVVPGIAQSGNVTRRGRASKQGNHYLKAAFSQAAVHAVRCYPKVRRYYERQLKRHQGRGRQMICYNIIAHKLAQGAFHILKEQTEYREELLFGR

SEQ ID NO: 143688 - protein, 355 aa, unidentified
MNFYVKQHKYYCGVDLHARSLYVCIIDSEGMIVKHKNIDATPEAFMNIIRDWREDIVVAVECMFAWYWLSDLCRKENIPFVLGHALYMKAIHGGKAKNDRIDAHKIAALLRGGMIPTAYVYPSEMRATRDLLRRRNHLMRKRADLLAHIQNTNHQYNLPAFHKSICYKGNREGVAERFSDECVRKSMAVDLSLIDHYDQLLRKLEYYICKKAKAHDPEALFRLLSVPGIGQTLSLIILYEIHDISRFPSVQDFVSYSRLVKSAKESAGKRYGTSGAKIGNAHLKWAFSEAAVLSLKQSAEIKKYKAKLVKKHGKAKALTILAHKIGRAVYYILKRKEVFSIDKFLNKQLIQAGRA

SEQ ID NO: 143689 - protein, 409 aa, unidentified
MMKQNIIFGIDVSSKSSTVCVVIDRIKQGETFKITNDSFGYQDLLDRLNQYLITPLVVFEATGVYSLSLQAFLEDYHIKYLKLNPLKAKKLMDNNLRHNKTDKVDAYRLALIQFNAPQKLRAPQPKEYHELQNASRYYEELTQALIINKNQLHRNLQSTFPQIESILSTSSGRVYWTIVSLFPHAQYVLNHNESQVFQSLLAISGIGRQRAHYLTTRLYALARQAYPYDNESSITIRAIQRNIANLLSLSAEKDNVINYMEKLAMQANARSLNIYESIPGIAKTTAVRLVAELGALRRFDTSAQIDAFVGIDPGRYQSGEKDSHLGITKHGNHLARKILYRTITQMETVKATQPCHITDYYDKKKRSSNSRGYKKIAIASVHKLIRTMFALIKHDQLYDYNVATHNQRL

SEQ ID NO: 143690 - protein, 395 aa, unidentified
MNDAKYIGLDVHQATISVAVLDSTGKLVMECILETKAAIILQFFHGLRGSLHVTFEEGTCAAWLHDLLKPHVTEVLVCDPRKNALLKAGNKNDRIDARKLADLLRTGLLSAVYHGENGVRALKELARSYLTVTQDLTRVMNRLKALYRSWAIPCTGQRVYAPRYRSEWLAKITEAGVRRRAEFYYNQLDALQALRREVRHDLLAESQKHNARKWLRQIPSIGPIRAALLIALMQTPHRFRTKRQLWAYSGLALKTSTSGEYRFVEGQLKRSRKFLAIRGLNANHNHDLKNIFKGAATRAAAVPGPFHEFHAAAVPGPFHEFHAALIAKGMKPPMARLTLARKIAAITLLVWKKGVRLCAGINRHEVENARVLRERTSDPPGPEFCAEHREVHSEA

SEQ ID NO: 143691 - protein, 377 aa, unidentified
MKKVRFIGLDVHADTIAVAVAEPGGEVRSLGVIPNRPESIRKLVKKLGPVGSLRVCYEAGPTGYVIYWQLTALGVLCEVVAPTLVPTKAGDRVKTDRRDAEKLARSYRAGDLTAVWVPDAAHEALRDLVRAREAAKKDQLRARHRLGKFLLRHGRRPPTAMTAWSQRHLTWLRQVQFEQPAQEATRLDYLHEVDHVAGRIDRLERAIDEAVKTAPTRMRAVIEALQALRGIALVSAVTIVAEVGELSRFARAPQLMGYSGMGAREDSSGPRTRRGGITKTGNAHLRRIAIEAAWAYRHRPAVGGTLRKRQATVSEEVKAIGWKAQLRLHARYRKLLGRGKCRQHVVTAVGRELLGFIWAIGVTVERRQGETSSSMAA

SEQ ID NO: 143692 - protein, 359 aa, unidentified
MKKKRLWAGVDLGVDTASVCVIDDAGDVVHERDCLSCPKDVRHALTGFRRTRFAGVALEAGTGTYVARGLRNFGYPVELFEARQLSKFLRARRNKTDAGDARGIAEAGRISASLVSRVYLKSLESQALLSRLAIRRHLVRQRVAAVSMLGRQIELFGGRLRCLAKRLDFRSEAETEIRQIRLNCSDALVRQLRYLADHCERLVAYQRLVDRELEQMARENDVCRRLMEIPGVGPICALTFYAAVDDPHRFLRSTDVGSYFGLAPRLHESGTTSKRPRISKMGNRHVRGLLVQAASMYMIYCKQDSGLRDWTVRLQQRLGRTPSRVALARKLAVIMLAIWKSGDRFNPMHRLSISSGQSC

SEQ ID NO: 143693 - protein, 325 aa, unidentified
MNQPILYCGIDMSADSFDICYLQPGGELASDKLPNTSSGFKQLLKLCPPNYRFVMEATGAFHLPLCFFLHEKKCFYSVVNALQIKRYIQMQLERSKTDKKDARHICMYGIERHPNQYQMPDQQYFECRTINNAIEAITAHIVSYNNKIYAARKLKIDADLTIKSYQQIVKTFKNELKKLQAELDQKLIEWQPDLLKQIKSVKAIGKRVAASLIVFTQGFRHTHSYQQLISYAGLSPKEFTSGKSIRGKVRISKIGGKQLRHILYMAALNAKKTNPACKALFDRLVLKGKNKKLAIIAVCNKLLKQVFAVVKSGVPYSDQYYKIIA

SEQ ID NO: 143694 - protein, 317 aa, unidentified
MTENCFAGVDVSKGKLDTCLTPGRQRHSCSLDKIEGLIAWLKKRAPRVVAMEATGGYEREAAAALAAEGFAVAIVNPGQVRAFAKASGRLAKTDKLDAETIADFVAAMRPEPRPLPAQETAALQALVVRRRQLIAMRRAEMTRLETTKETSLRKGVERHIAWLKAEIAKIDDDISGKIEASPVWRAKDELLQSAPGVGDVLSRTLLAELPELGSLCRGQIAALVGVAPFNRDSGKRRGLRSICGGRAPVRHVLYMATLASVRSNPVIATAYAKLRRAGKPPKLALTACMRRLIVILNTMVKNNTPWRPNVLTSNTVA

SEQ ID NO: 143695 - protein, 393 aa, unidentified
MYLVGIDIGKLKHSFCLLEKETGEILVEPVFFENSRDGFNVLLSSFKHLPQKDILIGMEDTGHYNLALLKFLLDRNYQVALINPVATNLTRKMQGGISKNDKLDTLTICDVLSSSQRVKSYRISKYSSFDLYEQKLLTREHHNLKEEENQLSNRLQKCIDVVFPEFNSLFKSKYGIVYMNILKEFGSADAIAHADIRTIRKCFDTGRGKHISLTAEELKEAARNSIGFPSSSEATQIKHLVARIELIKEQIAEIDKKIEEFSIQNNSPILSIPGISHFSGTSILAELGDIHNYSKPSQIIKFAGVAPLTYESSQFTAQHTAITKKGCKYLRKTLYQIITPVIQYNPVFRKFYLLKIAQGKGHRCAQGHCVRKLMRVIYHLLSTGTQFDPALLR

SEQ ID NO: 143696 - protein, 391 aa, unidentified
MIYVGIDVAKDKHDCFITNSYGEVLFKSFTIPNNRDGFETLFQKVQSVSDDLTKVKVGLEATGHYSYNLLGFLLDKGLTTFVINPLHTNLYRKSLSLRQTKTDKVDARTIASILMSDVNLKSYSDISYHNEELKSLTRYRFDKVKERAKLKSSVSRLICILFPELEKLVPTLHMASVYALLSEFPGAKQVANAHLTRLTNLLSEASKGRYSKDTAITFRDAARTSIGSNMPAKSLELKHTIKLIKELDSEIDEIENEIKIIMDEINSPILSIPGINYRMGAMIIAEIGDFSRFDSPDKILAYAGFSPSTYQSGHLYGAYAHMEKRGSRYLRYALYNAAKYVCHWDPTFTAYLAKKRAEGKHYNVAISHAVKKLIRVIYHLEKTNQQYIKAS

SEQ ID NO: 143697 - protein, 414 aa, unidentified
METYRIAGIDVHKKVLAVVIGDVAAPGELRFENRSFGAEAGDLGKLRDWLRERQVSVVVMESTAQYWKGVWEVLEEAGLHLELAQAQSNKAPQGRKRDFADARRLVRRFLADELDLSFVPNPEQRLWRTMTRAKEQLVRERVRLKGQLDSFLEECRIRLSSHVTDLLGVGSRRMLEAVASGMADPVAIAELATEGLRATPEQLAGALKGAVAINPVQRKMLAMMLERLELIERQIEELDRNTAEALRAHQDAVERLAEMPGIGVDSAQRMIAEVGPQARAFDTAGKLAGWVGCCPGREESAGVSRNDRSPKGNRWMRTLLNQAANAAVKNKGSVFEIRYHRLKGKIGHGKAIWAVAHSLCRVLWKILHAGVRYEERGQILNPQAARHRRNRLVRNLRRLGYQVTLTPSSPGALS

SEQ ID NO: 143698 - protein, 339 aa, unidentified
MPLYAGCDLHSNNNHFALVDQQGKRVDHWKLSNDPELILATLESQQSKIVGIVVESTYNWYWLVDTLMGAGYRVHLANPAAIQQYSGLKHADDKHDAFWLAQMLRLGILPEGYIYPKEERPTRDLLRKRGHLVRLRTSLMLSLQNIIDRNYGLRISGNDMKRLREDRVSPFFAGDGDLILVGSVSKEAIDFLTRQIQKIEKVIEEKVELRAPYRYLLTLPGVGKILALTIMLETGPISRFAKVGNYASYCRKVSSQWLSNEKVKGKGNKKSGNKYLAWAFSEAAEFARRQEGAARAYYQRKRQRTNLMVAHSALAHKLARAAYYLMRDEVPFQPEKLFS

SEQ ID NO: 143699 - protein, 443 aa, unidentified
MSKKRNSHLRGERGQAFANLIRGIPSEQILCVSLDISKYFHVVMMHNGLGEIVKPAFEIDFYQSGFDQLCQAIDQAKAETQAQVVLVGMEPTSHYFENLARHLLQHAQPVTLINSFAVKKNRDQQLMHREKTDPIDCGAIGDLLRRGEGTSYKPASGVYLQLQQLDRVRLSKVKIESMLKNQIIAHLDRIFPGLVILSKPARERYQPIFQVNFWQCQTLQHLLRVCPNPHQLVRMTPEQLVQAFRAQNYRLGRKSAAKIIARAQIALLPEPQLVAIRCELLQHDLRLLEVVQAHIAELEQRLTELVAQTPFQAWVQLKGLSVVQVASLAAAIGDPHNYTHAAQVFRRAGLVSGRNDSGNRQRQGQGKSIVKVGDVYLRRALMNAVTTMLLHQPILGCYHRKLCRKKHPGVARVATARKMVGILWATLHDQYPVSLISCKGAIM

SEQ ID NO: 143700 - protein, 416 aa, unidentified
MSFALPEALFFTGIDWAAETHAVCVMSAAGKIAAGFTIGHSADGIATLTRRLAKYGDPGEVPAAIERPDGRLVDLLLEAGHPVVPVKPDAIRTWRDGEVLPGAKSDAGDAAVIAGYLRLRARKLKAAAPYSDQTKALRTVVRTRGDLVEMRVAATGQLSALLDAHWPGAKAIFADVESPVSLEFLTRYPTPAAAAHLGEKRMAAFCVKHGYCGRRTAVELLTRLRSAPAGATGEALTEALRDAVLAAVSVLTALNASVKSLDRSIAAHLGEHPDSVIFTSLPRSGQVNAAQVLAEWGDARQAHEHPDSVAALAGVTPVTRESGKHRAVHFRWASGKRFRAAITTFADSSRHASPWAAEIYNHARASGKDHPHAVRILARAWIRVIWRCWLDGVPCDPALHGAAATLTKQTAEQIAA

SEQ ID NO: 143701 - protein, 414 aa, unidentified
MEVVYRCCAGMDVHKKSVAVNLLRRGLAGEADMDEVRTYGTMTRDLLSLCDWLREVGCTHVAMESTGVYWKPIYNILADEGLEVLLVNAKHIKNVPGRKTDVQDCQWIGQLLQHGLLRGSFIPPEPIRELRDLTRQRRKLVGQRASCIQRIQKVLEDANIKLSSVATDVVGKSGWDMLCRLTEGETDAEKMADLARGRLKSKKDQLILALEGRVTDHHRFLLRQHMKQIEFLDTMIEDFDRRIDEQVRPFFEFIPLLDTIPGINKTAAAAVVAELGVNMQQFPDEHHLASWAGICPGNNESAGKHRSGKTRHGSKWLRSLMVEIAWSAARTKGSYFRSQFRRLAARRGKKRALVAVAHSILVIIYHVMQNKVPYQELGEEFFDKLNSRRLTTYYTRRLQKLGYEVSLQPKEDAA

SEQ ID NO: 143702 - protein, 404 aa, unidentified
MLTSLSAERFVALDVHKHYVVAGAVTAQQQVVLAPRRVDLDDLPDWSQRHLHPTDAVVLEATTNAWHLCDQLRPLVASVTVAHPLLVKLITSARVKTDARDTLHLARLLAAGLIPAVWIPPQDVRELRALVAHHTRLIRQRTQAKNRLRSTLHRYNIVPPDGGLFAAAQRSWWEALALSAVEKLRIRQDLSVLASLEPLIAEVEEELTRLSGTEPWLSQVVFVLQVPGIGVINALVLLAAIGDITRFPTAKQLVGYAGLGASVHASGQTYQTGHITRQGRKEMRAALVESAWMAVEHHPYWKAQFERLSARIGKKKAIVAIARKLLVVVWHVLSKQEADRNADQAMVTRTMMEWARNKSTATRQGLTRAEFVRRELDRLGIGAEMDSFVFNGRTYHLPASASAR

SEQ ID NO: 143703 - protein, 409 aa, unidentified
MIRYIGLDVHKQWTQVAWHMPDGSIGRERLATCPALLREFAQRLGPDDVVALESTTNATAVAKLLKRRAGKVLISNPLKTRLIAESRIKTDKVDADVLAQLARSGFLPTVWQPTEEVELLRRRSAYHSVLVGQITRVKNRLHAVLHRQMIEVPVRDLFSERGRSFLRRVELPPDERMQVDLDLSILQTLEEAREEARKGLARLAQAHPQAQRLMTIPGIDYPTAVGLLAAVGDMRRFRHPRKLVSYFGLNPTVHQSAQHCYTGHISKQGRIHARWLLVEAAHCAVRCAGPLRAFFLRLRSRKGTNVAVVAAARKLTVILWHMLTNREPYRYAPQRTTRDKLNRLRYHATGVRRKAGPRKGSPLSPLYGTGLRGRTLRSRADRERLNTAQKDYEKLIKERKNGQKTPKIS

SEQ ID NO: 143704 - protein, 349 aa, unidentified
MKYFAGLDVSLEETAICVVDEGGEIVKEMRSESEPEALVSTLSSMRLGFDRIGLEACSLTAWLHEGLKAAGLPAICIESRHAKAAMGAMPNKTDRNDARAIAQIMRTGWFREVHVKDPRCRAWRSLLVARRTVLNEMRTIENVVRAILREVGLKLGTPSRKEFVDCVRTLIGDDKALARTLEPLLGILVTMLREFAKLTKQALDIVRREPVCRRLMSAPGVGPLTALTFRATIDDPGRFNHSRAVGAHLGLTPRRYQSGETDVQGRVSRCGDELARTALYEAAHSLLTRSKKWSSLRAWGMKIAKRRGMAKARVAVARKLATILHRMWVEATAFRFGREPAPVLAAKSA

SEQ ID NO: 143705 - protein, 348 aa, unidentified
MTIVEETRAVTGGVDTHADVHVAAALDELGALLGTAEFATTPDGYAALLAWLDGFGPVTKIGIEGTGSYGAGLARTATAHGTTVVEVDCPNRQDRFRHGKSDTVDAVSAARAALSGHAAGLPKGGTGPVEAMRVILVAKRSARAERVRTLNQMRHLVFAAPDDIRARFYGLNVYNLTRQAAAMRPRPADGVDYVTLYTLRELGRRVRLLEAEIDRFDELLQPIVAAHAPALLNVFGCGLFITATLCVAAGDQPGRIRNEAAWANLCGVAPIPAGSGKTNGRVRLNRGGNRQANSALYGIVLVRMGHHEPTKIYVERRRAEGRNTLEIMRCLKRYVARETFKHLPRGAD

SEQ ID NO: 143706 - protein, 323 aa, unidentified
MHSNYYGIDISKLTFDTVDQEGKHSRYSNDKRGFKEFSKNICKESLCVMESTGIYHLELARFLHTKSVAISVVNPLRIKRFSQMNLQRNKTDKADAKMISLYAQNQEVKLWKPAPKEVEEVKDICQVLEQYIEFRSGLKNKLDALKIKKAPKSLVNSVLDQIETVSVSIEELQKTADDLTASYKPEMLKNILSIKGIGKRTASLIIMASGGFEDFENAKQLSSYFGLAPTETSSGTSINGSGKISKMGNPLVRKKLYMCSLQASRCNTSCKNLYERLLAKGKPKKVALIAVANKLIKQVFAIAKSGLPYDDEYKSTFRSKNIG

SEQ ID NO: 143707 - protein, 391 aa, unidentified
MIYIGIDVAKDKHDCFITNSEGEVLFNAFTIPNNADGFHDLFQKISSLTNDFSNVKVGLEATGHHNYNLLGFLIDKGLPTFVINPLHTNLFRKSLSLRQTKTDKVDAHTIALMMMSGVNLQSYSDTSYHNEELKSLTRYRFDKVQERAKLKTSISRLVNILFPELEKLVPSLHMVSIYALLAEFPSSAQIASCHLTRLTNLLANASKGHYNKEKAIEIRNAAKHSIGSNMPAKSLELKHTIRLIQELTSEIDEIECFIKSIMDEIRSPILSIPGINYRMGAMIIAEIGDFNRFSSPDKILAYAGLSPSTYQSGQLDGCYSHMEKRGSRYLRYALFNATKFVCIWDNQFSAYLAKKRSEGKHYNVAISHAAKKLVRVIYQLEKSGQLYHRAA

SEQ ID NO: 143708 - protein, 299 aa, unidentified
MKYYTSTTQYNCGIDLHARQMYVCLMDRQGQILVHTNVRNNDFNFFLKLIAPYRHDLTVCAECMFGWYWLADACQEANLPFVLAHALYLTAIHGGKNKNDRLDSQKLAHLLRSNLIPPAYVYPARLRPLRALLRQRTFFVWRRSDLLARLQSHQLAHNRPTLSGRNRYNRDPWEQQLLAHEDHPLRKLALENELALVRHFDTQIIALETQLQRLTKEFAGRDYALLQTVPGIGQYLGLTILHEIGDIERFPTVKDFLSYCRLVKGTVASAGKIKGLRGAKLGNPYLRLWRSRRHRQTRS

SEQ ID NO: 143709 - protein, 393 aa, unidentified
MICVGIDVAKDKHDCVILNSEGKILAGVFTIPNNADGFDTLLQKIRSCTSSDDKIKVGLEATGHYSYNILGFLINQGLPTYVINPLHTNLYRKSMSLRKTKTDRVDAKTIATMLMSNVDLKSYTDTAYHNEELKSLTRYRFDKVRERAQLKQSVSRLVTILFPELEKLVPTLHMSSIYALLIEFPGAKQITEAHLTHLKSLLKDASKGRYGRDMATEIRDAAKHSIGSVMPAKSLELRHTIRLIRELDSEIKDIEAAIEAIMEELQSPITTIPGMGFRMAAMILAEIGDFSFFDSPDKILAYAGMSPSTYQSGHLSLAGTYSHMEKRGSRYLRYALYNATKYVCHWDPGFAAYLAKKRAEGKHYNVALSHAAKKLVRLIYALEKSRQPYRRAA

SEQ ID NO: 143710 - protein, 344 aa, unidentified
MSNLDTCGIEVSAKELVVSLRRQGDLEPLRSFPNTPEGHMIILRDLRRAGRVVRVCMESTGLYGLDLALALSGQEGIEVMVANPRAVRHFAQALMKRSKNDQIDAGVLEQFALHMPFKPWQRPAVAVLALHALARRLRELVEMQTAEKNRQHAAGLSQAIPAVVRRDLARSLRAQERAIERLTRQARKLIAQDPQLAERFELLDSVPGIGETSAVQLLGELGVLAPDLQARQWVAYAGLDPRQYTSGTSVHRKPRISKAGNKHLRHALFMPALVAVQHDPHLRAFYQHLLAKGKYKMQALVAVMRKLLHALHAMFKTRQPYDGSKLFRLNADAAQEVTHVLVAS

SEQ ID NO: 143711 - protein, 398 aa, unidentified
MTESSDYESVQVFIDDDVGKDTHHAVAVNRSGKRLFDKTLPNDENKLRSLISDLKQHGQILLVVDQPATIGALPVAVARSEGVLVGYLPGLAMRRIADLHSGEAKTDARDTAIIAEAARTLLHALRTLKLADEQIAELSMLCGFDDDLAAQTTQASNRLRGLLTQIHPALERVLGPRLDHPAVLELLQRYPSPEKLASLGEKKLAALLCKLAPRLGKRLATDITRALTEQTVIVPGTNAAVVVLPRLALQLITLRKQRDEVALEVEQRVLAHPLYPVLTNMPRVGARTAARLLTEVACRDFASAAHLAAYAGFAPVTRRSGSSIRGEHPSRRGNKTLKRALFLSAFAALREPISRAYYTRKMSQGKQHNQALIALARRRCDVLFAMMRDGTFYTPTAS

SEQ ID NO: 143712 - protein, 352 aa, unidentified
MKNVALQTGAYEKLFIGIDVHKLTWHVTIRNEDVELFSGGIPGHWRAFKRLLARYEGQQVQAVYEAGYFGFWLHDYLEEAGIDCLVTPPSLLPIEYGNRVKTDRRDSRKLAHLLAKGMLRRVWVPTKEERFHRQVVRRRRQLVRDCVRVQSRIKAELQFYGIEIGSPKGKWSRVYFDNLCRIRFKDRWMQRSFKHLLEYYVFLEKQIKKQTQLLKELSKTDKYRDRVNILMSIPGVGLITSMEILLELQDVSRFRRADQIAAYVGLTPSQYSSADKIRMGRITAIGKNTLRSVLVEASWMLISRDKELRERYERIKLRAGGKRAIVAIARSLLIRMRRLLIDDQHYCVRPNT

SEQ ID NO: 143713 - protein, 480 aa, unidentified
MAAQQGTTTEAKPAKPNRKQRREQQRKIWTDHPGLDVVHPHAAGIDVGNSEHYVAIAPDKSAEAVRRFGCFTADLRDLAQFLKAHGILSVVMQSTGVYWIPLYDVLEEAGFEVYLVNARDTKNLPGRKSDVQESQWLLKLHTYGLLRNSFHPTSEIRVLRTYWRQRTEHIHTATECVQRMQKALTQMNLQLANVITDIMGLTGQKILRAILAGERDADKLAEMRNWRIQASHEEIVASLTGNWRPELLFTLKQEVDRYDFCQRQIGECDQEIEKQLNALPSRPRETVPPVEPVAPPKKRKKPQGNSPEFGLGQELVRIAGVDFTRIDGINVMTAQTIISEVGLDMQRWKSEAHFASWLGLCPCNAVSGGKVLRRGTRKVVNRAATAFRIAAFTLRRSDSYLGAQYRRFRGKLGAPKAITAMAHKLAVLFYRMLRFGQEYVDRGQQFYQDKYRQQQISMLNTKAAQLGFYVIPVAHQPAPA

SEQ ID NO: 143714 - protein, 410 aa, unidentified
MEQIHERVAGLDVHRDSVSACARVPGVRREVVAHKARFAATTAGLAALADWLGGEAVTVVGMEATGVYWKPCFYALEDRFEVWLCNAHHVKNVPGRKTDMSDAAWLADVVAHGMVRPSFVPPPPIRELRDLTRYRKRQTDTRAAEVQRLEKVLQDAGIKLTSVASGVLTMSGRNMIEALIAGNRDPAVLAEMAIGRMRTKREALVEALSGHFGPHHAVTARQILDHVDFLDARIAAVSEQVAARMVPFAAAVELLVAVPGISRISAEVIIAETGADMARFPSPAHLASWAGVAPGNHESAGKRRRVGTTNGNRWLRRTLIESARAAARTQASYFAAQYRQIAHRRGPNKAAVAVAHSLTDVIWHLLSSGERFEDLGVDYYQRRRDPEREARRLVHKLEALGHTVTLTPTA

SEQ ID NO: 143715 - protein, 339 aa, unidentified
MHVTTIGLDLAKNVFQVHGIDDHGEIAFNRALRRAQVLAFFERLEPCLVGIEACGTSHHWARELIKLGHNVKLIPPAYVKPYVKRGKSDAVDAAAICEAVTRPTMRFVEVKTPEQQAILAVHRTRDLIVRQRTQTINMLRAQLAEFGLVLPQGVYHPLRFAKDCVDGEQPDLPQDAQEVVFDLCDELLFLHAKILRHSRHMTRIAKSEKRVALLRTIPGVGPITASAIVATVGSGKQFNNGREFAAWLGLTPLNRSSGGKERLGHISKMGDQYIRRLLVLGMTSRIRSIRLEPEKFDPWFADILSRKPSRVAAVAMANKTARMIWAVLTRNEPYKVRTV

SEQ ID NO: 143716 - protein, 334 aa, unidentified
MEQITTVGIDLAKNVFSLHGVDAAGKTVLRRTVRRDRLVEAVAALSPCLIGMEACSGAHEWGRRFQQQGHTVKLMAPKFVAPYRKSDKNDGNDAEAVCEAVGRPSMRFVPVKSAEQQALLTMHRVRQGFVVERTALINRLRGLLAEFGVVLPLRSVTVRRQAADAAEVLPELARRAIADLLEQLRLLDGRIDAYDTEIEAQARLSEPARRLMKIRGIGPTTALAIVATVGNAREFKNGRQFAAWIGLVPGQYSTGGKARLGHISKRGDAYLRNLLVQGARSVLQTAAAHQDRLSRWALELQERRGYYRTLVAIANKNARIAWALLAKNEQLHKN

SEQ ID NO: 143717 - protein, 407 aa, unidentified
MDVHRDFLIACIAATNAQGVTEYQSRRFSTYTGSLRELRDWLLANDCKDVCMESTGKYWFPVHNILEESCHVVVSHLKFVKAIKGKKTDKKDAQWIADLFKHDLVRGSFIPPKDIRQLRDLCRYWVKLSSYMTGEKNCAQNCLTVSNFKLDDVFSNVFGKSASAITTQLLEHPGEQFDVAPFVDGRCKTPIAQIQEAVDGIFTYEQAEKLKIIRGHMDSLERHKAELESLILEIAQNYLPQIELLLTVPGIHDAFTAIRILAEIGADMTVFDTSKHLCSWAGLTPQNAESAGKKKTTRIGKSGAYLKPLLIQVALAASRGEKHPEIYGKKQALQKRRGKKKAIVAIARRLLTAIYHILSKNEPYNPAAYIQEDKNPMARQISQEKAFEMLARMGFIVSNPSPLSSSG

SEQ ID NO: 143718 - protein, 387 aa, unidentified
MPQPNDLSRSLVALDQDSTIIAVVEMSQSSWLVAGMLPGIERQPRKKLEPSAERLLGLLHRWRDEAVKAGRKITRIALAFEAGRDGFWLARWLRAHGVEAHVIHPSSVAVSREHRRAKTDRLDTELLKRGFLGWLRGERGHCTMARVPTIAEEDAKRPNRERECLVGERTRIVNRMKGTLARLGIRNFKPTLRKSAERLATLHTPEGSPLPPNVLAELQRDMARLGFLICQIREIEEARQKRLEQEPETGPHAMVRLLARVVGVGIETADMLVHEVLSRPMRDRKAVARYAGLTGAPDESGAKRREQGLAKAGNARVRRGMIQLAWRFLLFQKQSALARWYQARTADARAGARKTMIVALARKLLIALWRFVTTGETLEGVVLRPAG

SEQ ID NO: 143719 - protein, 340 aa, unidentified
MKNGLKLLGIDIGKNSFHLIGHDAGGHQVLRKCFNRNRLLQFAAQIEPCTIAMESCGGSHWLARKLASLGHRVKLIAPQHVKPYVTGNKNDFIDAEAICEAASRPRTHYVAVKTVEQQVLSVQHRLRQSLVCHRTEAINRVHGFLLEFGIALPATKAAITKVPELIDDSRSDLPLQFKRVMEHLLEDIHRLDTEIKACDAQIKQQLAQDDAGTRLMTIPGIGPITASAFVADLGDASNFRASRDLSAFLGLVPRQFSTGGRPVLLGISKRGDRHLRTLLVQGSRPLMIRIERRDDALGQWVRDLLARKHPNKVACALANKLARIVWAVLRRGSTYNASMI

SEQ ID NO: 143720 - protein, 344 aa, unidentified
MTIVEERTAVTGGAGTHSEVHVAAALDSAGGLMGTREFPAAAAGYAGLLGWPGKFGDLALAGVEGTGSYGAGLARYLAAHGVRVVEVDRADRQERHRNGKSDPLDAVSAARAALSGRASGAPKGRDGAVEAIRALMVARRSARHERTQAINQARALVLTGPDELRARFDGLRAGALAEAVAALRPRPGDAAEYSVRIALRELGRRVEFPGAQAGRLDDLIIPLVTARAPALLSLYGVGPDTAALLLVAAGDHPERLRSEAAWAHMCAVAPIPASSGKTRRHRLNRGGNREADHALRRIVITRMSAHPATRAYVKRRTAEGLSKKEISRCLKRYVAREVYPYLRG

SEQ ID NO: 143721 - protein, 402 aa, unidentified
MRVGIDAHKMKCTTVMFDGDSVTGSFDFQTTRQGVYEFMEKVPEGSIAVIESSTTGKVLSRMLSGKYEVHMVAPPERRVSIKTDRRDAERIVMEDMLNYLRRCYIPSQYIENIRFVVTQQIQIGRRIARVKNQVHALLEMNMIQHELDDMTDIFGVKGLKKLSKIQLPRHDMIALARYLEELKMYVSHHRQLDTEIARIAASDNDVQLLMTIPGINCFTAVAIKSRIGDDVSRFATKKHLCSYAGVVPKANNSGEYISEHNHVKQGDIVLKYALTCAVRGAILANKNSSIKLFYRKISKKGVSPQKAQIAAARKMACTVWKVLSSKQPYTEQDDHMTKRKMKIMSSKAMRIIPTSVMPSKVCELVRNLVDDIDVLGKYHEDSDHIIGKDLSNKNRLKEDILR

SEQ ID NO: 143722 - protein, 354 aa, unidentified
MNSEKYIGLDVHQATISVAVMDSTGKLVMESILETKAATILEFFAGLRGTLSVTFEEGTWAAWLYDLLKPRVAKLVVCNPRKNALLKDGNKNDRIDARKLADLLRGNHLKLVYHGETGMRMLRELARSYLTIVKDLTRVMNRLKAVYRSWAIPCAGRDVYYTRHRAEWLGKIREAGVRRRAEQLYQHLDMLQHLRQQARRELLAESRKHSITAKLRQIPFLGPVRSALSVALIQTPYRFRTKRQLWAYSGLALETRTSGEYRYVEGQVRRSKKLLIRGLNKDHNHDLKGLFKGTATMASVRPGPFQDFYQALLSKGMKPTMARLTLARKIAAITLTLWKKEENFDAKKLKSQAA

SEQ ID NO: 143723 - protein, 355 aa, unidentified
MKNQAIQYLAFDVHQATTVATVRDEHGAIRLRATVPTEASAILALVRGLGGRVHVAFEEGTQAQWMHDLLLPYAERVIVCNVRGRSETTNKSDRIDADGLSEMLRVGSVKSVYHGASGMLTLKELVRCYLNLVDDSTRVMLRIKALFRARAIPTPGTSVYRARERAKWLSRIESRGARMRAGSLLRQLDTLLELRPTAKAAMIVEARRQPGWKVLRSMPFLGPVRVALLLAIIATPLRFRTKRQLWPYAGLAVVTRTSADEEFVNGKLPRRRRAPLTRGLNRNHNPALKGVFKGAANAAAAKPGPLKDFYDACIARGVREELAKVTLARKISSIALRLWKKGELWNPDKLMMQTT

SEQ ID NO: 143724 - protein, 345 aa, unidentified
MKKAKYYVGIDIASKTYTATIGQYREEKGWEIIAKPITFENTNDAFSQFIYWLNTHKVVAKNCIMCMEATGVYGEALAYFLVSNEYTLVVEAPLKVKRAFDPEGHKSDPVDSRQVAEYAYRFIDQRKVWEPKEMIIEQIKVLLTVREQLMAQRTAHRNANQALDRKVVQTPFAQDIHEKAIKELDMHIQEVEAEIKRLIKESPSSLELQRLLETVPGIGPILATFLVVTLQSAPEPYNHKNLAAYIGICPYENTSGTSRNKRATSRHYGPSPIRRLLYLAAMSVRQHCPLFEHYFLRKVAEGKEKQLVMNNIANKLLKVACAVVRTKTPYISGYRSIHPNLLKGN

SEQ ID NO: 143725 - protein, 336 aa, unidentified
MSSITLIGIDLGKSSFHVVGRDHSEHTLLRKQFSRTQLLRFIAQLPPCLIAFEACGGAHWLARVCQRHGHQTKLIPPQYVKPYVKGNKNDFIDADAIAEAASRPGMRFVQPKSETAQVIAVCHRLREGFVTERTAAMSRIGAILLEFGLSLPQGHSTMKQLFCWIGKQEIELPQALYAELMLAHEHYLLLNERIAEQDRKIAEWVKQDDACQRVKTIPGIGDMIASQLVMEVGNAQQFKNGREMAAWLGLVPRQHSTGGKSKLLGISKRGNKRLRCLFVHGARAVMSHMGKGDRPFDRWLMALCQSKPFNVACVALANKLVRIAWAVLNQQTVFKV

SEQ ID NO: 143726 - protein, 367 aa, unidentified
MKKVSTAAVKATKNFSQPKLTIGLDLGDRSSWYCLLAEVGEVLLEQKLSTTPKAMRDVFGAMPRCRIALETGMHSPWVSRVLSDLGHEVIVAHARNVRLIGESRKKDDRLDARTLARLARIDPQLLCPVKHRSAKAQAHLAVIRARAGLVRARTSLINTARGLAKSYGERLRGCNPRNVNPEKAQGLSPELQAALAPLLAATEALSERIYEYNQQIAKIAKESYPQAARLEQVKGVGTLIALTFLLTLEDPHRFRKSRDVGCYVGLQPGRRNSGQSEPQMHISKEGDPYLRTLLVQGAHHILGPFGADSDLRRWGLKLAERGGKNGKKRAVIATARKLAVLLHRLWVSGEAYEPLRNSSQITMQVAA

SEQ ID NO: 143727 - protein, 341 aa, unidentified
MAQISVIGIDLGKQAFHVHGVDAQGEVQVQRRFTRRALSRWMSRQQPCRVGMETCSGAHHWARLLGSYGHDVKLMSPQFVKPYVKSNKNDARDAEAICEAVSRPTMRFVEVKTPAQQELQMLHRVRSRLVRQRTAVVNQVRGFLLEHGIAIGQGIRVIRRRLPEVLEDGDNALTDGMRRIIEELRIELIEADARVEAFNRELERRCQADKNCQRLLTIPGIGPLNATALVSAVGDPANFRNGRDLAAWLGLVPRQHSTGGKPRLLGISKRGNRYLRTLLIHGARAALRGAAQRDDRVSRWALALERRRGRNVAIVALANKMARMVWAVLAYQQDYRPQIVH

SEQ ID NO: 143728 - protein, 366 aa, unidentified
MKKISTVATNRNEIFKEHKLTIGLDLGDRSSHYCILDEAGEVILEHSLPTTPKGIHQVFNGIPRSRIALETGTHSPWVSRQLTQMSHEVIVAHARNVRLIGESSRKDDQLDARTLARLARIDPSLLGPVQHRSAKAQIHLTVIRARAGLVSARTALVNAARGLTKSYGERLRKCGTQQMNREMAKGLSTELREALEPLFGEIESLNERIAEYDRRIEQIAKEVYPEVALLKQVKGVGTLIALTFVLTVDDPHRFQRSRDVGCFLGLRPGRRNSGMGQPQLHISKEGDRYLRMMMVQGAHYILGPFGQDSDLRRWGLRLAERGGKNAKKRAIVAVARKLAVLLHKLWVSGEVYEPLRNNPKVVGQVA

SEQ ID NO: 143729 - protein, 347 aa, unidentified
MTIVGGFDVHRKQITFDYVDSDTGEVRTGQIRPATRTTLRTWLGKHCPDGDGEFAVEGCTGWRFVAEELTDAGVRAHLADPAETAALRGRKKRAKTDRADARLLRTLLWEGRLPKAWIPPPHVLEVRTLERLYCALMNERREWQQRIAAQLFHQGCPTITALRSRAGRTNVAGAELSAAGRRYVDAALRRIDELTVDIDPLRTELTDFARHQPGCQALQARQYGVGWLSAVIFWAEIGDARRFSSSEQLVRYAGLDVTVYSSDAKRSPGHLSRQGSPELRWAAFEAAKNASRSASPDHGYYQDLAAKRDAKRATLAVARKRLRHSYHILRELGDAAMAMPIPEAEAA

SEQ ID NO: 143730 - protein, 351 aa, unidentified
MLIIGCDLHTRFQQIAMLDTETGEIVTRRLEHANGEAREFYRGLPPGVRVGIEATGCTQWFERLLAERGHELWVGDPAEIRARAVRRQKTDARDAELLLDLLRTGRFPRLWVPTPAERDLRQLLKHRDKLVGMRTSVKNQLHYLAMSQGVCRKRQLWSEEGRRELESLELGLWASQRRAELLELLDRLDPRIGTLDAAVGAEVERRADTVRLRQQKGVGPVTALAFVLTVGPVERFRNSRQLVSYLGLNPSEDSSGGRQRLGHISKQGNQMLRWLLVEAAQSATQHDPEFRQKYRHLKFRRGANVAKVAMARRLAVRMYWILRQAQSAASPVRTSGSSARTVVGQAGSSIL

SEQ ID NO: 143731 - protein, 347 aa, unidentified
MKRIAIDLAKSVYQVAESVQVGRVDRRKRLDSGAFTRYVQEQIEPVEWVMEACGTAHHWGRLMQEKGHRVVLLHPRYVRPYRRRNKTDRNDCDAILEAARCQDIRPVPVKSVQQQQVQQLHKLREGWKKSRVQRINLLRGILREAGVEAPNGIKPFLRQACELIERPEVRALRGALQVVLAEINLYEQSMRECEEQLARWHADDEIVHKLDEVSGIGLLTASAFKTAVGKPERFASGRHLSAWLGMTPSEYSSGERRRLGRISCKGNVYVRTLLIHGARAALLAAKRCKARTPERLTQLQSWALQTAERIGYNKAAVALANKLVRICWAVWCHERRFSGNWHSTKPA

SEQ ID NO: 143732 - protein, 425 aa, unidentified
MKNNFLSTLFVGIDVSSKTNVLCALDFQGNKLLNLKALNNQPGAKVILDNILDCLNSNSLKYVVIALESTSFYSTHIANYLSSNDELLFFKPFVYCLNPKTVANYRKSFVDMDKTDPLDAYIIADFARCGRITCKPWRGAQFLALQRLTRHRLHLIECITREKAYMVSNIYLKFSELTVLDKDDKPFSNTYGVTSAAILTESLSLDDIAYSSIDDLVDFIREKGKNRFSDPYKTVKLLQKAARDSYRLDKVLYEPLSVAIASSFNVIKAMEDEIKTVDKAIEKTIKGLNTTEYLSLTSIPGIGPVFASGVLAEIGTITSFDSHDALAKYAGLTWRSKQSGNYSSDDTRMTKTGNKYLRYYLIEAANSVKNRVPEYKEFYYKKYGEVTTHQHKRALALTARKLVRLIFGLLTKNQIYSSDKVGEIK

SEQ ID NO: 143733 - protein, 329 aa, unidentified
MQQKSIKSKSEYTETATHGTKYLGVDISSEHLDVYLYGKYKRFNNNHEGLKKLKALIDRQNEPVLVAYESTGWLSRILAMQLLSMGISQVCLNPSRVRNYARAIGVQAKTDKKDCEMIARFAEQTHAQANVTESPVLMRLKELQSSLNYFKRRMAHAKSSLSAQRDKFLIREIQRAITHDEKQIARIEKEMHKLIKANQEMQERYDYYLSLQGIGPNTALALISQLPELGQMNRRQVASLVGLAPYNWDSGKMTGKRMTRMGRKGIKSLLYLSVTSLLRLHDHPITKMYERLKLKGKKTIVAMVASMRKLLIWLNAETKKWLSEKTTHR

SEQ ID NO: 143734 - protein, 355 aa, unidentified
MSSEKYIGLDVHQATISVAVLDSTGKLVMESILETKAATILEFFAGLRGTVSVTFEEGTWAAWLYDVLKPHVAKLVVCNPRKNALLKDGNKSDRIDAHKLAELLYLNKLSSVYHGETGVRMLRELARSYLTIVKDLTRVMCRLKAVYRSWAIPCAGRDVYYTRHRDEWLGKINEAGVRRRAERLYQQLDMLQYLRQQARRERLAESRKHAITVKLRQIPSLGPIRSALAVALIQTPHRFRTKRQLWAYSGLALETRTSAEYCYVKGGLRRSKKQISIRGLNKDHNHDLKGLFKGAATRASVLPGPFQDFYQRSLAKGIKPTMARLTLARKIAAITLTLWKKGENFDADKLKSQAA

SEQ ID NO: 143735 - protein, 412 aa, unidentified
MEGETVIAGVDTHKDVHVLCLLDGLGRKVRSGSFGADPEGYDRLAEAIGDPGSCMVVGVEGTASYGAGLTRRLVELGYNVVEVLRPKRDKARPGEGKSDPLDAERAARKAASGRGCSVPKSQDGWVEAVRQLYVARRLAVATSTSCVACAKSMLTTAPSALRERFRGRERPKDLMPLLARGRKAGDALEESVLASLRSVAAVWKEARSQVESLDERIRALLEANAPALLGVEGCGTTTAAALVVAAGDNPGRLKGEAALSMLCGASPIPASSGKTERHRLNRGGNRQANWALYEIAIKRMAYDERTRRYVARRTSEGKSRREAVRCLKRYIAREVYRVLMDPNPDGAAPEGPELAKMRKAMRVTQKKAAAELGLSAATLGHLERGKRRSTKLERRYYELLCELERTLPQTAS

SEQ ID NO: 143736 - protein, 399 aa, unidentified
MEIQDETGRKLAARRLPEGAAGIAALHELIAGYLGQNGDPGQVVVAIETDRGLWVQALAAAGYQVYGLNPKQVARFKERYNLSGAKSDAADAHALADMVRTERHQLRPVAADTPEAEAIKVAARAHQTLIWERTRHTLRLRSALREFFPAALAAYAGLGLTGADTLELLVKAPDPASAARLSAAQITAALKRARRHNAAVKAEAVKDALRVQHLIQPAPITAAYAAAIRATASVLITLNEQISELEGQVEAHFRQHPDAAIYLSQPGIGTTNGARVLAEFGDADGRYASARARKNYAGSSPITRASGRSKIVLARFVRNNRLADALQSQALSALTGSPGARAYYDKQRKRGLGHNAALRQVSNRLVGILHGCLKTGTLYDEATAWPDHHATRHTSRVAA

SEQ ID NO: 143737 - protein, 407 aa, unidentified
MMAPPTCRRVTGGVDTHGDLHVAAALDSATGRPLGTASFPTTTSGYAALVGWLRGFGDVERVGVESTGSYGAGLTRFLRGEGVEVIEVDRPDRKARRLEGKSDPTDAQAAARAVLSGRARSTPKSRDGLAEAIRALEVVHHSAVKDRTRAINQFKSLLVSAPEPVRDALRPLGFAAQLARARRLGDGRGDVVEAETRGALKELARRIVFLDEQTDRLEARIAELGAQASPALMGLSGVGPHVAAQLLAAAGDNPERMHSEAAFAKLCGACPIPASSGKTNRHRLNRGGDRRANNALFTVVLVRMRHDSTTRAYVARRTAEGKSPKEIMRCLKRFVAREVFQALTNPPADLPTGHELRQLRLQAGLSLTTVCNAVGTSPMRLSTIERGLAHDTRLARRARTWLLENRT

SEQ ID NO: 143738 - protein, 391 aa, unidentified
MNKAWVGVDVGKEFHWAHVLDASGRQLLSRKVENDEADILELIDQALSSAEEVVWAVDQPGGSAALLLGLLWERNQRVLYVPGLSVDRARDAYRGESKTDARDAHVIADQARMRPDLGELEAGEQEIAELQLLLARRRDLITDQGRTITRLREVLLSLFPALERALDLNGKGPLILLTRYQTPAQLRRAGHKRVATYLRNRSVKGSDKVAYKALSAARSQSVSLPAQEVASRIVAELAAEVLALKERIESIDEEIGRRFFARPGARILISLPGMGPILGAEFLVCVGDISAFESADRLAAYAGLVPAARDSGKRVGNHRRMRGGNKTLKRVFYQSAFASLRGSPESRAFYDRKRAEGKRHTQALIALARRRVNVVWAMLRDGTTYETRSAA

SEQ ID NO: 143739 - protein, 336 aa, unidentified
MSVYVGIDVHRKRSQVAVVAEDGKVQLNKNAVNGTETLLRLIGDLPAGTPVAFEAAFGWGWLLRLLEDYGFDPHLVHPLQCKAIASARLKNDKVDAATLAQLLRADLLPEAWIAPAEVRQLRALLRHRTGLVRLGTQQRNRIHAVVADFGFDRSGSYLSGPGRGWLAGLDLPAVSREIVADCLAVIDGLAPVIDRIDGELRAHAKADPRVKTLTTLPGVGQFTALVMVAEIGDITRFPSARKLASWAGLTPTVRGSDRTVRHGHISKQGSAWLRWVLNQAAQTAKRSPEFAATYAAIARRRGKKIATIAIARKLLTRAWHLLSDMQAAGPATPPRP

SEQ ID NO: 143740 - protein, 366 aa, unidentified
MKKTITVQAFKGEIFQGQKLTIGLDLGDRWSFYCVMDEAGQVILEQKLPTTPEAMKQTFGKIPRSLIALETGTHSPWISRLLTELGQEVIVAHAQKVQLITKSNRKDDRHDARTLARLARIDPELLGPVRHRSAKAQIHLTVIRARAELVSARTALVNAARGLAKSYGERLHKCGTEQVSRKLAAELSAELREVLEPLLKEIESLNERIKEYDARMERIARESYPQVELLKQVKGVGTQIALTYLLTLDDPHRFPKSREVGCFLGLRPGRRDSGQSQPQMHISKEGDPYLRTMLVQGAHYILGPFGEDSDLRRWGRRLAERGGKNAKKRAVVAVARKLAVLLHRLWVSGEVYEPLRNSHQAMRAVA

SEQ ID NO: 143741 - protein, 422 aa, unidentified
MLEQTQDEQEIIARVAALDIGKAELMCCVRVPDPKGGSRRVQEVKSYSTMTRSLQVMADRLMDLGVTRIVMEATSDYWKPPFYLLEAHGFDVWLVNARDVKNLPGRPKTDRLDAVWLCKVAERQMLRPSFIPPVPIRRLRDLTRYRIGLVSDQTREKNRVEKLLEDSQIKLSVVASDIFGVSGRQMLDALIAGERNPQVLAQMARTRMRTKIPQLEEAFVGHFIDHHRFLLAKMLTRIDALDADIADMDTQIQAHLAPFADAVARLDQIPGVGATAAAVIIAEVGLDMTRFPTPAHLSSWARFAPGVKESAGRKKGTGSTGHGDRYLARVLGEAAAGASNTNTFLGERYRRISRRRGKKKAIVAVGRSILVIVWYLLSDPEVDFRDLGSGYYDSRINPEHKKRNHIRQLEALGYKVTLEPAA

SEQ ID NO: 143742 - protein, 406 aa, unidentified
MSKRRGKAKREQKVAKQELQNLPVLNLDAAAIDIGSEQHLVAVPPGRDTESVRSFGAFTVDLHAMAHWLKQCGVKSVVMESTGVYWIAPFQILEQYGLEVLLIDARAAKNLPGRKSDVLDCQWHQQLHTFGLLSGCFVPAAEIAPLRSYLRLRDELVKASTQGIQHMQKALFEMNVQLANVISDITGETGLAIIGAILAGERDDKKLAELKHRRIVASKETIAKSLEGNWRPELLFALQTALDRYKFYQQQISQCDEQIAQALAKLPTRQLQAQTKPEINTLQSAKEQKLSPLATQLQRIAGVDLTSIDGIGEHIAQIILSELGPDLQRSFRSEKHFSSYLGLCPGTKISGGKVLKRKSRKVKHRVATALRLAARSLHSSDSALGANFRRLKARLGAPEGHHRNGK

SEQ ID NO: 143743 - protein, 360 aa, unidentified
MKEEKRRFVGIDLGKREYTMAIIDKNGKMSIHLGKTSMQGRQGLYRLLEKSDKIALEAGNLAFIMASEIQQRVGSEVRVLNSAKLPFIWDAPTKTDKEDAMKLAHLVEERRDEKLPLVPLPSVKEMERRELASSYGRTVNDRTRMINRLHSLFVKQGITTMVKKNLATLLRRQEAVQVLKGQLREEAEYTMEQIELMEKRIKKLKGDIKKDAKTDEDMQLLQKIPGVGSIVAYAYVAYVGDGSRFSKGAQVSNYLGFVPRLDYSGTIERHGHITKRGNAYLRGLLVQAAWIAVRCRQKSPLKERYIFSTTFQGKSKKKTVVSISRRMTELMYSVLKNKSEYEERPWKGPGKTYAEQAMSA

SEQ ID NO: 143744 - protein, 405 aa, unidentified
MSKDDMKRYHYKNLCINLFIQMVAALKYSTGFDCSKEEFVAAILLVNTDQQNVVKATRKFSNTNKGFIDCEYWINQHKKVDVPVVITMEATGNYHENLAFYFYQKGYYVSVVLPNKAKKYLQSLGLKSKNDTIDAKGLAQMGAEQRLLQWKPFSESFYELRALTRYCEQLSANRTQLMNQLSSMEYSMYQIEEVKNGLKELIALTEKQLDQIKERIEELVRKDEKISGRFNNILAIKGLGLLSLATVVAETNGFELFENERQLTSYAGYDVIENQSGKRTGKTKISKKGNSHIRRIMHMPALNVVRCKEERFVNIYERIMSRTTVKMKAYVAIQRKLLCMIYILWKKNEAYDPNYPGTTGNAEQKSLFPHGFGETIKKVGEMNPPTQDELPYKAVAGSPLSAMQI

SEQ ID NO: 143745 - protein, 413 aa, unidentified
MHYKMRHVYVGLDLHKAHHTAVIIDCWNEQLGEIQIENKPSAFDELMKFVKKHTSKGMTPVYGLEDTGGNGRALAVHLVEKKQIVKEVNSALSYRERMSNATTQKSDSWDAFCIAKVLLSSLDKLPDANPQDMYWTLGQLVARRNALVKHAATLKNQLHQQLSYHYPSYKKFFCDIDGKAALAFWEKYPAPHHLESVGAEELAVYLRKASHNTCSTRKAEEILELVKKDGETKRNYQASRDFLVVNMVQDMKRSRELIKQTEEQLRQVLSETDYKLDSMDGISTVTAAELIAEIGDIRRFSNADKLARFTGIAPVCHSSGGKGKDKASKQGNRVLNSIFHNLAVQQIQVAKGSNKKQRNPLMYEYYQRKLAEGKTKKQALICVMRRLVNIIYSMMKHKTEYRAAATLTERQAS

SEQ ID NO: 143746 - protein, 326 aa, unidentified
MEHELHYIGIDTAKEKLDVDVLRPDGRHRTKKFANTTKGHDELVSWLKGHKIDHTHICIEATGTYMEPVAECLYDAGYIVSVINPALGKAFAQSEGLRNKTDTVDARMLAEFCRQKRPAAWEAPHPLERALRALVVRHQALTDMHTQELNRTETAREVQRPSIDAHLLWLEAELKRLEKQIKDLTDDDPDMKHRRKLLESIPGIGEKTSAVLLAYIGLKDRFAHARQFAAFAGLTPRRYESGSSVRGASRMSKAGHVSLRRALYMPAMVATSKTEWGRAFRDRLAANGKKGKVILGAMMRKLAQVAYGVLKSGVPFDASRHNPVAA

SEQ ID NO: 143747 - protein, 406 aa, unidentified
MPDYDFVVGIDWATETHQVCILDGDGGVRAELVVAHSGAGVRELVAQLARLSPEAARIAVAIEVPRGAVIDAVLAHGCHVFAVNPKQLDRFRDRHTIAGAKDDRRDAFVLADALRTDRRAYRLLRPEEPRVTELRELSRLHGELAEEHTRLSNRLREQLLRFFPEALATCGGADEPWLWSLLERAPTPAEARRLRPSALRALLAEHRIRRVTAETLHEALQAEPLPVGPGTTAAAVTHVALLLPRLRLVHEQRAQCQRRLDRTLDELAAGDEREHRDVTIIRSVAGVGTLIAATMLAEAPEPLAQRDYQTLRAHTGVAPVTRQSGKSRRVAMRRSCNPRLRTAVFHWARNSIRFDPRARKHYDRLRQHHGHARALRGVADRLLAMLVTMLKNGTLYDPMRRGAIAS

SEQ ID NO: 143748 - protein, 386 aa, unidentified
MTRPSNVLLRAINYDHTLVLAIELSNKSWVLAAQVPGLPQTKAQRTIEPNKNALLAAIDGYRARAAAVGHSVDRVIVTYEAGWSGFWLARWLIAQGVEVHVVQPSSVPVDRRLRRAKSDGIDAELLLRTLLAWLRGEPRVCSMAPIPDEADEDARRSVRERTELLSERVGLTNRIGAVLATLGVNDYNPLLQSRRRRLAELRTGLDEPIPPNALAKIERLLVRLELVLAQIAELERERDKVPAADAPDRAGQMIQQLTSLRGIGVQSATVLVREGFVRHFSNGKALGSYAGLTSTPYSSGGIDREQGIGKAGNRRLRMVMVELAWLWQRYQPGAAQVAWFRNRVGSTGRRIRKVMVVALARKLLIALWRFVMDGVVPQGAVMKPSI

SEQ ID NO: 143749 - protein, 427 aa, unidentified
MSYRVGGIDVHKKMLAVVVADVDVEEDYEFEQRKFGTTAAELNKLVEWLVEREVEELVMESTAQYWRPVWGALEQHWKPTRTEREGAGSTSGQLHLCQAKSNKGRRGRKDDFGDAKRLVKRLKAQELTLSFVPDEEQRLWRTVTRRRYQLSRHRVRFQGQLESLLEQGHLKLSSVVSDLLGVSGRRILTAIADGETDPAVLSAMGDCNLKASPAQLEDALAASRRLNEVFRQLLKMALQELALVDSQLKQLDQAAMQLMQEHQEVIHRMAEVPGLGAVSAMQIIAEVGPAAAAFRSAKALCSWVGVCPGNEESGGESKSSRSPKGNRHVRRLLNQAAQNAVKVKGSVFQITFQRLMPRLGYKKAIWAIAHRLCRLIWVLLHKRVRYEERGPAVSAKSKRRRAAKMIRELTKLGYRVEGGPVQVGISA

SEQ ID NO: 143750 - protein, 403 aa, unidentified
MYQNTCITIDVSQNISHIQGFIGPNKPLCKARTMRHSNQGFQFILTLKDIIESKSNETPLIIFEFTGIYHKSLEKFLISQNLKYHIVAPLRAAKARNSEIREQKTDARDCLTLSKLFYTHSLGIFYSENQTYSSLRKLNRYYDTCMKHLIKIKVNFRETLAVIYPNYNKLFTSVYSDESLTFLKLFPHPSLYTSKSEDEILTILNEKWNHLESWSSSKVKKITPLVEETISGCSITEPETLILLSYITQIEYYLNQIKATIIKMNQLASKLPLYNLVHSLPGIQDILTCKFIAELGDISRFTNYKQIVAYAGIDPMIRQSGDKDGLHLKMSKKGNKRLRTILHLMVSSLIKANRKPNAIKTKYQKKTHQLNPLKPKVASMACANQLVRIIFYMHKTSSTYQYK

SEQ ID NO: 143751 - protein, 403 aa, unidentified
MAVKVGIDVAKEFHWVAIVVAEAGKVLVSQRIDNDPDSIDALIGQLRQAEADHGELTVAIDLMGGVASLLTAMLIEAGIRLVYVPGLVVNRARRATKGGEAKSDPRDAKTIADQLRLHDDWREVTTSDETTLDLRMLVSRRRELVVDQTRRLARLRETLASFFPGLERAVDVTNLGDLQLLARHVTPAEIRRAGRRRLTEYLLRAGASRPYAEALVGKAVTAAEAQRTVVPGEARMAEFAREFATEAIAVRRRIGELDAQIAEDLDRHPATALIRSLPGMGATLTGGFLAEAGNLTRFATADQLASAAGLAPVLQQSGKMHYLRRATAGSKTLKFVFYQSAFCAIRTDPASKAFYRRKRTEGKRHHQALIALARRRINVLFALLRTRQPYQADYRTPDTATAA

SEQ ID NO: 143752 - protein, 410 aa, unidentified
MNFYNNTHPYYCGIDLHARTLYVCVLDQSGNTCLHKEIPASQSKLQQILEPYIGNIIVGVECMHCWYWISDFCNELGVDFILGHALYMKAIHGGKAKNDRIDSFKIANLIRGGNFPLAYVYPREMRATRDLLRRRTKIVRHGADLKAHIANTTSQYNLPTKNVNLKNPCAREQLRSNFSDPSVQRNINLDLSILDCYATQLSKVEWYIEQQAKQHNPVHLHILKSINGVGRILALTIIYEIGSINRFESVQKFASYSRLVKCKAESAGKSYGTQGNKIGNAHLKWAFSEAAVLYLRGNKKAQNYLLKLQKRMSKAKALSVLAHKLGRCIYFMLKNARLQAASAPSTNFIRLFFANASAGVFQFNNSLGREFNKYSINAISFSSICDKSVFFGKNRLINPLICSTNPFSQL

SEQ ID NO: 143753 - protein, 424 aa, unidentified
MKVTYQTCCGVDVHKSFLVATIVKTTGGIEPSYQKKRFSTFNNSILEFKQWLINNNCHDVCMESTGKYWIPVFNLLEDQINVTIANPKWVKAVKGNKDDTKDSKWIGDLFRLGLVKGSYIPCKAIRILREYTRYRYKLVSCRSSEKNRYQNALTVCNVALDSVVSDIFGKSSTSIIDYLLEQSGTTINHEEIASKLLRRLKSKEDAVIESVEGYQMTDAQKYRMRLVRAHMDYITAEIKDVDKMIENMISSNPDFENAIQFLCTIPGVKRDSAITIISEIGTDMSQFSSSKRLCCWAGLTPGSNESAGKKKSVRITRAGVYLKPALVQCAHAAVKSDKSPYYKKKYESLVKRRGKKRSIIAIARMILTAIYQMLSTGEQWNPSDLYKIDMPVALVEKQKAKAIKQAKKLLQREGLLPPDEPLAS

SEQ ID NO: 143754 - protein, 484 aa, unidentified
MSHQKKNPPNFGGKTTTAGKGKRGRQGKGMCLQDRPILEANAAGIDIGAREIFVAVPPDRDEHPVRVFSTFTEDLQKMAEWLVSCGVTTAAMESTGVYWIPLYDVLERGGVKPCLVDARGMKNVPGRRTDWHECQWLQFLHSVGLLRAAFRPDGEVCAVRSLLRHRAELVAITCQHIQHMHKALTQMNVQIQHVISDITGVTGLAIVDSILDGQRDPAVLAKLRDPHIKASEETIRKSLVGNWRPEHLFTLQQSRQSYQHYQKQIIACDAEIEKRIAAFTPWVDPELRPLPPDRKRKDRGRKKRGRTKNVDPQGFDLRTESYQLFGVDLTQIPGLMAMVLTLFGEVGRDMSRWPTAGHFVSWLGLCPDNDISGGRVLWRGLRKVKNRAGQLFRLAAFTLHHDQTPLGDYLRRMKSKIGPKAATTATAHKIAIIFYTMVKNQVEYDATIWAERDAEREKRFEARLKRQAHQLGYQLVPIEEKPAA

SEQ ID NO: 143755 - protein, 406 aa, unidentified
MELVPIHKRVIGLDIHQAQVTACAIIEESGGETRLEQRQFGAFKRDRRELAVWAAALDPDEVVMESTGIYWKSPYAALEAVGIRATVVNARHVKQVPGRKTDVGDAQWLATLARAGLLRGSFVPPARLRELRLIARQRQKLVGLLSSEKNRMHKVLTDAGIRLGVVVSDIHGQSARAMIKGILRGQAPHEVLQLASRRLKASREELHDALQGELTASHVFVLDELLRHIEELEARIARFDARLLAELASEHNALALLQTLPGVDLIGAAMLLVEIGSDMSVFGTSDRLASWVGLCPGNNESAGKRKSGRVRKGNPYVRRLLCEFAHAASRTKSAFQAKFQSLIVRRGHKRAIVALAHKMLRTIFFMLKRGEHYRDSATNYEQLSVQRNASRWIKALTRFGFIPAAA

SEQ ID NO: 143756 - protein, 329 aa, unidentified
MKQKELIIGVDVSKKTLDLIVEFEEGSEHMKIKNEKKAIVSLCQKLLGRSKGLFFCFENTGVYSFLLCTILQKQHVPYSMVNALSLKRSMGITRGKTDKADAKAIALYAVKNRNELPLSKLPTDCILELKLLISERSKCIKAIRIFSGTKENNDFIDEHILASSSKHNSNMLSFIRKQIKEIEVQISKLVQENTKIKEQYKLVQTVPGVGPQTAIELIVATNCFTSFDNARKFACYVGIAPFEYQSGTSIRGKTRVSHLANKKLKATLNMASLAAKKWDPQLHQYYKRKTDEGKNGMLVMNAIRNKLVQRIFATMKRGTPYVKLENFAA

SEQ ID NO: 143757 - protein, 348 aa, unidentified
MKKVVAGMDLHSNNVVIGIMDLDGKRVASRKTACELKEVVKFLAPFKKRLEQVAVESTYNWYWLVDGLEALKYPVVLANPAGMEQYNGIKHADDTNDAFFLAELLRLKILPTGHIYDAQLRPVRDLLRRRLTLVHHRTALMLSFKSLYTRTTGQEMTLSRLKELEIKKTQELYDHPANQLIAGLQIKHIEQLSESIAKIEKSVLDSARELPCYTQLLSLPGVGKILGMTITMEVGEIKRFADPGNFASYCRTVEARRTSNEKKKGANNSKCGNKYLAWAFVEAANFAKRYDEQCRKWYDRKAAKTSKVIATKALACKLAKAAWYLMAEGTNYDPARMFGQSGKNEMKT

SEQ ID NO: 143758 - protein, 370 aa, unidentified
MSILVSRSARRGAIHVGMDVSKDWIAVAVMQPEEDAPSVVEKIFHDEVSIRRFVRQFRTPARLATCYEAGPTGYELHRLLTSMGVACEVVAPSLIPKAPGERVKTDRRDAKKLVRLHRGGQLVAIRVPSPAEEAVRDACRARADMVDDLSRARKRLGAFLLRHNHIYRDGTTWTMKHHAWLRAQRFEERAMTVTFGHYLGVVESREAELDAMEAELRPWLKDSLFASQIARLCAYRGVAGFGALTLTSEVCDWRRFPAAGAFMGFCGLTVSEYSSGASTKRGHLTKTGNNHIRSQLVESAWAYQHRASVGAALTRRQEGLDPDTVARAWAAQLRLTARYRKLLARKNNKPVVIAAIARELAGFLWAEMVA

SEQ ID NO: 143759 - protein, 362 aa, unidentified
MEYFAGLDVSIDETAICVVSDGGETMLETSVPTDPAAIATALKPYAERLRRAGHEAGALSPWLHPELLAVGVPAVCLETRHVRAAMSAQRNKTDAKDALGLAHIMRTGWFRQAHIKTEACYRIRLLLVQRRNLKRKFLDLENTIRHSLKAFGIRLGKVGRGGFEQAVREAVVEDAMTVGLMDCMLRARAALWAEYLVLNKLVVQLAMADDLCRRFMAIPGVGPVTALSFSAAIDDPTRFKRSRDVAAYFGLTSKRWQSGTSIDVKGRISKAGDPDVRRALYEAASAMLTRFKGSDTIKAWGLKLAKTKCHAKARVAVARKLAVVMHAMWRDGTFYIGDPQATEAETAVWIAAKAKRLSYART

SEQ ID NO: 143760 - protein, 430 aa, unidentified
MEVIYSKACGVDVHKRFIIAVICDSSSANPKYIRKRFSTFNNQLIAFKNWLIEHDCQNVCMESTGKYYVPVYNALEGFISNVVVANPKWVRAIKGEKDDNKDAKWIADLFKLGLVRSSYIPSKDIRILREFTRYQYKLINTRSSEKNRFQNALTVGNCKIDMVFSDVFGKSASSIINLILSNDTYTSEDILSKVHGSCKASHEDILSAIDGVTLDTHQKARIEIVKNHMEYVDSLLCKIQKHIDEMIVGYENYIQLLCTIPGVDRKSAITIISEIGVDMSQWSSHHKLASWAGLAPGCNESAGKKKSVKISRAGVYLKPCLVQVAHAAVKDKDYDYYANKFNKISKRRGKKRAIIAIARKILVAIYHMLKTGEVFNPSDMTDIETSQKKRIEYIKNNFKNAFNQLMRTELSSEEILAFLPTKSTDSPLKE

SEQ ID NO: 143761 - protein, 356 aa, unidentified
MNYVGIDYHKKYSHVTAIDEEGRVIRSRRLDNRPESFQEFFGRLQGPSETVLEASRTWGVMYDLLEEIEGVELIELAHPQKVRAIAEAKIKTDKIDSHILAQLLRADLIPAAYIPGKQTRSYKEMIRQRVFLVRMRTRLKNRIHVLLDRLHVPLPSVTDIFGKRGTDYLRKLNLAGVDGEILRENLQLLESLNTLIKEAEREIELLLGDNPLVKLLRTVPGLGPILAAVVALEIDRIERFASPSKLASYTGLVPSTYASGGKLFHGRLLPMSNKWLKWALVEAAWVSIRTSPYCRTYFENHKRHKGPHTAAIALARRLSEIVWHVLTENRVYEERPFQRQRRVSIMATSPAALTAT

SEQ ID NO: 143762 - protein, 405 aa, unidentified
MNAVGIDVSKGKSTVTIRQPGDVVVLAPRDYRHTQSSINDLITTIKCLEGETKVCMEHTGRYYEPVASWLSAAGIFVSAVNPWLIKDFGNESIRTPKTDKADAKKIARFALDRWAKLPQYSRMDELRNQLKTMNRQFGFYMDQKTAMKNNLIALLDQTFPGANSFFDSPARSDGSQKWVDFVYTYWHVDCVRSKSLEAFTEHYKNWCKRKGYNFNAAKAKEVYLAAADLIAVFPKDDYTKLLIRQAVAMLNVASETVETLRIKMDQTASQLPEYPVVMEMDGVGATLGPQLIAEIGDVTRFKHRGALTAFAGVDPRANESGDYKRVSNPTSKKGSPHLRKTLFQIMDSLIQRSPADNPVYAFMDKKRAQGKPYYVYMTAGANKFLRIYYGKVNAYLSPTEGAEDS

SEQ ID NO: 143763 - protein, 402 aa, unidentified
MQDTNHAVCPGTAAREHDTSLFVALELSRSVWLIAVNMPGSDKISKFKIAAADTAALRTLLARLKAQSERRCGSPVKTICIHEAGLDGFWVDRLLQANGVDSHVVDAASIAVDRRSRRAKTDRIDVEKLLRTLMGWARGERRICSMVRPPSAEQEDERRLTRERGTLITERTRHVNRIKGLLATQGIFDFDVIRHDRRKHFEELRRWDGQPLPPRLKTELLREFDRLELVISQIAVVEAERDRALDMKRSVAPAATANGAAVGVPASTDGAGALLLRLRSIGPEFASVLSLEAFYRSFANRREVAAYAGLVPSPWKSGSIDVEQGISKAGNPRLRKTMIQLAWLWLRHQPGSALSRWFHERVGEKRGKIRRITIVAVARKLLVALWRYVTQGLVPDGAALKA

SEQ ID NO: 143764 - protein, 360 aa, unidentified
MSQSSWLVAGIVPGIERHPLKKLEPNEGELLRLLMRWRAEATKMGCTITRIAVAYEAGRDGFWLARWLRARDIETYVIHPTSVAVSREHRRAKTDRLDTGLLKRVFIGWLRGEPDHCHMAAIPTLAEEDAKRPNREREGIVRERTRIVNRMKSCLARFGVRNFKPTLRKAPERLATLVTPEGVPLPPNTLLELRRDMARLRFVMDQIKEVEEARAQRLEQAPQEKTHAMVRLLARVIGVGIETADMLVHEILSRSLRDRRAVARYAGLTGAPDESGSKRQEKGLAKAGNARVRRGMIQLAWRFLLFQKDSALAQWYRTRTERGGKKRKTMIVALARKLLIALWRLVTTGEVPAGVVLRAA

SEQ ID NO: 143765 - protein, 448 aa, unidentified
MKQKKPIKRKSIKLPKHLQNLNPYAAGIDIGSKSHFVAVPEGTDEQPVREFSSFTDDLERLAQWLTACGVTTVAMESTGIYWIPVFEILETYGLEVRLVNARHVKNVPGRKSDVLDCQWLQQLHTYGLLRGAFRPADQVCALRAYVRQRSTLVRSSASHIQRMQKALAQMNLQLHNVVSDITGVTGMRIIKAILAGERDTKALSGMRDPRCKNSEETIARSLQGNYRQEHLFSLRQAVELYDFYLAKINDCDQQILEQLRIFDVSDDNDNPDYKAPKNIGEALQRMSGVNLADINGIDTNTALKIIAEIGIDMSRWKTAKHFASWLGLCPGTKVSGGKILSSATKQVANKAAAALRMAAFALINSKSALGAYIRRQRARLGASKAITATAHKLARLVYSMLKNGTTFTDAGQDYYEERYRTRVVQNLKRKAQEMGFKLVSIQEETQIA

SEQ ID NO: 143766 - protein, 346 aa, unidentified
MNKHDDCGVEVSAEQLLAGLEREGAPRLRREFPNTPEGHNALVRWLEAPGRTVRVVMEATGLYGLDLALRLDSAPSVELMVANPRAVRHFAHALMKRSKNDPIDTGVLVEFAQRMPFHRWVRPSPAALALHALAHRIESLTAMHAAEKNRRHAAQLSAALPAAVVNDLKRSLRGLERALARLTRQAVQVIAQDPDLNLRYPLLLSACGIGPTSAVQVLAELAMLPPDLDVRQWVAQAGLDPRQYSSGSSVHKKTRISKTGNRHLRRALYMPALVAIRHEPHLRAFYLHLLARGKAKMQALVAVMRKLLHAIFGMFKHGQTFDGSRLFALPEKPSLLPPTSSTAEAA

SEQ ID NO: 143767 - protein, 355 aa, unidentified
MNAIKYIGMDVHLATISIAVLDAMGKLIMEVTIATQASALLDFIRGLSGTLYVTFEEGTSAHWLYTLLEPQVAKVVVCDPRQNPRRLGEKKSDRLDARKLAELLRLGTLKPVYHGNALGPALKELARSYRTLMSDTTRVMNRLKALYRARGIRCAGTRVYSPRGRDQWLAQLREPGVRGRAERLYKQLDLLLPLRQEARAALLAESRKHPAQKLLLSIPALGPVRVALLLALLQTPYRFRGKRQLWAYAGLALVTRSSADYRMVEGQLERSRRPALVLGLNANHNHVLKGLFKDAAVTTLTRPGPFKDFYTTRVAQGMKPELARLTLARKIAAITLNLWKKGECFNAEHLKAQAA

SEQ ID NO: 143768 - protein, 383 aa, unidentified
MPSDNTVHVAIELSSSTWLIAARLPSTVKPRLHRIEGGDTAALLKLLSELGQQASTRLGYGVDVVCCFEAGRDGFWLHRLLTTHGIGVHVLEPTSILVNRRARRAKTDRLDAEGMLRILAAWLNGDRQVCSMVRVPTVEDEDAKRPHREREHLVHEKLRVENRIEALLFTQGIRGRPSLRSWERDMAELRTGDGRALPPLLRAELDRLRRRLALALELIRELEAERTAALAAASEAAVADTAMALKITALQRIRGIGENFSAVLVREVLYRSFANRRQLASYVGIAPMPYQSGGMDRDRSISRGGNPRARTTLIQLAWLWLRYQPGSALAAWFRERVGALQGRTRRIAIVAMARKLLIVLWRYVETGVLPEGIEIRPQVAAAA

SEQ ID NO: 143769 - protein, 350 aa, unidentified
MLIIGCDYHPGFQQIAYVDTETGEFQERRLQHPEEAEKFYRALWEPSVKVRVGMEASGHARWFERLLEELSFELWTGDAAKIRAKRVGKKKTDREDARHILELLVENRFPKIWVPTWQNRDLRQLLWHRHRMVQTRTRIMNQLQAVAINEGVRYKKRLWREAGRQQLESLSLAPWASRRREDLLEVLDRINPTIAELTQAIENEAEKCCEARRLMTHPGVGALTAVAFVLIIGEAHRFGCGKQIAAYLGLVPEEDSSGERRRLGHISKQGNSLLRFLLVEAAQATARCDQRWRNQFFHLAQRRGRKIAKVAMARRLAVRLYWMWRREWNYEQLQSFGSHVGQPGNPHGVQ

SEQ ID NO: 143770 - protein, 342 aa, unidentified
MKFYCGIDLSARDCHVCVIDEQLKIVVQQKLRNELAKICQLLGPYKANLKIVVESTFNWYWLIDGLQAEGFDVVLAHTLGLYLITGAKVKTDRRDAYSLAKLLLVGAVPVAYIYPVETRPVRDLLRRRMHLVQVRAGEYGSLRRLLLRQGILSSKQQEIKTATEAELEQWFEHPLVRLHASQELRRIELYSEQIAELEKIILALAKTEQSYELLLQLPGVGQTIALTILYEVGELTRFANVKVFSSYCRVVPGIAQSGNVSRRGRASKQGNHYLKAAFSQAAVHAVRCYPKVRRYYERQLQRHRGRGRQMICYNIIAHKLAQAAFHVLKEQTEYREELLFGP

SEQ ID NO: 143771 - protein, 453 aa, unidentified
MYLCGLTERSRLKALISNRVASVSKTSDSMRVWWLGGTLPSSIDSKGGFDLARYHVGVDVGKAHHHVCVRDMANDTYCRTFSVSNDREGLAHLVASLDTLSANHDDFLIGVESCPYGLNVSYFLMAAGFNLVEVNTFRAGQFRKAQGKKAKTDRIDARCVAAILSLGDHKPLCIPEPISDNLRELTRFRSDLVDEKSMATIHLREALSILFPEFEKVFRQIDSAASLALLMTFPGPEHVIAAGEERVGELLLAASPHRMGKGMANRIMEAALRTVGVTQKQPALGVKISILAKRIAELQSTIRELDGQITALYDALPSKPKGFPVGRAPSLATIMAEIGDIRRFPTLKKFLSHLGWCPQTFQTGNYRMEHPRMSHAGNKYVRRLIWMLSVFAVQRVPRYREYFRRRVSEGKAKMHILVAVGRKLLSVLYSMLKTGAAYDPDWEENRRLAPARP

SEQ ID NO: 143772 - protein, 306 aa, unidentified
MAGVGIDVCKARLDVAVHGEDRTWTFSNDPAGLAGLLKWLKGRRGVRVLVEATGGQEQALLDKLVEKQVWACRVNPRQARDFAKATNRLAKTDAVDAKVLAHMVVALGEQLRRYEAPDLWRTQLRDWVQRRRHVVELIQREKQQLAWVSDAQLRAQIDTMLSTLVKQKQALEREIRQRIKGHATAALGSLKGVGPVVKSTLLAQLPELGQLDRKAIAKLVGVAPLSDDSGGRRGYRRIWGGRAELRCTLYMAAVVAMRWEPVIKTFYERLRNVGKPAKVALVACMRKLLTILNARMRDERLALAAQ

SEQ ID NO: 143773 - protein, 340 aa, unidentified
MRQLYAGCDLHGNSNLIGIVDGEGKRVFKKKLSNDFSLVRDTLKLFQEELVGIAVESTYNWYWLVDALMEEGYKVHLANPAAIQQYSGLKHADDKHDAFWLAEMLRLGILPEGYIYPKEERPVRDLLRKRGHLVRLRTSLILSLENIISRNFGSKLPVNYVKGLRKDRVTPLFEGNEDLALAGRVSKETIDFLTHQIRQIEGVVEKRIQLKEAYRYLLTLHGVGKILGLTIMLETGPIGRFETVGDYTSYCRKVPSQWISNGKRKGSGNRKNGNKYLSWAYAEASDFARRLHPESRAYYNRKMQQSNPAVAHSALSHKLARAAYYIMRDQVAFRPEKLFG

SEQ ID NO: 143774 - protein, 462 aa, unidentified
MVPRARVSVWPGRRCVPGIVAPDPRGARGAECLPRDVLRPTPPEEIAMDTIFAKVAGLDVHQKFITVGIRCRLETGKLFAEVRTFGTVTRDLMALADYLEALGVTHVAMESTGVLWKPVWNILESRRFTLLLVNPRHVKQVPGRKSDVSDAEWIAQLLQCGLLQGSFVPKRELRELRDLTRYRAQLVSEATRVANRVHKVLEDANIKLGAVASDVLGKSGRAMLWALNGGERDPDKLAELALGRLRAKIPELKLALEGHFSEHHRFLVEHLLRHLDDLEREIEEISQRIGERLPSILDDERLRRLDAIAGVNRTTIENVVAEIGADMSQFPDEHHLSSWAGISPGNEESAGKRLRNSTTRKNRWLRRAIIEAAWAAGRTKNSYLGAQYRRLAPRRGKKRALIAVGHSLLVIFYHMLKYDVEYQDLGVDYFAKREPERLRNYLVKRLQLLGYQVSLTPQTDAA

SEQ ID NO: 143775 - protein, 347 aa, unidentified
MGYFAGLDVSLEETAIGIIDGAGNIVREARATSEPEVLVAFFRASGMEMERVGLEACSLTAWLHTGLTKAGIPAICIETRQAKAAMGAMPNKTDRNDARGIAQIMRTGWYRAVHVKSPTCRSWRALLTARRMVLNKRRDVENGLRARLREVGLKVGTPSRKDFPARVRALAADDPVLASLAESLLAVVEVMTREVERLTKRVIDEVRVEPTCRRLMAVPGVGPLTALAFRATIDQPDRFRRSRDVGAHLGLTPRRYQSGETDVQGRISRCGDELARTALYEAAHSLLIRSTKWSALRAWGMNVAKRRGMARARVAVARKLAVILHRIWADGSEFHWGKQALAATAAA

SEQ ID NO: 143776 - protein, 414 aa, unidentified
MGWYLGIDIGKRFHVACLADAEGKEVGVPLTFNADREGFLKLESFLKTAAGDGGLGSVKAGMEATGHYWLSLYLYLQERGLDVSVLNPLEVKAFRNEGIRGNKTDAVDAVKISKLLRFGDFREAYVPDGDMAALRQLTRLRGDLVETLTSFKHKATAVLDQLFPEYGKLFSDAFGVTSRALLSEASTPEAIAALPAKRLTAVLRAASRGRFGEEKAREVQTVARGTVGRTGKGTDMFAAGLEVILSEVDHLQEKIDGLDKLIAASMEVVPTTLTTIPGIGTTLAAVILAEIGDASRFFGNKDGAEKLVALAGLDPKLRSSGQFQGKTKMSKRGSPYLRHALHTASFVAVFTAKDPLFRGIYEKHREKGKHPEVAISHVSRKMTHVIFSLLKNNTPYDPEGGNRRQAKREVVSET

SEQ ID NO: 143777 - protein, 355 aa, unidentified
MDSKKYIGMDVHKESISIAVRNGAGKIVMECVIETKASMILQFFDGLRGDLQVTFEEGTSAAWLYDLLKPRVTKLLVCDPRKNASMREGNQNDQIDARRLAELLRLNHLHPVYHGEHGLRSLKELVRSYLTITKDLGRVMSRVKAIYRSWAIPCSGKQVYSPRHRAEWLGKIGEPGVRRRAEFYYQQLDALRTVRQEVRRELLAEGKKHQAWKRLCQIPSIGPIRSAVLLGILQTPHRFRTKRQLWAYSGFGIETQSSADHRRVNGQLQRVKKQSSIRGLNRNCNHDLKNLFKGAAIVASSKPGPFQEFYAALVTKGLRPEMARLTLARKIATIALIVWKRGACFDAQHLKPQTA

SEQ ID NO: 143778 - protein, 384 aa, unidentified
MNSLVYVGADVHNESYSLIALLKGYFDGTAMIEDKILWELRVSADPRNIVKFIEAVRKRFPTDANVKFVCGYEAGGLGFSLQRALAAKGIECRVIAPTTLPTQKGKKCIKTDRIDARIIAKAMADGNLSYVHVPTEEDESVVSYIRARDDHRDQLTKVKQQIVGFCNKHGYHYDPSKAKWTHIYMKWLLSLKFEGLDIETMSEYMDSYYRISEKLERMNQRIEEIAEGEKYRELVKRLCCIKGIKTYTAMALIAEVSDFRRFEKAPQFAAFLGLVPGQHTTGSDQKFLPITKAGNRHLRTLLIEAAQAACQGHLGYKSKALKARQNGESQEVIAYADKCSRRVYTKYRRLMERGKTKNIAIVAVARELAEFIWGMAMGKIMPAA

SEQ ID NO: 143779 - protein, 461 aa, unidentified
MNNYYLGGDVSKGYSDFIIIDEEKRTVVDSFQLDDTETGHQELSKILKKLLEKYQNSIIYSAVESTGGYENNWFNSLLNLQKELNIEVARLNPFGTKHNSDASMNRIVTDKNAARNIAEYLINHKGKVNYKNDDKYFAMRRQWKFVRILSKQKTQLYNQLESVLYTANPEVLSYCKHGYPNWLLKVIERYPTARELSRARISKLSSIAYVTEPKAVSLINKAKQSVAAATDAITADLITSLVKQINQLDKLIKKQSKLIADNCNLPELKILKSFIGIGDYSAVGLMINISSVDKFESTKKLSSFFGLHPIWKQSGDGTYGMHMSKKGNSEVRHILYMVTRTAIVHNPLIKEIYERHIKKGMNKTAAMGVCMHKILRIIYGMLKNNEEFNPGKDRANSMKMLKNSTHPKTVVIKQNKLRRYQQPDESAPISNRQAKKRKKQKLSQDEITSSSTGSNIRSFHK

SEQ ID NO: 143780 - protein, 435 aa, unidentified
MPQSSHPLSAQGVEASTVVGHRDTRSGFGLMKPNAAGIDIGASSHWVSIPPERAAQSVREFGCYTPDLEALVEWLRQCNVETVAMESTGVYWIALYELLEREGFEVMLVNAQHLKHVPGRKSDVLDCQWIRQLHSYGLLSASFRPAEAMCVLRQYIRQRDRLIQSAAQHIQRMQKALTQMNLHLHRVLSDLTGLSGMRILKAIVAGERDPQTLAALKHERVRKREAEIAAALSGTYREEHLFVLSQELSLYETYQQQIAACDAQIETYLNQLPSPLPPHEQPQPKVVRKAVQNQPTFDLSTHLHRISGVDFCAIDGLGPLTVQTILSEVGLDPTRFGSAQRFASWLGLCPGSAISGGKRKSSKTRRVSNRAANAFRIAAMAAGKSDSAIGAFFRRLKARLGAPKAITATAHKLARIFLSPMEYGAVLRRCWCRTL

SEQ ID NO: 143781 - protein, 357 aa, unidentified
MTKVQKRVDFKGQTIFVGMDVHLKSWNVSLFYNNQYLRSFQQPPDAQALATLLKRDYPGALYQCAYEAGFCGFWIQRALTQLGLPCIVVNAADVPQTDKGLRSKNDRNDSKRIGDSLKAGMLDAIYVPQTAIESDRRLVRYRQQLQRDLTRCKVRIKSLLYHAGIVLPDKYQQTNWSNLFLQWLRELPVTHPSTRRTLDGMIFQVEQLRKEVLDLNKQLRQLLDTESYSQMGTLLRSVPGIGPIGAITLLVEIAAINRFTCFAAFNSFIGLCPSEHSSGEAIRRGAITPRHHRQLRSLLIEAAWVAIRQDPALAFRFAELKKRMPAKRAIIQIARKLLNRIWYVWNKKQSYEKGLIQ

SEQ ID NO: 143782 - protein, 312 aa, unidentified
MAMLSFCGIDVSKDRLDVVVLPEGWFFSVSNDTAGWTELVARLRPLAVCAIGLEPSGGYERGIIRALLVARLSVRRINPNKLRQFARARGVLAKNDRLDARLMAEYVAIMPTRAVQRDDAVDRLAEVVTMRRQLCDEHVTVENQTAHLEDAMLRRLSKRRLVRLEADIRLLDKRLAEMVATNAAFARLYELLTSMPGVGPVLAFTLIALLPELGKMGRKQIAALVGLAPYDFDSGKLRGHRSIYGGRMPIRNVLYMAALSASRYNPALKTFSNRLAHANKKSKVIIVAVMRKMITTLNAMLRDNAAWQPQSN

SEQ ID NO: 143783 - protein, 334 aa, unidentified
MDKITTVGIDLAKRVFALHGVDASGRVVLRKTVRREQFVETVAKLPPCLVGMEACSGSHEWARRFQGFGHTVRLMAPVFVAPYRKSGKNDGNDAEAICEAVSRPNMRFVPVKSAEQQALLALHRVRQGFIEERTALINRLRAVLTEFGVVLPNRTQWVRRDAVAVAEPLPVLARQAVEDLRAHLVGLDERIGAYDRQLEQQARQSEAAKRLMQIRGIGPLTAVAIVATVGSARDFASGRQFAAWLGLVPRQNSSGGKSRLGHISRRGDAYLRMLLVQGARSVLNTAARHTDRLSLWALSLQARRGMHKALVGIAAKNARIAWALLSKDQTLRTV

SEQ ID NO: 143784 - protein, 349 aa, unidentified
MNIAFDSHKRYTLCSVADDCGRIIDEMRIEHRRGEISKYLSRFPAGEAVAVETIGNWYWIVDEIEAAGMEARLVHARKAKMMMGCVNKTDRLDVRGLNRLQQVGTLPTVWIPPGVLRDQRDLTRTRMYLVAQRTRLKNRIHATLAKYGLSLPGVSDIFGRCSREQLLKQIANLPQQSTYTTKIQLEHTDRLERSIMELNSVIEDVIGSSREIALLRSAPGIGKIVSIVVCLEVGAIDRFPSAAALASYAGTVPRVHASGGHVRYGQLRSDVNRYLKWAYAEAANSIVINQRVYPDRHVTQLYRKVQSRRGHQKAIGAVARHLAEATYWMLTKKEMYKDPSLKQSLPTRV

SEQ ID NO: 143785 - protein, 352 aa, unidentified
MNYVGIDIHKKYSVLCAQDERGARLKEARVEGNCRQAYARFFGELAGPSKAVLEACWNWGLTHDLLEEIEEVEEVVLAHPLKTRLIAEAQIKTDRLDAFALGTLLRGNLVARAHIPKRETRARKNLLRQRLYWARLRTMLRNRIHALLDRQHGLELPQCSDIFGARGLSFLRRLELPEPDGTLLQEALALHDLIAQQMKAQEKRIAAEFKLEPSYERLLSLPGVGPTLGAVLAAEIDQIERFPSADKLCGYAGVVPTTHSSGGKVHHGRLLPYCNKWLRWALIEASWVAIGCSPYFGSLYRQQRARGKKANTAITIVARRMCRILYQLLAQKRSFEKRPPRVQITDVPGCSA

SEQ ID NO: 143786 - protein, 335 aa, unidentified
MLVYTGIDYHKRTSTICFIFPDGKKDVKTVLSENLVKELVNRKNLLVGIEASCGVNHVVDQLKTAGINVKIINPNKFRGIGIGGKKTDIKDAEALAECLKVNFIPEVYHKGIGARRLKSLLRIREQYVQSRVSATNHTRGILREYGITINAGAENFWDEIAGKLEQLDFDILKQKLTDMVFESRRLAAKEKDVEESLKILLAGDPRAVYLQSIPGVGLMTTAALLAIGDDFSRFPNAKSFASYLGLVPSESSSGDKVRRGAITKAGQDLARKYLIHGARSILIFSNENSQEPIRRWAFKLKNKRGMNKATVALAHRLSRICYNVIVEERQYKKVI

SEQ ID NO: 143787 - protein, 407 aa, unidentified
MGITCGIDWSESHHDVALIDEHGTVVARTRIDTGAIGFHILLALIAEHGGSVDDTPIALETDKNLLVVALAKAGFTVYPINPRAVARYRERYGQAGGKSDPGDAAVLAHILRTDRHLHRPLPAVSEEGRAVKALARQHQEAIWALHQTVSRLRSVLLEFYPQALQAFPNLKHKAALTVLAAAPTPAAGQRLTRGRVVALLRRSGRGNHPALVEQILTDLHTPALGQPPRVEEAYGHTVRGLVAIVIAMGQAVDDLETELAREFDQHPQAAILRSVPGLGPVLAARVLGEIGDDPARFDNPQGLRAYAGTAPVTIASGRLRYVKARKVRNKRFGDACHWWAYTMLTKSAGARAHYDRRRAAGDHHNAALRNLANKLLGRLWWCLVNNQPWDEHGAWPDHGHTENPTAA

SEQ ID NO: 143788 - protein, 318 aa, unidentified
MTSQHLVLAAGIDVGQRFLDVGLAPSGKTFRVANAADGIAAILERLTHEGVGRVVLEAIGPYAQRLVSALAIAGFEVGLINPRRIKAFREFEGRRAKTDRLDARLIARFALAMTDAIRPLPSAEQLALKALSTRRRQLTEMIAMEKTRLKQTAEPLLLDSHRAAIAALSAQCQHIEAELARRIADDPQLASTFEILTSVPGIGQRVATALVTELPEIGRADRRAIASLAGLAPHISQSGNAPPRAAIAGGRPCVRTALYMAALVASRHNPEMKRAYLNLRSQGKPAKLALIAIARKLLVTANALVKNNTHYTPQPLDS

SEQ ID NO: 143789 - protein, 337 aa, unidentified
MNYSGIDLHSNNSVIVVSDETDRVLCKRRVANDLRVVLSTLEPYRDELAAVAVESTFNWYWLVDGLQAAGYTVRLANTAAMKRYEGLKYSDDDTDAAYLAQLLRLGILPTGYICPIEERGLRDLARKRLQLSRSRTQHILAVETNVARQTGARIASRVVKQLTEQTVQELGLSEEVRWALAANVAVIQTLNVQIKKLEGHLGTRVRPRAEFKLLTTVPGIGEILATTIMLETSSIERFARVGNFASYARCVDSRRLSNGKKKGKGNVKNGNHYLAWAFVEAAHFARRYCPEAKRFYERKQSRTNPIVARMALAHKLARACYHMLKEHQPFDVKRCFA

SEQ ID NO: 143790 - protein, 343 aa, unidentified
MQTVTTVGFDIAKSVFQVHGVDVAGRVVIRRQLKRRQVIAFFQKLPSCLVGIEACASSHYWSRELQALGHSVRLMPPAYVRPYVKRQKNDMADAEAICEAVTRANMRFVPTKTPEQQSGLMLHRTRHLFMRQQTSVINAIGAHLAEFGIVAPVGRRGVEELLRVVADANDKRVPEVVRTCLAALGSQLLSLKQQILDFDRMIMAWHRSNQTSKRLNCIPGVGPLLATALVASVADPKTFRSGRNFSAWIGLVPKQRSSGGREKLGSISKQGDRYLRSLFVTGALAVIRYAKIHGAKHRPWLTALLARRPTKVAAIALANKLARMAWAMMATGARYNYPASLRV

SEQ ID NO: 143791 - protein, 376 aa, unidentified
MITCFIGIDAHTTNYTLSTAIDAEDKPFNTCKYAPKLTYILKYANALCKKYNLKKEDILLGYEAGCLGFKLQRDLNENGFNCVVMAPSTIPGTAINRRKKTKNDIRDAEAIAKALRNDDYSSVATPDEEDEAIREFIRAREDVRMELKRCKQHIMAFCNRHGQHYEETGWTQKHMKWLNNLAFSQPVLKETLNSLLLEYEYLTEKLEEKDRRIEEFAQMDKYRESVHKLTCFKGIKTLTALAVIVEIGDFARFMKAKNFVAYLGLSVGEQSSGNDHNQTGITKQGNRFIRKLLTEAAQCFSRATLKKSKELKKRQEGNVEEVIAYADKANERLRKRYHHLVIHNMKSPNKAKCAITRELACFIWGMMTDNIHTVLV

SEQ ID NO: 143792 - protein, 408 aa, unidentified
MGRAAEVVAPSSSIRTDGGCPVVQVNDLSRSLAAFDPILTLVVVVEMSKASWLVSSVVPGVERQPLKKLEPDATAVLRLIERWRNEAVRVGRPISRIALAYEAGRDGFWLARWLIARGIEAHVIHSASVAVSRERKRAKTDRLDAAMLMRVFLGWLRGERGHCGMVAIPTMEEEDARRPNRERESLVNERSRIINRMKSALARLGIRGFKPHLRKAPERLAGLRTAEGTGLPANIIEEFRRDMARLALVREQISSIEKTRAERLERAPDTGPHAMVRLLARVIGIGIETADMLVREILSRKLRDRRAVARYAGLTGSPDESGLKRREKGLAKAGNARVRRGLIQLAWRFLMFQKDSALARWYRTRTEGPSGARKTTMIVALARKLLIALWRLVTTGEVPDGVELRTAA

SEQ ID NO: 143793 - protein, 398 aa, unidentified
MTESSDYESVQVFIGVDVGKDTHHAVAINRSGKRLFDKALPNDENKLRSLISDLKQHGQILLVVDQPATIGALPVAVARSEGVLVGYLPGLAMRRIADLHAGVAKTDARDAAIIAEAARTLPHALRTLKLADEQIAELSMLCGFDDDLAAQTTQASNRIRGLLTQIHPALERVLGPRLDHPAVLDLLQRYPSPEKLASLGEKKLAAQLCKLAPRLGKRLAADIAQALAEQTVVVPGTNAAAVVLPRLALQLITLRKQRDEVALAVEQRVLAHPLYPVLTSMPGVGVRTAARLLTEVACRAFASVAHLAAYAGLAPVTRRSGSSIRGEHPSRRGNKALKRALFLSAFAALRDPLSRAYYTRKMSQGKRHNQALIALARRRCDVLFAMMHDETFYTPQAS

SEQ ID NO: 143794 - protein, 353 aa, unidentified
MQCIAFDSHKHYTWALVQNEKGKVLREERINHTRGALQGFLEEFDPGSPVAVETIGNWYWITDEIEAAGMVPQLVNARRAKLMSGSINKTDKLDARGINRLQRSGTLPTVWIPPRDLRDARELPRTRMVLVRQRTKLKNRIHANLAKYGLKTDGATDLFGVRGRRILDQRLGELPLQTRYATQSLLDELDHLQAGIEEFEARMADVFGEITALGIIKTLPGVALILGVVILTEVGDVERFPSSSHLASYAGMTPRVHSSGGHTRHGRTRPDVNHYLKWAYAEAANVAMMHRRRHPQRHVSRLYERVSRRRGHPKAIGAVGRHLAEATYWMLTKQEPYRDPATDRVEVESTREA

SEQ ID NO: 143795 - protein, 400 aa, unidentified
MKRLSGGIDIGSVSHHITILDEEDHILYNQKVSHNLNEFRKTIKQFKKIEKKEKGEISFALEGKNGYSAPFDRILLDKGFTLYNIDNLKLKRFREAFAGEWRDDGRDALMLSKMLKLKKYINSKREKVFIKIERPSPVTESLKILSRHQQTLIDEKVRLTNRLSKKLLEVCPQVLELGKLKNKRIIAILAKYPDFSKYKRMTLKSLLKIKGIGKRQVPFLLKRLNNIEYVGLTDIYKTIILSYAKRISELQEEIKDIDKKLDKIGEKDKSVKHLKSLPGVAIKLASRFIGEIGDINRFPSEKQLAVYCGIACVNNDSGKVTKAKAVYKANKICKQTLIIMAGCSIRFIPQCKFYYLKKRAEGKSHNHTLRCLARQLIKVIYKMLTEDRDYIVRKVLKKVA

SEQ ID NO: 143796 - protein, 347 aa, unidentified
MVTLGSDSHKRSHTLLAVDGNGCPLEERKVPATPAGHMEALAWARRWPERRWALENCRHLSRLLERDLLTADEAVVQVSPKLMGKARRSGRELGKSDPIDALAVARAALREAHLPVAQLEGKSRELKLLVDHREDLVGERTRIQNRLLWHLHELEPGFEVAASGLLRAVVLAEVRRRLERHTGVVAEIAVDLVGRLTELTTSAKRLQSRIESLAGELAPSLLSLPGCAGLSAAKLVAETADVNRFHSSAAFAMHNGTAPIPVWSGNHERHRLNRGGNCQLNVALHRIAVTQIRLGGEARVYVNRRMSLGNTKTEAIRALRRQISDEVYRRLRRDSSERLTAPNAVAG

SEQ ID NO: 143797 - protein, 289 aa, unidentified
MGSEKRRLANDGTGHRQLINWIKQMETNVQVICEPSGGYERMLIQALVGAQVKVSLVQANRVRQFARAAGILAKTDSIDAEVLCAFGQAMRPQTLSASKLQQEHLRELESQRRHLSRLLVMEQNRGARLGDSSVRTLNRSLTKQIQKQIERIDLLITEHIAGSQELSAKAHKLTAISGVGPHTAALLLAQMPELGQLNRREVAALVGVAPFNRDSGKWRGKRTIFGGRRHVRHGLYMAALVAARHNPILRAFYQRLRAAGKPAKLALTATMRKLLIVLNSALKPDPIYA

SEQ ID NO: 143798 - protein, 346 aa, unidentified
MEFKRIAIDTSKHVFTVHGVDQAERAVLRRNLSRSQMEGFFAKQPPTEVALEACGSSHHWGRMLEALGHRVRLIPPQYVKPFVKRGKNDRHDAAAISEAASRPDMRFVPVKSADRQAQAMVLSARELLVRQRTQLINAVRGHAAEFGVIAPRGTANVAAILQKMADKEAGVPARAQQILARLGHQIETLDDEIDALDKEMAAQHKTSTGSKRLATAPGVGPILALTLTLCVDAAQFEDGRHFAAWLGLTPREKSTGGKQRMGKISREGNERIRQCLVLGATSVIKAVTRSGADKKASKLATPWLLKLLERKPRKVAAVALANKMARMLWAMMSRGEAYRRPAPTMA

SEQ ID NO: 143799 - protein, 369 aa, unidentified
MTDLMLFVGLDVHKKTISVAMVEGAAGAAVRFYGTIANTPDSVRTLCRKLSRDAQQLYFCYEAGPCGYGVQRQLTRLGHRCDVVAPALIPRKVGDRVKTDRRDAMMLAQTLRAGQLTAVWVPDEAHEAMRDLVRLRTQAMRDLRKARQQLLSFLLRHGRNSPYGHWTKMHRRWLGELVFAHPAQHLALEEMLQRIERAEALCDRLKAAILELVPQWSLAPVVQAIQALRGVSLIVAAAIVAEVGCFSRFESPRALMAYLGLNPSEHSSGATIRRGAITKTGNTLARTCLVEAAWTYRFPPRVSQIIRDRLKELPEPIRAVAWKAQVRLSARYRKLTAAGKPGPKVVVAIARELVGFIWAIARMVEPKFA

SEQ ID NO: 143800 - protein, 343 aa, unidentified
MEITTVGIDLAKNVFQVHGVDAHGKQVLSRQLRRKQMAKFFAQLEPCLIGLEACAGAHYWGRVLEAFGHEVKLMAPQFVKPYVKANKTDAADAEAICEAVTRPNMRFVPIKTADQQAVLSLHRARAGFVKARTALVNQIRGLLHEYGIVLSGGIRHIREGLPDIVEDGELDLPPLFRELLQQLYEYLCQLDTQVQAMEQPLKAWHRCSEDSQRIEQIPGIGWLTATALVASIGDASSFKNGRQLAAWLGLVPRQHSSGGKPRLLGISKRGDAYLRTLMIHGARAATRSVEQDRSPTGQWLREVGKRRHKNVMVVARANKHARIVWALLVHRRDYDPLYVPQAA

SEQ ID NO: 143801 - protein, 349 aa, unidentified
MRQVSQVGVSQVGVSQVGVSQVGVDVDSEKLVCMMQRMGQRMLLPTFANTAAGHKKFIRWATKRARSARVCLEAPGIYSLQFALALHDAKNVEVMVVNPRAIKDFARACMQRAKTDAVDAGGILEYLERMPFTAWQPPAPEILQLQAINRRIVQLQTELTREKNRCHASKFAGASGDAVANDIEVNIRHLERRIERMHDSGLQLVHGVPALATKLAHLVSAKAIGEASAMRILAEVLVLPVDLAAPQWVAHAGLDPRPYESGTSIHRPRRITKVGNRHLRAALYMPALVAIQHEPNVKAFYNKLVAAGKKPMQAVVAVMRKLLHAIWGMLKHDQDFDGNKFFRLAEKTA

SEQ ID NO: 143802 - protein, 386 aa, unidentified
MITPNQLGQLFVGMDVHPDNHAAVAVNCFGKKFLETELANDYQAFAGLVKAVRQTAREQKLSAVFGLEDTEGNGNFLARHLLASGFAVKSVNPVLVKRQRTYETHPEKSDLQDAFGVAKVLIERIDSLPSFSITETTEAAKDLHTLTCERDSLVKEQIRLKNQLHQALRQTYGSEYRSVFKDVFSKKALKFWQEFPAAQALSASRKRGAKKPAWLEKTPAEFLPTASETQQRHISRKAQRLLSIREELLQIETELENLIATTGQQLHTMRGCGTVLSAVVLSEVKDIERFKTSSALAKYAGIAPKKSESGKTKRDRKSYSGNRRLNKAIYQIALTQISNQGLEKAKTYFAKKVQEGKTKKHALTCLMRQLTDIIWSMLKYKRAYYP

SEQ ID NO: 143803 - protein, 350 aa, unidentified
MGRYQEVVSEDSEIFVGIDIHLRQWQVTIQTVDQELFCGSIPGQWAALQKLLERYRMCRVRVVYEAGFSGYWLYDRVTAWGAECMVTPPSLLPVVSGNRVKTDKRDSRKLSRLLSLGLLQSVWVPSPAQRGHRRVLRRRRQLVQDRTRIQSRIKAELALFGMSVSSGPGRWSGRLLSELQQIRLPDQWSQASYDRLLEQYCQVSEQLASQTRLLRELARTEQYRPALELLQSVPGVALITGMALLLELGDISRFGRADQLAAYVGLTPSQYSSGDRIRMGRITGMGNRYLRGLLIEAAWVAIRKDTHLHDIYLRLKQRCGGKRAIVAVARRLLLAIRRVLLDQVAYRACA

SEQ ID NO: 143804 - protein, 331 aa, unidentified
MTYCIGIDVSKQSLELWDGTHEEEVPNERGLKTLKKLLKKRYGTNWNEGGFIYEPTGPYSNYLRAFAAEHEVRVVEVNPKKSANFAKVLGNRSKTDAIDAKMLYTFHLLLKESKFSIPEMDEIAEQLGAYLGSYEIIQKTRTMLSNHVHSLEYKSGVTRKLKESLEKELKHLGTIEEQLEKEMEAYAKDHQETREDLNNLLSMKGIGVVSAMNLLYLFRKYPGANRNEITALAGLDPIQRQSGSSLQGGRKISRAGDPMLRKVLYLACMNSIQHNECIRTFYKHLVSDNHKKPKVALVACMRKLLLIAHHLYVTKSKYRTLEHDANLCLSS

SEQ ID NO: 143805 - protein, 320 aa, unidentified
MMTQSDLVVVGIDVAKDKIDACIRSVTERKTCPATAPGRRSLIAWLRKHRVGKAVMEASGGYERGWTKALRQAGLEVRIVDPKRVRHFAESAGRLAKNDKIDAEMIAWFAETFNEAPSQVDDPAQEEMKALVKGRHGLIDVRARLEMQKEHEAPALVRKARARLLKKLAEEIAAIETAIAATIEATPDFARRAEIIQSVPGFAEGTAMALLGGVPELGQVSDEIAAALVGVAPYDDDSGKRRGERCIKGGRRWVRNALYMPCVGAATLNNPVFKAFYERLIAKGKPPKVALVACMRKLIIILNTMIARDEKWDPKRYKVA

SEQ ID NO: 143806 - protein, 391 aa, unidentified
MNYLGIDVGKFFHSFCLLNEAGEKKVLQIPANKQGFEKLSQLVKKELRDNELLIGMEATGHYFLNIYDFLLRLGVSKDNLVLLNPLQVKAFRNTNLRGAKSDDIDATRIAVLLRFGDFQRCHVAIDKLMNLRQLTRLRSELVALNGDIKRKIISVLDRIFPEFPTVFSDCFGKTAMHLIGKYPSPEELSSLSLSKLEKTIKKLSKRGISKNKIQELRRLANNSVGIKTGIDSLKVELDILLARLKMCQNQVKDIEEKISELLKSFPNHIFSIPGIGQSTGAAILAEIGDINNFKSSIKLIAFAGLDPKLKESGRYQGRTPISKRGSKYLRNAIWQSSMVGARANPMFKKIYQGKRNKGKSHRYAVTATANKMTKVIYSVLKNNRTFKEQIV

SEQ ID NO: 143807 - protein, 309 aa, unidentified
MRRICGVDVAKEALDVRLGASEQRFANDAEGIDRLAGECRRHRIELVIMEASGGYERQAFALLSTGGIPCAIVNPKRVRDFAKAKGCLEKTDRLDAAILVEFAAAMDIQAQPAPSPAERRLRDYGQRLRQITRLITLNKQFLACTDDPLCRQSIEDALTLLRGQARDFQDKMSAAIADDPVWGRIGETLREVKGVADRSLALLATELPELGTLSNKAIAKLAGLAPMADDSGARHGRRYIRGGRSAIRQTLFIISGVAARFDDKMRAFHLRLLAAGKAKLVARMAVARKFLVILNAKARDARATAGITP

SEQ ID NO: 143808 - protein, 341 aa, unidentified
MKNKSFIGIDISKNVIDASIFTEGASIKDFPHAVFNNSRKGFGGMVTWLKKNHVVLSNCLFGMEFTGSYSMELEKFLTARKYQFCMLSTHTVKHYPMGPKDKSDKIDSAKIADFLYRYNGTECVKPYNMPDKTMQRLKALMNERKFLVEQRTCFMNRRQLCTTKEDTQLYDGYIKKLSRDIENIELEEQKLLATDESLLTTYRNLLTIPGIGSVNAINVIVITRNFTAFETARQYASYVGVAPHFRTSGTSVRWRPRPSARCDGQAKADLSMAALIAVQYDAELQSFYNRKLGGKQDSDTKRKALNAVKFKLILRMFAIGKQNRKWETLDSMSNNEILAIS

SEQ ID NO: 143809 - protein, 395 aa, unidentified
MRRPVSGRDAERSQVIDVLKAQIKRRPARKKVSTVGTQQRRNISQQKLTIGLDLGDRNSWYCVLDEAGQIQLEQRVRTSAKTLGEVFGAMPRCRITLEIGTHSPWISRLLSELGHEVIVANARKVRLIGESRKRDDRLDAQTLARLARIDPQLLCPVKHRSAQAQADLMMIRARAGLVRARTGLVNAARGLAKSYGERLRGCKVRNMNPEKAEGLSPELQRALEPLLSAIEELNERICEYNDRIGALAQQSYPQVALLKQIKGVGTLIAPTFLLTLEDPHRFGKSRDVGRYLGLQPGHRNSGQSESQRPISKEGDPYLRTLLVQGAQHILGPFGVDCDLRRWGLKLAERGGRKGKKRAIVATARKLAVLLHHLWVSGEVYEPLHNSRQTTVAAAA

SEQ ID NO: 143810 - protein, 325 aa, unidentified
MTHSPLSDSSYFAGIDVAKAKLDLARSDTGEILTVNNDSEGIRRIVDSLRAAAPNMIVIESTGGLERPMLDALLEADLPVALVNPRNVRHFAIGIGILAKSDPIDARVLVEFAKLATPRLAEKRSANQVELDALITCRRQITQLRAIQFNRRGTTTSKAALKTIDAVLKALGKEIEKLDKKIRALVESDDDFDSTDKLLRSVPGVGAVVSATLLAELKELGSTDRRRVSALVGVAPYNHDSGTMKGQRSIFGGRASVRSVLYMATVTAIRCNPVIRAFAERLEKLGKAKKVQIVACMRKLLGFLNVMIRDQLSWNQLNVVKTLEN

SEQ ID NO: 143811 - protein, 383 aa, unidentified
MRAVCGLDVHKDTVYLCILSDTDEIFEKVYGVLTQELHSMRRDMRLHGVTEVTMESTATYWIPIWRVLEPHFRLKLVNPYFIKQLPGRKSDVKDAQWIAECTLKDLVRGSFVPPERIQQLRQYDRRIFDLDAEIVRKLSKLDGIMQRCNIRLSNYVSNTDTKSYKNVVDKLCEGVTDPVELIKEIHGRIINKHGRETILASLTGVVSEAEKDTMRQLRQELTLAEEHKQECQNKMVNICKTYYPKEFKRLMTIPGIKERAATSLIAEIGVDMTKFQTAAHLASWSGLKPRNDVSNGKYKSRRITHGNVYLRKTIIECAWGASRTKDCFFSRFSYHQTVVRKKSKMKVLVAVARKLLIAVWHVLHDETDYVDFNPDCKAPATNG

SEQ ID NO: 143812 - protein, 355 aa, unidentified
MSQEKYIGMDVHQATISVAVTDCRGKLIMESILETKAATILEFIQGLQGSLSVTFEEGTSAAWLHDLLKPHVTRLVVCDPRKNALLKDGSKSDRIDARKLAELLRGNQLTSVYHGEHGMRTIKELGRSYLTITKDLTRVMNRIKALYRSWAIPCSGTSVYAPRHRAEWLGKIPEPGVRLRAERFYQQLDLLQPVRQQARHDLLTESRKHQAVKLLRQIPSIGPIRAALLVAQLQTPHRFRTKRQLWAYSGFALETHDSGEYRYVRGKLQRNRERMTVRGLSNNHNPDVKNLFKGAAISASTHPGPRYDFYVALLENGMRPTMARLTLARKIASITLTIWKKGVDFDATHLHRQEA

SEQ ID NO: 143813 - protein, 401 aa, unidentified
MFVGHDWAEEHHDIDIRDGEGRSLGRARLSEGVEGVARFHALVGALVEHPSAVVVATETDRGLFVGSLVAAGYQVYAVNPMSVARYRERHSTSGAKSDPGDAAVLAELARTDRHHHRRVAGDSDLAEAIKVLARAHQSLIWTRQRQLNQLRSTLREYYPAALELGDLHGPDALGVLTVAPTPSLGRRLSRTRIGSAIARAGRQRRVEQRAAEIQAVLRTDQLSPPAVIGEAMGASVSALVAVVGEFNTQIARLEEQLSERFDQHPDAKVVRSLPGLGTILGARVLAEFGDDPNRYDSAKSRKNYAGTSPITKASGKSRVVLARYARNRRLADACYLWAFAAITASPEARSFYDARRAAGDTHNRALRALANRLVGLLHGCLRHDTLYDAHAAWDHRHQRAA

SEQ ID NO: 143814 - protein, 342 aa, unidentified
MKATTIGIDLAKHLFQLHGVDQHGKTILKRQLKREQMLSFFSNLPPSLIGMEACGSAHYWANKLQGMGHTVKLMAPQFVKPYVKTNKNDAADAEAICEAVTRPTMRFVPIKSSEQLAILALHRARQGFIKARTAQANQIRGLLAEYGFILPQGITHIGKHVPELLEDSENGLPGTFRHLLMRLHEHLKMLDKQVNELEDAIVSWHKDSAASQTLAQLPGIGPITASALVASIGNAKNFKNGRQLAAWLGLVPRQHSSGGKQNLLGISKRGDIYLRTLLIHGARAVLRVAERKESFSGSWLAGVMARRNPNVAAVAQANKTARIIWALLAHDRKYDAHYGMAA

SEQ ID NO: 143815 - protein, 350 aa, unidentified
MEYIAFDSHKRYTFASVEEHTGAILRDTRIEHQRGAVKEFLSEWKAGTPVAVETIGNWYWIVDEIEKAGMVPQLVHARRAKMMLASVNKTDKLDCHGLNRLQRTGTLPTVWIPPAQIRDLRDLPRTRMVLSKERTRLKNRIHATLAKYAISIEGTSDLFGKRGREELKKSLDLLPPHSRFSVERLLETLELVQKQIDLFEERMKETFVTSRELEILQTLPGVGFILAVVIFLEVGDIGRFPGASRFAGYSGTTPRVSSSGGKTRYGRLRPDVNRYLKWAFIEAANVICLNHRRRPYRHVSRLYLRIRQRKGHQKAVGAVARHLAEATYWILKKGEAYREPQKKTVSSTKG

SEQ ID NO: 143816 - protein, 339 aa, unidentified
MDITTIGFDLAKTVFQVHGADGEGHPVLRRKLRRGKVLAFFAGLPSCLVGMEACASAHYWAREIQALGHEVRLIPPQYVRPFVKTNKNDAADAEAICEAVTRPTMRFAPLKSAEQQSVLMLHRARELLVRQRTMVINALRGHCAELGLIVAQGASRVEELIAIIEDPDDARLPPLAREALGMLVAQLRSAQARIKELEVALLAWHRSSEASRRLATIPGVGVITATALVATIGDGAQFRSGRQLSAWLGLVPRQHSSGGKNRLGRISKRGDGYIRRLLVHGARTVLRWRRAKPGTRPGWTDQLLARRPTNVVLVAMANKTARVAWALLRYERIYQPVSA

SEQ ID NO: 143817 - protein, 346 aa, unidentified
MVLIGCDFHPSWQQVSWLNRETGEAGDQKLVHEPGAVEQFYRQFPAGSRIGMEATGNCQWFVELVTSLGHEVLVGDAAKIRASDSRQQKHDKRDARLLVQLLAEDRFPQIWVPSREEKDLRQLLIHCYKLVRIRAQVKNGLQHLAMNQGVLKKHKLWSKAGEKVLRELPLAPWASRRREDLFRIRAVLNGQIDLLDQAVVEAAEKNEKARLLMTQPGVGPITSLAFVLTMGDVKRFQRGKQVASYLRLIPREYSSGGHQRLGSISKQGNRFMRMLLVEAAQGAGRCDPGFRNEYLHRCPNKPKGVAKVAAARKLAIRLYWMLRSNTGYPEIVGIESSSRVPLVGAS

SEQ ID NO: 143818 - protein, 474 aa, unidentified
MARTRKKPAAPPVPGDAGAEVTDEPVQVISRAAAIDVAKGSGMVCLRLPHESRAARRTQKVWEVTATFAAVMTLMDHLVCQGVQRLVLESTSDYWRIWYYLAEAAGLEVWLVNARDVKHLPGRSKTDRLDCVWLCKLNEWGMLRRSFVPPEPVRDLRALTRLRANLTHDRVRHQNRIEKILEDALLKVSSVISDLMGASGRRFLQALADGERSPAALAALGDYRLHASKAALKEALTGRFRDIHGFEIGMLLELIDDLSAKIALLDERIEAQLANVPGLGGVCTSCGQAGPDGPCTGCGEPVLGVIARLDEITGIGRDGAQVIVAELGTDMTQFPTPGHAASWAKTTPRAIQSGATSKTGRTGKGDPYLRGVTGAAVMSAARTDTFLGARYRRQARRRGKQKAIVAGSRTIIESSWRIIADPGFRYIELGPDYHDHLDAGRKTRDKIRQLEKLNPGMTVTLTPRPGPAGQAPAA

SEQ ID NO: 143819 - protein, 424 aa, unidentified
MKNSTCHKIKQIPEGYLIVGVDAHKKKHAFVLKTMDGMTRPKFKLSNSRSGFVQLLDRTRHHMKLLGCRGIIFGIEAGGSYWRPLAHFLEANGVPFRLLSPFTLKRRREGDDVDRRKNDYHDAETGAEMLRTGAFTETKLPQGTYAELRAAYHAYHRLGDEITQTSNLLGSLLDGVFPEFCQVFRDVDSKTALAVLEAYPLPHIIAAMTVDQFKEAMVKRFQGMRIMRKKLAEIHQAAGDSIGIRAGSNAVAGEICMLIERLRLLHMQKQMSLCNTVTLMESLPESRLLLSINGIGHVTVAGLLGELGPISNYQNAKQLVKMAGINPVQSESAGKRGSRTPMSKKGRPWLRHCLWEGCLGLLRHNNAFQSWFQRVTERSVFNHPLNKREARGAMCNKLLHLVFAMVKNGTLYDANYAVKEMVSA

SEQ ID NO: 143820 - protein, 341 aa, unidentified
MSESALIGIDLGKHTFHLHGQDTSGREVFRKKCSRAQMMQFFGNVPNCVVVMEACAGSHFVARQLMAMGHTAKLISPQFVRPFVKGNKNDFVDAEAICEAASRPSMRFVTPKTESQQTLSVLHRMRESLVHDRTKTANQMHGFLLEFGISLPKGLAIMQRLASVLAEHELPVRLTVLLQRLHDHFVYLDEQIKALDKELAGQLADDDLGSRLLSMPCVGPITASLLAVEMGDGKQYRCSRDFAASVGLVPRQYSTGGRANLLGISKRGDKHLRQLLVQCSRVYMQRLDHQKGALADWVRSLLSRRHSNVVACALANKLARIAWAIAAHHTQYEAGPDALNA

SEQ ID NO: 143821 - protein, 343 aa, unidentified
MEYYVGLDVSLKQTSICVVSGTGSVVREGVVDSNPDAIAAFVRSKAPGAIRVGLETGPTSTWLWTELKRLGLPVICIDARHAKAVLKMQINKSDRNDAAGIARIMQTGWFKEVRVKDLHNHTVKALLASRALLVKIKRDLENQIRGLLKNVGLVIGRAKFNVFAVRAEELIEDRPELIPVVGPLLKARQAIEQQTEDLDRKVLRLTRNDAQVRRFMSVPGIGPITALCFKATIDDPTRFKRSRSVGAYVGLTTRRHASGEIDWTGRISKCGDTMLRSYLFEAAGVLLTRVPKWSALKAWGMRLAKRNGLRKATVAVARKLAVILHRMWIDGTEFNWSTKQAAA

SEQ ID NO: 143822 - protein, 419 aa, unidentified
MDLTDLTSTDTKPASPAPPPGLVAGVDTHQDTHTLAVLTAQGAVIATSSFPADQQGYDDLTAHLDRLGPLMAVGVEGTSSYGAGLTRTLRQAGYDTVEVLRPSRRVRRHHGKSDPIDAIAAARTVLSGDGVSQAKDTTGPAEQLRLLLAARTRLISAATAITNSIHSLLTTAPEPLRERYRRLDTPALITRLARTRPTRTITTPQQAATSALHHMARTHQDLHHRAERLNQQMHHILTTHYPGLLAVYGAGTTVAAQLAVTAGGNPGRIHNEAAFAHLCATAPIPASSGKTTRHRLNPGGDRRANAALHRIALVRLRHDPTTKNYANRRTQEGKTTKEIIRCLKRAIAREVYRALTQPPPTDTTSTLAAHRKRHHLTQTDVAHALNTYPARISDIENHRRPLPQLTHRYHQYLTTLDTQ

SEQ ID NO: 143823 - protein, 269 aa, unidentified
MNTQNTAIIHYVAIDVSKATLQVQDDKRAFAVENNSIGHRKLLVHLKGCPKPLVVYEASGGYEREFAAFLGKSAIPQAMLNPASVRDFARSEGVRAKTDPIETRMILAFAKSKALEAIDPPSEESLKLAALLDRREHLVEQMAREKNRLQNSETLIHRSINRMMKILEKEIAVMDKAISQLVDSTPLLKSRSQTMQSVKGVGKVTAWTLLAYLTEMDHLDRNKLVALAGLAPFNRDSGKMSGRRSIQGGRAKVRKASTWPPIPQPPATR

SEQ ID NO: 143824 - protein, 325 aa, unidentified
MIDGMLGIDVSKNTLDASMSSCNDKVRAKSFANSPDGWRHLLDWLIGQKIRRVHACLESTGRYSLGIACKLNEAGHVVSIVNPAQIRDFARTKLGRNKTDAVDASHIREYCELFKPPPWAPPSHAHRQLGELQTIRAGIVAGLTEWKNRKNSGMVDAVAQSLVDATISHFTSQLGAVEKTIAQAIDNDSDLRRKRDLLLSISGVGETLASVVLAELPGPDVLHSSAEAVAYTGLNPRRHRSGTSIDRQTRISKIGNAVLRAALYMPAMSAMRHNPAIVALVTRLKARGRLNPKQIVVAAMRKLLVLCFGVLKTGKPFDPALAMGC

SEQ ID NO: 143825 - protein, 328 aa, unidentified
MFEHYIGVDLHQAFFQACAVTPTGDRLWEDRFPRTDAGISALLARCNQRSAVAVEASTPTWHFADAIQAGVGELRIVDPVKTKLKAGYAAKTDRLDARRLADALRRDSVVGLYHPPVAIRELRELCRGRHAIVQVRTALINRLRAVLLRQGVVDGRRLARTISDAWLERLVMPPRATASVAALRRILTAVRLEAAQADGAVLAAAAADPIAIRLQQIPGIGPTLALLIRAEIGEIRRFPTPGHLASYAGLVPRVDASAGRVRYGRITRRGSPWLRWALVEAAMHGTRRTDRVGRWGRGLAVRKGALKARVALARMLCEEICRHWSACV

SEQ ID NO: 143826 - protein, 331 aa, unidentified
MAQDEVVVVGIDVAKDKVDACIRSLSQRQTFPSTAEGRRTLIRWLRKHRVGKAAMEASGGYEQDWAKTLRAARIEARIVDPKRVRNFARSAGRLAKNDPIDAEMIAWFAETFTEAPGQAYDAARERLVKIVNARQGLLDLQTNLTNSGEHSVPDVVQKMQARLLKKIAVEVARLETAIAIQVKATPHFAELAEIIESVPGLGKITSAGLIATMPELGQVSDNIVAALLGVAPYDDDSGQRRGNRHIKGGRRKARNLFYMPCMGAATRHNPVLKAFYDRLIAKGKEPKVALTACMRKLIVILNTMIARRQKWDANRYKVSAPARLPPSACPA

SEQ ID NO: 143827 - protein, 400 aa, unidentified
MISVGIDVSKGKSTVCILKPYGEIVSKPFNITHTQKDLSELSSMLFRLNDEVKIVMEATGIYHLPVLTYLQEKGFFVSVINPYLMKSYRNESLRKAKTDKIDSRIIANYGIDHWFKMKEFQTSGEIYEELKLLGQQYRHYMKLHLLSLAELTHLLDLTMPGIKNLLASWNETNRKDKRSDFVERFWHYDVITSMSEQEFTEEYILWAKEKKYVPSQEKAKVIYTLAQESIPTLPSETSSVKILVTEAVRVLKEVDATLGLILSRMQEIAKTLPEYSVVREMGGVGNTLAPKLIAEIGDVRRFRNGKALVAFAGIDPPPYESGQFVGCNRKISKRGSASLCKVGYETMRSLKMRSRPEDPVYRYVVKKESEGKSKKSAKIAGLNKFLRIYYARVTELYKNI

SEQ ID NO: 143828 - protein, 450 aa, unidentified
MMREVQEIEDEEHEQILERVCAIDVAKAPGKVCTRVPHPSRPGARRTRVQDVDATTNAILELGGHLAGEGIEKVTLESTPDYWRIWFYLLEASGLDVQLVNARDIKNAPGRPKTDKLDSVWQAKLTERGMLRPSFVPPAEIRRLRDYTRLRTGLTRERTRYWQRLEKLPGDSLIKVSTVASSLDTLPVRDMLEALIAGERDPKVLAGLARGKMKAKHAALIEALTGRFDDHHAELARMLLDQVDALNAQIGKLTTRIGELIAAIPSAQGVGADGTTGPAAGTSPGAPVLPAAARLDEVTGIGLDGAQAIIAEIGLDMSRFPAAAHLVSWAKLSPRTIQSGTSSRSGRTGKGNPYLKGILGEAAAAAARTGTFPGERCRRIVKRRGKLKALVAVARSILVIIWNLLASPAARHHDLGSGYHASRTDTGKKVRNHIRQLEAPGYTVALTQAA

SEQ ID NO: 143829 - protein, 413 aa, unidentified
MAEETISWFAGVDWGSERHQVCLLDARGTTVGERAFPHSGEGLAELGDWLLSMASAASTVAVAIEVPHGPVVDALIDRGFVVYAINPKQLDRLRDRFSVAGAKDDRRDAYVQADGLRTDRRLFRHLQVADPRLIELRAWSRLAEELQAERVRLSNRVRHQLWRYYPQMQKLTNDLAAPWFLELWTIASTPAKAGRLRKSTVERLLKQYRIRRIDAETVLRILREPAIKVAEGVAEAASIHMRSLIARLRIVNRELREAERKLDEVCTAISEIEQTSGESLQRRDVAILRSMPGIGRINLATLLSEASGPLSRRDYEGLRTLSGAAPVTKRSGKSLIVVRRYAAHVRLRDTVYHWARVATQRDPKCRARYTALRKRGHSHGRALRSVADKLLALACVLLQRQTLFDPHFGRPTT

SEQ ID NO: 143830 - protein, 342 aa, unidentified
MQITTIGLDLAKSVFQVHAIDAEGHVVVRKALRRARVLPFFAKLPSCLVGMEACGTSHHWARELTKLGHEVRLMPPAYVKPYVKRQKNDATDAEAICEAVTRANMRFVPTKTPEQQSGLVLHRTRHLFIRQQTSVINAIRAHLAEFGIVAPVGRHGVEELLTVVADPNDKRVPEIARACLSAFGAQLRRIKEQILEFDRLITAWHRSNEMSMRLDEAPGVGPVLATAVVATVADPKAFRSGRNFSAWIGLVPKQHSSGGKDRLGSISKQGDRYLRGLFVAGALAVIRYAKIHGTRHRPWLTALLARRPTKVAAIALANKIARMVWAMMVKGERYKEPVALAA

SEQ ID NO: 143831 - protein, 325 aa, unidentified
MTYIGIDISKATFVAAFPHVKGYRTETFPNDAKGIRRFISKLDPTLHHCVMEATGNYCFLLLYLLDKAGIRASLINPKKIKNYARVMMSVTKTDSQDACLIADFGERFKPAPYKFPSEHIMILKQKKTVLRQLQKQLTATKNLLSSLEPLPVKDKKCVYSLKQTVTFLEKQIKYMQQEMEAVVTDVFEKQLKLLTSVKGIGVTLATALIIATGGFTYFDNAKQFSRFIGISPTIEQSGTSINIRGHINRNGDETLRSMLYVAAWSASQHNKACSECYQRLRGKGKSGKVAMIAVANKLVRQAFAVVTSNKSYIDGFVSTKPDTAV

SEQ ID NO: 143832 - protein, 322 aa, unidentified
MSKHSIVCAGIDTGKYKLDVALNGSRQQLQIDNTTDGHAALSSWLKRHKVERVGIEASGGYERNVVTRLRGDKFVVVVFQPAQVRAYAGFLLQRAKNDKIDAALIAACTAAAKKIHAPPDPRLAPLAERMTLIDQLTDQIARFKNYREGSRDLRMRQLWKEQIAHFNKLLRAELKELVAAIRQHRDLAERLDLIESVDGVGLKTAVAILVRMPEIGRLNREQAASLVGLAPFDDDSGMHAGIRHIAGGRERLRGSLYKASLSAAFHWNPQLIALYQRLIAAGKLHKVALIACARKLLIFVNTVVERGTPWVSSRSPAVRAAA

SEQ ID NO: 143833 - protein, 407 aa, unidentified
MGRVFMYFIGIDWADEKHTIVILSESNKEVSAFEIPHSFDGIEHLKKRLKDLSIPVSNALCFIETSRGLLVSSLIQYGFTVYPLNPKVVDKHRKPSGAKTDFIDARLLADLGRKDHLSLRPLVLSDDLLQELRLLTRDQEGLIHSQTRLTNQLIASLKEYYPAALKFFTRIGQLCTLKFLQTFPSIDSLRKASREDVVIVLKTLRHKDPETKANEILEIISQPQIPVSFAVSKAKSRFTKVLVKQFIVLIEEIALYDKEILSLFKQHKDYEIFKSLPGAGKRLAPKLLAEWGDERTQYQSVASVQALAGTSPVAFQSGKYNKARRRTSCVKPFRNALHEFAWCSVRWEPWAKEYYYRKRKEGKSHHVAIRSLANNWVRIIFAMWKTEENYEPSVFLHAQKRHSQKVA

SEQ ID NO: 143834 - protein, 433 aa, unidentified
MTLINFVAANQKYYAFNLLSVFIMVFWSVQYLLQHLLVQTQLSDQLLQPLILILQLPQTPQFRHARSGKFFLPVNGMDYLLPLRLTVRNVLTRRITMNIVFLGIDLAKNVFQLCGLSQAGKPVYTKRTGRKELLQTQANIPACLIGIEASTGAFYWQREFEKLGHKVKVISPQYVKPFVRGQKNDGNDAQAIAVALMQPTMQFVPPKSPEQQDIQALHRARQRIVNHRTATVCQIRGLLLDRGIPIGSAVSRARRAIPLIPEDAENGLSSRMRRTIAELYDLFNDLGRRIHFFDKEIETVSRQSEACQRIAKVKGIGPETATAVVAIGKGTEFKNGRHFAAWLGLVPRQHSSGDRRVLMNMTKKGDKHLRTLFIHGARAVVRVATNNNDGHMNQWVNQLKERRGFNKTTVAVANKNARIIWSMLRNDTGYQVV

SEQ ID NO: 143835 - protein, 473 aa, unidentified
MGKGSGISRAERRRNARKERLRGLLPRDGAVVGIDLGEDRQALAVIDHDVRVLWRKTARVKAHRLGEALDLAVAAARAAGPGAVTVACEPAGPRWMQVQRLCAERGLPLVCIQPLVSHISREQQDYTSHKRDEPDAVLIARLACELHCYVPEQQDEAWAHLRALGRRREQLVRSATASVLRVRDFLSVAWPAAEAAAGAPFRSLTWLGCVEAVTSRCSGDPARLAARGEGEFLALAADAARAWGATRADKRIARNLLGALDDPDAVAWSRRGLFRRIAGELGDLRGLRARLEAVEAEMRAVVAGELGLARLGDIPGLTLTGAAAILAEAGDPRRYETSSSLVKHAGLSPADTSSGASEGASRISRRGRPGLRTAAWRAAWPLLAHNPVMAAKYQAMVSAAEEAAAAAAARAKPGSAQAAQAGRAARAARAKARVACAASLLRWIYYMTVHGADWDPEAASGGLRVPDGLPEAA

SEQ ID NO: 143836 - protein, 372 aa, unidentified
MKEASTPTMFVGLDVHKKTIAVATVEALASADVRFYGTIANTPVAIRLLLKKLAKGGQRLHLAYEAGPMGYILYRFATDLGHRCDVVAPSLIPRRVGDKVKTDRRDAMTLAQTLRAGQLTEVWVPDEAHEAMRDLVRMRALAMKDQRKARQQLHSFLLRHGRTFSGKHWTKMHRRWLGELRFAQPAQHLVLEELLVRIERAEELCGRLKQAIVDLVPQWTLAPVVAAVQALRGVSILVAATVVAEVGNFSRFQNPRQLMAYLGLNPSEHSSGATIKRGPITKTGNSLARTCLVEAAWTYRHPARVTQIIRERMKGLPEPIRAIAWKAQVRLTARYRKLTASGKSAPKAIVAVARELVGFIWAIARLVEPKVV

SEQ ID NO: 143837 - protein, 403 aa, unidentified
MSFNGAPVTAAAVVAVDVGKNKAALAMTSADRHRLFGPADFAMTAPALAAVVERVCAVLPAGPVKVGVEAAGHYHRPLLGSGVWPAGWEVLELSPARVAEQRRVQGRRRVKTDVIDLEAITELVLAGHGVAVKPRAAAVTELTGWAMQRGRRVLTRTATKNQLLAQLDRCFPGLAMVLPDVLGTKVGRLVAAEFADPHRLAAFGFTRFVRFAGNRGLRVRRSAAERLVAAARAALPSPQAQVARQVLADDLVLLACLDAQIVVTEAKLAQLLPDTPFAPLTTAPGWGTVRAANYGAAVGDLDRWPGARQLYRASGLSPAQYESAGKRRDGGISREGSVALRRALIDLGIGLWHADPAARRYGQQLRARGKKGGVIGCAMAHRANKIAYALVRDQSGYDPGRWT

SEQ ID NO: 143838 - protein, 321 aa, unidentified
MTSRGTEKMTQVTIGVDVSKDTLDAYRLSDGAKQRFGNDKAGHAAFVAWSGQDVARVVFEPTGPYHRAFERALAQAGLPAAKVNPRQARRFAEATGKLAKTDGLDAAMLARMGAILDIETKPRNSDEIIELKEMLLARAALVKDRVAAKNREKNLTLPLLKRQNGFRLKQIERHLEALDADIKARIAASHEMARRCAILTSIPGIGFLTAFALLVEMPELGTLEPGQAASLAGLAPITRQSGQWRGRSFIQAGRATVRTALYMPALVAARFNPDLRAKYTQLIAVGKPPKVAITAIMRKLIVLANALLKKGAPWEKKTACA

SEQ ID NO: 143839 - protein, 310 aa, unidentified
MERIFVGLDVSKARLDVHVRPTDEQFAVAYDEAGVATLVHRLAGLRPTLIVLEATGGYESTVAAALAHAGLPVAVVNPRQVRQFARATGQLAKTDRLDARVNARFAELVQPAARPLATEQAQVLGELVARRRQLVDMLGAEQNRHRQARAQGLPQRIRAHITWLARAIEELEGEITRLVRASPVWRETEDRLTSAPGIGDITAHALIADLPELGQLTRRRIAALVGLAPWNRDSGRWRGRRMIGGGRAAVRRALYMPTIVAIHHNPVIREVYRRLTAAGRPKKVAVIAAMRKFLTILNAMLRDRRLWQPA

SEQ ID NO: 143840 - protein, 350 aa, unidentified
MESAYDGPQVVGMDLHRRRSVLVRMTADGRKLATARIDNTAAALAAEMVKAGPSPRVVLEATYGWYWAADALAAAGAEVHLAHSLGVRGFRYRRVKNDQKDAADLADLLRMGRLPEAWISPPEVRELRELTRYRIKLVSLRTSCKDQVHAVLAKLGIPVTCSDIFGVWGSTWLDGLVLPQPYAGKAASLRKLAGELTAEIILLEKVIGDLLEHHDGYHALQQLPGIGPVLAAIIVAEIGDIRRFRRPGQLCSWAGLTPRHRESDTKVARGHITKQGSPILRWAMVEAIQRLPADTPVRDIKDAIIARRGKEARNIAKVAAARQLLTCVFYAMRDGQVRYLAARAAAKQAA

SEQ ID NO: 143841 - protein, 455 aa, unidentified
MAKKGKKTKPIPENMLIIHPHAAGIDVGAEEHWVCVPADRDAQPVQKFSAFTCDLPRLADWLTACRITTVAMESTGVYWIPLFQILEARGFEVALVNARHVKNVPGRPKTDRFDCRWLQKLHTYGLLAPSFRPPEDVCQLRSLLRHRDNLIRMTVKHIQHMQKSLDQMNLHLHHVISDVTGVTGMRIIRAIVAGERDPQTLATYRDYRIQSSEDTIAKALEGDYRPEHVFTLTQSLALYDFTHQQIAACDQEIERVLSTFASLVDPDEHPLPPPTTAHRQPQRNEPAFDLRTHLYRITGVDLTQVPGLQAPTIHIVLAEVGLNMHKWPTDKHFASWLGLCPDNQISGGKVLSTGSRRVQNRASRALRMAAQSLRTSPSYLGAFYRRMRSKLGPAKATTAPAHKLAKIIYHMLKEKTSYRERGAEYYMHKDQERKLRQLRKQAKHLGFDVVPQASH

SEQ ID NO: 143842 - protein, 424 aa, unidentified
MKVTYQTCCGVDVHKSFLVATIVKTTGGIEPSYQKKRFSTFNNSILEFKQWLFDNDCHDVCMESTGKYWVPVFNLLEDKINVVIANPKWVKAVKGNKDDTKDSKWIGDLFRLGLVKGSYIPCKKVRILREYTRYRYKLVSCRSSEKNRYQNALTVCNVALDSVVSDIFGKSSTSIIDYLLEQSGTSINHEEIASKLLRSLKSKEDAVIESVEGYQMTDAQKYRMRLVRAHMDYITAEINDVDKMIENMISSNPDFENAVQFLCTIPGVKRDSAITIISETGTDMSQFSSSKRLCCWAGLTPGSNESAGKKKSVRITRAGVYLKPALVQCAHAAVKSDKSPYYKKKYESLVKRRGKKRAIIAIARMILTAIYQMLSTGEQWNPSDLYKIDMPVALVEKQKAKAIKQAKKLLQREGLLPPDEPLAS

SEQ ID NO: 143843 - protein, 362 aa, unidentified
MKERLNYVYVGINIHKETHTAVLMTFLEEVLGKIKINNNRTGFKKLFAFVEEKKGDFIPIYGLEDVSHFGRNLAIFLIEKDCVVKEVNSALSYMERKSYPTTKKNDEWDAQCVSAVLMRRFHLLPDANPQDYHWTMSHLVKRRNALVKATTALAHQFHDQLQNYYPSYKQFFKEIDCSTALAFFEQYPSPKHLKGVTAEELGEFLRIKSHNRCSTKRAERILSLVEDDDINERKYQFVRDYVVQSIARQIRLNQEEVKRLESVQRKFLKKLDYQLETISGVSTVTACALIGHIDDIQRFSNANKLANYAGIAPINHSSGGKGKDEQNKSQGNRDLYAVVYFLAIQQICVDLKGKPVRKIEVA

SEQ ID NO: 143844 - protein, 406 aa, unidentified
MAYCGGLDWGSAEHGICIIEHDSGKIIARFPVPHDAAGIADLMRRLARLAPPADLPIAIERPSGLIVDALVAAGHPVVPIHPNVVKASRPRYRAAGGKSDRGDPYLLADLLRTDGHRFRRLIPCSDEIKALRALVRGRDALVAQRLVLANQLRALLDSFWPGAVAIFADIDSPIALAFVQRYPTPDSAARLGEKRIKAFMAQHRYCGRRSASELLARLRRAPPGLAGDSEADAKGELVRAWAAVLTALVAQIAELTSRIEHTIGELPDGKIVTSFPRAGRICAAQILAELGDVRERFQAEDQLAAEAGVCPVTHQSCKSRGVVFRWACNHRLRAAITCFADNSRHSSPWAADIYQRAKGPGCDHPHARPYPRQSLGARALARLAGPNPLRSGATSRLSGKRRLTPA

SEQ ID NO: 143845 - protein, 325 aa, unidentified
MSSEVVIGVDVSKQMLDVAIDGSDRVFQYGNETNGFNKLLKLAKKQNAKLVVFEASGGYEREIVRYLSQRKISVAVVNPGQVRHFAKGMGQKAKSDRIDAKIIAKFGSAVQPEPMTDLDKGRLVLSEKTTCRNQLVNALMALKNQIRLSKHTSKYTTPLITLYERQLKKIDSDIQAEINKSTELKNRAEILKSFPGIGDVLVAVFLAELPELGTVSRESIASLVGVAPYSRESGTFKGKRFCTGGRGKVRRALYLASISACTWCPYFRIFYDRLTAKGKPKKVVRMACMRKMLVLVNTMLAHGLLWTKTDAFASISSLKGASVTT

SEQ ID NO: 143846 - protein, 351 aa, unidentified
MKKVAYLAIDVHAGHCVLGHMAFDGTFIGNRRFPTSEQHIIEALEAIKAKEKYLALEESNLAYWAAQVAKPYVTEVICSDPKENALIYRSANKRDKVDTHKLCRLLRLGELKRVYHPEDDERAIFKAAVQHYIDLRDQQVVLKNKIKAMYRHWGVIDVAGEAVYGMKRRHDYLQRVKHLHVRNQLHRLYCLMDETESMQKRALKAMKQLGRKYPEIKQFKKMPGIGEVLSHIFDAFIQTPHRFANKRKLWRYCRLGITDRTSDGKPLGFKRLDRSGVSELKSVSYQAWLCAMRSDNEVSRFYSESFRRTSNRVHARLNTQRKILAVMYGMWKTGEAYRPQLFLDSPKMSVV

SEQ ID NO: 143847 - protein, 463 aa, unidentified
MKTQTRKNKSTKIKIDSSLPVLNTNAAGIDIGHREHWCAVAANRSARPVRQLGTFTEDLQEMATWLLACGVTSVAMEATGVYWIAAFQILEQRGLEVRLVNARHVKNVSGPKSDVLDCQWIQRLHSFGLLNASFGPDDQVCVLRSYLRYRDQLVCARSVQTQHMQKALQQMNVQLHQVLSDVTGVSGLRIIEAILAGERNPEKLAGLADRRVRASRGTIAKAMKGDYRPEHLFVLHTAFALHQTYEDKIHACDEALIAEMAKLPARVNPQAKPLPPRPPGRAAIRDMVAGVNLREELYRWTGVDLTAIEGIGVLTAQVVLSEIGTDMSRWRSQKHFASWLGLCPGNRISGGKVLSSHTRHVINPVADALRMSAATLKESKSALGAFYRRMRARLGAASAITATAHRLARIVYGLLKHGQEYIRQGAEPYEQKYRERRLYNLKKNAASLGFQLTQNKEVMQSVS

SEQ ID NO: 143848 - protein, 414 aa, unidentified
MEDAVEVLHQRCAGLDVHKKTVVAAVRLIEGNKVITEVRTFATTTAGLLALADWLTKNGCTHVAMEATGVYWKPVWHVLSDGEIELVLANAAHVKNVPGRKTDVNDAAWLAELLAHGLIRASFVPDGQTQELRALLRTRKQLVRERSRHIQRIHKTLEDANIKIDAELSDMLGKSGRAMLDAIAAGETDPVRLAALAHPNVKSPQAKLAEALRGRVTHHHRFLLQLHLQQIDGLDTALGTMDGEIEANLAPFRIAVDIVSTHPGIGKLSAHAIVSEIGTDMSRFATAGHLLSWAGLCPRNDESAGRRRSNRLRKGAQWLKTTVVQCAQAAKNKKGSYYQAQYLRLRSRRGPQKAICAVAASILTAIFHMLKNGTVYQDLGADHFNRRSKITQTQRLVKRLEHLGYAVEIQPLAA

SEQ ID NO: 143849 - protein, 342 aa, unidentified
MYYIGLDVHMKTISYCVKDAAGCVHREGKIGSTRQKLDAWIRTLPQPRTIAMEATIFTGWIYDHLLPHASAVKVAHPLMLRAIALAKKKNDKIDASKIADCLRCDFLPECHMAPTEVRDRRRILRYRHLVVRQMVQTKNRVSGLLMETGVEHTRSRLHKVGYFRRLMTTSSEIDDSIRPLLRLSRETIERCQKTDYALVSSLEHDPLLKERIRRLRTVPGVGPITALNWALEMGDISRFRSIKEAVSYCGLCGDERSSADKVMRMPLSKQRNKHIQHVLVEAAKLAPRQSAELALIYQKAIVKGNRNRATLAVARKMVAWLLAVDRENREFIPAEQREIRAA

SEQ ID NO: 143850 - protein, 346 aa, unidentified
MEHYVGLDVSLKLTAICIVDQAGKIVREGTVASNPEAIAAFVKSHAPHVVRIGLETGATSTWLWTELKKMGLPIICIDARHAKAALKMQINKSDRNDAFGIARIMQCGWYKEVRVKDLDCHAIRALLVSRALLVKIKRDVENQVRGLLKNLGLVIGRCKLNTFTVRANELIDGKPGLSAAVGPLLKVREAIERQIEDLDGKVLRLARSVPQVRRFMTVPGVGPITALCYLATIDDPTRFKRSRSVGAYLGLTTRRYASGETDRTGRISKCGDGLLRSYLYEASNVLLTRVAKWSALKAWGMRIAKRRSLSKARVAVARKLATILHRMWIDGTEFSWSSEGTAMQPA

SEQ ID NO: 143851 - protein, 346 aa, unidentified
MKKIFIGIDFSKEKFDVVIIMAENLEEKAPRVHEQFANDKAGYRKFLKWVKENSHGVDMSLWLFCGENTGDYSKGLSNFLYGKGCDMWLENAKCIKDSCGIRRLKSDRADAAMIAEYAMRNHDRMTLYEPLSGPLAQLRELFLFRQMNVRKRSGYIVRKGEKGRTLDSSPAKSFMARKCKHMIAELDKTIKECDKMIEALIASDRDLQETYEIVTSVPGIGTQNAVCMMVYTDNFKRFDCNPRKIACYYGIAPFGHDSGTSVHCDPHVHYMANKTIKGILTQAALCAINHCPPVAHYYARLIERGKKTMVALNNVKNKLVRIVTALVRTKQKFIPEYEFAKRYAMD

SEQ ID NO: 143852 - protein, 394 aa, unidentified
MSKKNTRNALDTSLSYAVIGLDLAKADCAVAAVPRSDDELGLIDRMDYESLFEQAEKLGPTLFAMEPCCGYSQISLRLQNMGHEVKVISGHAVKNWIATHKSNQKTDLNDATALAKLALYDHDLQPIRVKNVEECRIASVQAIRIQLRTQATKSLVCFKSLCQCWGIVIRRGSLNTKKMAEAVAAVEKLLGAEVASSLMILRDAYKFTMKQINALDKLLDALVEANEQARTMKTVLGIGTQTAARLAVTTGDIKRFPMPRSYAAYFGLAPRNIITGHSGTPSPSKRGALKPVSSRGQGKVSRRGDRVARSFIIQGAATIYMLYCKDMLPECQLRRWLHEQIKRGKPYGKIIVSLAAKLLRIVWALLTYGEKFDSHKAGALGSDKPVIPRVAFIR

SEQ ID NO: 143853 - protein, 411 aa, unidentified
MTKEDFIYVGIDLHKEIHTAVMIDCYNNKLGEITFPNRPADFPKLVTKVKKCNTDAKEVVYGLENAYGYGRALAVWLIDKGYFVKDVNTAISHRQAKHRGAMYRKSDSDDAEAIALATLNMLDKLPDACPNDAYWSLGQLVHRRDNIMKQRTRLVNQLHEQLCIAYPSYKQFFNDISRPTALYFWEHYPSRKYLKGKSVEDLRTELVPVSHNRCSTKNCEKILDAVASDKVKNNAYQDARDMVTLSIVSDLQHYDSQLAEVDKMLEQMYKMLGCTLTTIPGVNVITAVKILAEIGDIKRFSNANKLAQFAGIAPLHLSSSGKGKDVATKQGNRRLQATIYFLAIQMVQVSSKGTPRNSVVRAYYEKRKAEGKTSQQALICISRRLISVIYGMLKNGTEYRMPVVENAGENR

SEQ ID NO: 143854 - protein, 364 aa, unidentified
MYDSTTTVTVGLDVHARSIRVAAVRADELLEERTLPYDEEAVELVLRRWPVVRCCYEAGPTGFGLQRFLVERGIDCQVVAPGLVPQRPGDRVKTDSRDARKLARLLAGGLLEPIHVPSRELEAARDLVRAREDARLDRMRDRHRLSKFCLRHGRTLPTSSWTVARRKWLSEQRFEFAAQQQTFDSYVHTVDLVDARIEALERAIRETAEQEPWRRLVASLRCLRGIDTLTALALVAEIGDFDRFSSAEELMAFVGLVPSEHSSGDQRRQGSITKVGNSHVRRLLVESAWHARRRPTVGYQLARRQRGQDAVVVERAWRCQQRLYQRWQRMAGRGKPQQKIVVACARELAGFVWAIATEQPLRST

SEQ ID NO: 143855 - protein, 410 aa, unidentified
MKSAVITAVGVDVSKSKSTVAVRRPGGEIVMHPFDVRHTNSDLKKLVSTLKKLGGDIRVVMEHTRMYWRPIALTLKKAGFFVSAVNAMLIHDFSDNSIRKLKTDRADALKIANYALTFWDTLPLLNDEEETRLLLKMQSRANERITATATVLRNGLIALADQTFAGVNLAFDPNTKNTDGHEKWVDFFLRYWHRDCVCQYFMEVFTESYRGWCKRKNYKFRTATAHKIYIMAQECVATLPKCESTKTLIGQACKSLNAVCEARHNTQLEMQRLAALLPEYEIVMQMEGAGPVTGPALMAEIGDVRRFKNKKALVAFAGIDAPPFQSGAFESKSRHVSKRGSPHLRRTIFLVSNIILTLSNPENAVFCFMGKMLRGKTLLCLYCCRKRKVLAHLLCSRERVPSLSSSSGCL

SEQ ID NO: 143856 - protein, 344 aa, unidentified
MTYYAALDVSLRSVCLCIVDAEGSYCFEGKLPSEVEDIARCLEGFDGEIELVGFEAGMLSQYLSYGLTAAGFNVVCLESHHVKQSLKAMRNKTDRNDARGIAQLLRTGWYQPVHIKSVESHQVRVMLSSRRVILRKCIDLENELRGLLRIFGIKLPSKLSHGAFDEVVRKPIEANPALTRALIPMLDLRGTLYSAYVKLDKEVRAMAHEDTVCRRFMTVPGVGAITALTFKAGVDDPTRFKNSRLVAAHFGLTPKRHQSGEVDYDGRISRAGDAEVRCALYVAAHVLVTRHGEWSSLKAWGVRLTRTKGHRKATIAVARKLAVILHRMWIDDTDFRWHAENRAA

SEQ ID NO: 143857 - protein, 330 aa, unidentified
MPEPVVIGIDVAKASLAVAVHPSTEAWSCATTSEALDALVARLIAFQPVRVVLEASGGYEMPVVAVCTAAGLPVSVVNPRQVRAFAQAIGRTAKTDPIDALVLARFGARVEPPVRAIPDTTTQALAALVARRRQLLEMLGAEQRRLAQATTGPVRRDLRNHIRCLQRRVTDVDREIGGTVEQSPVWRVQEDLLRSVPGIGPTIARTLLAELPELGRLTRRQIAALVGIAPFNRDSGRWRGYRTISGGRASVRATLYMGALVATRYNAPLAAFYDRLRTKGKPAKVALVAVMHKLLTILNAMMKHQTEWDPKAASTSASPTRRTRAAAVAH

SEQ ID NO: 143858 - protein, 342 aa, unidentified
MEISTIGIDLSKNVFQIHGVDRRGKTSLRKKLKREQMLPYFANVPSCLIGIEACGSAHYWARKLNALGHTVKLIAPQFVKPYVKTNKNDAADAEAICEAVGRPNMRFVPIKNSEQQAILAQHRARQGFVKARTAQANQIRGLLAEYGIVIPQGIGHIGKRLPEILEDGENGLPGVFRQLIDRLGSNLKELDRQVKELEVQIQVWHRNNVDSRKLAQIPGIGPISASALVASIGDARNFKDGRQLAAWLGLVPRQHSTGGKSTLLGISKRGDCYLRTLLIHGARSVVRVVEQKANDANQWLTGIMRRRNKNVAAVALANKNARIIWALLAQDREYSADYGRAV

SEQ ID NO: 143859 - protein, 457 aa, unidentified
MKDKEAKLQSNIVTMPLVHACAAGVDVGDTLHSVAIPEGIFAERVKTFGTMTCDLEAMAAWLLQGKITTVAIESTGVYWKPLFSLLNKKGLEVYLVNSRQTKNVSGRKTDEDDAMWIQKLHSCGLLKSSYLPDDEQEALRTLVRYRHTLVQDCSRFKNRMQKSLELMNIKFHTLFADIAGKTSIAFIEAILAGERNPQNFLPLVDGRIKASKEEILKSVEGNWRSEHLFTLAQSYEMNKVYLQKIAACDTAIEERLQCYQAFANDGQCGEPVNENTAILKPVLKKKKQRGAPVFDVRSYLKKIYKVDVLAIYGLSEMGGLEILAETGVDLKKWPTENHFKSWLNLCPNNKISGGKLISSKLLKKKPNAASQAFRIAANTVQRSNHWLGDYFRRMKSKGGNKFAVVATANKIATIFYKMVVQQKDFMPFDLEAYQQKYKQAKIAFYEKKLKQLKAVAA

SEQ ID NO: 143860 - protein, 262 aa, unidentified
MFPVGIDVSKNTLDLCMLYDGIKGRIKTRNIQNNRHSVENILRWLRLQHCSPEDVHVVMEATGVYHERLATELHDAGFRVSLANPHRSREFARGMGIMTKTDKVDAYMLACYAFLKKPHRWEPPAPEIRYLGALLRRRDVLLGDALREENRLEKYLSTDTPADIISSCRRMAQLLREEISNIERQIKAHIKASPALRRDYTLLTSIKSVGPQLGMHMLIVLRSHNFVSAEQAAAFLGVVPIEKRSGTSVRRRPRMSKIGPLS

SEQ ID NO: 143861 - protein, 409 aa, unidentified
MDRTKYLYVGMDIHKETHTAVLLNYLEEKLGEIKIKNTLQGFHKLEKYILKQKKGLSPIFGLEDVTHYGRTLSIFLLDRNYPVKEVNPSLSYMERMSYASTRKNDTWDAQCISAVLMRRSHVLPDANPQDYYWTMRHLVNRRNALVKASTKLMQQFHEQIQTAYPNYKGFFKELDCQTSLTFFEHYPSPKYLENVSEDELGAFLRVPSHNTCSTNRARKILDLVAQETTKERAYQFARDTVIQSITRQLRAYQREIKELERTERQMYQELGYHLETMPGIDIVTACALVGHIGDIQRFSSSDKLANYAGVAPLRFSSAGKGKDVQNKSQGNRKLYSTLYFLAIQQIYLTSKKEPRNPVFRAYFEKKLSEGKTKIQALLCIMRKLVKIIYSMMKQKTVYKLPKIEEKIAS

SEQ ID NO: 143862 - protein, 343 aa, unidentified
MNEVITIGVDLAKNVFQVHGVDASGKTAIRRQLRRGQVLPFFKKQPPCLVGMEACATAHHWGRELEALGHRVRLMPPRYVKPYVKRNKNDAADAEAICEAVTRPTMRFVAIKSAEQQSVLMLHRTRELLVRQRTMVVNAMRAHLAEFGVVARVGLPQVKRLLAVISDSGDDRIPPLARTCLQGLAPQFMSLEGEIGAAEQRLHAWHRSNEVSRRLETIPGIGPITASALAASITDPHVFKSGREMAAWIGLVPRQTSTGGKQRLGRISKQGDHYLRWLLVAGAMTIIRHAKRRGTSNRPGLIGLIARRPTKVAAVALANKNARIAWAILRHGGTYERPTMRAA

SEQ ID NO: 143863 - protein, 466 aa, unidentified
MKDNRNVKGPKGRRGSAKASRRRSKALGVVHPDAAGIDIGSQTHWVAVPADRDARPVRSFGCLTADLHALARWLKACGVETVAMESTGVYWVPVMQVLEAYGLEGYLVDARPAKNLPGRKTDVKDCQWLQELHTYGLLSRAFRPAAEICILRSYWRHRKNLVEMGAMQIQLMQKSLEQMNLQLHKVLSDITGVTGLQIIRAIVAGERDPLVLVALKHPLVKHSDKTMAEALRGDWRAEHLFTLGQALELYDVYQEKIRQCDLQIEAYMDSLASPGDRTDWSQAPSSTRRKNQAHFDLRGRLYQLTGVDLTRIDGLDALTVQTVVSECGIDMSRFPSEKHYASWLGLSPNHQITGGKVRKRRTRKVCNRAAQALRIAAQSLHRSKTALGAFFRRMRARHGAPKAITATAHKLAVLIYRMLKYGTDYVDRGQQAYEERYQEQRLKILQKQATAMGYVMVSVQSGELVS

SEQ ID NO: 143864 - protein, 315 aa, unidentified
MSQPLFAGVDVSKSQLDVAINQGDELLEFYSIPHTEEGISALIQRLRKAMPRLIVVERSGGLERSLVALLAEAELPVVANNPRQIRDFAKAMGVLAKTDKIDARIMASFAAAVKPPQRSIKDAERQQLSDRVARRRQIVDMLTQEKNRLSRTVGPVRADIEDHIVYLKERLDKTNKDIEQMIANTPVYKETVEILVSFPGIGRVTSAALVADCPELGSLNRQKIGTLTGTAPLNDDSGTRTGQRYIRGGRKSLRVHLYMATISAMRCNYKIKGFYERLIGAGKKPKVAITACMHKIITILNAMVKHRKPWQTETA

SEQ ID NO: 143865 - protein, 447 aa, unidentified
MTHRIGPSRGDRRRNARKARLRGLIPREFAIVGVDLADRKQVFAVCDHDGGVHGRRSVNKRAWQLDETLGWAKAAAVEAGFAGVVVACEPTGHRWRVMLDQCDELGLTMVCAPPMLVHREREREDLTPDRSDAKDAVLIAGLAAQLRCYEPERPTAQWARMRHLGARRSELTTACGVVRQRMRSLLECVWPAALATAADPLASMTWRATMAVICARSVDGDPAAIRRMGWPRFQAAVRRELPRWGGHRVTWTIARELWDATTDPTGVIVHRHGALERVADALTDWQRLRVQRGAVEARMVHLLDELNLTSLVTTIPGLSAVGAAAILAETGDPHRFDSGRAVVKHAGLAPRDNESGTFKGTSRVSGRGRPELRLAVWRAVWGALPHNAVLSARHHHLRTREHNRLTDHQARVAVAGSLLRQLHAVIVRGVAWDARTAAGRQEVIAAA

SEQ ID NO: 143866 - protein, 345 aa, unidentified
MSAEYDGSQVVGLDLHRNRTVMVRMTPSGDVLESVRFANDAQALAEQIGKAGRSPEVVLEATNGWYWAVDVLLGVGASVHLAHPLGVKGFAYRRVKNDYRDAADLADLLRMGRLPEAWIATTQVRERRELVRHRHKLVQMRSSLKTQVHAVLAKRGVTVVDSDLFGVTGRKRLGSMALPDPFGVRVASLLRMIDALDIEIDQFDRLIRAELADDAGYRVIQQLPGVGPTFAAVFVAELGDVSRFAGAPQVCSWAGLTPRHRESDHTVHRGSITKQGSRLVRWAAVEAVQRAASSGPIRSTYERIVERRGGTAKNLAKVAAARKLLTLVYYGLRDGEIRCLAARTA

SEQ ID NO: 143867 - protein, 423 aa, unidentified
MGGIQVVYERCCGLDIHKRTVVACMIVPGPGSGPDKQTYTRIHKELKSFGTMTHELLELSDWLCANRVTHVAMESTGVLWKPIYNLLEGSFELLLVNPQHIKAVPGRKTDVRDCEWIADLLRHGLLAGSFVPDQGQRELRELTRYRTQLIRERASEVNRLHKTLEGANIKLTSVATDIMGVSGRQILSALVEGHSDERAMAELAKGRMREKIPQLEAALKGRFRPHQRFMVAQQLAHIDFLDEAIEKVSGEIEARMAPFGWALDLLMTIRGVGQRTAEVIVAEIGVDMKRFPTSRHLASWAGMCPGNHESAGKRKSGRTRKGNVWLRTALVEAAQAGGRCKESYLSAQYHRIARRGGSNKAAVAVGHSILVIAYEMLMHSTTYQELGGNYFDERDRIGKECRLVRNLERLGYKVSLESLSSAA

SEQ ID NO: 143868 - protein, 476 aa, unidentified
MTHQTRAHPNLAVIPMLGSESLYIGVDIGKFKHVAGFLSKTLLARHERFEGCPTLAFEQSRDGFRTFTDRIREYVPLENAVVLLEHTGHYHRALEQYLLELDITVYRIHVQKRPKGMLKTDKRDALGLANTLYSQLALGAQVAEKTQLVRPAVPPTKAAVQLKGLIQHRYELSHECTQRRNKLTSICDELFPEFTTIFRDPNLPSALAFREKFPTPHAIATASLSALKEVRLKTFPSEAQLLHLQQLASQTIGTKEVERQRSLVLEQGLLMKELRLIQEHLEKLHTEISAIVTNCREGHILLSMPPIGPMQAATIIATIGHISNFEKASELKSYFGWAPRRDQSGISFDDTNLAKGGARPMKHMLFLMAARAITIDCEWAKMYKQLLPRMCRYDERIKDYRGKLKVIGRIAGQMASMIFALLKTDQETLSKVPHGQEPPPPMLYDPEVHRRHREGNYRSLKPGTQPRKIIQLPKKS

SEQ ID NO: 143869 - protein, 485 aa, unidentified
MTTVYLGIDVSKGYADFVAMNEAGSELGGWGRFDDTRAGHDQVQARMAAVWARAPETQVVVGVESTGGYERNWLGLCHRLRRAGWALTAYRLNPLVVKRYHERQLHRTVTDRISAAGIAAYLRTGRRRQDQLWVAGELEGALTLYRTVRRLVRLQADLQNQLQALLSRCHPELVACLRGGLRQWVLALLRQYPTAAALAQADPAAVARIPYVTPAAATRLVAAAAASVADQTDPATGRAVMVLVDEIAHLRLQVRRLQTELAEQLRADPGVQIIDSIPGFGIWSAICLRLELGDIHRFPRPAELVAFAGLDPQHHQSGDTTINRGISHRGQAGVRAILYPVVRAAIRCNPAVGALYTRLRARGKTDAQAVVAGMRKLLHLVFACWVQGVAFDPSRWEQVAGKAQEMAQRAAMAPTSAAAVPLATCLAAPVSKREAKRRKAAHSPQGPCGVVPQKRPEFERPPSALIIPIRTPSCQGDHAPDFSSC

SEQ ID NO: 143870 - protein, 340 aa, unidentified
MPLYGGIDLHANNSVVVVLNEQDEVIYQKRLANDLTTILGQLAPYHTELKGLVVESTYNWYWLVDGLMEASYRVHLANPAAMQQYNGLKYTDDRSDARWLAHLLRLGVLPEGYIYPKAERAVRDLLRKRAHLVRQHTANVLSVQNIMARNTGTRFSGKRIHELTKQELTTLLADETQVLAVTSSLVVLDCLRQQIKTLEKTVHKHVYHTPSYEQLLTVQGIGTILAQTITLETGAISRFPTVGNYASYCRCVDSTKISNGKRKGTGNVKNGNPYLAWAYMEAAQFAMRLQPEAQRFYQRKLAKSRNNTILARKAVAHKLSRACYYMMRDLVPFEATKAFG

SEQ ID NO: 143871 - protein, 340 aa, unidentified
MKITTAGLDIAKNKFHFYGVNQVGKKVKKRVLTRSEVLPFFSTLEPTLVVIESCGSASHWGRKLKELGHEVKLIAPQYVVPYRRKNKNDFNDAEAIAEAAQRSNMTFVPIKTIEQQDVQMLLRVRDRHIQSRTQLSNQIRGLLAEYGLIISSVGRAALRKELPEFLEDAENDLTSTSRALFSELYEELIQLESVIKEYDKKVEGMVKLNDICLRAQTVVGIGPITAAALYAAIGNGHNFSNGRHFSAWCGLVPKQHSTGGKSVLLGITKRGNPYLRTLLNHGARTVLKYCEMKDDKLSLWAQRLKKEKHYNQASIAVANKLARIVWAVISKNESYQVDYV

SEQ ID NO: 143872 - protein, 393 aa, unidentified
MVACLRLVSDGKVTTEVRTFQTTTADLLRLSEWLAANDCTHVAMEATGVYWKPVWHILDDGEFELVLANAAHVKNVPGRKTDVNDAMWLAELLAHGLIRASFVPDTQTQEMRNLLRTRKQLVREQSSHMLRVQKTLEDANIKLDLVLSDLMGKSGRAMIEALIAGETNPAKLAGLADRRVKASPDELREALRGRVTKHHRFLLRLHLNQIDALDAAMATLDAQVEVNLGPFRTAVEQIISIPGIKNLGAQVIVSEIGIDMSRFPSAAHLISWACMSPRNDESAGKRRSNRLRKGAAWLKTTLVQCAWAAVKKKDSYLQAQFYRIKARRGPKKAIMAVAASILTAIYHMLKDGTMYQDLGCNHFDRRSTDQQKKRLLKRLADLGYAVELKPLAA

SEQ ID NO: 143873 - protein, 349 aa, unidentified
MTDRHLSYIGRIVYVGVDVHKETYTVTCVCNKQIVKTATVQADPAGLAASLLRWLPGATLYSAYEAGFSAFVLHRALTTAGITNIVVNPASVAVAANDKVKTDRRDAKKLAIDVADGRLRGISVPTEEEELARLLPRTRAQIVEHRATIARQIKAKLHQFGLIAPASRRMISNRYLREIAAWSLPPELRVSLTLLAEQWRFATRQLIEIRRLLREQAAAQADLETVYRSVPGIGAVVARTLATELGDMTRFANERALFSYTGLTPSEYSSGPSVRRGHMSRQGSGRVRHVLIETAWRALPRDQVLQEIFDRIAATRGKKRAIVAIARRLTGRIRACFRHGTTYAVGTYA

SEQ ID NO: 143874 - protein, 392 aa, unidentified
MGVDIGKTHHWVCALDADGKRLLSVEVANDEAEILALIATVQGLAQQPIWAVDIIGAPAALMLALLAQADQSLRYASGRMVAAMSSAYAGEGKTDAKDAYVIAETARLRRDLAVVDQDTDLVRNLAMLTGHRADLVADRVRMINRLRDLMTSVFPGLERAFDYASRKGALVLLTGYASPHRIRRIGHTRLVAWLRQRKVRDSAGIATRAITAARAQMTVLPGQDLATSIIAELATNILALDERLRSLDAQIAETFDQHPQAAVIQSMPGFGPLLGASLLVGAGDLRAFPSAGHLAAAAGLVPVPNDSGRRTGNLHRPKRYSRPLRHVFYLSAQTSMLRAGPNRDYYLKKREHGRTHSQAILALARRRVDVLWALLRENRTWTTAPPVVAQAA

SEQ ID NO: 143875 - protein, 343 aa, unidentified
MLAITTIGLDIAKSVFQVHGVDARGSAVVRRQLKRRYVLAFFKKLPPCLVGIEACATSHHWSRQLQALGHTVRLIPPAYVKPYVKRQKNDAADAEAICEAVQRPSMRFVPTKTSEQQSCLTLHRTRHLFIRQQTAVINTIRAHLAEFGIVAPVGRNGVEDLLYAVADQRDERIPEVARACLEALGALLGKLKAQILEFDRQINAWHRSNETSRRLDELPGVGPALATALVASVADPKAFRSGRDFSAWIGLVPKQNSSGGREKLGSITKQGDRYLRSLFTAGALAVIRYAKIHGTKHRPWLAKLLERRPTKVAAIALANKIARMAWAMMAKGECYREPVALAR

SEQ ID NO: 143876 - protein, 531 aa, unidentified
MNRYIGMDLGLSTKHRVAVLDGAERLGKPFSVEVCREGFEELLRRATAGAEGPVRFVLEPTGLAWVPVAAYMAAAGHRVHLVKPQKVSHLRKFLRQHTKTDSVDAETNARLPQVDPKGVHELRLPTPEQMALRRLVNRYERLTQQVGDQKRRVHALMVMVNPPLMSALGDAAFGQAGLAFFRHYADPALVVKMGRAKLEQFWKRHTKGPVDKDLVDRVFKACCTTAELYADLRRTGKLPFDYSEVQEELVAELDWMEHAQLEAKRLEPRITEIYNHLDPDRTLKEIRGIGDVIAPCIEALVGDIERFHNTRQFTSFSGLCPRKKQSGMSDQPMPITKSGQRLLKKYFYLAADVARQWDAEFAAYYARRYARGDHHNHIMIALARKMALRVYALLKRREKARRARQASGSAEPVSFVLRNPVGGAAVTKMQARELVLEKYTRAVANPERYKRERGRVGKGKGTGSAKSEWPSEDATSRRAVPTPQIPQARITRNPVDVEHRGEGWTPLGQVLSSLENLSVEKHVNRKRKNCE

SEQ ID NO: 143877 - protein, 358 aa, unidentified
MVQSKGINFDGQNIYIGIDVHLKTWNVTILTQSGYKKKHSQKSSAKELFEHLKKHYPNGNYQAVYESGFSGFSTYYALQEYGISCMVIHAADVPTTQYENVMKSDPVDSEKLAKALKAGTLKGIYIRRKENLDNRSVVRIRKTLKQQLGGYKSRVKHLLYNNGVQLPDCFASPNTHWSKRFMSWLREDVVLLSSSRIGLDLLLEQVDLFRKSLLKANRLLRDLAGSPLYADRYSLLISIPGIGVNTAMCLLTEIDDISRFNNQREFASYLGLIPTMHSSGEKSCNGEKTFRGNKKIGPMLVESSWVIIRHDSVMAAAYGEYCKRMKPQEAIIRIARKLSSRILNVLKKGKKYEYDRCC

SEQ ID NO: 143878 - protein, 484 aa, unidentified
MAKRKMSTFERLTTGKMNRSQRRELGRRVAASDPGLTIVHPNAGGIDVGNESHFVAVPADRDEHPVREFGCWTAALNEIAEWLISCRIDTVAMQATGVYWIALYDVLEQHGIRVALVNAQHTKNVPGRKTDVQECQWLMKLHTYGLMRDSFRLQPDMESVRTIWRVRDRHVKEAGRAVQHMQKAMTKMNIQLANTISDVSGVSGQAIIAAILQGERDPYKLAALADYRIQASREQVARSLEGNWRADVLFELQQAVDSYHFAHRQMQECDEKLRLYLANLPTRLLDQPAQSAGAPESPARKRKKPRKPRDNEPRTDMTEELQRICGVDLTSIDGIHVMTAFTVISEVGTDMSRFADENHFASWMGLTPSKDITGGKVIGPAKKKVKNRAAGALRTAATTLLDSDTHLGARYRYLRRQLPTFKSAVKAMARYLALLIYRLLTKGEAWVDRGAAQFEKRRLQRELVGLQSKAKAKGFLLVPLAEAR

SEQ ID NO: 143879 - protein, 348 aa, unidentified
MKHYAGLDVSVKETSVCIVDESGKLCRERKVVSHPEDLVAILSDPAFSLDRVGIEAGPLSQWLFEGLAKAGLPVFCIETRHTKAFLDALQQNKSDRNDARGIAHMMRVGLFKDVHVKTLTSQKRRALLTARSLLQEKAIDLENEMRGLLRNFGLKVGHASGGMFERRILELVEHDAELAEIMEPLLAGRRKLREGLAKLDKRVLAEAKRDEVCRRLMTVPGVGPIVSLAYVSTIDIPSRFRHSRSVGAILGLTPVLKQSGEVSRVGHVSLRGDAMMRKLLYEAAQSMMTRVAKWCWLKAWAMNIAKRHGSKKAKVALARRLAVVMHRMWVDGSEFRWTREENIVNAAA

SEQ ID NO: 143880 - protein, 346 aa, unidentified
MEEYDGRQVVGMDLHRRRSVLVRMTEDGRRLGTTRITNSPAELRNAIGAAGPAPRVVLEATYGWPWAADVLAAAGAEVHLAHPLGVRAYSARRVKNDARDAGDLADLLRMGRLAEAWIAPPFYRQLRELTRYRRKLTGLRTSCKDQVHAVLAALGIPVTCSDLFGKWGSAWLDQLALPQPYAGKVASLRSLIGALDGEITALATAIAQQLDGHRGYAAIQELPGIGPVLSAVIVAEIGDVHRFASPGRLCSWAGLTPRHRESDTKVRRGHITRQGPRALRWALCEAVQHQPDGFGPKIVKDSILARRGPQARNVAKVAAARELLTLVYYGLRDGRIRCLSLPAPAA

SEQ ID NO: 143881 - protein, 387 aa, unidentified
MRQPNDLSRSLVALDQDSTLIAVIEIGQASWLVAGIVPGFNRHPLKKIATDQEQLLQVLRRWAKEAETTGRMIKRIAVAYEAGRDGFWLARWLRARGVEAYVIHPSSVPVSREHRRAKTDRLDTELLKRAFLGWLRGEPDHCSMAAIPTLTEEDAKRPGRERESLVGERTRIINRIKGALARLGIREFKPMLRSAPQLLETLRTPEDAALPPNTLAELRRDMARLSFVKQQINEVERARLERLQQAPGERGNAMVRLLTRVVGVGVETADMLVQEIFSRNLRDRKAVARYAGLTGAPDESGKKRRERGLAKSGNARVRRGMLQLAWGFLVHQPDSVLAKWYRARTADARGVTRKTMIVALARKLLIALWRLATTGEVPEGLAIRAAA

SEQ ID NO: 143882 - protein, 313 aa, unidentified
MEFIGVDVAKAQLEFACLPSGETGSVPNVEEGTRELVAHCQALPPTLIVLEATGGYEAALVAALATVGLPLVVVNPRQVRAFAKATGQLAKTDAIDARILALFAERVRPEPRALPDEAVQALDALLTRRRQLVEMLTAERNRLLVARAPVRRDLQQHIRFLERRLREADDDLHTAVKASPLWRVKDDLLQSVPGVGRVVSLTLLAELPELGRLSHKEIAALVGVAPLNRDSGTLRGKRRVYGGRAPVRAVLYMAALVASKGNPVIRTFYQRLRAAGKPAKVALTACMRKLLTILNAIARDGTPWNPTRTLVRT

SEQ ID NO: 143883 - protein, 386 aa, unidentified
MTSTKYIGMDVHKESISIAVMNAFGKIVMECVIETKASILLQFIHGLRGDLHVTFEEGTWAAWLYDLLKPHVTEVVVCNPRKIALLKDGSKSDRIDARKLTEQLYLNKLQAVYHGEHGLRTLKELARSYLTITKDLTRVMNRLKALYRSWGIPCAGNEVYAPRHRSEWLGKITEPGVRRRAEHSYQQLDVLRLMRQEVRRDLLVESKKHKAWKLLRQILGIGPIRAALLVALIQTPHRFRTKRHLWTYSGLGLETHDSAQYRVVEGQLQRSKKPATLRGLNENHNHDLKDIFKGAAMRASTAAGPLHDFYEALLTFRRQLFETTSSLSASGRESVPSLGTIPGGGRRVLETLGFEGKYPSYKSGPCFKTRESPISPYALSDNPRKP

SEQ ID NO: 143884 - protein, 360 aa, unidentified
MRNYVTNLDSIITRHGKNPDDIHVIVGLDIAKNVFQVHAVDLGTGELITKAIKRDQLKEFFANMSTALIGIEACGSSQYWARELKQLGHVVRLLHPKSVKAFLQGSKSDANDAFAIYRAVQSPDIREVSVKSIELQSLDSLRVLRAGAVKEQTAAINRFRMILAEYGQAIQKSKKAFMRNASEALASLESSINGVTYHALELELQTIRDRDEKIEEYNRRIHEVVENNHLAKLLKSMPGVGDLIACAMAVALADPSVFRSGRDFAAFLGLVPGHTGSGGKVIMLGITKRGDRSIRSLLVNGAMTALRQKHRPDFVERLIKKGKTKKVIAVALAARMARALWAMASRQEKYKAKVLSISNP

SEQ ID NO: 143885 - protein, 440 aa, unidentified
MAMHKREEQMFPNAAAVDVGASSHWVAVPPDRGDDPVHEYGAMTDDLNAMADWLLACKVDTVALESTGVYWIPVFEVLEQRGLKVFLVDARQMKYVPGRKSDVQDCQWLQKLMGLGLLRAAFRPEVDVCVVRAVARQREVLIADQSSWVQRMQKALVQMNIQLTEVLSDVMGMTGQAIIRAIVAGERDPKVLARHRNARVKARAEEITKALTGNWREEHLFVLGQALGVYDDIARHLAVCETKLQGLLNKLGQAQIDLGKAPRAGSKLRAEFDVRQILANWAGVDLTRINGLAATTVMKILTEIGPDLSRFETVKHFCSWLGLCPATKISGGKVLSSGTKRSANRARQALKMAAMSLSHSDSALGAFYRRLCGRMDKPRANTATAHKLARMVYFMLTRGEAFVDQGQQRYEEQQRQRSVTALKRRATALGFVVTPAGVTT

SEQ ID NO: 143886 - protein, 347 aa, unidentified
MLYLGIDLHSKSFTVNGFDKTTGEAFFIKKVANEAEAIREAFAAVPSPRAGVLEAGTNALAMYRLLAPYFAELMIVAPNKVWDRRRQTGPKTDRHDALGLALALAKGDLRAIYRPDLTLQEGRSLVRGRLQVTRAITRVVSQLYALIRSYGLLISKKALTQQGRAALAKVTLPGQAATLLEYALARLDLLQTQERALEQQIALQAAADPICQRLMTIPSVGSFTALTLRVEIGDIRRFKSADALINYSGLVPQVFQSNEKVHYGRLTKAGNALLRYVAGVFAQNVIGNRLDTPFKRKYYRACHTHDINEVKVMIARDFLATVHSMWTHETVWEYPRPVVTRTPSSVA

SEQ ID NO: 143887 - protein, 419 aa, unidentified
MSFKILKNNCCGLDVHKTWIYACIGITDSIKRTEYKQARFSSFTKGLNELCDWLAKYNCNDVCMESTGKYWIPVFNILEKNNIWVTLSHPKYTKPQKGNKTDRKDAKWICDLYMCGMVNPSFIPPADIRELRDLVRYRFKLTCMITSEKNRAHNCLTVSNLKLDDVFSDIFGKSSRSITEQILQHPGETFDVTPFVDGRCKTPIEEIQAAVDGAVSQEQAVKLRQCLNHIDELELHKAEIEREIFRLSENYESVLNLIRTVPGFDKNPLTAIQVLSEIGGDMSVFPTAKNLVSWAGCCPRNDQSNRKIKSTRISRAGSYFKPVLVQVANALIKSKKHPEFATRYRRIKARRGHKKAIIAICRMILTAIWHILTDLKPYTPEGFLESRPVNKEKVLTTSQALNLLKQRGYTIKDDAIPAT

SEQ ID NO: 143888 - protein, 431 aa, unidentified
MVRYTEVIPKRSNGVVSSVGRPLGDAAYIRGGPLHFIKRTSLASKCRAPRVLRIIKRRPFGCKFLALALEKKGAPVMESTKYVGLDVHKEATTVAVMNSAGKLIMESIIETKAITIRQFIQGLRGDLHVTFEEGTWAAWLYDLLKPYVTKVVVCDPRKNTLLKVGNKSDRIDPKKLAELLRNGSLSAVYHGENGVRTLKELARSYLTISKDLGRVMNRVKALYRSWAIPCAGTQVYALCHRSEWLSKITEAGVRRRAEHYYQQLDALQTLRREVRKDLLLESRKHNATKLLRQVPCIGPIRAAQLVALMQTPHRFRTKRQLWTYSGLGLETRDSAQYRYVEGQLQRSKKPQQLRGLNSNHNHDLKNIFKGAATTASVSAGPFHDFYEALLTKGMQPTMARLTLARKIAAITLIVWKKGVRFDPQHLKQQAA

SEQ ID NO: 143889 - protein, 333 aa, unidentified
MNYFVGIDVSKETLDVAIIHQGNLILESKLNNQAKSIRSFFRKCIKEWKTSAEQFVVCLEHTGMYNNILLKTLVDLNSKICVEPAIQIQKSQGIVRGKSDKSDARRIAQYTYKNREELRFWVPARPVLQRIQVLLSFRARLIKIKKQLEVPVRELVQFTDPAIVRSLALLSKGPIKIITQNIKKIEQEINTLVQGDDLVKNQCIRATSIPGIGKITALSMIIASGSFKKISEAKQFACYAGVAPFKNESGTSIRGRSQVSRMANMAMKRLLHMAALSAIQCNSDLRTFYERKVIAGKNKMSVLNAVRNKLISRVYACVKQEKMYEKIYQHTVG

SEQ ID NO: 143890 - protein, 410 aa, unidentified
MSHNIAGIDVHKKLLVVVVVDPAKPEVALQSRRFGAGAAELSHLSAWLNEQGVVEAVMESTAQYWKPVWLELEPHLRLHLAQAQSNKAPKGRKSDMADAKRLARRFVAGELMLSFIPEPEQRAWRMVTRGRLQLIRERVQLQNQIESLLEEGRIKLSSVLTDLLGASGRRILRAMAKGETSPETLARLGDRNLKCGLAVLVDALTGSMGALHRRLLAQHLDRIELIDCQIEELNRLAATQMEKHQDAVTRLIEIPGIGAEAAQEILAEIGPDAAAFHSAAQLASWVGVCPGSNESAGKNHSGRSAKGNRFLRRLLCQAAQAAARTKDSHLQAVFKRYVVRLGYVKAVWAIAHRLCKIIWNVLRKGGRFIEFSETRNPRAVQRAINHHLKALRRLGYPTLPVPQPQVAAKG

SEQ ID NO: 143891 - protein, 429 aa, unidentified
MSYWIAGIDVHKKMLAVVVSDVEIESEYQFERRMFSSNPEQLRSLAAWLVEQKAEEIVMESTAQYWKPVWETLERYWKPLCEKREGARRRSGTLHLAQALSNRGRRGRKRDFVDAERLVKRLVARELTLSFVPDAEQRLWRTVTRKKYQLRRDLVRLNNQLESLLEEAHIKLSSLVSDLLGVSARRMLKALADGETNPAALAALAHERLRATPEQLCDALGACTELKPVYRRLLKMTLEHLQILEQQIGQLDQELATLLHPHQDAVERLAEVPGFAVDSAQQIIAEVGPAAATFPSEKCLSSWVGACPGEEESAGVNYSHRSPNGNRHMRRLLNQTANAAVKVKGSIFEIIYRRCVPRLGHNQAIGVIAHRQCRLIWLILHQGTRYEERGPAVTKRSRYQRTWRMIRQLRNLGYRVELPNPQASQAQAQ

SEQ ID NO: 143892 - protein, 346 aa, unidentified
MNQIIRVGMDTSKDIFQLHGVDFAERPVLRRKLRRDQLLAFFAKLPPTVIGMEACGAAHYWARELRKLGHEVKLMAPQHVKAYVKRNKNDGRDAEGLCEAMSRPTMQFVPVKTEEQQAALMLAGVRQQLIARRTQLGNAIRGYAAEFGLTAAKGLDKIEPLLAEIAQDETVPALARELLAFQGRDYARLQIELKAIEVKLRAWHRANADSRRLAQIPGVGPIGATALVMKTPDPRAFPSGRHFAAWLGLTPKDHSTAGKTRLGKITRAGDEMLRSVLVAGATAVIQQVRHGRGHPSPWLIALLKRKPPKLAAVALANKIARIAWKLMVTGESYDGARMLGASVSAA

SEQ ID NO: 143893 - protein, 480 aa, unidentified
MVERRLLGIDLGIASAHTAVVLRADGTTVCRRRCHPTVESFTELERQALEGAPEGTRLDIVVEPTGPAWLPVAVFFGRRGHAVFRVSSQKAADLRRFLHRHAKSNSIDAETLARLPLVDPGSLHPVELPGAHRATLDRRVRACDRLTREASEHKVRIKDLVRQLMPMTPLRGDLGKSDLAVLERWAAPNALLKAGKARLTALIAKVSQGQHGAERAEEWLRAAGAAVELYGGDSAVAFADLAEEVATEVRLLRAIERELASHAEVREAAYRRVDPEELARSLPGVAEVVGPAVVAAMARPGRFARGEQFKSFTGLVARASETGESDRKGQPMSKAGPSLLRTMLQRAADHARAEDPQLARIYFVQMVERGANHTKALCVVAAHLAERAWAVMVRGTPYVVRDTDGRPLSKAEAKAIIAEQWTVPEDVRRRRRSKKVGKVPHQVLVGHTQSRAQSAATRRPSPPSSSALRPAASTTQEGGT

SEQ ID NO: 143894 - protein, 360 aa, unidentified
MIVQGTSVGLDVHALSVVAHAVDEETGKVARARLCPDHGEVLGWLHQLRAPVRVTYEAGPTGFGLARAITEAGMECLVAAPSKLQRPAGDRVKTDARDAAHLARLLRLGEITAVRVPEREIEAVRDLVRAREDARADLMRVRHRLSKLLLRQGIVYFGGTPWTCVHEEWLGRHRFDDIHLKAAFDHSFDAVLAATAARDRLDEQIMVVAASPRFADPVNRLGCLRGISALTGLALTVEIGDWSRFCGSSIGAYVGLVPCEYSSGNSRVQGSITKAGNTHVRRLLIESAWHHRKSYSTSGPTLRARWAKVDPALRARGHAGNRRLNKRWRSFTERGKNPLVANVAIARELAGWCWSLATMH

SEQ ID NO: 143895 - protein, 343 aa, unidentified
MQYVGLDVSLAEVAICVVDEEGEIEVEGTAPSEPDAIADWLLEHDVHPDKVGLEIGGLARWLYSELGNRGLPMICIDPRRLRALTKTMPVKTDRNDARAIAQVIRVGWYRPVHIKSPVSQELRMLLANRKTLLVKYGDIENEVRGTLRAFGLKLSGRIASGHFEQRAMELVEDRPRLAAMVKPMLIARNVLREQCAVLHKMLLDAVARDDTCRRLMTVPGVGAVTAVTFLAVIDDPTRFQHSRDVGAHLGMTPRKYASGETDRNGAISKSGDALMRTTLYQASLALLTRSKRWSTLKAWGMAVAKRRGLRRAIVAVARKLAIVMHRIWADGTEFRWTREEAVS

SEQ ID NO: 143896 - protein, 410 aa, unidentified
MQITCGIDWAEAHHDVAVLDAGGGVLARARIDSGATGFTRLMALLGEHVDDVDQITAVPVAIETDKNLLVVALQAAGMTVFAINPRAVARYRERHGQSGKKSDPGDAFVLADLLRTDRHQHRPLPAVSDHASAIKALARQHQDAIWAVNQTVSRLRSLLLEFYPQAIRAFPNLKHKAALAILGAAPTPEAGRGLTTRRITTLLHRCGRRNDASLVDRILTDLHTPALRQPAVVEAAYGVTTRGLIASIVAMQTAVTELEQALAVEFDRHPLATILRSAPGLGPVLAARVLAEVGDDPDRFTTAAGLRAFAGTAPVTRASGRSRYVKARKVRNKRLGDACHWWAFVTITKSAGARAHYDRRRAAGDHHNAALRNLANKLVGRLWWCLQHHETWNDHAAWKTTGSTPEPSVA

SEQ ID NO: 143897 - protein, 341 aa, unidentified
MEEYIGLDVSMKETAVSIRREGKRIWRGKCASDPAALAKLVRKRAPYAKRVVFETGPLSVWFFHALKAEGLPAICIDARHAKAALDMAPNKTDANDADGLAHLAEVGFFREVRVKGFESMISRTRMAARNRLVRIAVELSNQIRGLMEASCLIVPSAKGGKFDEHVCRLLDGRGDLAPIMMPILEAWRSVRARAAELGRQILTDARQSQACQLLMSIPGVGAITATAFTSAIEDPANFKKSRSVGAWIGLTTRRYQSGEIDYDGHISRRGDPHLRGLLYEAATVIMTRAAAESDLRTWGIKLREKIGFKRAAVAVARKLAVIMHAMLVSGEFFERKAVVTI

SEQ ID NO: 143898 - protein, 320 aa, unidentified
MSASSVVVGIDVAKAHVDVSVLGAKLDAQRFDNQAEAHSALTAALKPLDVALVVMEATGGYETELACALQGAGLPVAVVNPRQARDFAKSMGRLAKTDTVDARMLAEFAAVLLRRDDLARFLRPLADPQQQWLAALVTRRRQLLAMLLSERQRLQITPKGLHPSIEAIVAAIKAQLDEIEAQMVGHVREHFGELDRLLQSASGIGPVASATLIAELPELGRLNRREIAALVGIAPMANDSGSSKGRRRIQGGRFDVRRVLYTAALTASRRNPVVKAFYERLIAAGKLPKVALVACMRKLLTTLNAMVKSNKPWDNSLHGA

SEQ ID NO: 143899 - protein, 469 aa, unidentified
MNHAKKKKRKNNGKQHNSLSQLEQINFDAAGIDIGAEEHYVAVPKGRDPEGEDVRHFNTFTVDLLSLADWLKKCKIDTVAMESTGVYWIPLFEILDSQGFDVKLVNPRSIKNAPGRKTDVLDCQWIQQLHTYGLLQGSFRPDDQICELRSYLRQRSMLISYASHHIQHMQKALEQMNIKLNHVITDITGATGMAIIRAVIAGERNPEKLAQMRDPRCKSSISTIAKSLQGNWRSEHIFALQQAVELYDFYKNQITACESRIQQHLETFDDRSDGKALPKPPFRSGGSRNKFHFDARTYLYQLTGVDLTRIEGIDTPTALTIISETGIDMNKWPTDKHFSSWLALCPGSKISGGKVLSSKSKPCANRAAHAFRLAAYSLHRSNSALGAFLRRKKSHLGSPKAITATAHKIARIFYNMLKKGTEYVDLGQDYYERCYQDRVITNLKRKAKQFGYNLINVKEHELLTTHLQI

SEQ ID NO: 143900 - protein, 409 aa, unidentified
MQPILKSCCGIDVHKSMIKASIAQGPLDRSPKIFTRTFSTMTSDLLKMKDWLRENKVEAIAMESTGVYWKPIFNILEDEFPVILANPQYLKKVPGKKSDVKDSKWMASLLRCGLIPASFIPQKPIRELRELNRTRRKLVGMMASEKNRIQKVLEDANIKLASVVSKIDGVSSMNMIQALLKKDKLSREEIADMARGKLKCKVDQLVEALNGKVTDHHRFLLRLHLNNIAFLAEQIQEIDERIQNCMAPFQKQDTLIQTIPGISKTTAPAIIAEIGVDMSQFPTDAHLASWAGMCPGNNESAGVKKSGKIRKGNSFLKATLTEVAWAASRTKGSAYSAIYNNIAKRRGKKRALIALGHRILLDIHRVLTTGEPFVDEGAVAVHQRNSKARQKSAIRFLEQSGYTVAKASA

SEQ ID NO: 143901 - protein, 419 aa, unidentified
MSLSTATSASQILVGVDWADAEHAVHVLFPDGRVSANQVEQTPEALDAWIAQLGEPFPDATIAIALEQKHGALVAGLLKFPRVRLYPINPAQLANYRKAIVNSGAKSDPSDALLLAQFLQHYQDQLRPLKPDDVHTRELALLAQDRRTAVDQRTALTLELKSTLKQYFPLVLLLVQSKLYAQFICRLLLKWPTLAELQKAKRHTVRNFFYANNLRGDHIEQKLDQIDQAIALTEDPALLSAGSRRAKKLAQLLLVLNQTIGEYDEQMAKLLEAHADYQIFKSLPGAALQMQARLLTAFGTDRERFHCAEQVQALSGIAPVTRQSGKTRIVSHRWACPKFLKQTFHEYAGLSINQSKWANAYYTMQRKNGKTAQMAKRALAYKWMRIIFRCWKNRVPYDEAKYIESLKRAKSPLLASMDN

SEQ ID NO: 143902 - protein, 343 aa, unidentified
MNEVITIGVDLAKNVFQVHGIDGLGAVIIGRQLRRSQMLPFFKKQPPCLVGMEACATAHHWARQLVALGHAVKLMPPKYVKPYVKRNKNDMADAEAICEAVTRPTMRFVEIKTRDQQSVLMLHRTRQLFVRQRTTLINALRAHLAEFGIVAGVGRNGLERLLKVIEDGEDDRVPAAARDRLLALRDQLEMVKGQVLDADRHILAWHRSSEVSQRLDDIPGVGPLIATALVASVPDPHVFKSGRDLAAWIGLVPKQNSTGGKDRLGHISKAGNRYLRMLLVVGALSVIRRAKQVGYTRRPWLTKLLQRRSTKIAAIALANKIARTAWAMMAHGTFYQEPQSEVV

SEQ ID NO: 143903 - protein, 339 aa, unidentified
MNEVTLIGIDLGKHSFHLHAQDATGRMVFRKKLSRQQLLRTLANVPSCRVVMEACAGSHWLARQLAGMGHEPRLISPQFVRPFVAGNKNDFGDAQAICEAACRPSMRFVSPRNETQQTVSAMHRLRERLVRERTATVNQIHGFLLEFGISLPRGAALMSRLPTVLDHETLPPRLVALVVRLRAHVHYLEEQIRQVEQDLKAALREDDKSRRLLEIPGIGPITASALAVELGDARQFANARQFAASIGLVPRQYSTGGKPTLLGISKRGDRNLRRLLVQCARAVMQHTDSRTDAMSLWVKTLSTRRHSNVVACALANKLARIAWAVLARGTHYEARALTT

SEQ ID NO: 143904 - protein, 322 aa, unidentified
MKEATTYVGIDIAKGQVDVQTYPPSTPVQFGNTPSGLAKLCKAIKRLRNVARVVIEATGGYETAAVVALAKAQLPVVVVNPRQVRDYARALGILAKTDTLDAAVLARFAHDTKPPVRPLPTETERAMSELVRRRGQLVQQHVADLCRLQQASLPGVIKNLQTSLTFNEKQQAEILTQLDELIQASPIYADKVELMQSVKRIGPITARTLLVELPELGTLTNKQIASLAGLAPFNRDSGTMRGKRTLWGGRKRARTALYMATMNAACHNPVIREFYQRLLHAGKLRMVALAACMRKLLTILNAILRDHKPWNPEKTTKSEIFA

SEQ ID NO: 143905 - protein, 397 aa, unidentified
MYIVGIDIAKRKHEAAVIDGEGAVIIKPFSFTNNCSGYNRLLAMLAKAKLPLDEVSFAMEATGHYWLALFTRLQKEGFRVQVINPVQTNSIRNFYIRQAKTDPRDALLIAEVIRFGHFSESTLHPENIYELRELCRGRHAIVSMQADVKRKVVALLDQVFPEYETAFTNMFGDTSMAILQACPTPKELSEMPLEELCHLIEVSSHKRFRMAKARELQELARNSFGFAMAGDVFSTMIRLYAKHLDFLKQQVQEMDRKIAEIMDTLDTPITTITGIGPTLGAYILSEIGDISRFPSAAKLAAYAGIDPTMRQSGEYNGVRNRMSKRGSPYLRHAIWLAASSAVLHDPALKLYFQKKRDEGKPYMASVGHACRKMVSIIYAVMRDNKAYVPCIPSEISA

SEQ ID NO: 143906 - protein, 392 aa, unidentified
MVYVGIDVAKDKHDCFIVNSEGEVLADVFSIPNNRDGFDLLFNRILECSGKSEKIKVGLEATGHYSYNILGFLLDKGLPTYVINPLHTNLYRKSLSLRKTKTDRIDARTIASMLMSGMDLKSYTNTAYHNEELKSLTRYRFGKVQERARLKQSVSRLINILFPELETLVPTLHMASVYAMLSEFPGARQIADAHLTHLKTILSDASKGHYDRDKAAEIREAARRSIGSFMPAKSLELQHTIRLIRELDKEIDEIESAIKTIVDDMAPPILSIPGMGYRMGAMILAEIGDFSRFDSPDKILAYAGLSPSTYQSGKLNAAGAYAHMEKRGSRYLRYALYNAAKYVCHWEPTFAAYLTKKQAEGKHYNVAISHAVKKLVRVLFALQTSGRAFQTI

SEQ ID NO: 143907 - protein, 437 aa, unidentified
MVPHAGGAVEEEKTMDILHERVSGLDVHKNTVVACARIMTGKETTRECRTFATTTDGLLALRAWLSECQCTHVAMEATGVYWTPVWRILSEGDFELIVANAAHIKNVPGRKTDMNDAMWLADLLAFGLIKASFVPTEPMHELRSLTRTRKQLVREQTRHVQRIQKTLAEANIRLDSVISDIMGASGRRIIEAMIAGVRQPHKLADLAGKQIKATPKELYDALHGRLTDHHRFLLDLHLRQWDGLDTTIRTIDLEIDQRIDRMDKDRAAGEPPFRSLIGNADTVPGVSAVSAPAILSEIGCDMSRFPSAGHLLAWAGMCPGQNESAGKRKPSRLRKGAPWLKTMLVQCAWAAIRKKGSYYQAQFLRLRHRRGPQKAICAVAASILTAIYHMLKDGTEHHDLGADYFDRRSTETKAKHLVASLTKLGFTVQLQPSAKAA

SEQ ID NO: 143908 - protein, 303 aa, unidentified
MTTVADQFEHVVVIDTHARMHTYCLVETCTGGIIDTATFPTSAAGTNRAISWIVRRSHGTTPLAAIEGTSSYGAGIAAALSASGFGVTEIRPISRPSRARIGKSDPIDAEAAARSVIREDVDKLAQPRRTGDRTAPRVLLAARALVDQQRTANRNALTALVRSIDLSVDARKPLTDTQVATIATWRTSRNDATTRVFREEARRLARAVLEQTEVLRENHRQLAQLTETLAPGLQSVPGVGAVTGAIPVAAYSHHGRVRSEAAFAALCGIAPLPASSGNTTRHRLSRSGDHQLNRAVDDVVPHA

SEQ ID NO: 143909 - protein, 344 aa, unidentified
MGEVITIGLDIAKSVFQVHGVDGAGAVVMRKRVSRAKMLEFFGGLPRCLIGIEACPAAHHWARELQAMGHTVRLMPPSYVKAYLKRSKNDANDAAAICEAVTRPSMRFVAVKTKEQQAALMLHRARQLLVRQRTMLSNAIRGHLSELGIVSAKGRNGTGELLEIIANDADSRIPLAARDILKVLAAQYSTIGAEIASIDKSILAWHRSCEPSRRLEEIPGIGPIVATALVAEIGDWKAFRSGRGLAAWIGLVPKQHTTGGKDKLGSITKQGNRYLRWLLVAGAMAVIRYAQKHGTRKRPWLGQLMARRPTKLAAVALANKIARIAWAIMARGERYREPELLLAA

SEQ ID NO: 143910 - protein, 398 aa, unidentified
MSKVIIGVDPHKLSATIEVLDERESVLGSGRFTTDKAGFAAMRKYVKQWSEREWAVEGSLGVGRPLAQRLLEAGERVVDVPAKLAARARLLDTGHGRKTDAHDAHSAAVAAVRAKDLRVLAPDAQLEALRMLVDHRDQLSNQRVATVNRLQRLLAELTPGQAKKDITALQAKAILASVRPRDIAGKARRRIAVDELAAWVAINKKVKELTLEIKAIVKERGSNLMDLNGVGPVVAARVLADVGDVARFADRNRFASWTGTAPLDASSGEQTRHRLSRAGNRRMNRMLHIVATTQLRYDSEGRTYYRRKLAAGKTRMEAMRCLKRRLSDAVYRQLIADARLHAALDGTGPGGHCGASLTSSAVDLPPHIDTSDQPLPGPATPTLQPPRRPRKAVALKAG

SEQ ID NO: 143911 - protein, 407 aa, unidentified
MDSLKTVFGIDVSSRKSNVCIMVNGQKVNDYAISNDMVGFNQLLDDLKQVTNPQIIFEATGVYSRRLQAFLDMHDLRYVMMNPLEAKRKTKDDLHQNKTDKLDAMYLAKMQSEHPQRLAYVQSEEYQELMANNRIYEQASHDLITNKNRLHKAIQLTFPEIEHLLANPRGKNYWSIVLKFPHPNIVLETKEADIIDFLKSLSGIGEKRANDLAQRLIRLAKLACPAVKKSSAHIRGLEMAINNILSAEETCQTALKEMAKLAPKRDLEILKSIPGIAENTALRIISELGDIRRFNNPNQLNAFVGVDPQVYESGNLTAHLSISKRGTAIGRNVLYLAINQIQSAKKAGNPCHIADYYEKRKRSSETASHKKAAIASIHKLLRTIFALITNDQLYSYDIAKHNQRLLS

SEQ ID NO: 143912 - protein, 376 aa, unidentified
MKEHTRKMKRQNSNANTTAASKAASKKEEFAFYIGIDLGDKNCEVCVFNPAGEHKESFRLAMKSADLQGYFATLGRSRVAIEAGGQSRWVAEVIEQCGHQVYVSNTRKVAYIHASDDKDDPGDAYKLAELVHFKPRLLHPIQHRSREAQADLSWIRAREVLVESRTQLVNAVRGISKAFGERLAKCSTEGFTAKLATQVPEAIRGAVAPLLETIDHLNDQIRYYDQMEEHIARERHKKYWLLQQVNGVGVHTALSFMLTIGDAERFEKSRLVGAFLGMRPRKKDSGESKPQLGITKAGDEYLRKTLVNCAHYILGPHGADSDLRRYGQRICERGGKNAKKRAVIAVARKLAVLLHRLWVTGEVYEPLRNSKQPVAA

SEQ ID NO: 143913 - protein, 520 aa, unidentified
MTTARARKRSSRRPSAVNLGKPRGVLHPRVQQVGPEHFGIVCCDCHKDSSKLLLADFYGNVLIPPTVVAHNRPELDAAVNRIRDTFTTHNIRDGLVAIERTGRYHRLLQRTFAAAGFETRILHPFVTKQYRQPVDPANKTDDTDLAAIHRATVTGCALLEASRDEAWTTLQLVIRHRRDLVRKGAALQCQIRDHLEAALPGFAACFDKLWDSALPWHLLRHFPSAAQLRAAGLTTLCQSLQHAGIRFHKRSLDKLLAWAEQAAPGDVAASQHLRLALALYDDRQHKTQEIQALEREIAGRLVQTPYVLLLSFPGINVVSAADFAGEMGPIEHYANSKAITGRSGLRPARYQSNKVDKGDGPLVRNCNRALRAAILTIADNLILCNHHFRVLAAAWAAQGKDPRHSRVKVALRFCRIAFQMVAGRQVFRHPCIQGRHYILDKLNAFHGDHDTPMPQVLADLQAAVSQVPPREHAAEATPLHEELTKIHEGHRRGPQPLADILPLVLARLGVGVVQSLESGE

SEQ ID NO: 143914 - protein, 348 aa, unidentified
MLADRLDYVVGVDPHRDAHALAIVDVRTGGVVFEASVSASSAGYARALELARAQALGRRAFAIEGTGSFGAGLTRFLNANGERVLEVGRLRRERRSGGKSDALDAIRAARSVLAQSPRPAEPRSGGEREALRALMAAREGAVTARRAGLCQLRALLITTPEPLRGELRSLTRARLLRRLAAVRPDRRRDGELRGTLRALRSVARRVQRLTEEERELAAEIEALVRTLAPRLLDEPGVGPLAAAQLLISWSHSGRIRNEAAFARFAGCAPIPASSGQTIRYRLDRGGDRRLNRALHMIIVTRRRAHAPTTAYIARRIRDGKSPREATRCLKRYLARSLYRLLESTPMPA

SEQ ID NO: 143915 - protein, 438 aa, unidentified
MSNKVIFNLDELFISVGIDVGADFSWMSIALPNQQFVGKPYKILHNSIDSLTTAVSKIKEAEELYSLESRIFLESTGIYHYPLFCYLRDKGFNCSVINPIITKNSTNINIRKVHNDRFDSKKAALVGLKSDLKVSLMPSDLALNCRNLCREYYDLMDNRSAYVNKLQGELRMAFPQYLGIFSKVTINTSLTLLETYTSPSAFLKADKQEIIDIIKSTARFGLTYAQNKYNAIIQAATDANQFGYIIESNIKRIRLYISFIRKYDEEINDILESLHKLVDSNEDSKFVKQIHLIETFKGAGFLSAVSIMGEIGDFSAFSKPKQLFAYFGLDPAVKQSGKFEGTKVQMSKRGSAIARRVIHTLTLQSISISRNGEAKNPVLREYYLNKCGSKPKLVAMGAVSHKVCNMIFAILRDNKPFKIIAPQEHIKQYNAAKCDIAA

SEQ ID NO: 143916 - protein, 349 aa, unidentified
MANLTIGVDLGDRYSELYVVDAAGACVETGRIRTTVAGLEQWFGGRAPARVVLEAGTHSPWASRVLQRLGHEVLVANPRKLRAIYENDSKDDRVDAEYLARVGRLDPALLKPITHRGEAAQADLAVLSSRDVLVRTRTLLINYTRGVVKAMGGRLPRCSAESFARRVGPHVPPALRPALAPVLAQLQQLTAAIRGVDREVERRCAEQYPATAQLRQVSGVGPVTALAYVLVLEDPRRFPRSRAVGAYLGLRPRRSQSGEQDPQLRITKAGHPFLRRLVVQAAHYILGPHGPDCDLRRHGERIAARGGKNAKKRAVIAVARKLAVLLHHLWISGAVYEPLRHRPALAQAS

SEQ ID NO: 143917 - protein, 331 aa, unidentified
MTRSGVQIAQRTVAARREGFGQLLEWARKLDGERVWVLEDVRHVSGSLERFLIDRGETVVRLPPRLMAEARQGVRERGKSDPIDALAIARAALREGVDTLPTARLAGVELEIRLLALHRERLLDSRTRLINELRWQLHDLWPDWEIPKRALIGPSWQTKIAQRLRRTDTTVQVQIARDMIRRIRELTRTITQLYQQLAELVKQAAPQLLAEQGLGVLIAAKLIGEIAGIDRFTSDAQLARISGCAPIPVSSGQTDRHRLDPGGNRQLNHAFHMLALTKILHDPQTAIYLAKQRSNGKTSKEAIRSLKRHLVQRVYHLLHDPNSVPITICLT

SEQ ID NO: 143918 - protein, 345 aa, unidentified
METMYYIGLDVHKKTISYCVKDGSGRIYAAGSIPATRLTLDMWMKTLPQPWTVAMEATIFTAWIYDHLQPHAAAVKVAHPLMLRAIAVAKKKNDRIDAKKIADCLRCDFLPECYMASTEIRERRRTLRYRNLLVRQAVQMKNKIAVLLMEAGVSYNKQKLHKVGYFRELLATNQDIDEGLKPLLRLCRETVVRLGKTESALVRSLQRDSLLVERVERLMTIPAVGPITALTWALEVGDVKRFSSIKKAISYCGLCGAERSSANITQRTPLSKQRNKHLQTVLIEAAKMAPRNSPELAMIYEQEKQKGNANRATLAVARKMVAYLVAVDRRQKGFLVVENKNRTAA

SEQ ID NO: 143919 - protein, 347 aa, unidentified
MKQVITIGLDLAKHVFQVHGADADGSPVFNRKLRRSEVMRFFEKLPPCLVGMEACGSAHYWAREITALGHDVRLIPPAYVKPFVKRGKTDAADAEAISEAIIRRTMRFVPIKTAEQQAAAMVLKTRALLVRQRTQAVNALRAHLAELGIIATAGLAKVEALVSIVRDETDARLPAAARFALMAIADVIEASADQIDRLERAIVMESKRDEDMRRLTTIPGVGAITAATIKALVPDPGGFKSARHFAAWLGLTPRSHSSGGKERLGRISNMGNPDLRALLVVGATAVLRVARNDARTRPWLKALLARRPFKVAAVAQANKTARIIWALLNQGGTYRRAAPLTITAAAV

SEQ ID NO: 143920 - protein, 386 aa, unidentified
MQKLNDLSRSLTALEPDGTLITVIEMSLSSWLVAGIVPGVERQPLKKLAVDESALLKLLHRWREEAEKAGRRIERIVVAFEAGRDGFWLARWLKAHSIEAHVIHAASVAVSREHRRAKTDRLDTELLKRAFLGWLRGERDHCKVVAIPTLKDEDAKRPNRERESLVGEQSRIVNRMKAALIRLGIRGFNPKLKRAAGRLDSLRTPEGEPIPPNTLAELRRDMERRRLVSNQIRQIEEARLERFEQAPNDGPHAMVRLLARVVGVGIETADMLVHEVVSRNMRDRRAIARYAGLTGSPDESGRKRREKGLARSGNGRVRRGMVQLAWRFLTYQKESALAQWFRARTENALRARKPMIVALARKLLIALWRLVWQGVVPDGVVLRPAQ

SEQ ID NO: 143921 - protein, 342 aa, unidentified
MVTAVLGIDLGKTICSIAGPDERGTLVLSRRIQRFRLLDFLSSLPPCIIAMEACGGAHHIGRFCVEQGHEPRLMSPLYVRPYVKVHKNDDRDAEAIAEAATRPTMSFVAVKSEEQLDLQALHRARERLVHNRTRLINQARGFLMERGVRIGTGRHVFQRALGQLIADPSKQLSPAMIAILSNMAEELTAINDRVAELDREIASHARSNADTRRLMEIPGIGPTIASALVAAVGDGGCFAKARDLSAWLGLVPRQITTGGKARLIGISKHGNSYLRKLFIHGAQTVLHLVKDRTSPIARWSDGLKERAHVNVAAVAMANKLARIAWAVLTKGERYQQSALVGA

SEQ ID NO: 143922 - protein, 315 aa, unidentified
MTLPSPFVGIDVAKADLVVAVRPTGERWVVANDEAGVTQLVCRLRRLAPALVVLEATGGYERAAVAALAAVRMAVVVANPRQVRDFARATGQLAKTDAIDADTLALFAERIRPEPRPVPDDAARTLDGLLTRRRQVLDMLGAERNRLTHALPAIRRDITQHIRWLERRLDDVDQDLDRTIRSSPVWRAQENLLRSTPGVGPVVSRTLIGDLPELGALTRKQIAALVGVAPLARDSGTLTGRRLVWGGRAPVRAALYMAALVASRHNPAIQTFYQRLLRAGKPKKLALTACARKLLTILNAMMRTQTPWRPTPQLT

SEQ ID NO: 143923 - protein, 343 aa, unidentified
MKKIAIGIDFAKEKFDVTVKNVTNGTSIYGQFPNTPGGGRSMVRMVRKFAKDIASSEWLFCGEDTGYYSQTIARYLTEKGYFMWLQNPYCIKHSEGSIKRGKNDKADSVSIAEYAHRYEDKARKYELPSKVSEELHMLLTRRDTYVRAKRVIQSGVMEIPKRDKQGESITLIKSSAKRLLREIDEEIELLEAQMEKLVEEQEDTKKNYEILRSFKGIGIVNAMCFIAYTDNFKKFDLKARKIATYWGVAPFGKDSGKTIHVDPHVSDFCNHWLKAILSNAANSAILCNPLIIPYHERLKNAGKCDGICKNNVKNKIIQIVTAMIRKGEKFDPEYKFTNKKADA

SEQ ID NO: 143924 - protein, 387 aa, unidentified
MEVRMENAPSAGSNNDPVRCFVAIELSKSSWVLGFQTPLANQTSRYQVKACDAKALLDLIERVRGRVARELVRPVEVMSCYEAGYDGFWLHRVLEAHGVHNHVLDPASLQVNRRARRPKTDRIDADRMVRALIRHLRGEPEACSVIRVPSPEQEDARRLHRERDRLIAERVAHVNRVKGLCATQGIYDYKPLRSDRLKRLEKLRTGDGRALAPRLKAEIVREIKRLEVVLEMISTVEAERDAILTEKKSTHLNADKIKMLAKLKAIGAEFSTVLVGEVFYREFANRRQLGSYVGLASSPFCSGSLDRDQGISKAGNPKARTMMIELAWTWLRYQPESALSRWFRERVGNLKGRPRRIAIVAMARKLLVALWRYLQTGVVPTGAELKA

SEQ ID NO: 143925 - protein, 328 aa, unidentified
MNEVTTIGLDLAKNVFQVHGVDASGRAVVRRQLRRSQVLPFFEKQAACLVGIEACATSHHWAREIAKLGHEVRLMPARYVKPYVKRNKNDAADAEAICEAVTRPTMRFVEVKTEEQQSVLMLHRTRQLFVRQRTTLINAIRAHMAEFGVVAGIGRNGVERLLRLIDGGVDKRVPPAAEECLRALQTQLMLVKRQILEADRRILAWHRSNELSRRLEAIPGVGPLIATALVASIPDPHAFGSARDVSAWIGLVPKQNSTGGKERLGGISKAGNRYLRSLLVVGALSVIRRAKQVARRADGPPAGKGCRHRIGQQDRPHRLGADGSRHTL

SEQ ID NO: 143926 - protein, 380 aa, unidentified
MKRYCGLDVHKDSVFVCIMDENGIVFQEKFGVLTFELEKLRETLYNYATTDVCMESTGVYWIPIWRVLEDYFNLKLVNPYFIKQLPGRKSDVKDAEWIATCLMKDLVRGSYVPDSVIQRLRQYNRRIFELNHNISYKLNKLDSCFQRCNIRISNYVSNINGKAFIEIARLISEGVVDAEKLLKKVHGRTVNKYGRETIIAALTGVINDTDIDCIRQYLNEFEMLKQHRSECQSKMDTLCNEYFPRQIKNILTIPGISQRSATAIIAEAGVDMSNFENSGKMVSWCGLSPRNDESAGRIKSRKITHGNKFLRQTLVECSWSASKKQGCFFNRFSYHQTAIRKKSKIKVQVAIARKILVVVWNILVKDTQYINFNDIDMLTA

SEQ ID NO: 143927 - protein, 370 aa, unidentified
MRNNITIVGLDTHKNSIDIVTAETGGNKEVRHYGKIGSDMASLDKAIRKLRSRGAGLRFVYEAGPCGYGIYRHLTQQGFPCAVVTPSMTPKKSGDRIKNDRRDAENLARLERAGELTHIHVPQEDDEAMRDLTRGREDAVKALRTARQRLGAFLLRYGHRYPGKKTWSPAHMRWLSDITMPHPAQQVTLQEYTHAVRECAERVNRLTEQIQKLLPEWRMFPVVKALQALRGVAQIVAVTTVAEIGDIHRFAKPRQLMTYLGLIPSEHSSGDSIMRGNITKTGNGHVRRSLVEAAHAYGFPARVSRVLLKRQDDLPQVIRDIAWKAQVRLCGRFRRLMARGKLRTKVVTAIARELVGFIWAIAREVQPQVV

SEQ ID NO: 143928 - protein, 368 aa, unidentified
MKQITTYVGVDAHKKDLFIAMLVGDQTTPVTWQLANEPNAVRRLVRKLEREAPGPVRMCYEAGPCGYALQRQVTTPRVSCQVIAPALIPRKPGDRIKTNRRDARKLAELLRAGLLTEVRPPTPEEEAVRDLCRARDDAREDLQRCRHRLGKLLLRRGLHYSGRNWTRAHRQWIDSLEWSQPAERVVVDDYLLAIDHVEARLIEFDVRLTEIAQTEPYRTPVGWLRCFRGIDTLTAILILAELHDFRRFHTPRALMAYLGLVPGEDSTGEKHRRGRITRTGNALVRRLLVETAWHYQHRPGIGVALMRRRKGQPGRVIAIADKAQQRLCRRFRRLAEQHKPAPKIAVAIARELAGFLWAALQPAPAPAK

SEQ ID NO: 143929 - protein, 370 aa, unidentified
MSPSSTRFVGMDVHKDSIAVAYVAQDHGAEVIYLGTIGTRQCDIDQLSRKMPSKATHLVFVYEAGPCGSWLYRYLSNKGYDCWVVAPSLIPKKAGDRVKTDRRDAVPRARLARSGDLTPVYVPKVEDEAIRDLTRAREDTLGDLKDAKCRLKAFLLRHDIRYTGRANWSPAHRRWLSEVVCHTPAQPIVFHAYVRAVTEHTARLQRLEQELQEHVKAWRLHPVVEALQALRGIPFTVAVTTVAELGDLTRFENPRELMKFLGLIPSEYSTGERRRQGAMTKAGNTHARRALVEGAWAYRYPAKVSRHLQLRLETPPKAIQDISWKAQVRLCKRYRKLIARGQHANQVVVAMARELVGFMWAIAKEVPVIP

SEQ ID NO: 143930 - protein, 341 aa, unidentified
MQVTTIGLDIAKNVFQVHGIDAAEKVVVRKQLRRSQVLAFFAALPPCLVGMEACATAHYWARELTKLGHRVRLMPAKDVKAYVKRNKNDAADAAAICEAVRRPTMRFVPVKSAEQQAQLMQHRARDLLMRQRTQLINAVRAHMAELGISAPQGREGIKQLLAIVADEEDTRLPVDARASLMVLAAQLQAMQTTIGSLERRIVVRHRSNQDSKRLQSIPGVGIIGATAIAATVTDPTAFRSGRDFAAWVGLVPREDSTGGKRRLGPISKQGDRYLRRVLVGGAVSILRRAKLNPERYPWVTRLLARRPFKVVAIALANKMARVAWALLANGGTYRRPRLAAV

SEQ ID NO: 143931 - protein, 365 aa, unidentified
MAKAKSLVGLEVHATKIVAAALDVETGEVRSFRLGGDVGEAAAFCAGLARPVRAAYEAGPTGYGLARELARRGVECVVAAPSKIPRAPGDRVKTDRRDAELLVRLLLAGKLHAVRVPGPEEEALRDLVRAREAVRVDLMRCRHRLSKLLLRHGIRFDDGRAWTERHRAWLAGVTLPHAAAQATLLDATGAIDALTHRRGGLEREIVAMLPDSPWATAVGRLRCLRGVDTLTAVGLCSEIGDFERFARPGQLMSYVGLVPSESTTGAQRRLGAITKTGSGHARRLLVEAAWHYRKRPAIGKALTDRQDGQRAEAVAIAWSAQQRLHRTWTRLEARAKRRTIIAVAAARELAGFCWAITQTGGPPQT

SEQ ID NO: 143932 - protein, 421 aa, unidentified
MNGLTDTVYTAYVGIDWAAAKHDICVQGAATGAREFACISSQPEAIEAWAQNLYRRFGAPIAVALELSKGPIVSALQKYDFLVLYPINPSTLAKYRETFTPSGAKDDPTDAELAVDLITRHPERFSPLKPQSVSMRMLIGLVEQRDKFLGDRGRLVNRLGHALQQYYPQVLEWFSEHHTVVFCDFLNQWPTLTQVKRARKASLERFFRSHHVHSAQLIEKRITAIKTAMPLTSDPAVIEPHRLQVEVLIEQLRITIKALKRFDDEIAATADKLPDYDLLFSPLPGAAKVLAPRLLAAFGEDRQRFPYADSLQKYSGIAPVTKRSGKKTWVHWRWQCPTFVRQTFVDWAAQTINKSAWAGAYYRQQRAKGCSYQVAVRALAFKWIRILHCCWQDRTPYDESKYLEALRRKGSPLLKYLVEPV

SEQ ID NO: 143933 - protein, 403 aa, unidentified
MPRPREKERHNAFFGTATGKTLHKGMFFDNTYDGFQKLLIQTDALKVQYSLRKVVFGMEPTANYHKPLGEYLIKGGHLVVLVSAAATVKNRDLMDGRWDKHDTKDAANVADLISQAKCLYYDCPGEDLRSLRGLQSLKKRLKKEEHGLRVRIRNQLLAQYFPEMDQHFGSLASLNVVSRCLDPSDIALMEYDEFCRTVAPGKVNLAQQKRLMQIWQAAKQSIGCSVGEAVPVEAEIMVAALHRVRETIKTVDDRIEDICLKFPEYSFLLSIPGFGPDVSSKVLAAIGDPERFTSGKQVLKMAGFDLCADRSGKRSNSAIPVISKHGKADLRFALYQAALISSLNDKDFIVYHTNKIRGREREKGIGTKMRVKLAAKLLIIAWTLMRKKEPFDPGHLSRQAKAA

SEQ ID NO: 143934 - protein, 471 aa, unidentified
MAAGKGMADGTGVPGHGGDGAEVAEDSTQVVEYAAAIDVAKGSGMVCIRVPGSRAGRRRQVTWPVQATFTAVTALMDHLRCEGIQRLVLESTSDYWRIWYYLAEAAGLEVWLVNARDVKHLPGRGKSDKADCVWLCKLNERGMLRRSFVPPQPVRDLRALTRTRARLAQDQARHQARVEKILEDALLKISVVISDLFGASGRRFLDALVAGERSPAALAALGDKRLRATRTELAEALTGRFRDIHATEIAVHLRLIDAINTEVTRLDEEIGRQLALVPGAEPACAACGLAGGGHAPGCADGDVEVLGLAERLDEITGVGAVNGRALIAELGTDPSQFPTPGHAAGWARLTPRSQQSGQTARPGRTGKGNRYIRGALGQAAMTAARTDTRLGAMYRRIARKRGKQKAIVAVSRVICEIAWILICDPSARYAELGPDYYHPLSAARQTQTKIREIERLNPGKKVILADAGAAA

SEQ ID NO: 143935 - protein, 343 aa, unidentified
MQITTIGLDLAKHWFQVHGVDAAGKVVVKRRLRRAEVVEFFKTLEPCLVGIEACATAHHWARELIALGHEVKLMPPAYVKAYVKRNKNDAADAEAICEAVTRPSMRFVPVKDIDQQSVLMMHRARNLLIRQRTMLVNALRAHLAEFGVIAAQGLRHVEQLIAAIEAESTALPELACSILRLIVSQLNDTQAKIQQVEAKLAQWHRNSRLSKLLATIPGVGIMGASAIAATVCDPNLFRSGREFAAWLGMTPRQNSSGGKERLGRTSKRGDKYIRCLLVAGAVAILRHARTRATKDAEWVRGMLARKPAKVVAVALANRTARIVWAVMKRGDGYKAKEIVGQAA

SEQ ID NO: 143936 - protein, 342 aa, unidentified
MHITTIGLDLAKNVFQVHGVDANGKAVLRKQLKRSQVLSFFANLPPCLIGMEACAGAHYWGRELTKLGHDAHLMGAQFVKPFVKGNKNDANDAEAICDAVSRPNMRFVPVKSTEQQDIQMLHRVRSGLVAERTAQANRLRGFLGEYGIVIGPGLTQLRKHLPEILADDAHGLSALARELLSDCHLRILELDRQVSDCMEKMLQLHRSSPASQSLGAVPGIGPITATALVASLGNGKAFDKARQVPAWLGIVPKQDSSGGKPKLLGISKRGDTYLRTLLIHGARAVVKAAAQKDDAQSRWINALVQRRNANIAAVAVANKNARIAWALLRYGEVYRAPAAGNA

SEQ ID NO: 143937 - protein, 346 aa, unidentified
MDNIGLDLHQRETQLCLLTDAGELIEQRIATTGERFTAVLGPRPRSRILLEASTESEWVARHLERLGHEVIIADPGYAPMYATRSRRVKTDRRDARTLAEACRLGAYRAVHRASDAQRQVRAELAVRDALVRTRTRYVAVIKALVRRDGFRLAQGEPERTAAKVAALALPPALAAELGPLLALLAPLNQQIAAADERLTLLATRDPVVQRLTSAPGIGPVTATAFVATLDQVERFATAHRVEAYLGLVPSERSSGERQHRGRITKQGNTRMRWLLVEAAWRILRSPRPEAAALRAWAEQIALRRGKRVAVVALARRLAGVLYALWRDGSTYRGARPHPAEGSAAAA

SEQ ID NO: 143938 - protein, 457 aa, unidentified
MAPQHKGNPPKAKSSAPQLPVLHRHAAGIDLGAREIYVAVPPDSCARNVRSFPTFTEDLHALRDWVKECGVTSVAMESTGVYWIPLFQILEAAGIEVCLVNARHCKNLPGRKTDVQDCQWLQYLHSVGLLRGSFRPADQVCAVRTILRHRDALVRGASRCVSHLHKALTQMNVQLQHVISDLTGVTGQAILHALLAGERDPQKLAVLKDHRIKASRDVIAKSLRGDWRAEHLFTLQQTHTLWQQHQTLIVECDAQIAALLQTFDARADLAAAPLPPAKSSHKKPQRNEPQFAAREECYRVLGVDLTAVPGFQTPTVLVLLCELGPEFAAKFPTAKHFGSWLGLCPDNRITGGKIYSVRTRDVKSRVAEALRLAAQSLHRAQNYFGELYRRWRARLGGPKAITAMAHKLARILWHLLKYQEGFQPEVFAQAEAKMKRQKLARLQTLATTLNYRLVPNQ

SEQ ID NO: 143939 - protein, 377 aa, unidentified
MEKDSRFVGLDVHADTIAVAVAEPSGEVRALGTIPNTPDAVRRLVKKLAPAESLRVCYEAGPTGYVLYWQLTELGVACAVVAPTLVPVKPGDRVKTDRRDAEKLARSYRSGDLTPVWVPDAAHEALRDLVRAREAAKQDQLRARHRLAKFLLRHGRRAPAGIKAWGTKHRTWLQTVRFDHGAQAATLLDYVTEVAHAGERLRRLERAIDDAVQTAPAAMRAVIAALQALRGIAALSAVTIVTEVGTLSRFARPRQLMGYSGAVSREHSSGRATRRGAITKTGNAHLRRIIVEAAWTYQHRPAMGATLRARQRDLSEEVKAIAWKAQHRLHRRYGRLLAKGKPKPRAVMAVARELLGFIWAIGVQAEQAHRAAATRAA

SEQ ID NO: 143940 - protein, 317 aa, unidentified
MTTAPRFIGVDVSKDYLDLHVRPTGETGRVANDPDGVASITTRAVAAGAVLVVIEATGGYEYPVAAALAAAGVPVAVVNPRQVRDFARATGRRAKTDAIDAAVLAHFADAVRPVPRPLPDPDARRLAEILGRRRQLLGMRTMESNRVPQTTDRAVRRDLEAHLRWLDEHLDRLDRELAAAVEESPVWRANDDLLRTIPGVGEVLSRTLMAEFPELGTLTREQVAALAGLAPMNRDSGRWSGPRFVTGGRSKVRAVLYMAALSARRFNPQLKAFADRLAGKGKPAKVVLVAVARKLLVLANAVLRTRKPWDAKVAAAA

SEQ ID NO: 143941 - protein, 316 aa, unidentified
MSYTKRFVGIDISKSSFDICILPDNRSASFANTPAGIARFIAFVAELGTVERFLLEPTGGYERRVMEALLSAQLPVARVNARQVRQFAGACGQLSKTDRIDAFVLADYGQRMETTLVSPVSAAQTALVELVARYRQLSHMIVQEKNRREKLSNRADSKSEAWIEESLHFLGEQRQAVVDAMTACLEVDDTLSEKAVVLMQLKGIGLRTACFLLAGLPELGSMDKGQIAKLVGVAPLNRDSGKMRGKRTISGGRKPVRDALYIAALPAIRFDPKIKAFYAKLKANGKPGKVALVAVMRKMIVILNARMRDHLATVID

SEQ ID NO: 143942 - protein, 373 aa, unidentified
MFHFTTLFIGMDVHKESFSLCYYDMMANQFKHSTKVGPNVSYIVNYVNELRRLYGQDAEVLCGYEAGCLGFTLYHQLQAHGIPCIVMAPTTVMKEGSKRVKTDKKDAAQLAKALAFRSYRPVHIPTVEDEQVKEYIRMRTDHKVALKKIKQQILAFCLRHDFRYTEGSSNWTQKHVRWLHSLNPDGLYAEILTEYLLTYEKLVDQIERYDARIEQLGQSDSYQEKVSWLSCFIGIKTLTALSIVTEIGDFNRFATAQHFASYLGLTPNENSSGDKERRGAITKAGNSHVRRLLIEAAQSLAKGTIGYKSKELKRRQSGNRVEVIAYADKANERLRRRYRTLVLGKNKKQNVAKTAIARELSGFIWGMMTGRIA

SEQ ID NO: 143943 - protein, 337 aa, unidentified
MEQRYVGIDLHRRRSVIVTMDQAGEVLSSVRIPNDPVAMSIAVAEAGEGAEVAFEATYGWYWLADLLKADGHHLHMAHPLAMRGMTSHRRVKTDWKDATLLADVLRMGSLPEGWIAPPELRELRELVRYRAKLVALRSGLKAQVHAVMAKNGILPARVEMFGPGGQAQLDSLDVPMSFTIRIESLRDLIEIYDREVTMLEGAVHRQLKDHTGYQAIQKIVGVGKVLGAIFVAEIGDVARFSSPEKLCSWAGLTPKHRESDLTKHQGDITKQGNKLVRWAAIEAISGYRGGPKLRADYERIAERRGKYRARVAVARKLLVLVYYGLRDGEIRSLDRAG

SEQ ID NO: 143944 - protein, 316 aa, unidentified
MPDKLYIGADVSKDWIDLAIYGQPATRRIRRDRDAIGAWLASLDPASVALVAFEPTGGYERLLRQCLREADMAFARVHPNQIVAFRTRRGVRAKTDRIDARLLAEFAALELSQRGLAPLMATDDGLHALVARRRQLVALLHAERCRTELAEPGPVRSSLEQVIDVLTAQLELIEAAIDAAIAANEQMVVMAALLRSFKCVGRVTVVTLLAGLPELGQFSGKEIAALVGLAPFQRDSGKRRGRATTGYGRPEVREVLFNVARSAIQHNPRMRAFYQRLVTTNRRPGKVALTAVMRKVLVSLNAIARNREPWKGAVAA

SEQ ID NO: 143945 - protein, 414 aa, unidentified
MLYIGIDWATDSHTVTLLAASGEVLETLAIENRLAGFLTLLETIRKHLRELEPAATPDSVSFAIEDRNQRLTDFLLAQDFQGYLIEPSRMKGYRLRYRSSGNKTDPDDSFVLADVLYRDHDQLPRIAPDSDVVRSLKTLLRDRESFVRDSTRLSNRLTACLRQYYPEALGFFEDVAGKTSLDFIAAYPDFAAAICLSRREVKQFLAKHHCHHQTQLERILGVLTLDPTPIPAVIVRTKRRQALAIIQQLRMVQAAVAEYDAEIERLGKENGEVKRFRSMPGGGPIIGAGLHTLFGDDRTRFTSAMAVQSLVGTAPKTIQSGQFRTACFRFGCNRFYRTLLQQMALGALRRSAWAKQFYRGKRREGKTHQHALRCLANLLLKIAYAIWRDRTEYNEDRHMAQIMRHRLRIASNSV

SEQ ID NO: 143946 - protein, 387 aa, unidentified
MPQPNDLSRSLVALDQNSTIIAVIEMSQSSWLVAGMLPGIERQPRKKLEPSPERLLALLQRWRDEAVRAGSTITRIALAFEAGRDGFWLARWLEARGVEAHVIHASSIAVSREHRRAKTDRLDTALLQRGFLGWLRGERGHCSMARVPTIAEEDAKRPNRERDCLVGERTRIVNRIKSTLARLGIRNFKPTLRKAAERLATVHTPEGTPLPPNTLAELQRDMARLGVVVSQIRQIEEARQKRLEQQHETGPHAMVRLLARIVGVGVETADMLVHEVLSRPMRDRRAVARYAGLTGSPDESGAQRREQGLARAGNARVRRGMIQLAWRFLMFQKESALALWYRARTTDSRRGTRKTMIVALARKLIIALWRFVTTGEPLEGVILRPAS

SEQ ID NO: 143947 - protein, 348 aa, unidentified
MEKLIRIGMDTSKSVFQLHGVDSAEQPILRRKLRRGQVLQFFGALPPVQVAIEACGASHYWARQLQALGHEVVLIPPQYVKPYVQRGKSDAADAEAICEAASRPKLRKNFVPIKSTEQQAAQMLTKLRAQFIGRRTQLANSIRGYAAEFGLTAPKGLSRLQDLLEDIRADATVPDLAVELVEALAAELTRVDDQIATLDKKLMQLHRGNEMSRRLAGIPGIGPVGATLLSIKVTDAHSFKSGRSFAAWLGLTPKNHSTAGKNRLGVITRAGDEMLRSVLVAGATAVIADLRRGGSRIWPWLQALIARKPPKLVAIALANKMARIAWKLMISGERYRPIGGLAPMATPT

SEQ ID NO: 143948 - protein, 456 aa, unidentified
MGHARARKIPAQLVEDEDYQLRHERVAGTGIAKAKADVCTRLPPARDGGRRASRLEEVPATARDILALAGRLLADGVELAVMEATSDYWRIWYYLLESAGLRVQLVNPAPARQLAGRPKTDRLDAQWIARLAEMGLLRPSFVPPPEIRALRDLTRTRLQLVGDRTREWQRLEKLLEGALVKLSSVAARLARTKTARGILEALADGQHDPETLAAVAAGQVKGGRAAVQQALEGMLCGEHHPRLIRLHLDHITFLDRAVAAIEDEISAALDAIPAAWGISSDGVPSPGPGPGAAALTAVQRLAEIPGVSPRLAMAIIAETGLDMTRFPTPAHLVSWAGLAPVARQSGPRNRKPKKGQGDAYLKGYCTQAANGAARTETFLGERLRRLSRRLGGNRAKCAVARSILVIVWHLLASPEARFTDLGPDWHDRTTGRDRKIRAHLRQLHARGLDVTITPAA

SEQ ID NO: 143949 - protein, 340 aa, unidentified
MEKRFIGIDLHRNRFTCCIRLENERTYVTEWELEDLGKFVKKLRPSDEIAVEITGNTRLFFDAVVPHVARVVVVNTSQFKVIRQSVKKTDPHDARALALYLSKNMLPEVRMKDKEHGQLASLTQTRDTLVKLRTALKNKINNILSARGLNLAKEALGSEKKLNEVLELPFDEIVRIELRVIVEQVRSLNKSIAELERTIGEEGSKLEGHKGLSSIKGIGKITGAILLSVIGDVNDFADEGRLASYFGIVPRVSNSNETERSGRIHKRGTKLGRTALVQSALIAANYSPYLKRFYEQVKARRGAGKAIIALARKFLGIIYRTLKNKWVFEDFPNFVLAEAS

SEQ ID NO: 143950 - protein, 384 aa, unidentified
MSAHPTPIQAAAQLQANTLFASLELSKARWLVTASAPGSDKLSRHQVPGGDGQALLELLWRLQAAAARRSAPVMIIVIQEAGLDGFWIHRLLVQNGITSHVVDPASIAVNRRHRRAKTDKIDGVKLLRTLMAWMRGERQVCTMVQPPSPEDEDRRRLARERARLLKERVQHTNRIKGLLSGQGIPDYDPLHRDRRGRLAALTTGDGRPLPKRLETEIGRELDRLELVASQLAAVERERDALMAQTAEADARAAPAALIRLRGIGPELAALLWLEALFRRFENRRQIAAYAGLTPSPWKSGGIDREQGIAKSGNPRLRRAMIELAWFWVRHQPGSALSRWFVERVGAARGRVRRIAIVALARKLLVALWRYVTQGVVPEGAVLKG

SEQ ID NO: 143951 - protein, 323 aa, unidentified
MTLSLLGIDISKLKFDVCLILQTGKLRHKVFPNNQAGFQQLSAWLLKQKVERVHACMEATGTYAEPLALYLHQAGHQVSVVNPAKIKAYAQSHLSRTKTDKADAQLIARFCQERHPPAWQPVPQEIADLQALVRRLEALSEMRQMELNRLSAGVSTERVRSSLERLITYLDQEIQDTEALIDEHIDSHPTLHEQRELLVSIPGIGQTTAAKLLAEILDVKLYESARQLAAFAGLAPRLHESGSSVKKRARLSKVGTPRLRKALYFPAISAMRHNPQVRALSVRLKERGKCPMQIIGAAMRKLVHIAFGVLKNGERFKPEMKTA

SEQ ID NO: 143952 - protein, 342 aa, unidentified
MHYIGLDVHKKTISYCVKDVSGQVHSEGTVPATRAALDLWMKALPQPWAAAMEATIFTGWIYDHLQPHAAELKVAHPLMLRAIALAKKKNDRMDASKIADGLRCNFLPECHMASTAIRERRQTLRYRNLLVRQAVQMKNRISGLLMESGVSYNKQRLHKVGYFRELLASNREITERVRPLLKLSRESVDRLQKTEGALVRALCRDPELVERIERLRTIPAIGPITALTWALEIGDVKRFPSLKHVISYCGLCGDERSSADIAKRTPLSKQRNKYLQRVLVEAAKLAPRHSADFALVYEKEKQKGNANRATLAVARKMAAYLLAVDRRERAFVTLGDHRQAAA

SEQ ID NO: 143953 - protein, 385 aa, unidentified
MGSQRFIPRDYDVFSGLDVDKRSISVTFTDHQGSVKSLRMPYSVEHLLNHVRKHFPNQKVVFGYEAGPTGYGLYDGIVAQGHPCLVAAPAMIPKAPGQRVKTNRLDSRSLSENLRGGQLKSIHVPSPIYRELRHLTQLRDVLVSEMVGMKQRIKSLLLMEGIEFPKAPAGSQWSFIGKGKLRKLSCSGATRFKLDQLLDSLEFNEKQILKTTREIRRFLKNDAELSQCMKYLMTIPGVGWIVASQLLARIGDWRELKNIRQLAGFLGLVPSEYSTGERTDRGSITRTGDGRLRSKLIQASWSAIRQEDELRDFFRVVCGKHPREIASRVAIVAVARKLSVRISVVLMKQRAYELRKKVHSAPLTQEETSPQGTPRREPEPGEKNS

SEQ ID NO: 143954 - protein, 340 aa, unidentified
MDATTYGLDVAKRVFQMYWVEVETGEIVNRRFGRDELIRFLAQRPPGRIALEACGSAHWWARKIKALGHEAVLLHAKFIRPFVQTNKTDAADARSTWTAVQQPGMRTVAAKTEDQQAMLSLHRMRALLVKFRTMQVNQLRGLLYEFGVTFRAGRAAGLAEIQARTAELEGALPGTMMCCLQDQRRRIDELQRDIDLLEKRIGVWQKQDAACHAITAVPGIGRLTATALVATMGDAKSFRSGREFAAYLGLVPRQSGTGGKVRLGPMSKRGDPYLRTLLIHGARSVMYNAKVPTPWQTDIQARRPSNVAAVALASKIARTAWAILARGQEYQRNYVSVRPA

SEQ ID NO: 143955 - protein, 321 aa, unidentified
MNKNTEIFGIDISKDVFDVYSHQKGHHSFKNDAQGFKSFLKVITKDALVVMEATGYYHYLFAQFLHKKKVQVSVVNPLSVKRFIQMKLAKIKTDKSDAKAICEYGHMNEVTLYKALTDVQAECLQLFRLLDNYLKKRTQTKNKKHGEEVLGIPSKYVYGSLKRDLKHLDKEIGGIEARLLELVKQDQQHQLTLLKSIPGMGMKTALFLIVITDGFKKFETASQLCSYVGITPTIRESGSSVRGRSRISKVGNKKLRNLLFLCAFSACKHNKACREIYERIVNKGKSKKLALIAVANKLLKQAFAIAKSGRPYDENFVSKLV

SEQ ID NO: 143956 - protein, 344 aa, unidentified
MNNRNLIALDIAKNIFQVCRVSKSGKTQSNKPVSRNQLKELLVGSKPSMFAFEACGSSHYWGRFAESYGHTIRMLPPKAVKAFRQGHKTDETDAQAIAIAAQHEAIKSCALMNIEQHTLQSFESSRRYIGKQCRGLANHIRALTYEYGLTIPKGNSALLKAIPEILEDAENGFPHSLRVILHSLYEQLKVQQRLFKEIEKEKAHQIKTIEPCQRLSALEGVGPVGSAMLYSCLGKGEMFKNGRQAATYLGFTPKQHSSGGKTIIVGIDKKGGNKELRAVLYQGALSVISRLPEEPTTAKQRWLIQLVQRVGVKRACIALANKTVRTAWAMLSSGEAYNPQPLTV

SEQ ID NO: 143957 - protein, 377 aa, unidentified
MAEITRALIARVGVDLAKTVIQVHAVDKAGRRVVSRALKRDQFLGWCTQLPSGCLVAMEACSGAHAWGRRLRAMGLDARLIAANFVSPYRMEGKSGKNDMTDAAAVCEAASRPTMRFVPIKTPEQQGVMALHRVREGLKEERTACINRIRGVLVEFDLVFGKSPKVLRAVLPDVVEDASNELSGRARLVVQRAFEHWRELDEHLRWCDRQIGEHVRSSVEARRAAKITGIGELGASALTASVSDFRQFKSGAQFGAWMGIVPRQNSSGGKIGLGRITKRGDDYLRTLLIQGAKSAVMSAAKRDDPTSRWLQALVERVGWQKACVAMANKNARILWAVMTREQAFEPGHVSEKPAAKCAKPAGGQAQDAVARPVASVA

SEQ ID NO: 143958 - protein, 506 aa, unidentified
MSRTLSHSQATLSSQTKKVTPAQCAAKPQRPSGTRRSTRASSYTPTSPERFCAQYHDYTGLQVVHPHAAGIDVGGSISHFVALEVSPCVLEVREFGCDTEDLYALRDYLKKYHVTTVALESTGVYWIPIYDILQDAGFVVCLVNPSQVKNVPGRRKDDKLDCRWLLTLHTFGLLSASFRPSAEILELRSIWRMRSQLIALQADEVRRMQKYLDEMNVRVHKVLSDLSGVTGLAIVQAIIRGEHRPEVLAQYRDCRCKCTEEELRRALTGHYRPATIFNLELAYQRHQMYRTQIAACDAKMQPLLIALIPMGDDDIADQLQRAGTPTKQTATEIRYHLPAYDLETYLKLMLGCEATSIPGLGPLLVMTLVSELGLNCAAWKSEKHFCSYLGLCPKHDISGSKVLKNHTKKTTQRAAAAFRQAAAAVMRSDSALGAFYRRKAVSGNSGKAQVATARKIACDFYRMIVYGQTYAEVGAAAYEEQVRKQQLKSLIKRAKMLGFEVTPLAA

SEQ ID NO: 143959 - protein, 394 aa, unidentified
MAFKIFRKNCCGLDVHKTWIYACMGITDTNGRTEYKQARFSSFTKGLQKLADWLAKYDCNDVCMESIGKFWIPVFNILEKTCWVTLAYPKYTKPQKGNKTDHKDAKWICDLYMCDMVNPSFIPPPDIRQLRDLMRYRSKLTNIMTSEKNRALNCLTVSKLKLDDVFSDVFGKSSRSVIRYILEHPGETFQVAPFIDRRCKHPVEEIQAVIDGTISHQQAVKLRECLQHLDELEVHKTNVEKEILCLVRQYPYQLELLQTVPGFSGNIMTAIALTSEIGADMSVFPSAKHLVSWAGCCPRNDQSSKKVKSTRISRAGVYLKPLLVQVAIQPFTANADELSAAGAVEIRCQICDGRFLSMWAALFIFLGCPLPPCPKNLHVHNGRIVILASVAWIF

SEQ ID NO: 143960 - protein, 339 aa, unidentified
MIYMGVDLHLRFCVVTVLDASGRVLQQTRVANDAASWSHYLERWSEPVAMAAEACTFATAFAERVRPRVARLVLAHPQRVKAIASAKLKNDRVDSATLAHLLRADLLPESWISDPATGELREQVRLRASLVTQRTRWKNRVHALLHRYGQRAPDSDLFGRAGRSWLEAIELPAGARQQVDTHLRMIDAVNGELQSLDATLGAVAEADADVHGLMTIPGIGPFSALVLKAEIGDVHRFREKRALYSYAGLVPRVRESAGHRFRGSITRAGSPLLRWVLVEAAMNAARSSRAARNYFERLAQRKPRAVARVALARKLLGAVWALWTHGVLFDENEFAARQR

SEQ ID NO: 143961 - protein, 365 aa, unidentified
MRHQSLFSVWIKQVKGCFRPSNHYTQGMTNHTFIGVDISKATFDFYFNDHNSNYGKLHNHQEGFEVFINMLPQDPWVVMEASGPYYYQLACFLSQQGIPVSVVNPLVIKRFSQMKLQRTKSDKADARIISEYAHIATLRSWRPPSEDMHHLQQLFTTLEQVIKQRTALGKQMMAFQATGSVDEQLLRINETWIAQLESTQKELEKMIEEKVDKQSASLRKNLQSIPGIGPKTSILLIVSCKGFIPFQHYKQVISYLGLAPRIYQSGTSVRGRARICKMGMGKVRACLYMAARSARRHNTACRRLYDRLRAKGKPHRVAMIAVANKLIKQAFAIVKSGVKYQDDFGSFDSSKQNKILTHSKTALAV

SEQ ID NO: 143962 - protein, 404 aa, unidentified
MWYAGIDWADQHHDVLVIDEKGRQVGSLRIDHSPQGFAKLNTFFEQIVGDAPKEQMACIIETTHGLLIAHLLEAGWPVYPVNPRTVDRRRAASGAKTDTIDAYLLAKTGRADLADLHRLTPDSETMTELKLLTRDQNALIQMQTRLVNQLSACLKAYYPVALELFGKLQQKSTLHFLQAYPTPQEAMAASVEQIKAVLKHGRYPHPTAGAATIVEQLHQPHLQADAVITRAKSRLMLALVSQLLPLIEQIAQYDKEIETLFLTHPDHELFESLPRAGQHLAPRLLAEIGDDRLRYQDASSLQALGGTSPVLFQSGMYAKAHRRLGCIKPLRNVLHQFAWQTTLSEPWARDYYQRKRAEGKSHTVAVRALANVWVRIIFAMWQHHQCYQAATFEQAQHQHARRAA

SEQ ID NO: 143963 - protein, 347 aa, unidentified
MEYFAGLDVSLEETAICIVDDSGLIVREARIASEPEALVGFFRASGMAMKRVGLEACSLTAWLHQALIEAGIAAICIETRQAKAAMGAMPNKTDRNDARGIAQIMRTGWYRAVHVKDPCCRSWRALLTARRMVLNKRRDLENGIRALLREAGLKVGTPSRRNFAARVIELVADDPVLAALARSLLSVIAVITEEIDRLTKRVLDEVRIEPTCRRLMTVQGVGPFTALAFRATIDRPDRFRRSRDVGAHLGLTPRRYQSGETDVQGRISRCGDELARTALYEAAHSLLIRSTKWSALKAWGMNIAKRRGMARARVAVARKLAVILHRLWADGTEFRWTKQAAASVPAA

SEQ ID NO: 143964 - protein, 345 aa, unidentified
MQSMYYIGLDVHKKKISYCVKDGSGRIHAEGAIPATRWDLDRWMKTLPQPWTAAMEATIFTGWIYDHLKPHAAALKVAHPLMLRAIAAAKKKNDRIDANKIADCLRCDFLPECYMASTEIRERRRTLRYRNLLVHQAVQLKNKISGLLMEAGVSYNKQKLHKVGYFKELLATNPDINEGLRPLLRLCRETLVRLQKTESALVRSLQRDSLLAERVQRLMTIPAVGPITALTWVLEVGDVKRFSSIKKAISYCGLCGAEKSSADTVKRTPISKQRNKHLQSVLVEAAKMAPRLSPELALLYDREKQKGNPNRATLAVARKLVAYLVAIDRSQRDFLVVEKENCAAA

SEQ ID NO: 143965 - protein, 406 aa, unidentified
MLNAVGIDVSKGRSTVAVLQPGGVIVHKPFDVPHKSRDLHDLAQYLGSLEGDTRVVMESTGRYHEPIRNALSKAGLFVCTVNPHLIKNYGNNTIRKVKTDSADAKKIARYTLDNWAELREYTNMDTTRTQLKTLNSQFSFFMKQKTAAKTNLIALLDTTYPGVNKLFDSPVRADGSEKWVDFAYSFWHVDCVRNAGIKAFTDRYKRFCKHHGYEFQEAKANAIYKDSKELIATLPKEAVYKELIQESIRQLNLLSENVEHIRKTMNELASTLPEYNTVMNMYGVGSTFGPQLMAEIGDISKFQHREALTAYAGVDPGKNDSGQEVHNSSHASKCGPSRLRCTLYQIMTTMLQNGVREDDAVSSFLFKKKAENKPYLVYMTAGANKFLRVYYGKVKECLHNQEQAEQ

SEQ ID NO: 143966 - protein, 421 aa, unidentified
MTIDINNLTDVVLVAIDIAKARNDVLVQLPNGTKKKFKVANKMKDFKEFIDYLSSFNKECFIALEATGNYHRPIAYHLQASGFKVYLVSSFSAAKTREALHNSWDKNDPKDAQVILHLLKTGVIQTYYDPLINQYNDIQEIAKTYHQISLRKVRVQHSIMNHYLPLYFPEAEIFFHSSRALWFSHFMQHYPTPSAILKYSQEEFIQNAWDVVGRKVDKENWLINFYQTAQESIGLPIPCDAQAIKMFKIILQEHHDLCQQLKCLEDTASTFLEGNNDYQKLLTIPGIGPIIALTILAEAGNLKRFKHYRQFLKYCGFDLSTKQSGFYRGQTKLSKFGNGRLRYVFWLAATVSIRMRENTFRKKYEDYIKQDPLNNDLKRKGYTAVAAKIARVAYGIVKNETNYRCYHESVIPSGGIPSVRP

SEQ ID NO: 143967 - protein, 323 aa, unidentified
MQGKVSFQEDAMPVVYAGVDVSKEWLDIHLHPLGESRRFCNDKTGIRQLKRLLARHRLASIVMEATGKFHRPAHRSLWLDGFAVAVVDPLRARMFARACGYLAKTDRLDARFLALLAESLRPPADTPPSPHIEALQELVNARSAAKCDITALQNRSKTATTALLRGELNRLVRRLEQHVERLDKEIERCVGEDPQLCRKAEILTSIPGIGRVTALALMAGMDELGSCSGKQAAMLAGLAPIANDSGARTGRRSIRAGRPAPRRALYMAALSACRYNPALARFADTLKAAGKPAKVILVAVMRKLLVLANCLLSHDRLWTPNPP

SEQ ID NO: 143968 - protein, 385 aa, unidentified
MLSRADHTEISIRTDLRAIFVSLELSRTIWLVTSLSPGAREKMSKHSVPAGDIGGLLVRLRSLQERVRARRKQLPPLVVIQEAGLEGFWIHRLLTENDIESHVVDPASVATSRRRRRAKTDKLDGDTLIRTLLAYKRGEPRVCAMVRPPTHEEEDRRRLSRERRVLLKERIQHSNRIKGLLFGQGVTGYEPLGRDRRQRLVGLQTGDGRPLPPHLKAQIDRELDRLEMAIEQIRAIEGELRHAIVAADTVTPVPRMLIELKGIGNEFATVLWTECLYRRFDNRRQAAAYAGLAPTPWQSGSIDREQGVSKAGNPRLRAMLLQLAWLWLRHQPDSVLSQWFLDRVKANGGRLKKPTIVALARKLLVALWKYVTSGVVIEGAIVRAA

SEQ ID NO: 143969 - protein, 352 aa, unidentified
MKKGITKVVAVGIDVGDKTSQVCAKDATGAVVWEKKVKTTEAGFRGALGKAGPCRIVLEAGSQTHWIKACLEGLGHQVKVADPRNLRRIYQSESKSDVRDARELAEEALWRWDRMSEVTLRSQRSQEKLAVLKARDALVRARTALVNLARSVLKQEGVVVPKGTPEAFPKKAEPLVPEGQRAALGPVVKQIAMLTEEISGYDRWIEKAGLAEGPVRLMRTTTGVGPVTSAAFVWTLDTPDRFAKSRTVGAFVGLRPRRDQSGDTDKELPITKTGNAFLRRLLVGCAQYILRRSSPKSALKDWGLKLAGRGGKRAKRRAVVAVARKLAVILHRMWVTGEEYVPFPQRARAHAA

SEQ ID NO: 143970 - protein, 313 aa, unidentified
MADMIATAGIDVSKDRLDVAVHPTGQEFSVSNDAAGWRVLVRRLRSAQPRAIGIEASGGYEHGAIGALLEADLPIRSVNPWKLRLFAQAAGVLAKNDRLDAGLIARFVATMPSREVRRDPAVEQLAELVRARRQLVDDLQQIGCQVEHLRDTGLRRLQARRVRQLQRDIALLDQRIAQAIAASPGLRARHELLCSMPGVGPVLAATLLALLPELGALSNRSVAALVGVVPYDFDSGRMKGLRCIFGGRAAVRRVLFMAAQAAAMFNPTLKAFKHRLLAAGKKPKVAIVAVMRKLIVTLNAMVRHNVPWHPATT

SEQ ID NO: 143971 - protein, 349 aa, unidentified
MRFYNQPHRFYAGGDLHARTLFLHILDDQGQTRFEANLAANPQSFLDAIAPFRDNLVVGVECMFAWYWLADLCEDQHIPFVLGHALYMKAIHGGKTKNDRIDAKKIATLLRGGMFPQAYVYPRHLRETRDLLRRRTFLVRQRAQFLTHIQNTNSQYNLPPLTKRLSYASNRTDPELVDRFPFESVQHSIRTDLHLIDALDEEIRVLELHLTRSAKVDDPQTYHLLKTIPGVGPIIALILLYEIHRIGRFPEVGNFASYARLVRCEHESAGKAKGHGCKKIGNGHLRWALGEAACLMLRNHEPAKRWMQRKEKKVGKPTALGILTAKLGRTVYHLWRMQRAFDAKKFLMS

SEQ ID NO: 143972 - protein, 332 aa, unidentified
MPQSERIVGIDVSKRQVEACLRARQERLSQPSTPAGRRAMIAWLRQHDVTVAVMEASGGYERDWAAALRGAGIAVRIVDPKRVRYFARSAGRLAKNDPIDAEMIAWFAETFATAAAPAHDPEREAVDRLMTVRALLVRLESQIGQLGEHRQPPLVERAGRAIAGVIVRQRKRLETAIAARIARQADLAERHRIIQSVPGFGPCCAAGIIAWLPELGQIGGKPATALVGLAPYDDDSGGHHGERHIKGGRREIRDLLYMAALAAIRRNPVIKAHYRQLRARGKKFKVALVACMRKLVVILNTMLMRGQMWNPPAAAIAGARPPWRGRRSPSTA

SEQ ID NO: 143973 - protein, 352 aa, unidentified
MKIIGCDFHPSYQQIAMMDTETGELWEGRLEHEQGEARRFYQALQGQTVRVGMEAVGNSHWFEQLLAELGHELWIGDAAQIRRLVVRQQKTDRRDAKHILDLLLDGRFPRLWVPSPQMRDVRQLLRHRQKLVEIRTQVKNQLQHLALNQGVRRKSRLWSVQGRAVLEQLPLPPWTARRRGDLLAMLDRLQEQVGELDRAVRAEAEQRSEVRLLMTHPGVGPVVGLAYVLTIGPITRFPRGKQVASYLGLIPSEHTSGGHQKFGPISKQGNTMMRTLLVEAAQTAARFDEQLRRQYGRLKARKHSALAKVMVARKLAVRMYWMLRENKPYAQLYAQRPVARMQGSPSHSVVAS

SEQ ID NO: 143974 - protein, 351 aa, unidentified
MTVYVGMDVHRKRSQIAVLDAAGEEQRNRNVPNDPVKLVPILGVLPPGTPVAFEAAYGWGWLVELLEELELEPHLVHPSRCKAIAAARLKNDKVDARTLAQLLRADLLPEAWIAPPEICDLRALLRHRASLVRLATGLKNRVHAVLADRGITPPSSLWATPGRAWLQALELPPTPRAIIEDCCGVLDALATPIARLEGEIGALAKPDPRVQALMALPGVGKLTAMTLLAEIGDIGRFPTARKLCAWAGLTPQVRNSDRKVRHGHITKQGSPWVRWILQEAAQTAKRSPLFADTYGQLARRRGRNIATVAIARRLLARSFHILTQLEAAPAPEKARPGALASLHEPATRPLS

SEQ ID NO: 143975 - protein, 383 aa, unidentified
MPERTAFFQPRGEISGLDVHKESIAVALAEPGRAEPVYRGEIANKPKSIEKLIAKLSEAYDGALLQFCYEAGPCGYVLYRQILACGHDCQVVAPSRIPRTPADRIKTDRRDALKLARLLRSGDLTAVWVPDQDQEMMRDLSRARDDMKGQERKARQQLNAFVLRHGHHWPRGKSRWTPAHYNWLESLRFERPWQQVVLQEYIDATKAASARVAQLSDHLMQALPEWSLAPVVDALIALRGVDKLAAIVLLAELGDISRFDSPRELMAFLGLVPSEHTSGARRRQGGITLTGNGHARRMLVESAWSYRFPARQTLHLKRKAVHASEPAKTIAWAAQKRLCARYRTLTRAGKNTKVVCVAIARELAGFIWDIVRHEMPRLGLQEG

SEQ ID NO: 143976 - protein, 347 aa, unidentified
MRFYNRQHRHYCGIDLHVKTMYVCILDAAGHALVHRNVKSTPEAFLEIVAPYRDDLVVAAECMFTWYWLADVCAAEGITFVLGHALAMKAIHGGKSKNDKIDSHKIASLLRGGLVPQSYVYPAMMRSTRDLLRRRLHLVRKRGQLLAHIQNTRAQYNLPEFERRLAYPANRDGVSDHFPDASVRKSIEVDLALLERYDTLINDLELTLVRDAKRHDGDAFQRLRSVPGIGKVLALTILYEIHDISRFDRVQEFASYARLVKGRKQSGGKLLGTSGAKMGNVHLKWAFSEAAVLFLRHATGGKKFLATLEKKHGKGKALSILAHKIGRAVFYILSRDTVFSMEKFMAA

SEQ ID NO: 143977 - protein, 349 aa, unidentified
MVADELDYVIGVDTHLDEHVLAIIAAPSGAVVAQHSIQASARGYAVALRFAADEANGARVWAIEGTGSYGAGLARFLAGRGETVLEISRTPRAERRLRGKDDSLDATRTARAALASETLALPRSGERREALRLLLVARRSAVDVRREALGQLRGVIVTAPDKLREELRGLPVGRLLVRCSRLRRSSAISADELATRLVLRSLARRIEAATLEAAELERELLGHLRALAPALLDEPGVGPIVAAQLIVAWSHPGRVRSEAAFARLAGVAPVPASSGKTTRHRLSRGGDRQLNRALHTVVLHRRQHDPATKDYIAKRIAEGKSRRDATRLLKRYLARHLYRLLQHQEPLMA

SEQ ID NO: 143978 - protein, 449 aa, unidentified
MSRPKVIEDEQHERVHERVAAIDVAKDSGMVCTRTPHPSRPGARRSTVWTVKARMSAVRALGRQLVKDGIEVVTLESTSDYWRIWFFVLEACGLAVQLVNASQARNLPGRPKADLLDAQWLARLTEMGLLRASFVPPKAIRDLRDYARARTRLVRERTRCWQRLEKLLEGALVKVSSVASKLTTVSAQDMIKAMIAGQRDPQVLAGLARTRMRAGHDDLVQALDGMFDDHHGELAALLLDQIAFLGDRIAQLAARAAGLTAAMPAAWGINADGTTGPDAGTGPDAAALPAVARLAEIPGISEDLARAIIAETGLDMSRFPTAAHLVSWAGLCPSARQSGPRTRAGKKGQGNGYLRGSLGQAALGAARTATFLGERYHRIARRRGKAKAQVAVARSILVIIWHLLADPAARYADLGPGYYQARLDTDRKLRNHIRQIQALGFDVTLTKTA

SEQ ID NO: 143979 - protein, 368 aa, unidentified
MGKCITYVGLDVHKKTISVAFADEGDSEVRPYGVIDSNLSSLDKVVRKILSRGCEPRFVYEAGPCGYGIYRHLKQQDTECMVAAPSLIPKKSGDRIKNDRRDAKNLARLYRSGELTAVHVPNSEDEAMRDLTRAREDSKTAERKARQQLNALLLRHGLKYCGKSHWSLAHWRWISDIKMEHEAQQFTLQEYVDTVRSCSERVERITEKIRLLVSQWRFGPVVEALQALKGVCLVVAATMIAEIGDLSRFDNPRDLMAFLGLIPTQHSSGDNIKLGRITKTGNGHARRMLVQAAWSYRMPARVSRRLRDRQQNLPEKIWKIAWKAQVRLCTRYQRLIARGKPGQVATTAIARELAAFMWAIFRTVEVGA

SEQ ID NO: 143980 - protein, 342 aa, unidentified
MQVTTIGLDIAKNVFQVHGIDAAEKVVVRKQLRRSQVLEFFKALPPCLIGMEACATAHYWARELTKLGHKVRLMPARDVKAYVKRNKNDAADAEAICEAVRRPTMRFVQVKSTEQQSQLMLHRTRDLLMRQRTQVINALRAHMAELGMMAAQGNAGLRELLAIIAGAADERLPAEAHASLIVLAAELQAMRTLIASIEKRIIAQHRSDEASKRLRSIPGIGLVGATAIVATITDPKAFRSGRDMAAWIGLVPRQDSTGGKQKLGPISKQGDRYLRRILVVGAHAVLKLARQKPEKYPWLTQLLARKPFKVVAVALANKMARIAWALLVKGGPYRARALVAAA

SEQ ID NO: 143981 - protein, 326 aa, unidentified
MDKLYCGIDIHKETFVGCIMDMNGTVLREHGFPANKDALERFISGIPNSQIKIAIEACGIWRGAYKILSELGYDVKLASPKKTHDIACNKKTDKVDARTLADLLRTNYLPEVYIPDDDILELRDLARHKSNLTRLRVKVQVKIKGYLLRNDIKYPKDIWTEEALAKLAEKDQNIRNLINVYWSLKAEEKEVMRRIRNIAGNMKLANLLMSMTGIAEYSALLILAEIGDIKRFKTPKELVSYAGLCPGIYRSGDMERNVRNQAVNKWLKWIIYECSGRATMLDPRFQGYYYKIKQRKGFKTARRAVARKMLTIIWHILTKEEPYKAS

SEQ ID NO: 143982 - protein, 417 aa, unidentified
MESTAQTTLPDVPPNGVTCGIDWARDDHAVSIVDARGREVRRATVEHNAAGMRELLDLLSRTGAREVAIERPDGPVVDNLLQAGITVVVISPNQLKNLRGRYGSAGNKDDRFDAFVLADTLRTDRTRLRPLLPDTPATATLRRTCRARKDLVGHRVALANQLRAHLRVVFPGVVGLFAEIDSPISLAFLTRFDCQDRADWLSVKRLAAWLAAASYCGRVDPAVLHGRLTRAPRGAAGDEGAANAHVTRALATALTSVATQIRTLDAQIAEQLALHADAHIFTSLPRSGTVRAARLLAEIGDCRARFPTPESLACLAGVAPSTRQSGKVKHVGFRWAADKQLRDAVCDFAGDSRRANPWAADLYNRAIARGHDHPHAVRILARAWLYVIWHCWQDNTTYDPDQHQALQRLIHLKTAAA

SEQ ID NO: 143983 - protein, 412 aa, unidentified
MDVVHEACAGLDVHKRTVVACVLRSGPGGTVVQQVETFGTMTRDLEALAAWLAAEGCTDVAMEATGAYWKPVSNVLEASEGFTLLVANAEHLRAVPGRKTDVKDAAWLAELLRHGLLRASFIPDRQQRERRELTRYRTALIRERAAEVNRLQQTLEAANIKLAAVLTDVTGVSGQRILAALTEGKTDPEQLADLAHWRLQKKRDALEQAVVGKLEGALRFVVQRQLEHLRDLDRLIEQCDAEVAERLRPFAAELARLRTIPGLGPRTAEVILAEVGPDLARFATAGHLAAWAGMCPGNRASGGKRYPARARKGSPWLRAALAEAAWAASHCKQGYLPAQFRRLAARRGKKRAIVAVGHSILVIVYHLLTRGTTFEDLGGLYFDERHPDRVRAAAVRRIEALGYQVQLTPKAS

SEQ ID NO: 143984 - protein, 402 aa, unidentified
MTYDYVIGMDVGKYFHHACVLDIDGTQVLSKRINQNEQSLRALFSALSAYDHKVLVVVDQPNNIGRLTVAVAQDIGIDVRYLPGLAMRQLSRIHAGNAKTDIRDAYIIAHAAKNLPESLRSVDRVEEAFLQLKVLNGIDEDLARSYTRLINQIRSALVGCYPQFEQALRGQIIHRKWVLHLLARYGGPTKIKRLGKAKAAAFARRYKARNPEPVLDAIFAAISEQTVTIAGAHYAEMGVAMSAKDALLKLEHRQQIEKEVIELINDIPHTQFLLSMPGIGPKTAAQILMTAGDMSDFPSAGHLASYAGLSPRTNQSGTSIMSNSLNRAGNKKLKNALWQSSFASIRFHERSRQFYERKRREGKRHNAAVVALARRRLNVLYAMMRNHEHYHDPAPSQEDLAA

SEQ ID NO: 143985 - protein, 467 aa, unidentified
MKNYDYNLFVGIDVSKGKADAAILAAPELRSVKPRFLRKKLSFKFIKSDVVEFLNTVRKYSSDPHCLHTYFALEVTGIYSTNIYSFIKQNCNSDEEIHQLNTDFVNKWRESHNISKSDPLDAQTISTIIGTDDDVRYVSDSVFENKNGYQDLKALVHRHYQIKKLYSQETNRLIALCDCYFPELQYVFEPKSAAFLAVLSQYPTSHDIINASKNEVFSLVYEASKHRCNMDKIDKLFNYAQDTLVPHVSDYIRCVIFNTVESIFNIRAQLKLIEKDIRKLAATFNVYSLLMTITGCGPLTAAVIIAETGDIFRFKNADHYVSYSGSSPRNKRSGKSVEIMGKISKKGSKYLRHALYMIAEFARRHNPVLKHLFERVKNGNKKRHKLAVIVVANRIARYIYSIMKNESSFVIMHENIMRLPEETRNTFFNSISLDFPKNTRKQIYQYSDINGEIHRFVYKNEATELIA

SEQ ID NO: 143986 - protein, 358 aa, unidentified
MKSESTKLRDFSGQNIYVGMDVHHKSWKVHIYSDEFELKSLSQEPDVNRLYNYLDSHYKNANYHLAYEAGFSGFWIQRAFAAKGINCKVVHPADVPTSNLEQLRKSDAVDSKKIAKGLRSGDLNFIHVPDIQLEMDRQLMRSRGLLIKDSTRIKNRIKSILKLQGIAIPAQYKEGTWSKVFIKWLGEINFGSVSGKMTMQTHINELLFLEEQKKQVDIGIKELSKTVRYRSNLKLLQSIPSIGLLTGMILLTEIGDMARFSRLDELCSYCGIVPNCHSSGENERIGRLTRRGNSIIKRVLIECAWVAVKKDPALLLYYKEQIVKMKGQKAIIKVVRKLLSRIRYVLMNKQEYVLGVIA

SEQ ID NO: 143987 - protein, 319 aa, unidentified
MSAQTVIGIDVSRDWLDCFCLPEKQRFRFQNSPDGHARLLEILQNMPDGLKIGFEATGGQEWALWRVLISMGINAVQLPPAQIKAFALSMGKRAKTDQIDAELIARFMAFRPEAGRTLPDVKLQFLRALTVRRAQMVEARKRLSAQISARRKQGVSAELEDMDSSLKAFLESQISELEQRIESVIAEAEELSAKAELLRSIPGIGPVSVSMLLAEMPELGRMTATEAAAMAGLAPMAHDSGAMRGKRVISGGRRSLRHVLFQAGLAAASHNPVLKAVAKRMKQRGKPHKLVIVAIARRLITIANAVLKTGLPWRISSAA

SEQ ID NO: 143988 - protein, 362 aa, unidentified
MKQRLASAPVSSATTYARQVIGIDLGDRWSRYCVLDAAGTVVEEDRVRTRPEALAAKFGELPATRIVIEVGAHSPWVSRLLQAQGHDVVVANPRKVRLIYESDRKNDRLDARMLGRLGRVDVSLLAPVQHRSCEVQADLALVRSRDALVAARTQLINAVREMVKSMGGRLPRSTTAAFAGKVKLLIPAELKSALEPLVRSIHSLSEQIRRYDERVEQLADKKYPETRLLRQVKGVVPLIALTYVLTIEDPTRFQRSRQMGSFLGLRPRQCESGNSAPQLGISKCGNNHLRWLLVQAAHYILSRLAPDSRLRRWGLQLASRGGKNGKRRAVVAVARKLAVLLHRLWVTGDVYEPLYGLTAEAA

SEQ ID NO: 143989 - protein, 596 aa, unidentified
MKAKNKKSRLTAIKEDPTEVDGEKKSVAAPLNTFADVDKDAVIGPAMLSELSTTVLYKLLQLKKVPGRTKLRKADTRAKALTGMVTVGDLNALGIFVPKDATMPPRVDDLHVDVPDFIREHHEMYEKFKPGTGKRIDESVGGIDVHEDNLTYAIANPTGIVMADFVGNEANGIKHLAHVFRENGVSCIAMESTAEYWLKLYWLLHAEGIHVLVANPKQTKETQGQKTDLRDAKRIAIAFRDGRLKPSVLCTPEQFQLRKLSRDMTNRKQQATKEINALKIMFHMFDAPEWIRKLNTSDRGCRILSVASSLSNHDEILSMLSKEFARGKGMIEDGKILNAMARELHEFIVQLAGIPGALTRFQQHFDQYMHFREMARDLLFQILQIVEKDKTFIRNLELLLTCPSIDVDTAIPFLVEIIDVRFFWHPNALVRWVGLGPRVNQSGFNKRNNGHIYKGGNKGARRSLWLAAKVDHAHYKKGGHPIGEFIAQLRSKNKAYKVSVTAGARKLTNVIYHVLIMQKPFQEVYTQLESAQLAKNRERKKEALQKLLKEVSMVDILEALSKALPRRCERFLEAEEKVARKVHAMLGTRLEFAAFG

SEQ ID NO: 143990 - protein, 338 aa, unidentified
MNYVGIDHHRQYSHMTVMDQMGQVLRSGRVPSLQDEIGKFLEGFEAVEAVIETGRSSYTMVDVLEEMGVTVKIAHPNEVKAIARAKIKTDKRDSEVLAHLLRMNMVPEVYRRSVENRQAQRVLRQRAFYVRAMTALKNRVYAFLSQQREEVREEVARETNIFSERGQKVLLGLKLVPGEKRLLDALLKTYRHLEKRTKESATFVEKLYEENREAQLIRTIPGFGKYLSVLVAVEIADLSRFADAAHLHAYAGVIPSVHSSGDNTYYGKIIRAGNRWLRWAAVEAVWPAIRADFDLRCFYERLARRKGANKAKVAAARRLLTIVYKVWKEQRNYIPYRR

SEQ ID NO: 143991 - protein, 355 aa, unidentified
MNDTKFIGLDVHKTSVSAAVLDQDGKLVMQSVFATHAAAILSFIHGLRGTLRVTFEEGTHSTWLYDLLHSQVAEVLVCNPRKNALLKSGNKSDQIDARKLADLLRGGMLSAVYHGQTSTLTVKELGRTYTTLTQDTTRVMGRLKALYRSQAIATEGKKLYTRRRREPWLALLTQAGQRYRAERMFEQLDALQGLRRQARRDLMIECRKHTATRLLTSVPFLGPIRAALLLARVQTPFRFRGKRQFWSYCGLALETRSSADYNFVAGELRRSKKPVLIRGLNQNHNHDLKNIFKAAATTASAFPGPFREFYENLLGKGMKPEMARLTLARKIAAISLILWKKGERFDPEQLKPQAA

SEQ ID NO: 143992 - protein, 328 aa, unidentified
MNFLGIDVAKEKLDCSLLRSNLPNQVLHKTVANTPDGMTALLTWAMKKAHCKVNELYAILEATGSYHEIAADSLFNAQCSLSVINPAYVKNYARSLGIKTKTDRVDANILARYGREREADLIPWLPPPPQYAHLDALIRRKQAIETDLQRELNRLEKQETGRGNDKTIASIKRMIAHLKQELEQLDMDIEQHIQSHSNLEHNRGLLQSIIGIGEVMSTVLLPVFQTKRFKNAPQVAAYLGVIPIATESGSSVKKPSRLSKTGQASIRAKLYFAAITASRHNPDVKALYERLLNKGKSKMCAIGAAMRKLIHICFGVLKHQTPFCPQTA

SEQ ID NO: 143993 - protein, 338 aa, unidentified
MTIGIDLAKNIFAVHGVDQNGKAVLIKPKVARDQLAALIAQLAPCLIGLEACSGAHHWARLFRGYGHSVKLMDPKRVTPFRLTGKRGKNDAADAAAICEAVARPNMRFVPIKEEHQQVILTLHRTRQGFVEERTATYNRMRGLMSEFGIVLPQKVACLRRSIGEHLEDLPGYANQCIGDLLSHADQLDGRIAEYDKLIAQAARDDARSKRLMQRPGIGPVTASALLASIGNGNDFKNGRQVAAWIGLVPGQYSSGGKARLGRITKAGDGYLRSLLVMGARAILSGLGDKQDGFSRWARSLVERRGYWKAVVAIAAKNATLAWAVLKYGEDFRLNASAV

SEQ ID NO: 143994 - protein, 306 aa, unidentified
MDKDGNIRREHIFPSSKKAVEKFLCNIPNSEITIAIEACGMWRGIHKILTEIGYEVKLANPKKTHDIAGSKKMDEIDAKTLADLLRTHYLPEVWIPDEQTLKFRDLTRHKSNLTRLRIQVQGKIRGYLLRKGAKYSKLSKEETLTKLAEEDPDIKNLVHVYQCLKQEEKDVMRRIKRISQNMKQTTMLMSMPGIAEFSSLMILAEIGDIKRFPAPKELVSYAGLCSGIYQTGTTERTVHNTAVNKWLKWIIYECSGRALMLDPRFQNYYYKIKEKKGFKTARRVTARKMLTIIWYMLTNEEPYHAS

SEQ ID NO: 143995 - protein, 370 aa, unidentified
MSQSSTLFIGMDVHKDSIAVAYVAQDHGAEVMSLGTIGTRQCDIDQLIRKMQSKATHLIFVYEAGPCGYWLYRYLTKQGYDCWVVAPSLIPKKAGDRVKTDRRDAVQLARLARSGDLTSVYVPTVEDEAIRDLSRAREDAIRDLKAAKFRLKAFLLRHDIRDTGRAAWGPAHLRWLSEVVCPTPAQHIVFQEYVRTVTEHTERLQRLEQELQEHVHAWRLHPVVEALQALRGVQFTVAVTMVAEIGDLTRFDTPRELMKFLGLIPSEYSSGERRQQGAITKAGNTHARRALVEGAWAYRYPAKVSRHLQLRLEQHPKMIQDISWKAQVRLCKRYRQLVARGKHANIVTVAIARELAGFMWAIAREVPVTP

SEQ ID NO: 143996 - protein, 409 aa, unidentified
MRVIGLDVHRNFAQVAILDNGVVKDHGRFAMDREAVLAFATKTLTPDDDVVLEATGNTAVIVRLLTPFVRRVAIANPLQVRAIAWAKVKTDKIDAATLARLHAAQFLPEVWMPSEKVELQRRLVAERTQLVSQMTRLKNRIQSILHANLMPRETGRIYGAKGRARLEALALPADQMRAALRHHDELGRLATELAAIDKSIAQQALEDENVRRLMTIGGVDLVVAFSVLAAIGDISRFSSPQKLVSYLGLNPSVHQSGDHPAFHGHITHQGRGHARGMLVEAAWSLAPSPGPLSAFFHRISMKRGKQVAAVATARKLAVLVWHMLTKQQDYAWTRPALLQFKLRRLELSAGHPSRRGGKTPGPARDYSLKTVRDQERAWLEQAETEYRRFVAGWKERRPARGATPAAKGT

SEQ ID NO: 143997 - protein, 408 aa, unidentified
MRLFAGDDWSETHHDIELMDASGRRLARARLPEGMAGMSRLHALIGEQIGDVADEDVEVVAGIETGRGPWVGALVAAGYTVLAVNPLQAARYRERLAVSGAKSDAADAHMLADMARTDAHQLRPVAGNSALAEAIKVVTRAHKTLIWDRTRHIQRLRHALRDYFPAALEAFGDLDAPETLELLAKAPDPATAARLTTAQITAALKRAGRRGDLAAKATGIRASLRTGHLGQPEAVTAAYAASVRASIAMLTTACEQISVLQEQVEEHFGQHPAAEIVRSQPGLGPILGARVLAEFGDDPARYLTAKARKNYAATSPITRASGKKKVVAARFVHNDRLIDALLTQAATAVRVSPGARAYYGKQRARGLGYNAALRQVANRLVGVLHGCLKTGTLYDEATAWPHHQELAA

SEQ ID NO: 143998 - protein, 316 aa, unidentified
MPAPAFVGIDVSKACLAVRVSPAGSAFTVASDPDGLAELVARLAALAPAAVVLEATGGLEAAAVAALAGAGLPVCAVNPRQARDFAKGFGLLAKADAVDAAALALFAEKVRPRPRPLPDEQAQAFAALLVRRRQLLEMRVAEQNRLPTARTAAVRRGIQKHIDWLARQLGGLEAELAAAVRASPVWRAKEDLLRGVPGVGPTVARTLLAELPELGTLSGKQVAALAGLAPFARDSGTRRGQRRVGGGRAGVRSALYMASLSAARYNPALRAFYRRLRAAGKLAKVALVAVARKLLVLLNALLRDGRPWNPELAKTA

SEQ ID NO: 143999 - protein, 337 aa, unidentified
MDTIPVRCGLDIAKHIFALHVVNASGKTIIRKNLKRKKVLEYFAQLPVCVVGIESCGGSHYWARELKKLGHKPQLISARYVIPYRRKGKNDANDAEAICEAIGRPSMQFVAVKSEEQQTILMMHRVRGQSIATRTSLVNQIHGHLQEFGIVVSKGRHKLKRELAEILSNDALPALLHEMLHDLLAAILREEERIESLDKNIANWVSGNAIASKLIELDGIGTLTASAVVATAGNAAVFKNGRQFAAWLGLVPKQYSSGGKNKLGGITKRGDTYLRMLLIHGARTVLLMSTKGRGKHNQWIESLRKRKPDNVVAVAYAAKQARMLWAIMAGKSAPSLT

SEQ ID NO: 144000 - protein, 369 aa, unidentified
MGKYSEAFVAFDVAKKKHAVAIAEGGRAGEVRFLGDVENSWLPIERTIKRLADRYERLHVCFEAGPTGYGLYRQIQALGHDCMVVAPALSPKRAGERIKTNRRDAVTLARLHRAGELTGVWAPDAAHEAVRDLVRAREAAADDLRRKRQQLLSFLLRHSRIYSGGGHWTLAHRRWLANQKFEHAAQQIVFQEGIDAIEDALQRLRRLEKQLTLIVPEWSMAPVVEAYQAMRGASFLVAVTFAAEIGDVRRFDTPRQLMSFLGLVPAESSTGDTIRRKGLTVAGNRRARRALVEAAWTYRYPARVSNTLRARLEGLPKLVRDIAWKAQVRLCARYRRLSARGKKLPIVVAAIAREMAAFLWAIGREVAPA

SEQ ID NO: 144001 - protein, 342 aa, unidentified
MKKATIIGIDLAKNVFHLHGAAADGSVLFRKKLTRPQLLQFMAEQPRCIVAMEACGGSHFWAREMTRIGHEARLIAPIYVKPFVKRQKNDAADAEAIVEAALRPTMRFVTVKSEDQQARAVLFRAREQVVNQRTEMVNALRAHLGEFGHIAPQGINNLRRLEEIIEDADTSLPDLARDICRDMLTQISQFSARLAAMAKQIDALSKHGAITRRLRTMPGVGPICAMAVETFAPHMESFRRGRDFAAWLGLVPRQNSTGGKQRLGRTSKMGQRDIRRLLIIGAMAIVRWALRKGAVAGSWLARMLAEKRRAVVAIALANKMARGIWAMMTKQEEYRGPAMIAA

SEQ ID NO: 144002 - protein, 428 aa, unidentified
MTQSSSTTSPTMWVAIDIAKAHNEVLIESPQGRRRHFRVANTLEDFAKFAALLSSSGYRCRIAFEATGDYHRPLAYFLGAQGFALSLVSSIAVARTRDALYNSWDKNDPKDAQVILHLLKTGTTQVYYDPLEHHYHDLQELANTYQQISLGKVRLHHSIVTHYLPLYFPEAERYLHSTRAEWFTQLLLLAPCPAVVLKWSREEFITLARRLNAHKNDKTRWLADFYEAARSSIGLPVAENSEAIRMFRVVLNEYLHLCRLRREMEEQVVACLSNHADFRRLQTIPGIGPILALIILAEAGNLRRFSHDQKFLKYCGLDLSTEQSGQFRGTTKLSKRGNARLRYAFWMAGAVAVRAKQNSFCQKFHDYIRRDPLNPDLRRKAYTAVAAKMARVVYAVVKTGTDYRRFPEATVPGGRIPSLRAVEAISTS

SEQ ID NO: 144003 - protein, 454 aa, unidentified
MAQRNAQVIPKPGKSRAAALTITHPNAAGIDIGSASHFVAVPPDRDDEPVREFPSFTVDLNALADWLLACRVDTVAMESTGVYWIPLFELLESRGFTVLLVNARHVKNVSGRKSDVLDCQWLQQLMTYGLLRGAFRPAEQVCMLRALYRQRGMLLRSQGRHVQHMQKALTQMNIQLTNVLSDVVGESGQKILRAIVAGERDGQALGAMKNVRVRASVEEIAKSLQGNWRAEHLFALKQALGAFDFVGTQLAECDGEIELQLQRLQVHDGEPAKGKKRGRARNAPKFDLRTQLFQMCGVDLTRIDGVDVTTALAVVSEVGTDMSRFPTIKHFTSWLGLCPGTKITGGKVMSGKTKRVVNRAAQALRLAAAALRSSKSALGAYFRRMCSRMDKPKAVTAAAHKLARLIYTMLTKGEEYTDQGQDYYEERYRERVLRALAQRAAKLGMQMVPIAQPA

SEQ ID NO: 144004 - protein, 343 aa, unidentified
MQTVTTIGLDIAKSIFQVHAVDAEGNVVVRRKLKRRYVVAFFQKLPPCLVGIEACASSHHWARELQALGHTVRLMPPAYVKPYVKRHKNDAADAEAICEAVSRANMRFVATKTPEQQSCLMLHRTRHLFIRQQTAVINAIRAHFAEFGIIAPVGRNGVEALLHIAADVSDNRIPEIARACLVALGAQLRTLKAQILEFDRLIMTWHRSSEASKRLDEIPGVGPALATALVASVGDPRAFRSGRHFSAWIGLVPKQNSSGGKEKLGNISKRGDRYLRSMFTAGALAVIRYAKLHGTKHRPWLTALLARRPTKVAAIALANKIARMAWAMMAKGERYKEPIALVA

SEQ ID NO: 144005 - protein, 459 aa, unidentified
MQHYYLGIDVSKGYADFVILNNKKRPVEENFQLDDTFEGHCCLYERLLRFFDDHPDSTIYAAVESTGGYEDNWFNALIKFQGTLNLKTARLNPLGVNANSKADLKRNVTDKISAQNVAEYMIAHPEKISYQQQDHLASLRKQWGFIRMLTKQSTQLLNQLESLIYTANPELLVYCKDGTPGWVLRLLIHYPTSSSLSKAKIIKVARIPYISPDRAKELVGNAKKSVASATDKVTGKLIIATVNQILHLKQVIKAQTKLMAQECSVPEVDLLKSFIGIKDFSAIGLMLEIQTVERFLSVKKLASFFGLHPVYKVSGDGIGGFRMSKRGRKEPRQILFMVTLTAIQSNPLIRGIYQEHIQKGMEKMAAIGLCMHKTLRIIYGMLKHNSVFDPEIDRRNREKMVQCNRSVNKDKNRRYQAFDSNAPISRRQHGKREERKQSHSDNITNNGIIAPAPLSTYQI

SEQ ID NO: 144006 - protein, 378 aa, unidentified
MCALPTDPPETINPDGSTTSHLYYRILKMRYHQSTTSFNCGIDLHARSMYVCVVDAKGNVVLHQNIRDNDFEFFLKKIQPFRHDLTITAECMFAWYWLADACVREKLPFVLAHALYLRAIHGGKNKNDRIDSEKLARLLAAHLIPVAYVYPADKRPVRALLRQRLTYVWRRSELLMRVHSMQQAEGHEPVPRGARNRDPWEARLIERYPNAHHQVALKTDLATIRHYDRMILDLEGQLVRTTRRIASRDFALLKTVPGIGQALALTILYEVEDIHRFKTVQRFSSYCRLVKGTVASGGKIKGLRGAKLGNPYLRWAIGEAAVLGRQHQPRLAAWHERLCQEKGKFKANAIVANQLGRAIYYMLKNGTAFDVEQLVGGQ

SEQ ID NO: 144007 - protein, 338 aa, unidentified
MKLYAGIDLHSNNSMVTVIDEQDRVLFQKRLPNELERILFALASFKQWLVGVVVESTYNWYWLGDGLMQAGYSVHLAHPAALVQYQGLKYSADEHDARWLAHLLRLGILHEGYIYPREARAVRDLMRRRMQLVQTRSAQVICMQTQFTRSTAKSPSSDALKRMLPDEIEGLLEEPNVASGVRANLEVVRTLNGEIARLEREIIEQVKLAAQYEPLLSIAGIGRILALAIMLETGAIERFAKVGNFSSYARCVDSKRLSNDKKKGEGNSKCGNAYLAWAFVEAAHFAVRYNARIRRFYERKAAKTNKIVAIKAVAHKLARAAYHVMRERVPFDEARAFA

SEQ ID NO: 144008 - protein, 387 aa, unidentified
MQEKERRSAKQALQDLKMEIRSSQDTLLIAVDVGKIRHCACFVSSSGKVLRRRFYFTNTIDGFNQLMRQSKFYQRKEELPHTLFGMEPSGYYWIHLYEHLVNCRKRVVTVSPLAVNRNRETINVSKDKSDPKDAYNIADLMRQGKFYFPIYRDKEIRELKRFTKIYYRLISQRSSLRCRLRGAVGYSFPELEHYFTDILAKSMIIILKNCPFPSEIRKMGRSRFVSLLAKKNPRFSKKRIEEIYELATSSVGITGEERSALFELKFLLNELEGIKRNLDEVNAEVQNIVSGRDDYSLLISIPGVGPVTASSIIAEIGDITNFSSGKQLVKLSGLDLYGSESGISIHSLRHITKRGRRTLRTVLYQAAIACIRLNKHLKACYLKLLAN

SEQ ID NO: 144009 - protein, 468 aa, unidentified
MDLILGIDLACRAAHQASLARPDGTFVWTGRKFVTRPAELEKLWKQIGLGEHDTLRVVMEPTRNAWAPVASWFRYRGARISMVPTTQSADLRAYYSKHTKNDQLDSKLLARLPLLHPEGLREHTGDGPAEPLRRVVKIRASIVKRRTAIFQRLDAQLELLGPAWYDALGSNYGKAALALLARYADPHSLTRLGHARLTRFLIRHSRGAWREQHATMLLTAAQESLQLWGSDADARIDFAELAADIATEAEQAQMLTEQIDDLDERAANLYAEADPRGIIASAPGVGPVTCAVIAGRIGDPHRFHSLAAIRAYSGLVPKVSQSGQAEQRHGLTKAGDPLLREALFTAADQARKTDPQLAAKYKRLMTTERHHDSALCHIATVLLTRIARCWRTREHYVLRDTDGRPITAEQGRHLVRIHHAVDKRTRINAASKRYSQRQKGRTGREQQESPSAPIHRPVHPSIKPTEVA

SEQ ID NO: 144010 - protein, 330 aa, unidentified
MGIDVSKRTLDLAVLQDGGKPVCEFHIENESKALRKLLTVLSQEWGIKENQLVVCMEHTGIYNAVALGVFWKKKIRVCVERAMHIKYSQGLTRGKSDKLDARRIGHFAYKNRESLTFWKPQRDVIERMKALLTLRSRLIVVRTQLMVPLSEVVGFMRPDILKDLEDKSAHSLRGIEKDLEQVEKELRRLTTHDPLVKTQMEQITSIKGVGPITAMNVILTTGEFTRITEAKKFACYAGVAPFEHTSGSSIRGRSRVSSLANSTMKKLLHLAAVSAITHNKELKAYYQRKLAEGKNKMSVINAVRNKLITRIFSCVKNNKLYQEDIQHALA

SEQ ID NO: 144011 - protein, 386 aa, unidentified
MRPTGNMALSTAALDYDSTMIGALELSSKKWVFAVQLPGVKKHSRHVVEPNGPALAELIERLKSRSAAAGRVIARVIITHEAGRDGFWLARFLERRGVEVHVMQSSSLPVDRRARRATTDVIDVEMLLRTLMAWLRGEPRVCSMVPVPSEADEEARRAHREREDLIGARRSLLNKIDGILATLGIEGYRALRRDRRVQLADLRQPDGAPLPLAALARIERLLDRLELAMTQIKAVEKTRDAVVVKPAPQNDNERMIRNLSGVRGVGVESATVLVREAFCREFANRRSLGAYAGLAGTPFASGGMQREQGISKDGNHRLRALVVELAWFWLRYQPDSALTKWFRERVSVAIGRVAKIMIVALARKLLIALWCFAKDGVIPEGAAMKA

SEQ ID NO: 144012 - protein, 343 aa, unidentified
MKLHVLGIDLGKTVFHLVGLDSTGKVVIRKKCSRRQLLAFTANLQVQLIGMESCSGAHFLGRALREQGHEVRLMPAQYVKPYVQTNKSDFLDAEAIAEAVQRPRMRFVPIKSEEQLDLQALHRVRERWVMRRTAVVNQIRSLLLERGLTLPKGRSHVDALLPRILEDAQLRLSGCFRVLLAQLKIELEQSTARIEQMDGVIQKTAKENEDCQRLTEIPGVGPVTATALIAAVGNASAFGKGRNLAAWMGIVPGEYSTGGKQKLLGISKRGNKYLRTLFIQGARSVVQQRHKQAPGLSSWLAQLLARAHQNVVIVALANKLVRMAWAVLCKNESYRAPIFAAAT

SEQ ID NO: 144013 - protein, 356 aa, unidentified
MTISTKYIGLDVHKESISIAVRNAAGKIVMESLIETKASMILQFIDGLRGDLHVTFEEGTSAAWLYDLLKPHVTRVVVCDPRKNKSMREGNQSDKIDARRLAELLRLNHLTPVYHGEHGLRTLKELVRSYLTVTKDLARVMTRLKAIYRSWAIPCSGKQVYARCHRAEWLGKITEPGVRRRAEFYYQQLDALRMLRQDARRDLLAESKKHKAWKRLCQIPAIGPIRAAVLLGILQTPHRFRTKRQLWNYGGLAIEMHSSADYRSVDGELQRSRKNVLVRGLNRNCNHDLKNLFKGAAAVASSKPGPFEKFYAALVAKGMKPEMARLTLARKIATIVLIVWKKGVCFDAQHLKPQTA

SEQ ID NO: 144014 - protein, 320 aa, unidentified
MTISNSQVVVGVDVAKDEIVVYRADQQQTQVVTNERSALKQWLKKLPANSAIALEATNTYHLDTTEMAHEMGHDVYVIDGSRLNRYRDGIGIRAKTDALDAVLLARYLSKESDRLRIWNPPPKAYTQLKSVLRRRAELVQHRVALKQSWKDEPLLKEALANYLANIEQTEKDIQSLLRSIISEAGMDAQVKRCQAVEGVGVLTATAAVTAFMRGEFSDSDGYVAFLGMDPRVRQSGKKDQRRCLSKRGDSEFRRLFHNSAMAASRSATWKPYYQSYLARGLKGTEALVILARKLARVLFALMKNQSEYKPISMFGGSPQT

SEQ ID NO: 144015 - protein, 340 aa, unidentified
MKKVSTIGLDLAKNVFQAHGADASGAVIFRKKLRRAQVLEFFATQPACTVAMEACGGSHFWGREIGNYGHRVRLIPPAYVKPFVKRQKNDAADAEAICEAAQRPTMRFVAVKSEAAQGAAVVFRTRDMLVRQRTQIINALRGHLAEFGLIVAQGPAHVAKLIMAVQDPKQPLPEAARPILCVLVDMLNLLDQRIKLLDIAIARRAKEDEVARRLMSIPGVGPVIATAVAALAPPAETFKRGRDFAAWLGLTPLQHSTGGKQSLGATSKMGERTLRRLLIIGASSVVRWAARKGAPAGSWLASMIVRKPAMLVRVALANKMARVIWALMAKGGTYRAPVVA

SEQ ID NO: 144016 - protein, 502 aa, unidentified
MILPPEDACRNKLSRKSRAKAMARGQGKKKQKPQPASNKSQKPEDAPKASSRGGLPVAASASLDQLEQVNRNAAGIDLGADVHFVAVPPGRDPETHVRCFSTFTADLVALADWLEQCGIETVAMESTGIYWIPLYDLLEQRGFEVLLINPSDFKKFRRKTDVSDCVWLQTLHTFGLLQGSFRPHERIVTLRSYLRHRDNLVKCATDEVRRMQKALEQMNVKLTEVLSDIMGVTGLAIIRAILAGERDPQRLAQLRDERCKNNVATIALALQGNWREEHLFALRQGLELYEVYLQKLAQLDERIGAYLETFEDRSDGQELPAIPRNRALEPKLNLRDLMHKLTGVDLTEVDGIGGQAALQIISEIGTDMSKWQTDKHFVSWLCLCPELQLTGGSRKSKRSRTQPSKNRAAAVFRMGAQSLLKADCALGAFGRRIRAKKGGAQAVTAVARKLAIIVYHMLKEGRPYKDQGAAYYEARYRERLVEGLRRRAKQLGLDVVPLATAP

SEQ ID NO: 144017 - protein, 355 aa, unidentified
MLARSQAGFFIQLEQLLGPAASRKRAEPVDKPETMNTTNQTDTVQAPVYCGIDIAKSQFEADLGGKTRQFDNTSSGIEKFLGVLPANSHLVMEATGHYHLQLVDLAHQAGIALSVVNPAWINNFRRSGGKRAKTDPIDAPTITAYARAFKPAPDVALPKCLLALREMYAVRETLVGMRVALQNQQDSITDKKLCTLIRAQIKNLLKKEEQINERMEETVGSDPDLQGKSEVLRRNKGVGPQCVTTLLCELPELGTMSRKTIAALAGVAPYNNDSGKFQGKRRIAGGRKKVRKALYMASLSASRYDPTFVRIKKKMKAEGKAGKVILIAIARRLVVILNAQIRDHIEELNLQKLVA

SEQ ID NO: 144018 - protein, 403 aa, unidentified
MKVREWIWVGIDVGKAHHHACAVDETGKVVFSKRLVNGQAEIEALIARAGKAAGRVRWAVDMTSGSAGLLLAVLRHAGAELVYVPGRLVNRMAGAFAGEAKSDAKDAFTIAETARLRHDLTPITEPDVLITELRVLTARREDLMGDWVRGVNRLRELLASIFPALEAAFDYSTRSALVLLTGFQTPDGLRVASAGRVAEHLRTGGAWPKGIPAMVDKALAAAAAQTVALPAEAAVAPLIARLAAQLLDLDREIKDLDKQITGTFGEHPHAARITSVHGFGPILGAQLLADTGGDLLAAFGSSARLAAYAGLAPVPRDSGRVRGNLHRPKRYHRGLRRVFYLAALSAIKPDGPSRVFYQRKRAEGKLHTQALIALARRLIDVIWALLRDGREFHSSPPITAKAA

SEQ ID NO: 144019 - protein, 409 aa, unidentified
MEGLIERCAGVDVHQSTMVVTVRVPDGHGGRRVETHTFGAMTVDLLTLRDWLQAFGVTHVAMESTGVYWKPLYYLLEDGFTVLLVNMQHLQQVPGRKSDVRDSEWLAQLLECGLLRGSLVPPAPIRDLRDLTRYRKKQIEDRAQEVNRLHRVLEDAGLKLATVMSDVMGRSGRLMLEALLGGTTDPTVVAGLARGRLRAKIPALRLALQSQFRTHHAFLIGQILAKVDFLEEGIATLTEEVDRQVRPFEPVIERLMTIPGVQRRTAVTLFAETGGDMTRFATAGHLCSWGAMCPGQNESAGKRRSGKTRSGNRFLRGALIESGLAATRAKETALRARYLRVKRHRGHKKAVVAVGHQILEIAYYVMRDATTYQELGPNYFARSDRQRTMRRSIRQLEALGYRVTIEEAA

SEQ ID NO: 144020 - protein, 317 aa, unidentified
MIVAGIDTGKGKLHVCLLPTGERFSVNNDEGGIATLVAHCRAAGVVRAGIEATSIYHRAAAQALREAGIETAELQPRQAHGLAVALLKRAKNDTIDAFVIAKLVELLNGPWKQPPAAQLEALAEALTFIDMLDERLVVLKTQRERFTAKRFLAGLDKAIKALEKQRRGELRRLIACLRKDQMLGERLDLLLSIPGLGERTAASLLIRMPELGSLTREQAATMLGVAPFDDKSAERDGQRHIAGGRARLRKTMFMAAFAAAHHWNADLKAFYARLRASGKAHTAAVIACERKLIILANAVLMRGTPWQDRRGMPCLAT

SEQ ID NO: 144021 - protein, 343 aa, unidentified
MQVVRIGLDLAKYVFEVHGVDNHGKVVVRKRLRRDAVAGFFANLPACLVGMEASNGAHYWARVLTELGHQVRLISPQFVTPYVKSNKNDQNDAEAICEAVGRPSMRFVPPKSTDQLAVQAVHRIRRRLVADRVRLVNQIRGLLSEHGIVIARDIAQLRRGLAVIVGSINDGLSEMLRALMRELQEELSELDTRIAAYDRRIREIFRTSEQCQRLGKIEGVGPVTATALIAAVGDRSCFKNGRQFAAWLGLVPKQRSSGGRARLFGISKRGDRYLRTLMIHGARAALSRATGKQDPRSLWLGKMRQRRHPNVVAVALANKNARIVWAMLTGDAAYEPALSVKAA

SEQ ID NO: 144022 - protein, 390 aa, unidentified
MILVGIDVAKDKHDCCIINSDGEFPEEVFSTLNNREGYETLYKRICSLAVDLAKVKVGLESTGHYSSNLLAFLLDKHLTAYVINPLRVNLFRKGQSLRRTKTDKIDSRNIAHLLMADSSLKPYSLSSYHMEELKSLTRYRGTKVRERTKLKTSIARLVTILFPELEQLVSSIHIHSIYAMLEEFPGSAYIAATHLTRLTALLLKASRERFGRETAIRIRDTARRSIGAVSPAKSMELQHTIAHLQVYDQEIGEIESEIEKIMDDVNSPITSVPGIGMQMGAVILAEIGSFRRFDSPDKILAYAGMSPSTYQSGKLTGSYSRMEKRGSRYLRYALFNVTRYVCHYDPGFTAYLSKKRKEGKHYYVAISHAVKRLMRVLYAMEISGNRYQTA

SEQ ID NO: 144023 - protein, 400 aa, unidentified
MAVAVGIDVAKEFHWAEIKVAGTGAVLASHRVDNSPQAIGDLITEIGAAEAGHGPARVGIDILGGIATLLEAMLAQAGLTIVHIPGLAVNRARRATRGGEHKSDPKDAKVIADQVRTRDDLRVIEPMRELDVELRLLVGRRSELVTDATRRFARIRDLLTSVHPGLESVVDVTTKTGLHLLTRYVTPAEIRRAGQSRVLAWLRRTGHVREAAIDALAGAAVSAAAAQQIAVPGETVAADLIRDLAAEALAAREQIKAIDARIEAVLARHPDAALIRSLPGMGATLTAEFLSATGGITRYADGDALASAAGLAPVLKQSGKVRYLQRATAGDKALKRVFYQSAFIAVGCDPASKAYYARKRAEGKVHHQAVLALARRRVNVLYAILRTRHPYDTTLSRRAA

SEQ ID NO: 144024 - protein, 344 aa, unidentified
MGEVSTIGLDVAKSVFQVHGVDVAGAVVIRKRVSRAKVLEYFGELPPCLVGIEACPSAHHWGRELQALGHTVRLIPPSYVKAYLKRSKNDANDAAAICEAVTRPSMRFVPIKTKEQQTALMLHRTRQLLVRQRTMLSNALRGHLAELGVVSAKGRNGTAELLRIIAGGADSRVSPAVRGILEVLARQYGAIGTEIASIDKSIMALHRGCEASRRLAEIPGIGPVSATALVAEIGDWKTFSSGRCLAAWIGLVPKQHTTGGKDRLGSITKQGNRYLRWLLIVGAMAVIRYARKHGTQKRPWLGRLMERRPTKVAAVALANKIARMAWAIMVRGERYKEPKLLLAA

SEQ ID NO: 144025 - protein, 369 aa, unidentified
MKADKRGKVKGCKMNSIVAGIDLVDRESLATVLSPIGDVADRFSFPMNEEGYTYFASRVPKDARIAFESTIMAYPISRALKMRGYNDVTVAHPKTLAWIVRSKKKNDKADSLKIARLHMAGMLPESHLLDRDQQIARDLLVQRVKLGVEIGRLKNSLIGYLKREGVYDSLPKTGDNFSVKRRHAILSLRFDDKRDLILGTMMDRLEFLEGQCIPLEDSVRENARVSDDVKLLMSITGVDYYLASLLSSFIGDVERFPSDDHLASFFGIIPTSRDSADVKRRGRMTKDGSSIVRWALSIMVDTVMLHNDPIREYYTGVKKRTGSGKLAHVATMRKLTRMLYHMLKTKQHWKWENPLLTERKMAKLESGWR

SEQ ID NO: 144026 - protein, 389 aa, unidentified
MFYLNPYSMRNVCGLDVHKDNVFVCIDKEKGEKIQFKTGILTKDLDALRDTLVANDVTEIAMESTSVYWMPIWRVLENDFKLYLVNPYAIKQLPGRKSDIKDAEWIATCLRKELIRGSYVPDSTIQQLRQYNRRIFDINKQSVYIQNKIDAALQRCNIRIGNYISNVRAKSYCQIVDMLSEGKTSPELLILKVHKRTVNKWGRETILAALEGVVNKTDCSILKQLKEELDMLRKHKIECLVMLREICMENYKEQLLDIQTIPGIGEQGAMQIIAETGVDMKAFITAAMLVGWAGLKPRNDESNGKFKSRSTTHGNKYLRKILIECAWGASRTQGCFFNKFSYHQTMVRKKNRQKVQVAIARKILVVIWNILEKGVVYNDVLEKNKTKDK

SEQ ID NO: 144027 - protein, 347 aa, unidentified
MNFYTRQHKHYCGIDLHAKAMYVCILDQHGTKLFHKNLPTTPDAFLRAIAPYREDLVVGVECIFTWYWLADLCQQEGITFVLGHALYMKAIHGGKAKNDKIDAYKIAVLLRGGMVPQAYVYPAEMRATRDLLRRRCHLVRKRAELLAHIHNTNSQYNLPEIEKRLAYKANREGVADHFPDPSVRKTIEVDVSLINHYDQLLSEVELYITCSAKAHDVQTFARLQSVPGIGQILALVLLYEIQDIARFPRVQDFVSYCRLVKCAKESNGKRLGTSGKKIGNVHLRWAFAEAAVLFIRQSQPGKAYFTTLERKHGKAKALTVLAHKLGRAVYYMLTREQVFDLTRFVTA

SEQ ID NO: 144028 - protein, 352 aa, unidentified
MTVTIVGTPTLARAITGGVDTHADVHVAAALDPIGGLLGVQEFPATSAGYARLLGWLGGFGTVCLVGIEGTGSYGAGLARHIAAAGIRVVEVDRSDRQDRRRRGKSDPLDAISAARAAQSGRAAGMPKGRDGQVEAIRALMVAKRTARSERIQTINQARSLIVTGPEDLRARFARHSADDLVAELASLRPRPGSMIRYHTLLSLRELGRRAGFLDGQLQRLDELIVPLVTARAPGLLALYGVGHDTAAKLLIAAGDHPERLRSEAAWAHLCATAPIPASSGKVTRHRLNPGGDRQANHALYRIVITRMSSHPPTRAYVDRRTTEGLSKKEIIRCLKRYVAREVYRHLRPGAG

SEQ ID NO: 144029 - protein, 371 aa, unidentified
MKEFSKYVGLDVHKETIAVAVAESGGGEVRYFGEIANTPEAVQKVVSQLRKGGAQLSFCYEAGPCGYVIHRQLSDLGWDCQVVAPSLIPKKAGDRVKTDRRDALSLARLHRAGELTAVWVPDGAQEALRDLTRAREDLKHLQRQAKQRLLAFLLRHGKRYDGKSKWTQAHDRWLEGVKFEQATQQIVFQEYVDTVAVLSKRLDALDGHLQSAASACIFWPVIESLMALRGVNLLTATTIVAEIGDLKRFANAPQLMAYLGVVPSEHSSGSKKTRGGITKTGNGHVRRVLVEAAWTYRHPARKTAVLQRRAERAPEVVQEIAWKAQKRLCARYRMLEARGKLKVQACTAIARELAGFIWAIGQVMPQPAAKA

SEQ ID NO: 144030 - protein, 295 aa, unidentified
MAFDVGKRKHAVAIAESGRTGEVRFLGEIENSAATIERVIKRLAGRYDRLHVCFEAGPTGYELYRQIRDLGHDCMVVAPALIPKRPGEHVKTNRRDAITLARLHRAGELTAVWVPDAVHEAVRDLVRARQAAADDLRRKRQQLLSFLLRRGRIYSGGGHWTLAHRRWLAKQAFDHPAQQIVFQEGIDAIEDAVQRRLEQQLAAIVPSWSMAPAVAAYQAIRGASFLVAVTFAAEIGDVRRFDTPRQLMSFLGLVLAESSTGDTVRRKARPAFDAPAGRWSRLPGHTAIPPGSAKP

SEQ ID NO: 144031 - protein, 412 aa, unidentified
MEVVHARCAGMDISKTDAKVCVRIAGAGRRKTAETVTTWGAMTGQILALRDHLAAGKVTCVVMEATGDYWKPFYYLIEDLPGVQVMLVNARHVKNLPGRKTDVADAAWLAQLGAHGLVAGSFVPPAPIRALRELTRTRTAITRERGREAQRLEKLLEDAGIKLSSVASDILGVSGRAMLEALIAGQRDPDVLADLARRRLRARIPELTQALEGRFSEHHGFLARVHLDLIDQHTAAIGELTRRIEQVIGPFRGFRDLICSIPGIATVTADVIVAEIGDDMSRFPTAGHLASWAGTVPGSNESAGKVKSSKTRPGNPYLQGALGTAAMSCGQHPGTYLNAKYRRIATRRGPQKANVAIQHAILVAIWNMGTNGTFYEDPGGDYFTRLNPERARTRAIRQLESLGYAVTLANAS

SEQ ID NO: 144032 - protein, 364 aa, unidentified
MNVTAALPIVGVDLAKSVFQLAIADASWRVVERQRLTRTQFERWFANRAVGLVVMEACGSAHHWARWLSSLGIEVRLLPAPYVRAYVKRNKTDAADAEALLEAARCADILPVRVKSVDEQALQALHRTRSLWMGTRTARINALRGFCREFGIAIAQGARVGLEQIARVLAEPNSAIPDLIRETMKLLVEEIRLLEARVGQLERELTQTARQSAACTTLLSIPGVGLLTATAMVAATSGNVGHFRDARHFAAWFGLTPKEYSSGNTRRIGRISKRGDRYLRMLLTHGARSVLRAATAATQAGRAVDSLRAWALAVQARTNHNKATCALANKLARICYACLRDGSPYGQVKRLEKKIARSAYPIPA

SEQ ID NO: 144033 - protein, 447 aa, unidentified
MQKKNVKMEVINANAAGIDIGSRSHFVAVGQGTADVKEFGVYNEDLQAIAAWLKENEIETVAMESTGTYWQSLFAVLQAQGFEVILCNGKFTKNIKGKKSDVQDCQWIQKLHTMGLLSGSFLPDQSTEQLRTYCRHRGNLLDQAADTTRKMQKYLRLLNLRLDVVVNDITGLTGLKIIDAICKGEINPQKLASLRNGNCKKSEDEIAKALQTNGRNDYLFTLKHEYEMYVNFQSKITECDKEIEKMLNQQINNDENKKQHHIAKKVHKRINKNTPKNMDINLLSYQYFEGVDLMAIEGVSYSTVLTLMSEVGTGIHKFETAKQFASWLRLSPNNKISGGKVLSNKIPKGSNRLKIALRNAANAIGNLKDTALSNFFSRISHRKGRVSAISATARKLAVIIWNMVVKNKPYIPLTEYQFVDQKRKKITAMKRLITKFDITTNDLNLQL

SEQ ID NO: 144034 - protein, 363 aa, unidentified
MVESTAVTVGLDVHARSIRLAAVRADELLEERTLPYDEEQVGRLLRRWPGARCCYEAGPTGFGLYRHLVERGIDCAVVAPGLVPQRPGDRVKTDPRDARKLARLLAGGLLEPIHVPSPELEAVRDLVRAREDARLDRMRDRHRLSKFCLRHGRLLPTSAWTVTRRKWLGEQRFEYAAAQITFDSYLHAIDLVDARIEQLERAIRATAEQGPWRELVARLRCLRGIDTLSALGLVRDISDFDRFNSAEELMAFVGLVPSEHSSGEHRRQGAITKVGNSHVRRLLVEAAWHARRQPRVGYELARRQRGQEPLVLERAWRCQQRLHRRWQRMAGRGKPQQKIVVACARELAGFVWAIATEQPLRNT

SEQ ID NO: 144035 - protein, 312 aa, unidentified
MDVSKGTLDYTWLPDGDQHKQVNNTAAGIKKSIRNIMMLSPEIVVVEVTGGYQAPLVNALHESSIPVKVVNPRQVRDFARSLNRLGKTDKLDALTLAEFGLSRKLQADNPKTPQQILLSAVLRRREQLNEMLIAERNHLEHAPGKYAEQIVSHIKMLNKELYALEKDLAEIISSDKSLLEDNCIIQSIPGIGPVVAGTIIAELPELGNVTRKEAAALVGVAPFNKDSGKFRGRRHIWAGRAKTRKVLYSAMRPCLRYNGVIRGWFDRFRAAGKLYKVAVIACIRKILTVIRAMLISRKSWNPHYFTVIPGSA

SEQ ID NO: 144036 - protein, 391 aa, unidentified
MIFVGIDVAKDKHDCFILNSEGTVLADVFTIANNRIGFETLLSRIQSCSQGESKIKVGLEATGHYSYNLLGFLLDSGLATYVINPLHTNLYRKSLSLRRTKTDRIDARTIAMMLMSDVDLKSYSNTAYHNEELKSLTRYRFDKVKERAKLKSSVARLVNILFPELEKQVSSLHIAVVYALLSNYPGASYIANANTEELAETLCTASKGRYTKSKTAEIKVAAGVSIGSKMPAKSMELKHTIALIRELDKEISEVESAIDKITSQMDSPIFTIPGIGRHMGAMILAEVGDFSNFASADKLLAYAGLSPSTYQSGQLQNCYAHMEKRGSRYLRYALFNAAKYVCLWCPTFSAYLEKKRSEGKHYNVAISHAAKKLVRLIFAMQRSGKAFLADY

SEQ ID NO: 144037 - protein, 395 aa, unidentified
MQVMHPICCGIDVHQKSIVCCILDGPLTSNEPKKYQTTFGTTTKELKAALDWILEHQVTHVFFESTGQYWIPLFNIFSDSDLELVLANPQHIKNVPGRKTDVKDAEWIAQLGRCGLINQSYIPSQEVLQLRYLTRYRLSVKQRLTQIKNHIHVILQRANIKITSYLSDIFSKTGQALLTLFIDGEVINEDNVESCIHGRIKASTKQLIEAMEGKLSTVDRFLIKECMEEYKLQKKISDELNKEINEYILEHFPEEYQLLLTIPGISDNCCATILAEIGPNVDAFKTDKKLASWAGMCPGSNESAGVKKSSHTTQGNKYLKQALVMSVLSVQRAKEETFSLFYQRISSRGSKMKAIIACGHKMLRIIYKILQSHQPYNSQKALGLRQQTNALSLTI

SEQ ID NO: 144038 - protein, 385 aa, unidentified
MLLDHLSDGPTAIRTQFGAIFVSLELSRSTWLVTSLSPGQGEKMSRHSVEADDVAELMKLFADLRRKAEVRTGLSYPIITIQEAGLDGFWLHRVLQREGIESHVVDPASIATPRRRRRAKTDRLDGETLLRALLAYKRGEPRVCAMVVAPSVEEEDRRRPCRERRTLIAERIAHVNRIKGLLFAQGISDYAPLRRDRRARLKALRTGDGRELPSHLKAQISRELDRLELLLTQIEAVEAEQDALLAEGKQPATPDPASMLLALKGMGANFAAVLWSEAFYRQFANRRQVAAYAGLAATPWRSGRIEREQGVSKAGNPRLRTTTIQLAWLWVRHQPQSALAIWFKAHSQRGRKRTIVALARKLLVALWKHVTQGVVIEGAVMKSAA

SEQ ID NO: 144039 - protein, 321 aa, unidentified
MTYVGIDVSKATFVVAYSSAKSSETKTFKNTTKGIRKFIRTISPEENHCVLEATGNYSMLLVYLLSKAGFTVSMENPLKIKNFARVMLSVVKTDEIDARLIALYGERMQPAPFKLRSDSLLLLKQKRTVLRQLKKQLTANRNLEGSLKILPFIDSKCKKVLEKTIKFLEKQIEEMEEELTSLAEIEYKKQMDLLTSIKGIGATLAAALIIATGGFTYFDNAKQLTRYLGLSPTYQQSGTSVNVKGHINRNGDAYLRSQLYIGAMASLRCNTECKACFERLRSNGKPGKVAIVAVANKLIRQAFAVVTQEKIYIDGYKSVKP

SEQ ID NO: 144040 - protein, 317 aa, unidentified
MTTKTYEHNLGVDISKEKIDVSFNADGVVGFTNNQQGFQQLLKRISKESTRVVMEATGGYEKPLAAFLQTYGIDVSIVNPKRVRDYAKALGKLAKTDTIDAHVIRLFAEAVNPQVMPQKSESQQALDALARRREQLVKQRTMEKQHLETATNPEAKRSIKRMIKQLDQEIERIEKQVNDLIDSNPAYQDTVNRLTTVKGIGPVVALTLIADLPELGQLNHKEISALVGVAPFCRDSGTMKGKRTIWGGRASVRAALYMAAVSAISHNPPIKTFYQRLLQNGKAKKAAIVACMRKLLIVVNSMIKNEADWNPNFGKLA

SEQ ID NO: 144041 - protein, 398 aa, unidentified
MLSIGIDVSKGKSTVCGMKPGGEIVYTPFEVQHTREGMSELLSLLRGSGEEVRVVLESTGSYHCPVVAALLENGIFVSVVNSLRMKRFCSQSIRRVKTDQIDAMQIALYGLAYWQELQPTRLPENTYRELQLLARQYYQMTSLLIKAKVDFNALCDQVLPGMQELMSDHAGRHKLSDFVLRYHHTAHILEMGETRFRKDYCKWAEKKGYRNRERMAALIFATAQNGIPVLPNAPSTQIVITEAIRVLHTVEASRDAILTQMQALAKTLPEYSLVREMPCIGDTLAPRLIAEIGDVRRFHSKRALIAYAGIDAPPYQSGKFSANNRHISKRGNRYLRKTGYEVMQSYVMHKPANDPIFTFIEKKRSEGKSGKLAMVAGLNKFLRVYYGKVTELYRSLPQ

SEQ ID NO: 144042 - protein, 339 aa, unidentified
MNNSVIGLDIAKNIFHLFTLLVDGKTLKKKLKRSELLTFFATYPASIIGIEACGSSHHWARELTKLGHEVILLNARFVKNYVVGNKTDFNDAEAIYEAVLRPNKRVVAIKTVAQQDIQLIHNIRKDLVDQRTALVNQTRGLLSERGIVINQGIEQFREQLPLILEDAENGLTDLTRELFAEQYEKIRALDAEIKAQDQRINRLCNSNDLSKRFLEVPGVGPLTATIVAADIGDSGKGYKSSRDYAASLGVVPKQHSSADKQHYLGISKRGNRYIRTLLIHGARAVLKNCTKKTDKLSLWLQALVARRGFNKAAVALANKNARILWAMASNGKDYEALAA

SEQ ID NO: 144043 - protein, 307 aa, unidentified
MTLHPDVIGCDVSKAHLDLFDTGRPLRIGNTVNDITRWLGQLNGRTPFLVLEATGRYDRVLVKALEVHGIGYARVNPARARAFATAAGHLAKTDRIDACMLARLGQSLNPEATLPRDPARVRLEAVHRRRAQLVAVRQKDKQRLSEATADERDSLRRHIAWLDREIGRLEEKTRVLLHNNAVLARQEKLLRSVPGIGPVTAVTLITLLPELGSLPGKSLAALAGLAPLNADSGRFSGKRSIRGGRKPVRDALYMAAVTASRSSSRFKAFADTLGKSGKPFKVRTIAVARKLLTTTNAVIRDEVPFTP

SEQ ID NO: 144044 - protein, 344 aa, unidentified
MTYYTGIDVSLRSVSICVVNDKGKVCLEAKVAAEIDAIVDRLRRFSSDVKSVGFEAGTLTQYLTYGLQAAGFEVICLEARQVSVTLAAMRNKTDRNDARGLAQILRTGWYSRVHVKSLHSHQVRALLASRKAILKKCVDLENELRGLLKVFGIRLPSRVGHGSFDAELRDTVSGDEMLACALVPLLDARTVLYKTYLKLDNAVKGLVRVDPICRRLMSIPGVGPVTALTFKAAVDDPSRFKSSRTVAAHFGLTPRRFQSGELDNPGHISRAGDADVRSALYVAAHSLLTRNAQWSTLKAWGVGLAKIRSHRRAVVAVARKLAVILHRMWIDGSEFRWGPVVASA

SEQ ID NO: 144045 - protein, 345 aa, unidentified
MRNTNVLAIDLAKNSFQVCKTDKYGRVIFNKALSRKELVTLLRKENQSLVAMESCGGAHYWCRKAKALGHEVIAISARRVKAFRQGQKTDATDALAISQAALQPNTKPSRLLSEHEQCLQSCERIREALVENKVALANQTRGLLHEFGYVIAKGDCHLLAKIPDILEDGENQLSGSFRACLQIQYDRLKQIIKDIASVEAQVNQDIKDDVDCQRLQQLEGVGAVNALSLKIVLGNHAHFKSGREAAACLGATPVQHSTGGKERIGSISKHTANKKVRSKLYLGAMSVIRQLENREIRTEKERWIKSLVERRGKKIAAIALVNKTIRTAYAMLKNNQDYKPQVLAM

SEQ ID NO: 144046 - protein, 379 aa, unidentified
MVEGCMATHGEHGVPARTDGPSDETLGVLTPTRPRRRRNPVHEQGQYVGIDLHRRRSVIVRMTPEGEKLEVVRIENDPVALSLEVAKAGANPEVILEATYGWYWAADVLEACGARVHLAHPLGNNWGNRRVKNDERDAGDLADLLRLGRLAEAWIAPPELRELRELVRYRAKLVALRSGLKAQVHAVLAKEGVRVPMSDLFGVGGQALLDQCALGDAYVVRVESLRDLIEVYDREVKMLEGRIGQRLDGHAGYQAIQAIHGVGPVLGAVFTAEIGDVTRFSRPDQLACWAGLTPRHRESDTTVKRGSITKQGSKLVRWAAIEAISRNQGGTVLQQRFHRIAERRNNRNIGRVAAARKLLHLVFYGLRDGEIRCLARDAG

SEQ ID NO: 144047 - protein, 355 aa, unidentified
MLFGKEPAVKQMMVYVGLDVHDETIVAVWQRKGDQERSKTFENTLEGVKKLVESVGKGEVAAAYEASGAGFSLYDKLTKVGWDVIVVPPTAIPKSAKERKGKTDVDDARGLMKMLMAHGECGVEMPSVWIPSAKVRQDRELVRHRLRLAENGARIKAQIKSLLKIHDVSCPFKADWSRKHLAWLRGLLLEDAHSPSLRRVLESLMKLLEAHDEEIVALDKALKKLSEEEAYAAQVEAVTAIRGVGILTALTFLLELGDVKRFKNRRALANYLGLTPATYESGKADDRKGHITKMGSGRVRKVLNQAAKTYLRTNDVRWDWYEKLKERRKGKIAVVAVMKKLGVLMWHRACDALSA

SEQ ID NO: 144048 - protein, 426 aa, unidentified
MRSIGMDVHRDFSEIAIAEDGVVRAAGRIATTPQALELFAQSLAPDDQVAIEATANALAIARIIEPHVRRVVLANPKAVRETSRRAKTDKIDAKVLAQLLAVGFLDRVWAPDEAARTRRQLISRRGAMVRQRTREKNQIHAVLQRQLVKRPPMSDVFGVKGRVWLAEQVDGLPLDERLTVGAGLRQIDFTEAELAELDKILAADALSDPDAMRLMTLPGVSAVTAIALLAAIGDIGRFKTPRHLVGYLGLDPRVRQSGNEPARHGRISKQGPGDVRGLLVEAAWHAARTVGPLRAFHSRLAARRGANIATVAVARKLVIITWHVLSRGENYAFMRPALHAEKIRKLELAIGAPRQRGKKLAIRAFAPRTVKDVEREQATEHEAAYARLTAGWKPSRPKKKAGAGATPGRASQRPSQGTAARQATSP

SEQ ID NO: 144049 - protein, 342 aa, unidentified
MERYDKHHSKETVYFGIDLHQRTWFVTVRTKDQELYSKGMPGKWWALKGLLERFSDYDIKAVYEAGYFGYWLHRKLTAFGVDCIVTPPSLIPQAYGNKVKTDRRDSRKLAHLLVKELLKSVYVPTEEELYHRQVLRRRSQLIQDRIRAQNRIKAELRFYGIDIPTSRGKWSKTYVRNLCSIRFGNKWMQESFNRLLETYDFLCTQVDKQTRLIKELAKTPLYENRVSILMSIPGIGMMTAMEMLLELQNMERFRKPEQLAAYVGLTPAQYSSGEKIRMGHITGIGKSHLRASLVEASWFLISKDQSMSAVYERIKVRAGAKRAIVAVARRLLLRVRNPLCLY

SEQ ID NO: 144050 - protein, 370 aa, unidentified
MNSIIYLGMDVHKETYNLCAYNNETGEICGETKCKADIKLVIKFIENLKKTYGEDLVVKAGYEAGCLGYVPYHQLTKYGIDCDILAPTTMARSSKEKLNKNDKLDARNIATNLANGTYKSVYVPNDEDLAVKEYIRMLDDTKIARKKVKQHINAFVLRQGYKYEGKSKWTIAHLEWLKTLPIIGLLRETLDEYLSQYDDLCNRIDRYGDKLIELSHEESYEQSISHLRCFKGIDTTAAMTVHVEISDFTRFLNACAFASYLGLTPGESSSGSKTTYLSITKQGNTTVRNALVESAQALVKGTPGIKSKAVKARQKGQDIKVIDYADKAVDRLQRKYRKLINRGVHHNKAVVAVARELACFIWGMETGRIN

SEQ ID NO: 144051 - protein, 427 aa, unidentified
MDHALLPTLAAFVGIDWATTHHDLALQVADGTTSEQSRIAHTPEAITQWLSTMQTRFGGQAIGIAMETSRGPLVHALLEAPFVMLYPINPRSLQRFREAFAPSGAKDDAPDAQLLLSLLVKHRDQLACWRPEDVDTRTLSRLVEYRRSAIALRTQLTLQLQAALKEYFPQAQEWAGEDLTSPLACEFLRRWPTLAALQRARPSTVNRFYTMHHCRRGALIAKRLAEIATAVPLTRDPAVIDSTTRFVALLAQQLGTLRPSIAQLDADIAQRFAAHADAAIFRSVPGAGAAFAPRLLSAFGTDRSRFPSAVDMQQRAGIAPITIRSGRHEQVCWRWSASNFLRQTFHEFAGHSVRHSTWAKAFYRQQRVRGKSHHAAIRALAYKWIRILWRCWQDGTAYDEARYTRALARRGSPLTRLLPNPSIEATA

SEQ ID NO: 144052 - protein, 307 aa, unidentified
MNIHPGFVGIDVSKHFLDVFDNGRVERIANTTEAIAALVARWHESFVLFEATGRYDARLRKALEAEGVSFTRVNPARARDFARATGRLAKTDAIDARMLAAMAQSLSFARERESDSEREALARAHKRRDQLVHMRKQERTRFSECDDLELRADIEAHMHWLDAQIVRWDAEIDRLLKCSTALAQRARQLRSIPGIGPVAAATLLALMPELGTLSAKTVAALAGLAPFNVDSGKYRGARKIQGGRKRVRDALYMAAVAASRCNARLKILYQRLRSAGKPAKLALIAVARKLAITANAILRDKSSFRPA

SEQ ID NO: 144053 - protein, 353 aa, unidentified
MKYYTSTTEFNCGIDLHARQMYVCVMDRQGKKLVHTNIKNNDFAYFLKLVQPYRHDLTVCCECMFGWYWLADACQAAGLQFVLAHALYLKAIHGGKNKNDRIDSEKITHLLRTNLIPRAYVYPATLRPLRALWRQRLCYVWRRSELLARIQSHQLAHNRSPIKQSRANRDSWEKLLLAQEDHPHRQLALQNDLAMIRHYDQQITALEQHLQKLTRSVAWREYALLQTVPGIGEHLGATILYEIGDIERFPTVKDFLSYSRLVKGTVASAGKIKGLRGAKLGNPYLRWAFGESAVIAKRDHAVIGPLAQRLEARSNKFKANTVLAIKIARAVYFMLKNKTVFDPQRLVAALARN

SEQ ID NO: 144054 - protein, 348 aa, unidentified
MDHIIRIGMDTSKHVFQLHGVNAAEEPVLRRKLRRNDMVVFFERLAPTIIAIEAAGASHHWARLLRSFGHEVKLIAPQLVKPYVKRGKNDAADAEALCEAMSRPTMRFVPVKTAERQAALMLLGLRDRLVRNRTQLANAIRGYAAEFGLAAAKGIAHLAPLLARIQSDESLPGLARELFAAHAQEYAQLQAQIDEVEGKLMAWHKTNPGSRRLAQIPGIGPIGAAMLIMKTPAPEMFRSGRQFAAWIGLTPKDHSTAGKVRLGVITRAGDAGLRSALVVGATAVIRHLRNGKGRSMLSAWVEQLLKRKPPKLAAVALANKLARIAWKLMVTGETYTAKPRPVASAGIA

SEQ ID NO: 144055 - protein, 387 aa, unidentified
MLQTVAALFPAAVDYERTLVLAIEVSNKSWVLAAQVPGLPHTKAKRTVNPEAEALLAAIAGYRTRAAATGRSIERVIAVYEAGWSGFWLARWLIRRGVEVYVIQPSSVPVDRRIRRAKSDGIDAELLLRTLLAWLRGEPRVCSMVPVPDAADEDAQRCVRERTELISERVGLTNRIGAVLATLGVSDYNPLLRSRNRRLAELRTGLGEPLPRNAHAKIERLLARLELVLTQIAELERERDAVVETEASDKASKMIQQLTSLRGIGVQSATVLVREAFVRRFANGKTLGSYAGLASSPFSSGGVDREQGIGKAGNRRVRTVMVELAWLWIRYQPAAAQVCWFRERVGSTGRRVRKIMVVALARKLLIALWRFVVDGVVPEGAVLKSAA

SEQ ID NO: 144056 - protein, 390 aa, unidentified
MKAENVTEIETDAVHTTLGAIFLSLELSRSSWLVTSLLPCNREKMSKRVVKAGDTAGLFDLISQLKATVRRRTGRDVPVIAIQEAGLDGFWIHRILERDGIESHVVDAASIATSRRKRRAKTDKLDGETLLRALLAYKRGEPRVCAMVVPPSPEQEDRKRNSRERRALIAERIKIVNRVKGLLFSQGIVGFEPLKRDRRTRLEELRTGDGRELPSNLKAEIVRALDRIELVLRQIKDVEAARDEVARNECDPSKVANGVSMLKQLRGVGADFAEVLWSEGLYREFANRRQLASYAGLTPTPWQSGSISREQGVSKAGNPRLRTVMVQLSWFWLLHQPRSALAQWFQERVALDGGRRRKPAIIALARKLLIALWKYVHHGAVIEGAVMKPA

SEQ ID NO: 144057 - protein, 352 aa, unidentified
MDRYVGLDAHAQTCTLAVMGPSGKRLTSRVVETNGYALKEAIRGISGRIHLCLEEGTQSAWLYEILQPQVSEIVVTVPEESKGSKDDLRDAWARADDLRTGRIRTRVYKAPKHLTALRSAACAYRMATQDVVRVKNRLKAVFRSRGILAESDVYQTRSRTKWLKQLPAGHRELAEWLGCELDTLVPLREEAEERLLKEAKTHPITRKLGTAPGMGPVRTAQLVAIVATPHRFRTSRQFWSYCGLSVVTHSSSDWVRDKHGRWVRGEVQQTRGLNRQRQPVLKAIFKGAATTVLTQLAGHPLHADHQRRLQAGIKPNLAKLTLARRIAAIMLSMWKHEEVYDPARLKVVTNKP

SEQ ID NO: 144058 - protein, 410 aa, unidentified
MEAILERCVGLDVHQETVVACVLYGKLDCKPKQEIRTFSTTTKGLLALNDWLNDRECTHVAMESTGVYWKPVWNILEEQFTLILANAKRIKNVPGRKTDVADAAWIAQLLRCGLITPSFVPPADIRNMRDLTRYRRKLLRDATAEKNRIHKILQDANLKLTTYISDIFGTSGRALLESVINGEVLDADEVKEKVKTSLKRKVPELLEALDGRMKKHHRMMLGLHLDHLSYVEKQLEKVEFEINQLLEPHLPSVELLITIPGIQKDAAAVILAELGNDMSHFGGDPQIAAWAGLSPGNNESAGKKKSSRIAKGNKSLKAVLCQAAWAASKSKGTRLASFFYRIQKRRGQRKAIIATAHLMLRMIYRMLKDKIPYREVGWDYLTSSKPSVEYWVKKIEAQGFIVKVESTEAS

SEQ ID NO: 144059 - protein, 387 aa, unidentified
MMQPKDLSRSGIPFEQDRTIVAVIDMSQSSWLVAAFVPGLDRHPLKKIEPDQEVLLRLLGRWREEAIRAGRDIERVAVAFEAGRDGFWLARWLRLQGIEAHVIHPTSIAVSREHRRAKTDRLDTELLKRAFLGWLRGEPDHCAMAAVPTLGEEDAKRPSRERENLVSERTRLVNRLKGALARLGVRDFKPTLRNAAGRLEAVRTPEGVPLPPNTLAELRRDMARLHFVREQIREVEEARLERLERAPGEGRNAAVRLLARVVGVGLETADMLVHEVLSRNLRDRRAVARYAGLTGAPDESGAKRREKGLAKVGNARVRRGMLQLAWRFLRFQPDSDLARWYRARTADARSATRKTMIVALARKLLVGLWRLVTIGDVPQGVVLRPAT

SEQ ID NO: 144060 - protein, 412 aa, unidentified
MEGETVIAGVDTHKDVHVLCLLDGLGRKIWSGSFGADPEGYDRLAEAIGDPGSCMVVGVEGTASYGAGLTRRLVELGYNVVEVLRPKRDKVRPGEGKSDPLDAERAARKAASGRGCSVPKSQDGWVEAVRQLYVARRLAVATSTSCVACAKSMLTTAPSALRERFRGRERPKDLMPPLARGRKAGDALEESVLASLRSVAAVWKEARSQVESLDERIRALLEANAPALLGVEGCGTTTAAALVVAAGDNPGRLKGEAAFSMMCGASPIPASSGKTDRHRLNRGGNRQANWALYEIAIKRMAYDERTRRYVARRTSEGKSRREAVRCLKRYIAREVYHVLMDPNPDGAAPEGPELAKMRKAMRVTQKKAAAELGLSAATLGHLERGKRRSTKLERRYYELLCELERTLPQTAS

SEQ ID NO: 144061 - protein, 435 aa, unidentified
MEEVEDEPLFCDRVAGIDIGKATVMVTIRVPSEARAKGRQQETREFGTTRRELLALADWLRCWQVERAGMEATSDYWKPVLFTLEQEGFDCLLYQASQVKALPGRPKTDKLDSVWLARITEQGSLAGSFVPPEEIRRLRTHTRYRRKLVQMRTAQKERCEKLLEDAHLKLSSVISDIHGVSGRDMLRAIAAGERNPKVLAQMARGVMRSKIARLEQALDCSFFTGEHAFILTMMLDSIDSLTAQAGVLDARIADMCQPYQRQLEQLDEIPGFGTTTAQDLIAEIGTDMNVFPTAGHLASYARQAPRVKESAGKRKGKNATGRGNPYIGGALGEASISAGRTQTFIGEKYRRLTRRMPKRKAQVAIMRSQLVIAHALLSDPDARYQDLGPDYYERKADTRRRARNHARALERLGYKVTLEAIDPGTGELHLVATAG

SEQ ID NO: 144062 - protein, 336 aa, unidentified
MNDVVTVGIDLAKNVFAVHGVDATGRVVVRRIVTRAKLPELVARLPRCLIGMEACCGAHEWARRFLQFGHSVKLMSPVFVVPYRKGGKNDGNDAEAICEAVTRPNMRFVPIKSAEQQAILTRHRVRQGFVEERTATMLRIRGLMGEFGIVLGQKPSRLRNEIGLTLEALPTLARRTIDDLRNHLRVLEARLADYDQELRHLAQSEERSRRLQTIPGVGPTTASAIVASIGSGHEFKNGRQFAAWLGLVPAQWSSGGKHRLGRITKRGDGYLRMLLVLGARAVLANGKPPSDRVSRWAHSLRLRMSYHKVCVAIAAKNARIIWALLARGGNYRATQV

SEQ ID NO: 144063 - protein, 410 aa, unidentified
MEVLYQRCCGLDVHKETVVACLRIVSGGEVVREVRTFETTTASLMALSAWLAENGCTHVAMEATGVYWKPVWHILDDGDFQLILANAAHVKNVPGRKTDVNDATWLADLLAHGLIRASFVPDTQTQELRTLLRTRKQLVREKSSHILRVQKTLEDANIKLDSVITDVMGMSGRAMIEALIAGESNPAKLARLANYRLTAPQEKLREALRGRVTKHHRFLLRLHLNQIDALDAAIATVDQQVQADIAPFRCAVELVTSIPGVSDIGAQVIVSEIGTDMSRFPSESHLISWAGMCPRNDESASTRRSNRVRKGAPWLKTTLVQCAWAAVRKKDSYLKAQFLRIKARRGPKKAIMAVAASILTATYHMLKDGTLYQDLGSNHFQTRSKGQQTKRLVQRLADLGYDVALTPLAS

SEQ ID NO: 144064 - protein, 453 aa, unidentified
MTALRKVKTKANTQLPMLHPHAAGIDIGATQIQVAVPSDADPKPVRTFTTFTDDLLALCDWLKACGVRTVAMESTGVYWIALFQILEAAGLEVYLVNARHCKNLPGRKTDISDCQWLQYLHSVGLLRASFRPPEAVCAVRSLLRHRGNLIRYASQQVLHLHKALTQMNVQIHNVIADVVGVTGLAILDAVLAGERDPQKLAALKDRRIRASHDLIARSLQGDWRAEHLFALRHALATWRHYQTLIADCDLEIERRLARFESRVNVVENPPPPSTLRHKRPYGTEPKFEARTELYRLTGVELTQVPGLQINTSLTLFGELGPDFVSRFPTAKCFASWLGLCPDNRITGGRVISVKTRDVKCRVAEALRLGAQALWQSKTYLGDCFRRWKARLGTPKAITAMAHKLARIIWHLFKHREAYDPTVWAAAEEKLRKKKLKRLQQNAAALGFKLVTAT

SEQ ID NO: 144065 - protein, 403 aa, unidentified
MEHVIIGVDPHKLSATIEVVDQHEKLLGSGRFTTDQAGFTAMRSYAKTWPDRVWAVEGANGVGRPLAQRLLEAGEQVVDVPAKLAARVRLFDTGHNRKTDARDAHSIAIVAVRTTTLRVLKLDGELEALRMLIDRREALTRRRVQTVDRLQALLAELLPGQAKRDITTGQAKAMLGTVRPRDIAGKTRRRIAVEELAELVAVEAKIKKSTAELKTIVLARGSRLMDLHGVGPVVAARVLADVGDVTRFADRNRFASWTGTAPLDASSGEQNRHRLSRAGNRRMNHMIHIAAITQIRLDTDGRVYYRRRRAEGKKSLEAIRCLKRRISDAIYRQLLADAQLNAGQDPGASPGGHRGASQESSAVDLPPHIDTSDQPLPGPADKTLRPAPPARKAQRDNDLRTAG

SEQ ID NO: 144066 - protein, 349 aa, unidentified
MIWIGVDAHKQVHEALALGSEGVVGQQRIPNTPQAWAALLAWARQWPERIWAVEGAGYLGRGLAQYLARQGERVHEVNGRWTARRRRGMRTPGKSDRLDARSVATLLREEAATLPRVYAEDDELAAAQLWSRTQAELTKDLTRLVNRLHELLLQCDPEYKTTLPDLTTKAAIGALRQYAAPGAGTLAREREALIRATAAQLALLDEQDRELRRKLERVSKTRFSPLRQIEGIAAIIACAIVAEVGRPRPGFGEEQLAPLGGLSPLEASSAGAIRHRLNRLGNRRLNMLFHQIVLTQARRYPPARTYLLRRQAEGRTSREARRALKRLIVRRVYRAWRACFDMNLARVAA

SEQ ID NO: 144067 - protein, 415 aa, unidentified
MRVHRQCCGLDVHKKMIAACLLTEDAEGNSVVEKRLFGTMTRELHALAQWLCAAQVTAVAMEATGVYWMPVWNVLEHHGLQLLLINPEHYKAVRGRKTDLKDGTRIAELLQDGRLEGSYVPPVAIRVLRDLTRYRIKLVQYQSALANRIQKLLEQCNIKLASVASDALGVSAMAMLRALAEGETDAVRMADMAKKQLRKKIPQLQLALEGCVLPHHRLLLREMIEDLDHVGAKITRIEETIEQQMRPFQEAVNRWLTVPGIKHRLAWTLVAEVGPTVEAFPSAADLVSWAGVCPGNNQTGGKRKSGTTRAGNPWLRRALCEGAWAASKSKGTYLQAQFRRLAALRGPKRALIAVANSILTAGYYMLHRATTYQDLGPDYFDKRNTIRATHRLVKRLEALGHRVILEPRFIAEPSS

SEQ ID NO: 144068 - protein, 410 aa, unidentified
MRVIGMDIHRVFAEVVALLDGVVTRMGRVDMRRDRLEAFARSTLTHDDHVVVEATGNAAAVVEVLSAHVGRVVIANPKQVRLIADAKIKTDKIDATVLAKLYASGFLPEAWVPDARTEAMRRQVTRRTQLVRQRTRLKNIVQSILHAHLVPPCPHGDLFGKAGRGWLAAQSLPDDERIAVERHVRELDRLGEELSGVERDIARRALEDAAVKRLMTVPGIDMVVAVGLAAAIGDVSRFAAPQRLVAYLGLNPSVHQSGDGPVRHGRITKQGRGQARGMLVEAAWAAARSPGPLRAFFLRISARRGQHVAAVATARKIAIVVWHMLRDSKDYTWARPALHAKKLRDLQLRAGHQPRRGQRGTAHAYNQAATREAERRQAAEGEAAYERLTSGWQPTGPRRTRMDAAKEERP

SEQ ID NO: 144069 - protein, 369 aa, unidentified
MNDITYVGLDVHKATVCVAIAESGRGGEVREVGVFENRPDVLRKMVARLGKHRRRLNFCYEAGPCGYGLHRLLTGLGHDCVVVAPSLIPMKAGDRVKTDRRDALMLAKLHRAGELTPIWIPDAAHEAMRDLVRARATAVRALSKARQHLQGFLLRHDRIYHGARAWTLAYRRWLTTVRFDHPAQQIVLQDYIHAVEDAESRRDRLTRQIEELMPSWSMAPVAAALQAMRGVALVVAVTVVAEVGDFRRFTNARQLMAYLGLVPSEHSSGSTVRRAGITKAGNALARRVLIEGAWTYRMSARVSRKLHDRLEPLSAAIRDIAWKAQVRLCARYRRLAAIGKPKVVVTTAIAREMVGFIWAIARVAQPELI

SEQ ID NO: 144070 - protein, 404 aa, unidentified
MTAAGTVGTADQWVFGGVDSHADTIHVAVVTDNGGHLADAEFPTTTPGYTAALAFLGAHGDVVAIGVEGTASYGSGFTRAARTDGLSVVEVNRPDRAERRRSGKSDPIDAYAAARAALSGRASSAPKDATVTGIRALHNAARSTVKARTAAMNQIGHILISAPDTIRARYRAQHGKPLIDALARLRPAGDAVHTAVLTALKSLARRVQALTTEHNELTASLDKVATEHNPGLRAAHGVGPDTAAQLLITAGGNPDRLRTEASFAALCGVAPVPASSGKTNRHRLSRGGDRAANAALYRIALVRVASDGRTRDYVVRQTAAGRTKKEIIRLLKRAIAREVFRYLTTTVTVPEVADLRPARQAKNITLTAVAHHFGVWPAVISSIERGTRRDDNLANAYRDWLTAA

SEQ ID NO: 144071 - protein, 344 aa, unidentified
MAQYAALDVSQETTAICLVDESGKMRRQAKVATCPETISRWFAENATGLVRIGMETGPLAVWLWNELDARGLPVVCMDARHANAALKMRPNKTDRNDAAALAQIVRTGWFKHVRIKSRTSYEIRSLLAAREVLVRVRVKLENEIRGLLRTFGVLFGKAAGGFARRAHEIVAGELDASPPMRLVVENLMQARLTILDRIKVLDRQVLAVARTNATARLFMSAPGVGAITALSVASAFDDAERFKRSSSAGAYLGLTPRRYESGEVSWNGRISKHGNKLTRTHLYEAATTLLTRTVRFSPLKAWGLRLAKRCGFKKARVAVARKLAVILHAMWKTNTGFRWSENAA

SEQ ID NO: 144072 - protein, 355 aa, unidentified
MKLYVGLDISLESTSVCVVDQNGSVVRECKPATVPEAIGLALKEWKGSIERVGLEAQALSPWLSVELIRLGLPAIVVETVHMQRALSAQRNKTDRNDARGIAQMMRTGWFRAVHVKSPESQQLRFLLSGRRLLKRKFIDVENELRGALKAFGLVIGAVGRGDLEARTLELIDGAPRIVVALATTLLRVRRMLFAEYAELHKQILRFVRDDEICRRFMTVPGVGPVTALAFKAAVDDPARFKRSRTVGAHFGLTPRRFQSGTVDYSGRISRCGDPEVRTALYASASSLLVRCKKWSSLRAWGMTIAKRRGHKKAVVAVARKLAAVLHRMWRDGSEFRWSTAKDAQPNGMAATALTA

SEQ ID NO: 144073 - protein, 424 aa, unidentified
MNLTQNDRLKQVTSETLIVGVDVGSQTHFCRAFDWRGLELSRRVFKFSNTGMGFLTFLRWTEELMNKTEMKTVIVGCEPTGCYWLTFQKFLQDHDIQLVTVNPFAVNRSKELDDNSPEKSDLKDPKTIALLVKDGRYSTSYLPSGVYAEIREASVCRDQIMKQHVRLSNQIQGWLQKFFPEYFECYAAWDSTSGLMLLKEAPLPQDILRIGAGGINQIWRDAKVRGAGIKRAQTLVEAAQNSVGLEGGEAARLEIWILINDYILKAEQLRRLDEYLEEKVKEVPNVEKLLAIKGVGMSTVIGFIAEVGDIGRFTDPKQIQKLAGLEIVKKSSGKKKGQPRISKRGRRKLRRTMYESARALMNWNPAFQDVFLYYRNRQKNPLGGMQAKIAVACKAIRVFYVVLQTGCDFDEEKFRKDIVRPEAA

SEQ ID NO: 144074 - protein, 429 aa, unidentified
MTSKSCTTSPVVRVAIDVAKLTHQVLLELPSGTRRVLRVANTKAEIDRFVATLRALELSCEIAFEPTGDYHRPLAYLLGQAGFHLCLVSSIAVARTREALYNSWDKNDPKDAQVILHLLKNGTTQRYLDPLMTGYQDLQEIAKTYQQISLRKVRLQHSLVTHHLPLYFPEAERYLHSSRAEWFTELLLFTPCPTAVRRYTKTAFVAAAREQIGGRKVDKGRWLADFYETACSSVGLPVSEASETMRMFRVVLEEYRALCQLRKRLETDVVTRLANQPDFVRLQTLPGIGPILAMIILAEARDLRRFGCARQFLKYCGFDLCTEQSGQFRGTTHLSKRGNARLRYAFWMAGTVAIRMQQNSFRRKFDDYIRRDPQNTDRRRKGYTAVAAKMARVAYAVVTTGTDYRRFPEATRPGGRIPSPGAVEAHATS

SEQ ID NO: 144075 - protein, 349 aa, unidentified
MRMVGGLDLHRRQITYDVLDVDSGEIWRGRLWQPDRSRFRHWLEREVRPRAQGSSVALAVEGCTGWRYVVEEISAAGFAPFLAEPADTQAARGRKHRAKTDRTDAQLLRELLQAGELPESWIPPQDVLEWRERVRLYKSLVDQRTLWCQRIHAVLYHHGVTIPEGAIRTERTRSMLADDNLGVSSAARERIDVGYKMIDAADAQALPLKHALQRFGTRQPACRALVEAQYGIGGLLAVVLWTELGDCRRFSRSEQVVRHSGLDVTVDASDRRRAGGHLSRQGPETLRWALYEAAKSSSHGRSPDHGYYAKVKERHDGKIAAISVARQFARRSYHVLRAVEPDEVYAIPA

SEQ ID NO: 144076 - protein, 343 aa, unidentified
MQTIKTIGFDIAKSVFQVHGVDAAGEVVIRRQLKRRSVLAFFRKLPPCLVGIEACASSHYWSRELQALGHTVRLMPPAYVKPYVKRQKNDMADAEAICEAVTRANMRFVPTKTPEQQSCLMLHRTRHLFIRQQTAVINSIRAHLAEFGIVAPVGRKGVTELLHVVADPSDKRVPEVARACLAALGAQLLSLKQQILEFDRMIMTWHRSSQTSKRLHCIPGVGPMLATALVASVADPRTFRSGRNFSAWIGLVPKQHSSGGKDRLGGISKQGDRYLRSLFVAGALAVIRYAKIHGTKHRPWLTALLGRRPTKVAAIALANKIARMAWAMMAKGERYRQPVALAA

SEQ ID NO: 144077 - protein, 413 aa, unidentified
MIVGIDVGSEKHYFRAFNWRGIELTRKPVAFSNSMEGFNSFYNTIVELMQKRELEEALVGIEPTGHYWFDLGQFMGEKNIKFVMVNPHHVHKTKELDDNSPSKNDRKDPRVIAGLVRDGRYFYSYMPTGVYAELRNASNRRFVLVEEQTRAKNRLQKWIAVYFPEYKGIYTHIDAKGGLLVLKQAPTPEKIVRLGVEGIIKIWKDAKLRGNGHKKAMLILNAAMKSIGLKSGLTEARMEIQDLIEDYELQTKRLERVNDLIKELCQQVRYADKLLEIKGIGITTVAGFIAEVGDITRFDSTKELQKLAGLELVSDSSGKHNGKTKISKRGRKRLRYLLFEAAISVVGKNEEFKEIHRYYTTREKNPLKKMQSLIAVACKLIRVFHVILTKGISYDASKMLKDIRHQGEQLKAA

SEQ ID NO: 144078 - protein, 355 aa, unidentified
MDSKKYIGMDVHKESISIAVMNGAGKIVMECVIETKANMILQFIDGLRGDLHVTFEEGTSAAWLHDLLKPHVTKLVVCDPRKNASMREGNQNDKIDARRLAELLRLNHLNPVYHGEHGLRSLKELVRSYLTITKDLGRVMTRVKAIYRSWAIPCTGKQVYAPRHRAEWLGKITEPGVRRRAEFYYQQLDALRAVRQEVRRELLAEAKKHKAWKLLCQIPSIGPIRAAVLLGILQTPHRFRAKRQLWTYSGLGIETQSSADHRSVDGQLQRVKKQNSIRGLNRNCNHDLKNLFKGAAIVASSKPGPFQEFYTALLTKGIRPEMARLTLARKIATIVLMVWKRGACFDAQHLKPQTA

SEQ ID NO: 144079 - protein, 344 aa, unidentified
MMNKQLKTNDSKVNHIYQAGIDVGAEELVMVIRKNGKLLNPQTFANTKADRARLIMKLVKLPGVIVCMEATGVYHFDLAVALHDAGVLVMVINPKSSHNFAKVLMKNSKTDAVDANTLAEYAARMDFVAWTRPSKETIAVRCFSRRITTLTTQKAAAKNHLHALTATQETPKALLRDAKVAITQLEKRIDRLTTEALLLIAKYPKLERTLTLLISIKGIAQTSAISLMGELLLLPPDLTHREWVKFAGLDPKAFDSGKSVHKKSRISKAGNRNIRAALYMPALSAKQHDPHVKAYFQHLVANGKKPLQAVCAIMRKLIHAIHGMLKNDEPFDNTRFYKIPASAV

SEQ ID NO: 144080 - protein, 340 aa, unidentified
MTQHKIIGIDLAKNIFFLFEINHKGKNLCRKKLQRSKLLSYIANKAPCTIAMEACSGAHYWAREFSQFGHEVILYAPQHVKTQRRKQKNDYNDAEAIAEVALYKRPHPVPHKSVEQQDIQSLIRMRRLLVTERTRIVNQVRGLISEYGIIMPKGAAAFRKAIPEILENDENQLSCILRELLSHQYERYLYIDEQVKWFDDKLNQTIKQFENAKRLMSIPGFGPLTSQAVAVWLGSGQQFKTGRDASAAMGLVPKQDTSGDKVILLGITKRGNTYIRSLLVHGARAALRRAKFKSDNLSKWMLELQERRGPNRAAVALANKLMRIAWAVITKNEEYRPRQS

SEQ ID NO: 144081 - protein, 318 aa, unidentified
MSEPVFVGIDVASATLEVACTGDKVTWQVSNDEAGIAELVRRMKEAAPALIVLEATGGYEFMAASTLQLDGFAVAVVNPRTARDFARAMGLLAKTDSLDAKLLASFSRVLHQHPERERFIKPLADEARQQLQALVQRRRQLIEMQTAEKLRRRQAHVASRASVDRVVAFLKEELANNDSAVAAHLERHHAELVAALTSVPGVGQTSVAVLIADLPELGKLDRRKIAALVGVAPMNRDSGQSRGQRSIWGGRHDVRCALYMATLVAVRFCAVFRSSYERLLARGKAKKVALVACMRKLLATLNSMAKHGARWNPMLHDS

SEQ ID NO: 144082 - protein, 274 aa, unidentified
MNSLGIDVGKKICRAALKDERGDVIREFFFSNNNEGISTLIQSVSHYGKCTAVVESTGNMWIRLHDTLEENEIDTILANPYKTKIIAEAKIKSDKLDARILADLLRADLVYESYVPTKEFREKRSLVRHRISLVRNRTMLENKVHSLLDKYDYKSELTDVFGKSGIIWLKTLDVSTIDRLIMNTTLAAIENINLQIETISKELAKYGWDSDDVKILLSMTGIDVFSAMLIATEIVDVKRFCTPWKLVSYAGLAPSTRESSGKTKTGRISKPPEH

SEQ ID NO: 144083 - protein, 371 aa, unidentified
MNSIIYVGMDVHKNTYSLCAVSDATGEILAETKITADSDLIAKFIENARDLSGNPEAQVKTGYEAGCLGYSLYWELAARGIECVILAPSTMQKPAKNKVLKNDRRDARNIATNLANNSYKSVYVPDHEDVKTKEYIRMMGCFKTQLKRIKQQINAFLLRLGLRYPGNSRWIPAHLKWMNGLELEPEFREILDEYLSEYDSLSERIERFKGRLEEMAQKERYKEKVEQLRCLKGIDTASAMTIHVETSDFSRFPNAAAYSSYCGLTPAENSSGEKNNRLNITKMGNSMIRKTLIEAAQVLVRGTIGKKGKKVKAKQKGQDVKVIDYADKAVERLQKKYHHMIYRNVNRNIVITAIARELACFIWGIETGHIS

SEQ ID NO: 144084 - protein, 338 aa, unidentified
MYQLGIDVSKKTLDICLMREGVRGRLKTKKIKNDFKAVHIITEWLEHHNCALSDAHVIMEATGVYHELLATGLYLAGVKVSLANPHRTREFARGMDILTKTDKVDAWMLACYGALKQPEAWTPPTEEIRHLSALLKRRDLLVSDATREKNRLEKYRATHTPEAIIISAESMLARLNDELTKIELMLKQHIEKHIFLKEDYELLTSIKSVGPQLGLNMLVILRSHDFRSAEQVAAFLGVAPVEKRSGTSVKGRSRMSKIGPPEIRAKLYLAALCGLRFNIALKSMYERLCLNGKAKMVAIGALMRKLIHWCFGVLKSRRKFDIDYVDLSRTQFSIGGQP

SEQ ID NO: 144085 - protein, 342 aa, unidentified
MAIVGAFDVHRRQVTFDVLDTETGQVRRGLVRPACRATLRRFLAGYAGVGEVEFTVEGCTGWRFIVEELERAGITTHLAEPAATADARGSKRRAKTDRTDARHLRQLLVEGRLPESWIPPEHVRQVRARPALYHDLREEHTAWIQRIHATLFHQAVPVFDDALSSAAGRARLESGEGLSSAGVQVVAAALPVLDALDEELHTLHQQLAAFARRQPGCRALQTLYGVGTITSVAIWAFMGDTRRFSSSAQAVRHTGLDVTVYSSDGKRAPGHLARQGPPVLRWALYEAGCNASRTGSPDHDFYHDTKQRIDHKRAAISVARKIARRSHHILRNLGDQAWAPAT

SEQ ID NO: 144086 - protein, 363 aa, unidentified
MIVIGTDTHKRTHTCGAVFAGSGQLAGELTAPAREPGFRQLLDWGRNLDSERIWAIEDCRHVSGALERFLIASGERVVRVPPKLMGQSRRGERSSGKSDPIDALAIARAALREGPETLPAAHLDEDAMQVKLLLNHREDLVKARSEDQCRLRWHLHDLWPELEIPAGALDRMVWLDRVARKLARAEQSTRVRVARELVLEIRRRTRRAAGLEREIEGLVKAQVPALLELEGCGALTAAKLIAETAGARRLPSDAKFARLAGVAPIPASSGKRTRHRLDRGGNRQLNCALHRIAVTQGRCYAPAREFLAKKQAEGKSRIEALRCLKRHLARRVWKLLVNSEREISMTTADTQRGKLTPQFAVAA

SEQ ID NO: 144087 - protein, 392 aa, unidentified
MSSLRFVGLDVHKDTIVIAVADEGQTPAEVLGTFANDVAAMKKKLLKLATSKSDLRVCYEAGPTGFGLCRDLRAEGIDCRVIAPSLVPKQSGSRVKTDRRDAMRLAQFLRSNDLTDVWVPDEKTEGLRDLERARDDAKNSERVARHQLSKFLLRNDCAYKDGRAWTVAHAGWLKKLKFEDRCKQQVHVDYCRAVEAATERVKRLSTDIALLIRGMPMEPLVTALTAFYGIQLLSAVIIVAELGDLRRFKSPRELMAFLGLVVSEHSSGKTIRRGSITRTGNAYVRRILVEAVQHYRRVGSRSTSVEARRKEISPEVVAIAKKAEVRLKKRMQHLTDRGKPWNKIVIALAREMSGFIWAVGQVPTLLATVVAPEQSSAPKQQMREKKAKKIAP

SEQ ID NO: 144088 - protein, 346 aa, unidentified
MVLIGCDYHPSWQQVCWLDQATGETGDEKLVHASGDAEKFYRRFSSSVRVGLEATGNCQWFLELLRKLGHEVWIGDAAKIRASDSRQQKHDKRDARLLLQLLMENRFPRIWTPTREQRDLRQLLIHRYKLVVLRARVKNELQHLAMNQGITRKRKLWSQAGEKVLGELPLAAWAGRRREDLFRIREMLNGQIDLLDDAVVEAAERNEKARLLMTQPGVGPITSLAFVLTMGDVNRFQRGKQVASYLGLIPREYSSGGRQRLGSISKQGNRFLRMLLVEAAQAAVRYDRGFRDEYLHRCHTKAKGVAKVAAARKLAIRLYWMLRTNIGYPEVVRVESSSRVALVGAS

SEQ ID NO: 144089 - protein, 347 aa, unidentified
MASSLNHHWCVGVDLHKDTLTACVFCGCCGEVSFQKIPCKCRKLIAQYFAALPRPHTVAIESVGFYRWLWEMLEPVVEKLVLADATQARALAGRRLKTDREDSLNIAELLSAGRLPTSYAPPLEVQILRDLTRHRNGFSRQHARVLCRVKSIMNANNRPGPARMRSDGLIRYLKAQGPKLPPRHVEMLWQCVDSLALTERQMDQAERTIGEMVRRGSFPEVYGILTSFPGVAQLTAATVIAEVGDFRRFRDSKAIGRYAGLNPRVYASGGKQRIGHIAKTGSPDLRWILQQAAWTAIRTDDAVRRIFLRVAKRSGRKAAAVAVARKMLTWMWSAVTKGEPYRTRVAA

SEQ ID NO: 144090 - protein, 361 aa, unidentified
MGVIIGMDPHKRSATIEVIDERAVVLAAGRYGTDIGRYAQMLAAAREFTGRIWAVEGCNGIGRHLAHRLVHDGEVVFDVPPKLSAQVRVFATGNGRKTDPVDAHSISLVAPRTPGLVQVQVEEDLVVMGMLADRRDELGRARTQVINRPHRLLLELVPGGAKKFLSARQARALIATVRPRDLAGKTRRRLAVELAVELEATGKKTRALDKELTELVTARGSTLMDLHGIGPSGAARLLADVGDIRRFASRDRFASWNGTAPLDASSGSQTRHRLSRAGNRRINRVLHIMGVVQLRNQTKGRAYYDARRAGGMPSIMAMRAHGRRLSNVVFACMLADHKRREAGPGGQSGTTGDSSAAGPDA

SEQ ID NO: 144091 - protein, 311 aa, unidentified
MNQQDFFIGMDTSQDLLEVAVRPTGERMSFANQEDGISLLRDFVKPFSARLIVLEATGGLERAAVCALAAEGLPVVVVNPRQVRDFARSKGILAKTDKIDAQVIAQFAESIRPEVRPLKTEEAQKLEALLNRRRQILQMLTAEKNRLHSAPAWTRKDIQIHIQWLEKNLAKFNKDLDLLVKKSPIWRAQDKILQSAKGVGPVLSQTLIGRLPELGTLNRKKIAALVGVAPLNRDSGKFRGRRTIWGGRSEVRSILLMATRVAIRFNPVIRAFYERLEKAGKKRKVAETACMRKLLTILNAMMKNRTCWQAV

SEQ ID NO: 144092 - protein, 453 aa, unidentified
MHKSSKKKSGVKKITQFEIINPQVAGVDVSDNGGMMVAYPINATEIVVEEFECYTRDLRRISETLRSHGIKSVAMESTGVYWIPLFLLLQEDGFEVYLVNAKHVKNVTGRKDDEEDAEWLQKLHRCGLLTASFQPDNQTRCLRSVVRHRGTLVQTRSTYLNRMQKALEQMNIKVHTVLSDIDGKSGLRIINAIIAGERDAATLADLCDIRVKASREEIIKSLEGFWSEEHLFELSQCYKLYQYHNNMIQECELKIEKILVETIQSKNGGVIPKLNKLQRKRRYKNDISIDVVNYLFMLTGVDIASVDGITGIGGLTALSIYAEIGNNLHRFKDEKHFASWLGLAPNNKISAGKIISSRVPKKKHYAGQVFRMAAMTLGHNKGPLGDFYRRIRSTAGKSKAIVALTRKLAVLYYRMMVNKSAYNPKTLIDYQEKYKKQKIKNLEKYLEKLKAVA

SEQ ID NO: 144093 - protein, 371 aa, unidentified
MKSIIYIGMDVHKKTYSLCALLKETGEIIGETKIPADVSLIIKFIENAKKSVDSDDVQIKTGYEAGCLGYSLYWQLAAKGIECDILAPSTMHRSAKNKVVKNDRRDAKNIAANLANGTYKSVYVPTDEDVEIKEYIRMMHDFKIELKKVKQHINAFLLRFGHQYPGKSKWIPAHIKWLKELELSDMYREILDEYLSQLEILSEKIERFKHRLEELSQKETYNEKVGQLRCIKGIDTTAAMTMHAETSDFDRFPTANAFASYCGLTPGEDSSGESYHRLGITKQGNSMIRTTMVEAAQVLVRGTIGKKGKKVKSKQKDQDVKVIDYADKAVVRLQKKYHRMIFRGVKRNIAITAIARELACFVWGIETGHIS

SEQ ID NO: 144094 - protein, 388 aa, unidentified
MVEKSVVKIAVDPHKRINAVVAVGATGSVLARATFAQSTTGFADLMGFARRWPRREWAIEGATGVGKNLAQRLVVKGETVFDVPSKKSSLVRAFSATSGRKSDDVDAYSVALASLHSDLLQVRVDERAETLRLLSNRRDELVGLRTQAVCRLHRELQILIPGGASRALTAAKAKTLLASVRPRDEVGKVRKSLALDQLADLVAIDKRLKDIGAQITTVVAETRTSVTDVRGVGPVVAAIVIGEVRDVSRFPTKHHFASYNGTAPTTWGSAGDARPCVNLHGNRRLNHALHIAAIVQLRFDCEGRRYYLRKIADGKTAKEARRCLKRRISDAIYHQLLVDAQAGERGPGGQMGATTKISAADPAPTVDSSIKPQPGPHRKGNPAASIAS

SEQ ID NO: 144095 - protein, 370 aa, unidentified
MGKIIFVGLDVDDNLFHGAAVDQAGQIIAEFSCKPQCRALITRLQKLQDVQAASLKICYESTYLGFSLCRDLRNSKFDCEVVATSLIPEISGKKVKTDRLDSKKLAKYFASGLLTIVRVPGEEDEAERDLIRSRLFAVKQHRAVKQHILSVCRRMNLDFKQETKFKKHWTGVHLNWLHARINGLTSSSLRRNIQLLLQQYEHNQRLIDAYDIEITQLAQSEKYTKKVEALSVYRGISTTTGMTLITEIGDITRFDHPKRLTSYFGMDITEYSSGGKQKQYRMTKMGNAYGRCVVIEACQKVFCPPRVCYDLRRRREGVDPSFTSIADRCMERLYRKSNRMLHAGKNRNVTKVACAREMLGFIWESLRAAA

SEQ ID NO: 144096 - protein, 342 aa, unidentified
MKKHNNSRKNSELTSKRAKSRGPVQRDTKEVLAELVGKLREKLDPKVGAASAGEKNQRGELRPNLDRLTVGVDLGDQWSHYCILGLEGETLAEGQLRTTQQDVAEFFRALNAARVAMEVGTHSAWVREVICSYGHEVLVANPRLMEGSKRRKRKNDRIDANKLARLGRVDPESLHPIEHRSAEVRQDLVMLRARDALVAARTELINATRGLVKSMGARLPKCSSPSFAQKVEEAVPAQVREALLPLVRMTAALSDCIHGYDEKIEKLGSEKYGHTALLRQVKGVGPITALAYVLTLENPERFVKSRDVGPYLGLVPKQEDSGESQPQCCASGAGRMRRSERR

SEQ ID NO: 144097 - protein, 426 aa, unidentified
MGEYSEAFVAFDVAKKKHAVAIAEGGRTGEVRFVGEVENSPATIERTIKKLGKKYDRLHVCFEAGPTGYGLCRQVRDLGHDCMVVAPALIPKRPGERVKTNRRDAVTLARLHRAGELTGVWVPDVVHEAVRDLVRAREAAADDLRRKRQQLLSFLLRHGRIYENGGHWTLAHRRWLARQSFEHTAQQIVFQEKIDAIADAAQRLHRLDEQLRAVVPTWSMARVVEAYQAMRGASFLVAVIFAAEIGDVRRFDTPPQLMAFLGLVPGERSTGDTVRRSSLTLAGNRRARRALVEAAWTYRYPARVSEALRARLEGLPKAVRDIAWKGQVRLCTRYRRLSAAGKKPPVVVAAIAREMAAFLWAIGREVAPSYPVSTQPAAQGWGWGHGGELPSLVMWPSRRARRPPSRPRTAPRRRHGRPVPNPRMRV

SEQ ID NO: 144098 - protein, 429 aa, unidentified
MIVRTFRIDGNQRYRSYAGAGAESSGYLVGINLTTSALETLMEARTVNNLPPAAPHDDAVRCLLAIELSKKSWIVAVNTPLSDKISRYTLEACDWKGLLDLCERIRARVAREMKKPVEIISCYEAGYDGFWLHRLLEAHGIRNYVIDPASLQVDRRARRAKTDGVDVERMLRSLLAYLRGEPKVWSVVRVPSVAEEDDRRLHRERDRLINERVQHVNRIKGLLAIHGIYDYQPLRGDRVQRLEQLHAADGQTLPPRLKAEILRELQRLELAIGMIKAIEAERDAIASAKTGHTSAKKIQHLAKIKSIGPEFATALVGEVFYRSFDNRKQLASYVGLTPAHFQSGAMSRDQGISKAGNAKARTVMIELAWLWLRHQPDSPLSVWFRERVGKLKGRIRRITIVAVARKLLIALWRYLENGMVPEGAILKVK

SEQ ID NO: 144099 - protein, 430 aa, unidentified
MHNKNYISVGIDVGSAFSFMTILAPDETVILKPFKITHNNKDSLERAVSEIKKAEELYSLESRTFLESTGIYHFPLFCYLVDCGFNASIINPIITHSTKNGNIRKVKNDKIDSKGIAKLGLSKDVPVSQFPEKLVLELRSLTRKYYDLTDERSAHINKLKGDLHTVFPQYLDVFCDVTGKTSTMILRQYGTPDKILRGHKKTMIEKISKASRKGLAKASERYEKLCAAANAAKTFGCQIDSIYFNIFLTLDLVEKLDSALDSILNRIRQLITFNKNEKFIQQIKLLNTIPGVGFLTAVTIMCEIGDFSAFRNPKQLFAYFGLDPEVNESGKFVGTQLHMSKRGSRIARRAIFAVALASIRTKRNGEGINPYLRKYYELKSGQKPKMVAIGAVMHKVCNIVFAVLRDEKAFELRSPEEHCKQYQRPALAAA

SEQ ID NO: 144100 - protein, 356 aa, unidentified
MNEGSCVGLDVHARSVVAGVIDVGSGEVRSLRVPPRSDATVTWLKTLPAPVRVVYEAGPTGYGLARACAEAGISCVVAAPSRIRPAADRVKTDRRDAERLARLLRLGEITPVRVPGPDEEAARDLVRAREDARGDLMRARHRLSKLLLRHGAVYDATAWTRAHDAWLRKQRFEDGPLAIVFDECYSRMINAKTRRDALDKAIAELAASAPYVDVVERLVCLRGVSTLTAFALTVELGDWNRFRPESLGPFLGLTPSENSSGERRRQGAITKAGNTYARRLLIEAAWHQRSAPRLSVTLERRREGKPLALRAQADRSARRLHGRWGALEARGKPRLIVVVAVARELAGHCWALATME

SEQ ID NO: 144101 - protein, 336 aa, unidentified
MSNISKLDFSGQHIYVGMDVHRKSWSICILTHQFEHKTFTQPPDPLVLVNYLHRNFPGATYHAVYEAGYSGFWIHDQLREKGIECIVVNPADVPTKDKERAGKRDKVDCRKLARSLRNGELEGIYVPTRIKIEDRSLLRTRRSMVKKQTRCKNQIKSMLAFYGIHLPTDIVHHNWSSKFIKWLEEIRMEKASGNVAFKVHLDELRYVRGIIVELNRNVRALSRTDEYRVNAQLLKKVTGISTLTAMTFLTELYNIERFGSLDKLASYVGLIPNTDSSGEKDTTTGITNRRNQTLRHLIIESSWIAVRKDPALLMAFEHLCKKMPKTRAIVPIAGNY

SEQ ID NO: 144102 - protein, 416 aa, unidentified
MNAVGIDVSSRKSTVAVLRPLGEVVCLPFDVTHDIAGLASLAEKLKALDGETRVVMEHTGRYYEAVAKALHEAGLFVCAVNPLLIKEYGANSLRRVKTDKADAVKIARYALDNWADLRDFTPMDAIRYDLKTLNRQFQLASKQRTASANNLIALLEQSFPGIRKCFDSPVRSDGTQKWVDFAHSFWHVDCVRKQPFAAFCERYRKWCKRHAYFFKLSNAEEVYALAKRAVVLTPKSKVVKVLVQEAANQLISISRSVEVYRAEMDRLAAMLPEYPVVMAMYGVGKSYGPQLMAEIGDVRRFERKQALVAFAGIDPMPNQSGDKNVRSNKSSKRGSPYLRKTLFNVIRTYLQCAPQDEPVFQFLNRKRAEGKPFYVYMLAAANKFLRRYYAKLRDYFASLDTLQPVAPIPTILKATL

SEQ ID NO: 144103 - protein, 353 aa, unidentified
MDDRAIEGEVILGVDTHLDTHVGALISETGKLIGTLSVAAETTGYLKLLTWANSLGHVRRAGVEGPGTYGAGLARVLRDHDIEVLEVNRPDRAARRSRGKSDPTDAENAARAVLAGRATAIPKEQSGAAEAMRTVSVARRSAVKAKTQAINQLRALLVSAPQDIRERLLRTKTSECVANCAKLRSLGGAPMLQALATTLRLLAKRYLALAEELSTLDAMLEHLTQRHARRLRERFGVGPQTAAVLVAVAGDNPERLKSDAALAALCGTSPLQASSGKTVRHRLNRGGDRAANNALWTIAMVRMRSDPRTRAYVERRTKEGMSNKEIHRCLKRYIVRELYPLILADLADSASAS

SEQ ID NO: 144104 - protein, 374 aa, unidentified
MTRFGGLDVHKDSIFLCIIDGNGVIYREKYGVLTPALEALSLTMQEYGVTEVAMESTSIYWIPVWRVLEGKFNLHLVNPYFIKQLPGRKSDVKDAEWIATCLMKGLISDSFVPGETVQQLRQYDRRIFDLNAEIVRKLGKIDAGLQRCNIRLSNYVSSTDGKSYTNVLKKIVKGVTDPEVLIKEVHGRTINRFGKDTILAALTGVFAQSDIDTLRQLSEEVELARKHKEECQAQMDQICEECFKKEYDALQTIPGVKSRSAASIISAIGTDMSVFKTSSHLVSWAGLNPRNEESAGKIKSRKTTHGNKQIRKTLIECAWAAKKKDSYFNRYSYRQCVVRKKGTMKVQVAIARKILVAAYHIISKGEVFKEAAAA

SEQ ID NO: 144105 - protein, 390 aa, unidentified
MTYYVGIDIAKYKHDCFIADDSGCVIRDSFSFSNDKDGFNVLLSILKKLKPKGQIKIGFESTGHYHFNLKLCLEANGFDYVEFNPLLVHKFISTQTLRRTKTDKKDASMIAKYLMTIDYKPYVNSFYHINNLKSLTRLRETLITDRTRFLNQITSYLDQIFPEFKPLFENGLNKSAFYLLTHYMTPVKMSKLDSNKYSKMKSELGHTISYQKICQIKDAAINSIGHTSKDLEYALKSSLNVYLYLDNQIDELESKIIEIYDSLNCHIHTIRGISKLTSAGILSEIGNFNKFLTPAQIQAYAGLEPSKDDSGTHDGLGVMVKHGSSYLRKYLMNSAETFYVYNPSISDFYWKKRNEGKHHRIALSHVARRLINTIFYLEKHNQDFDSKLVK

SEQ ID NO: 144106 - protein, 370 aa, unidentified
MSVRRILAKTIDTDLEYEAIGIDLAKNCVSAALLTTDGEVVCIDRLDYSELEKSAQVLTPTTFAMEPCTEMNYLVQKLEAWGHRCLVIGGKNVQNYVENHFSGQKTDLNDAQALAFLAQDTQLRTIKAKDVEQQKYASLTTLREQYIKQYRQTIVSLKGICQAWGLNISKGISGKAQLKDLIENHAAFPEELKESLVDMVTHAQTALKALNKITKTLEELAKSDKVCQLIQTIPGLGSICSCRLRATVGDIKRFKSPKDFPAYYGLVPRSIATGHNERKGKITHRGDRTMRSLMVQAAGSLVNMATKGKLKSKQLTKWILKKQKEKMPWGKLVCAVAAKLLRIVRAVLISNKPYNSKIAGVAKCSLPKGS

SEQ ID NO: 144107 - protein, 387 aa, unidentified
MTKVNDLSRSLAALDQDTTLIAVVELSSKSWLVAAAVAGIERHPLKKLDPDASALLKLIERWRGEAERRGRTIKRVVLAYEAGRDGFWLARWLKERDIEAYVIHPASVAVSRERKRAKTDRLDAAMLLRVLLGWLRGERGHCSMVAIPSMDEEDARRPSRERETLVGERARITNRIKGALARFGIRSFNPLLRKAPQSLEKLQTAEGGPLPVNTLEEIKRDLARMAVVREQIAAIEKARVHRLKQAPKTGSNAMVQLLARVIGIGIETADMLVREVLSRTLRDRRAVGRYAGLTGSPDESGSRRREKGLTRAGNARVRRGLIQLAWRFLMFQKQSALTQWYRARTAGATPTQRKSLIVALARKLLIALWRLVTTGEVPHGVVLRPAI

SEQ ID NO: 144108 - protein, 354 aa, unidentified
MKKVSTTAAKQIRNFSQQKLTIGLDLGDRSSWYCVLNEAGEVLLEQRLATTPKAMQEVFGGMPRCRIALETGMHSPWVSRVLSELGHEVIVAHARNVRLIGESRKKDDRLDARTLGRLARIDPQLLSPVKHRSAKAQAHLTVIRARAGLVRSRTALINTARGVTKSYGERLRGCNPRNMNPEKAEGLSPELQAALAPLLAAIEALSERIHEYNQQIEKIARESYPQVARLEQVKGVGTLIALTYMLTLEDPHRFRKSRDVGCYVGLQPGRRNSGQSEPQLHISKEGDPYLRTLLVQGAHHILGPFGADSDLRRWGLKLAERGGKNGKKRAVIATARKLAVCCLSGCFSRPQAVV

SEQ ID NO: 144109 - protein, 425 aa, unidentified
MKFTRNDAANQRIERITNHHAIVGIDIAKDIHAAQITDFRGRTLTPRHVSFTNTKTGFEKLLTWIQAVGDKHGKTSFLVGMEPTGHYWHNLADWLLEQGLEVVLVNPVTTHRNKENRDNSPSKNDPKDALVIADVVSRGYYTDYSPQEPVFDQIKAVMSAREYWSGQSTSLGNRIVRWIDLYFPEFRHVFPEWDGVRALATLKAFALPAELRKLNAEEVVEGWRSQGMRRVAGASGKAKAVELLSAAARSIGKSNTNDAARQDILRLLHVYEETQLILTKMKQELETLLEQVPFVQQLYSLRGLGTITIASLLGCAGDLRHYAHGRQLLRRAGLNLAERTSGKHKGQIKLSKRGSSMLRKYLYLGVLGLVRQHPDFKYWHTRNQAKGMSRMYSIFKLMGKLARIIIGMIQRGETYQGQMPQAVAA

SEQ ID NO: 144110 - protein, 397 aa, unidentified
MYIVGIDIAKRKHEAAVIDGEGTVIIKPFSFTNNCSGYNRLLAMLAKAKLPLDEVSFAMEATGHYWLALFTRLQKEGFRVQVINPVQTNSIRSFYIRQAKTDPRDALLIAEVIRFGHFSESTLHPENIYELRELCRGRHAIVSMQADVKRKVVALLDQVFPEYETAFTNMFGDTSMAILQTCPTPKELSEMCLEELCHLIEVSSHKRFRMAKAQELQALARNSFGFAMAGDVFSTMIRLYAKHLVFLKQQVREMDRKIAEIMDTLDTPITTITGIGPTLGAYILSEIGDISRFSSAAKLAAYAGIDPTMRQSGEYNGVRNRMSKRGSPYLRHAIWLAASSAVLHDPALKLYFQKKRDEGKPYMASVGHACRKMVSIIYAVMRDNKEYVPCIPNEISA

SEQ ID NO: 144111 - protein, 396 aa, unidentified
MKDCIAKTSKSNKGSKTQEQRMENYPAYIGLDVHSRTIAVAVAKAGREEAEFRGEIANKPKSIAKLIRQLSTEFGGEILLFCYEAGPCGYVLHRQIIESGHECQVVAPSMIPNRPGDRVKTDRRDAYKLAHYLRSGDLKAVWIPDEEQEAMRDLVRAREDFKNQEKQARQQLNSFLLRFDHVWPSNKQRWTEAHFNWIESLEFRHDWSYIVVQEYLDAVKAATQRVADIMAQIEMLLPQWSLAPVVYSLMALRGINKLTAITIMAELGDISRFDSPTQLMAYVGLVPTVHSSGDKTNMGRITRSGNSHVRRVLTQSSWTYRFAARQTKHITSKAKNASAKAKAISWKAQKRLCGRFRYLIMAGKNPKITVVAIARELLGFIWDIVCHEIPKLQKAN

SEQ ID NO: 144112 - protein, 342 aa, unidentified
MDHFAGLDVSVKATSICIVDDTGRVIREVKVTSEPEALLAALTNPAYHFKRIGLEAGPLSQWLFSALAEAELPVICVETRHMRAVLQAQINKTDRNDARGIAQMMRVGLYRPVHVKTLRSQKLRMLLTHRKLLQSKAIAIENDLRGTLRNFGLKVGTAGKVKFEARIKELVENQPDLAELVEPLLIVRRALREQFVILHRRLLAIVRDDEVCHRLMTTPGVGPVVALTYRATVDVPARFRKSKAVGAVFGLTCSKYQSGEIDRSGRISRCGDEMMRVMLYEAAQSMLRSKKWSWLKAWAIQIVRRRGMKKAIVALARRLAVIMHRIWVDGTVFHWTRDVAAA

SEQ ID NO: 144113 - protein, 354 aa, unidentified
MSTITIGVDLAKSVFSVCEVDGSGHVLRRRDLKRDAFAVWLAQVPAGTVVAMEACSGAHHWGRRCLEYGLQPRLMAAQFVTPFRKNRTAKNDRNDAEAIATAARQGNMRFVPVRSVDQQARLSWHRVREGYKAESLAIGNRLRGLLAEFGIVVAKSDLALRRVLAALDEHPTLPPELNELLRDLSAHWAQVRMAVDACDARIDAHARRDERCVRLRAIIGIGPITADAAIATLGSAKDFRNGRQLAAWLGLVPTQHSSGGHTRLGTISCRGDAYLRTLLIQGARSSLQRAKVASAEKSTPEQVWIRQLASACRSARCWWRSPTNTRGSCGRCWRTRKPTTPTRGLVHAPPANTP

SEQ ID NO: 144114 - protein, 395 aa, unidentified
MMLLETRIDEPTAIRTQLAAIFVSLELSRSNWLITSLSPGNGEKMSKHGVAAGDLAALLRLFAELQRKAQVRTGKSYPIITIHEAGLDGFWIHRVLQREGIESHVVDAASIAAPRRRRRAKTDKIDGEALLRVLLAYKRGEPRVCSMAVAPTPEEEDRRRICREREVLIDERIRHVNRIKGLLFAQGISGYAPLRRSRRAQLEALHTGDGRALAEHVKAQISRELDRLELLLAQIKAVEAERNALLATMAKVDDARTQASHPLAMLLGVKGIGAEFAAALWMECFYRTFANRRQLASYAGLAATPWQSGAVAHEQGVSKAGNPRVRTKMVQLAWLWLRHQPQSALALWFHEQGKRERKNWRKSAIVALARKLLVALWKYVSAGVLIEGATLKSAA

SEQ ID NO: 144115 - protein, 419 aa, unidentified
MFKIILNNCCGLDVHKTWIYACVGITDSHNQTHYHEARFTAFSKGLRDLCGWLAKLGCTQVCMESAGKYWIPVFNILEKTCKVTLAHPKYTKPMKGNKTDRKDARWICDLFMCGMVRPSFIPPPVIRQLRDLVRYRMKLTNMITGEKNRAQNCLTVSNLKLDDVFSDVFGKSARSITEYILAHPGETFDVAPFVDRRCKTPISEIQAAVDGTVSHEQAVKLRQCLDHIDELELHRSQIEAEIRRLVSPFTTALDLIHTVPGFDKNPLTAITVVSEIGADMSVFPSSKNLVSWAGCCPRNDKSNKTVKSTRISKAGSHLKPVLVQVANAVIKSKDHPEFGIRYRRIKAHRGHKKAIIAICRMLLTAIWNVLSKREPYSPDGYAVPQPSFVARPLTKSQGLALLRQMGYVIMNVTPPLVPA

SEQ ID NO: 144116 - protein, 376 aa, unidentified
MSQSTTLYVGLDVHKESITVSYALGGSRDEPTCLGPIGTRQCDVDKVVRRLQSKAKELVFVYEAGPCGYWLYRYLAKKGLACQVVAPSLIPKKPGDRIKNDRRDSLQLARSARSGDLTPGYVPEVEDEAIRDLSRAREDVVKDLKAAKFRLKSFLLRQDIRYSGKANWDAAHLRYLAAVVCPTAAQQIVFQEYLTAVCEHMERLNRLEDQLAEQVKAWRLYPVIEALQALRGVQWTVAVTVVAEVGDLTRFDHPRELMAYLGLVPSEHSSGEKRRQGSITKTGNGHARWALVEGAWGYRYPAKVSPSIRKRVEKVPKSIQDIAWKAQVRLCRRYRQLTSRGKHSNVAVTAIARELAGFMWAIAREVKAMATLQAAA

SEQ ID NO: 144117 - protein, 343 aa, unidentified
MDVGVLGIDLGKNSCSVVGLDPTGRVVLRRRMRRESIVGLAAKLSGCVVAMEACCGAHHLGRLLAAQGHEVRLMSPEYVRPYVKAQKNDDRDAEAIAEAATRPTMRFVALKTEAQLDVQVLHRVRDRLVGQRTALTNQVRSILLERGIVVPQGRRRLLDALQVISDQPDGSGVGPRVRLLLDDMLDQWRGLDRRISALDDEFAAMARNDPAARRLATIPGVGVLNATALVAAIGDGRTFSRGRDLSAWLGLVPRQASTGGRPKLLGITKRGSKYLRKLIIQGARAALPSLSRTTTPLGSWLRGLLSRAHGNTAVVALASKLVRIAWALLRNETAFAAGGLAAA

SEQ ID NO: 144118 - protein, 352 aa, unidentified
MEYIAFDCHKKYTYAVVEDEKGRVYWEGKIVHERGALAAFLKEECRPGSPVAVETVGNWYWIVEEIEQAGCVPRLVHAGKAKLMLGMTNKTDKLDARGLNKLQRAGTLPTVWIPLGDLRDKRELTRARITLVRQRTQLKQRIHATLAKYNLAIPEVGDPFGVKGRKLLKEKIAELPPETGAVTRMLLEQVEILDQRIAELEKRMEEVLAPSREVELLMTLPGVGFILATVIALEVGDVQRFPGPEHLASYAGMVPRVQQSGGKVRYGKTREDVNRYLKWAYSEAANVIARYHQKYAFRHVGQLYARIRERKGHQKAVGAVGRHLAEATWWVLHTGQPYQDPAICRLGRVMGA

SEQ ID NO: 144119 - protein, 315 aa, unidentified
MAMPVPVTKPIVGVDVAKNELMIYQAELDLLEEIPNNKAAIQKWLKALSGPVAIAIESTNIYHLEFADLAYEAGCTIYMVGGYELSHYRKGVNVRAKTDALDARLLARYLKNEGDDLHPWTPPSPLYRQLLSLFRRRAALVQARVGLVQSWANEPLLKAAFAEQVKSMQQLETLVEKTINDHLKEAGLLGQLKRCRKVEGIGFLTGARLLTAFQRGDFRNADAFIAFLGMDLRVSKSGQKDGRRSLTKRGDPEARRLLHNAAMSASRTPAWKGFYEEQRARGFSTTQALVILARKLARVVFALLKGQSEYQPKAG

SEQ ID NO: 144120 - protein, 467 aa, unidentified
MNNAKKKKRKNSGKLHNSLSQLDQINLNAAGIDIGAEEHYVAVPQCRDPEGEDVRHFNTFTVDLLSLANWLKKCKIDTVAMESTSVYWIPLFEILDSQGFDVKLVNPRFIKNAPGRKTDVLDCQWIQQLHTYGLLQGSFRPDDQICELRSYLRQRSMLISYASHHIQHMQKALEQMNIKLNHVITDITGVTGMAIIRAIIAGERNPEKLAQMRNSRCKSSKSTIAKSLHGNWRSEHIFSLQQAVELYDFYKSQITACESRIQQHLETFDDRSDGKPLPKPPFKSGGCRNKFHFDARTYLYQMTGVDLTRIDGIDTPTALTIIGETGIDMSMWPTDKHFSSWLALSPGSKISGGKVLSSKSKPCANRAAHAFRLAAYSLHKSNSALGAFLRRKKSHLGSPKAITATAHKIARIFYNMLKTGTEYVDLGQDYYERCYRDRVITNLKRKAKQFGYDLVNVKEHELLTTHL

SEQ ID NO: 144121 - protein, 342 aa, unidentified
MEISTIGIDLSKTTFHLIGLSPRGEIVLRKKLSRKQLLTFTATRTPLLIGMEACAGAHYLARALRDQGHDARLMPAQYAKPYVKTNKNDYLDAEAIAEAVQRPTMRFVPIKNDEQLDLQALHRVRDRWVARRTAVMNQIRGFLLERGIAIRKGPSYLTAQLQVIFTDSDTSFSGRLLHLIRELKHEWDELERKIEEASAELSRIAKLDDGCHRLMEVPGFGPIVSTALVAAIGNGISFRKGRDLAAWLGLVPRQHSTGGKTRLLGISKLGNEYLRRMMLHGARSVVMQMERKPSALGEWLTSLSARRHRNVTVVALANKMARIAWAILTKGTHYAAPAFVAA

SEQ ID NO: 144122 - protein, 344 aa, unidentified
MEYYAGLDVSLEQTSVCVVDTQGQVVREAKVASEPEALIRFLRGEGLELGRVGLEAGPLSQWLHAGLVAAGFEAVLLETRHVKAALSAMTVKTDRRDARGIAQLLRLGWYRPVHAKSASAQEVRSLLTARKLIQGKLLDIESGIRGVLRGFGLKVGTISRGRFEARIRCLVEGQAMLETVIGSMLTARAALQAEFARLHRALLALVRADPVCRQLMSVPGVGAVVAITFRSGVDDPMRFRRSRDVGPHFGLTPRKYQSGEIDVTGSISKVGDRMVRTALYEAASVMLTRTVRMSPLKSWALGVARRRGTKKARVALARKLAVILHRMWVDGTSFRWTNEASAMA

SEQ ID NO: 144123 - protein, 395 aa, unidentified
MRFVGVDIGKESHMVAAVDESQAIVLPPTPITEDAAGYGKLREMLGKPDATLVAMEATGHYWQNLFAFLVSEGFSIALLNPLRTRRFAEEDLVRAKTDAIDALVIARFAAQKRPPASTVSEEATLELRELVRLRDRWVQEFGDHVRQLHRLVDLGFPEFTRHVKTLDSVLATTILAEYPTAAAFKQARPGILANMRYDGRHAVGRALANDLIAAAKTSVGAHHSEAYQLQVRTLCEDITTLRRRLRRIEGEIERTLETHEVGKLLTTIDGIGPNSAARIIAEVGDPAAFRDAAALAAYVGVIPATNHSGKRQPLRAPISKLGNARLRRALWMPTLTAVRRNPWLHAFYQRLRARGKLPKVALIASMRKLLAAVYSVAKNRKPFVPRLPDHVGTTG

SEQ ID NO: 144124 - protein, 355 aa, unidentified
MDHIGIDVHKRESQIYILAEGGEVIERRIRTEPGRFAAVLGTRPRARIVIEASTDSEWVARCLEALGHEVIVADPNFAPMHATRTRKVKTDRRDARALAEACLLGAYRPAHRLSDPQRHVRGRLVVRDALVRTRTRYISIIRALLRQHGYRVPSGSAEHFVHRVQRLPLPGRLRSVVAPLLALMRPLNGQLTYSDATIEHLAVQDPRVRRLRSVPSIGPVTAAAFLAAIDDAQRFSHAHQLEAYLGLVPGERSSGETQRRGAITKAGHSRPRWLLIQAAVSILRRRPPQAEALRTWALRIAARRGKQVAVVALARRLAGILYALLHDGSVFEPQCGRRPRPPAAIAAPVGPVPAT

SEQ ID NO: 144125 - protein, 392 aa, unidentified
MGRRKSLRRRRMSFTMASSEQALEGVRYVGLDVHRKSVVATVLDEGGQVVQQAKFGPTDRELVEFLDQLPGRQKIALEACSMWQHYFDAARSTGAEVVLSDPFKTRLIAKTNRKTDRVDSQALATLLRLDSLPSVFAPPPEIRALRSIVRERVFYRRKTTSMMMRIYHELIARGIEYEDRILVHRRKREVLRKLGLPLVDRGLDAIRAMEETTKLLDGAIEEAWEASSDAQLLSTIPGVGKLTSVALVAFLCPIERFGSEEGVGSYVGLVPSTYQSGEHLYHGHLKRDSNGLLRTLLVEASWTHRLRCRRGSVAKIARRVSRRGGKGRGSIAAAHKLLKIIHAMLKRKEPFRVDAPGPSTAMQCVRRRETTALQSLRRATLGSPTANRLSAS

SEQ ID NO: 144126 - protein, 403 aa, unidentified
MKHVIAFDVSMGKSYMVIYNVQKQCVFESEIKHTKPDFKKLQEKIHKLTDENGESPEIVFESTGIYSRQLERFMQDNQYTYCLLNPLEAKLQCDSLRIHKTDRSDAHRLALTHFTVTRRVSNGTNNLFHQLKSLSRLYSELDSELSIIRGRMHKVIQLTFPELERMFTSKSDLFLNFVQLFPHPDCILGLSKTIIKNRIRANTNKKISNITAEKKAIQILEIAKTSYPAVSQNDVLCDQLKLYARRYQELLHQKECCINKMVYIAEQRAEYDIILSLPGIGPNTAVRLMAEIGDITRFNNNKQLNAFAGIDIRRFQSGKTFFKDKINKRGNKHLRKLLFLIIQNMIKQRRYGQNHVVEYYDKLKTQPYNKCHKVASIACVNKFLKLLFHLITHDIHYDYRLTA

SEQ ID NO: 144127 - protein, 352 aa, unidentified
MEQFIGCDAHKKFSVFVAVNEKGQAGEALRVAHDRQLYREFLARLPAHSAIAVEASGSYSWLVDEMERSGHDPKLCNPLEAKRRMGLTNKTDKLDARGLAILLRNGTLPEVWIPPSELRDQRELLRLRIFLVRLRTRVKNRIHGTLARHNVQVPGADLFGVAARRELHARLPELPVHSREAVEQELTTFDFLETQIESAEQRLEAIMKVSVEADLLKTLPCVGKILSMVLMLEIGRVDRFPAAAHLASYAGLVPRVHSSGGHTRMGQVCGNVNRNLKWAFVEIGNLIVINQRRHAGTHVVRLYQRIKRAKNHQKAVVAVARHLAEAAWWVLTKQEVYREPQNSRLALSSTHG

SEQ ID NO: 144128 - protein, 412 aa, unidentified
MNIRVEKSCGIDVHKAFLSATILTQTGIKNTREFSTSLEGLLDLRNWIVENDCQRVAIESTGIYWIPTYTMLEGKVETIVANPLQIKYIPGRKTDDLDSEWIAEVCLNGQIKPSYIPCREIRDIRELTRTHVKLNQAITAFKNRVHKILQRAGIRISVVLSDIFGKSGTIILNGILDGKSIEQIFGELKSKRMKATKAEIKEAIKGELSQSDIFVVKECLETIGFLNNKLKEVDSRTLQSLTGMKKELEILMSIPGIGFTTAAGVLAEIGNITVFPKPKSLVSWSGLAPAVNESAGKSSNSHITKRGNKYLRTFLVLAANSIAIGKPNKLRFFYQRIQAKKGRKKAIVALARKLACIVHHLLTNNEKYSEEELKGKKIKLPKLIQMQDLDLEEMIGILCEAGYTVNKSSVAG

SEQ ID NO: 144129 - protein, 412 aa, unidentified
MQVLYSRCCGLDVHQKTVVACVMITQPNGKVDKSIRTFATTTAALLDLADWLASLQVSHVAMESTGVFWRPIYNVLEDQFELILANAHEIKALPGRKTDVRDCEWIADLLRHGLIRPSFIPTKPVRVLRDLMRYRKSLVYQHTQQINRLHKILETANIKLTSVVSDVWGKSGQSMIKAIIQGESDAQTLSELARGTLRGKLPQLQEALEGRIQPHHRMLLQQIFAHLQFLESSMQQILKEIEAQMDPYQEVVELLMTHPGVQAVAAMGVVSEVRIDLSRFPSAKHFASWIGVCPGNHTSAGKRKHGKTTKGNAYLRALLAEIVWGISHTKDNYLSAQYHRLARRIGKTKAIVAVSHTVAVNFYHMITKRVAYQELGANYFDTLDRERLTKHTVKRLEALGYEVTLTPKEVSA

SEQ ID NO: 144130 - protein, 371 aa, unidentified
MDEFTKTLYVGLDVHKESIAVAYAPEERGTDVVSLGAIGTRQCDIDKLIRKLQSKSATLVFVYEAGPCGYWLYRYLTRQGFSCRVVAPSLIPRRPGDRVKTDRRDAVTLARLMRSGDLSAIYVPTIEDEAIRDLSRGREDAMRDLKAAKYRLKAFLLRQDIRYEGRANWNAAHLRWLSELVCPTSAQQIVFQEYVRAVTEQHERVQRLDTELREHVTRWRLSPVVEAIQALRGVELTGAVILIAELGDLTRFDTPRQLMSYLGLTPSEYSSGDRRRQGGFTKAGNSHARRALVEGAWAYRYPAKVSRHLQLRLERLPVEVQAIGWKAQVRLCKRYRQLIARGKHANQVVVAIAREMAAFAWAIARTVHVAS

SEQ ID NO: 144131 - protein, 345 aa, unidentified
MGAYVPIDLHRFRSVVMQMADDGEVLGWTRLANDPDTLVAEVLKAGEAPEVAIEATYGWYWAVDALQAAGANVHLVAPSKLTAFEGRRVKNDQRDCKVLGDLLRSKMLPEAWISTPQVREWRELVRYRAKLVAVRTGFKSQAHAVLAKLGVHVPMTDVFGVGGRQLLAHLCEHDARFHSAYGQRLESLVVVVDALDSEIAELTDSLAHLFRDHAGYHAIQHVPGIGPIIAAIFVAEIGDVHRFHSAAHLASWCGLTPRHHESDTTVRRGPITKKGSKLIRWAAIEAAQRLGHDTWLHAERERLAERRNSRAVAKTAIARKIITLTYYGLRDGEIRCLDRHSSRAA

SEQ ID NO: 144132 - protein, 346 aa, unidentified
MDSIDYIGFDIHKKTISFCVKAQDGRILDEGTIPARRPDLSAWAKRRSRPWWGAMEATLFTGWVYDHLKPLAQELKVAHPAMLKAIAASKKKNDKVDARKIADLLRCDLLPECYMAPSAVRELRRVLRYRNLVVRQATRMKNRIAGLLMETGTVYNKERLHGKAYFSELLESLREIPGSVMELLKLSRAQLEFFATIQQRLVKGLRADAGLRERVERLQSIRSVGEILALTWALEIGEVNRFPSIAEAVSYCGLTSAQRNSAGNEHRGPISKQRNKHLQTILIEAAKLAPRYNPQLAVVHERERKRGDCNQATLAVARKLVAYLMAVDKSGKPFQVRASAGEGEQT

SEQ ID NO: 144133 - protein, 314 aa, unidentified
MQYIGIDVSKDDFHVAWNDEKVQIFANSKEGISSFEDSLHHLQYDRQATQIGLESTGIYHLLSSVLLTDHGWAVVVINPYITSKAIKSSLRQVKNDRKDALVIRKVLMLGEGYLFTDTPEILRLKALLREYTSLTKMKAKCKNIISIQNKYQQTTDEALDSVFPQLIDSLNENLKQMKKRLQKTNSEEQKLLQTIPGIGPVCSSALVAFIGNVHRFDHPKKLVAYLGLDCRVHQSGTSINGKGFITKRGNPVLRSLLFNAAYVARQHNPELKMFFEKKLSEGKHYFSATCAVERKLVGIVYAVWKRKTPFVKCD

SEQ ID NO: 144134 - protein, 454 aa, unidentified
MPKTTSGSRPEFKPVNVRAAAIDIGSKMHMAAVDPACTDTPVRAFGTFTQDLHDLADWFKACGVTSVAMESTGVYWIPAYEILEQRGFEVILVNARYAKNVPGRKTDVSDAAWLRQLHSYGLLRGSFRPDAEIATLRAYLRQRERLVEYAAAHIQHMQKALMEMNLQLHHVVSDITGVTGMRIIRAIVAGERDPDVLATHRDVRCHSSSETIRAALVGNDREEHVFALTQSLELYDTYQAKMLDCDRKLECLIAALSNGGTKPVGKLPKPRVKNKQVNTPSFDVRTALYGVLGVDLTEIHGLGPSLSLKLIGECGTDLSAWPTAKHFTSWLCLAPGNKVSGGKVLSSRTRRSSSRAAALLRLAATTVGRSDTALGAFYRRLALRAGKAKAVTATARKIAVLFYNTLRHGMTYRDPGADHYEEQYRSRVVANLRRRAKSLGFVLHAAPGGQLAVS

SEQ ID NO: 144135 - protein, 355 aa, unidentified
MSQEKYIGMDVHQATVSAAVRDRNGNLLMECILETKADTLLEFVQGLHGTLSLAFEEGTLAAWLHDLLKPHVNRVVVCDSRKAALLRDGNKNDRIDARNLSELLRTNQLKPVYHGEHGLRTLKELGRSYLTVSKEMTRTMNRIKSLYRSWAIPCAGTTVYAPRHRRQWLAKIAEPGARVRAEHLYEQLDHLQPIRVRARRELLQESNKHDAVKRLRQIPSIGQIRAALLVALLQTPHRFRSKRQIWAYSGFAIETHDSGEYRYVRGKLQRNRERITVRGLNRNHNPDLKNIFKGAAISASSRPGPLQDFYETRVAMGMRPTMARLTLARKIAAITLTLWKKGANFDPQQLSRQAA

SEQ ID NO: 144136 - protein, 344 aa, unidentified
MNTIKVVGIDLAKSVFQLCVWMNDGTVAWNRKVSRSKLLDTVRQFPPDTLIAMEACATSHYWGRTFQSMGYAIRLIPTQHVKALTRHQKNDANDALAIYETAFRPGIHFVAVKTVEQQDIKALRCARQLMVEQRTAAANQIRALAAEQGFEFPVGIHTLQQRLPDLIEDAEKPVSPVFRHLLSTLLENIHALNEYIRSTEYEIAALCQQQPRYRALMTIPGVGPLIAAAFLSEVDAEQFANGRQLSAWCGLVPRQHSSGGKHILTSMTKNGNWDLRTLIIHGARAVIRCAQKRDDNLGRWLNHVTERRGKMKATVALANKLTRIVWRLLYEPVDFNMDKAFAMK

SEQ ID NO: 144137 - protein, 410 aa, unidentified
MVKENFIYVGIDLHKETHTAVMIDCYNQKLGEITFPNRPADFPKLVTKVKKCNTDAKEVVYGLENAYGYGRPLAVWLIDKGYFVKDVNTAISHRQAKHRGAMYRKSDSDDAEAIALATLNMLDKLPDACPNDAYWSLGQLVHRRDNIMKQRTRLVNQLHEQLCIAYPSYKSFFNDISRPTALYFWEHYPSKKYLKGKSVEDLRAELVPVSHNKCSTKTCEKILDAVASDKVKNNAYQDARDMVTLSIVSDLQHYGSQLTEVDKMLEQMYKMLGCTLTTIPGVNVITAVKILAEIGDIKRFANANKLAQFAGIAPLHLSSSGKGKDLATKQGNRRLQATIYFLAIQMVQVSSKGTPRNSVVRAYYEKRKAEGKTSQQALICISRRLISIIYGMLKHGTEYRMPVVESAGEK

SEQ ID NO: 144138 - protein, 452 aa, unidentified
MEIKKQISLEVVHPNACGIDIGSRSHWAAVGQNAEDVKEFGVYSQDQLEMCNWLHSKGVTSIAMESTGTYWQNLFSTLVGQGFEVILVNGRQTKNIKGKKTDIKDCQWIQKLHSLGLLSASFLPDSDTDTVRTYSRHRQNLLKQSASCVRRIQKYLRLMNMRLEVVVRDVVGLTGSSIIEAFLNGEHQGEDLAKLRHYNCRKSEEEIAKALQFNGRKDYLFALQQEWNSYKHLQQQITETDLQIDQLLKELIDKDDHKKQHTIEKKKHKRKNKNAVSQTDMNLIAYQYFEGVDLMAIEGVSEGLIMTLIAEIGLDGIRKFPSAKQFTAWLRLAPNNKISGGKVLSNHIPKGSSRLKIAFRNTANAIGNLKEGWLADFFKRLNYKKGRATAVSALARKLAVIIWNMLVKGQSYQPPSLYLFLDEKRKIAAAKRIQKQITKFGLTDRDIEITKY

SEQ ID NO: 144139 - protein, 357 aa, unidentified
MDNNTICDPTKAADYDVFIGMDVDKRSIALTTRDRMGIGKSLKMSYDPDMLLSYVHNHFDGKSAAFVYEAGPTGFGLYDAIHEKGYPCIVVAPQTIPTTRGKRVKTNRLDSVKLADLLRGGQLSGIRVPPPAYRELRELTGLRNSQIDAVRATKCRVKSLLLNNSLAFPDPLSRWSKRAICNLRGLSCNKAVHFKLNTLLDDIEWHQNQALKTQVALRQLIESEPEFAESMGFLMSMPGVGWIIASYTLARIGDWRLLGRSDETSSFMGLVPCEDSTGDDTNRGSITKAGDQRLRSMIIQGAWTAIRNDRELGEFYERVRKNHPAHTAARIAIVAVARKMAVRMHCVLRERRNYEKK

SEQ ID NO: 144140 - protein, 379 aa, unidentified
MQSIRTLAGVDVSGKALEAKRRRDDEDESREFSNDGAGHRELLKWIGRGARVCIEATGVYHLQLALMLTAAGVEVMVINPRVARDFGSALGNRSKTDRVDAATLLEYVCRMNFVAWKAPSWAVLELRELGRRLSELVHTGAEEKNRFHAKKAAGISTTVINDVKAHGAQIQKRTKEIEKSAVALIRGDADLREQFEILTNIPGVARRSAVLLLTELAVLDPTMTVKQIVCHAGMDPREYESGSSVQKPTRISKVGNARLRAILFMPALTAIRHDRGARLFFAQLMARGKKKMQAIVAVMRKLLHGIWIVLQRRVPFDSAVLFAASLAKAESSDSAVAANPPEPSKDHPKGRSEAQELRHQLDPGSAQATRSPRRRSKAA

SEQ ID NO: 144141 - protein, 415 aa, unidentified
MSLSVLYARCCGLDVHKKTVVACLLLTAASGRVSREVRTFATTTAGLLALADWLSRQEVTHVAMESTGIYWRPVFNLLEGSVQVILVNAQHMRAVPGHKTDVKDSEWLADLLRHGLLTASFIPPKPIRDLRDLVRFRKNVVQQRSQSINRVQKVLETANIKLASVASDVLGKSGRAMLEGLLAGVSDAETLAELARGRLRAKLPALREALEGRVEATHRTLLRHLLDHISFLEGELERLHGEIDALLPAYEQQLARLMQIPGIGRSAASAILAEIGTDMSRFPSAKHLASWAGVAPGNKQSGGKRLRAATNKGNTHLRAVLAEVVWVISHTKDNYLSAQYHRLARRIGAKRAIVAVSHSLLVIIYHLLRDAQDYHDLGPHFFQTLDTTRQRDTAVRRLEVLGFKVTLEQRKEMDA

SEQ ID NO: 144142 - protein, 397 aa, unidentified
MTKKHTQTTLDVSIEYSAIGLDLAKYDVSLAAVTLNEGEIICIDRVTYAELYELADKLSPTLFAVEPCCGYSQLALELEARGHEMRVINGKVVKMWIDTHMSGQKTDINDALALARLTADPDLRPIRAKSLEECRIMTVQGVRQQLIGQRTKTLVSFKGFAQTWGIHMPAGRRNLKKMREAVEAKADMMGDAAVSALTTMLDRVKTLDDQIHQLDKDLEALVSANANGRLLKSVMGVGTQIAARFITVVGDVKRFETSRSLVAYIGCVPKNYITGHVNKPRQKKSSAPDLSSKGQGRISRRGDKLLRSLLMQGAACIYMQYCKRQLPDCQLTKWIDKQLAVRKPYGKIMVSLAAKLIRIAWAVLTYGKKFDIHRAGVPRSVLAAMAVQPSNEAAAAA

SEQ ID NO: 144143 - protein, 372 aa, unidentified
MQQNTTYVAFDTSKETIAVALAEGGRRGEVRFFGTIANRPEAVRKLVDRLTGRHSQLAFCYEAGPTGYGLYRQIQALGHHCQVVAPSMVPVRPGGHIKTDRRDATTLAALFRAGELTAIWVPDAAHEAMRDLVRARHSAMEGVRRARQQLLSFLLRHGRIYPTKRHWTRAHRRWLAEQRFEHPAQQIVFEELIQAVEQVMARRDRLEQQMIALVPNWSLQPVVAALQALRGVAMVAAIILAAEIGDFRRFANPRQLMAWLGLVPREHSSGASTSRGAITKAGNGRARRLLIESAWTYRLPARIASQLLARSAALPEAVKAVAWKAQVRLCARYRRLRCSGKPTNVVTVAIARELAAFAWAIAIIVMPAPQTT

SEQ ID NO: 144144 - protein, 368 aa, unidentified
MGSIEAFVAFDVAKLKHAVAIAEGGRSGEVRFVGEIENKPATIERTIKKLSKRYSPLHVCFEAGPTGYGLYRQVRDLGHDCTVVAPALIPKRSGERIKTNRRDAVTLARLHRAGELTGVWVPDEVHEAVRDLVRAREAAADDLRRKRQQLLSFLLRHGRIYDGGGHWTLAHRRWLARQAFEHTAQQIVFQEQVEAIAEAVERLHRLDGQLAVIVPTWSMAPVVEAYQAMRGASFLVAVIFAAEIGDVRRFDSPPQLMAFLGLVPGERSTGETVRRSSLTLAGNRRARRALVEAAWTYRYPARVSETLRARLEGLPKAVRDIAWKAQVRLCARYRRLSAAGKKLPVVVAAIAREMAAFLWAIGREVAPA

SEQ ID NO: 144145 - protein, 322 aa, unidentified
MHPFQLGIDVAKAKLDCALRLTSGKFRHKVVDNTPAGFKALDSWLAKECATTLHVCMEATGTYWEAIAEHLAERPATTVSVINPAQIKAFGASQMVRTKTDKADAKLIAQFCAERTPEPWQAPTPAEKTLRALVLRLDALQTMHTQESNRLEVARESVAEGIAKHLTWLDDEIARLSKAIRNHIDNDPTLKDKHRLLDSIPGLGERTTAVLLAFLAEPARFENARQAVAFAGLDPRQHESGSSVRGKPRLSKVGHSFLRKALYMPAMVALYRTDWGKLFRDRLAAKGKPPMLIIGAMMRKLVQVSYGVLKSGQTFQPGLHGA

SEQ ID NO: 144146 - protein, 337 aa, unidentified
MKLKRIGVDLAKQVFQLHGVDSHEQAVCRKQLKRSQMLDFFRRLEPCTVAMEACGSAHYWARELRTLGHEARLIAPQFVKPYVKSGKNDANDAEAICEAASRPSMRYVEVKSAEQQAGQALHRIRSRLIRARTALVNEIRGLLGEFGLVESRHGIAATRRLAQTALDAQNGLPGQMRELLAELRGELDEHDARLSRLDDMIRRQAREDERVGRLMQVEGIGPITATALVSAVGDARQFRSARQFAAWLGLVPRQHSSGGKERLGSINKRGDTYLRTLLIHGARAVFRHCQDKADRRSQWLRQLVCRRNPNIATVALANKNARIVWAILSRGEGYRPS

SEQ ID NO: 144147 - protein, 404 aa, unidentified
MSAIVPIGDDPSKCRFVRNEFDTFTEQGLKSLVEFLSPLDVEMVLMESTGVYWMAPYDALLEAGINVAIGNAHEIRGMRGRKTDRNDADWLARVAKHGSFHPSYVPGREYRGLRSLARYATSLRGTLSSEKNRLGKLFNAAGYRLNSVFSDMFGTGGMICVRGVLNGERPEEILGKVPAPGRYKHTRGEMLLALGGKFEDGDLFAARSVLETIDHLEGKISECVGELERIVRDKEERKLELLQTIPGIDALAACLLLAELGGGGLEAFESAEALCAWAGLCPSQNESAGKSRPAKSRKGNKYLRRDVCECASSAVKTRGTTMRSKFQHFMQRGKGYKKSIMAMGRKLLTYVYYVLKKNQPYVDPKIDYQKQHAEKNFQRFAAQLRRCTTKYDIQIINRETGEAV

SEQ ID NO: 144148 - protein, 341 aa, unidentified
MDHYAGIDVSVEYSSVCVVDGCGKVVREGKVASEPEALIGWFGSLGLSLARIGLEAGPLSQWLFAAMRDAGLAMELLETRHVRNAFKTMPVKTDRKDARGIAELIRLGWFRPVHCKSMAAQETRAILTARKQMQSKLHDVEMSLRGILRGFGLKVGKTTPKQFDGRIRELVGGHPTLEVIAEEMLGARAALLRAFNGFEKRVRAMARHDAKARLLMTTPSVGAIVALTFASAIDDPARFRSSKSVGAHFGMTPKKYQSGETDYSGRISKIGDSCVRTGLYEAAHVMLTRPVKGSALKSWAMRLAKRAGMQKAKVALARKLAVIMHRMLVEGKPFNLAAPAA

SEQ ID NO: 144149 - protein, 331 aa, unidentified
MMSLPNRTNETPLTVGVDVSKATLEVGFSDRDVTLAPANDEAGHAALLAHLAALRAKGSEIGLIVLEATGGLELDVATALQLAGYAVVIINPRQARDFARSMGFLAKTDRIDARVLAHMGQTLLQRDDLRKLIKPLPDEGQRMLQALVTRRRQLLAMRIAEQQRASGPDRRMRRSLNIILKALDRELARLDKDMQAFIGEHHAELAALLNQVKGVGKATISTLLAEVPELGELNGREVSALVGVAPINRDSGTMRGKRTIFGGRPSVRKVLFMAALVASRHNPVIKAFYQRLLAAGKPKKLALTACARKLLTILNAMARTRKPFNAALHLD

SEQ ID NO: 144150 - protein, 359 aa, unidentified
MTSMQDAPRRRRVVVGVDTHKHIHVAVALDELGGRIEARSFAADRSGYEQLIDWASSLGREVMFGVEGTGSYGAGLASAIRRRSIGVLEVLRTDRRDRRLRGKSDTIDAENAARAVLNGQASAVPKSADGTVEMIRLVKVAKDVAVKARTSAMISLKAVLVNAPAELREQLQPLTKMALIRRCAALRPGPVTDPMTAAKHTLRAIARRWLALDAEIKAHEQMLNRLTTELVPDLVAAFGIGADIAAEMLIVAGDNPERVRSEPAFARLCGVAPIPASSGMTTRHRLNRGGHRQANTALYRAVIVRLQYHQPTQAYYQRRTAEGRTKAEIIRCLKRLLAREIWSYLRPLRQARQPLVLAA

SEQ ID NO: 144151 - protein, 354 aa, unidentified
MKDYTNRKVFIGIDVHKKSYSIAAICNGSLIKKTTMVADPQVLLSFLHNFKDAEIETAYEAGFSGFHLHRFLAGNGIKNMVVHPASIEIASRERVKNDKRDSLKIATQLCAGRLKSVHVPQCSREDFRLISRLRNSFVKDRTKKGVQLKSILHQLGKIPYDDTTITSKKWIEKVLKMEFSPDQYFVIKCIADQWMHLTTEIKKIDVMLNIQAKNDIELEKIYTSIPGFGSIIARVLANELGDMTQFANERQLFSYTGLTPREYSSGEHKRLGHISRQGKPILRKMLIQAAWITIKVDKEFCELYLAISQKAGKKRAIVAVARRLIGRVKTCLKEKRPYRISASAATQSCLVSTS

SEQ ID NO: 144152 - protein, 430 aa, unidentified
MPSPEKPSKRKKTKSTNPAALPILQPRVAGIDVGSTQHWVCGPPRDGKPNVRVFATTTEDLNALADWLAKQGVKSVAMESTYIYWIPIFELLEARGLDVVLVNARTLHNVPGRKTDFSDCQWIQLLHSCGLLRGSFRPSDAITRLRTLHRQMTNFVVERGRCTQWMQKSLDQMNVQVHRAVSDLTGTTGMAIVRAIVAGNRSPKNLAKHRDPRCRKSEEEIARYLTGNWREEHLFNLAAALQHYDSLEKTIASYEARLLEELTNLQPPERKHQSPSPHPNPTKEKTIRLRGGEARTTLWRFAGADLTRIDGISTITAQTVLTEVGPNLAAFPSEDHFVSWLRLCPRTSVSGGKPLKKKRNGLGANRVAAALRMAASTVGKSKTALGAACRGIARHKGGVAVFATRTAPRSARLPNAALRPRIRRHRRSRL

SEQ ID NO: 144153 - protein, 352 aa, unidentified
MQDTIIIGVDTHKDAHVAIAITNLGARLGTLSIPATAAGYRKLVRWANIHGAVQAYGIEGTGSYGAGLFRALTLQGYHVIEVDRPNRRLRRQHGKNDTIDAEAAARAVLSGEARTRPKSGDGEVEMIRQLKIVRDTAMKARSQAMVTLKTLLVNAPQLLREQFIAITGRMTLIRALAALRPGPITSTTASAKTALRMLAHRWLALDVEIRELDHALETLVRLRAPTLMAAPGISTGTIAEMLIVLGDNPERIRSEAAFAKLCGVCPIPASSGKTTRHRLNRGGNRQANAALHRVAVVRMRSHPSTKTYVQRRTAEGKSRREIRRCLKRYIAREIFNNLCKPATQQEEASNAA

SEQ ID NO: 144154 - protein, 343 aa, unidentified
MDHYAGIDVSLEYSSVCVVDASGRIVREVKVASEPEALIGWFGSLGLGLARIGLEAGTLSQWLYAAIKQAGLAVELLETRHVYEAFKSMPVKSDRNDARKIAQLMRLGWFRPVHCKSITAQEIRAMLTARKLVQSKLLDLENSLRGILRGFGLKVGKTSDRSFAGRIQELVKGHPNLEAIGEALLSVRAVLLREFSAFEKRVRAMARSDARTKLLMSTPAVGPIVALTYASAIDDPARFKSSKQVGPHFGLTPKRYQSGETDYSGRISKVGDAAVREALYQAAHVMLTKPVKGCPQLKSWAMRIARRAGMSKAKVALARKLAVILHRMLANGTPFNAAAAAAT

SEQ ID NO: 144155 - protein, 337 aa, unidentified
MNFSFHFFQDQFMKKIIIGIDISSKTLDICLQRDSKTEFVTIANDVKAINGFFKKLAKQEVVVAMENTGRFNWQLYEALPKYNFAVYVISALHLKKSMGLVRGKNDRVDAERICKFIQKNQDECGVWKPVAANIQKMKVLLTERTSRIKMKRQLLAQQSDYKLMNTIGLEKQLAKMNQGLIESIQQQIEKLETEIEKIIKSDESLKEQAKQIQSVPGVGPITCWSMIAKTEGFTTITEPRKMACYCGIVPFDYQSGTSIRRQPRVSTYADKSMKSILHLAAMSAIRFDNKLRDYYQRKVAEGKNKMSVLNAVRNKIVHIIFALIKNQATYQDHLVLS

SEQ ID NO: 144156 - protein, 470 aa, unidentified
MRLGSKTNTQEVAAMKRSAISISRNPSRRAKRPYIGILSEQEQRAMNTVQHDEATQPAFAALVGLDWSDEKHDICLLAEGASKPETSVIAGTPEAIQDWIQLLQKRFGNRPVAICLEQSRGPLIYALMNYAFITLYAINPVQSAKYRETFAPSGAKDDPVDAGLLLDLLRRHRAQLTPWKPDDVQTRTIRGLSEERRHAVDMRTKCIQKLTARLKMYFPQALDWFADDLASPMACDFLLHWSTVAEVKKAKSATLRAFFHAHNCRSEALIAQRLDAIAKAVPLTEDPGIVTPAILTVQTLARVIRDLSSAVTKFDQQLAGVFASHPDAPIFNSFPGAGNVMAPRLSAAFGSDRQRWPDAGALQSFSGIAPVTERSGKSTWIHRRWKCPKFYLQTFFEYAQYSIPYSVWAGAFYRQEIAKGKRRNAVIRALAFKWMRIQMACWQQRVPYDESRYLQSLIQRGAPLAKLIQT

SEQ ID NO: 144157 - protein, 416 aa, unidentified
MKPWQDLTHYAGFDWAKDHHAVVIVNSEGRIVADFELDHSLEGWKSFADKTSAWPHLAVAIETSQGAAVDQLLQREYTIYPVHPVAAQSYRQRKAPSGTKTDHLDAWGLADALRTDGHGWKALQPLDPLTQQLRLLCRDEVSLIEQRTALVNQLQQALAEYYPAALEAFDDWTNAFTWEFVLAFPTPQALVSAGKRRWEKFLHTHKLWRPETVEKRLGLFAQADQFKASEPIVRAKSQLAVSLCKLLGTLGKQLALYRKQIEALFRDHPDHDLFGSLPGAKKILAPRLLAAVGGDPKRYGSHAVLQSIAGTAPVSYQSGKLNKVHVRWACDKFMRHTVHLWSDCFRKASAWGQTYYEHKRQEGMTHVCALRCLGQRLLKILFRMLTTKTPYNAELHARNQQKHGSWVLKLVNKPAA

SEQ ID NO: 144158 - protein, 429 aa, unidentified
MSQADMPSSPIDASVYQYIVGIDIGSQMCSCCMLKPDKSQVIKPTEFPNAMPGFTFLQERLEALGVDPHHILIGLEATSRYGENLYRFLENGGYTLCLLHPRQTHQFAQQRGLRAKTDRLDANTIARLLLSGEARRGYVPTERIATYRELVRLHTQLSDDIARYKNEIHALLIVLFPEFTQVFADPSRPTALGLLKRYPSAQAMAAAGLQAITSTLQELAPRHFGQKTAQRLLQVAQQSVSSGIAASARARSLAVLCDQLEHTQTNLEQLEEELDRLLEADDDAKKLQEVPEFGRKMVAVLRAELGDVTRFQRADQVVAYAGLDLQVRQSGKWKGETKLSKRGSGRLRRLLYMTAVRCTRLRDSAFGQYYQRLVARGMKKMEALMAVMRKILLVAYRLLRTRETYDPTKVCAAPAQHTPSSPKLAATRG

SEQ ID NO: 144159 - protein, 354 aa, unidentified
MRTEHFISLDVHCEFSEMAVVTRSGRLTKRHRCATAIPPLVEAIVGVPRPRYVTFEEGPLADWLCRHLSPHAERVLVCEPRRNHLIAKDSDKDDPIDAEKLAQLFRGGFLKPVHQTASIERSIFKQHVGLYHDSVRQRVRRANRILAQLRRHGVFVKEDEMQTSEQRESLRSRLPSSRLLGEDLQWLWREYDVLVDESNSFEKTLTREARSFEPIRRFVKLPGIAWIRGATFFAYIDTPWRFRGKSPLWKYMGVGLDRRHSGGGRTQLHVAKQANRILKGMILGAAVTAIDQGANPFADQYERWINEGGLSPRNARRNVARSLAATLWGMWKNGTEYRPDWVGGGFGKERDASL

SEQ ID NO: 144160 - protein, 412 aa, unidentified
MRLFVGDDWAEDHHDVEVMDEAGKVLARRRLPEGAAGMAQLHGLTGQFVPEDEMDSAEVVIGIETDRGPWVMALIAAGYTVYPVNPLQASRYRERHGVSGAKSDAGDAHMLADMVRTDSHQLRPAAGDSPEAAGIKVLARTHKTMIWDRTRAVQRLRHQLRDYFPAALEAFEDLDAADTLELLGKAPTPARAAKLTRAQVSAALKRARRRNIPDKATAILAALRSEQLGQPPALTDAYAATARSFIVLITTLNEQVKALQGQVEEHFGRHPDAEIYLSQPGMGKILGARVLGEFGDDPRRYRDGKARRNYAATSPLTRASGKKKVVAARFIHNDRLVDALNAQAFAALNASPGARAYYDELRDRKIEHNDALRRLANRLVGILHGCLKTGTLYDEETAWGHRANLSQSSAAA

SEQ ID NO: 144161 - protein, 281 aa, unidentified
MNIPQKETASDSKPPQFAGIDVGAEELVLVIRKNSKSLNPQKFTNTPSDRARLVNKLAKLSGITVCLEATGVYHFDLSLALHDAGVSLMVLNPKASHNFAKVLMKNSKTDAVDANTLAEYGERMAFVAWTRPSNEKITLRSFARRIHSLTKQKAATKNHLHALTATTETPKAVLKDASLAISQLEKRIDCLTTAALLLIVKHPELARILHLLISIKGIAETSAIALMGELLLLPPDLSHRQWVKFAGLDPQAFESGKSVHKKTRLAKSGNAHIRAALVCPL

SEQ ID NO: 144162 - protein, 331 aa, unidentified
MKKNQIIVGIDVSRSTLDCCLHSMGKHFVVENSAKGFSLLIRTVVKLSKGKKDELLICFENTGKYSKALSVYLHTHGIPFVMVPALEIKKSLGITRGKNDQVDSKRIANYAYEKKERLTLTVLPGAKIDKLKTLLSLREKLLKHRTAYKNGLSDLHDCYGRGETTILRKVQQRMIKAVNDEIDVVEKEIEDIIKSDEELKRNFELILSVRAIGRIVGYYFLAYTENFTSFIDGRSFACYSGIAPFANSSGIFIGKSRVHPYANKQMKSMLSMAAMAAIQISGEYKEYYNRRIEAGKNKMSTINVIRNKIVYRVFAVVRRGSPYVDLNKFAA

SEQ ID NO: 144163 - protein, 341 aa, unidentified
MDHIAIDLGSRESQVCVRDSTGKIVHEQKLSNLDLLEMFDCPKAIVSMESCAEAFAVADGARSRGHEIRVVPCSIVRSLGVGARGIKTDKRDARALSRASCQLEDLPSVHVPSSWSRQVKTLCGLRDALVSSRTKCTNAVRGWLRTQLYRPRLPRTTLPRTLREEFATRGQSLPSEVERQLVAIEALNDQIKAADLHIDAMARASDVCVLLMSAPGVGPQTALRFTAALDCYDRFADAHQVASYLGLTPGEHSSSSRKRITSITKAGSAPVRWLLVEAAWTALRCRRDDAMCRWALRIAQRRGPKIAVTALARKLAGILYAIWRDRRPYDPAIVAPTSQGR

SEQ ID NO: 144164 - protein, 344 aa, unidentified
MTYYAGLDVSLRTVNICIINEQAERVAETKLASDVQDIVAYLDSLELDIEKVGLEAGTLAQYLTYGLQSAGFEVICMEARQVKAALSAMRNKTDKHDARGIAQLLLSGWYSRVHVKSMQSHHIRMLLSSRKAVLGKCIDLENEIRGLFKIFGIKLPPKLGHGAFDAAVRDIIEVDETLSHALLPMLDARLVLYQTFRVLDNRTRHLANDDPVCQRLMSAPGVGFITALTFKSGVDDPGRFKRSRTVAAHFGLTPRRFQSGEMDIEGHISKCGDADVRCALYTAANAMLTRSSRWSSLKAWGMKLAKTRGHRKAVIAVARKLAVVLHRLWIDDTQFCWGNEGVRS

SEQ ID NO: 144165 - protein, 346 aa, unidentified
MKKIFIGIDFSKEKFDATLIKAEGLKECAPSVHEVFDNKTSGFRRLVKWVKAQSESASVDSWLFCGENTGGYSIGLSNHLYASGYDMWLECAYRIKHSAGIQRVKNDKADSKAIAEYAMRNYDKMILYKPQSSSLTCLREVFLYRHSLVRQKVSLQVRRDEKRLTQERSDARAFMSFTSKHLITEVNKAIAKCDQKIKDIIAADDELREIFDIITSMPGIGIQNATCLMVYTDNFQKFELNARKIGCYYGIAPFGRQSGTSVNSRPQVSPFANRMIKSLLSQAALAAIKFDMNVYNYYQRLKERGKHPLLIHNNIKNKMLHALVAMVRDRVKYNPDYVYRTNKEIS

SEQ ID NO: 144166 - protein, 344 aa, unidentified
MDHFAGLDVSVKQTSVCIVDDAGKIVREVKVASEPEALLTVLTNAAYRFKRIGLEAGPLSQWLFSALAEAGLPAICVETRQMRAVLKAQINKTDRNDARGIAQMMRVGLYRPVHVKTLRSQKLRMLLTHRKLLQSKAIAIENDLRGTLRNFGLKVGMVGAVRFEARIRELVENLPDLAALVEPLLIVRRTLREQFRILHRRLLVIVRDDEVCRRLMTTPGVGPVVSLTYRATVDVPARFRKSKAVGAVFGLTCAKYQSGEVDWSGRISRCGDEMMRVMLYEAAQSMLRSKKWSWLKAWAMQIAKRRGMKKAIVALARRLAVIMHRIWVDGTEFRWTREQATAAA

SEQ ID NO: 144167 - protein, 345 aa, unidentified
MNCFCGIDLGAKRSQVCIIDNDQKVLVNRKVANDIEIIHKLIRPHGLVPTVIESTFNWYWIVDGLQARQVPVTLAHSLKLAAITSAKVKTDKRDALTLAQLLRAKMIPTSYIYPAAQRPLRDLLRQRWDAVALRADEYRKMRGRLYREGITTVGSNDVKLMGEEEVNELLDHPLIRRQMMMNIERVELLTRQIRSLEKELLSQVKTRQDFRNLMTIPGIGAVLALTLLLEIGDISRFPKARLFASYCRVAPGCADSGDSHRRGRGNKQGNPYLKWALTQAAEYARRFDPRFTDLFNAVLHKHPGASGTIITHCIVAHRISFAVYHVLKDGTPYNPEKLFRTNPDT

SEQ ID NO: 144168 - protein, 394 aa, unidentified
MKLVGIDVGKNSHHFCVMNKETGEFNVTPSSFSNNKEGFDFLINSLKPYSKKSILLGMEDTGHYHVALLKFLLSNGYTVALINPKTTDLTRKMEGGITKNDKLDTITICDVLDTPERKKQYRITKVDRFDLYEQRQLTRHHHNLKEELNIYCNRLQKSIDLVFPEFNTLFGSKYGVVYMNLLKTFGSAEAIASTDIRTIRKCFEIKGRGGRISLTAEKLKECAKNSIGISSEVETIQIKHLVSQIMLIKEQIAEIDKKIEEFSIKNNSPILSIPGISHFSGTSILAELGDIGNYSKPSRIIKFAGVAPYHYESSQYNAQHTAITKKGSKYLRKTLYQVILPVINNNPVFKKYYRLKISQGKGHRCAQGHCIRKLLRVIYHLLETGQSFDPALLR

SEQ ID NO: 144169 - protein, 412 aa, unidentified
MKEKVEFEQVIERGCGLDVHKETVTATIKGEGIKQETREFSTYTRSLISLRDWLLKNGITHVAMESTGVYWKPVFNILGEHFQIILVNARHVKNVPGRKTDQLDSQWLAKLLMAGLLKASFIPIKKIRELKDLVRYKTKLTRQVSSEKNRFVKILEDANIKLSSVLTDIFCVTGMKMIREIIECDYDPDKLLYHVHGSVKKSRSEIKEAITGYVTDHHRFMMQTILESIEKTEDIIAKIDSQIAEQTKEYGLEIELLETIPGVGHDGAIGIISEIGVDMSVFPDEKHIAKWAGMCPGNNETAGKKKSSRASYGNAYIRALLVQLAWSASRTKKTYLSSKYKSLVRRMGKKKAIVAVGHKILIASYFIIKDKVAYNELGEEYLSNFRKDKLVAYYKKMLQELEPNLEFETKVA

SEQ ID NO: 144170 - protein, 350 aa, unidentified
MPEIATIGLDIAKNVFQLHGVDRSGKIVLRKALRRSQVPGFFKALSPCLIGLEACATAHHWARTLMAFGHVVRLIPPAYVKPYLRRQKNDAADAAAICEAVTRPSMRFVPVKTPQQQSALMLHGARDLLIGQRTALINALRGHFAELGFVVAQGARNTRHLIALIHDDASPDLPVTARVALEPLAAMLLEIEAQIARLDKAILAAHRSDPVSIRLASIPGIGPIVASCLSASVPDAGLFQGSREFAAYLGLVPRQHSTGGKPRLGSISKMGNRYLRKLLVVGAHAALYSMKSGKTRTALADWARSLLAKKPFKVVAVALANKIARIAWAVMARSVVYEPGSHGAAAPTAS

SEQ ID NO: 144171 - protein, 368 aa, unidentified
MNNIGGVEVRRQDGPSRPPHPPDGTPVWMAIDISRSKAVYCLRWAGSEQRRLSTPWGIEHVCAVVEAYRGCQLHVAYEACGFGYELAWWLQEHAVRVSVIAPSRVERAPGLQVKTDRVDVGKLARKLEKGELKAIYIPPRRVHERRQLGRTYAQSLKERKRAQVRIRSLMQEQGRLGPLPVAGWNVYSRWLAGQDLPEPVRLCVQVHEQLRAVADQQAQRMKVELYKLARSPEHRPLVTALTAQAGVGWHSAIRLVLELGDIDRFPTTDALPHYLGLTPSQYSSGELDHRGHTLKCGPSFLRALLLQCAWSAVRQGCDTELRERFATLAPRIGRKRAIVAVARKLAIKVRGRWRTHVVSSPPAPALAV

SEQ ID NO: 144172 - protein, 399 aa, unidentified
MLAVGIDISKSKSVAAILNQDGSMHTSPFEFHHTQPELDAFIKYILNSNQSATILMENTGHYHYPVLKAFREAGLPVCMVNAYQIKKFGDMDLRKAKTDKKDAVRIARYALEKSYSLVPYTSMEQKYEDLKFLARQYNQRMLTLKTNKVFLLNLLDETMPGITNILPLTTRTPETSLSVLFINRFKSYDRIKKMGKSRFLDAFEKITRKSRNRQTKTYGLAIYEAALRNITTRGENEYTLAAQDQCVELVCESQKAADSIILKMQTLAETLPEYAVLRSMAGVGDRLGPLILAEIGDIRRFHSGKALNAYAGNDAPPYQSGTFESYNRHISKRGNAALRKYCFEVMQALKLTQPQDDPVYLFLLKKEQEGKPYNVAKMAGVDKFLRIYYARAMETLKQQ

SEQ ID NO: 144173 - protein, 420 aa, unidentified
MEGRPGRRRQPADKGRPQSRSVDCAGGKTANQSYTREGPAVSKHTTEAFSIKYVGLDVHKETIAVAVANSGTAEPRGLGIIPNDTDSLRALVKKLGRPSELRVCYEAGPCGYVIQRFFQRLGIDCVIVAPSLIPRKPGDRVKTDRRDASKLARSLRSGDLTPTWIPDEHHEALRDLVRAREDAIEDQLRARNRLTKFLLRLGVKPPEGVKAWSAPYKKWLDALAWDRPVQQVVFAEYRQSLEEIQQRVGRFEREIETLAPTTAHGPTIAALQAMRGVKLITAATIVSELGDISRFENPRQLMAYAGMVPSEHSSGGNVRRGSITKTGNAHLRRVIVETAWHYRHAPGVSGDLRKRQREVPAPACTIAWNAQQRLNKRYRHLLARGKTSHQTVVAIGRELLGFIWAIASVVKVTSQQPAAA

SEQ ID NO: 144174 - protein, 337 aa, unidentified
MKYCGIDLHSNNCVVIVSDETDRIVFSKRLPNELGRIREALELHREELTGLVIESTYNWYWLVDGLMDAGYRVHLAHPSAIKKYEGLKHSGDFADAAYLAQLLRLGLLAEGYIYPREERAVRDLARKRMQLVRYRTAQILSIENIVTRQTGARLKGQAVKRLRAEQVDEFAFAPDIALAVEANRAVSQALGQQIEALERRLKERVSLRSEYRLLKTVPGIGETLATTIMLETGCIGRFAQVGNFSSYCRCVDSLRESNGKKKGEGNSKNGNKYLAWAFVEAANFALRYCPQARSFYDRKKSQTNRVLAIKALAHKLARACYHMLRDQKPFDVSRCFG

SEQ ID NO: 144175 - protein, 415 aa, unidentified
MKTAASTFSPEELSIKYVCGIDIGSQSCAGCILRSDKSVIVKAIPFANARQGWQLWEEKLSQLDAAPSQILIGMEATSRYGENLYHELEQQGYVLRLLHPGQTHQFHQQQGLRAKTDRLDAMTIARVLLSGEARAGYVPSERIATYRELVRLHTQLSDETAAYQNEIQALVVVLFPEFTQVFADPCLPTALAVLKAFPSAQAVVEAGVEPIAVLLHQMPAHFGRPTAQKLVAFARKSGSSGRAVAGRSMSLRILCDQLEHTQANLARLEAEIEQLLTNDPGVKGIQQVPEFGPKTVAVLRAELGDVERFARTDEVIAYGGMDIEIKESGLWKGKAKLSKHGSGLLRRMLYLAALRSIHLEGSAFGAYYRRLVERGLKKGSALMAVMRKMLAVAAHLLMHEEESYDPCKVCVSRVG

SEQ ID NO: 144176 - protein, 341 aa, unidentified
MKHYAGIDVSLECSSVCVVDASGKILREARVASEPEALIAWFRSSGFEFERIGLEAGPLSQWLFAGMKTAGLAVELLETRHVRKAFEAMPVKSDRNDARGIAQLMRLGWFRPVHCKSISAQETRSLLTARKLVQSKLLDVENSLRGILRGFGLKVGKTTKREFVARIEELVAGHPHLQMIAKALLAVRAVLRTEFAAFEKQTRRMVRSDMQARLLTSVPAVGPIVALTYASAIDDPARFKSSKQAGAHFGLTPKKHQSGETNYTGRISKIGDASVRTALYEAANVMLTKPVKGCSQLKGWAMRIKRRAGTNKAKVALARRLAVIMHRMLADGTPFNAAAAA

SEQ ID NO: 144177 - protein, 344 aa, unidentified
MSEVITVGLDIAKHVFHAHGVDDRGRPIFSKRISRGKLLDFFAAQPSCMVALEACGGAHHWARQLIQLGHQVRLIPPAYVKPFVKRQKNDAIDAEAICEAALRPNMRFVAVKSEQQQAAGLVFRTRDLLVRQRTQLINAIRGHLTEYGWIAPKGPSHVAMLADLIEREAIASSLPEAARAMFRLMLDQLADLNGKIADLDKEIARRAREDEVSRRLMTIPGIGPISATAIAALAPPAETFAKGRDFAAWLGLTPLQRSTGGKQKLGATSKMGERTLRRLLIIGSSAVVQQASRRGAPKGSWLEQMLARKPRMLVTVALANKMARIVWALLVKRENYKAPVAAKA

SEQ ID NO: 144178 - protein, 392 aa, unidentified
MNPRALGWDNHRKFSKVSLMEQSPDGQIHAVERARLEHDDKDAMRAWLSHLDPEIPVALEATFGWPWVADLLEELGHPVHLGHPPVIRALAKHEAKTDRCDGDRLGKFQLRGILPESYLAPPEVRQRRERTRYRMALSALRTGVKNRVQAILHRFGILHDFSDLFGKAGRRFLESLELPEGSRQTLKGYLDVLDVLTRLMGEVEQWMQENLEEDELVRLLTSIPGIGLILAHVIRAEIGEIERFPTFRHLASYAGLAPMSDDTAGREGPRHCSMACNHVLRWAFIEAVHGVQRTKGPHGLRLRWLNARLSGQGRQKGRKSSAKVAVAHELSKLVYVVWTKRVPYTDTPPPRPGSREDRRQPKESLTVKTTLRSDQPRHPMVRRRETVGQTRL

SEQ ID NO: 144179 - protein, 456 aa, unidentified
MIEKGVIRLKKLINQSLPVINANAAGIDIGASFHVVAIPPDRSPTPVMQFGAFTTDLVRMAEWLIEHKVTTVAMESTGVYWVAAYEILEEYGLEVMLTNARDTRSVPGRKTDVNDAQWIQRLHACGLLKASFRPCKPIAELRSYLRVRERMLDYAAAHIQHMQKALTYMNVQLNLVVSDITGVTGMRIIREIVSGNQDAEYLASLRDPRCQSSQETIQAALTGNYQPEHVFALKQALALYDTYQVHIKACDVEIENVLISLSVGIPIPDDPLPKARHRTRQANQLNFNVRQALYHVVGVDLTQINGIGPYLALRLISECGTDMSKWKTAKHFTSWLTLCPGSKISGGKVISSHSRKSNNRIVAHLRLAATTVGRTNTALGAFYRRLAARIGKAKAVTATARKIAILFYNAVRYGMKYKDPGADQYEKEYKDRVLKNLRRKANELGFSLQPKIECVS

SEQ ID NO: 144180 - protein, 354 aa, unidentified
MPSKVTKPDTSAYPKLMSIGLDIGKDVFHIVGFDHNGKVVLRRKFRRLELDAVFEKLPRCVVGMEACLSAHFVSRRLRALGFEPRIIPAIYVKPFLKGQKNDYNDAEAIAEAALRPNLKLVKEKTQEQLDLQACHRVRSRLVSRRTATINQIRAFLIEHGIAIRTGANSLRRSLPEILLQRADELSPRMRVLIEELHGDWLRLDARIEALNEEIEEISRQEKSCQNLMTIPGVGPLISTATVAAIGNGEAFERGRDFGAWLGLVPRQYSTGGKPILGRISKRGSKYLRTLFIQAANVILMRPQNWPRYSFGAWLVTAATRLHRNKLATALANKLARIAWSVLRYNERFDDAQTV

SEQ ID NO: 144181 - protein, 341 aa, unidentified
MAVAGGLDLHRGQLTFDYVDTGTGESWRGRICPADRESLRGWLRRFHGVPDVEFAVEGCTGWRYVAEELQRAGITPHLAEPAGTAGLRGRKRRAKTDWADARHLRDLLLDGRIPESWIPPGHVLEARALVRLYKDLLEERTSWQQRVHATLFHQGIPVVPKLGTADGQQRLDAAELSAAGRRAVQAGLRQIERLTQEMASLRRELARLSSRQPGCRALRRAHYGIGGLLSVAVWAELGDCRRFSSSDDAVRHTGLDITIYDSDGRRARGHIARQGPPVLRWALYEAALYASRPASPDYACYCGVRDRIDGQRALLSVARKLARRCYHTLRDLGEDALAPAA

SEQ ID NO: 144182 - protein, 410 aa, unidentified
MEVFLERCAGLDVHQASVVCCVLIGAPGRKAQKLLRSFGTTTRELEALRAWLAEHGVTHVGMESTGVYWKPVYAVLEGHIDLIVGNAHHIKNVPGRKTDVKDAEWIAQLVRHGLVASSFVPPPAIRDLRELVRHRRTLIETRTAVRNRVLKLLEGANIKLSGVASDVFGVSGMAMLEALASGTNNATEMAGLARGRMRRKHAALEAALDGRMREHQCFLLGMQLRTLETIDRDLDALDARIEAQLEPYQAQHRLLMQIPGVDWVTAASIIAEIGTDMDVFATARRLAAWAGVAPGNYESAGKPKGAGTRRGNVFLKSALFAAASAAVRTKGSYYRDKYNRLRARRGPVRAIMAIAHKLLIAAFHLLSTGEAFRDLGESYLDQVARRRSTAKLVQRLSNLGYDVVLAPKAA

SEQ ID NO: 144183 - protein, 408 aa, unidentified
MEVVYRCCCGIDVHKKVIVACLVNGGGQELREFGTTTSEIKSLANWLTESGCEMIAMESTGVFWKPLYNLFELMDLDAMVVNAAHMKALPGRKTDVKDAEWIADLLRHGLLKASYIPSREQRELREITRYRKSLTEERCRETNRLQKILEGANIKLDSVVKDINGKSARKLLEKIIEDDVPTSEEEVSKMVHGRMRSKLGQLVTAIEGITTPLQRKLLAQVIDHIDDLNRRIADLDRLVQDYMDEYAAAIAALCDIPGIARRSAEVILAEIGLDMSRFPSAAHLCSWAGVCPGNCQSAGRRKHGKTTKGNKPLKTILTQCAKSARSVKGSYFSAQYQRIAARRGKNRATLAVAHSMLIAIYHILKNKTAFHDLGSDYYDAFNRDRKINSYLKRLKSLGWEPDAIPSSA

SEQ ID NO: 144184 - protein, 317 aa, unidentified
MSALPVFVGIDVAKTEMVTGLRPSGEVWTVSNDETGIHELLQRLRPHGPVLVVIEATGGYERGVVAALAAAGMPLVVANPRQVRDFARATGQLAKTDRIDAQVLALFAERVRPEPRPLPDDATRTLTALLARRRQILEMLTAERNRLEHAVPAVRRDLIQHIRWLERRLRDVDHDLDRTVQSSPIWRAKENLLRSLPGVGPVTSRTLIGSLPELGFLNRKQIAALVGVAPLARDSGTLKGKRLVWGGRAPVRAALYMAALVASRRNPALRAFYARLVAAGKPKKLALTACMRKLLTILNAMVKTNSAWQRIDHPKTA

SEQ ID NO: 144185 - protein, 430 aa, unidentified
MLSKYVGRKTSSIENDITKARNHLRQRGKIMRVVFGIDVSKASSEVAILVNGEKIHGYTIPNDAIGFNRLLEDLGTVYQPEIVFEATGVYSRRLQAFFEDNSYAYIRLNPLESKKQLDSLRVRKTDKIDAEKLATSQFILNRKPSYVQEALYQELRDLSRFYQNLTEDIVCSKNRLHKVLQVTFPELENILSSPTGKQYWNLVMSFPCNSFVLELDDAALRAIIRQSTSKHISENRVTYLVDKLTKLANHSYCAVKKTSPMMEEVKYYAGELLRLSEYRQSVLEKMITLAQPLPEYEILLSIPGIAETTATSIIGELGDIRRFHSANQINAFIGIDLRHYESGDFLAKEHITKRGNPYARKILFKCIHNIASASHTNPCHIADFYEKRKRQSQVTSTKPHTIASIHRLIRTMYYLITHNKLYDYTSTQNR

SEQ ID NO: 144186 - protein, 339 aa, unidentified
MKYTPVGVDIAKHLIQVHFIDENTGDVVDKQLRRRDFLEYFSNRKSCLIGMEACGGSQHWARELTKLGHKVRLLQARFVKAFVMGNKNDVMDARAIWMAVQQPGKEIAVKTEEQQSVLVLHRSRRQLVKFRTMQINSLHGTLLEFGETIHKGRAAMEREFPEALERMKERLPPYLITVLENQYNRLNELDSLIEDIEKQLTSVAKQNETCKRLLDIPGVGPLIATAAVATMGEASAFKSGREFAAYVGLVPRQTGSGGKIRLLGISKRGDTYLRTLFIHGARAAALLTKEPGLWITELKKRRPVGVATVAMANKLARTVWAIAAHGRKYDKEYVSIRSY

SEQ ID NO: 144187 - protein, 412 aa, unidentified
MDVYCGIDWAEDHHDIALVNRDGQLLARRRISDDAAGLAQLLDLLAEHGDTAEDLIPVAIETPRGLLVACLRATGRMVYPVNPMAVARYRDRHTVSGGKSDHGDSVVLANILRTDIGFHRPLPAGSELAQAIAVLARAQQDAVWDRTTAHNKLRSHLREYFPGFLAAFAEAKHGILRPEARTILAAAATPADAAKLTAAQLRALLKKAGRSRGIDAEAARLRDAFRAPQMRQLPLVEQAMGRQTLALLGQLNAACAAADDLEHAATESFNQHPDAGIITSFPGLGALTGARVLAEIGDDRSRFQDAKGLKAYAGAAPITRASGKTKSVTRRKIKNNRLAAAGYSWAFSALTASPGARAHYDRRRDDGDRHAAAQRNLFGRLLGCLHRCLITGQHYDENIAFPGTPEKLPQAA

SEQ ID NO: 144188 - protein, 318 aa, unidentified
MSKSTLMSAGIDTGKYKLDAAIDGRPDRLQLNNEQPGHASLAAWLQKHGVERVGIEASGGYERPVVAYLRAQGFNVILFQPKQVRAYAMFRLQRAKNDTIDAALIAACTAAVKTLHAPPDPRFAALAERLTFIEQIEEDMARSKTRREGFQTAELKAEVEAEISRLKKRRTLELKLLAKSLRASADLAKRLDLLVSVPGIGERTALALLIRMPELGTLSREQAAALAGLAPFDDDSGNRKGSRHIEGGRSRLRKSLYAAALPAAFKWNKALVDLYGRLKAAGKAHKLALVACARKLLIFANTVLARGSKWTDDLPARN

SEQ ID NO: 144189 - protein, 344 aa, unidentified
MDHFAGLDVSVKETSVCIVDDTGRIVREVKVASEPEALLAVLRNPAYHFKRIGLEAGPLSQWLYGALAEAGLPVICVETRHMRAVLKAQINKTDRNDARGMAQMMRVGLYRPVHVKTLRSQKLRMLLTHRQLLLSKAIALENDLRGTLRNFGLKVGMVGKVKFEARIRELVESLPDLAVLVEPMLIVRRVLREQIVILHRRLLAIVRDDEVCQRLMTTPGVGPVVSLTYRATVDIPARFRKSKSVGAVFGLTCAKYQSGEVDWDGRISRCGDGMMRTMLYEAAQAMMRSKKWSWLKAWAMQIARRRGMKKAIVALARRLAVIMHRIWIDGTEFRWTREQAAVAA

SEQ ID NO: 144190 - protein, 322 aa, unidentified
MRISTIGIDLAKNVFQVHGVDAAEKLVLKKQLRRSQVLEFFSKLSPCLVGMEACATSHQWARDLKKLGHDVRLMPASYVKAYVKRGKNDAADAAAICEAVTRPSMHFVPIKSSEQQSALMLHRTRDLLICQRTQLINAMRAHLAELGLVARKGRKGLQQLIRTVAEADDERLPSDACFACQAIIAQLQAVQIQITRLDKRIHQAHRVNPASKRLEAIPGFGVIVSTAVVATMTDPKAFKTGREFAAWIGLVPRQNSTGGKDRLGSISKQGDRYLRRLLIVGALSVVKSARARPDKYPWIITLLGRRPAKVVAVALAKGAVHT

SEQ ID NO: 144191 - protein, 346 aa, unidentified
MKIIGCDFHPAWQQVAVLDNETGEIAELKLLHEEGEAERFYSALPRPTLIGIEATGNCQWFLDMLQRFGHEVWLGDAAEIRASYVRKQKTDRRDAGHILRLLVEGRFPRLWTPSAEERNLRQLLIHRQKQVEIRTRVKNGLQHLAMNRGLQKKRKLWSAKGRTDLEKLALEGWAARRREDLLGLLNQLDKQIGELDEAVKGAAQLHSQARLLMTQPGVGPITALAFALTIGDVSRFRRSKQVSSYLGLIPRERSSGGKQKFGSISRQGNSFVRMLLVEAAQATNQWDESFRKQYVARCHHKPKALAKVASARRLAVRLYWMLRTNTPYPEIARIEGSPGVGMVSES

SEQ ID NO: 144192 - protein, 428 aa, unidentified
MNYTQNQKISQISSHTLIIGVDIAKFKHVARAQDFRGVDLGKPLTFENNKEGFDGFTQWCQQIMLNNGCSEFIVGMEPTGQYWLNLAHYLKDHDIPFGVVNPLHVKKSKELDDNSPTKNDVKDAKVIAQLVKDGRYAVPNIPQGVYAELREAMKIRDLLTTDLQAVQGRVHNWLDRYFPEFLTVFKDWEGKSALHILQLNLLPHELLEVSDEDLLTYLRIAAKRGVGLSRIRSLKEAASCSVGIRQGIDMAKLEIVILLDQYEMIKNKFEELDSKIDALLQQVPSVSRMLAIRGVGKDTVAGFLAEVGDLNNYTHPKQIIKLAGLNLRENTSGKHKGQTKITKRGRKKLRALLFRVIMPLVAKNTAFKAMHEYYTKRPENPLKKMQSLIALCNKLIRVLFAIGKKGCQFNEEKMLSDIPHFTSLKMVA

SEQ ID NO: 144193 - protein, 347 aa, unidentified
MGYFAGLDVSLEETAICVVDAAGRIVREARVASEPEALVAFFEACGMAMERIGLEACSLSAWLHAGLTQAGLPAICIEARQAKAAMGAMPNKTDRNDARGIAQIMRTGWYRAVHVKSPSCRSWRALLTARRLVLNKRRDVENGVRALLREAGLKLGTPSRKDFSARVRELAGDDPVLAALSESLLSVIEIMTQEVDRLTKRVLDEVKVEPTCRHLMTVPGVGPLTALAFRATIDQPGRFRKSRDVGAHLGLTPRRYQSGETDLQGRISRCGDELARTALYEAAHSLLIRSSKWSALRAWGMNVAKRRGMARARVAVARKLAVILHRMWADGSEFRWGKQATAAAAAA

SEQ ID NO: 144194 - protein, 406 aa, unidentified
MKNKYSNPKNKKVKKIVLQENWEKINPNACGIDVGARELWVCVPSDRDPEPVRCFGTKTPDLQEMAQWLKACRIDTVAMEATGVYWIASFQLLEREGFKVVLVNPRQVKNVTGKKSDVMDCQWIQKLHTFGLLGASFRPADPYCVARTYMRLRDDLVSGSTTQIQLMQKALHQMNIQLSHVLSDISGCSGQAIIEAIMAGQRDPIALAELASRRVKSTKAEIAKALIGDWRPEHLYCLAQAHQMYLRYQLDINQCNAKLADELEKLPNKVDAKLQPLPPKLDRKKEIDEKLRLGLYCKFGVDVTAIEGIGPTAALTLLTEVGADLSAFASEKRFCSWLGLCPDNRISGGRVLSSRTRRVVNRMADVLRMSATTLKSSQSAMGAFYRRMVAKLGPAEGITAVAHKLV

SEQ ID NO: 144195 - protein, 318 aa, unidentified
MKTTAIGIDVAKDRLDIHARPTGETWRVAHTPDQFPALIARFKELDAERIVIEATGGLEVLLATQLAAAGLPVVVINPRQARDFAKAAGQLAKTDQVDARVLAHFGEALQPPVRPLPDEETRALEALLTRRRQLVDMLVAEKNRHAALSRRPELQENVAEHITWLNRHIADLDDQLKQQIERSPIFCREDRLLQSVPGIGDVSSRTMLACLPEIGKLTDKQIGALVGVVPFARQSGRWQGEAHIRGGRSEVRTVLYMATLSAIRCNPTIKTFYQHLLAKGKKKKVALTACMHKLLTILNAIVRHQEEWRTPQTSAATS

SEQ ID NO: 144196 - protein, 390 aa, unidentified
MFFLGIDIAKLNHVASLVSDNGNIVFSNFMFKNSLEGFLSLIDKVKSIPKDDIVIALEFTGHYSDNFVNFFFNRKFNVTLVNPANVANFRKSYGRDSKNDRIDSINIAKMLLSREYSLVTQSDIEYLSLKKLNRIRDSLVKQKSKCKILLTRNLDSIFPELQYLLPSGIHSKAVYALLKKYPSSEEIAALEIDVLTNILKTNSRGHFCEKTAYIIKSQAKSSVGFEDISLSFHISQLISSIELLEEQIRNTEKQINAIIEKLKPVILSIPGISNVACACILGEIGNISRFRSPSKLLAFAGLDPKVRQSGQFRALSCQMSKRGSKYLRYSLIYTAWNAVRNNEVFSNYYTLKRSQGKNHYKALGHVAHKLVRVIYKLMKDNIPFNAEQLI

SEQ ID NO: 144197 - protein, 424 aa, unidentified
MAQGSGLTRGDRNRNRRIEAVREAVRRDRAVLAIDLGEDKQVAVVLDHEGRALARKVVKAKAHQLAGLLAWAAERAVKAGFAGLTVACEPTGHRWKALMGLADAAGHGFVCVQSLAVARAREGDDYTRDKRDKTDHRDAYLIGKLVIRLDCYLPERADEDWARLRHLGARRFAQVTDVTSCMQQAGDLLGCAWPEPLSAAKRPLESVTWLAGMAVITSRCCGQPSRLRRMGYEKFLAAVRRELPRWGGKFVRHSIVKALWEALAGTGGVAAQRPGALERLHLLLEDWRVLRARLADTEARMTGLLGELGLTELVTSIDGVSALSGAVMLAETGDPARFTSGRAVVKHAGLNPSEHTSATINGQTRISRRGRPALRAAAWRAVWGSLRHNKVLAAKHARWTGRDGNRLADGQARAPPRCCAGCGP

SEQ ID NO: 144198 - protein, 424 aa, unidentified
MKVTFQTCCGVDVHKSFLVATIIKTSSGIEPSYQKRRFSTFNNSILEFKKWLLENECLYVCMESTGKYWIPVFNILEDEINVTIANPKWVKAVKGNKDDTKDSKWIGDLFRLGLVKGSYIPCKKIRILREFTRYRYKLVSCRSSEKNRYQNALTVCNVALDSVVSDIFGKSSTSIIDYLLEQSGTSIDHEVIASKLLKRLKAKEDAVIESIEGYQMTDSQKYRMHLVRAHMDYITAAINDVDSEIESLIASDPDYENAVELLCTIPGVKYDSAITIISEIGIDMSQFCSSKRLCCWAGLTPGSNESAGKKKSVRITRAGVYLKPALVQCAHAAVKSDKSPYYKKKYESLVKRRGKKRAIIAIARMILTAIYQMLSTGEQWNPSDLYKVDMPEALLEKQKQKAIKQAQKLLIREGLLPPTEPIAS

SEQ ID NO: 144199 - protein, 349 aa, unidentified
MERFCIGVDVSAKTIDVAWRGDRRVECRQFANDRNGHRALIKQTRKRARRIRVVMESTGVYGLDLALALVGARFEVMVANPRVAANFAKAILQRSKSDRLDAAMLLQFAETMPFVAWEPPSAKARELRSICRRVQALLKIVRAEKSRLHAALHEQGTSVVRQSIRASLKAVEGQMAALRRAAQKVIASDPLLSRQHELLLSCTGIGQISAISILAELAVLPSDMTERQWVAHAGLDPRQYDSGSSVHAAPRISKKGNRYLRAVLYLPARVAGRFEPNAARFAARLRGRGKKPLQIHVALMRKLLHAIHAMFRNDQPFDGSRLFPAAADAVGTSGIASSAISEVSTACPA

SEQ ID NO: 144200 - protein, 371 aa, unidentified
MKQTIRSFVGMDVHKATISISVAEDGRGGTVRFIGVIPNTPEAVGKMAKQLARHGELDFCYEASGCGYGIHRQLTGLGHKCTVAAPSLIPRKPGERIKTDRRDSEKLAILHRSGDLTPVWVPDTTHEALRDLVRARVDASMHLMRARQQLLAFLLRHGRSYTTGNHWTQRHRCWLAGQTFQEQAHGIVFQDYLETVWTAQARRDALVQRISTMVATWSLGPLVEALRGLRGIDLISAATFIASTGDLSRFESPRLLMGYLGLVPSEHSSGGTIRRGGITKTGNREARRMLIEAAWSYQYPARIAKEKAEILVRLPKNIRDIAWKAQTRLCTRYRSLIAKGKKSTVVVAAIARELAGFIWAIGREMRAPMTA

SEQ ID NO: 144201 - protein, 458 aa, unidentified
MSTPKRSGRLRKITATTMARVIEPNAAGIDVGATEIFVAVPPDRDPVAVRCFSTFTCELLRAADWLRVCGITSVAMESTGVFWIPLFQILEDRGIRVCLVNARHVKHVPGRKSDVADCQWLQYLHSVGLLRASHRPPQSICAVRSVWRHRESLVQMAAVHVQHMQKALDQMNIQLHHVISDLTGTTGMAIVDAILAGEHDPIRLAQLRNPKIEASEATIAKAMAGDYRPEHLFTLQQSVQAYRQYQKWINDCDKEIEVQLRHLQTRIEPDQKPLSPRKDRHQPRRHAPSVELLTHLYRVFGVDLTDVPGVSVITAHTLLTEVGTHVNNFPSAGDFASWLGLCPDNRISGGQILSTGTRHVSNRLAIALRMAAQSLHRSHSYLGQYFRRMRTRLGAPAAITAAAHKLARILYHLISTRQPYDETVFASVEERARKRKLRHLKKDAAVFGFQLTPVGCVP

SEQ ID NO: 144202 - protein, 368 aa, unidentified
MENTTYVGLDVHKLTIAVAVFLPGKTEPLEWTDPNTDRVVRRLARKLKRLAPGPIVACYEAGPCGYVLKRQLEKLEIPCQVIAPSLIPRKPGDRVKTDRRDARKLAEMLRGGYLTEVHPPTPLEEAVRDLCRCREDAREDLMRARHRVTKFLLRRGLTWAGRDWTHTHTTWLRSLQLEVEADRATLADYVRSVEFQQDRIAALDEELAKAAQQEPFQQPVAWLRCFRGIDTVTALTFVSEIHDFRRFRTARELMSYLGLTPSEWSSGERERRGGITKAGNSHARRVLIECAWHYRHIPAVGPGLKKRRKGQPGMIIALADKAHRRLWTRYRKLYRVQNKPHTKVIVAIARELAGFLWAAMTQIAPVAA

SEQ ID NO: 144203 - protein, 400 aa, unidentified
MIDTGDIDVFLGLDVGKGEHHATAVTPAGKKAFDKRLPNTEPKLRELFAKLQAKHGTVLVVVDQPASIGALPLAVARDMGCPVAYLPGLTMRRIADLYPGEAKTDAKDAFIIADAARAMPHTLRTIDGEDETIAELEMIVGFDDDLAGEATRVANRLHGLLTQIHPSLERVLGPRLQHPAVLTLLERFGSPAQIRKAGRRRLITLLRPKAPRMAERLVEEIFAALDEQTVTVPGTEAAALIVPSLAGSLAAVLDQRKLLARRIEELLEDHPLPKVLTSMPGVGVRTGARILIEVGDGSTFPTAGHLAAYAGLAPATRSSGSSIRGEQPSRRGNKQLKRAFFLSAFAALGDPASRAYYDKKITQGKHHTQALLCLARRRADVLFAMLRDGTFYEPQPAAAR

SEQ ID NO: 144204 - protein, 547 aa, unidentified
MDCCVGKFQVHTFTFPDYGVSKMYHVRRSGRKQPKARPRSKQSLQKPNGVISPRVQKVGGEHFAIVCVDPAKHRSEWMMADYFGNLLIECQTVEHQSVFFKVAVEMIRQAQQQHDIQDTIVVVERTGNYHLPPKRAFASAGFDTRVVHPFATKQYRVPANPGIKTDENDLYAQHRAAVAGFGLCELELEPPFRDLQLRARHRRNLVEKAASLACQIREHLHLGMPGYAGLFDRLFETPTALVIAARCDSPAKLIQLGRNRLSRYLSKSKVRHQLRTIDKVLAWAAQAADDPIQDGPMHHAIWTDLHELYQHIQRQIVALEQELAGDVVQTPYVRLMAIPGINVVSAAELAAEMGPISGYANANAITGRAGLFPSRYQSDQTDNDRGPLIRQANRRLRCVLMRIADNLACHCAYYRGQAEVDKARGVDKRASRVKIAKRFSRLALACVAGDEPMRHPCFQKPDSILDKLRRFHHAHQTPMDVLLTDLEAAVEQLPYNTCNHEAEIVADVLEQHTRRRRGAGLIGDVLPAVLARLNIRTTEANKNRDRS

SEQ ID NO: 144205 - protein, 410 aa, unidentified
MELIVERPGALDVHKAQVTACVRVPGQDGRVEEVQEFKTTVRGLLVLRDWLKAHKVTQVTMEATGVYWKPVWHVLEDDFELLLVNARHVKQVPGRKTDVADAQWLCRLAEAGLLRSSFVPPKPIRELRQLTRYRKAQISERQREANRLHKALEDTGIKLDCVATDILGVSGRAMLDALVCGTTDPVVLAEMSKGRLRAKIPELTEALEGRFEDLHSLLIGSILAHLDFLDTQIEALSEAIEAKLAPFAAGAVELLCTIPGIAERTAQNVIAEIGVDMSQFPTAGHLASWAGQCPGNDQSAGKRRSGRTRKGSKWLNLALKEAAMGAIRTNDSYLQALYRRKKSQGGHNKAIGAVKHSIICAIWHMLQTGEIYTDLGPDHLARRNPQRQTKRLLAQLERLGHTVTIQEVAA

SEQ ID NO: 144206 - protein, 414 aa, unidentified
MLKIVYRVCCGMDVHKSFVVACIASTNEYGVTTYKSKRFSTFTGDLRRCAVWLAENNCKDVCMESTGKYWIPIYNILESTCNIVLAHPKYVKAIRGKKTDKRDAKWIADIFKHDLVAGSFIPPADIRQLRDLFRYRWKLTSFTTGEKNRAQNCLTVSNFKLDDVFSDVFGKAASAITVRILDNPAKKITDVSGFRTKHMKATDEEILAAVDGVMCEEQAEKLRIIRSHMDSLELCKLNLESLILATAEKYLPQLNLVMTAPGIQSFAAIGIISEIGVDMSVFPTSKHLCSWAGLTPQNNESAGKKKTTRISRAGAYIKPLLVQCALCAIRAKQFPEVHNRYLALKKRRGHKKAIIAIARMLLTVIYNMLKKNEPYNPELYRKDDRPPAHREVSVEEAIFILQRQGYLVTAPSTT

SEQ ID NO: 144207 - protein, 341 aa, unidentified
MEIDVLGIDLAKQIFQLHGADRRGRVVHRSKVSRSSFFEAVRALNPKLVVMEACSTAHHWGRRFQSVGIEVRLISPQYVAPFVKTNKNDRNDAEAIVEAASRPTMRFVTIKSVEQQDIQAAHRMRAILLRHRTALINQIRGLLGERGLAIARSPEAFRRAIPELLRTSADELTSFCQTLLTELLQHMRAIEERVHLIEASIQTFMKKSALCRKIAEIPGIGPITATAVVAAVGDARQFRNGRHLSAWLGLVPRQYSSGGKPRLHGISRRGDTYLRTLLIHGARAVLRYAPKKTDPQSIWLQELMARRGHNCAAVALANRNARIIQALLSSEATYMTRSAAT

SEQ ID NO: 144208 - protein, 344 aa, unidentified
MKLTTVGIDLAKQVFQFHGIDEHGKVLVKKQLRRDQMATFFVNLPPCLVGMEACGSAHYWARKLQAMGHTVRLMAPQFVKPYVKTNKNDAADAEAICEAVGRPNMRFVPIKNIEQQAVLALHRVRQGFVKARTAQANQIRGLLGEFGLIVPQGIGYIATRVPELIEDAENELPGSFRLLVRRLLDHLKELGQQVEELEAQIQAWHRNSDLSTRLAQVPGIGPITASALVASIGDAKNFEGGRQLAAWLGLVPRQHSSGGKSNLLGMSKRGDSYLRTLLIHGARSVIYRAGQKADPCSWINAVVQRRNKNVAAVALANKNARIVWALLAHDRRYETGYRKAAEVA

SEQ ID NO: 144209 - protein, 422 aa, unidentified
MLEETQETEEIIQRVAALDVGKAELTCCVRVPGRGGSGRRLQEVRAYQTMTRWLLVMAERLGELGVTRVVMEATSDYWKGVYYLLEAHGFEVWLVNARDVKHLPGRPKTDTLDAVWLCKLAERQLLRPSFVPPPAIRQLRDVARYRTDLVAVRTAEKQRVEKLLEDAQIKLSVVASDIFGVSGRAMLAALVAGERDPKILAQLARTRLRAKLGPLVEAFTGFFTDQHAFLLAKMLARVDQLDADLAELDAKLQELIAPFAGAVDRLDEIPGVGQVAARLLLAELGTDMTRFPTAGHLVSWAKFAPGVKESAGKRKGSGSTGHGNPYLARVLGEAAVAASKTDTFLGERYRRIARRRGKRRAIVAVGRSILVIVWHLLSDPTARFQDLGAGFYDTRINAERAKRNHIRQLEALGYKVTLQPAA

SEQ ID NO: 144210 - protein, 349 aa, unidentified
MLIIGVDFHSRFQQIAMVDTESGELVERRLEHSNGEAEKFYSGLQKPVRVGMEATGYAQWFERMLAKLGDELWIGDAAEIRAAMVRKQKTDARDALHILDLLLANRFPRIWIPSPEERDLRQLLRHRHKMVCLRTSVRNQLHALAMGQGIHRKRKLWTTGGRTELEALRLDPWASRRRRELLAILDQLDPSLAELDRAVAKEAEQRPAARCLMEQPGVGPITALMFVLTIGPVERFRTSKQVVSYLGLNPRESSSGGRQRLGAISKQGNSMARYLLVEASQTAARYDEELRRDYQRLKFRRGTAVAKVAIARKLAVRLYWKLRKHNSPVPPARMQDSSEHPLVGASLSS

SEQ ID NO: 144211 - protein, 515 aa, unidentified
MHQTKYRGIITEGRSIDVSSLGISGFPLAKPLRKSVSPFGGDLCFGWLGSPRLYLYKPLGCVSALWNWMPDGKDKTIHYQKVLRMLQSVPYLSVGLDVGADFSWMSIMLPNGTLTGKPFKIIHSDPSSREPAVKKIKEAQEMYSLESRCFLESTGICHIPLLCFLRDKGFGCSVINPIITKNSTNMNVRKLHNDKFDSKKAAKVGQDASLKTSIVPDDAVIDLRNLVRDYYYFKDLQSAIVLKLHAELKVSFPAYLNVFSRVTTQTSLKLLEAYPLAVDMLAAPRDELVESIRQTTRFGEKYAISKYDAICAAAKEDAVFGRALQSNALRIQLYIKTYREYQEHLDSMLEELHKAVDKLEGTPVYDRILLLQSLQGVGFLSAAVLIAEMGSFDLFSSPKKLYAYFGLDPGVNDSGRFHGDRVHMSKRGSSLARRILHMADINSLKVDKAIKTPVNPVIYDYYIRKCDSKKKIAAVGAVMHKICNIIFAMLRDNKPFELITPEEHCERYAAEHQNL

SEQ ID NO: 144212 - protein, 330 aa, unidentified
MTRIICGVDVASKSLEARIGQQGAAGSFPNNPEGVAALAAFCQAHKVELVAMEATGGYEQQAFAQLSEHGLPTAVLNPRAVRQFAQSMGRLEKTDAIDAGMIAFYAEVKQCPPLCLAPRTQRHLRALVTRLRQLTEVRTAQLNQQRLIAEPVVQASFDDLLALIARQIRDLEQKIAALIEADPLWCELNHAFRSIKGVADRTVARLMAEMPEIGTLSNKTISKLAGVAPLAADSGKHQGKRRVRGGRPSVREILFIVASVVGRHEPDFVAFQQRLRAAGKPPKVVRIALAHKLLVRLNAKAREVRLRSSRPSLHPRLETVTSLHLSQPSS

SEQ ID NO: 144213 - protein, 419 aa, unidentified
MLDPLQVGVDVDRQSNTVTLMDHQGREVAPPFTVANNLPGTQAFVQQVAQQVIDGNFDGIRVAAEATGWYWFLFFQTLSQDPLLNQWPLELYPINPRLTAKFRETYVDLDKTDLTDSYVVADRLRMGRDLPQPFCPDDTYLPLRFLTRYRYHVVHNITREKACFLALLYLKASEYSHKDKRRRPFSSLFGAASRAVIQEFASIEEIAAIPFDELVEFIDHKGKRRFPDPTDNARRLQRVARESYPLPEALQRPIHQILHLSLQQISFLERQEKRLSAAISERVAEIPHTLETIPGIGPVFSAGIIAEIGDLARFDYEEAKVAHFAGFKWRRTQSGDFQADETRLTRRGNRFLRYYFCEAANRVRLCDPEYAAFYDRKYREVRKHQHKRALVLTARKLVRLVVALLSTNQPYQPRRRSRH

SEQ ID NO: 144214 - protein, 358 aa, unidentified
MTRITTIGLDLAKKVFQVHGVDAEGKIVVARKLRRKEVLAFFGKLPPCLVGMEACGSAHYWAREITKLGHTVKLMPPRYVKPYVKRGKTDPGDAAAICEAVARPTMSFVPIKGVEQQGLSMMHSARSQLVGQRTQLINAARGHLSELGIVAERGLLGFAELAAIVRDESDRRLPVTARAALIVLVRQIEMISTEIAALDSIVRKENKASELGPRLETIPSVGPVIASAFRARVTDAKLFKNGRHLSAWIGIVPENDSTGGKVKQKGLSKKGDRYLRSLLVNGAMAVVQQTQKRPDKHPWVAKLLSRMSAKQAAIVIANKTARIAWAIMARGGVYSPAIARLNIEPRRARPRIRCLAMG

SEQ ID NO: 144215 - protein, 391 aa, unidentified
MICVGIDVAKDKYDCFILSSEGEVLADVFTIPNNAEGFDTLLQTIRRCARPEDKIKVGLEATGHYSYNLLGFLLDSGLATYVINPLHTNLYRKSLSLRRTKTDRIDARTIAMMLMSDVDLKSYSNTAYHNEELKSLTRYRFDKVKERAKLKSSVARLVNILFPELEKLVSSLHIAVVYALLSNYPGASYIANANTEELAETLCTASKGRYTKSKTAEIQVAAGVSIGSKMPAKSMELKHTIALIRELDKEISEVESAIDKITSQMDSPIFTIPGIGRHMGAMILAEVGDFSNFASADKLLAYAGLSPSTYQSGQLQNCYAHMEKRGSRYLRYALFNAAKYVCLWCPTFSAYLEKKRSEGKHYNVAISHAAKKLVRLIFAMQRSGKAFLADY

SEQ ID NO: 144216 - protein, 333 aa, unidentified
MDYTSKFVGIDVASTKLDICWDTIQGLAHQTILYDEQSLNNFLNEHPEIVSSQSTVGVESTGDYHLKVAKYFLGLGFTVKVINPIITKEYTRATIRGKKTDKTDSQLIHKALSEEHGDIVNLSQLTNESKELLRLSASLTSITHQLTQRIQSTERKELSGLEEIQRQLYDILDELKDANERIVAKATEERSDEELYIDSIPGFAVKLSAVVHHEIGDINRFKNFKSLIAFAGLDPKIKQSGNNLNVTGRLTKRGSSHLRAGLFLAANVAKQFDQDLKDYYIKKKAEGRSYKEIMCMISRKLLARIYTVLKEQRMYRPQPIIKELSTDPDLTEV

SEQ ID NO: 144217 - protein, 359 aa, unidentified
MEAQVTKIDFTGQNIYVGFDAHKKSWRVTIMAEDKVYKTFTQPPNPEILHNYLSRNFPGASYHSAYEAGFCGYWIHDKLLSFGIKSIVVNPADIPTTGKERVQKDDSRDSRKIARSLSSGTLTPIYIPSLKTQRDRSLLRTRSMLVRDMTRYKNRIKSFLYFYGISLDDSFNNTQTHWTNRFIKWLESIDTGEESGKETLRVLIAEVKHLRTSILDVTRQIRLLSQTKEYKEPVTLLKSIPGIGLITAMIILTELETINRFRNIDNMCGYIGLVPSTKSSGEKEKTGDITPRGHSVLRTALIESSWMAIRNDPSLMKSYLSYCKRMEPNKAIVKIAKKLLSRIRFVLSNNKPYICSVEK

SEQ ID NO: 144218 - protein, 333 aa, unidentified
MVEGTEGSHHKEGSTKMSKYTTVCAGIDIGKHKLDVAIDGGAQRMQADNNSQGHRSLSAWLRQREVERIGIEASGGYEQAVVLSLRADGFVVIVFQPVQVRAYAKFVLQHAKNDTIDAVLIARCTAAATEIHEPPDARLAPLAQHLTMIEQLTEDVGQLKTRREACREERIREFWKQEINRLKVLLNRELKQLVTAIREYRDLANRLDLIASVDGVGLRTAVAILVRMPEIGRVTREQAAAIAGLAPYDDDSGLRRGSRHIKGGRQRLRQSLYAAALPAVFYWNPQLKAFYRRLLVAGKPHTLALVACARKLLIFVNTVVARGTSWRSSALTT

SEQ ID NO: 144219 - protein, 388 aa, unidentified
MEAGDLQGRACLATIYVALELSRSSWLVAIQGSDEGRPSRHKVDAGDAKRILALIEQARRVVARRSGQEAVRVCSCYEAGYEGFWLHRVLVAAGIESRVVDASSLLVDRRARRRKTDRIDVETILRALIRWLRGERDACSMVIVPDADAEDERRLSRERGRLVQERTGHINRIKGLLMTMGIYDFQPTASDRLERLAKLVTGDGRQLPPRLSEEISRELARLAVLEEQIAAVERERDERPAKQDDAAPTDIATPPGRIAQLHKLRAVGRQTAAVLQGEVFFRQFRNRRQIAAYVGLDPSPWASGDTMREQGISKAGNRRARHALVELAWMWLRWQPASELSQWFHKRVGDAKGRLRRTIIVALARKLLIAIWRFLEHGVVPAGAVLRA

SEQ ID NO: 144220 - protein, 370 aa, unidentified
MDHTSTLFVGLDVHKDTIAVAYIDSEPGAEAVSYGTIGTRHCDLDKLIRKLQSKGKHLVFVYEAGPCGYWLYRYLRRKRLTCFVVAPSLIPKRPGDRVKTDRRDAIALARLMRSGDLTAVYVPEVEDEAIRDLARAREDALKDLKAAKCRLKAFLLRQDIGYTGRANWGPAHLRWLAEVVCPTPAQQIVFQEYVRAIDDHHERLERLEVELKDHAKAWRLSPVVEAIQAMRGVAFTVAITVIAELGDLTRFENPRQLMSYLGLTPSEYSSGPRRHQGAITKAGNTHARRALIEGAWSYRYPAKVSRHLQLRLETLPKAAQDIGWKAQVRLCKRYRRLTARGKNPNQAVVAVAREMAAFIWAIAREVPIAA

SEQ ID NO: 144221 - protein, 347 aa, unidentified
MITIGIDPHKSSHTAVALDETGAPLGELRVLADKSTLVRLRAWSADWPQRVWAIEGAGGLGRLLAQQLLGAGETVVDVPSALAARTRVLQSGHGRKTDGIDARSVALVAQHRNDLSRVAPDDHSAVLRLLSDRRDELTAERRRAVNRLHRLLRDLHPGGAPRQLSADRASRLLATIRPAGVVDIERKTMGRQLLADVRRVDRALNDNRRRCAEAVATSGSSLTEIFGISEILAAKILAHTGDITRFANADHYASYTGTAPIEVSSGEQRRHRLSRAGNRSLNHALHMAARVQTMHPGPGRTHYQRKQTEHKTPAEALRSLKRQLAKVVYRHLRDDHALQTSPTPALT

SEQ ID NO: 144222 - protein, 429 aa, unidentified
MNSTRNKKIEQVKETTMIVGIDIGSEKHYFRAFNWRGIELTRKPVAFSNSMEGFNSFYNTIVELIQKSELEEALVGIEPTGHYWFDLGQFMGEKNIKFVMVNPHHVHKSKELDDNSPSKNDRKDPRVIAGLVRDGRYFYSYMPTGVYAELRNASNRRFVLVEEQTRAKNRLQKWIAVYFPEYKGIYTRIDAKGGLLVLKQAPTPEEIVRLGVEGIIKIWKDAKLRGNGHKKAMLILNAAMKSIGLKSGLTEARMEIQDLIEDYELQTKRLERVNDLIKELCQQIRYADKLLEIKGIGITTIAGFIAEVGDITRFDSAKELQKLAGLELVADSSGKHNGKTKISKRGRKRLRYLLFEAAISVVGKNEEFKEIHRYYTTREKNPLKKMQSLIAVACKLIRVFHVILTKGISYDASKMLKDIQHPGEPLKAA

SEQ ID NO: 144223 - protein, 416 aa, unidentified
MDIQTSYQATVGIDWADQKHSVFVRFSDGDSYGQTIGSRPEAIQQWLLELKAKCAEGKIAIALEQRRGPLFYQLCSHLEWIDLYPVNPQSLASFRQAFFSSRAKDDPLDSQLLEELVRTHGDRLRPYQAQPISERKLDQYCRLRRRLLDLATQTELKLISTVKQYFPLVLDLFGGVGLKADIVLSFLSRWPTLAELQKAQANTVRSFFYAHNSRSQSRIEERLRRIKEAQNVTDDLALIEPFVLTTKCLVGQLRYFRKVLREFDDQIEQLFKSHPDHLLFESFPGAGKQLGPRLLAVFGSDRTRWAAPMDIQKFSGIAPVIERSGKSVWVHRRLSRPKFICQTFHEFAQHSVLHSAWAENFYRRQRQKGKSHHSAVRALAFKWIRILYACWKAKEPYNESRYLQVLQSKTFSVSST

SEQ ID NO: 144224 - protein, 350 aa, unidentified
MIAVNKDIITTIGVDLGKNTFHICAMNDKGTIVLRERLTRASLPKRLANIPRCLIGMEACAGSHHIGRQLATLGHDVRLMPAKYVKPFLKGHKNDYRDAEAIAEAVQRPTMRFVPFKNDKQLDLQALHRVRSRLVGQRTAVINQIRAFLLEHGVAVRQGPGALRRALPSILAQRTDVLSPRIIHLIEDLTDDWRRFDQRIADVTREIEQLAKQDEHCKGLMGVPGIGPMTASAMVAAIGDGAAFSKGRDFAAWLGLVPKQISTGDRTILGGISRRGNRYLRTLFIQGARSVLQRSNGWEKKSFGRWLIAASKRLHKNVLAAALANKLARIAWAVLSHAREYDAAFALKAA

SEQ ID NO: 144225 - protein, 363 aa, unidentified
MDKYIGFDIDSKKTVACIVQNGKKDKYATFATGIEQMKNFLKTERQGSEKLHLTFEISGQAGYRYDHLRGYADDITVSNPSKMTWIYRTAKKNDRIDARKQAILLSIGEVPRVHMPNKEVRQWRVAILHRRNTVGKITAVKNRMRALLKGNGFVKAPHRGSWWKVANRNWMRGLADEMNITYEDLWRMNLLDMLEELWVLEDQLKRMTRYLDGYLAKHPGARLLLSIPGIGPRTTEAVLAYTDDIRRFGRGKQYCAYFGLTPRLDESGLSRRLGHISKQGPSVVRWLLVEAAWRVVKKSPAFLAFYERVMCGQNGRKKIAIVAVARKLLSIMRAMQLTGELFNERLVCNECGVRKVGKVKNSA

SEQ ID NO: 144226 - protein, 366 aa, unidentified
MKKTSTIRVNGNMIFKGHKLTIGLDLGDRWSFYCVLDEAGQIILEQKLPTTPEAMKQTFGKIPRSLIALETGTHSPWVSRLLRELGYEVLVAHAQKVQLISKSNRKDDRHDARTLARLARIDPELLGPVRHRSAKAQIHLTVIRARAELVSARTALVNAARGLAKSYGERLRKCGTQQVSRELAAELSVELREVLEPLLQEVESLNEHIKEYDARMEKIARESYPQVELLKQVKGVGTQIALTFVLTLEDPHRFPKSREVGCFLGLRPGRRDSGGSQPQMHISKEGDPYVRTMLVQGAHYILGPFGQDSDLRRWGLKLAARGGKNAKKRAVIAVARKLAVLLHRLWVGGEVYEPLRNNHQAMRAVA

SEQ ID NO: 144227 - protein, 409 aa, unidentified
MEVLVDRAAGIDVHKKSLTVCVLTTEGRKVVKTMHRCATFHREVVALRQWLSERRVTHVAMESSGEYWKPVHEVLEGSFELVVANAQHVKNVPGRKTDPEDAAWLARLLRHGLLRASFVPSRPIRDLRDLTRMRRKTVEMTSRVENRTQKVLEACGVKLGSVVSDVFGATGRAILSELAANRTDALTLAKLARGSLKNKKDELALALESSFSAHDAKLLEHQLHLHGQLEAERKKIESELVEISKPYEELIARLDGMPGLDRDAALAILGEIGDDMAPWADEHRFAAWAGLCPGNHESAGKRKKISVRKGNPFLKSIIVQSATAAVRTKGSYYQAKFRRLVKRRGYKRAIVAIAHSMVIAIYHMIRDNKPYQELGGDWLDSRSAESKGRDLVRQLERLGYRVHLLSAQP

SEQ ID NO: 144228 - protein, 355 aa, unidentified
MSCEKYIGMDVHQATISVAVMDSMGKLIMESILETKASTILEFLGGLRGTLSVTFEEGTWAAWLYDLLKPHVAHVLVCNPRKNAALKQGNKSDKIDARELANRLRLNDLKPVYHGETGVRMLRELARSYLTIVKDLSRVMNRVKALYRSWAIPCAGRDVYYTRHRSQWLEKIPEAGPRRRAERLYQQLDMLQYLRQQARRELLAESRKHSITAKLRQIPSLGPIRSALAVALIQTPHRFRSKRQLWKYSGLALETRISGEYVYVHGERRRSKKQISIRGLNKDHNHDLKGLFKAAATRASVIPGPFREFYQRSLAKGIKPTMVRLTLARKIAAITLTLWKKGENFDLEKLKSQAA

SEQ ID NO: 144229 - protein, 473 aa, unidentified
MAKRKKSTFERLQKGEGNRQQRRELQRQLNAAEPGLEVVHRDAAGIDIGNASHFVAVPPDRDPEPVREFGSWTADLKRMAAWLKGCGIRTVAMQSTGVYWIAVQEVLEQEGLEVYLVNARGTKNLPGRKSDVQECQWLMKLHTYGLLRNSFRPPDNIRAVRTIWRLRDRCVVAAGRCIQQIQKALTTMNVQLANTISDVGGVTGLAIIRAIVRGVRDPWELAGLRDRRVAASEEEIAHGLQGNWREDVLFELDQVVQEYDFHHARIADCDEKLESYMAALPTRRMAAEEPAAASSKRGRRRNCPNFDLRGALQRVLGVDVTAVDSIDVLTGEVLLSEVGPDLSAFPTENHFAAWLLLTPRQEVSGGRVIRHVRAEGSSRLANALRMAAQSLSHSDSYLGARYRSLRGRLGAPRANKAMARYLACLLYRLLTKGEAYVDRGAEQYEKRRTEQDRRALERKAAAHGLKLVPVAQT

SEQ ID NO: 144230 - protein, 325 aa, unidentified
MRQPQSQVKPQTQVGLDVSSQTLDAHIRVDGKAFSVPNTDVGFDQLCDVLSAYDVSMILMEATGGYEDNVACYLQLQGFDVVVINPRFARRFAQSMGKLAKTDRIDAAILAQMAFMIDSGPDRERYIKPVTDEQRKQLSRLSSRRRQVVDLITIEKQRLTHADDYARESINGIISLLNVELKRIESDILRYVKKNFSELADRLLSIPGVGEQAMIVLIADLAELGHVNRRRISALLGVAPFNHDSGKFKGQRRIRDGRQTVRNVLYMGVISATRFNPVIKAFYDSLLLRGKPRKVAIIACMHKLIRIINAMMRTGKPFDMSLHGV

SEQ ID NO: 144231 - protein, 457 aa, unidentified
MSRIRGCTLKMESYAGVDWASDKHDVLVADAAGERLLAATFAHDENGLRSLCRQLLRLNVALVAIERPDGLLVERLLDAGLRVLALHPNQVAAARDRFRVSGGKSDRFDAFVLCELARTDHHRFRVLEPDSDQTKALRALTRGREDLVGTRTALCNQLRAELERFWPGPLHLFTDLDSQISLAFLERYPSPADTRGLGEARLAAFLARERYSGRQSAAQLLTKLKRAPTGRVGEQELATRRQLVLTLVSMIKLVNGQVKELERHIAVAIRPHPDGDIFLSLFKGTALTAAVLLAEIGDCRARYPARDALAADAGQAAVAKESGKRKTATFRWGCNKRLRQAFHTLADSTRHWHPWAQDLYADARARGHDHPRALRTVGRAWSRILWRCWQDRVPYDPDRHRALQRHITVTIPSPSGPRPDLAATKRIAGAAVTGTAARRAEREALDGKPTSANTLRG

SEQ ID NO: 144232 - protein, 402 aa, unidentified
MNAVGIDVSKGKSMVAIMRPFGEIVSAPFEIKHTASDIHSLVELINSVEGESRIVMEHTGRYYEVLAHQLSEANLFVSAINPKLIKDFDNDSLRKVKSDKADAVKIARYALDKWQNLKQYSVMDELRNQLKTMNRQFGFYMKHKTAMKNNLIGILDQTYPGVNTYFDSPARSDGSQKWVDFASTYWHVDCVRKMSLNAFIDHYQNWCKRKKYNFSQSKAEEIYGKAKELVPVLSKDAITKLIIKQAVDQLNSASTTVESLRTLMNETASKLPEYPVVMAMKGVGTSLGPQLIAEIGDVSRFTHKSAITAFAGVDPGVNESGSYEQKSVPTSKRGSSDLRKTLFQVMDVLIKTHPQDDPVYQFLDKKRAQGKPYYVYMTAGANKFLRIYYGRVKEYLSSLPES

SEQ ID NO: 144233 - protein, 363 aa, unidentified
MIVIGTDTHKKSHTAAAVFAGTGQLAAELTAPARQAGFGELLSWGRDLDPERIWALEDCRHVSGPFERFLVASGERVVRVPPKLMGESRRGERTRGKSDPIDALAVARAALREGPETLPGAHLDEAALELKLLLDHREDLVRARADDQQRLRWHLHDLWPDLELPAGCLDRVVWLDRVARKLSRAEQGARVRVSRELVRAIRDRTRRSAELEREIGAMVRAQAPQLLVLPGCGTLTAAKLIAETAGVARFASDAKLARLAGVAPIPASSGNRTRLRLDRSGNRQLNCAVHRIAVTQSRIHAPAKEFLARKRAEGKSTREALRCLKRHLIRRVWRLLNDSGIDRSVETTDSQRGSLSPQIAVAA

SEQ ID NO: 144234 - protein, 345 aa, unidentified
MKIVGCDLHTRYQQIAMLDTETGELIERRLEHANGEARAFYAGLQGPVRVGIEATGHTRWFERLLAELGHELWIGDAAQIRAAMVRKQKTDARDAAHLLQLLVEERFPRIWRPTMAERDLRQLVWHRQKLVWMRNAVGNQLHALAMGEGVCRKKQLWTKQGRAELQALNLGAWASYRRQELLEMVDQLDGSLEKLDRAVEEQSQQNEAAVLLRTHPGVGPVTSLAFVLTLGPVERFKRSKQVVSYLGLNPREHSSGGKQRLGAISKQGNPMMRSLLVEAGHSAARLDAELHKDYQRLKLRRGSGVAKVAIARKLAVRMYWMLRQQANYAQLVRMQGSPWATLVEQ

SEQ ID NO: 144235 - protein, 373 aa, unidentified
MHRTFVNAEGSASVDGVVLGVDTHLDLHVAVALDQLGRRLGELTVPSTTRGYEKLLRWAEGFGSVGCAGIEGTSSFGAGLSCHLKAAGVSVVEIERPKRRHLRRKGKSDPIDAEAAARTVLAGAALGEPKSGDGRVEMIRTLRSARQSAVKARTQAANQLQALLVTAPEVLRHRLRELPTKELVATCARFRLGDDPDNIETATRFALRSVARRHETLSEEITELDGQLKRLVAEVAPGLISLPAIGTHHAATLLVVAGDNPERLRSEASFASLCGVSPVEASSGKVVRRRLNRGGNRDANRALHMICVVRMGSDKRTREYVARRTAEGKSKWEIMRCLKRYIAREVYRILLSSTTTKPPPTQAVSRVLEADIA

SEQ ID NO: 144236 - protein, 351 aa, unidentified
MKTMTKQLQGEELFVGIDLHKRRWHVTIRVADVEIFSSSIAGRWQELEKVLNRYNGCRINAVYEAGYFGFWLFDHLTQYGVDCIVTPPSLIPQEHGNRVKTDRLDSRKLARLLAKGLLKSIWVPSAKERFHRQVIRRRRQLVGDRVRTQNRIKSELCFYGIDLPAARSKWSQVYFANLQRIKFKNHWMQKSFNQLLEQYEFLSTQIDKQTQLLKQLSQLPLYCDRVKILCSIPGIGILTAMEILLELQDFSRFRRAQQLAAYVGLTPSQYSSADKIRMGRITGAGKNSVRSALVESCWHLIRKDKAMRKKYEQIKARAGGKRAIVAVSRKLILCIRRLLLDNRPYVYEPVI

SEQ ID NO: 144237 - protein, 476 aa, unidentified
MAIPHSSRLNRKQRRELTRRLRADDPGLDVLHPNAAGIDIGNSAHYVAVRPDRDPDPVRRFDCFTADLHRLADWLQHCGVTTVALQSTGVYWLPLYDILDARGLEVYLVNARHTKNLPGRKSDVQESQWLLKLHTYGLLRNSFYPSADIRVVRTYWRQRADHVRAVSTCIQRMQKTLTQMNIQLANVISDLSGWTGQRIVRAILAGERDPQTLAALSHPGIHASRDTIAKSLEGTWRPDLLFVLQQAVTMYDAYHQRIEECDQALEQHLKSFADKPADTTDAVASPAARDQARPRIKHRRKAGSHAPQFDLGRELHRISGVDLTRIDGIDVGVAQTVISEVGLEMSRWEDEHHFASWLGLCPDNRITGGNVIRRGTRHVINRAATALRIGATTLLRSQSYLGAQYRRFRGKLGAPKAITAMAHKLAVLVYRMLRWGQEYVDKGMQYYEERHRQQQIRLLKKRAATLGFLIVEPQIS

SEQ ID NO: 144238 - protein, 402 aa, unidentified
MKKVCGLDVHKDSIFCAIYNGEVCSVVKEFTTMTPDIYLMGEYLQSEEVEEIALESTGIYWIPVWDLLYEMSFKLTLVNPYLIKQMPGRKSDIKDAQWIATLLHKGLIRGSFVPPPVIQELRVYSRKHIKLKQQVTRILTIMDSILVKCGIRASSCLSSISTKSFMCIVEALIAGWTDPDYLVSLVFGNRKNKQSGKLKDALTGNVKSHHLRELSWAKQEYNMYQMQISDCLFEMNRICEEHFSLMVKLLQTIPGISQISAMTIIAETGGDMSVFESSDKIVGWAGLRPKNDESAGKYKSTAITKGNKYLRTILVQVSWAASRTKGSFFKDKFQRLAMRKPRKKALIAIARKILVVIWNVLKYAEEYNPRLVPVQDPVKMKARLAYHKKEYEKTAKLLNITV

SEQ ID NO: 144239 - protein, 425 aa, unidentified
MIRNDENTDCQIVDGRICDVSFFLRASVSCMFNKSRTHVVMDPAVGKAAERSEAAFPTAAGDRSSVSGSFETATEQDRRRFLETSPNNCQSRLRRYAASSSYPQDRENSMDGSITSFVGIDIAKRSLDICILPEGKQLSLPYDTAGLKQLFSWLPEAGSCLIVVEATGGYQRRVVAQLADAGHLVAVVNPRQVRDFAKGLGILAKTDRIDAQVIARFGQHVRPRTLAKTHEKQEELAQLVTRRRQLIELRTAENNRMDTLVSKPVRKSVQQVVDLLNKQIKRIEKEIVALLESNDDWKNRGEIIQSAPGVGPVTTATLLAELPELGLLNRQEISALVGLAPYNRDSGRFHGKRSIWGGRASVRSALYMAALTARRCNPVIRSFAQRLEAQGKPFKVVITACMRKLLVILNTLVKTNSPWNPDYAK

SEQ ID NO: 144240 - protein, 338 aa, unidentified
MRTFIGVDYHKKFSYGTIMTEAGQIIKQGRFANHPASVAGFLGEHGGSGCRAVLEATRNWMVMHDWLEELVDGVTLAHPLKVKAIAEAKIKTDKIDATTLAHLLRCDLIPAAHVRSAQARILTNLLRHRMFLVRLATMTKNRIHVLLDRHPLIRSQRSATELFTRMGTAWLKGIDLPKYDRCILDSEVALLEHLAEQIKQADRWLAQVGRKDPRVKHLMSIPGIGRAFALLIVCEIDDVHRFATDKKLHAYGGLVPSTHSSGGRTFHGRIIRGGNKYLRWAMVEAVWPAIQKDVQLNAYYHRIAQRKGPNPAKVATARRLLSIVYKVLKEDREYRYAG

SEQ ID NO: 144241 - protein, 413 aa, unidentified
MKDIVYSRCCGLDVHKDSIAACARWSDDTGEIHKENRVFGTTTQALEELAAWMAQYQIRQVAMESTGVYWRPVWNILEGRFEVRLANAQHIRNLPGKKTDRKDGEWIAKLLQHDLVPASFVPPTPIRQLRDLTRTRVRLVQERATVANRIQGILEDANIKLASVVTDVLGYSGRRILEALIDGQTNVEQLADLARTTLRRKIPQLRVALNGRTNPHHRFCLQQMMDHLGFLEGKIFVIEEEIERHSRPYEEAIALWITIPGIRRLLATTLVAEMGVTVKQFPSAAQLASWAGLCPGNNESAGKRKPGKTRKGNAWLRRALCEAAWGASHTKNTYLAAQFRRLAARRGVKRANIAVAHTILIIAYQMLKNRCEYQELGADYFDRLRGDGLKHYYVKRLQQLGVTVTLESAQPPA

SEQ ID NO: 144242 - protein, 435 aa, unidentified
MEEVEDEPLFCDRVAGIDIGKATVMVTIRVPSEARAKGRQQETREFGTTRRELLALADWLRCWQVERAGMEATSDYWKPVLFTLEQEGFDCLLYQASQVKALPGRPKTDKLDSVWLARITEQGSLAGSFVPPEEIRRLRTHTRYRRKLVQMRTAQKERCEKLLEDAHLKLSSVISDIHGVSGRDMLRAIAAGERNPKVLAQMARGVMRSKIARLEQALDCSFFTGEHAFILTMMLDSIDSLTAQAGVLDARIADMCQPYQRQLEQLDEIPGFGTTTAQDLIAEIGTDMNVFPTAGHLASYARQAPRVKESAGKRKGKNATGRGNPYIGGALGEASISAGRTQTFIGEKYRRLTRRMPKRKAQVAIMRSQLVIAHALLSDPDARYQDLGPDYYERKADIRRRARNHARALERLGYKVTLEAIDPGTGELHLIATAG

SEQ ID NO: 144243 - protein, 343 aa, unidentified
MLKESLYKGKKVFVGIDVHKKTYAVSCFVDGVITKKWSMQSDPASLLDQLKKNFKGAQITTGYEAGFSGFNLHRLLFSNKIKSCVIHTPHIQTRANDKVKTDTRDSAKIAEQLSTNQIKSIYIPTQEEEQRRSVSRGRDAVVRRRISVSNELKMKLYYLGVDTKNIDTMSEKFLKKIEQMKFSGYDTFHIGELIGTYRELSLRIKRYNKMLEKQANEDSNTDIYESIPGVGIISSRILANELGNMKRFKNERQLFSYLGLTPGERSSGEKIRRTSMTKQGSSHIRKTLIEIAWRAISVDKNLLSKFGDLSYKIGKQKAIVAIARILVGRLRSCLIKKELYVLG

SEQ ID NO: 144244 - protein, 333 aa, unidentified
MNKITLIGLDTAKQTFHLVGVDAHGHYVWRKQASRCRLLSTLAQIECCEVVLEACGASHHWARSIQALGHAVRLIAPQHVKPYRRGQKNDYRDAEAIISAALSPGMRFVGVKRVEQQAEQALHRVRSRLMSHRNAAANALRGLLGEYGVVFGRGLKPLRDGARCFAETEEAHTLGLVDLVNDVLEEIGVLQARMDHYEHLIEQRVEADETSRRLREELRGVGKLSASALRVKVADVRDYGNGRHFAAYLGLAPGHSGTGGQVHIGHLKRGHDRYLRQLLIHGARSALCHLGDKQDPQSRWLRGLLERRGFNIASVALAHKNARQAWAIMAREQ

SEQ ID NO: 144245 - protein, 307 aa, unidentified
MNTKNYIAIDISKLTLQVCSCFFSGCFPYSDSGLKQLIQKVRTVDSPIVVYEATGGYERILAETLRQNSIAGRIVNPSRIRAFAKSDGLKAKTDPIDAALILRFAQQKQLEPTEPPSDTELNLKAMMNRRAQLVASITSEKNRLDKDPPCTHKSIRNVIRMLEKELAIFDRDINNLVSEDKQMSYRREIMSEVVGVGNITCLTILAYMPEITRLSRNELVAMAGLAPFNRDSGKYKGQRKIDGGRAKIRKCLYMAATTAAVHNKHIKSYVDALRSRGKPYKCAIVAAMRKLLIHLQSLLKINQFSLA

SEQ ID NO: 144246 - protein, 424 aa, unidentified
MKFNRIATLNQRVERITTSTLVVGVDIAKERHVAQAVSFRGIVLSKRPIVFENTQVGFELFERSIRKLQQDHKMDDVIVGMESTGHYWFNLASWLTNKGIEVVLVNPATTKRNKENRDNTPSKSDPKDALIIADVVSRGYYTPYRPEEEMFQRLRIMMTNRERWTKQSARLKNQITRWLDIRFPEYTSVFKEIDCPRSLATLREFPSPSDLQGLTPQDVVDRWATHMSRPGGNRGLQKAAELIHKAKHSIGAVVGLEEDKWDLENLLDEFERVQEILRETERRIEKLLPEIPLAECLKSVGLTPTICAAVLAFGGDVSQLEHGNQLLRRAGLNLAEKTSGKYKGKIKLSKRGNSLLRKHLFLAVIHLVKGNEAFKAWHQHNVEQKRMSKMRSIMKLIGKLARILVAMCRKGETFSTETTPAMAA

SEQ ID NO: 144247 - protein, 342 aa, unidentified
MDKVTIIGVDLAKRSFQVHGASGDGSVLFRKKLSRAQVVPFFAKQPICIVAMEACATAHDWGREIGALGHEVKLIPPIYVKPFVKRHKNDAADAEAIAEAASRPTMRTVAVKTHEQQSRAVLFRTRDLFLRQRTQLINALRAHLAEFGKIAPKAATNIKRLKKVLEDPENGLPQIVTDIGSVYFSQIATLTDQISKLDKQVRTEATKDDAARRLQTMPGIGPITAMAVSAFAPPMEIFRRGRDFAAWVGLVPKQHSTGGKQKLGRTSKMGQRDIRRLLVIGAMSVVKVAVHKGAPEGSWLQRMLARKPRMVVAVALANKMARRLWAMLVKSEDYRDPAIAAA

SEQ ID NO: 144248 - protein, 352 aa, unidentified
MKSTQTTATPKLFIGIDVHKKSWTVHFKTDLFDNKTVTMPADPDELISYVGKHFQDHEVSCCYEAGCCGYWIARALLSHGWEVKVVNPADVPRNNKQDWQKTDRIDSRNLCKHLSDDNLKGIYIPGEEQEQLRSLFRRRIHLARNLRSIKNHIKSQLLYFGIKLPDQYDNPNWSREMKTWIGNLKWKFSSGGESIKSRLKQLEFMWYEELHISNELRAYCRKHYRKDYYLYKSIPGIGGITAAGILSELGDIRRFNRLDELAAIVGLVPGIYQSSDHTINLGLTKRSNHQLRSLLVEASWVAVRTDMALQQYYRRHAHKEPNKAIIKVAHKLLSRMRAVINSEVPYQLGVLK

SEQ ID NO: 144249 - protein, 446 aa, unidentified
MSDRSGLSRGDRNRNARLARLRQLLPFDHAIVGIDLADDKQAAVVTDHDSRVIARRRVSARAWELGDLLDWAVAKAFAAGFASVTVACEPTGHRWRVLDQLAAGRGLALVCVQPLLVYRSREGEDLTRDKSDPKDAVLIARLAGELRCYEPERADAVWARLRHLGARRRQLTTDATAQVNQIRDLLECAWPAVLGASGSPFRSTTWCAALAVVLDRCAGDLSRVVRLGPARFEGAVRRELPRWGAVRPCLRIVRAACAALRDPAGVMVHRPGALERAHLALGDWRDTCARLAGAEARMVAVLDDLGLTALVTTIAGLTPVGAAAILAETGDPARFASPRSLVKHAGLCPRDNASGEHQGKTSISGRGRPGLRLAAWRAVWAAMPNNPVMAARFTHLTTRQDNRLARQQARTACAAALLRWIHVVVTRRVTWDPAIAAEGTPLRQAA

SEQ ID NO: 144250 - protein, 465 aa, unidentified
MTVHSVGIDFHQGLHRVRCLDEQAQACDGFGFQTTPEGLLTLEERIFKDSSNPIIVFEPAGIPWLTVAAYLRSRHPDCRLVKAKMQKVAALRKYLKGPVKSDRIDALTLAKMPFIDPEQLEEVYLPSAEIHALQRLTRQRKRLQSDISGRKVRIEAIIDGYLPGVRKTFSAPWSIQFREFLRSRFNPFGIVRDGEKTFVSFLTKASYREKVSKTESQHIFQACQSIAAICKVSETVSAINEDFFVELQDEVTRELRLMEAEEAESELLEQRISEIYHKLHPSNNLCTIPGVGEHTAPIFLASIGDPTRFRNQSSFANWTGVVPRSRQSSNMEAKGLRMTKAGPSIMRLALFQSGDIGRRWDPQMAAIYYRQMVNHGKNHKQALGAVMSHLGARVWKVLLEDRPYELKDMQGKPITRQNARSLILTKYHVPEEVRKEKRRRMNKTGVVRETATNSICETAKTPQPA

SEQ ID NO: 144251 - protein, 420 aa, unidentified
MDVVVERCAGIDVHKDMVAVCVRVPGPDGERVEVLAEFSTFTEELLVLRDWLVAHGVTRVGMEATGVYWKPIFWVLEDAVECWLLNARHMRNVPGRKTDMADAGWICRLMEHGLVKASFVPPPEIRELRDLTRLRKTRIEERTRETQRLDKILQDAGVKLSSVASDVLGRSGRDMLDALVAGSRDPAVLAELARGKLRRKLPQLQAALEGRFSSHHALLVGDVLSLLDHLDESIEALSVEIDRVIAPFAEHRDRLASAPGIDRRTAEAIIGEIGVDMTKFPTAAHLASWAGMCPGQHESAGKARHGTARHGNSWLQRHLAVAALAAARTKGTYLNAQYHRLAGRRGKLRARKAVGHTLLVGVWHMLAEGVEWHELGGDYFDRRQSPEHRARRKLAELRTMGWQVTTNDDGTTTLTPPIAA

SEQ ID NO: 144252 - protein, 570 aa, unidentified
MVVVGTDAHKYSHTFVATDEVGRQLGEKTVKATTAGHATAIMWAREQFGLELIWGIEDCRNMSARLERDLLAAGQQVVRVPTKLMAQTRKSARSRGKSDPIDALAVARAVLRETDLPLATHDETSRELKLLTDRRDVLVAQRTSAINRLRWLVHELDPERAPAARSLDAAKHQQALRTWLDTQPGLVAELARAELTDIIRLTGEINTLAQRISARVHQVAPALLEIPGCAELTAAKIVGEAAGVTRFKSEAAFACHAAVAPIPVWSGNTAGQMRLSRSGNRQLNAALHRIALTQIRMTDSRGQAYYQRLQDAGKTKRAALRCLKRRLARTVFQALRTVHQPSSEHTQPAAACHRSYCSSHLGEPPRLTDMTQKTRIQPLPPKRAGLLIRALYRIAKRRFGEVPEPFTVTAHHRRLLIANVVHEALLQRASRKLPPSVRELAVFWTARSIGCSWCVDFGAMLQRLDGLDMDRLTDIDNYATSSKFSDDERAAIAYAEAMTADPHSVTDEQVADLRARFGEAGVIELTYQIGVENMRARMNSALGITEQGFNSGDACRVPWAAPDVPSAESR

SEQ ID NO: 144253 - protein, 336 aa, unidentified
MNTVNVNTAIFVGIDAHPTTHTALAMNRFEEEKGILTFDNTREGILQYLSWLTSIDTRQDNIIIGIEGGGNSRHSLIAHLLTKYQNIYEVNPLYTKQRRTFGTKADKSDPRDAKLIAEVLTRKLAELPKITTHDLSSHMLVLKKTVWFYEQTTAQGVAIQNQLHQVKREAMLSIDRTEKKILMMIITALEKQLKQVRKTQKQCQEQLAALLEEQGKNLMTIKGIKTVLAAKIVAHSGGIERFTNLDSFIQYAGIAPREKSSGRTKRHSKSKTGSRKLNHTFYLAAMVQLRWNPKAKEYFEKKIQEGKTKKHALKCLMKRTACIVYGMLRSGEDYKE

SEQ ID NO: 144254 - protein, 431 aa, unidentified
MNCNTQNAKIETINEKTLVVGIDVGSETHYARAFDWRGYEYSKKAFPFSNTEAGFVSFLEWMQDIAKDNGKEELMPGMEPTGHYWFDLGKFLQDKGIKPVLVNPYHVKQSKELDDNNPSKNDRKDPKVIAGLIKDGRFTYPYLPEGVYAELRSASNLRFQTQEELTRILNRIARWFSIYFPEYKDVYGKSDSKSGLMILEQAPLPADIRALGVDGVNKIWRDAKLRGVGMKRATKLVEAAGHSIGSREGLTTARMEIKNLLSDYERYSKRMEEVVELIDELVKEIPYVEKMLQIKGVGIKTISGLVAEIGDIRRFDNPKQIQKLAGYALVEDSSGKHQGETKISRRGRKKLRYLLFEASLSLVGKNEEFKELHYYYTHREENPLKKKQSLVAVACKFLRIAYKILTTGVDYDGAKMISDIRRPQKQMLQAA

SEQ ID NO: 144255 - protein, 413 aa, unidentified
MIPIEKLFIGIDVSSSSLVAHAMDQEGNDIFHSFEVNNNQPGCEKLINFISKHAQDYKVNIIQIGMEATNVYWQHCYRLLQDDENLNTNFKLLLYVLNPKVVKNFKKAYNDLPKTDSIDAWVIADRLRFGRVKNSSVPEEVYKPLRQITRFRFKLGESMRKEKNRALNLVFLKFSDYSSSSPFGTFSEASMALLEDFSPEEIVNTDIEKLATFLFENSNNRLGGSHSIEDIIKELKKSARNSYRLKPKMNQAISQTLSMTFDNIRFFKSQLKKVKKTIIRELKAIPQTLDTVDGMGPILTSGIISEIGDINRFDNQASLASYAGLTWTRHQSGSFEAEETSLTKKGNKYLRYYLVEAANSLRVHNDEYRQYYWKKYNEVPKHQHKRALVLTARKFVRLVFALLSKGEIYQPRR

SEQ ID NO: 144256 - protein, 368 aa, unidentified
MSNHTDYEVGCDAHKHYSLFAVLDHQGRPVEQTRVNHEPGAIRAFLSRFPPGTPVALETVGNWYWIVDEIEQAGCVPLLAHAQMAKRMMGHVHKTDKLDAEGLAILQHLGSLPTVWIAPAEIRDERELPRTRMALSKMRTALKNRMHSTLAKYALSLDTQSDIYAPKWRPQLMQLICSLPDETRRCMQQELELLDQVQEQIRRLEARILERVKITPTIQLIQSVPGPAKILSIVIDREVGSIDRFPSPHHFASYSGLVPKVKASGGKTHYGKMIKAANNYLKCAFIEAANVVVRQQHHPSWRQKYVVALFERTRQRKGHAVAVGTVARYLAEATYWVLKKGEPYREPGPQHPVGRKSAVSPKQGQVPT

SEQ ID NO: 144257 - protein, 372 aa, unidentified
MQQDRAVFVGLDTSKMKISVALAEEGRQGEVRFLGEIDSTPEAVRRLVTKLAGQYRRLLFCYEAGPTGYGLQRQISALGHDCAVIAPSLIPKRPGERVKTNRRDALTLARLHRADELTRIWVPDPGHEAVREVVRAREAAMEDLRAKRRHLQSFLLRHGRVFTGRKPWSRAHARWLAELAFEHPAQHWVLREYRQAIEDAEARLERLTRQVAEVVSSWSMAPVVEAYQALRGVALLTAVTFAAEIGDVRRFETPRQLMAYVGLVPCEHSTGDRVRRGSITKAGNTRARRVLIEGAWTYRFPARLTRLLQERQAGLPKIVRAIAWKAQVRLCGRYRRLMAAGKRQTVVTTAIAREMAAFLWAIGREIEPRPAV

SEQ ID NO: 144258 - protein, 317 aa, unidentified
MALHRAFVGIDVSKEWLDLWLAPQKRFERAGNDGAGWAAVIGLLKSLGIEAGVVVAFEATGGYEQGLRRALLEAGFDVRRLNPLRVRLYAKSLGRNAKNDRIDARVIARYAEAADTTPDILDPARERLAELVSHRRRLVDERVAVGNQTSTLHCVLLQAQNRKRLALIERQIDETDALILEAVGQVPSLVAKVGLLKTLKGVKDITAMALVALLPELGRITRRAIAALVGLAPFDHDSGKFKGTRSIAGGRAAVRTALYMAARAAARSKSPLGDFYQRLIAAGKSPKVATVALMRKMLVTLNAMIRDNEAWKHAKPC

SEQ ID NO: 144259 - protein, 360 aa, unidentified
MNPTIVAVDLAKTVFQLAVADTNWRVIEQHRLSRSQFERWFLNRDISLVVMEACGSAHHWARWLNRMGIEVKLLPAAYIRAYVKRNKTDAADACALLEAARCADIVPVRIKSIEQQALQGLHRIRSLWMTTRTSRINTLRGFCREFGLLIPQGARAGIEVIARALADPNAAVPTLIRGSMKLLVEEIRLLEARIGQLEKELTELAKQSPACTTLLSIPGIGLLTATALVAATSGDVSHFKDARHFASWFGLTPKEYSSGSTRYLGRISKRGDRYLRMLLTHGARSVLRAATVAQRAGRTIDGIKQWALIVQGRTNHNKAACALANKLARICYATLRDAAPYGQPAPRQTRKLQRTAFVTA

SEQ ID NO: 144260 - protein, 313 aa, unidentified
MYKYIGIDVSKATLDLYDGEKSYKVSNDTTGFKAVKKLSTKKEELCLIFEPTGIYSHSLIEYCQKYSIKAIIVGSKEARDYARSIKQRSKTDKIDAKVLYRYHTQVVPKSITVPSIDTHMRKVTQRRNVYEKYQKMMGQLNNLIEASHKADKSLIASLEKQIISLEKSSQKVLAEIEKLLLDNREHQEAFTHLQTIPGIAKKSALVILMEFLRYPEAKSNEMVALMGLDPVLKESGMFRGKSRISKQGGKYFREKIYMSTVVAIQYNDRLKSFYERLVQNGKPKKLALIAAMRKLLRIAFAIVKNKEPYLALV

SEQ ID NO: 144261 - protein, 508 aa, unidentified
MTKKNTSSKFRLLLTGQLVKSKTQEVFKMNVKARKAKKQVNVENQAINLLAKEELSKKIEVVEKELRSYTWRELETNGKFAKNDKLSFITDDMLIVGCDIGSETHYIRAIDVRGRELSRGAFEFSNTSEGFENAKAWVLALAAKNDKKQIVLGLEPTGHYWFALAAWMISNGISVVQVNPYAVKQSKEIEDNSQLKDDRKDPKLIANLVKDGNYGMPYLPEKVYADMRRLSMFRDQLSEDRIRNINRLHRELKIYFPEYMDAFGKIDGAFTLEVLKVSAIPSDIAALGAEGIKNIWHDAKLRGRGYSRAGEIVSYAKKSVGLKDGTDAGREAVKWYAEQILKLDEQLAVIENALHKKCREIPYAENILAINGIGENILAGILAEMGDISRFDDVKEIQKLSGMGLVACSSGKHKGQTKISHRGRKRLRYWLFQAAKSAVSHADEFKQLHEYYTTRTNNPLKKMQSLIVIACKILRVIYTILKTGTTYDPQKLLKDIKRPVIAQTSLAA

SEQ ID NO: 144262 - protein, 350 aa, unidentified
MIIIGCDYHPGFQQIAFVDGDTGEFQERRLSHREEAEKFYRELAVSGARVRVGMEASGQGRWFERLLAELQMELWMGNAAEIRAKRVRKKKTDREDARHILQLLVEDRFPQIWVPNWENRDVRQLLWHRHRLVQMRTRIMNQLQAVALNEGLRCKKRLWRERGRQQLETFQLAPWASRRRRDLLELLDRLNPTITDLSQALEQEVEKYPAAQRLMTHPGVGALTALAFVLIIGEPERFRCGKQIAAYLGLVPEEDSSGESRRLGHISKQGSGLMRFFLVEAAQVTARSDAEWRRKYFHLAQRRGRKIAKVAMARRLAVRLYWMWRMQWDYQQLKKFGPHAGQLGSAVGVQ

SEQ ID NO: 144263 - protein, 394 aa, unidentified
MHEVFVGIDISKNFFNVSIVNRRGEEIKRFKFDMDIYHFNKLLEELNKFNKKSIIIGMESSGVYHMNLYSFLRENSFNVSLINPLIISSFTKLSLRKSKTDRKDAKEIAKYLLMVDENINYFESNEIKYLVRERERISKEIGKIKNDIEKIIIVTFPEIIKFYNIYNKTLLNLIKDYPSSNRIREVSYEEIEDILNKNRRGRKSKISSKRIIELAKSSIGISSEVKERILSFKISHLLFLMDKEREIEEIIRKNIDGVMRRNIEIVTSIKGIGEVSAIHLLSEICDINRFNSYKKLIAYSGFDPTIYQSGNFEGKSRISKRGNRHIRRILWIMANSVIRYNEVFKIYFIKKIDKGIPYKKAVISVCHKLIRVIYSLIKNGSYFDPNLHLVHNSL

SEQ ID NO: 144264 - protein, 410 aa, unidentified
MSPLYVGIDVSSKSNVAYLMKPDGSKHSSFSVSNSRDGSQQLVKRILSAIISESLTDVVIGLEATSVYGDNLVCFLREDGSLAPYNKKIHVLNPKQVNKFKLSYNDLPKNDYVDSFVIADCLRFGRINKEVYLDDYRYAALKNLTRARFFAVQNLTREKQRFMNQLFKKYSTMAQEKVFSDTFSTTALAVYESFESAETLANMDLHQLTEFIIEKGKNRFPDPDSVAKAIQKAARSSYRLPKTVNDSVNQVLSISINSMRAMESQIKAFDKAIAEQMALIPNTLTSVNGIGPVYSAGIIAEIGDINRFPNQASLAKYVGLVWSQHQSGDFEAQNTRMIQSGNRYLKYYLCEAAMSLVRCDAEYRSFYHRKYKEVNKYQHRRALALTARKLVRLVFRLLKDNCLYRAPESK

SEQ ID NO: 144265 - protein, 347 aa, unidentified
MRFYTKQHKFYCGIDLHAKKMYVCVLDSAGEIVLHRNINTEREIFLAVIEPFREDVVVAVECMFTWYWIADLCAKEAIPFVLGHALYMKAIHGGKAKNDKIDSRKIAVLLRGGMIPQAYVYPAKMRATRDLLRRRNHLMRKRAELFAHIQNTRSQYNLTDHLGRIAKPHNREGVVERFDDPSVQNMIATDLAVITAYDPIIAKMERDIISSAKHHDPVAHALLNTTPGIGRILSLVILYEIESIKRFPRVQDFVSYSRLVKSAKESNGKKYGSSGKKIGNAHLKWAFSEAAVLFLKGNEPAKRYLNRLTAKHGKGKALSILAHKIGRAVYFMLKNKRPFNQKKLLGL

SEQ ID NO: 144266 - protein, 347 aa, unidentified
MELEQVSIIYNKETNLETIMETINILLPWLGIDVAKKTFNVVLLRGEKKKHKQFANAAPGFAALRDWLTKQGVPQVWACLEATGSYSAALAHDLQQAGHQVSLVNPARIKAYGQSQLQRTKNDRADADLIARFCQATRPQLWTPPPPQQHELQALVRHLDDLLDTRQQLQNRLTDGPQVPSVLVSLRQVIAHFNEQIAQVEAQIQQHVQRHPDLQEAHDLLVSIKSLGSRTATVLLGEIERLRSFRHAGEAVAYAGLNPKERQSGTSLKGKTCLSKIGNARVRKALYLPAINAIKYNPIIKRLAARLEKRGLCKMAIIGAAMRKLLQLAFGVLKTGKPFDEKHAFAS

SEQ ID NO: 144267 - protein, 387 aa, unidentified
MQKPHDNGKASPAAFMQDNTLIAVIELSLSNWLVAGLIPGVSREPLKKLEPNPEDLLKLLHGWRDEAIKAARPITRIAVAYETGRDSFWLARWLRERGIDAHVIHATSVTVSREHRRAKTDRLDTAMLKRGFLGWLRGERGHCTVAIVPTMEEEDAKRPHREREGLVHEQTRVVNRMKSALIQFGVRNFNPKLRKARVKLETVRTPEGKSLPPNTIAALRRDMERLKIIKEQIKAIEQARLQQFEQKPEALANRMVYLLVRIYGLGWETADLLVHELLSRTLRDRKAVARYAGLTGSPDESGSKRREKGLSRSGNARVRKIMIQLAWRMVKFQPDSALVQWFKQRTENAKGSRKPMIVALARKLIIALWRYANDGVIPEGFRLHSAA

SEQ ID NO: 144268 - protein, 335 aa, unidentified
MTKKAQSELANFAGIDVGAQQLHLVRRSNGVSSKPQAFANTPRERRELAKKLAKVPNLIVCLEATGVYHQDLALALHDAGVRVMVLNPKVAHNFAKVLRRDSKTDPLDADTLAQYAERMPFEPWARPSTAALQLRAFSRRIEAVKDKKRAAKNQLHALRFSPETPKSVLQDALKEIEQLEQRLVTLTKEARTVIASNPTLHGCYELLLSVKGIAQTSAIALLGELAMLPAGLTHKQWVKFAGLYPRHNDSGTSVHKQPRLSKAGNLHLRKGLFMPALSARTHDPHVQAYFEHLVAAGKKPLQAICAVMRKLLHAIHGMFKNNQPFDNTRFYALPA

SEQ ID NO: 144269 - protein, 363 aa, unidentified
MMTSPVAGIDPHQDSYTIGIVNPNGVELAHETFPTSASGYLDGIELLTTHGVEQVGIEGSAGWGAHAAIAFVAAGFDCREVPAQRSAAQRRSRRLDKTDVVDAVAAARALLAEPGLGPVQALEVYDSLVAKIEAVLEHRRMLVAVRTLVLQHAQDQISKLPVEIRDQLTTTGKIEGRLRRLEQVDTSAVSTLAGEYRLSWLIALVDQDRAARRQVRQLERDIDQLLDEHGTTLRDEPGIGPIAAATLLVEVGDPFRFARESKFARWSGTGAVALSSGEGDGRPVKHRLDFRGNRRINSVLYIASVTQQRNHDDARVYLERKLGEGKTRREARRAHKRHLANRVIRRMWNDESRRRERPVTVAA

SEQ ID NO: 144270 - protein, 415 aa, unidentified
MLTIYYKNCCGIDVHKKMLVATMAITDERNVTTYETKQFSTFTKDIIKLKEWLISNNCKDVCMESTGKYWIPIFNVLEDTCKVVITHPKYVRSIPGNKTDKKDSVWISDIFKHGLVNPSFMPSADIRQLRDLMRYRFKLLNCRTGEKNRFQNSLTMSNIQIANIVSDTFGKSAQSVLSLILSKKDTVTIEEITPLLHKRMKASPQDVLDSIQGNLSNEQNAKMKICLTHFENINQRIEELENAILPLTAKYQNEIKLILTVPGVGDISAIYILSEIGPDMCAFKSANHLSSWAGLTPQSNESAGKKKSVKISRAGVYIKPLLIQCANAAIKDKDCEYFKLRYEAIKKRRGHKRAIIAIARMLLTCIYHMLLKNEPFNNELYKEFTNSNFKSKTTKLNINNAIKYLEKQGFSVKQA

SEQ ID NO: 144271 - protein, 430 aa, unidentified
MQEKQTDVTKELNYAAFIGLDWSDKKHDVYLHVCATGEEESKVIASTPEALDEWILQLRERFESRPVAICLEQARGVLVYMLMAHDFITLYPINPAMSAKYRQAFTPSHAKDDPTDARIIMELLLHHRDRLTAWKPDNVQTRTLARLCEERRAAVNLRTKLVQKLNAKLKMYYPQALALVGEDLSSTLACDFLQKWPALAEVKKAKPAKVRAFYYGHNCRSESLIQERIQLATTAKAATTDEAVLIPLVASVKMLSRLIGDLNPSIKGFDEQIKALFAQHPDAAIFGSLPGAGDALAPRLLVSFGSDRDRYSLAAEVQQFSGIAPVTERSGQRQWVHRRWQCSKFTLQSFHEFAQHSMGWSVWAKAYYQFYKSKGKKHNTIVRSLAFKWIRIIFACWKEHRPYDEARYLETLQRRGSPLCQHLDLPALVA

SEQ ID NO: 144272 - protein, 401 aa, unidentified
MNAHYTPNELQVGIDVGSINHAVAISDGNGKIIREFEITHTQKGFDKFFTIVAKESKQRDAIASIAMEGYNGWARPLDGLILKQGYKLYNVNNVKLARFKEIFPAAAKTDAIDARKIVELFSLQKHLPIAKKVLQEIQVSDSINIQLKKLSRRRKQLVDERMVISNRMGADLQAEAPDLKSLASCVDDLWFLRFITLRQDMRLLIKVHKSTIEKIPRIRKNHIDKITAWQTEASFTDAIDYIASMFYDDAMRILELKLKIKDIEKQIDQLIPSSNIASTLITIPGFATVSAGTLAGEIGTLNRFEGEGSLALYLGMTNLDNSSGKKTGSKRNMATNRHAKKAMINATMQHSRNAVESSVYLKKKISQGKKYQQAIRSLGRHLVRVIWSMIQQERSYEIREK

SEQ ID NO: 144273 - protein, 337 aa, unidentified
MDRQYVGIDLHRRRSVVVRVSATGEQLSCVRIANDPMAIAAAVAEAGPEPEVVIEATYGWYWVVDLLQANGARVHLANPQGLNWGQRRVKNDERDAIDLADMLRLGRLPEAWIAPPAVRELRELVRYRAKLVGLRSGLKAQVHAVMAKEGVLPAQGRMFGPAGNAQLDAMAMADNYTTRVASLRDLIELYDREVTMLEDQIHRQLRGNRGCQAIQAIDGIGPTIAAILVAEIGDVTRFRSPEALCSWAGLTPRHRESDTSVRRGRITKQGSRLVRWAVIEAVSRYHGGPRLAGDFRRIAERRGTNKARVAVARKVLTLVYYGLRDGEIRCLAQAEAA

SEQ ID NO: 144274 - protein, 391 aa, unidentified
MPKPQQRQPDDLSRSLISLNMDTTLIAVIEMSQSSWLVAGIVPGVERQPLKKIKPDEAQLLALLCRWRDEASRAGHHVSRIAVAFEAGRDGFWLARWLKVHAVDAHVMHASSIAVSREHRRAKTDRLDTELLKRAFIGWLRGERGHCKMVAIPTISVEDAKRPNRERENLVSEESRIINRMKAALTRLGIRGFNPKLKKATERLEGLRTPEGEAIPPNTIAELRRDMARRQFVRKQIREIETAREQHHANGCEDGPHAMVRLLARVIGVGIETADMLVQEVLSRNLRDRRAVARYAGLTGAPDESGAKRREKGLARSGNARVRRGMIQLAWRFLMFQKGSALAQWYRDRTENAAGNRKTMVVALARKLLIALWRLVRDRVVPDGVVLRPTQ

SEQ ID NO: 144275 - protein, 350 aa, unidentified
MLIIGCDYHPGFQQIAYVERETGELEERRLSHREEAERFYRDLAAQGARVRVGMEASGHAHWFERLLAELNCELWIGDAAKIRAKRVRKQKTDRQDAQHILRLLLKDDFPRIWVPNWENRDLRQLLWHRHRMVQARTRIMNQLQAVALNQGLRCKKRLWRESGRQQLEALALAPWACRRRQDLLAVLDRINPTIAELTQAIEQESEKCPQAQRLMTHPGVGALTALAFVLIIGEVDRFGCGKQIASYLGLVPAEDSSGERRRLGHISKQGNSLLRFLLVEAAQATARNDARWRNRFFHLAMRRGRKIAKVAMARRLAVRLYWMWRQGWTYEQLESFGSHAGQRGNRHGVQ

SEQ ID NO: 144276 - protein, 364 aa, unidentified
MDVHLRSTTVCALDAETGEAVTRRFRGNPWGEVAEWMSGFPGPSLAAYESGYLGFAPQRELSGLGVDCVVAAVSKVPRSAADLSSKNDRNDAARMAKAILSHDISPVWVPSPEIEGLRDLAGAHDAATARLAAAKQRLLAFLARRGYAYGGTTPAGNPRRYWTYDFLRWLDKVRPADDGGIRALAALRSEVEAAAETRDDLLAEYRAAVAAGPLSAEVEALQSIKGCGFALAAAFASEVGDFSRFRSGRQVTSYFGLAPKQRSSADSVRLGGISGAGNALVRRLAVEGSWSYVQAGHQPKLMPKGSGVPLEVRMHGRKGSERLLRRREEMLARGMPQAKANAATAAELVRWLWALGAMCREATE

SEQ ID NO: 144277 - protein, 346 aa, unidentified
MLHVGLDLSRKQVEVCLISDQGELVDGFAVIPDRDGLHGLARRVAVYGQAVRAVVESMNGARFVHDELVEHGWDVLVADAQKVKGLAPLACKTDKIDARVLAELSFRDLVPAIWLPTLELRREREISRWRLHLVKHRSTLKNRVHSTLITFGHQRHMSDLFGVAGRKLLKELDMPEPWRSHVDASLVLIDDLEARITQIAKELRRSGADHRYIPILMTAPGFGWITSFTVACEIGDISRFSSPVKLTGYTGLCPRVKQSGQMDQRGPLSKHGPKYLRWGLMEAAIAASSHPLFRERYQRTKRRLGRQRGPKVAQIDLGRQLAEAIWYMLTRNQPFAPAGATFRLAA

SEQ ID NO: 144278 - protein, 330 aa, unidentified
MTIAVGIDIAAKTFDMVIRRSGKPSKPSTFKQTPAGHAAVIKQLKKLKPRSIVMEATGIYYLDLAVAIAEAGLPVSVINPKSFRHFCALKLNGTKTDGVDAALLAEYGERMAPRLWTPPRDLYLKLRDVGRQINRLTHSRTQAKNRLHALTSTRMTLALLIEDEQEAITMLDRRIDRLTQAALELIEQDQTLSRHMQNLCAAKGVGQATAIAVLAELMVLPDSLKAPQVSRYAGLDIRLTQSGSSVNRPARLSKAGNAYLRSALYMPAMCAVRHDPRAKAFYDALVSRGKKKMQAQCAVMRKYLTGMWACIKDETAFDSSQLFSEEHMKA

SEQ ID NO: 144279 - protein, 343 aa, unidentified
MYFIGIDVSTKESALCILDGNGKIVRETKLPSDPEIIARFITDTGLAIERIGLESGCTAAWLFAGLQRYGWPVICIDARHAAAALQAGFRNKNDRNDARGIADLMRVNKYRPVWVKSPEAQRQGRLLTARATLQSQRVALENTIRGLLRQEGIGLTDRRTAFEAAVREVIAEDRLLHAAVHPLLETRNAVLCQRAALDRQILLIVRADPVCRLLMTAPGVGALISLAFKVAVDDPRRFSRSRNVGAHFGLTPREHSSGELRYQGRISKMGDREVRRLLYVAASRMLRRDAALWCPLKAWAVRLAQRVGIRRARVALARKLAVVLHAMWSDGQVFQWRRTEASA

SEQ ID NO: 144280 - protein, 440 aa, unidentified
MMEGMEAIHVPACGLDVHKDMIEACVIDKNGQLHQAVFDTMRKSLYQLKEWILSLSCLHVLMESTSVYWIPVFEVLEEVRGMDVGVGNARHMRNVPGRPKTDKADARWISKLCMMGLILKSFVVGRKFRELREFTRYHKKLVQERARQVNRIEKLLQMNGFKLSSVLSDITGVSGLRLLETLRKKGCVTVDEVVLALDKRVKKPPEEIECAINGQMKITSRMLLGKMLKRLKDCEAEIAEIYDMMVDVSKESKPQIMQIDSIPGIGELSAIYIIAEISTDMSSFETSNHITAWAGLAPKDNKSAEKLKSSKTKKANIYVKSVLTECAWAAVRARDTRLSNWYWRNVNRLGQKKAIIAVARKLLVYIYTMLKTGEMYDDSLDVADTKKYKAEKLDSARKIVERQTCRPNKENHCDSIDTVVVPQPSVGTNNSNDLTEDHLV

SEQ ID NO: 144281 - protein, 407 aa, unidentified
MDVIYNKCCGIDVHKKKLVACLRKGRKREVREFGTTSKEIKEMTTWLESNDCEMIAMESTSVYWKPLVNIFEIRGMAYMVVNAKDFKNLPGRKTDILDSEWLCELLQHGMLRASYIPTREQRELREACRYRKKITEERARGLNRLQKHLEGANIKLGSIVSDIDGVTSLNLLEYVVNHEDEIDEAKARELIITRISASVADVVEAMDGIITPFQKVMIKEIIEHLNGLAVRIAKMDELIDEYMPDYEEAIKKLEKIPGVGKKSAEIILAEIGLDMERFPTAGHLASWAGVCPGNNESAGKRKSGKSRKGNKILKSTLAQSAQTAAKNKSSFFHAQHQRISVKRGKKRATIAVAHSILVSIYHMLKDGKEFVDLGSDYYNQFNTEKKANSYVKKLESLGYKVDIIKAS

SEQ ID NO: 144282 - protein, 330 aa, unidentified
MSQNNITNNNLTIIYAGVDVAKATLELHLGGVIHNLANETKDHTRILKLLTDAEKAQAGTKVHVILEATGGYEAALVRALHEAGQPVSVIQPSRVRHFAYAKNQRAKSDPIDTRILTQFGEAIRPAPTAPPSAAQIHLGVIVSRRAQLIETRIAELNRAAHYTDKMLCRQSRGLLALLDRQIGACDKAIAAQIAADDTMKARAQRMRQVAGVGPVVAAVLQAGIPELGTLTPCEAAALAGLAPYDCDSGPRKGSRRIWGGRAPVRCALYMAAMTAIRHDPILKAFYIKLRTAGKKPMVALTAVMRKLVVLLNHLLKNPEFELASARAGTN

SEQ ID NO: 144283 - protein, 346 aa, unidentified
MRFVGIDVGAERHTVAIVDESGVVILKATAFTEDSAGYGRLLELLGTATDCLVAMEATGHYWRNLYAALVTAGFAVALINPLRTSRFAEEELQRTKTDAIDALGIARFAAQKRPTITQLPEAALQELRELVRLKGQVLQQLGDRVRQLHRAVDLVFPEFTRHVRTLDSELATAILARYPTAAALRTVSARKLARLCYDGSHHVGEARARALIVAARQSVGAHHGEPYQLQVRYACEDIDLLRRRLRALEKDIEQRLEQIEVGKLLTTIDGIGPQTAACIIAEVGDPARFHSSRALASYVGVVPRLHHSGKRRFSTSAKVPLGNARLRRALWMPALTAVQHNPWLRA

SEQ ID NO: 144284 - protein, 336 aa, unidentified
MDTETGEFQEKRLAHREDAETFYRALAGQKVRVGMEASGHARWFERLLAELQFELWIGDAAEIQSKRVRKQKTDRQDAQLILRLMLKDDFPQIWVPSWENRDLRQLLWHRHRMVQVRTRIMNQLQALALNEGLRCKKRLWREHGRRQLESFRLAPWASRRRRDLLELLDRLNPTIAELSQAIEQEAEKCPEAQRLMTHPGVGPLTALAFVLIIGKAERFQCGKQIASYLGLVPLEKSSGNRRRLGHITKQGSSMVRFLLVEAAQVTVRSLPEWRRKYVQLMMRRGRKIAKVAMARRLAVALYWMWRKGWNYEQSKSSVRTRASSEQAMVCSRTPSN

SEQ ID NO: 144285 - protein, 318 aa, unidentified
MASFLGIDLSKETFHAFLLSDRGEAKRVFPNTSKGFDQLTAWLKNRRAVDVHICMEATGAYWEALALYLHGLNHRISVVNPARIKAFAQSELLRTKTDAVDAALIARFSKSQDPEPWIPPPPEIRVLQALMRHYEHLKTTRAQQSVYAQSSEATIVTASIAAVIAALDEQIAQVERKIRQHFDDHPDLKRRRDLLTSIPGIGEATAGSILSEIPHLDRFQSAKAVAAFAGLSPRERRSGTSIHGRPRLCKTGNARVRKALYMPAMVALRFNPTLRVFADRLLSAGKHKRLVIGAVMRKLLVLAYGILRSGVAFDPNYA

SEQ ID NO: 144286 - protein, 386 aa, unidentified
MAHAQSLPVTAVDYNTTLILALETSNKNWVMAAHVPGTGMVKAKQVIAPNAAALEVAIEGYRRRAAAGGQTVERVILVYEAGYGGFWLARWLKARGIEVHVIQPSSVPVERKKRRAKSDNIDVELLLRTLLAWLRGEPRVCSMVPIPDEAAEDARRPSRERDELVRERISLTNRIEAVLTTLGIDGFNPLRKDRRERLEMLRTPFGQPLPKHAKAKIVRSLDRLELVMAQITTLENQRDAAVLAQDAPDEAARMVQALVLLRAIGAQSATVLVYEAFVRHFSNGKALGSYAGLTGTPFTSGGAEREQGISKSGNQRLRATMGELAWRWVRYQPDSALSQWFRERLAGAKGRMKKILIVALARKLLIALWRYVTHGVIPEGAVLKPV

SEQ ID NO: 144287 - protein, 403 aa, unidentified
MSKVLDRALLNLFVGIDISKEKFDACCIGSNGDKLFRMSAAMSREGFEQLLMQISSISKTKESLLIGMESTACYHINLFSFLTSKGFTVIIINPLLISNFMKLQLRKTKTDKKDALVIAQFLLTKKDSLFQNVLSPESADMRDLARQRESLIDQMTAIKSDTKRLLTITFPELEHIAGIFTKSMLRLLCHYPSAKAIHKAKRSKIAHILIPGSYGKQTEESVDAIIKAAATSIGTASPAKEVLIKQKASILTQLEDHLREITDMLIEQCQAQMKDNIDILTSIRGIGEKFATNFLVELGGDPRLFPSHRQIIAMAGLDPSVYQSGQYVGLSKISKRGNRHLRRIIWLMTVKVIQFEGYFSSYFERRIKDGLLYKKAVLATAHKLIRVLFAMLSNKTLFNAKVS

SEQ ID NO: 144288 - protein, 316 aa, unidentified
MSISETFIGIDVSKERLDCASRPNGTTSSFKNSVTGIDALIKQLQEQRPRLVVLEATGGLERALVAALVVAQMPVVIVNPRQVRDFARAVGQLAKTDRIDAAVIAHFGEAVKPEVRTLPDQLTQEMDALMKRRGQLVAMLGVERNHLVSATSPVSNHVKEHISHLEELIQRLDQEIDQMIGKSPIWKAKDELFQSVKGVGPVLSRTLLAELPEIGQLSRQKLSKLVGVAPLNNDSGKRKGKRSCWGGRSRVRAILYMSALSATRFNPVIKEFYQRLLAKGKTKKVALVACMRKLLTILNSMVKNNTPWDPSFAQRG

SEQ ID NO: 144289 - protein, 360 aa, unidentified
MHVPRPGRVYSRKLVAQATSNQETPRMNVTTIGLDLAKSVFQVHGIDAHGKMLITRQLRRGKVLEFFANLPACLVGMEACPSAHHWAREISKLGHDVRLMPPGYVKPYVKRSKNDRADAEAICEAVQRPTMRFVPIKSEEQQAMLVLHRVRETLVGQRIQLINAILGHMAEFGIVVAQGAGNVQQLISRLVDPDDTQLPARARTVLQIQADQLRDTERRLAGLDNQLKEQARQNETARRLMTIHGVGPVVATAIMATVGDARAFASGRHLAAWLGLVPGQRSTGGKERLIGITKAGDGYLRRLLVNGARALTRWWRTKSPWLMALLAHRPTNVAAVALANKMARVIWVVLARGEVYRTAA

SEQ ID NO: 144290 - protein, 410 aa, unidentified
METVVERPAALDVHKEQVTACVRVPGASGRREQHVAEFKTTVQGLLALRDWLKAHGATHVAMEASGVYWKPPWAILEDEFECLLVNARHVKQVPGRKTDVSDAAWLCQLLEAGLLRASFVPPKPIRTLRNLTRYRKAQIGERQREANRLHKILEDTGIKLDCVATDILGVSGRAMLDALVAGTTDPAVLAELAKGKLRQKLPALREALEGRFDVEHGIVVGAILAHIDFLDEQIDLLSEAIGEQIRPFKGAVELLCTIPGVQRRTAEVIVAEIGTDMSVFPTAGHLASWAGLCPGNDESAGKRRSGRSRKGSRWLSIALTEAAQANTRSRDTYLSSQYRRLKPRRGHKKAIGAVRHSIIVACWHMLTSGELYHDLGSDYFTRLDPDKQTRRLVAQLERLGHLVTLQPVAA

SEQ ID NO: 144291 - protein, 341 aa, unidentified
MQITTIGLDIAKHVFQVHGIDAEEKVVVRKQLRRGQVMHFFEELPPCLVGLEACATSHYWARELSKLGHEVRLMPAKDVKAYVKRNKNDAADAEAICEAVRRPTMRFVQVKSAEQQAHLMQHRARDLLMQQRTQLINSMRSHLAELGIIAAQGREGVKELLAIAAKDANTRLPNDARASLLVLAAQLHALQTTIGAIEKRIVAQHRANKESRRLQTIPGIGPIGASAIAATVTNPKIFRSGRDFAAWIGLVPRQMSTGGKAKLGPISKQGDRYLRRLLVIGAVSTLRRAKLNPQRYPWVTRLLARRPFKVVAVALANKMARIAWALMISGKTCRSAWFAAA

SEQ ID NO: 144292 - protein, 412 aa, unidentified
MSVVQFTQVLSRGCGMDIHKKVVVAAVQGEGICKETRSFDTFTRSLTQLIEWLVSLGITHVAMESTGVYWKPIYNVFEGFIPHIWIVNARHIKNVPGHKTDKNDSEWICQLLMAGLLKPSFIPPKAQRELRDLTRYRRKLIQFVSANKNRIIRILEDGNIKLSSVLSDTSGATAVKLIDMLCDGKQITLSDIESVRHGRCQHTAEDMLEACTGCINEHKVYMLSKIRECNASLKEDILDFDKRIKDVLSSYHDAIERMCEIPGIQNRVCEDLVAEIGLDMSNFPTSAHLCSWAGMCPENNESAGKKKSGRTNHGDKQVKETLVEAAWAASRAKGTFFMERFNRLAPRKGSKKALIAVGHSLLKCIHYVLSTGGRYKELGDNYVPNKKEQKRKEYLKKELQKLGYSVKLSKED

SEQ ID NO: 144293 - protein, 314 aa, unidentified
MFIGIDVSKARLDVAIRPSAEKLSVSNDEAGIQALVTRLSEIKPALIVLEATGGLERSVSGTLGSAQLPVVVVNPRQVRDFAKALGQLAKTDRIDAEVLARFAEAIRPPLRPLPDKVSLELRSLIARRRQLIEMMVAEKNRLSTASKAVRKRIEAHIRWLETELDRADKDLDHSIRQSPIWCENEDLLRSVPSVGPVVSRTLLAELPELGRLNRKQIAALVGIAPLNCDSGTFRGRRGIWGGRASVRAVLYMAALVASRRNSVIRNFYKRLRDKGKAPKVALVACMHKLLTILNAMIKHKTRWSEIIPQTSLDF

SEQ ID NO: 144294 - protein, 435 aa, unidentified
MSSKAYRTTRVNEVDWEQLARGKEGLGVTVGIDVGKFDLLVICRWADGRFERPWRVKNPWEIPTLVSVLKQVKADRKLVVALEPSGTYGEALRQALGENGIDVQRVGAKASHDYAEIFDGVPSQHDGKDAAVVADLAALGKAKPWAYQAADSWEEELAYWVEEMVAQRQMLTPWQGRLEGLLARHWPEASQVLNLSSGTLLRILKRYGTPEALAEDADAARQLARWGRSLLSAAKIDKLLAGARSSVGVRAGPWERRQIQEYAERVLAARQQANRAQRRLRQLAEGHPVLEAQGKVVGVPTACVLWTSTGDPRHFDSAGAYRKAMGLNLAERSSGTYQGRLRISKRGSARTRQWLYFAVLRLVQRCGVRPWYEAKKARHEGEARRVLVAVMRKLAVALYHVGVRNQEFEPRRLFGRISRRSGRSAQRPGVSKQRA

SEQ ID NO: 144295 - protein, 394 aa, unidentified
MRFIGIDIASETHVCAGVDDQGVVWLKPSSFREDAGGYAKLFGLLGDDADALVAMEATGHYWKNLFAALASRGFAVALLNPLRTRRFADEGLERAKTDAIDALGIARFAQQKRPAVTRLPDSATEDLRELVRLRDRLMQDLGDRVRQLHRVVDLGFPEFTRYVRTLDSELATSILHEYPTAQAFCGISVKRLANLRYDGRHLVGLDLAQKLVEAAKVSVGHHHGDAYRIQAQYACEDIDLLRRRIRDLDRDIESALKHHEVGTLLTTIDGLGPLTSARLIAAFGNPADYKSAGALASFVGVVPATNKSGKRQTDRAGITPIGDADLRRALWMPTLTAVRRNVWLKAFYDRLIAAGKLPKVALVASMNKLLGAVYSVAKNRKPFEPRLLLQGAHP

SEQ ID NO: 144296 - protein, 344 aa, unidentified
MMKITIIWRFIVGIDISKKHLDCYLLDRQTGAGSECQVPNTCKGFEQLANWFDEHGADRSQTKLISEHTGRYGEHLLRWTTTNEWAHAVVKTTALKKVGNEHHRKTDATDAKDLADYGVRFSDKLSLTKAPKPAIGQIRRLQAERRAMVDRRAALKSKLTEADIHDADMERLVEMWTRQVALLTEHISELEGRIKELINEDTNIKNRYDMMRSAPGIGKVLGPLWVSLFAGQQTLEARKISSRFGFAPHPHQSGSSVKRTEQSSGFGNSEVRRVMHQAALSVKTNYPHYRKYYEKKRAEGKEHLLVINNIINKLIRLYCAMWNNRVEYDPDYIQKNKHEWKKSA

SEQ ID NO: 144297 - protein, 332 aa, unidentified
MLYENYVGIDVSKLSIDAFIRESRIHRQFRNEESGFKQLIQWIKKHIGETWESLLVCFEHTGLYSLSLALFLEREHITYAMVPALDIKRSLGITRGKNDQIDAKRIAEFAYRFNDRVMPTSLPAEDIRKLHSLLAMRDKMMRNMGGYITSRNELFRVIPDRELPVLTSVYENIISTLKNEVHELEREIRSIIMANKELKTTFELITTVKGIGFIVASFLIVYTCNFTRFENWRKFACYSGIAPFEYQSGTSVHARTQVSSIANQRMKRLLHLAAMTAIHFDAELHNYYVRRQAEGKSKMATINIVRNKLIARVFAIVKRGTPFVDIQKYVYL

SEQ ID NO: 144298 - protein, 342 aa, unidentified
MHNPDVCGLDVSAKELVVMVRRDGKTESCRSFPNTRPGHQELRRYLTHQRERVRVCMESTGLYGLDAALALQADTRVELMVANPRAVKDFSRALLQRSKTDPLDARVLLEYAARMPFQAWQPPPAEALQITALARRIHALTEQCTMEKNRLHAVEATATTLRVIVQDLRRSVRGLETAIAKLSRKAHQIVAANPELERRFRLLQSTPGIGSVSALQLLGELVLIPANCDVRQWVAYAGLDPRQHESGTSVHQKARISKLGNRHIRRALYMPALTATRCAPHLRAFYLHLQARGKCKMVALVAVMRKLLHAIFGMFKYDAPFDGARLCPALTLAVPPEVACAA

SEQ ID NO: 144299 - protein, 381 aa, unidentified
MTETTRMTECNAPGATLYLAFELGSTKWVLAFTTSPAQRPRHRQVAAGDLSGLLREVLTAKVRFGLALDAPVRSCYEAGRDGFWLHRWLVAQGLDNVVVDSSSIEVNRRARRAKTDRLDAGKLVYLLMRWAQGERAVWSVVHVPTPEAEAARQLTREIATVREDRTRTRNRIQALLATQGIRRPLTRGFAAQLATLQTGDGRPLAVAWQERLAREWAQLETIEGRLTVLHAARRAQIAEGVTRVAQVARQLTRLRGVADTSAALYSAELFGTRTFSNGRQLGALTGLVPVPYRSDQRVQDQGISKACRAEVRRVSIQVAWCWLRWQPDSALAQWFTRRFATAGGRSRRIGIVAVARKLVIALWRFVEHGVIPEGATLKPAA

SEQ ID NO: 144300 - protein, 345 aa, unidentified
MVILGVDAHKRTHTIVAADTTGKQLATTTILTTTTVGHLEGLRWASEHGDDRVWAIEDCRHLSRRLERDLLVAGERVVRVPPKLMANVRDSARTYGKSDPIDALAVARAALREPNLPVACLDGPDREIRLLVDHREDLVAERTRAISRLRWHLHELDPTIDPSPRSLDRASNYDKLGDRLAGFDGLVVRLARELLERCRQLTVTINDLEAEITERVTIQAPSLLAIVGCGALTAAKIVGETAGIARFRSHNAYARHNGTAPLPVWSSNHARHRLSRVGNRQLNAALHRIALTQARCHPGARELLARRKANGDGGMEALRVLKRRLSDVVYRALLNDEQAAQPLAA

SEQ ID NO: 144301 - protein, 402 aa, unidentified
MKVCGLDVHKDSIFCSIYDGKTSSEVKVFDSTTRFIYEMGEYLMTEGVNQVAMESTSIYWIPVWNILMEMGFELTLVNPFLIKQMPGRKSDIKDAQWIATLLHKNLIRGSVIPNSTIQELRFYTRKYMKLQQDKCKLLTKMDRIMVMANIRISSCVSKLTNKSVIIVIEALIKGETNPDNLVKLVYGNTKNKQSGKLREALTGYIMDHHRKALKWEKEIYDILERQTLECIKEMERICNKHYKDEMLLLQTLPGVSKISAICLIAETGADMSVFENSGKLTGWAGLRPRNDESAGKFKSKAITKGNKYLRAILIQVAWGASRTKGSYFMEKYHRLAMRKSNKKAIVAIGRKILVIIWNMLKEKKPYNPNLVSIYDPIKIERQLAYHRKEMEKAAKLLHKEII

SEQ ID NO: 144302 - protein, 410 aa, unidentified
MLKIVYPVCCEIDVHKTFIYCCIATTDNKGITTYKSNRFSTFTNQLKRCATWLKEKDCKDVCMESTGKYWIPVYNILELSCNIVLTHPKYVKAIKGKKTDKRDAKWIADLFKHDLINGSFIPPADIHQLRDLTRYRNKLTNFIVGEKNRAQNCLTVSNIKLDYVFTYVFGKASSSIINTLLLNPSEKITDVSKFRTRGMKSTDEEILAAIDGNICNEQAEKLKIIRSHMDSIEECKANLESVILNLAEKYLPKLNLILSVLGIKSFSAVSIILEIGVDMSVFPTSKHLCSWAGLTPQNNESAGKKKTTRISRGGAYIKPLLVQCALAAVKSNKHPKIRNRYLALKKRRGHKKAIIAIARTLLTAIYNILKKNEPYNPDLYKKSDLPPQHKTVSFDEAVFILQRQGYIITS

SEQ ID NO: 144303 - protein, 390 aa, unidentified
MIYVGIDVAKDKHDCCILGSDGEILFSPFTIQNTLQGFDELYEKIWSLTQDLDEIKVGLEATGHYHLNLLRSLLDNGLASYVINPLHTNLFRKGQSLRKTKTDKVDAASIAMMLLTDRTLKPYSDTSYHNEELKSLTRYRFDKVQERAKLKTSVSRLVSILFPELEKLVPSLHMATIYALLSEFPGASFVATAHLTRLKHLLYEASKGHYGRDEAILIRDAAISSVGTVMPAKSMELKHTIYLIEVLTEEITEIETAINSIMETLNSPITTVPGIKNRMGAMILAEIGDFSRFENADQILAYAGLSPSTYQSGQLTSSYAHMEKRGSRYLRYALFNATIYVCNWDPVFNSYLAKKRAEGKHYYVAISHACKKLVRMIYRMQLTGEPYRAA

SEQ ID NO: 144304 - protein, 380 aa, unidentified
MGWSGRAPAPPACEAGKGNAKDKEHAMSQTLNSAMTVIGIDIGKNSFHVVGHDARGAIVLRQKWSRGQVEARLANIPPCLIGMEACVGAHHLSRKLASLGHDARLMPAKYVRPYSKGQKNDFNDAEAIAEAVQRPTMKFVATKTAEQLDLQALHRVRERLVSQRTGIINQIRAFMLERGIAVRQGIGFLRTELPTILATRTDALSPRMLRVIEELAGDWRRLDQRIDGLSGEIEALARQDQACSRLMTVPGIGPIISSAMVAAIGTGDVFSKGRDFGAWLGLVPKQISTGDRTILGKISRRGNRYLRVLFVQAAWVVLVRIKNWERYGLKSWIEAAKRRLHHNVLAIALANKLARIAWAVLAKGRAFELTRTDDAGVRPA

SEQ ID NO: 144305 - protein, 354 aa, unidentified
MKRSTKYVAVDVHQATTVASVREESGRVIARSVLETHGPSIPEYLRGMRGAIHVAFEEGTQSQWLHDLVAPLVDRVIVCDPRQVARQGNKGDHVDADRLAELLRLGGLRPVYHGSADRADLQDLSRSYRNLVEDGTRVMLRLKALFRARAIRTSGTAVYHPAGRAAWLAQLPERGVRFRAEALYAELDVLRALRPKAKAAMLAEARRDPAWPVLRAIPFLGPVRVALLLATMGTPRRFRTKRNLWASAGLAVVTRSSADYAFVAGQPVRRRRAPLTRGLNRNHNRVLKDVFKGAATAATARPGPLQDFYHGMIARGMREELARVTLTRKLAALTLRLWKNGECYDPAKLTMQSR

SEQ ID NO: 144306 - protein, 345 aa, unidentified
MKITTVGIDLAKNVFQVHGIDERGKAALCKQLRRAQVAVFFANMPPCVIGMEACASAHHWARTLQRFGHTVRLMAPQFVKPYVKTNKNDVADAEAICEAVGRTNMRFVPTKNIEQQAILSVHRVRQGFVKARTAQANQIRGLLGEFGLIIPQGIYNVAKRVPELLEDASNELPVPFRHLIDRLTEHLKELDRQVKEFEKEIIAWHRDSELSRQLEKIPGIGPLAASALVASIADARSFKNGRQVSAWLGLVPRQSSSGGKPTLLGMSKRGDAYLRTLLIHGARSAILAAKNKVDNTQGWLTNLLSRRHPNVAAVALANKNVRTVWAILAHGREFKPDYVPTRMAA

SEQ ID NO: 144307 - protein, 345 aa, unidentified
MTIVESRLITGGVDTHADTHVAAALDAIGGLLGVEEFPVTPAGYARLLGWLGGFGTVGLAGIEGTGSYGAGLARHVAAAGIRVVEVDRSDRQDRRRQGKSDPLDAVSAARAAQSGRARGAPKGRDGAVEAIRALMVAERSGRSERTQTINQARSLIVTGPDDLRARFAGYTVAALVSELATLRPRPGDVVGYATRIALRELGRRAEFLDSQLERLDELIVPLVTARAPGLLALHGVGPDTAALLLIAAGDHPARLRSEAAWAHLCAAAPIPASSGKVTRHRLNPGGNREANHALWRIVITRMSAHAPTRAYVERRSEQGLSKKEIIRCLKRYVAREVYRHLRPAA

SEQ ID NO: 144308 - protein, 342 aa, unidentified
MDHYVGIDVSLEASSICVINGSGKIVQEAKVLSELEPLIVFLRSLGLQLTRIGLEAGPLSQWLYAGLKSEGFSVELLETRHVRDAFKAMAVKTDRKDARGIAQLLRLGWFKPVHCKSAAAQEIRALLTARKLIQSKLYDIEMSLRGILRGFGLKVGPTTPKRFAGRVAELTRDHPALRNVAQALIKVHEVLMDELCAFEKQVRSIARSDGRVKLLMTTPGVGAIVALTFVSAVDDPGRFSSSKRVGAHFGLTPKKYQSGETDVTGRISKTGDGGVRAVLFEAAHIVLTRPVKGGALKSWASRLAKRAGMKKAKVALARKLAVILHRMWSNWTAFDAVKAASA

SEQ ID NO: 144309 - protein, 482 aa, unidentified
MKQNIYSNNNKVLKETLAMYKPSEILFAPIEIGKFNHKSCITNFFGDVIIKPFEFPNNSHGLNFFINKFKSAVTAAAAKKVILGCESTGHYHLNLVHHLKRLNLPVEIINPRDSKNENPNKNSKTDIIDLNAIARVLIHNKGSRQIVSEGVYYNLQRATRTRIKFVQRRTSSSNIITGLVDRIFPGLWDKDNSIFSKRFSKASLLILQHFPHPVQIIKLGVKRLANFLSKHNTKLGIETAQKVVSAAKDALYKPIDELKQDIFALQSHIRCYTLYERLVDELEQQIALLLIQTPGTYLLSIDGISVIHAANFTAEVADINRFAFANQIISFAGTCSRKFQTAQYEAQNLPISRKGSKFLRSTLNQTALSLNTWSPKFHDYYTKKYLENPDKPGRARIATGNKFVKLAFALMKHEQLFRPTNDSLDEKTYYSNLWYKIIRKLGKFNLSDSFTLENNYLAKIKKQLEIKYALSLTTEIEDGKGY

SEQ ID NO: 144310 - protein, 387 aa, unidentified
MAQNSQSSAFVPSNFDIFAGLDVDKKSMSITFTDHDTLQRSLRLPYSATQLLNYTRKHFPGQRVAFVYEAGPTGFGLYDELTAAQRYCLMVTPAMVPSAPRDRVKTNRLDSKKLSEGLRGGQLKGIHVPPQIFRELRHLVQLRDTQVGQLSATKCRIKSLLLFEGIPFPDAQGKWSGRVLRELEKLPCHPGVRFKLACLIDALQFHFQTAAKVQKEIRRFCDNEAELKQAISLLTTLPGVGTITATHALARLGDWRQIKNVRQIAGFLGLVSSEHSTGEKENRGQITRIGDQRLRNKLIQCAWIAIRKDPELRAFYRRIYEQRPKKTAARIAIVAVARKLTTRMYAVLKQQRPFVIRADSSIAPLTAEETTGLRERLDMAQNDELSF

SEQ ID NO: 144311 - protein, 346 aa, unidentified
MKINRVGVDLAKNVFQLHGADRKGKTVWTRKLSRAKWLSVLFDTVQPGTEIGMEACAGAHHWARLLTHRGYAVKIIPPQFVTPFVKSNKNDANDAQAICEAMGRPNMYPVKVKTVEQQDLQAMHRIREEIKGHRIAKANQIRGLVTEYGLVAPQQLSSLRRAIPEWLEDAENGLSFLFRQLLQGLWGDLYVLDQRMAELDQQIAVIAQENPIAKRLQQLRGVGPLIATALVATIGDARQYRKGRDMAAAIGLTPRQHSSGGKDRLLGISKRGDAYLRCLLVHGARSAVRTAKDKDDRLSRWIISLQARRHPNVVAVALANKMARMAWAMMTKGADYDPDLAAVSVN

SEQ ID NO: 144312 - protein, 416 aa, unidentified
MMNHPKMRYTYVGIDSHKETHTAVFIDCFFDKIGEITFKNLPSEFGAFLSDADKLKMDGTELLFGLEDTSSFGRTLTVFLTENQRPVKHVNALLVARERKNQNITQKTDSVDAECAARVLLSKFGELPTADPQDKYWILRTLVVRRDHVVGSNTRAKMLLHSLLTQHYPSYRNYFKTIGGKTSLAFFKTYPSPATLKGVTAEELAEFIRGYSDNYYGEEKALEILNSLEDTTAAFQEIRDETVRSTIRQIEFNLEEIAKLERSMAVYLESFNCTLLTMTGIDVVTACQLMSCIGDVKRFPTAAKLARYSGIAPVTYASGQKGFQFANQRGNRELNSLFYNLAVRVSTPCGPNEKIINGFFYDYYHRKQTEGKTKRQALKCVQRRLVNIVWTMLTNGEEYVNPPVLDKPKEEGKQAN

SEQ ID NO: 144313 - protein, 345 aa, unidentified
MPIVGGLDIHRKQITFDYLDTETGQVRRGQICPADREHLRAWLARFAGRDHVAFAVEGCAGWRYVAEELAAAGITAHLAETADTAFARGRKRHAKTDKTDARHLRLLLAEGRLPECWIPPGHILECRALLETYHDLRREHTAWVQRIHAVLFHQGAPALGAGTLRTGQGVAALRAAAAHLSPAGQLQVATALEVLEALEARMHVVRHQLLDAARQLTGAKVLAARLYGVGPFAALALTCWLAGEGRFSSSRKAVRFAGLDITVSSSDRKGPPGRLSRQGPPVLRWALYEAGKTHARTSAPDHAYYAQVKDRKNSKRAALSEARKILRQACHILTELGDDALAPVT

SEQ ID NO: 144314 - protein, 342 aa, unidentified
MSTIQTIGVDLAKNVFSIHGVDAYGKCVLRKTVKRNKMLDTFANLPPCVIGMEACSGAHYWARELTKLGHSPKIMAAKFVIPYRQNEKNDANDAEAICEAVSRPKTRFVSIKDEEQQAVLCLHRIRHSLIKNRTATINQLRGLLSEFGVIVPKGRYSLQKAVPDILEDANNGIPFLARELLNDLIANIKKLNEEILRYDRKIYQLSKEMKQASKLLAVPGVGEHTATAIIATVNDGKQFASSRQFAAWIGLVPKQYSTGGQTNLGHITKRGEKHIRTLLVHGARAVIAQCKTKTDSTSLWLQRLVERRGYKRAAVALAAKNARIIWALLTTENEYKANYVNQ

SEQ ID NO: 144315 - protein, 350 aa, unidentified
MLYTGVDHHRSFSYLTTMNEKGEIIAQKKLPSNGEIIDFLKSVGESMEIAIEATPSWYWLYDHLEDAGFEVKLSHPLKTKAIAYAKVKTDKVDSATLAHLLRSNLLPLSYVPEKSVRSNRELLRYRASLVTLQTRVKNKIHNILAKNNISQEYSDLFGKEGMAFLHSLALPENYKIALEGYTAVLDAVRQEIRVASQKVRQLAVQDRDALLLMTIPGMGYYSALLTASEIGDVRRFPSAKQLCAYAGLVPSTHASGNTCFHGHITKQGSKWLRWILIEAAIHAVKRPGVLRRFYLKVERKKGGQVAKVATARKLLEWIYHILKDGRSYQEMEKIADLLGRGEPGNHSGSA

SEQ ID NO: 144316 - protein, 356 aa, unidentified
MQNKSSKILDFSGHNVYVGLDVHGASWAVNIIVDEIEHRKFTQPPDPVILHNYLVRNFPGANYYSAYECGFSGYHHHRKLLELGIQNIVINPADLPVPDKEKINKRDPIDSRRISRALQSNLLKGIHIFNPEHEQFRTLNRMRWKAAKEHRRVKNRIRSFLYYYGIIPPPELNPEYWTSAFVNWIKQLTLPDQAGTLSLGYLMDSYQNTKDQLLKVSRDLRQQVKLHYPDIYKRLMTVPGIGPINAMCLIAEIGDMTRFKTCKHLASFVGLIPRSHQSGTKDPNCSLTYRSNKYLRTALVESAWMALRYDPALLKYYKERITKYKSQVVIVKIAHKVLNRIRYVWLSEKIYQAGII

SEQ ID NO: 144317 - protein, 340 aa, unidentified
MDMTTLGIDIAKSVFQLHGIDADGAVVVQKKLRRGAVLNFLGKVGPCLIGMEACATSHYWAREIAALGHEVRLIPPTYVKPYVKRQKNDAADAEAICEAVTRPNMRFVPIKTEEQQSVLVLHRARDLLTRQRTMILNAIRGHLAEFGIIAAQGPRQVMGMIAQLRDDGDASLPEIARSALLALGAHLEALAGEIRALERQLIVRHRADPTSQRLETIPGVGLITATALAASVSDPSVFKSGREFAAFLGLVPRQNSSGGKDRLGRISKMGDRYLRKLLVVGATSVIRRAGSNPTKTGTWVRSLMERKPARVVTVAMANKTARIAWAVMTRGEAYRASPKA

SEQ ID NO: 144318 - protein, 387 aa, unidentified
MQASQTSTPIAVDHGTIFVAIELSQKTWLVTLHSPDRDRMSRHRLEGGDHAGLLALIDRVRARAARALGGVPAVVSCYEAGYDGFWLHRLLTAAGIRNYVFDPASIAVERRGRRAKTDRIDGEQLLRTLMAYCRGEPRVVRIARAPAAEEEDARRDSRERERLITEQTAHTNRIKALLRLLGMAVGNPRRHDWLEWLSAQRDWEGQKVPPRLMTELAREHARLMLVVRQLAVLERAAAEQPPIKGAAAVMTERRDLLLRLKSLGPTFAATLVNEVFYKDFRNRREVAGYFGLAPSPWQSGGTDHEQGISKAGNRRGRHKAIELAWLWLRHQPDSALANWFQRRTAQASKRHKRIAIVALARKLMVALWRYLTTGLVPAGAKLKAAEA

SEQ ID NO: 144319 - protein, 347 aa, unidentified
MRFYTTQHPFYCGIDLHARSMYVCIVNHEGEILLHRNMKAAPEPFLKAVAPYRDRLVVAVECIFTWYWLADLCAAEGISFVLGHALYMKAIHGGKAKNDKIDSQKIAALLRGGLLPQAYVYPADMRATRDLLRRRTHLMRKRAELLAHVQNTNSQYNLPEIGKKIAYKANREGVAERFDDAAVQKTIEVDLALITYYDELLRDLELSILTTAKQHDANTLYLLQTVPGIGKILSLVLHYEIHDIDRFPRVQDFASYCRLVKCAKESAGKRLGTSGKKIGNAHLKWAFSEAAVLFLRNNPQGQKYLARLEKKHDKGKALTILAHKLARAVYYMLKRKTAFDMDVFLRA

SEQ ID NO: 144320 - protein, 343 aa, unidentified
MYYIGLDVHKKTISYCVKDAAGHVHREGKIGSTRRELDAWIKTLPQPRMMAMEATIFTGWIYDHLLPHAEKVKVAHPLMLRAIAAAKKKNDKIDASKIADCLRCDFLPECHMASTEIRDRRRTLRYRNLVLRQMVQMKNRVSGLLMESGVSYDKQRLHKMGYFSELFSTNEEINDSIRPLLRLGREHIQRAQRLDRALTSSLERDPLLSERLRRLRTIPGVGPITALTWALEIADHTRFRSVKEAISYCGLCSAEKSSADKVMRMPISKQRNKHIQHVLVEAAKMAPRYSHELALVREKEIQRGNKNRATLAVARKMVTYMLAVERRQQDFVPAEEMAAKAVA

SEQ ID NO: 144321 - protein, 460 aa, unidentified
MTLLAQLGIPLPSRYYLSIDVGYKEHVAVVISLQTFARGDDRWKRARCVHFPSTHSGLKKLQQYLDRFCSDPAAFLGLCEPTGGFYGATVFQYLLDRGYRMLLVDNATTRHMREKIFPHMPKTDEMDARVMARIGYLHEAVGEEFTLCPLELPDPDSAHLLALCRDSWKLSTTINRARNQFTQLMAVTFPELKTFFTSSVSTVAPVSLIAAYPTPALLATAPPEEVRQVLEQAGDYRHIHRVEELQVLARNSSGLPPDPGRAWRMRWVTDFLLTNFRHQAALDKRIKELVEEWEGYERIAQVPYSSPITLGVILAVTGDVSRFSNYRKYVAYTGYFAGLETSQTIDRTRMSKRGNRDLKRALFQIAAPLVWFDQGDNPYKELYQRKQAEGREWYKAMPFVCAALARHIYHCLKFKDPYRAEKAFQGSSPLPVSEQVLVDLRANLDENFEVMEAFLCQIEG

SEQ ID NO: 144322 - protein, 374 aa, unidentified
MSDHSEAFVAFDTSKLRNAVAVADAGRAGEIRFMGEIENTGAATAKLVRKLAAKYPRLTFCYEAGPTGYGLYRQITSFGHECIVVAPSLIPKRPGDRVKTNRRDAVNLAKLLRAGELTAVWVPDRHHEAMRDLTRAREAAVMDLRSQRQQISAFLLRQGLHYPGKTTWTKAHMSWLASQKLAYAEQRLAFEEMMLAARQAQERLDRLEQAIRTAVPDWSLAEVVTALMAMRGIDLISAAGFLAEIGDLSRFRTPSELMAYLGLVPSEDSTGDTIKRGPITKAGNRRARRILVESSWSYQHPPRVGKEKQEKVAAAPRAVREIAWKAQCRLSGRYRALIRRGKLKTVAITAVARELAGFIWAISREVTTARVAAK

SEQ ID NO: 144323 - protein, 464 aa, unidentified
MKNQPQPVPLQPSQVGKPNFSLINQNAAGIDIGSAEHWVCVPPDRVSENVRRFGCFTPDLVAMADWLIESGVETVAMESTGVYWIPVFQILEQRGLQVKLVNAHYVKTVPGRKSDVLDCQWLQQLHTYGLLSGSFRPEDQVCVLRSYIRQRDSLIKSASIHVQRMQKALIQMNLQLHKVISDITGLTGMAIIRAIVAGEHDPQMLAALKDPRIKSSITEIAQALTGDYRTEHLFVLKQELTLYEIYLVQIAECDREIEQCLATFESKAEDEAPPRKGKKRKKPKGHDPQFDLHGHLYRISGVDFTRIDGLDVLSVQTILSEVGLDPSRFKSVKHFTSWLGLCPGTKITGGKVKSSQTRPVVNRAANAFRIAAFSLTHSHSALGAFYRRLRARLGAPKAITATAHKLARLFYQMWTTHGTYTDPGMDYYEQKYHQRILNNLKKKAQSLGFELVAQANATTRTPIH

SEQ ID NO: 144324 - protein, 435 aa, unidentified
MEKIRANVAGIDIGAKKVFVSVEGQPVVSYFTFTEDFFLLRDYLLKHHVVSVAMEATGVYWVILYEILEEAGIDVWLVDGRQTKQVPGRKTDVKDCQWIQELHSYGLLNRCLVVDADIKELRSYLRLREDHIGSSSMHINHMQKALTLMNIRLKEVLNQIHGASGMAIIEAILGGERDKNVLVSLCHTSVLKTKKELILKSLEGRYTEAGLFALKQAYDGYMFYLRQIEECDKKISTVMNRIGQSGNSWDIKKKRKAIRHHKPVVENLAPNLLNVFDGKDATVISGITDYTWMQLLAETGPDLKKWPNEKHFTSWLGLSPGQHNSGKMRKNVKKKGHPVAGQIFRTIAQSLINSKNIAIGSFGRRLRGRKGPRIAIKAMARKTAILYWRIMVKGVDYAEQGITHYEEQLLANKIKTLNRLAKELNIQLTENLNVA

SEQ ID NO: 144325 - protein, 338 aa, unidentified
MKTYAGIDLHSSNNFIGVINAEDKRLYSKRHDNRIEDVLKVLGKFKASLQGVVIESTYNWYWLVDGLMDQGYKVHLANPNAIQSYNGLKHTDDKWDSFWLAHLLRLGILAEGYIYPKHQRPLRDLLRRRLMFVSQRTSQILSLQSMITRNRGLNFSGAQIKRFRDEFIDKLFSDRHLVFTAKKNIATIRFLDQIVSEIEQEVGSQIKIKKEFISLLTTPGIGNILGLTIMLEVGNIGRFPKAGNYSSYSRCVESKKTSNGKKKGENNKKNGNRYLAWAYVEAANHAIRCCPKAQKFFQRKMAKNERALATKALANKLTKATYYIMRDQVAFDEDKLFG

SEQ ID NO: 144326 - protein, 417 aa, unidentified
MAEEIAWFVGIDWASQSHQVCLVDADGECLGERAVAHGGAGIEELCDWLIARTGATPEVIGVAIEMTHGPVVEALLERGFCVYGINPKQLDRFRDRFTVAGAKDDRRDAHVLADSLRTDRHAFRRLSNDEPVIVHLREWSRMADELQQERARLASRMREQLWRYYPQMLELADDFAADWFLDLWNQAPTPAKAVRLRETTIERFVKAHRLRRWQAPEVLRILKQKPLSVASGVVEAASDHIRTLTVRIRLVNQQLKAAHRKLDELCAQLIPSEENEPGQQCEQRDVVILRSMPGLGRIILAVLLAEVWQPLRRRDYHALRSLSGVAPVTRRSGKTCVVVRRYACNKRLANALYHWARLATQHDALSRRRYAALRQRGHSHGRALRTVADRLLSVACTLLEQQTLFDPSYEVRDAAGA

SEQ ID NO: 144327 - protein, 336 aa, unidentified
MNDVSIFVGLDVHKDSIDIALVECERKATVRFYGTVGGDLADLEKAVKRIRKAHPFATFHFVYEAGPCGYDIYRYLTRAGYECMVVAPSMIPKRSGNRIKTDRRDAIMLASLHRAGELAPVFVPREEDEAMRDLVRAREDAVKAARVAKQQLKGFLLRHGIKFSGSGDWKPSYMKWLADLKMSSPAQQIVIQDYINAVKDGHERVTRFNVQIRELLPSWELAPVVNALQAMRGVALITAVTVIAELGDLKRFNNPRQLMAYLGLVPSEHTTGPHRRTGSITKAGNGHVRKALVEAAQTYRLPARISKCLLERQEGLPKVICDIAWKAQVRLCARFR

SEQ ID NO: 144328 - protein, 387 aa, unidentified
MPQLNDLSRSLVALDQDSTIIAVVELSQSSWLVAGVLPGIERQPQKKLEPSAERLLGLLHRWRDEAVRAGKKITRIALAFEAGRDGFWLARWLNARGVEAHVIHPSSVAVSREHRRAKTDRLDTELLKRGFLGWLRGERGHCSMARVPTIAEEDAKRPNRERECLVGERTRIVNRMKATLARLGVRNFKPTLRKAAERLATVHTPEGTPLPRNVLAELQRDMARLGFVVSQIREIEQARQKRLEQETETGPHTMVRQVARVIGIGIETADMLVHEVLSRPMRDRKAVARYAGLTGSPDESGARRREQGLARAGNARVRRGMIQLAWRFLRFQKQSALAQWYRARTADSRLGTRKTMIVALARKLLIALWRFVTTGETLDGVILRPAG

SEQ ID NO: 144329 - protein, 327 aa, unidentified
MMSTQHNYAGIDIAKRNFVIAVSSLSKTKTKTKTETNNPKGIAHTIEYLKKHNVALVVMESTGGLEIPAAKAIHRSGIAVIIANPRQTHQFAQSQSLTKTDAKDAKMLAFFAQMTAQKEGWQTMLYQPPTEAEEVLEALVNRRNQLVDMRTAEKNRLHQVHETQVESVKQLIAHFDRLIDELDKQIDDHTHTHFDGKAKVAKQIKGIGSTTTATLMAMLPELGRLSHKRLASLVGIAPHPRESGETKFKSRCFGGRSAVRKALYMATVVATRFEPLIRDFYQRLLSKGKPYKVAVTACMRKLLTILNARMRDYFTENGTTENGIQTA

SEQ ID NO: 144330 - protein, 327 aa, unidentified
MPQFNNYVGIDVAKADFYACFDEQTESLKFNNTTLGINSFLHHLVKSNFNHDNTLIGLESTGSYHLRLCLQCTMRGFQIRVINPLIVKKQNQTNLRRVKTDKQDASLIRYCLTTGAGYPFTDTAETIRLKSLVRQRNSLAHLLFKNKRQQADIAYKEDCLNIKLNPVYQEIQAIIDPKIKELEHELKIFRKPEQKLLQTIPGVGPITAVSFIAEAGDIKRFQHPKQLVAFIGLDSRVHQSGTSVRGKGYISKRGNKILRTRLYNAASVAVLHPNMFQSFFQKKRSEGKPYRVALVATMNKMTHVIHSVWTNNQPFVDYTMNNIKEAD

SEQ ID NO: 144331 - protein, 370 aa, unidentified
MKKNSTRTQSPKRAAARSKGPITIGLDLGDKTSRYCVVGDHGELVSEGSVATTRKAMAQKFSGMGRCRIALEVGTHSPWLSRLLSHLGFEVIVANARQVQLISASSRKNDRMDAHMLARLARVDPQLLRPIRHRSEQAQADLMTIRVRAELVEARTRLVNAARGFTKAMGERLPACDTDSLGMEKLEALPPALREGLQPLLEQIETLTAQIKKLEGKLEQIARIEYPETQLLTQVHGVGTLIALTFVLTLEDRERFQKSRDVGCYVGLRPKQSESGQSQPQLRITKEGDRYLRTLLVQGAHLIVNRRGPDTDLKRWGLRLAERGGKNAKKRAIVAVARKLAVLLHRLWVCGEVYEPLRNSRPAATSNKAA

SEQ ID NO: 144332 - protein, 331 aa, unidentified
MDIKEVIGIDVSKNFNEARIHTNQKLIEFENNIKGFRAFEKWVLSNIKCHKSQIMFAFEHTGLYSYPLSVYFTEKGYSYIIIPGLELKRSMGIARGKDDKIDAQRIATYAYEKRSKLKPYELPQDEIIQIKRLLTLREKLVKQRAGYKGTLGEFKKFLTRNDNRMLFDVHEKMIKEFSKQVEKLEDKLDELIKNDKQLKQMYKLITSIKGVGPQTALFLIVYTDKFTKFDNWRKFASYCGIAPFPNRSGISIRGRTKVSNLANKKIKSLLDQCAKTSIQHNPEMKLYYEKRVKTGKPKMSTINVIRNKILSRIFAVIIRGTPYVNTLGYMS

SEQ ID NO: 144333 - protein, 346 aa, unidentified
MAYYVGLDVSVKETSICIMDDKGVVAARTDISTDPDLIAGFIFRHAPKLERVVHESGILAIWLTRELEKRGVPIICIDARLAHKALSGRINKSDQGDAEGLAQLARTGWFSQVHIRSEASERVRVLIGARERLIRMRKDLEGHVRGVLKVFGICMKSVGTGKLRRDFRDQLAAAADADPAIEMMSETFIPLHKTLCIARDALDDEVRMMARESDLARRLMTVPGVGPIVALAYIATLDDEKRFRKSVNVGAFLGLTPKRHQSGEVDWSGKISKCGDCDMRRLLYSAASTLISCTRKPSRLKEWATKLAERKGHKKAAVAASRKIAVILHCLWRNETVFEPGMEGAS

SEQ ID NO: 144334 - protein, 403 aa, unidentified
MNSVGIDISKGRSTIAVMRPFGEVVISPFEVRHTGSELSKLAKQLKSLDGETRVVMEATGNYHASVAKLLHNAGLYVSVINAKLVHGYGNNELRRVKTDRKDAVKLANYGLDRWLTLPRYIPEEDTRLLLKNCYRQYRQYSKVQTVLKNNLISLLDTVFPNANRLFSSPIRGDGSEKWVDFVAEFWHCRCVSEKSERAFTSKYLRWCRKHGYNFREAKAHTIYAEASGHIGVMPKSETTKLLVEQVVAQLRATSTALAALKHEMQSLASQLPEYPVVMDLFGVGPTLGPQLIAEIGDVRRFYSKKALVAYAGLDAPPNDSGDVTGRHKSMSKIGASSLRRTLFLVMSVYLQTAPLDEPVYQFMDRKRAEGKPYRVYMMASANKFLRIYYATVKAYLESLEHTA

SEQ ID NO: 144335 - protein, 370 aa, unidentified
MKEHSIFVGMDVHKNSIDIAIAEKGRQGQLRHFGTIESSLTALDKVVRKLVSNGKRPCFVYEAGPCGYEIYRHLTAKGFDCAVVAPSLVPRASGNRIKNDRRDSLMLARLHRAGELTAVCVPHDEDEALRDLTRAREDAKIDEKKAKQRLLAFLLRSGHRYSGRASWSQAHRRWLADLKMPHRCQQIVLQEYIEALNHCSLRLQRLTDQIRQMVPRWRLFPVVQALQSLRGVSLIVSATTVAEIGDFKRFQNPQQLMSYLGLVPSEHSSGEKTRRGSITKAGNTHVRRMLVEAAWAYRFRARVSRALLQRQEALPPSIRDIAWKAQVRLCARYRRLWARGKIKAVVTTAIARELCGFIWAVATAVEGTTA

SEQ ID NO: 144336 - protein, 358 aa, unidentified
MSTMLSGQVDFVVGVDTHRDTNVAAIVEAVTGGVVDHLHCATDAMGYKRALAFATLHAPGRRVWAIEGTGSFGSGLTTYLLENGEWVVEIDRPARPARRDGAKTDELDAVRAAREALSREHLAAPRARGDREALRVLLATRHGAVVGRTKAIGQLKALIVNAPQQLREQLRRGTTDQQLDRCARLRTLPSHSVEHRATVSAIRATARRALFLEAEAAQHETDLEQLVLAICPELLDLPGVGAITAAQFIICWSHQGRIRSEAAFAALAGVAPIPASSGNTVRHRLNRSGDRQLNRALHTVALSRMQHHGPTRAYAARRTAEGKSTRDIKRCLKRAIAREIYRHLQAHARAANQAPAAA

SEQ ID NO: 144337 - protein, 345 aa, unidentified
MNKISVIGLDLAKDVFQVHGVDGEGEVIVRKQLKRSQVRRFFANLEPCLVGMEACGGAHYWSRELTELGHTVRMMAPVFVKPYLKSNKNDRNDAEAICEAVQRPSMRFVQPKTPEQQAVLHLHRARRLLVRQRVALSNHLRGILSEYGIVLPQGAKALSGRLPALLEDAENDLPMLTRDLLAECKEEYDQLMKRIERLEGRIKAWHVTHDVSQRLASIPGIGVLTASALAATVGEGQDFSNGRQLAAYLGLVPRQASSGGKVRLLGISKRGDGYLRGLLIQGARNVIYHIRRRQRAGQPGGNAWVEQLLQRTHPNAVAVALANKMARIAWVLLVRNQTWCPARTL

SEQ ID NO: 144338 - protein, 452 aa, unidentified
MTKKKLALDVVNPQAAGIDVGSRSHYVAIGQTDEDVKEFGVYNEDLLALAQWFLDNEIKTVAMESTGTYWQSLFTTLQGAGLEVLLCNGKFTKNIKGKKTDVQDCQWIQKLHTLGLLSGSFLPDEATQQLRTYCRHRSNLLEQAADTSRKMQKYLRLLNLRLDVVVKDITGLTGLSIIDSICKGEICPEKLAALRHGNCKKSEKEIAKALQSNGRKDLLFALTHEYQLYLLFQKKIAECDKQIKQLLNEQINSDEDKKQHHIDKKVHKRINKNTPDININLLSYQYFEGVDLLAIEGVSHSTVLTLMSEVGHGINKFESAKQFASWLRLAPNNKISGGRILSNKIPKGSNRLKIALRQAANAVGNLKDTALSNFFKRIAFRKGRTSAISATARKLAVIIWNMITKKVPYKTDTQYEFLDQKRKRKVLEMKKLILKFDITPDDLGLQLNINNL

SEQ ID NO: 144339 - protein, 482 aa, unidentified
MINDVLGKLNVENGAEVMPFYDYGVGVDTHKDFIQVCVLVRRGDTFKRYESKHPTAWKSLVNAGEWACRTIREKSIPTIEPKPLRYTIESTSTYHLPVLKAFQGKPSVVNPVLAGSSRRKTDKLDARLLSYQSMTGLWPESFVASPEIQEFRLLVKQRDYHSRECTAITNRINNYILRFGHTLGSYQSVRSIENRALLEDMCSEGYVYTDDGCLGMGAGSFVCPDGLPDQVKKIILKMYSEYDFHNEQAACYQKQAIGYAKNILWETDGGYVKGDKLIKNLLTVPSVGEATILLWLSEVVTPLRFKTAPQLAAYCGCDPSLKISAGKVTSQTRRKGNARLHNQLMIVAGACINRHSEPFGQWGYAISKKHVKGGHKKASGAVSRRIAVSMYYVHKQNEPFRYDKYNFYKIVVPDAQVDEMGLSKRVVNLLNSNGLSNSKSIADMYVTGQIFGISGFGKKAAQEISHWIHINKNLNKALEVCK

SEQ ID NO: 144340 - protein, 464 aa, unidentified
MKNDGKSGKTRSAVSNGLKAIRPMVGGIDIGSREHWVCGPPREDGAANVRVFGTTTVQLMELVDWLVAHRVESVAMESTSVYWIALYELLQSRGIEAVLVNARQLHNVPGRKTDFHDCQWIQLLHSCGLLRGSFRPDAAIVAMRAVHRQLFNLVEERTRFVQWMQKALTQMNVQVHHAVSDLAGTTGMAIVRAIVAGERDPDRLSALRHPRCRKSAEEIARHLTGTWREEHLFNLGAALSLYDAVETQIASYEARLATAIAALQPQERKDASVPVHPNPRKEKDIRGRGDQAARTALWRLSGVDLSRIDGVGTAVAQTVLTEVGPDLSAFPTEHHFVSWLRLCPRRPISGGKLLNKTRNALGANRIAATLRMAATSLQRGRTALGAAYRRIARHKGASVAVFAIARKLAQLVYRMLRYGQDYVDIGEQAYEQKFKARRIASLKEAARSLGYSLTEAPASQGSPG

SEQ ID NO: 144341 - protein, 346 aa, unidentified
MASVTYLGIDLHAKNSWLYAFDDEGEVLLNAPAPNDWKALAPALARCPGRIVAAVEAGGNWPWLVYGLQQRGCEVRLLHPNSVAPYRQSRAKNDRIDAALLASLAAEPWRAKGAWICPDDWLWLRAQLRARQQLIGQRTMVRNRIHGLLKQDNRRPPVGAIFGPVGQAWLQEQELPEGMRHALQPLQAVEQAIDRQVERLEKRLWPLIKDNPLMKRLAALPQAGPVTAVTIVLESGDLARFRHTRAYVAHCGLAPWTFESAGKRRYAKLCPLSNQTLKVAYAEWAFRLLTRGGPAWAKVRESYGDHPTGRAKILLARKLAAAVRALAVRGEEMVIAKFIRRAAPVA

SEQ ID NO: 144342 - protein, 362 aa, unidentified
MTKVAKTCGKEKRGQFNFEGKACWIGVDVHKLNYAAAILDEDGQRLEFSTPAAPKKLLVQLLNMGMTIKALTYESGPTGYGLAWACQEMGIRALVAAPNRIPRPVSKSGKTDRLDSMKLVELLARDMLKGIAVPSREEFALREMERARQRLVRQRRQARQIIRAFLLRNGLEEPHGLDKWGISPLRFLREMPLPEYLRLSLDSYLEEHASILAALAKITKQLAKAAIEQGHGERIKNLRTIPGVGVTIAHTFTSEIFRPERFKRAEDICAYVGLAPITSQSGSGKEKAWLRPVGQRYLRSILVESAWRLIMVEGSYRDFYNRIRNKTGLTQKAITAVARKLLVLTWRIALERRPYRPITESK

SEQ ID NO: 144343 - protein, 392 aa, unidentified
MYIVGIDIGKNHHEASIVSPEGKQIGHSLRFATTHKGADSLMSFIFNNIGNSSCIFGMEATGHYWYPIYSFLKARGYTIYVINPIQSDSLRKMYIRQTKNDSIDSFLIAEVIRFGQFTTTSMADENILAIRQLCRYRDSIISSRTEIKLRISTIMEQIFPEYEKQFSSLWVSTSMGILEKYLTPENIENAPIDELFEIIKDKSHNRLTRAKAISIKEAAADTFGIKIAQDAFSFQLKQLIDRMNFLDKQIEALDCQILEYYEKFDCYLHTIPGIGMIAAATILAEIGDINRFKSSSALVAFAGIDPTVRQSGEFSSTHNHMSKRGSPYLRHAIFLAATTCSFHNSPLNAYYKKKREQGKHHLTATGAVARKLTTVIYAVLRDGKPYEPKSFC

SEQ ID NO: 144344 - protein, 283 aa, unidentified
MRRCIGLDVHREFAQVAIWEDGLIWQAGRIQTTPEALRDFADSLCATDEVALEATGNTHAIARLLERHVGRVVVSNPQKTRAIAEAKVKTDKVDAAVLAGLLAADYLPSVWLPDDQTHALRRQVTRRAHIVRQRTRLKNQVQSILHRNLIPRCPAADLFGNKGRAWLADQDLPHDEHQAVGALLRQLDFHGQELRIVDAELGRVGLERAEVRRLMTIPGVDATVALAIVAAVGDFGRFSSPQRLVSYLGLNPRVRQSGGQPAQHGRITKQGRAHARGMLVEAA

SEQ ID NO: 144345 - protein, 319 aa, unidentified
MSDPIKYTMIGVDVAKLKLDVAIGDDKVLTLDNNEDDFKKLLKIIPDSAPACFVMEATGGYERKLVSFLQSKNIAVAVINAKRVRDYAKAMGAYAKNDRIDAQMIRHYAQVAFAKGRLKLRESRTEIAQQLEDLLRRRHQLVGQRTVEKQHLEAAINKESVRSITRMIKQLDKEIERIEGRIKAYIEEDANLAKHKEQLMRVQGVGEVTALALLTQLGKLSNKEIAALVGLAPFCQDSGKKTGRRVIFGGRELIRSTLYMATMSAISFNKPIREFYQRLLAKGKLKKVALIACMRKLLTILNSMTKTGSEWNPDFAKTV

SEQ ID NO: 144346 - protein, 335 aa, unidentified
MDFCYFIGIDIAKDTLDWAVYTQQGLQLSTHTPNSPAGIKAALTEFKALSGWSPKQAVFCMEHTGIYNAHLLELLHQQTLSIWLESSLQIKQAGGMQRGKTDKVDAQRIAQYAYRFQDQMRLWEPPREVVQKLAFLSATRQRLNQAYNLLAVPVAEQETFISKSLQKALKGNVAKSLAALKEEQKAVEKAIKELIEADARLKELFDLMVSVPGIGPVIATELLITTNEMQTINDPKKLACHAGVAPFEYRSGTSIRGKTKVSHQARKRLKSLIHMGTMSAIQVKGDLQDYYVRKLGEGKHTMLVLNAVRNKLIHRVCAVVRRGKKYDKNYTPALA

SEQ ID NO: 144347 - protein, 343 aa, unidentified
MKLIRIGVDLAKDVFQVHGVDRHEKAVWRRKLRRNEWLKVLVATAEPGCEIAMEACGGAHHWARKLQGLGFRVKLIAPQFVKPYVKGDKNDANDAEAICEAMSRPSMRFVTVKSAEQQDIQAVHRIRVGLVEQRTAKANQIRGLAAEYGLVAPKELGQLRIALPCWLEDAQNGLSDRFRQLLSGVWEDLRALDERVGELDREITVIAKSDPLAKRLQQLRGVGPVIATALVGALGNGEQFARGRQMAAALGLTPRQHSSGGKERLLGISKRGDAYLRTLLIHGARSVIRTAKGKEDRLSRWVIALAARSHPNVAAAALANKTARMAWAMMRKGTDYQPDLVTD

SEQ ID NO: 144348 - protein, 339 aa, unidentified
MKKTDRPTYLGIDVSKESLDCCLYNGTEHKTRSFNSNKLSTVQKIITHFKISPDSCRVVLEATGVYHSAAFVGFVSRGFDVAVENPLRIHSFATMKNLLRTKTDPVDARTIAEYGFTNEPVSAKLKEAYQCEVQAKLKLIGFFKKHITQNRNYLEALNNNSFECNAPSLIAHVKNEINHLNATIKEINRDIEKILTKHCPELYKQYKSIPGIGSAVAGAIICFYGDFSGFSDSKKAAAFAGICPKVCKSGSSVDKRGSISKKGNSMLRTLFYMAALSASRCNDACQEVYLRLRQTGKPAKVALIAVANKLLRQAMALARKGESFTANYKEISLCRAKTT

SEQ ID NO: 144349 - protein, 324 aa, unidentified
MTQPVLGIDIAKLKFNVCLINQQGKLKQKILANTPTGFEQLSEWLTKQGVQCVHACMEATGTYGEALALFLHQAHHTVSVVNPAAIKAFAQSRLSRTKTDRVDAELIARFGLAQAPPRWTPLPPEVRELQALVRRLESLIEMRVMEENHLSSGITVDRVRQSVEELLNHLNEQSKRCEELIRTHISNHPRLRRESELLDSIPGIAETTAALLLSERVDIQQYSSARQVAAYAGLVPRERHSGSSVRGRTRLSKIGNARLRKALYFPAITALRCSEFFQTWAEGLLQRGKSKKSVICAVIRKLVHVAYGVLKNGKAFDPTWAKSA

SEQ ID NO: 144350 - protein, 453 aa, unidentified
MNQSPPRRIKHVGLDVHATSHAVAVAESGTEEVRYHGEIPGTPEAVDKILRKLGGEGVELRVCYEAGPTGYGLARHLLARGIACGVVAPGLIPRKGGERVKTNRLDAQRLARLSRAGELTFVHVPDAGDEAIRDLVRARMSAVEDLRRQRQRLLGLFLRQGRRYPGTGRNWTRAHMAYIAGMEWEREEHRFLCQEMLQAIDTEQARVDRLAAALESRLPGWRWASVVGALRCLRGFDTVSAMTMVAEVGDFSRFESPEQLSAYMGLVPGEDSTGSRRIQGSITKTGNAACRRTLVEAAHHYRCAPAVGEKLRGRQEGQPEAVVAHAWGAQVRLCGRFAHLKGQHKKTVVVVTAVARELAGFVWAVAMLAMGKGLPERRHRGAAPRARLGDAGVGTPGQAEKTKAESIGEKPAGPRGAKGPRVYVLRPFEKAGAGSPGERPARRRVAEGRGSNG

SEQ ID NO: 144351 - protein, 356 aa, unidentified
MSYDVKYIGMDVHKEAIVIAVLNESGKLVMESVIETRASSILQFLHGLRGELHVTLEEGTWAAWLYDLLQPQVQHIVVCNPRRNALLKEGNKSDKVDAGKLADLLRTGMLRPVYHGENGLRTLRELGRSYQTISKDLTRVMNRLKALYRGWGIPCAGTQVYAARSREGWLSKLPQAGVRRRAELLYQQLDGLQTLRREVRPEFLAESRKHKAAKLLRQIPCIGPIRAARLIGLMQTPHRFRSKRQLWTYSGLGIETHDSAQYRFVRGQLQRSKKPQQLRGLNRNHNHEMKEIFKSAATRASCGRGPFYDFYAGLLAKGMKPEMARLTLARKIAAITLKLWKKEERFDVEQLKTQAA

SEQ ID NO: 144352 - protein, 349 aa, unidentified
MIVVGIDPHKQTHTAVALDAATGRKVGELELTARARGFERLVRWARGLDKVDRFAVEDGRHVSGHLERHLLGRGETIVRVPPAMMGQARRADRIRGKSDPIDAEAVARAAMGHPELPVAALAGIERDLGLLVAHRESLVNERTDKISKLRWLLHDLDPDIAPGLRTLDRFKVMDRLAGELERKPRSTEVRICLGLLSRCREITVEARSLERELTALMKALAPELLQISGCAALTAAKLLAETARVERFPTEGHFARYAGTAPLPVASGASHRHRFNRHGNRQLNAAIHRIAITQLRIHEPARDYFDKKRSEGMSKTEALRALKRHITRVVFKTLTRINLPADRLTAVAA

SEQ ID NO: 144353 - protein, 420 aa, unidentified
MKAKKKAKLDLIDANTLIVGIDIGKKKHHARFINLRGYELGKVFSFTNNRDGMEKIISEIKKTKIKNSLAKAVIGLEPSGHYWKATAHYLSSQGYKLALVNPYHIKKTKEIDDNSQTKNDSKDPILIAKLVRDGDFFDPNLSSGIYAELRRMYRLRLKLKKSMVRQKTALKILLDEYFPEYEDFFCNILGMTSEYILRNYFLPRQIAKENILALADKIKRLSRDRIKADRILKLAEASKCSIGITTGLEAATLEKTYILDEARDLKQKLAYMDRRLKYYLDQIQYSKYLLSIPGVGTVIAAGFLGEVGDISKYSSAKEIIKLAGLNLVEISSGQKKGVKKLSKRGNSILRCLLYQCAVAAIAKNNQIKRYYDCQTKTKNKMKMLVAVQCKLARIMFALLKYKKYYDPLAVAQNSFEQAAA

SEQ ID NO: 144354 - protein, 407 aa, unidentified
MGINCGIDWAESHHDVALADDTGHIVARARIDTGATGFNDLLRMIAEHGGTPEGTPVAIETDKNLLVVALAEAGFTIYPINPRAVARYRERHGQAGGKSDPGDAAVLANVLRTDPDVHRVLPAVSEHGRAVKALARQHQEAIWALHQTISRLRSVLLKFYPAALQAFPNLKHRAALTVLTAAPTPEAGQKLTRHRLESLLRRCGRRNDPGLVEQILTDLRAPTLRQPPQVEASLGHAVAGLLGIVDSMHRAVDDLEKELGRVFDTHPQAPILRSVPALGPILAARVLAEIGDDQTRFVTPAGLRAFAGTAPITRASGRSHYVKARKVRNKLLCDACHWWAFAMLTKSAGARAHYDKRRAAGDHHNAALRNLANKLLGRLWWCLQHGEAWDDRAAWPQAHDGPNPAAA

SEQ ID NO: 144355 - protein, 318 aa, unidentified
MNTQTVYVGIDVSKENLDLAVNPREHIRRFHNTATGIGKTVDHIRETGSILVVMEATGGLEISLAAALGEAGIPTAIVNPRQVRDYARSTGKLAKTDAIDAQILADFAATVQPEPHPLAAPQAQELKDILARRRQLSEMITAEKNRLQRARGVLRDHIRAHIAWMEKEMLDMDTTLKRFIEESPMWREKDNLFQSVPGIGPVLSTTLVAELPELGNLNRKQIAALVGVAPFNRDSGKMRGKRSVWGGRATVRAALYMGTLVATRFNPVIRQFYQRLIAAGKAKKAAITACMRKLLIILNAMIKHRTPWHYAPELAVIS

SEQ ID NO: 144356 - protein, 328 aa, unidentified
MKKLFIGIDISKDVFDYCFLNSENEIIEKGQIPNSRKEILKFCKKVKSFKEYEPWICMEHTGHYGYLLSCIFTEEKFYFSMLDPLNLKRSFGITRGKTDAIDAYRIASYALSNKHKLVAYKLPSEELRKLKILMKSRSRYSKISVQLQNGIKANKIANKSMNLEDEIEDDLETLAIFKSKIKIIDKKMLVIIKDAKELKTNYDKIIKVIGIGPIIALACIIETQNFTKFYDPRKFGCHCGIAPFEYSSGSSVRGKTRTSNLCNKSLKGILYKGAWTAIQHDPQLKGYYNRKIEEGKHKFSVANAVAFKIVLRIFAVVKRDEPFVKLAA

SEQ ID NO: 144357 - protein, 417 aa, unidentified
MRRVLEHCAALDVHKKQLTACARILGPGGELEELTVEFSTMAGDLLGLRDWLKQLGVTHVAMEATGVYWKPVYYALEDDFELLLVNAQHVKNVPGRKTDTTDAQWLCQLLECGLLRASFVPPKPIRELRDLTRYRKSLIRERASEANRLQKTLEDAGIKLSSVASDVLGVSGRLMLEALVSGTRDPEVLAELARGTLRKKLPALKQALAGQFKPHHTLIVAQILAHLDYLDEAIAALTAEVEQRLAPFADKAELLTTITGVAERNSQVIIAELGPDMSRFATDRHAASWVSICPGNDESAGKRRSGRTRRGNPHLRAALVESANAAARSKNTYLRAQYEQVKRRRGHKKAIVAVAHSILIAAYHILKDDVPYQDLGGDYFTRRADPNRIAKRLVAQLERLGHTVTLETSTAEVPAAA

SEQ ID NO: 144358 - protein, 410 aa, unidentified
MEVVLERCAGLDVHQASIVCCVLIGAPGRKPQKLLRSFGTTTRELEALRAWLAEHGVTHVGMESTGVYWKPVYAVLEGHFDLIVGNAHHIKNVPGRKTDVKDAEWIAQLVRHGLVASSFVPPPAIRDLRELVRHRRTLIETRTAVRNRVLKLLEGANIKLSGVASDMFGVSGMAMLEALAAGTNNASEMAGLARGRMRRKHAALEAALDGRMREHQCFLLGMQLRNLEAIDQDLEALDARIESQLEPYQAQHRLLMQIPGVDWVTAAAIIAEIGTDMDVFATARRLAAWAGVAPGNYESAGKPKGAGTRRGNVFLKSALFAAASAAVRTKGSYYRDKYNRLRARRGPVRAIMAIAHKLLIAAFHMLSTGEAFRDLGESYLDQVARKRSTAKLVQRLSNLGYDVMLVPKAA

SEQ ID NO: 144359 - protein, 367 aa, unidentified
MKKVSSRAAAQSRNISQQKLTIGLDLGDRNSWYCVVDEAGQIQREQRVRTSGKALQETFGALPRSRIALEIGTHSPWISRLLSELGHEVIVANARKVRLIGESRKKDDRLDAQALARLARIDPELLYPVKHRSVQAQADLTLIRARAGLVRARTGLVNTARGLAKSYGERLRSCNVRNLNPEKAEGLSPELQAALEPLLNAIGSLSERIVEYNEGIENLAQQSYPKVALLKQVKGVGTLIALTFLLTLEDPHRFHKSRDVGCYLGLQPARRNSGQSEPQLHISKEGDPYLRTLLVQGAQHILGPFGPDCDLRRWGLKLAERGGRNGKKRAIVATARKLAVLLHHLWVSGEVYEPLHNSNPTTVAAAA

SEQ ID NO: 144360 - protein, 318 aa, unidentified
MEYFVGLDVSLRNCALCIVDSKGTMLLERELPCEIKDITECLASFRHPIEWVGFEAGTMSQHLFHGLKAEGFDVVCMEARQANAELSAMRNKTDKNDARGIAQVLRTGWFSPVHMKSREAHGVRALLSTRKALLKKTMDLANEVRGLLKIFGIRLPMTVKHGSFDGVVRPLIEMDDVLAHALVPLLDARVVLYQHFLELDRRVKRAASQDEVCMRMMTVPGVEPIASLTFKAAVDDPTRFKRSRTVGAHFGLTPRRYQSGEHDNPGRISKAGDRDVRATLYAAANALLMRTMAGSQIKSWGMRLMRTKGRRRAVAAFA

SEQ ID NO: 144361 - protein, 351 aa, unidentified
MNIIGCDLHTRYQVVAWIDEETGEVRTRRLEHGKDEVRKFYASLPRGAQVGIEATFPALWFERLLGECGHEWWVGDAAQIRAKAVRQQKTDTRDAEHLLDLLLTNRFPRIWVPAAAERDLRQLLVHRMKLVRVRTLVKNQLHALAMSQGVCRKRKLWSAKGRAELQSLVLLPWASRRRTELLALLEQLDAALEPLDRAVAEEARARPDAVRLMTHPGVGPVVSLAFVLTVGPVERFLNSGKLVSYLGLNPSEHSSGGRQRLGAISKQGNTMLRWLLVEAAQTAAWRDPELRRAYQRLKFRRASGVAKVAIARRLAVRLYWMLRERKDYAQLVRMSGSPSSAVVSPVAGSKV

SEQ ID NO: 144362 - protein, 416 aa, unidentified
MNVLYPRGCGLDVHKDSVSACVLLFDSGGGRQERRKDFPTHVCGLGRLKAWLTALRVTHIAMESTGSYWIPIWRALEGSHFHAVLANPAHVKNMPGEKTDSGDSAWLADLLAHGLIRASFVPPRQVWQWRDLTRLRVKLVQEFNRVHNRIHKVLEDACIKLDTVASDILGVSGRAMIDGIVAGHEDVTWLADKAKSHLKKKYAQLKVVLRGRVTPHHRWMLGELMEELRFVEKRTLLVDQRICEAMQPHEDAIRRLCTIPGVGVITAWTLLAELGTDMRVFPDGDHAASWSGLCPGNYRSAGKRLSNRTRKGNRWLRRALCQSAWAASRKKDCFLAAYFYRQAARKGERKAVVATAHKILVIAYHVMRDGGEYRELGGNYYDQLHPERTRNRLVRRLERMGLEVQVRPAEQSVQTS

SEQ ID NO: 144363 - protein, 352 aa, unidentified
MSLHSQGKSGEDITCFEEYHPMSNIIGIDVSKASLDCAYLRDADQKKTKRLRCENNVSCFASLIAWAEARSGLPVESLSFVIEPTHVYHESLVQFLHITGATVYLVNPGRVRKFAEGIGILSKNDLVDADLLARYGLLARNLIVYVPVAQEVNDLRSLLNRLDVLERNLRSELNRQEKVGKTMVFHRLEQQSIARAVKRLKTEVITFKRAIRECVKSTQSLQQNFDLLHTIPGVGAKTAWIMMVILGSRAFRSAPEVASFLGLNPIEKRSGKSQYRRPRLSKSGSGNYRQKLYFPAMVATRKNPDIQALYERLLAADKTKMCALGAAMRKLVHICYGVVKNQTPYQAQTIPS

SEQ ID NO: 144364 - protein, 370 aa, unidentified
MKPNFEPGKWFMQCVGIDIAKGTFTACLCMYEFDQGCSTAPVVFNNDKTGFNQFVKWSRKEALKGYPLRYVMEPTGVYYEQLASHLNKLSLNVCVVLPNKAREFAKYEGILTKTDDMDAYTLGMLGCLDKRLKPWTPPSPIYRELRQMTRFVADINKVKTELRNHLEALAHSETAEKSIVKHYNKLIDEIDKQLVSNQKAIREKIKQEPGLSERIDRITTINGVGFMTVATVVAETNGFALITNRKQLTRYAGLDVPAHQSGPVDPKRHISKQGNVHIRTALYFPAIVSTQCNPQMKDFYRRLCARNTQSKMIGVTATMRKLLLLIYSLWKSGEKYDPTRDKPACNRQKKEAETTEGQPHGIDVGTLAEE

SEQ ID NO: 144365 - protein, 457 aa, unidentified
MRYALTMHCGFVFHEYSLTVRGKCLPQFFLNVDKVDERLTFDKQRNDMKRIICGVKQTVHYFWRCRMTYFVGIDIAKRKHDCFIMNHHGEVIRDSFSFANDRSGFTSLLEVLNQLETSQAIRIGLEATGHYGMNLKVFFESHGFSFMEFNPALVKRFSQATTLRRTKTDKVDAKRLALYTASVEFKPYPNKSYHIKNLKSLTRFRDSLVKHRSLQLVTLTNVLDRIFPEFKPFFKNSLTSKTCMYFLDHYGTPSKMARMNQESYAKISSQLRRTISYAKFIELKMLAKNTVGLEDPILTFQLQLALDAYHFAQTQVEAIENCITDEFLQVHTHIHSIKGIGLQSAACIFAEYAPFERFDSADQLLAFAGLEPSRHQSGSVDTKGYMVKHGSPYLRQALMNVAESSLIHNPVLYDFYLKKRNEGKHHRVALSHVAKRLVRIIFHLEKNNCNFDLSKMR

SEQ ID NO: 144366 - protein, 321 aa, unidentified
MTYVGIDVSKATFVVAYSSAKTGRTKTFKNTVKGVHEFIQTISATKYHCVLEATGNYSALLVYLLSEVGITVSLENPLKVKNFARAMLTVTKTDEIDARLIALYGERMQPAPYKLRSDSILILKQKRTVLRQLKKQLVATRNLKGSLEVLPSFDPECKKTIERTITFLEKQIKAMEEKIASLAQGEYKKQMDLLTSIKAIGVTLAAALIVATGGFTYFDNAKQLTRYLGLSPTYQQSGTSVNVKGHINRNGDSNLRSQLYVAAFSSLRCNTECKACFDRLRSNGKPGKVAVVAVANKLVRQAFAVVTQGKTYVDGFKSEKP

SEQ ID NO: 144367 - protein, 415 aa, unidentified
MNRLIERCAMLDVHKSQITACVRVPDDAGGRRQEIREFQSTTSGLLLLADWLRSWSVAVVGMESTGVYWRAVFYLLEGEFECRLYNARHLRHVPGRKSDVQDAEWGCQLVEHGLVRASFVPPRPLRELRDLVRYRKAKIQERTREVQRVEKTLQDAGIKLSSVASEVLGKSARLMLDALISGTHDPEILAELAKGSLRKKIPALREALQGRFTDHHVLLVGQMLAQIDFLDETIQTLSERVQELTAPFSRELELLDTIPGVDRRAAEMLLAEIGPDMSQFPTEHQLASWAGLCPGQRESGGKKGSGKTRKGSKWLRGTLTESAKAVVRTKGTYLSARYHRIKSRRGHARATTATAHKILTAAYHVLQRGVPYHELGEEFFYRRDTEATERYRRRLIKQLERLGHQVTLQPLPEAA

SEQ ID NO: 144368 - protein, 408 aa, unidentified
MDQQQPAQAQVWVGIDIGKHAHHAAAVTADGQLVWSRRVANDQAAIAELIGQATTSAARVCWAVDSTCSSAALVLALLAAAGQPVVYVPGRTVNRMAGAFAGEAKTDPKDALVIAQTARMRQDLLRARPKDELVAELAVLVGHRRDLVADWVRTVNRLRGLLQASFPGLERCFDFTSRSALVLVSRYQTPQALRALGRRRLVSWLRRQVPAQLSDSRVEQMAEAALAAAAAQTIRLPAQEVTARLIAQLASDLLGLDRRIKELDKTITQRLASHPQAKIITSLPGMGPLLAAELLVAVGDLGSFPDAGHLAAYAGLAPVPRDSGRRTNNLHPPKRYNRSLRRVFYLSALSSLSGPGPNRDYYQRKRAQGRRHQQALIALARRRVDVLWALLRDNRCFELAAPIKTTTA

SEQ ID NO: 144369 - protein, 343 aa, unidentified
MSITMIGLDTAKSVFQIHAVDEAGKVQLRRKLRRSELIPFFEKQHRCTVVMEACGAAHHWGRVLTGLGHDVKLIAPEAVKPFMKKGKKNDAADAAAVCLAASRPDVKFVPIKSLEQQGMLALHSARSLLVKQQTMLVNAMRGLATEFGLTVAKGRDKLEDLVALVKADKAFPSRARQAFTELFVQCGALAEGIATFEAEIVTHARHDETARRLMTIPGIGPITASLMAVTVLDFSVFKSARHFAAWLGLVPRQYSTGGKTRLGRITKAGNREIRRLLVIGATSMVYRAPHWNSAAGVWTRGLLERRPVRLVTVALANKIARIAWALMTRKEVYHAKGRIAAVA

SEQ ID NO: 144370 - protein, 402 aa, unidentified
MKASKRYLRFCGVDMAKHKHVACIIDRNAQYLLRPRSIRNDAAGFQDILNCLKQTGRPKSVLTGMEATGHYWYSLHDFLTRQGYNVVVLNPIQTAQQAKQAIRKCKTDKYDAFHIANLLRTGQYKAAVVPNELAMTCRQITRLRYRIVKQAAMIKQLVNSRLHPAWPEYEGLFSNKFGTTSMKLLQTAPTPKELMELDPDDLGELIRRASRGRFGPAQTQKILHCAKNSVGMQRGHYGISTGIKFLIEQIKALEPVRKKMDAEIVKLTAKVPQYLFTLPGATELTVVSLYGEISPIEAFEKPSQLVAFAGLDPKVFQSGQYDAPRRSISKRGSPYLRRSLWQMAYRALITEGDLRDFWRKKHRQNKHHLVAVTAVANKLCHIVWRIMTDRRDYIRKGYNPKS

SEQ ID NO: 144371 - protein, 329 aa, unidentified
MKLQHIIGADLSKKSIDLVCHLLKSHIQIENSVTGFKKLMQWLRQQKINPSEIMIVMEHTGLYSYCFEKFLHQHQMAFCKVNALAIKRSMGLVRGKTDKLDAARIAAYGYEKRDKLIIDVPASDALKRLQMLHSTRERLVKQRASLTCAIKEYRHIGIAEKDVLMQTQLQLIKNFSRQIEKLMAEIESIIDQQEPLKQNFHLLQSIKGVGKILALTAIIKTHNFNRFANARKFACFCGTAPFEHSSGTSIKKKSRVSHLADKQMKSLLDLSAKSAIQYDKELREYYLKRTEGGKSKMSTINVVRNKILYRMFAVIKRQTPFLENYLQAA

SEQ ID NO: 144372 - protein, 347 aa, unidentified
MTLYIGVDFHPHQQTVSYCNTEHGEVEQISLAHNVELVRRFYEQFPKAVVGIEASCTAAWFEHLMNELGHELQVGNPTLIRARARSRHKSDKRDADLILELLLKGEFPSLWRRSTKSQSVLEQLRFRHQLVKHRTQVCNRLQALAHSAGLPKRGIQTKRARLALMAANFTETQSFERSQLFELLDDLSGRIKVIEKWLEEKAAGDAQVGLLLSHKGIGTLSALVVVHTLGDITRFPSSKEAVAYTGLDPLERSSAGKVRTGSISKAGSAVLRHLLGQAMHVAARYDGELKAFYKRLANRRTKSVAKVATTRKLLIRLFIMLRDGIDYQEFKRRGSEARMPVLSHGLQ

SEQ ID NO: 144373 - protein, 333 aa, unidentified
MKQAIEKKYAIGIDISKAYFDAAYVEDDVVRHKQFKNNRTGFRNLKKWLRKYKIRTAHFAMEATGRYGLELAMFLHRQGYPVSIINPRQIKAYRDSWLIRSKTDAADALLISKFCRSRDLPLWQPPAREVVAIQDMERRIGSIKKMRTMEVNRLKSGELTKSVEKSIKKHIAFLDDSIKQIKADIKEMIKNHTSLQADVALLTSITGIGEHTAAILIGEVKDIALFDSAPALAAYAGVTPQNQTSGDTVRKKPKMSKVGNARLRAALYYPAMSAMQHNPIVRKFAERLKENGKEGKVLVGAAMRKLLHIIYGVWSSGKPFDPNYEKRSMPLTT

SEQ ID NO: 144374 - protein, 408 aa, unidentified
MKAVHQRCCGLDVHKKTVVACVLSGKGRETRTFGTMTRDLLELAVWLEKERVSHVAMESTGVYWKPVFNILEGRRFQLLVVNARYVKAVPGRKTDVKDAEWLAELLRHGLLRPSFVPDRPQRELRELVRYRRTLIQEKARLITRIQKLLEGANIKLGDVASNVMGLSGRAMLKELASGNRDAAAMAELAMSNLRTKRAELEQALTGSVGPHQEFLLHSQIRMVEQIETELEAIDEEVEKRMLPFAAAVDLIDAIPGIGRHGAEQILAETGTDMTRFASPEHFASWARVCPGNNESGGKRHNTSTGLGNPWLRSALIEAALGAVRAGRAHPNFFAARYRRLAGRRGTRKAAMAVAHSILIAIYHMLRDGAHFEDLGATHWDEHHRESVARRSVHRLQQLGYRVTIEEVA

SEQ ID NO: 144375 - protein, 439 aa, unidentified
MKTSTTSVNPGMAREHLVAWIGLDWADNQHQISIHDIASGQVESYALKHSPETLQRWLDDLRKRYSGGKVGVVLEQSRGAVLYALMNCDFVVLYPVNPLALASYRKAFYTSGAKDDPRDATLLMEMVSKHPERFRAWEAEDPDTRSLRLVVEARRKLVNQLTRCTNQLTSHLKSYFPQAIEWAGDLDSRQACDFLEQWPTLEALQQARPSRLRKFYLNYGRPRVEIIEARLGQIKQALPLTQDPAAILAGSLMVRALAAQIRPLLATIEKFDDEIKRLFQKHPDRQLFESLPGAGTVLAPRLLAAVGADRERWTSAAEIQTFSGIAPVTKQSGKTRFVHRRLACSKFVRQTFHEFAGSSIVWCDWAKAYYDHLIAHGKGRHVALRALAYKWIRILFACWKNRTPYQEEIFLQALAQRGSPLSQLAQAAQRTKTAKKRVA

SEQ ID NO: 144376 - protein, 343 aa, unidentified
MPAITTIGLDIAKSVFQVHGVDAEGNVVFRRQLKRRYVLPFFQKLPPCLVGIEACATSHYWSRELQALGHKVRLMPPAYVKPYVKRHKNDATDAEAICEAVGRPNMRFVETKTPEQQGCLTLHRTRHLFIRQQTSVINAIRAHLAEFGIVAPVGRRGVDQLLAVVADTRHKRLPEVTRSCVAALGAQLQMLKAQILEFDRMIRAWHRSSETSKRLDAIPGVGPALATALVASVADPKAFRSGRDFSAWIGLVPKQSSSGGKDKLGSISKQGDRYLRSLFTAGALAVIRYAKIHGTRHRPWLTALLARRPTKVAAIALANKLARMAWAMMARGEQYREPAALAA

SEQ ID NO: 144377 - protein, 347 aa, unidentified
MNFYTRQHKHYCGIDLHAKAMYVCILDQNGTKLVHKNLPTTPEAFLRIIVPYRDDVVVGVECIFTWYWLADLCQKEGIAFVLGHALYMKAIHGGKAKNDKIDAQKIAVLLRGGMFPQAYVYPSEMRATRDLLRRRCHLVHKRAELLAHIHNTNSQYNLPEIGKKLAYKANREGVAEHFPDPSVRKTIEVDVSLIDHYDQLLGEVELYITRTAKAHDVQTFARLQSVPGIGQILALVILYEIQNIARFPRVQDFVSYCRLVKCAKESGGKRLGTSGKKIGNVHLRWAFAEAAVLFLRHNQPGKEYFTKVEHKHGKAQALTVLAPKLARAVYSRLTRAHAFALQRFGSA

SEQ ID NO: 144378 - protein, 342 aa, unidentified
MHIASVGIDLGKTTFHLVALDDHANIVIRRKFSRRQLLAYIANLPTSLVGMEACSGAHFIGAALRDQGHEVRLIPAQFVKPFLKSNKNDFLDAEAIAEAVGRKNMRFVPIKTEDQLDLQALHRVRDRLVHRWTAVINQIRGFLLERGITFAKGPANLRRQMPLILEDAEQNLTTRMRNLLAHLWQEWKSLNSDIEGVSQEIDGIADQDAACQRLRRIPGVGPLVATATVAAIGNGAAFRKGREFAAWLGLIPRQHSTGGKARLLGISKRGSIYLRRMFIHGARAMLLRVKYDTGRLGEWARQLELRVPRNKAVVAVANKLARIAWAVLASGNEYRNVAVAAA

SEQ ID NO: 144379 - protein, 412 aa, unidentified
MIEVTFPNSSGLDVHKKSVTACVMVAKRGGGVRPETRTFKTTTVELQALAAWLHEHEIEQVVMESTGVYWKPIFNILSPDFDVWLVNARHVSQVPGRKTDVSDAEWLTSLMRHGLVSKSFIPDVEQRDLRDLTRYRTRLLDERASAANRLHKVLEDANIKITSVLTDVQGVSARLMLEAIIQGRTDVEQLAELAKGRLRNKIPDLVEALFGQVRSHHRFMLQETLNHIDELNARIASLDQRIQELVAPDEAIITRLMAIPGVGRRIAEILLAEIGHDVEHFPSAKHLASWACLCPGNNISANKRRSGKTRKGQKWLDAALVEAAWAASHTKDTYLSAQFHRLRAHRGAKRAAVAVAHSIITIVYHLLKDPQATYQELGGDFFIKRNKVQQQRWAVRTLETLGFQVPLAPMTA

SEQ ID NO: 144380 - protein, 367 aa, unidentified
MGALYLGLDVHKKTISIATAEEGRLGEVRSHGTIENTPLNIEKLMKRFSKVSQELHFCYEAGCCGYVLQRQITSAGHSCTVVAPNRIPRKPGEFIKTDRRDAIKLARLHRAGELDEIWVPDAAHEAMRDIIRSHGDAKNHLKTCKQQLHSFLLRHGRIFTGLCNWTRSHYTWLANQRFEHPAHQVVFQDYINAIHDAEDREKKLVKQIEELLPHWRLKPLVDALCLLKGINLVAAATILSVTGDLRRFPTPKQLSAYFGQVPSEHSSGEHVKRFGLTKAGNSEARRILTQGAWCYRFPARISKQKEPALVKADKAIRDVAWRAQLRLCSRYRRLIALGKPSPVACSAVARELATFIWEIGQVVPIQT

SEQ ID NO: 144381 - protein, 412 aa, unidentified
MFKIFRNNCCGLDVHKTWIYSCIGITDPNGRTEYKQARFSSFSKGLRELAAWLAKYSCTEVCMESTGKYWIPVFNILEKSCFVTLAHPKYTKPQKGNKTDRKDAKWFCDLFMCDMIKPSFIPSPEIRQLRNLMRYRFKLTNMLTGEKNRAQNCLTVSNLKLDDVFSDVFGKSSRSITNYILDHPGKTFDVSPFVDPRCKTPVSEIQAAVDGAISPEQAVKLRQCLDHIDELETHRKEIESEILRIAEPFSAVLDLLYTLPGLNKNPMTAIAILSEIGPDMSVFPSSKHLISWAGCCPRNDQSNQKVKSRRISRAGSYLKPLLVQVANALIKSKKHPEFKERYHRIKSRRGHKKAIIAVCKMLLTAIWNMLSKLEPYNPEGFLEHRPVKQEKTLTVSQALELLRLRGYTIANQ

SEQ ID NO: 144382 - protein, 375 aa, unidentified
MAMTRTNESTPALLMALELGERSWKLGFSRRLGDRPRVRTVTARALDIVLAEIAAAKRRWQLPADAPVTSCYEAGRDGFWLHRWLVAHGVVNFVVDSASIEVNQRAKRMKTDRLDLEGLLTLLARYVAGDARAWRIVRVPTVAQEDARQWHRERETLQRDRTRVINRIKGLLATMGVRLAVSGAFVDRVDQARLWNGQPLPPGARTRLLSDWRVLQDLEQALAGLEQRRTTELDTAAKTAVDKLVTLRAIGTLSARVLSTESFAWRRIRNARELGALVGLVPARYQSGDTTRDLGITRAGNAHVRRTAVQLAWLWVEHQRESALTQWYLRRFGGGGPRLRRIGIVALARKLLVALWRFVERDVRPEGARLKPLLA

SEQ ID NO: 144383 - protein, 451 aa, unidentified
MAKRRGKKIKQVEMLHTIKANAAGIDIGATEIYIAVPGDRDPQAVRHFDTFTTDLHAAAKWLKACGIDSIAMESTGVYWIPVFQIFESYGFEVVLVNARHVKNVPGRKTDVQDCQWLQYLHSVGLLRGSYRPPQEVCAVRSLLRHRDGLVKTAASHIQHMQKSLTQMNLQIHNVISDITGVTGLAILDAILSGERDPQKLAALKNGRIKATENTIAKSLEGDYLPEHVFTLKQSLQVYRHYQQMMAECDLEIEKHLNNIDSHIDVDTNPPPSPTSSCRKGKGNEPNFDLRTHMYRILGTDLTQIEGINAVTAHVFFTEVGCDVSKFPTVGNFTSWLNLCPGNKISGGKVLSSHTLPGKNRLAKALQISAMSLWRSQSYLGNYYRRKRARDGAPSAITDTAHKLARIIYHLVKTGKQFDESVFNAQEEAHQKRALENLKNRAKNMGFQLVPR

SEQ ID NO: 144384 - protein, 347 aa, unidentified
MEKNAASEVQVFAGIDVSARKLSVAVGSETAEREAIQTFANTSKGHQALVGHLLRGKGRVRVCLEASNYSLDVALTLQAHRQVEVSVVNPRRARRFAESLGERSKTDPVDAHVLCQYARRMPWVPWVPPSGLALRLRGLTRAIEALVVTQTQEKNRQHALRASRALPTFVIRELQRHLDYLQLRITRLRREALRLIAGDPELDRRFRLMLTTPGIGETSALQILGELAVLPSTLDARQWVAFAGLDPRRFTSGSTVEKKPRISRGGSRHLRRALYMPALVAIRHEPNLRAFFRHLVARGKAPLQAVVAVMRKLLHAFFAMFRSDQSYDGCKLCPLQSAPDSSTLCAA

SEQ ID NO: 144385 - protein, 467 aa, unidentified
MTPHKDYCLDPCPPVLTPMLPPSPILSDALQVCHPHAAGIDIGEAEHWVAVPPGSDPQPVRRFGPFTADLDALADWLIDCGVTTVAMESTGVYWIPLFELLEARGVQVLLIDPRQAKRAPGRPKTDRLDCKWLQRLHAYGLLAGAFRPADQVCVLRGYLRHRQMLLTYAAHHIQHRHKALEQMNLKLTQVVSDITGVTGMAILKAIIAGERDPVTLAKLRNPHGQHSEDEIAKALQGTWRAEHLFALQQAVELYQFYHQQLTTCDQRITAHLETFADQSAGQPLPPKARRHKKTNEPRFDARTPLYRLAGVDLTTIEGIEENTALILLSEIGTDMHRWPSVKHFCSWLGLCPQHQISGGKVRSRRVRPGAHRVTVALRLAARSLHHSQRALGAFFRRMKARLGTPKAITATAHKLARLVSHLLKHGSAYVQQGLENYEAQYHERKVKTMAKQAKALGYTLVPLAAQG

SEQ ID NO: 144386 - protein, 292 aa, unidentified
MEHELHYIGIDTAKEKLDVDVLRPDGRHRTKKFANTTKGHDELVSWLKGHKIDHAHICIEATGTYMEPVAECLYDAGYIVSVINPALGKAFAQSEGLRNKTDTVDARMLAEFCRQKRPAAWEAPHPLERALRALVVRHQALTDMHTQELNRTETAREVQRPSIDAHLLRLEAELKRLEKQIKDLTDDDPDMKHRRKLLESIPGIGEKTSAVLLAYIGLKDRFAHARQFAAFAGLTPRRYESGSSVRGASRMSKAGHVSLRRALYMPAMVATSKTEWDGRSATVWRLMARKER

SEQ ID NO: 144387 - protein, 291 aa, unidentified
MSRAAIFVGLDVAKRTLDVAVRPMGETWSVANEERGVVELVTRLRTLPPTLIVCEATGGYEQLAVTSLAAAGLAIVVANPRQVRDFAKGTGQLAKTDTLDAAILALFADRVLRRRRSPRDAPARLLDALLTRRRQVLEMLTAEKNRLGIAPRPLHRGIRQHICWLERQLDDVTGELTALIEASPVWQVKHHLLQSVPGIGPIVSAVLLGELPELGTLTHKQIAALVGVAPMARDSGQWRGERFVWGGRAAGRIALFLAALFARRRGAARGRAGASWGTEASGQAVIPKRGR

SEQ ID NO: 144388 - protein, 406 aa, unidentified
MKPTYFLGIDAAKHKMRVALSNRSEHVLFEKDLPVAATGLRQLFAAIKRQVNDPEQLLVLIEATGLLHLNWSAALTKAGYAVAVINPLIARRLYTLQNSIRDNKSDPIDARGLCTIGLLHGEKLLAHYRFCLKPEQFALQRLQSVRKALRSALTNLKKTYQSLMDLSFPELGGLLQLDGVGIRQLLIQAPTPAAIAGKRLCTLEKNWMVRPKAAALKTLAADSMADPDLAAASGPALVALLQSVAAIEARLHELDQQIAKLACTSVDQKTKALIETIPGFGPVNAAKTLAWLPTEILHSGSNRKVAARLQAFMGNDPRLRQSGQWKGHTKMSKRGVEMLRTAFFQSAFSAAHNDPELRTYYQCKRAQGKTHEVALSHLMRILTRRLVAVLRSGKPYQSHYNLKNAA

SEQ ID NO: 144389 - protein, 365 aa, unidentified
MQSSITMSKESQKGTSQKSSNECLKYSVGADIGKEKFDACISSIDKDQCVKVVATKAFKNCTGGFNEFFKWQQNKCKLSVPVVFAMEATGVYYEQLAWFLHRKEEYLSVILPNKAKKYMQCLGIKSKNDKIDSIGLSRMAAEQRLEPWNAPSESIVELRAITRYRESLQESRTRFNNQLSALKSGEFVSAEIEASLKEMISLLDQQIKQTKKQIEQKLALDERLKRGAEILTEIKGVSSISVATVLAETNCFEMFSNKNQLTSYSGYDVIENQSGNHVGKTKISKKGNAHLRRIMHMPALNVVAYGEPVFVKLYERVFDRTKVKMKGYVAVQRELLCLMYALWKKDEKYDRGYYLRGSKLPAMQS

SEQ ID NO: 144390 - protein, 359 aa, unidentified
MTTTIDTRDVCCAALELSKTSWVCAFSAPGDSKATVHKIRPGDVNRLIDILNSSKEKAQCHLGRQLQIVLCYEVGYDGFWLARVLIARGIRTVVFDPASFLMPRRGRRAKTDRLDAEGMTRTLRTWLSGDREVARDVQIPSVEQEDAKRIERERKYLVEERISIVGRIKGLLALHGIWLSGKRVRKDLRERLDTMRTGDGRPLAPFLRREVDRMLHHYDFVSQQIEEVVADRKEALADNSGRFPQAEKVRRLTTLDAVGETTATVLVAEVYHRSFETRRHVASFVGLAPSPYRSGDTDRDRGISKAGTKLARQTLVELAWFWLRYQPNSWLSLWWHERFGDKRMRGRKVGIVALARSSP

SEQ ID NO: 144391 - protein, 367 aa, unidentified
MNQRTYVGLDVHARSILGCAIDQRTGEVLRQRLPGNNAGVVDWVKGLGPPVRVVYEAGPTGYGLCRALEAAGFTCVVAAPSKLQRPPGDRVKTDARDAEHLARLNLLDQFTPVTVPGTHREAARDLVRAREDVRADLMRARHRLSKLLLRHGIVYSGGRTWTNAHYAWLHRQCFEDPVLEATYDSCLETVELTLARRDGLDDRIRVLAESEPYADVVHALMCLRGISVLTAFGLTVEVGDWNRFTGKTIGAYLGLVPSEHSSGTTRSQGAITKTGNTHARRLLVEAAWHHRRRYQPSRDMQSRWDLADETSRVRGHQGNHRLHRQWEKFEARRKRRVIANVAVARELAGWCWSLAAPVQQEHPWPDE

SEQ ID NO: 144392 - protein, 352 aa, unidentified
MQCIAFDSHKHYTWALVETVKGKLVREQRIDHTRGAFQGFLEEFDPGSPVAVETIGNWYWITDEIEAAGMVPQLVNARRAKLMSGSINKTDRLDAKGINRLQRSGTLPTVWIPPRELRDARELPRTRMVLVRQRTQLKNRIHANLAKYGLDVGGVTDLFGARGRVILDDLLIEFPPQTRYATEILIENLDHLQGELKAIEVRMSELFGDLQSLELIQTLPGVAMILGVVILTEVGDIERFPSASHLASYAGKTPRVHASGGHVRYGRTRPDVNHYLKWAYAEAANSVMMHRRKHPERHVSRLYERVQRRGGHSKAIGAVGRHLAEATYWMLKKQEPYKDPETRQRKESKKEA

SEQ ID NO: 144393 - protein, 349 aa, unidentified
MYKKKIETIDSKINSDNYDYYIAIDWSQRNMAVATMKKDSNKIRIIDVESDLGALKTYFKSLSGSKILTIEETTPTHYLYVELFDYVDRILICDPYKNKLLSDGPKTDKIDAGKLCMLLKGGFLREVYHSINKKYELRQYVSEYEQLVKFGVSVKNQKSAIYRSMGKSYQKKEEIDDAASKFIIEKKDQRIELYESQKKDYEKMFANLIKLDKGLKHLRGINGIGIIGAVKILATVIDANRFENAGKYLSYCGLVKHQKMSGGRNYGQKNPRYNRRLKSVYKTAAMSVIGGKSSLSEYYNSLLKQGISEDKARHRLARRIAIISFGVMKSGMPYDPYKWRNTVEKENKD

SEQ ID NO: 144394 - protein, 342 aa, unidentified
MQWTVAIGIDTHKHAHVAVALDRLGAQLDAFEAPATSAGYLALHRWAHELGEPAFALEGAGSYGAGLARFLQAAGCPVYECERPKRAERRRGKNDLIDALIAARRLLAGERLGSPRGLSGPREDLRLLLLERRGAIRARTATLNQLQAVIVTAPERLRSRLEGRSSEQLVRTVARLRTVEGEQAVVRGVLRRLGRRVLSLDAELAELDRELEGIVSLLVPELLEECGVGPVCAAQLVVSSGDPSRMVSEASFAALAGTSPVEASSGQQQRHRLNRGGDRQLNRALHVIALSRVRYHRETAAYHQRLLASGKTTREARRCVKRMLARHFHHKLCSLPALALTT

SEQ ID NO: 144395 - protein, 412 aa, unidentified
MPHDFEARYNVVPLNAITLIKEVSMLGTDIIKAKFLPRDYDVFAGLDVDKKHIDVTFSDHDQRMKSIKIPYSADHLLAYARRHYPGQPIAFAYEAGGTGYGLYDQITAAGYRCLVVAPSMVPTAPGQRVKTNRLDSKKISTALRGGELTSIHIPSEPYRHLRHLVHLRDTFVRQATASQVRIKALLLFEGIPFPDPQGRWSTNAWAQLRTLPCASPVRFKLDRLISMATFADEQARQTARELHRFCRHNTELSSTLELLMSAPGIGRITGTHLLARIGDWRLIRHIHQLPSFLGLVPCEDSTGDAANRGPITRTGDRRLRAKLLQAAWVAIRQDPELDDFYIRIYQRNPKPMAAQKAITAVANKLCRRIACILKEQRPYVLRDASSRTTKEETASPQGETRFPAETSAPPVP

SEQ ID NO: 144396 - protein, 346 aa, unidentified
MLHAGLDLSRKRLDFCLLDESGEQVEVGAAPPDADGLRSLARRLARHEQPVRAAIESMNGARFVHDQLELAGWQVEIADALKVKGLAPLACKTDRIDAWVLAELSRRDLVPAIWLPDPSVRAERERARFRLHLVRHRSSLKQRVHAVLLAHGKPCPVSDLFGVAGRALLERLALPEPWAGTVAASLRLIDELDLQIATGEAELRRLGADHHYVPLLMTVPGIGWVLAYTIAAEIGDIDRFGSPRKLAGYSGLCPRVYQSGESDRRGPLAKQGPKYLRWALVEAAVHASTHPAYRERYQRTKTRLGKQRGAKVAQVDLARRLAEAIWHMLTRNQPFAPAGATDPLTA

SEQ ID NO: 144397 - protein, 386 aa, unidentified
MSRPSNIPLRAINYDHTLVLAIELSNKSWVLAAQVPGFPQTKTQRTIEPNKNALLAAIDGYRARAAAVGYAVDRVITTYEAGWSGFWLARWLVALGVEVHVVQPSSVPVDRRLRRAKSDGIDAELLLRTLLAWLRGEPRVCSMAPIPDEADEDARRSVRERAELLSDRVGLTNRIGAVLATLGVNDYNPLLQSRRHRLAELRTGLGEPIPPNALAKIERLLARLELVLAQIAELERERDEVAAAEAPDRAGKMIQQLTSLRGIGVQSATVLVREAFVRHFSNGKALGSYAGLTSTPYSSGGIDREQGIGKAGNRRLRTVMVELAWLWQRYQPGAAQVAWFRDRVGSTGRRIRKVMVVALARKLLIALWRFVIDGVMPEGAVMKPSI

SEQ ID NO: 144398 - protein, 316 aa, unidentified
MHTTSVFVGIDVAKASLEVAVHQPAARWAVEYTDPAVATLVARLTALTPTLIVLEATGGLEIPVVGALAAGGLPVVVVNPRQVRDFAKATGRLAKTDTLDAAVLAHFAAAVRPPLRPLPDAATQGLAALVTRRRQLVGMLTAERNRLGAAPTVLHKELQAHIRWLERRIAGLDTDLDQAIRTSPVWRAQEDLLRSVPGVGPIVARTLVAQLPELGTLSNKTIAALVGVAPLNRDSGFFRGRRLVWGGRAAVRAVLYMGALAAVRFNPVLRAFYQRLRTGGKLPKVALTACMHKLLTILNAMCKHQRRWDPTHAQTH

SEQ ID NO: 144399 - protein, 342 aa, unidentified
MTMIGIDPHKATHTAVAIDDDENVIDEFTLGSSSTQAERLCDWASGLGKREWAVESANGLGYLLSQQLVAAGETVFDVPAVLASRVRLLGSGKSQKNDPNDARSIAIAALRSDRLAVVEPDDHVVVLRLLVKRHRDMARLRNKHCSRLHALLLEVEVGGIGERISVTNASRLLDSINIGDEATRYRTLIAREVVDDIARLDATLRASKKRIAVAVQASGTSLTNIVGVGPIGAATIIGYTKNITRFPTRGHYATYNATAPIEVSSAGHTKHRLNLRGNRILNHAIHIAAVTQLRHDTIGRKYYDKKIAEGKTPKEAIRALKRRISDAVYRALIADTARTTTS

SEQ ID NO: 144400 - protein, 457 aa, unidentified
MKTKYFMGCDVSKGYADFVILNEEKQCVENNFQLDDTFSGHNCLYERLTSFFSQHPGAEMFAAVESTGGYENNWYSAMRQFQGTLNIKTARLNPCGVHASSRADMRRTITDAVSARSIAEHLISYPARITYEQDDYWASLRKQWSFVQMLSKQKVQMLNQLESLVYSANPEILTYCRDGVPEWVLNLLKRYPTATKLAKARNSDLVKISYVTQKRAEQLKAQAKTSVASSLDDVTCQLIIATVEQVMALKQTIASQNKMLSRQCSTPEVELLKTFNGIGDYSAIGLLLEIQSVKRFSSVKKLAAFFGLHPIFKISGDGSAGFRMSKQGRKAPRSILFMVAMSAVKSNILIRDLYQEKVSGGMEKMAAIGLCMHKILRIIYGMLKTNTPFDPEIDLQNKKKANSAKNKPIRDKNRRFQTYDDGAPVSRRNRKKRLERKSSQGAINTKCGIEVPAPAST

SEQ ID NO: 144401 - protein, 335 aa, unidentified
MLYVIGIVLYKNDVMNKSTIFVGIDISKDTFDIHDGVEGHFQFRNDLKGFALFAKRLKPGHWCVMEATGCYHQRLAIYLYEMGVHVTVVNPLVIKRFIQMKLNHVKTDRSDAMMICRYGQEQPLALWSPEASYIVDCKRLQSTIRLYFKQRTALKNMFHSLSYSGSAKGKLVRSLRRGIKHLDKEIGLLESEMEAVIRSNEQDLYSRLNTIPGIGRKTAMILIVSTNGFRSFQSAGQVSSFFGLAPNERSSGSSIRGKTRISKIGDPLLRNHLFLCSFTACVHNPQCKALYDRIVAKGKSKKLALIAVCNKLIKQAYGISKSGLDYDRNYVGRLS

SEQ ID NO: 144402 - protein, 427 aa, unidentified
MKYTQNEKIMQITENTLIIGVDIASDVHYARAFDYRGIELDKVIKFNNDIQGFKVFSDWITKIATNNHKQHVMVGMEPTGHYWFTFAQYLEENNIKIVLVNPYHVKTTKELDDNSPTKNDRKDPKTIAMLMKDGRYMEPYIPKGIYSELRNATNTRWQLVKKLNSIRNQVKRWIKIYFPEFNNVFADWEGKAALMILKHFPTPEKITKLDAPEIIATWRKEISRAVGIKRATKLIKAAKASVGIKEGLIAAENELHILLEEYELLMKQHQNTMSLIEKLTMQIPGVKEILKIKGVGLKTLSGFIAEVGDIERFDHPKKVQKLAGLNLKENSSGKHKGQTTITKRGRKRLRSILFSTIMPIVAKNKEFQQLHKYYTTRKENPLKKKQSLIVLCCKLIRVFFVILKTGVKYDPVKMMNDIKRPILQEVA

SEQ ID NO: 144403 - protein, 413 aa, unidentified
MEAIVARCCGLDVHQASVVACLLVGRPNRQPKKEVRRFGTTLGELEMLAAWLSEAGCTHVGMESTGVYWMPVYRALEGRFDLVVGNATHIKAVPGRKTDVKDAEWIADLLRHGLIRKSFVPPRWQRDLRDLVRYRRKLIHQQTGERNRLMKMLEVGGIKLSSVASDVFGVSGRAMVRALIEGVMTPEQMAGLARGSLRKKVEALAEALRGHLGDHHRFLLRLQLERIERTEHDVAVVDARIDEALGSHQEAMDRLAQIPGVDRTGAMTFLAEAGPDMSVFPTSRHLAAWAGVCPGNNESAGKRTGKAKRRGNVHLTTALVQAAAAASRKKGSYLKEKFWRVKARRGYKRALLAVAHRILVSAYEMLSRSADYRDLGAEYLDKHRVTATRRRLVSQLKSLGYEVTLAPAATATA

SEQ ID NO: 144404 - protein, 338 aa, unidentified
MAIVMGLDQHRAQITAEWIDTDSGELGRARVSPAHRDDVRRFLARFTGRRLEAALEATTGWRFVAEELRAVGAEVHLAEPAETAARRGNKKRAKTDRADARHLRELLMIGRLPESWIPPDHLLDLRAQVRLRHTLVDQRGEWQQRIQSVLYHHGFPQRHGLLTAGNRAWLQALELPAGAREQVTVALQMIDALDAQSAPITRQLRLYARRQPGCRALMKHYGIGELTAVTILAELGDARRFSSSRHAVRYAGLDITVHQSDQRRAPGHLSRQGPPALRWALFEAAQAARRPGSPDRAYYDQAAERLGGNRACLALARKLLKRSFHTLRELGDDALQAV

SEQ ID NO: 144405 - protein, 393 aa, unidentified
MRKPKKQQKPLNDLSRSLTPFDPNQTLIAVIEMGKKSWLVAGIIPGVERQPLKKLAPDEDELLKLLERWRAEAEKAGHKITRIAVAFETGRDGFWLARWLRVRDIEAHVIHAASVAVSREHRRAKTDRLDTEQLKRAFLGWLRGERDHCKMAAIPTFAEEDAKRPHRERETLVGEHTTIINRVKAILARLGIRNLNPKLKKAPERLEHVRTPEGEPIPPNTLAELRRDLERKQLVAEQIQQIEKARLEQLKRAPKAGPNLMVLVLMRVIGIGIETADMLVKEILSRNMRDRRAVARYGGLTGSPDESGTKRREKGLARSGNARVRKGMVQLAWRFLEFQKESALAKWYRARTDNAPRLRKKMIVALARKLLIALWHFVRDGVVPEGVVLRPAH

SEQ ID NO: 144406 - protein, 345 aa, unidentified
MKIVGCDLHTRYQQVAMLDAETGELVERRLEHENGEARAFYAALSSPVRVGIEATGHTRWFERMLAELGHELWIGDAAEIRASMVRKQKTDARDAAHLLDLLLSERFPRIWRPTLAERDLRQLVWHRQKLVWMRNAVGNQLHALAMGEGVCRKKKLFTKKGRAELESLALGRWASHRRHELLEILDQLDTSIEELDRAVAEQAEQNAAAVLLMTHPGVGPVTSLAFVLTIGPGGRFERSKQVVSYLGLNPREHSSGGRQRLGAISKQGNPMMRSLLVEAGHTAARLDAELRQDYQRLKLRRGSGVAKVAMARKLAVRMYWMLRSPASYAQLVRMQGSPRGTLVGR

SEQ ID NO: 144407 - protein, 527 aa, unidentified
MMTSKRKSGKTKSKATNKSFRVAVLGKPTGIIQPRVQQVGPEGFGVIAVDCAKDRSKWMMANFYGKVLIEPTEVEHRCNAFQVMAQLATEAIERHQIKDVIACVEMTGSYHKPIYRQWKKLGYDTRIIHPFASSHYRLPEHGDVKTDDNDLAAIFRAAVNGFGLLEKPWNETYLRLQILVRHRRDLVRKRSKLQCQIRYHVDRCLPGFTSTFATTDMWTLPIAVGTLQFIADHGGTAQAILDSGILQLGRWLRNHKFRFQQRTLERIYCWAKQATTGEEMASSIAHVWLELLDDWELKTKQIVACEVKEASLLVKTPYILLLSHPGINVVSAAELAGETGPIEHYASSKSMSGRSGLFPSRYQSDGVDRGGNLSKFRNGKMRAAWLMVASNMVKCNAYWRAKASHWREQGVAGPDVRCRIANRLTRPVFQMVSGGKLYSHPSRLDRGYVLEKLMNFHRQHGTSPSQIVNDLRVAIEQIPAAHYLQEASPLKGFHAKSRRSRRTEPKELGDLLVAVLARLGVADLESP

SEQ ID NO: 144408 - protein, 351 aa, unidentified
MWIIGVDYHPSVQQIAFVATDAGECGERRLNHSDGEAEKFYRELEAAGCKVRVGMEATGHGRWFERLLAELGFELWIGDPAKIKAKRVRKQKTDRLDAELLLQLLLEDRFPRVWVPSPENRDLRQLLWHRHRLVQMRTRIMNQLQAVAMNEGVRRKQALWSKSGRAQLESLPLAPWAARRRHDLLELLDRLSPTIEELSAVVEQEAKQRPEVLRLMTHPGVGPTTALAFVLIIDSAERFACGKQIASYVGLIPCEDSSAERRRLGHITKQGNSLLRFLLVEAAQAAVQRDPDWRRRYIHLAMRRERRIAKVAMARKLAVSLYWMWRTQRDYQQTVKFSSHAGESDYVHGVQ

SEQ ID NO: 144409 - protein, 402 aa, unidentified
MNCVGIDISKGKSMIAVMRPFGEVVVSPFEVLHTDSELSKLARLLKSLDGETRVVMESTGNYHAPVAWLLHDAGLYVSVVNAMLVHDYGNNSLRRAKTDKKDAVKLANYGLDHWLTLPRYVPEEDTRLMLKSCYRQYQQYSKVRTMLKNNLISLLDTAFPDANRLFTSPPRADGSEKWVDFVAAFWHCECVCGLSEKAFTAKYQKWCKKHGYNFSEDKALDIYASACGHFGVMPKTDTAKLLVEQAISQLRATSAALAALKQEMQSLAASLPEYPVVMGMFGVGPALGPQLMAEIGDVRRFHSKKALVAFAGIDAPPYQSGQMDIRSRSISKRGSASLRRTLFLVMGVLLQCAPMDEPVYQFMNKKRSEGKPYRVYMMASANKFLRIYYASVKAYLDSLEHN

SEQ ID NO: 144410 - protein, 409 aa, unidentified
MLERCAGLDVGKDEVVACARTPSLSGKGRSSELRTFSAFTSGLEALADWLRAKGISEVVMEATGQYWKPVWYVLEDRGFELKLVNAKHVKMVPGRKTDLADAAWLAQLFEHGLLAGSFVPPVEIRELRDMTRYRKRLIQTHTAEQQRVQKVLEDAGIKLDSVASDVLGVSGRLMLRALINGERDPDVLAELAQRSMRKKIPQLREALRGRFKQHHAKMLRIILDHVDYLDTAIATLDAEIDELMAPFSQARDRLDTIVGVGKRAAECIIAEIGVDMTRFPSPAHLASWAGMCPGNNITGGKPRSGKTNKGNRWLGEILHECADSASRTRDSHLAAQYWRLQRRTGKRKANTAVGHSILVICWHLLTNNCDYQDLGGDWYVRRTDTDKRRNQLIRQLQDLGYGVTLTKVA

SEQ ID NO: 144411 - protein, 418 aa, unidentified
MSKIKSQKIKSVNDQTMIVTLDIGKGSHYGYFRAPDGQDVEPFAFYNTYDSFHSFWKKLSRFKKAHGCRHVVVGFESTGPYAEPITHFLKQQPVTLVQINPMHSKRVRELTGNSPNKTDRKDPRVIADVIMLGHALRVVIPQGASAHLRRLTQARERAIRDRTAIVNQLQHLLFVIFPEFLKVIKKISCKTGLYLLRHYPSRQAIAALGEQQLSRIIKRVSRAKMGQRHAEQLCQAAQASVGINEGQESIVEEIGHLVDKIKRENDFIDRVECQMRVHLEQIPYSRYLLSLPGVGLITVAGLIGEVGDFRQYGTVAEITKLAGLDLFEVSSGKHKGRRRISKRGRPLMRKLLYFAAINAVKSTGTMHQPYTQMLARGMPKIKALVAISRKLLRVMYALARNQSMYVENFASHRYHLAA

SEQ ID NO: 144412 - protein, 401 aa, unidentified
MPESITAGIDWGGSLHQVAIVDGRGRQLASFQVAHDVAGLAELGERLATYGADLPVAIERAEGLLVEHLQALGLQVYPVSPRIAARIRERYRVAPIKDDAFDAFTLADALRHEQPRWRPLAEPSPLLAELRALTRDRERIVAEHVRVQNQLHAILESYHPAAARLFSRLDRKVALSFARDYPTPARAAQVGERRMARFLARNGYTGRVAPAVLAERLHANLLAAAPGTVAGKSFAARHHADLLEQLTRTREAYDERIARLLAEHPDGELFRSFPGVGPVLAAILLAEIGEDRARFPEAALLLAEAGLAPVTRQSGKTRRVRFRRAASHRLRQAFTWWAFNSLTESPWARLVYEENRARGQRYYRALRGLSARWGRVLYRCWQDGSCYEVERHPGALELVET

SEQ ID NO: 144413 - protein, 345 aa, unidentified
MRHYAGLDVSVQETSICIINETGRVEFERKVTTHPEDLLKVLTNPCYRFVRIGLEAGPLSQWLYSGLADAGLPVVCIETRHTKAFLKAQINKTDRNDARGIAQMMRVNLFRQVHVKTLTSQKHRALLTARKLLQEKAIALENDMRGLLRNFGLKVGPVGAGKFEERIRELVEGHQELSEITDALLSARRVLREQFSKLHRRLLSVVRSDVVCRRLMTVPGVGPVIALAYRSTIDVPARFGSSKSVGAALGLTPVQHQSGESNRIGRISLCGDDMLRTLLYEGAQSVMKRSVKWSWLKAWAMNVAKRRGIKKSIIALARRMAVIMHRLWIDGTTFQWTKEALSTSP

SEQ ID NO: 144414 - protein, 324 aa, unidentified
MILGIDVAKQTFDVTLDPAARRQQHRTFANQASGFAQLSAWLAKQQVTVVHACMEATNIYWEELAEYLHGQGHQVSVVNPVRIAGYAKSQLRRNKTDKLDSAVIADFCATQQPSLWTPPTPEQKRLRSLERHRQALLKTRTQQTNRHSTCTEPLVQKSLDTLIDTLDAEIAQVEAHIAELVKQQSAFQEQLTLLTSITSIGNKTALTLMAELYDLADYPDACAVDADAGLSPARHESGQSVRKKPRLSKVGKAAVRGALYLPALNAIRHNPIVRNLAQRLRAKGKPEMVIIGAAMRKLLHLVYGVWKHKSPFDPNWHPATLASS

SEQ ID NO: 144415 - protein, 367 aa, unidentified
MKKVSTAVSKGTKNFPEQKLTIGLDLGDRSSWYCVLDEAGDVLLEQRVSTTPKAMKQVFERMPRSRIALETGMHSPWVSRVLSGLGHEVIVAHARNVRLIGESRRKDDRLDARTLARLARIDPQLLCPVKHRSAKAQADLTVIRARAGLVRARTSLINTARGLTKSYGERLRGCNPRNMKPEKASGLSPELQAVLEPLLAGIESLSEQIREYNEQIEHLAQESYPQVALLKQVKGVGTLIALTYLLTLEDAHRFRKSRDVGCYLGLQPGRRNSGQSEPQLHISKEGDPYLRTLLVQGAHHILGPFGADSDLRRWGLKLAGRGGKNGKKRAIVATARKLAVLLHRLWVSGEVYEPLRNSSQAMLPAAA

SEQ ID NO: 144416 - protein, 354 aa, unidentified
MVEYIHQGESHDLLCRTRRSLRSVNICVIDDQGEIRAETKLDSEVTDIIAYLDSLDLEVACVGLEAGTLCQYLTYGLQSASFEVVCMEARQVKAALSAMRNKTDKNDARGIAQLLRTGWYSKVHIKSMASHRVRALLSSRKAVLSKCIDLENEVRGLFKVFGIKLPPKLGHGAFDAAVRDIIETDATFSQCLLPLLNARLVLYHCFRELDNRTRRQAHNDPVCQRLMSAPGVGFITALTYKAGVDDPARFKRSRTVAAHFGLTPRRFQSGEINIDGHISRCGDRTVRCALYTAANAMMTRSSRWSSLKVWGLQLAKARGHRRAVIAVARKLAVILHRMWIDDTQFNWGMEGTRS

SEQ ID NO: 144417 - protein, 358 aa, unidentified
MRIIGCDLHARQQTVAMLDTDSGELVEKTLQHDGEELRKFYSGLSRPVLVGIEATGSMQWFLELMEELGIECRVGDPAKIRAAEPRKQKNDRRDAQLLLKLLVENRFPTIWMPSTEQRDLRALLRHRHQWVRLRSRIQHTLQSMALNHGLRRGHALWNQAGQHALWTLPLAPHASERRKALMKLYPCLQESIDELDRQVSRQVDQHPPARRLMTHPGVGPVTALATEVFLGDPLRFTDGKAVASYMGMIPREHSSGGRQRLGAMSKQGNTLLRYLWCEAAMHAVERDPELKRFYRRKLVQKGMGKARVAAARKLGIRLWIMMRDQIDYQEFCRRGKARQESGSVRAGMPAINSGPAEA

SEQ ID NO: 144418 - protein, 312 aa, unidentified
MEEKVTFEQLVQVGCGIDVHKENIVATIRKSDQTFETREFDSYTSSLTELRDWCKTEKVTHIAMESTGVYWKPVFNILEADFEIILVNARHVKNVPGHKTDKKDSRWLSKLLLAGLLKGSFIPPQDIRELRDLVRYKRKVTDQAASEKNRIIKILEDANIKLSSVLTNVDGVTGTKIINDLIAGTTDVNELIVHYHGKMKASKEEVRKALEGRLTAHHQFMLQLVQQSIRDKEAVIIALEDKIDEAVKGYEVEVDLLQTIPGVAKDSAINIISEVGADMERFPNEKHLSSWAGMSPGNNESGGKKSRKNTTW

SEQ ID NO: 144419 - protein, 414 aa, unidentified
MLKIVYRVCCGIDVHKSFVVACIASTNEQGVTTYKSKRFSTFTGDLRRCAVWLAENDCKDVCMESTGKYWFPIYNILEPTCSIVLAHPKYVKAIRGKKTDKRDAKWIADIFKHDLVAGSFIPPADIRQLRDLVRYRWKLTNVTTGEKNRAHNCLTVSNFKLDDVFSDVFGKAASAITVRILENPKGKITDVSGFRTKGMKATNEQVLAAVDGEMCDEQAEKLRIIRSHMDSLDLCKLNLESLILSTAEKYLPQLNLVTTAPGIQSFAAIGIISEIGVDMSVFPSSKHLCSWAGLTPQNNESAGKKKTTRISRAGAYIKPLLVQCALNAIRAKQFPEVRNRYLALKKRRGHKKAIIAIARMLLTAIYNMLKKNEPYNSGLYRQADRPPAHREVSVDEAVFILQRQGYLVTAPPTP

SEQ ID NO: 144420 - protein, 335 aa, unidentified
MGSCAAPSAKGDDKFITTDYLQQCQPKVSRAALSELIAGLPPCVIGMEACSGVHYWARLFRQYGHDVRLMAPKFVSPYRMAGKTGKNDAADAIAICEAVQRPHMRFVPVKDESQQAMQCLHRTRQGFIQERTATYNRLRGLISEFGVIAPQSTDALRHVVSDQKETLPVQVRLCIDDLLTHVTNIEEKIAEYDRVLSRVAKTDHRSQQLMELKGVGPTTASALVASIGNAHDFKNGRQLAAWLGLTPSQYSSGGKSKLGRITKAGDAYLRTLLVQGARSVMVGAENRTDPFSRWVCSLIGRRGYWRAVVAIAAKNARLCWASLHYGDDFRLYSTT

SEQ ID NO: 144421 - protein, 389 aa, unidentified
MSPQNDQSKKCFTAFEQASTMVAVVELSKKLWLVAGIVPGIGRHPLKKFEADENRLLALLHHWQQQAVKAGREIKRIVVAFEAGRDGFWLARWLRVRGIEAYVIHPTSVAVSREHRRAKTDRLDTEHLKRVVLGWLRGEPDHCRMVAIPTVEEEDAKRPNRERETLVGECTRIVNRVKACLARFGIRGFNPTLRKAADRLETLVTPEGARLPPLTLAEMLRDIARLRFLREQIKSIEKARVQRLRDAPATRTNAMVNLIARVFGIGIETADLLVHEILSRNLRDRRAVARYAGLTGSPDESGDRRREKGLARAGNARVRRGMVQLAWRFLGFHPDSALTQWYNKRAADGRGSTRKTMIVALARKLLLVLWRMVTTGEVPADLKLRRTTA

SEQ ID NO: 144422 - protein, 424 aa, unidentified
MHSRVKIACGLDVHRSKIVGSIVTSTGTHETRTFTTNIDDTLALKDWILTHECERVAMEATGIYWYPIYNLLEEHVTIQVANPLFIKGIPGRKTDQLDAEWIATLCLNGLVKPSFVPGLQMRNRRDLVRTLSRLIHIRTRHKNRVHKVMVRAGIRIGAHLSDLFGPSGLRILHGLLEGQSIDTILKELKNPKITKKREELVKSICGTLDENDVYLIRLELDAIGSVNCLIDNLKQRISVVMMPEHEDLNTLMSVPGIGYDSAVNILAETGDVRLFPSGKHLVSWAGLAPGMNESAGKQGPGHITKRGSKFLRTFLIEPAHSIASMKRNNQLKRFFSRMRGKLGYKPAIIALARKLLMLIHHLLVNREPYFEENLPMKKPIEMNPSSLSSMNPDQILQILSDAIAELAEPDRVDFVRKVNRIGNS

SEQ ID NO: 144423 - protein, 372 aa, unidentified
MSANQNSIYVGMDVHKAAINVAVTVRGRREPEAEWQLANEPRSIKKLVKQLKGMARGGAVSAAYEAGPCGYALQREMCEQGIECSVVAPSLIPVKPGEHVKTDRRDARKLAAMLQAGLLTEVHPPTPEDESVRDLTRAREDTKQDQMRARHRLGKMLLRHGFVYREGKNWTMRHRNWLKQVRFGDEIAQRVFEGYVLVLEQVEERLKRIDEQLEAVARSERYVERVGWLRCLRGVETVTAMMILAELHDFRRFTSPRELMSFLGMTPSEHTSSSRVRRGSITKAGNTHVRRVLIEAAHHYRHRPSVSSTMRQRRNGQPARVLAIADRAQERLHSRYFKLKEGYKKPHNVAVVAIARELVGFIWAVLRETEAA

SEQ ID NO: 144424 - protein, 308 aa, unidentified
MFVGIDVSKAPLDVVLRPTDDGWHVSHDEPGMALLVERLPALQPALIVWEATGGLEVPGAGALAAAALPVGVVPPRHARDFANATGRLAKTDTRDARGLAHVAEAVRPTPRPRPEADAHAWRARVTRRRQVGQRLTADRQRLQSAPQRSRADRPAHLAWLERRVARRADDWAAASRSRPLGRVNAESVQRPPGVGPVRSRTVVAEGPEWGVLNRQESAARVGGAPCHCESGPGRGTRSIWGGRAPVRAVLSMRTLTAVRHHPVLKAFYQRLRAAGKAAKVALTASLRKLRTIWNAMVKPRTRWPANTA

SEQ ID NO: 144425 - protein, 335 aa, unidentified
MKSYKRVIGIDISTERLDVADSNAKIVHEVDYTIEAIKSKILRLIKKPSETLVVCEATGGLEYSLVDMLHDAKIDVVVANPARIRDFAKGHGFLEKSDKIDARVLQLYGQQVDATLAIPRTLQERNFIALTRRRTQLLQLISQESNRLRQSNDTQVKSFIEEMLKSLENQMKTLDSWISKALDEQSKTNPSIDVMRSVPGVGVVMTATLVAELPELGTISRTKIAKLVGVAPMIKQSGKSEERRRARGGRGGVRRVLYMATLAATQKNDVIKKRYIKLLASGKPKKLALVACMRTLLTILNDMVRHETKWGEKKKSVAGTVVSNRPAPAHVLDKS

SEQ ID NO: 144426 - protein, 345 aa, unidentified
MKIIGCDFHPSFQQIAICDLETGELQERKLSHADGQAERFYQELGESALIGIEATGNCQWFLDLVQRLGHEVRVGDAAKIRASYVRKQSTDKRDAGHILKLLLEKRFPQLWTPSAAMRDQRQLLRHRDKLVEIRTKVKNSLQHLAMNRGMQKKSRLWTRLGMEQFQQLAMPGWAGTRREDLLQLLKELNGQIEPLDQAVKQAAEQHPQAQLLMTQPGVGPVTALAFVLTVGDVTRFAGSKQLTSYLGLVPSEHSSGSKRWLGAITKQGNRFLRKLLVEAAQTTVRKDEGFRKEYQHRCRRRPKGVAKVAAARKLAVRLYWMLRSNVGYPEIVHIESNPRVPLGEV

SEQ ID NO: 144427 - protein, 478 aa, unidentified
MASRKKSTFQRLNGERLNRKQRRELERRLGSEDPGLEIVHRNVAGIDVGNESHFVAVPPGRDSQPVQEFGSWTADLERMVEWLKACGIEMVVMQSTGVYWTALYDVLVARGFKICLANARHTKNLPGRKSDVQESQWLMKLHTYGLLCDSFHPPDEIRALRSLWRLRDRHVKEAARAVQHMQKALITMNVQLSNAISDITGVTGQAILREILIGERDPWKLAKLRDWRIKATEEEIARSLEGNWRDDMLFELRQAVEAYDFIQQQMAACDQRLKRLLEALPARPVAEREAEAGAAEANQRSQRRGSRQKNTPGFDLKEELKRICGVDLTRIDGIDVMTTQTFVAEVGTDMSRWATEHHFASWLTLTPNRDVSGGKVVRQEPRKSKSRVAAALRTAACTLLRSQSYLGARYRALRARLGAPKAIKAMARYLACLMYRMLKYGQAYVDRGTQHFEQKRAQRELSSLQRKAAALGYTSAHK

SEQ ID NO: 144428 - protein, 375 aa, unidentified
MKKISTAATTSNKNLHSRLTIGLDLGDRSSWYCVLDDSGEVIAEHKLGTTPKAMQESFEAIARSRIALETGTHSPWISRLLSELGHEVIVAHARNVRLIGESRRKDDRLDARTLARLARIDPQLLAPVKHRSAQAQADLTVIRARASLVRARTALVNAARGLTKSNGERLRGCNPRNLDREKAQALRPELQAALGPLLQSLEALSEHIAEYNQRIEKIAQQDYPQTALLKQVKGVGTLIALTYMLTLEDPHRFSKSRDAGCYVGLQPGRRNSGQTEPQMHISKEGDSYLRTLLVQAAHHILGPFGPDTDLRRWGLKLAERGGKNGKKRAVIATARKLAVLLHRLWVSGEVYEPLRNRWVDRSARMAQRTPLSPSA

SEQ ID NO: 144429 - protein, 280 aa, unidentified
MESYVGLDVSLKRTSICVVGRTGKVLCEGTVNSAPEAIVGFVKSKAAGAVRIGLETGPTSTWLWTEIKALGLPVICIDARHAKAVLKMQINKSDRNDAFGIARIMQCGWYKEVRVKGLDSHAMRALLESRALLVKMKRDLENQIRGLLKNLGLIIATARGQAFHARVQELVEPSRFKRSRSVGAYVGLTTRRYASGEVDWTGRISKCGDAMLRSYLFEAAGVLLTRVQKWCALKAWGMRLAKRVGLRKAKVAVARKLAVILHRMWIDGTEFQWSADKVVA

SEQ ID NO: 144430 - protein, 379 aa, unidentified
MYRILKIGMDVHTTNYTLCALESKFGQSDAVLANITVSPELRNVVDFIKRIKQKMDPYGRDEIDVECGYEAGCLGYSLYHALTGCKVKCTILAPTTMSVEKGPRIKTDKRDARNIADCLSTGKYSAVHIPTEQDNAIKEYIRMRDDHVIALKKIKQQMNALCIRSGFIYDGNKWTEKHLRWLCGLNLPELVRETLNEYLVTYDEQTAKIERYDKRIAELASQSEYQENVRRLECFLGIKTNTAMSLIVETGDFTRFAKGNLYASYLGLTPGEHTSSENGGKLGITKAGNKHLRTMLIEAAGTICKGAVGYKSKNLRARQDGNMPEVIAYADKANMRLRGKYYRLIRHGKKRNIAVTAVARELACFVWGMMTDNISKTAV

SEQ ID NO: 144431 - protein, 353 aa, unidentified
MLEVLTSPTLKEAPVSAAYDGRQFVGIDLHRRRSVVSRTDQHGNVLEAVRISNDPHLLAEVMGRAGEQPEVVLEATYGWYWAADLLATIGANVHLAHPLGVKGFAYRRVKNDFRDAADLADLLRMGRLPEAWIAPPQVRDLRQLVRHRAKLVAVRTGWKCQVHAVLAACGVPVRMSDLFGEAGTELLDHLQLPTAFAARVNSLRRLLDPLDAEIALFDGMARARLARHPGYRAIQAIDGLGPVLAAVLVAEIGDVTRFPGPAQLASWVGLTPRHRESDTHVHRGRITKQGSRLARWAAVEAVQRVGTHTRLGQVRDRVAERRGRNIGVVAAARELVCLVYYGLRDGHIRRLAA

SEQ ID NO: 144432 - protein, 321 aa, unidentified
MSAPSAVTVGIDVAKAHVDVSVLGANLDIRRFNNDAEGHSALAVALQPLNVQLVVMEATGGYETELACALQGAGLPVAVVNPRQARDFARSMGRLAKTDAIDAHMLAELASVLLRRDDLSRLLRPVPDERQQWLAALVTRRRQLLTMLLSERQRLQITPVGLHSSLLAIIAAIQAQLDDIDAQMVAHVRQHFGELDRLLQSTHGIGPVSSACLIAELPELGRLNRRQIAALVGVAPIACDSGLRNGRRRVQGGRFAIRRVLYMATLTATRYNPAIRAFYQRLKAAGKLSKVALVACMRKLLTMLNAMVKTNTPWDDSLHRA

SEQ ID NO: 144433 - protein, 408 aa, unidentified
MNLFVGIDVSSKNLDVCFLDSEDTCLKEETLSNDLNGANQIKETILTYNGQFHYEKIIVGMESTSVYSFHPSTLLDNDKDLQRIGVEVVVQNPKAIHRFKGLFEEDKTDRIDAFRIADFLRFGRYNKTVIKEEKYIALQRLTRSRYQVIQQLTECKQHFLENLYYKCNTLSNDVDTSIFGAAMMELFTDSLSLDDIANMELEELAFFLQKKGKGRFSDPEKLAKSIKKAIRDSYRLGKVVQHSVDMVLATYAKLVQTLKKQIKELDKGIQALFEILPEAQCLISVPGIGPVYAAGIIAEIGQIERFETQAQLAKYAGLYWKRSQSGDFESERTPRVKTGNQYLRFYLVEAANSVRRNEPVYHEFYQKKYKEVPKYKHKRALVMTARKLVRLVDVLLRNHQLYTSERSV

SEQ ID NO: 144434 - protein, 339 aa, unidentified
MSPGTAADVTHDRTVAWFQPHCARQVTVTRLICGVDVSGETLDCRLGQDGPCLETARTAEGIGRLARFCREHAVELVVMEATGAYERMVFSLLWEAGIACAIVNPRSVRRFAEAMGFLEKTDRIDAGQIARYAEVKGIVAQEPASPSQQRLRALVTRLRQLTDLSVAQANQRRLVEEPDVLEGVEELLKLVKRQIRKLEAQIAELIDSDPLWRAFDEAFRSIKGVADRTVARLMADLPEIGTLSNKAIAKLAGLAPMAKDSGKRKGKRSIRGGRTSVRSILFVVASVVSRHNADFKDFHQRLSVEGRTKKAVRIAVARKLLVRLNAKAREIRHTFANAT

SEQ ID NO: 144435 - protein, 366 aa, unidentified
MIVIGADPHKSQHTLAAVEAATGELLDDLTVTSKPKGHRELMRWGRAFGEERLWAIEDCRHLTGNLERYLVAHGERVVRVAPKHMAGARRSVRERGKSDAIDALAVARAALREGPDKLPSAWLDDEAMQIKLLLDHREDLEQESTRIVGRLRWHLVDLWPELELPAKAFERMVWLDRVGARLARAEQSTRVRICREQVCTLKRLLRRSRELERELAVLVKAKNPALLELPGCGPLTAAKLIAQTAGAERFPSEAHFARLAGVAPVPVSSGRKDRHRLDRGGDRQLNCALHRIAVTQKRVHTPAQDYLARKQSEGKTKREALRCLKRQLVRTVLRLLRPPVSSVRTDPLPMKNLTKIKEPLQVAALT

SEQ ID NO: 144436 - protein, 335 aa, unidentified
MWHVGLDVHYRTSTYCILDENGHEVACETIRGHWPKLLERLAQVAKPWSICFEASCGYGYLYRELSKMGARVVVAHPGQLRLIFRAKRKNDRIDARKLAKLLYLDEVPAAYVPNQDVQNWRELIEYRRRVVDRQTTCKNAIRSLLRSQGILASKGLWTKKGLNWLRQLEMPTPAARLKRQMLLEELDEAKRRTKTVTKELDQMGERHPGVLLVRTIPGVGIRTAEAAVAYIDNARRFLHSSQGGAYFGFIPCQDASAAANRLGHITQQGPATARKYLVEAAWQGVYRSPTIRAYFERLLHGRKERRKIALVATAHYLVRCMHAMLVSNRPWHEVA

SEQ ID NO: 144437 - protein, 337 aa, unidentified
MKSQQPDTSVKEYQNAKCYSLKIPAQPDNMLHFFQKRFPGKRLVYAYEAGPTGYALYDHVTAQGYDCMMVHPGNIEKAPKDRVKTNRLDSLKVLRQLHGGNLKGIRVPSESYRQLRHLTTLRQQYAADQRRAKQRIEALLTFENIQLPFVTERRWSLRHIQAIKELKLETIRRFRLDSLLDDLAYARQQLLRIHRQLREFCKQNDAIQKNIQLLRSIPGFGFVIPTYLLGRIGDPAYLRTARELGAFAGVVPSERSTGDTVRKGPITHMGDPILRGLLVEGAWIAIRKDAELRQFYDRIRSRNSGDHGARIAIVAVARKLAARAHRVLKDQKPYVIH

SEQ ID NO: 144438 - protein, 409 aa, unidentified
MKLYVGIDVSSTDLYTCIMDQEGNTCAQFKADNHLLGATFLRDQVLLWANKLQPSEILIGMEATSVYSWHPAMFFHQQEELKSWNVKVFTINPKLIRKFKEAYTDLDKTDGIDAWIIADRLRFGRLKVTAVMQEQFIALQRLTRMRYHLVHQLTREKQYFLQHLFYKCSSFTQEVDSSVFGHAILELLLESFSLDEISQADVQQLADFLRQKGRNRFADPECIAKSIQKAARSSYRLSKCVEDSIDLLLGLSIQSIRSLQAQIKELDKAITRHLEGIPNTLQTIPGIGPVYAAGILAEIGQIERFDNQAALAKYAGLTWSKHQSGRFQAEETSLIRSGNRYLRYYLVEAANSVQRHDASFRAYYRKKYEEVPKHQHKRALVLTARKLVRVIDALLRNGQIYTPRKGEDR

SEQ ID NO: 144439 - protein, 391 aa, unidentified
MIYIGIDVAKDKHDCFITNSEGEVLFNAFTIPNNADGFHDLFQKISSLTNDFSNVKVGLEATGHYNYNLLGFLIDKGLPTFVINPLHTNLFRKSLSLRQTKTDKVDAHTIALMMMSGVNLQSYSNTSYHNEELKSLTRYRFDKVQERAKLKTSISRLVNILFPELEKLVPSLHMVSIYALLAEFPSSAQIASCHLTRLTNLPANASKGHYNKEKAIEIRNAAKHSIGSNMPAKSLELKHTIRLIQELTSEIDEIECFIKSIMDEIRSPILSIPGINYRMGAMIIAEIGDFNRFSSPDKILAYAGLSPSTYQSGQLDGCYSHMEKRGSRYLRYALFNATKFVCIWDNQFSAYLAKKRSEGKHYNVAISHAAKKLVRVIYQLEKSGQLYHRAA

SEQ ID NO: 144440 - protein, 313 aa, unidentified
MIHQMYFVGLDAAKLRFDGYVHPGGERFSCCSKTEDMEALVRRVAALGPVKVGLEASGGYERKLADCLHAAGVEVYILPPARVRGFARAIGCLAKTDAIDAAMIARYLAATHERLKPYAPDPACARLSALAAHRRRLVAEKSALASQLDTIDGELVRAMIEARRHTIAQDVAALDKAIRDLLAATQRLAQRHRRLRQVTGVGPILATALLADMPELGRISAKAAAALLGVAPHARQSGNSSRPGRCSGGRKHLRDIAYMGALSAIKAKDPVLATFYNRLRQNGKPFKLAMVATIRKLISILNAIARDDQAFAA

SEQ ID NO: 144441 - protein, 482 aa, unidentified
MKSKPQKRTKKATDHPTQRHWHEMNRKQRRETMRKIQSEEISLEVVHPNAAGIDIGNESHYVAVPPSRDSQPVQRFGCTTAELKAMAAWLKQCGIRTVAMQSTGVYWIAVYDILEQAGLEVYLVNARDTKNLPGRKSDVQESQWLMKLHTYGLLRNSFRPAQQIRTMRTYWRQRNDLVQSTGRHIQRMQKALTQMNLQLANVLSDVSGVTGQAIIKAILGGERDPHKLAEFRDPRVKASEEQIAQSLEGNWQEELLFVLKQEQDGYEFCRKQMAECDRQLAQYLQQREDRSQGAPLPEEKRKGRLKKKRANKPRFDLREGLFRLSATDLTRIDCIDVMTAMTVISEAGWDMSKWKTEDHFVSWLRLCPDNRISGDKIIGKGRLPTNNRVNIALKMAASSLRLNNTYLGAQFRRLRTRLGAPIAIKAMAAKLARLVYRMLRYGMKYVDRGAAFYELQNRQLQIKRLKSKAAKLGLQIVQAPAA

SEQ ID NO: 144442 - protein, 339 aa, unidentified
MKITTIGLDIAKSVFHLYAVNKMGRYVTKKQLKRHQMTRYFARLEPCLVAMEACGSANHWARQIKSLGHEVKLIAPQYVKPYVKGNKNDYNDAEAIAEAAQRPTMRFVPIKSIEQQDIQNLHRQRERLKKARTALSNQVRGLLAEYGIVINKGVAAVRKGLPDILEDAENDLTMRSRELFAELLEELRILDERFKHSDKQIELSNRGNETCERLEAILGVGPLIASGTYAAAGDGKDFVNGRHFSAWLGLVPGQHSTGGKPKLLGISKRGNAYLRTLYIHGARSVLQHSESKTDRFSLWAQALKERRGHNKACVAVANKMARMAWVIMARGETYRPAMS

SEQ ID NO: 144443 - protein, 390 aa, unidentified
MKKNSIAGLQSKGKKDQIRRAEAKQRLTVGLDLGDRNSRYCILDEAGEKVSEDKLPTTKAGLDGLFGKMAACRIALEVGTHSPWVSRRLAGMGHEVIVANPHNVKLITQSVKKNDRVDAEQLARLARVDPKLLSPIRHRGEQAQADLAVIRARAELVDTRTGLINCARGMAKPMGERLKQCDADQVKETLADGLGEALQKVIRPLLKCVEEISKQVGVYEAKIEEIEKRYPEKELLTQVWGVGTLIALTYILTIEDAQRFEHSRDVGPYLGLTRKYRDSGDSEPELGISKHGDGLLRRYLVQGAQCVLRQGAPDCDLKVWGETLQNGGRKGKQKNQKGSKRGKKKAVVGVARRLAVLLHRLWVTGEVYDPHYNRKAAAAAQAKAKAKAAA

SEQ ID NO: 144444 - protein, 404 aa, unidentified
MFKFGIDWSEQHHNLCIRNDKGAIVSQVEFKHTLEGFQRFDDERRKLGVPPSECLVAIETAYNLLVDFLLDRGYVVYLIPPQATKGYRNRQRSTDAHTDDTDAALLASILHTDLESHRRLQPNSALTQQILAQVRLIDLLRRSIQRQANQLRAVLFRVYPQALGLFGKLTAQINLHFLMTYPTAQEAQCLTRAAFEAFCREHRYGRANLISRRYAHLMEPAPQANPIAVAAYRDQIRILAELLLPQVLRRTEALSCLAQLFSQHPDAFIFESLPGAGELLAPALLAKFGDHRDRFPTAAGVQALAGTCPVTKKSGKRKVVLFRRGCDREFRRIAQQFAKASVRQSGWALAYWRDVRPRCRSDSDAYRRLANRWLAIIWRMWQDGKAYDESYHIQQRAQRRRPRS

SEQ ID NO: 144445 - protein, 415 aa, unidentified
MQHEEALMEVLHASCCGLDVHKKTVVACLLTPGLGGRPVREVRTYGTTTRELLALVDWLAANGCTHVAMESTGSYWKPVHNLLESSFELLVVNAHHLKAVPGRKTDVRDSEWIADLLQHGLIRPSFIPSRPERELRELTRYRTTLVRERASEVNRIQKVLEGANIKLASVASNVVGVSGRAMLSAMVAGVVDAEVMAEMARGKLRNKIGTLKEALHGRLGSHQRFLLGAQLRHVDELGQLIDEVSAEVEERLRPSQEDLTRLTTIPGVGRRTAEILLSELGADIARFPSARHLASWAGICPGNHQSAGRSGTGRTRKGSPWLRSALVEAARAAGRGRTYLGAQYHRIAARRGANRAAVAVAHSILVIVYHMLSDRRDYHDLGGNYFDERHREQVSRRLTRRLEALGYSVSLSPAA

SEQ ID NO: 144446 - protein, 422 aa, unidentified
MKVFNPADFAALIAIDWADRKHDVCELDQQNNETTFSVISSKPEAINAWANALKQKYNGQQVAVACELKKGPLIYALSKFKHIVLFTINPSTVAKYRKAFTHSGAKDDPTDAAIQLEILQQHMSKLNVIMPDTQSIRSLAQLVEYRRKLVQDRVDLTNRLSTTLKNYYPQVLDWFNEKDSMIFCDFLLRWPSLAKVKRARKQTLHDFFNLHNARYPNVNEKRIDDIKHAQSLTSDNAIIGPNLLLVECLVGQLKQLMLSIERFDHEIKSIYKQHSDRFIFDSLPGAGPQMAPRLLAAMGSNRERYQSSEEVQKYAGIAPVTERSGKKEWIHWRYSCTTFLRQTFVEWAGQSVRYSFWAKAYYEQQKSKGKPHNTIIRALAFKWIRILFRCWKTKTAYDESTYLEALKRKGSPLLKYAMESKF

SEQ ID NO: 144447 - protein, 354 aa, unidentified
MVTIGVDSHKESHTLVAVDALGRKVAQRTVSNRVESYAEVWTWAQGLEAPRVWGVENSGSYGRGLAQYLVGQSEEVYEVPPHLTGRTRRRSLDREKSDAADALSIARVVLQEGAKLPRVQAEDVSSVLSVVIEHRGNLVAERTRLVNQLHSQLSQVEPGYKDRLGDLTQRPALEACQTYPLPSGDPVAHMRVTVIRQMATLLMSLTDMIQQLETQEIGPRVEKTQTPLLSIQGIGILTAAELMARVGPISAMKSAASLARYSGIAPMERSSGASQRYRVNGQGDRQLQAVFYRMALVQKRCNPLAAAYVAKKRHEGKTAKEAHRCLMRRLVDIVYSVWKHNVPYRPPAAECMAV

SEQ ID NO: 144448 - protein, 410 aa, unidentified
MGRMKGKRSASSIVGCAPRCAEPHAETPEGVLPQTFRGGRPVSKTITSFVGLDVHKDSTAIAEAEAGRENPRFIGTVGSDLGQLLKALKSLGKPETMLVVYEAGPCGYGVARQLRSRGYSCEVVAAGKIARRPNERIKTDRRDALTLARLARSGDLVKVRVPDERDEAMRDLSRAREDAVKARLKARQQLKALLLRHGHRYGGKSSWTLAHERYLATVGFAHPAQDIAFAEYRQAVREGHERVERVTQALRTQTEHWRLQPLVAALSSLRGIDFVAAVTLAAEIGDFSRFAHPTELMGFLGLVPSEYSTGDTRRQGDITKTGNGHARRVLVEAAWNYRFPARISRVLQIRQEGQPKAVCEIAWRAQLRLAHRYRRLSSRKLHPNKICVAIARELAGFLWDIARQVKVAEA

SEQ ID NO: 144449 - protein, 342 aa, unidentified
MTYYAGLDVSLEETAICVVDGTGAIVKEVRAESEPGALNDALKRLGLALQRVGMEACSLTAWLHDGLAEAGWPAFCIETRQANAAMKTMPNKTDRNDARALAQIMRTGWFRQVHVKSHQSRRWRSLLVARRTVLNHMRSIENLVRAISREDGIKLGTPSRKDFTARVREMAGTEPELMAMLEPLLAVLASMMEELGRLTKRVLDIVRNEATCRQLMTSPGVGPITALTYRATIDRPERFARSRDVGAHLGLTPTRYQSGETDIAGRISRCGDELARTGLVEAAHTLLVRSKKWSSLRVWGLAIAKRRGMARAKIAVARKLAVILHRMWVDRSDFRFGREAVA

SEQ ID NO: 144450 - protein, 317 aa, unidentified
MFIGIDVGLKSLEVAATPAAPSLPRRVPNTAAGIARLVAALGGLTPTLVVLEATGNYHRPVLAALLTAQLPVSVANPAQVAAFRQSRLGRHKTDRADAHLLARFAELHHDELRRATPDEPDLARLRALVGYRDDLVNRKTRLRNQHHAAGWTDEPSVLAWLEADLAEVEARLREVEGAITALLATLPQSALLTEQIGVGSLVAAAVLAYLPAGVLGNAKAAAAYAGLHPRQEQSGQRDRSRLSKQGCPALRRYLYLAALVAGRRDPELAAFRQRLLDRGKAARSATCAVAHKLLRRLMGRIRQARTHHHPDLLPLAA

SEQ ID NO: 144451 - protein, 362 aa, unidentified
MLGARGEVREYGKIANTPTAIERMARKLAAKGNELRFCYEAGPCGYGIQRQLSGMGHLCDVVAPSLIPRKPGERIKTDRRDANKLAKLHRAGELTPVWVPDQKHEAIRDLIRARHAAAREQRRARQQLRSFLLRHGHSYSRTAWGAMHRRWMAGLKFDQPMHYLVLEDAIAAVEAAQGRRLRLEAQIEAAVPAWSLAPVVGALQALRGVALVGAVTLAAELGDITRFDNPRQLMAYIGLVPSEHSSGGTRRQGGITKAGNSTARRMLIEAAWSYNTPARISRAKLLQQEALAKPIRDIAWKAQDRLCRRYRTLARSGKKATVVCTAIARELTGFVWAIAHEVGRSASDKSAGKLAVRSVAVP

SEQ ID NO: 144452 - protein, 355 aa, unidentified
MTSTKYIGMDVHKESISIAVMNSIGKIVMECVIETKASMILQFIDGLRGDLQVTFEEGTSAAWLYDLLKPRVTKLVVCDPRKNKSMREGNQSDKIDARRLAELLRLHHLTPVYHGEHGLRTLKELVRSYLTITKDLARVMTRVKAIYRSWAIPCTGKQVYAWCHRAEWLAKITEPGVHRRAEFYYQQLDALRLLRQEARRDLLAESKKHKAWKRLCQIPSIGPIRAAVLLGILQTPHRFRTKRQLWNYGGLAIEMHSSADHRSVDGQLQRSRKNVLVRGLNRNCNHDLKNLFKGAAAVASSKPGPFEQFYAALAAKGMRPEMARLTLARKIATIVLIVWKRGVCFDAQHLKPQTA

SEQ ID NO: 144453 - protein, 314 aa, unidentified
MEQPSSPSFVGIDVSKDRLDVHILPAGQAFAVARNGEGLDQLVTELRTRAPALIVLEATGGFEVTVAAVLAGAGLPLAVVNPRQIRDFARATGRLAKTDALDAQIIALFAERIRPEPRPIADAESLALAELVARRRQVVEMIGMEANRLRQARSPRVRRTIEATRKTLEAQLVELDKDIDDSVRGSPVWRAADDLLTSVPGIGGITARTLIADLPELGRLDRRRIAALVGVAPVNRDSGQMRGHRAIAGGRTAVRNALYMATLSAVRWNPVIKAHYTRIVAAGRPKKVALVACMRHLLTILNAIIKTASPWKTA

SEQ ID NO: 144454 - protein, 356 aa, unidentified
MMTAKISYEGRRVYIGLDVHKSFYVLSAISEGILVKSCRMKAEPIELTKFIRKNFSGGIIESCYESGFSGFHLHRVLTAGGINNIVVNPGSIETCSRNRVKTDKKDSKKLAKDLSEGRYRGIRIPSMEQENARLLTRTREQLVRSITRVRVQIRMKFHQFGLIDSVEHRVLSRRMVETILLKEMSLELKASIESLLSVWDSLVGEKKKLESKMRCQAEKDPNETLWRSLPGIGAFSSRILSNELGDLSQFPNERALFSFTSFTGLTPCEFSSGDRIHKGHISRQGNSSLRHVLVEAAWRAIRIDRVLKEDFNRIASRRGKKRAIVAIARKLVGRARAIFRTEGEYQLGYRKYKQCA

SEQ ID NO: 144455 - protein, 416 aa, unidentified
MDSGCNSQMGGIQMNSVGIDISKGRSTVAVMRPFGEVVISPFEVRHTDSELSELARQLKSLDGETRVVMEATGNYHTPVAKLLHDAGLYVSVVNAKLVHGYGNNDLRRVKTDKKDSVKLANYGLDRWLALTRYVPEEDTRLLLKNCYRQYRQYSKVQTVLKNNLISLLDTVFPNVNRLFSSPAREDGSEKWVDFVAEFWHCRCVSEKSEKAFANKYQRWCRKYGYNFNEAKAHTIHAEASGHIGVMPMSETTKLLVEQAVAQLRATSTALAALKHEMQALTSMLPEYPVVMDMFGVGPTLGPQLIAEIGDVRRFYSKKALVAYAGLDAPPNDSGDVTGRHKSMSKIGASSLRRTLFLVMSVYLQTAPLDEPVYQFMDRKRAEGKPYRVYMMASANKFLRIYYATVKAYLESLEHTA

SEQ ID NO: 144456 - protein, 321 aa, unidentified
MSRILVGVDVCMDFLDAHARPTGVQKRFDNTPAGIEQLVAWVRPLAPERVIFESTGPYQKAAVGALLAADLPAVVVNARQVRDFAKGTGQLAKTDVIDAAILAHFGEVVATVVRPLPPQEILEFREFCDRRGQLVRMLASEKNHRHAASGASPKVIKNIDKHIAFLQRQIDDLEERMDRIVADSETFKAKDAILQSIVGIGPQVSRILLAHLPELGNGTRRSIAALVGLAPFADDSGTSSRVRHIRGGRAKVRIALYQAAVAAIRYCTTMKAFYASLKARGKATKVALIAVARKLLVLANALLRTGIPYQHPTNSVCLKNA

SEQ ID NO: 144457 - protein, 340 aa, unidentified
MQLYAAIDLHSNNSVVVVLDENDRQVYRRRLPNSLEAIVAALRSCEGQITGVAVESTFNWYWLVDGLRADGFTVHLVNTAAVKQYDGLKHSGDFEDARHLAHLLRLGILPTGYIYPREARALRDLARKRSQLVRTRTQQILCIHNLLARNLGRNARGDEIKALEPQQLDELDLLSEHKLAIKANLALLACVQEQIKTLEREVVSQAKLRDDYQHLLTVSGIGKVLALTIALESGDVGRFAAAGNFASYARMVQSRRDSNGKTKGEGNARCGNKYLCWAFIEAAHHAIRNDEAIKRFYQRKCAKSLQVVAIKAVAHKLARAAFHVMREGTPFEVQRAFAQR

SEQ ID NO: 144458 - protein, 355 aa, unidentified
MNDAKYIGLDVHQATITVAVRDSAGKLVIEAILETKAETILQFLRGVRGSLHVTFEEGTWAAWLHDLLKPHVTRVVVCDPRKNALLKVGNKNDRIDARKLSELLYLNKLSPVYHGEQGIRTLRELARSYLTITRDLTRVMSRLKALYRGWAIPCAGQQVYAPHYRGEWLAKISEASVRRRAELYYLQFDTLAALRQGVRRELLAESRKHPATRLLRQIPSIGPIRAALLIALIQTPNRFRTKRQLWAYGGLALRTYTSGEYRFVSGELKRSKKVLAVRGLNLNHNHDLKNLFKGAATRAAATAGPFQNFYQACVARGMKPHLARLTLARKIAAITLLVWKKGERFDAEHLKQQAA

SEQ ID NO: 144459 - protein, 466 aa, unidentified
MQQPIEVQVDEHEPIVERVVGIDVAKASGMVCLRVPHETIPGRRVTKVWSVKATTRALVELGDHLRCQGVQRVVLESTSDYWRPFYYLLEAAGLTVWLVNAAQAKNVPGRPKTDKIDAVWLAKLAERSMVSPSLVPTEPMRQVRDLARARFDLVADRARVKQRIEKLLEDALIKISSVLTDIHGVSGRAMIEALIAGQRSPKALAELAKGRARARSAALQEALDGRFTDHHARLARLLLDQLDELTARIDQVTALLEAAITALTPPQADTDTPTGDSGDSGDSGDSGHSGDGAPAQPAPGRYARAVERLCAIPGGGPDSVRAVIGEIGLDMSVFGTHQRLCSWAKVAPRTVQSGRKTGRARTGRGNPYLKSALAQMAMGAAKTDTFLGERYRRLIKRMPKAKALVALQRSILVIIFHLLADPTAEFTDLGSDFYQRRIDRARRTTHLLRQLHALGYQVQLTETEAA

SEQ ID NO: 144460 - protein, 352 aa, unidentified
MKTQTTASLPKLYIGIDVHKKSWTFHHATDLFNGSTVTQPASPSTLVDWVDKNFKDYEVTVAYESGFSGYGAARYFLQHNWKVLVLNASDIPRPDKQKVVKTDKIDCRNICKQLKHGEVKGIFVPDEQQEQFRSLFRERDHLVRGLREVKNQIKSFLYYYGFTIPEEFDNANWSKSFIQWLNEQKYQFETGTMTWQLLLSRFEFMHRNKLQLSTAIRAYARKHYKKDYYLLKSVPGIGGIVAAAVLAEVGDLRRFTRFDQLASYVGFVPGIYQSGNNSQATGMTPRSKSLLRSYIVEASWQAVRVDQALQNYYRSHVGKLPNKIIVKVGRKLLSRMHAVIRTETPYQMGVIK

SEQ ID NO: 144461 - protein, 348 aa, unidentified
MLTTAFPKITVGLDVGDRQSRTCEIDASAQVVREAVVSTTTAAIAGYFAEREPCRVVLEAGTHSPWISRQIERLGHEVIVGNPARMYPHKRRKNDRRDASFMARQGRADPELLCPIRHRSAHAQEHLELLRARNQVVSVRTKLINHVRSAVKTAGARVGSSSAESFALRARSQIPPELRGALQPILSMILGTNEQIDALDREVSQVAREYPELSRLQQIPGVGELTSLAFVLLVEDPSRFERSRDVGPFFGLVPRLDQSSDSSPQLRISKAGDVMGRRLLISAAHYILGPHGRPCDLRRYGEAIAARGGTNAKKRAVVAVARKLSVLLHKLWVSGATYDPDRQLKRQV

SEQ ID NO: 144462 - protein, 336 aa, unidentified
MQINHFVGIDVSRDTLDFCVVVDGISHQHYCIANRTVDIGSTIKKIMRSSGSTFDDTIFCMEHTGIYNLPLIKWLQSHDAKIWMESGVHIRKTLGLVRGKNDKVDSMRIAMYAFINRHKIKFWKAPRKLIARIAALLSQRSRLNKAKKQLCTANKEQKLFMDKDIMSSLNIYTQKTVVVINKQILAIENEILSIIKEDEKLNRMYQIITSVAGVGFVTASYILVTTNEFINFNDPKKYACYSGVVPFEHSSGSSVRGKTRVSQMANKNIKTLLHMAALSTIKKGGDLQEYYYRKVVAEGKNKMSVLNAIRNKLILRIFACVNQDREYEQNYCYKLV

SEQ ID NO: 144463 - protein, 374 aa, unidentified
MRNASSGVATPEEAPSVGSLAPEPLGLLLSKIAFGSSTDPDGCLNTLVRIHKEGSQKMSKPNIKAAGIDTGKFNLDVAVHGASDTLEIVNAAAGHETLIDWLRARDIERVGIEASGGYEKPVTAALRRAHFVVIVLQPMQVRSYAGFELLRAKNDHIDAALIAKCTALSDAVRAAPDPRLEPLAEALTLIDQLGEDIARWKTRREGFHQAAPHDWASAEIKRLTRLRNLERRHLIQAIRDHKDLARRLELMLSVPGIAEPTALTLLIRMPEIGHLTREQIAALAGLAPYDHDSGRFKGQRRIAGGRARVRKALYAAAFPAAQRWNPQLVAFYKRLMQNGLKHKQAIVACARKLLIMVNAVIARGAPWIEHQTQS

SEQ ID NO: 144464 - protein, 360 aa, unidentified
MKRHHFIGIDVHCQFCEIAVVDAVGKVVCRDRCATTISTLLAVLEKVPRPRSLVIEEGSLAGWLWRGLATAVERMVVSEPRRNRLIAKGGDKDDDLDAEKLAQLLRGGYVKEVHQVKSLERAVFKQQVAMYHFRVRQRVRECLRLTWLFRQHGVMIREKDYANVKDRPALLARLPENAALRHMVTILCTGYDTLVEQEETWRKCLLQLAPQEKVVRRFQALPGLGWIRAATLYAYLDTPWRFRSKSALWKYLGIGLERHRSGNGPEQLQVPKLAHRLLKSTILGAALSAVLQGDNPFAELYRRWISKGLSSKLARRNVARALATTLWGLWKNGSAYHPKWVGVPAAAKAAARSRLGAAGC

SEQ ID NO: 144465 - protein, 423 aa, unidentified
MEERSRAWFVGVDWASQNHHAVVVDATGRKLGERSFRHGGEGLAALAAWILALTEAEPDTVEVAIEAPHGPVVETLMARGFRVHAINPKQLDRFRDRFSPAGAKDDSRDALVLADALRTDLRCFRRLQPLDPCVVELRECSRLLEDLRHDRNRLANRVRELLWRYYPAMLELDDDVAAPWFLDLWKRVPTPNKGARVRPETVERLLKRHRIRRLDADHVLDRLRQPAIATAAGTVGAATAHLEVVVERLRLVNRQIKDAEKRLDQLTEKLATATAEADSAATTQRDMTILRSLPGVGRVVLATLLAEASEALQRRDYHALRCLCGVAPVTKRSGKSKIVLRRQAAHARLANAVYHWTRVAVQRDPRSRQKYAALRARGHGHARALRSVADRLLAVACAMLAAGTPFDPAHPSKVIDGNSVTPC

SEQ ID NO: 144466 - protein, 375 aa, unidentified
MERSGIEKDFAKGKPICVGVDVHKRDWVVTVLCQGEELYQARVVPDPKALVRLLRGFKASEVHAVYEAGPTGYGLHDALVEAGFDSIVTPPSLVPRIGGRVKTDHRDSRKLVSMLAGGFLKRMHVLTPEERAHRQLLRTRNQIEHHRQHTQNQIKSLLLFHGKRVPTTLREHWSGAYVQWIETIEWDHPALKTSIGALLDLFRHLDGQYKTLTREIEVLALTEKYRERAQLLIRIPGIGIFTAMAILIELQDIERFRRADQLASYLGLTPSQRSSGERIRMGHITHCGNVHLRTRFVQSSWTLIRYDQAMRARYERIKHQTGSGKKAITAIARGLALRVRRVLLDNVEYKLDYCGTLGKERGQTGQFKRLVLRPA

SEQ ID NO: 144467 - protein, 447 aa, unidentified
MGQRTIGIDLAIRGDHVARIFDDGRPHAKPIRFRLTADSLGSLVSRLRDGLSGGSTITAVMEPTGMSWFPVAHWLEQAGIKAIRVKGQRVRALRRYLSEHTKTDAADAYVLGAIPLFGGVPADPVYVPTADRHALQRLTRQRERLENEVATIKRRLIDLVRWACPAIEGVLPDFRTNLALAILHDLFDPAMVTKARRTTLLGFIAKHASGSHPHTGPFADKLVDGLKAAAVETQRLHGAAVNFQHLQLEVVIEIDRMRLLETQLGKLGREIEALYSKLHPSDALRSIPGIGDSLAPLVLGVLHEVKRFAGLHQLRGFCGLFPRTNSSGGADQPGQAITQSGNNRIKRALYLAADAARRIDPGLAEVYWRLMVRKGHHHKQALCAVATRLVNRIGKVLRTGDAYELRDCAGKPITVAEGRAIIAEQFAIPVEIRNARRRHRMESLPSN

SEQ ID NO: 144468 - protein, 392 aa, unidentified
MVVSVGIDVAKDKHDCFIQSSEGEVLADVFTISNNMDGFHTLLEKIQACTASQDKIKVGLEATGHYSYNLLGFLLDNGLATYVLNPLRTNLYRKSLSLRKTKTDRVDARTIATMLLSDVGLKPYTNTAYHNEELKSLTRYRFDKVKERAKLKSSISRLVCILFPELEKLVSSLHLATVYALLEEFPGAKQIARAHLTRLKSLLENASKGRYKRDMAVAVRDAARNSIGSKMPAKSLELQHTIRLIQELDTEIDEIEAEIEAMMEEIHSPITTIPGIGCRMGAMILAEVGDLSRFDSSDKLLAYAGMSPSTYQSGQLKNCYPHMEKRGSRYLRYALYNTTKYVCLWNPTFAAYLAKKRAEGKHYNVAISHAAKKLVRLIFAMEKSKQPYRSVA

SEQ ID NO: 144469 - protein, 338 aa, unidentified
MKRYLGVDLHRNCFTVHTRQEDGSGESREWSIRSLKAFAKTVTANDAVAVEATGNVRLFCEALKGCGCRIVVVNPHQFQVISRSVKKTDKHDAKVLAEFLAKDMLPEVRMKDEAHARVASMAQTRDKLVKLRTTLKNKVNNLLAARGILIRKESLASEKGLAGVLAAPVSELEHLELEILVGEIRHLNESIKKLEGLLHGQRPKLPGWENLTSIKGIGDTGASILLSTIGKIEDFADEGKLAAYFGIVPRVSNSNETEHSGRITKRGCKLGRTTLVQCALIAARYSPYLQTHYRRIAAHRGTGKAIIALARKFLGIIYKTLKNNWIFEDFPNFVLAKT

SEQ ID NO: 144470 - protein, 447 aa, unidentified
MPREGFVSGGLVTEQSGFHSNQTKKTTMKAWNEIKHYAGFDWAKDHHDVIVLDAGGKTVAEFRFDHTAGGWDEFSKKLAAFPNVAVAVETNHGGVVERLLERGCCVFPVHTRSAKGYRQRKVPSGNKTDKIDAWSLADALRLDGAHWKQLAPQDPLTKELRLLCRDEVALIRDRSALITQLRQTLYDYYPAALEAFDDWTMPAAWSFVVSFPTPQVLVKAGKRKREKFLHVHKLARPATYQRRLEIFARAHQFAGSEATIRAKSKLAVARARQLQLLETQIAEYRQEIRRLFAQHPDAKLFGSLPGAGDKIAPRLLAEIGDDRALFSDAQGLQCLAGTAPVSYQSGQIHRVYLRRQCNKSLRNAVHLWANLSREFCPWAATYYTALRAKGKSHACALRALGQRWLKIVWKMWQTRTLYDADLHARNQLKHGSWVLQLVNQPAAVKAE

SEQ ID NO: 144471 - protein, 375 aa, unidentified
MSEITRGSMSAIVRVGVDLAKQVIQVHGVDSGGRRVVGRTLKRDQFAAWAAQLPPGCVVAMEACSSGHHWVRRLRSMGLDARLIAAHFVSPYRMEGKSGKNDATDAAAICEAASRPSMRYVPIKNCEQQGVMSLHRIREGFKKERTACVNRIRGVLAEFGLVFGKSPKVLRARLADVIEDAGNELSTTARLVVQRAFEHWRELDEHMRWCDSQVGQHVRGSAQAKRAAKVTGIGELGASALVAGVGEFKQFSSGAQFGAWLGIVPSQNSSGGKASLGRITKRGDDYLRTLLIQGAKSAVMSAGKRDDPTSRWLVQLTARVGWQKACVAMANKNARILWAVMTREQSFEPRHVSVKPQAKLPLKERAAPPAQTAVT

SEQ ID NO: 144472 - protein, 322 aa, unidentified
MNPSPSVELYVGIDIAAATFVAWWERSPGPPRRAQTFDQTATGIAALVTQLQATGMQPDHTLVGLEATSTYWIRVAVALHQAGYHVAVLNPKHVHNYAKSLPRRSKTDALDAQVIAQFVAERQPMPWNPPPAVYHELRQRLMARDALLEMRQQAVNQQHALSQWPVVVPAVTSRFETVMTTLDAELASLDAEIATTLTAGDWAVSAGLLLSIPGIGIQCAAWLLVTTFNFTLCDTPEAAVAYAGLSPLEHESGTSVRGRAHIGRGGNSRLRKVLYMAALSAGRWNPVLRPFYMRLRERGKPAKLAHCAVARKLVHLAWAVVP

SEQ ID NO: 144473 - protein, 310 aa, unidentified
MTSQVTVIGIDVAKETLSLCDAHTGEVFELPNEARAIKAWLKTLPSHCAIAIEATGIYHVLVASLAHARKHRIYLINGFRLSNYRKGIGGRNKDDRSDAQLLARYLSHEQAQLEPWQPPSKVYCRLQALLHRRAVLVRNVTSLRQSFSQDPMLARALKPVLKRMAVLEQRLETQIQLVLEEAGLKEQSKRCQAIEGIGPLTAAALILAFLRGHFRNSDAFIAFLGLDVRLKESGRYSGRRKLTKQGDPEIRRLLHNAAMAAARTKRWRELYQGYLARGLKTTEALTVLARKLARIAFALMQTQTTYQPRG

SEQ ID NO: 144474 - protein, 351 aa, unidentified
MRYAQVETEYYCGIDLHSRSMYITVMNKEGKIEFQRDLPNNFGIFETYVKPFLPDMAVGVESSCYYYWLSDACHEAGIPFYLGHAYYMKAINGGKVKNDRVDSRKIADLLRANLFPLAYPYPREMRSARDLLRRRHYFMRRRASTYSHLQVLCAQHGKIDLPTKAVKDKSSRRKLVKLFDDLDLQMIIASDLEFIESLDPIIAKLEWRITQQAKNHNHTDYQLLRSIPGVGEILALIILYETHNIRRFKTVQRYSSYCGVVKCERESGGKRIAAKNTKIRNPYLKWAFGEIILKAQNDERIAKLYQRLNSKYGRGRAKSVIAHRFAVAAYFMLKNKVAFDVERFCQSSKYN

SEQ ID NO: 144475 - protein, 327 aa, unidentified
MIAYLGIDVSKDTLDVFLVREDGKTENSQIANNSKGFKTLHNFLTKRVKTTLHACMEATGHYGDAIATFLYEAGYTVSVVNPLQIKSYGDSQLRRIKTDASDAALIADFCRTQQPPAWTPPPPELQELQALVRHLSALKDMRQQELNRTKSGISSPIVKDALVTHIAFLDDQIAQLLAKIRKHVKSFPGLREQRALLTSIPGIGDLTAFRILAELPRWESFSTPNQVAAFAGLAPRLHQSGSSVRGRTHISKRGSARLRTALFMPAIVAQTHNPVMAAFAHRLLAAGKSKMAVVVAVMRKLLLLAFAVLKSGRPFDPHYAARLEFAS

SEQ ID NO: 144476 - protein, 350 aa, unidentified
MNARTIAIDLAKNVFELAIADEAGKIVDRKRLSRSQLRRYFENYGAAHVVMEACGTAHYWGRWFSERGMQVSLLPPHYVRAYIRRNKTDRADATALLEASRANDIIPVCVKSVEQQALQGMHRVRSAWRGTLTARLNALRGLCREFGIIAPVGARRGLAELVQRVADESSGLPRIIRTVLQGVIEEVRAIQERLRQLELELAAIAEQSAVCQRLRKIPGIGLIGATAFAGSIGDIRSFRSPRRFAAWLGLTPREFSSGNIRRLGSISKRGDGYLRMLLVHGARAVLYSANAAQRAGRPLDALREWGLRVRSRSGHNKAAVAVANKLARIIWASWYRQRDFEFRPPSPATH

SEQ ID NO: 144477 - protein, 358 aa, unidentified
MRIIGCDLHARQQTIAMLDTDTGEFVEKTLEHDGEELRKFYSGLTRPVLVGIEATGSMQWFLEWMEELSIECRVGDPAKIRAAEPRKQKNDRRDAQLMLKLLSENRFPTIWMPSTEQRDLRTLLRHRHQWVRMRTRVQHTLQSMALNHGLRRGHSLWNQAGQQALRALPLAPHASERRKALMTLYPRLQESIDELDREVSQQAQNHPAARRLMTHPGVGPITALATEVFLGDPLRFTDGKAVASYIGMIPREHSSGGRQRLGAMSKQGNALLRYLWCEAAMHAVGRDPQLKRFYRRKLVQKGMGKARVSAARKLGIRLWIMMRDQIDYQEFCRRGKARQESGSVCAGMSDITNGPAEA

SEQ ID NO: 144478 - protein, 347 aa, unidentified
MQFYTRQHQHYCGIDLHARQMYLCILDAAGKVCFSRNLECTPQAFLAAVKAFREDLVVAVECMFAWYWLADLCEREGIAFVLGHALYMGAIHGGKAKNDKIDAHKIAGLLRGGMLAQAYVYPPRMRATRDLLRRRCHLMRKRSELITHIQNTVSQYNLPPLEHRIQKRCEREGLLSHFPDPQVRNSIALDLAMIEQYDALLPKLERHIRACAKEHDRKAFTLLRSIHGADLILPLVILYEIHTIGRFPRMQDFLSYCRLVKPARESAGKLLGHAGGKIGNAHLKWAFSELATTFLRANPPAQQLHERLKKQHGKGKALSVLAAKLARAVYFMRKRGHIFDPDKFYRD

SEQ ID NO: 144479 - protein, 350 aa, unidentified
MNSTHPVIIGIDTHKATHVAVAIDTQGTRLAALSILTNPKGYLELERWSRSLGQVLAFGIEGTGSYGAGLSRSLLAQGHNVIEVTRPNRQLRYTQGKTDSLDAEGAARSVLSGQAKALPKTQTGSSEMIRHLKIARDTAVKSRSQAMVTLKTLIINAPADLRDTLDQIRGKVALIRCIAAFRPGDIIDTIASAKAAMRALARRWLSLREEILEHDKELERLVRERAPNLIESHGIATLTVAEMLILVGDDPTRIRSEAAFAKLCGVCPIPASSGKTHRYRLNRGGNRQANAALYRVAIVRMRNHEPTLAYVKKRTKDGMSKSEIIRCLKRYIVREIYSQLCVRKLADIAA

SEQ ID NO: 144480 - protein, 373 aa, unidentified
MEKVSTYVGLDVHQHEIVVSMLNGRREAVEWTVVPDCRGVSRLVKKLKREAAGQIEGAYEAGPCGYALQRQLRAAGISCQVVAPSLVPIKPGERIKTDRRDARKLAEHLRAGLLTAVHPPSEADEAVRDLCRCREDAKEDLMRVRHRLSKMLLRRGQVYRSGSNWTQRHREWLGRQRFEHAADQAVFEDYLLAIEQLEERVVGLDERLAELAASDPYRERVGWLRCFRGIDTVAAMTILAELHDFARFHSPRQLMAYLGLVPSEHSSGQVTRRGAITKSGNRHVRRMLVQVAWHYRHRPAVGVTLRKRRHRQPAAIIALADRAQQRLHRRYHRLVLAHRKPHQKAIIAIARELVGFLWAALYLYPRRQEAAAA

SEQ ID NO: 144481 - protein, 349 aa, unidentified
MTDIIRIGLDTSKSVFQLHGVDRSERPVLRKQMARREMIKFFEKLSPTVVALEACGASHHWARKLSALGHEVKLIAPQLAKPYVKRGKNDAADAEALCEAASRPTMRFVPTKTAEQQASLMLVSMRARLIKRRTQLSNAIRGLAAEFGVIAAAGLCRIEPLLKTIAADETLPALARELFALHAKEFAALADEIKLVEEKLMIWHRSDECSQRLAKIPGVGPISASLLMMKTPDPQLFKSGRDFAAWMGLTPRNHSTAGKARLGVITRAGDTPLRAALVVGATAVLRHVRQTGGKNASPWLLELLKRKPPKLVAIALANKIARIAWKLMVTGETYKWNTARPNLEAMASA

SEQ ID NO: 144482 - protein, 343 aa, unidentified
MPHYVGLDVSQKTTAICVVDEQGRRLWRGVCATDPEAISARVLRHAGVDAKVGVETGSMTPWLVHGLRSAGLDVACLDARRVKAALQMRLNKTDENDAEGLAQIMRTGWYRPVHVKSLDAHRARALLGARAQLVGMTTRLSNMIRGVLKTFGVLPGAGRGLRFDHRVEALLDDAPDIALIVRPLLVSWRQLREQIAVFDKAVRRQVGIDPICRLLMTVPGIGALSSLMYVSTIEDPGRFSRSRAVGAHLGLTPRRYQSGETDRSGHISKCGDGLARTLMYEAAIVIRHRVKRSLHLKDWAEAIERRSGPGEARVALARKLSVILHSVWRSGEPFRWAPKATVA

SEQ ID NO: 144483 - protein, 344 aa, unidentified
MDHYAGIDVSLECSSVCVVDASGKIVREAKVASEPEALIGWFGSLGLGLARVGLEAGTLSQWLYAAMKQAGLAVELLETRHIYEAFKSMPVKSDRNDARKIAQLMRLGWFRPVHCKSIAAQEIRAMLTARKLVQSKLLDVENSLRGILRGFGLKVGKTTRTNFAGRIEELVRGHPNLQTIGEALLRARAVLLAEFNRFEKRVRAMSRLHEKARLLMSTPAVGPIVSLTFACAIDDPSRFTSSKQVGPHFGLTPKKYQSGETDYTGRISKHGDASVREALYEAAHIMLTKPLKGCPGLKSWAMRIARRAGTNKAKVALARKLAVIMLRMLKDNVPFNPAAKAATA

SEQ ID NO: 144484 - protein, 362 aa, unidentified
MNATSTAAVVGVDLSKNVFELAVADEQWRVIERARLSRNQFERWFANRAVGRVVMEACGSAHHWGRWLAGLGIEVRLLPARYVRAYVKRNKTDAADAAALIEASRADDLLPVRVKSIEQQALQALHRSRSAWMATRTARINTLRGFCREFGITISQGSRLGLEQMARQLADPTSSLPALLHPTMRLLIEEIRLLETRISQLEKELAQLARQSPACATLLTVPGVGLLTATAMVAATSGEVTHFKDARHFASWFGLTPKESSSGMTRRLGSISKRGDRYLRMLLTHGARSVLRAATVADRQGRAVDELRRWALTVQSRTHHNRATCALANKMARICYAVLRDHANYGGVRIDRKMRQTYALPS

SEQ ID NO: 144485 - protein, 412 aa, unidentified
MELLHRRCCGLDVHKETVVACLRLVSDGKVTTEVRTFQTTTADLLRLSEWLAANECTHVAMEATGVYWKPVWRILDDGEFALVLANAAHVKNVPGRKTDINDAMWLAELLAHGLIRASFVPDAQTQEMRNLLRTRKQLVREQSSHVLRVQKTLEDANIKLDSVLTDLMGKSGRAIIEALIAGETNPVKLAGLADRRVKASFEEFREALRGRVTKHHRFLLRLHLNQIDALDAAMATLDAQVEANLGPFRTAVELIGSIPGIKNLGAHVIVSEIGIDMSRFPSAAHLISWACICPRNDESAGKRRSNRVRKGGTWLKTTLVQCAWAAVKKKDSYLQAQFHRIKARRGPKKAIMAVVASILTAIYHMLKDGTMYKDLRRNHFDRCSSDQQKNRLVKRLVDLGYAVEIKPLAATA

SEQ ID NO: 144486 - protein, 360 aa, unidentified
MISERTSVGLDVHARSVVATALDSVTGEVFKTTLVPAHEEVIGWLRGLPGPVATTYEAGPTGFGLCRALTAAGIRCEVVAPSKITRPSGDRVKTDAKDALLLAQLLQVGQITGIRVPTVSEEAARDLVRAREDIRGDLMRARHRVSKLLLRHGHVYYGGKAWTGGHARWLHQVRFDQPGTRAAYEADLESVEFALARRDRLDAAITAMAADSEFTPVVRKLCCLRGISTLTGFALAVEIGEWERFTGSGIGAYLGLVPSEYSSGQSRRQGGITKAGNSHVRRLLVEAAWHHKPRYVVGKVLQARWDQAPAAARTRAHLGNQRLHHRWATYTARKKKHTVATTAIARELAGWCWSLATLPD

SEQ ID NO: 144487 - protein, 408 aa, unidentified
MGRVAEVVAPSSSTPTDGGCPVLQVNDLSRSLVAFDPISTLMVVVEMSKASWLVRSVVPGVERQPLKKLEPDATALLRLIERWRSEAVRAGRPISRVALAYEAGRDGFWLARWLIARGIEAHVIHSASVAVSRERKRAKTDRLDTAMLMRVFLGWLRGERGHCGMVAIPTMEEEDARRPSRERESLVNERSRIINRMKSALARLGIRGFKPHLRRAPERLACLRTAEGTGLPANIIEELRRDMARLALVREQISSIEKTRVERLARAPDTGPHAMVRLLSRVIGIGIETADMLVREILSRKLRDRRALARYAGLTGSPDESGLKSREKGLAKAGNARVRRGLIQLAWRFLMFQKDSALARWYRVRTEGPNGARKTTMIVALARKLLIALWRLATTGEVPDGVELRPAA

SEQ ID NO: 144488 - protein, 338 aa, unidentified
MAIVFVGIDLAKNVFAVHGVDEAGKAALVRPAVPRGRLLELVAMLPPCTIGMEACSGAHHWARQMQAHGHTVRLMAPKFVAPYRLSGKRGKNDAADAAAICEAVQRPNMRFVPPKSVEQQARLMVHRARQGFVEARTATLNRIRGLLSELGIVLPLKASTVRSQAAERLEELPGWANTVIGDLLGEVKRLDQRIEEYDRHITEMARQDERVARLMRLSGIGPTTATALIATIGNGHEFRNGRQLSAWLGLVPGQYSSGGKVRLGRITKAGDAYLRSLLVLGARAMLNASVGKTDSLSRWAQALVQRRGYWKAVVAMAAKNARMAWAVLSRGESFELPG

SEQ ID NO: 144489 - protein, 331 aa, unidentified
MQQIAWCDNRSGAQGERRLEHASGEAEKFYRELKQRGVQVRVGLEASGHTRWFERLLAELEMELWIGHPAKIAAQRVRKQKTDRGDAQLLLQLLQEDRFPKLWIPSPENRDLRQLLWHRHRLVQMRTRVKNQLQSIAMSEGVRRQSRLWSKPGRAQLDSLVLPPWTARRRHDLLQLLDQLTPQIAELSQAIEQEAERRPEVLRLMTHPGVGPITALAFVLVLGTPQRFRCGKQVGSYLGLIPSEDSSAGKQRLGHLSKQGNTLLRYLLVEAAQSAVRCDAEWRRRFVHLAMRRQRNIAIAAMARRLAVSLYWLWRKAEDPPAAPQSGSHVG

SEQ ID NO: 144490 - protein, 392 aa, unidentified
MRFTHERSDYDRLVEFLHGCSQPCRVALEPTADYHRTIAYRLISEGFDLVLVSSVAGARLREAVFNSWDKNDPKDAQVIMRLLKQGMTQRYCDPLLMRTHDLQELSKTYQHISRARTRLQHVLLTHYVTLYFPEIERFWLPQRNGWFIRLLIQFPTPASIAALSVEEFRDRVWKSMGRRVHKEAKIQQIHALATRSIALPIEADSPAVATFRLQLERYLQLCQTRDALERNADELLSENSDYQRLRTIPGIGSIIALIILAEAGDLRRFGHHRQFLKFCGLDLAKSQSGASRSRDQLSKRGNARLRCALWMAAMTAVRMRENAFRDKYRRYIARAPEDLDLNRKARTAVAAKMARVVYALIKHGQPYRHRFDAGLPSGSIPLTRAVEAFGTS

SEQ ID NO: 144491 - protein, 400 aa, unidentified
MSGLKGSFDVFVGIDVSKDKFDACGITGNEVKLFQFSATMDRKGFEKLKGHLAAGSISSVLIGMESTASYHVNLFSYLVSEGYRVLLINPLLISNYVKMQLRKTKTDKKDAVVIAQFLLTNGDTLIQRATPSLISDLRDLSRQRESLVDEMTSLKIEIKQLLNITFPELEHMAGIFTKSILKLVQQYPSAFALRDANLDQLSQMLIADSYGHKREAFAAELIKAAHSSIGSKSPAKEMILKQKIALLIHLEDALQEITDMLIEMSRKLMEEEINIMTSIKGIGDKSAANFLIEMGGNINQFERSGKIIAMAGLDPAVYQSGKHEGKGRITKRGNRHLRRIIWMMTTRVIQYSDIFKVYYLKRRKEGLPYKMAVLATAHKLIRVIYAMLTQRTTFCPQVNS

SEQ ID NO: 144492 - protein, 318 aa, unidentified
MSEPVYVGLDVAKATLDVAVRPSGESWQVPNDDAGVTGLVVRLRALGPALIVCEATGGFERTAIVALAAAGLPVVVANPRQTRDFAKGTGQLAKTDRLDAAVLALFAERVRPTPRPIPDEAARLLDAVLARRRQLLEMLTAEKNRLGFAPRPLHKGIRQHIRWLERQLDDVTRDLADQIEQSPVWRAKDDLLQSILGVGPIVSATLLGELPELGALGHKQIAALAGVAPLARDSGKLRGKRMVWGGRASVRTALYQAVLSARRWNPQIRAFYARLITAGKPTKVALIACARKLLTILNAMIRDNACWRVPELSIQHSC

SEQ ID NO: 144493 - protein, 357 aa, unidentified
MGPQAKTKESAVNHAAIDLGSKESQVCVRGADGAVLYERKHPTKELELLMKSWSPSRVVLETSSEAFRVADAARAAGHEVRVVRATLSKQLGVGERGIKTDLRDARKLSEVSTRIDLPSVHIPTAEARELRSLVRSREMLISSRTRLVNHARGWLRTMLLKIRRGATATFPDRVRAVATQQSHPVPQHIEQVLLVIDALNVQVLASDRQMRKLVKANELCRRLMTVPGVGPVTALSFVAAIDDVSRFEQAYRLQSYLGLTPGEDSSSERQRRTSITKAGSTSVRRTLIQAAWAAYLRRPDEPMVKWATQIAERRGKFIAIVALARKMAGILYALWRDKTSYRSEKSAQLAATEVFTQ

SEQ ID NO: 144494 - protein, 355 aa, unidentified
MHSTLIINFICKDMKDLSTLQHFVGCDISKDTLDFALYERGKDYRTFEHIQVPNSPDGFKTMRKWLRTLKVRMKDAVIAMEHTGSYSMALSEWCFGKGITFVMLHPLDVRNYGGTSRNKTDKADSQFIADYAYTMREKLKPSVPESANIKQLRQLRNERQLAVRSRTAYINLLKSMPDNVDTRRIEKIIKEFEAQIKQIESEMNTVISRDKAILANYDLLLSIPGIGLVNAVTTIIATGNFTRFQTARQYAKFCCVAPLSRQSGTSVAKGDHVSKAGHNEIKSVLTEGARSAITHDSQIRAYYERKKSEGKCHGCILNAVKFKLICRMFAVVSRQRPYVDVEAYRSRTVKSADSA

SEQ ID NO: 144495 - protein, 341 aa, unidentified
MKLIRVGVDLAKNVFQVHGVGDHEKAVWRRKLTRASWLKVLLETAEPGCEIGMESCGGAHHWARQLQAHGFKVRMIAPQFVKPYVKSNKNDANDAEAICEAMSRPHMRFVAVKTVEQQDIQAVHRVRAELTKQRTAKANQIRGLVAEYGLVAPKELEHLRRALPCWLEDMENGLSERFRRLLNGLWGDLQALDERMAELDREIAVIAQNDPVAKRLQQLRGVGPIIATALVAAVGNGEQFANGRQLSAAFGLTPRQHSSGGKERLLGISKRGDVYLRVLLIHGARSVLRTSKDKADRLSQWVTRLAARSHPNVAVVALANKTARMAWAMLKNGTDYQPGTS

SEQ ID NO: 144496 - protein, 384 aa, unidentified
MSKVIFEACGIDVHKEMLSICLTNRELTRTRFFEIPNQGDAIRELIGILKAHRVQQVAYESTSIYWLLLHDLLEPQFDCTLVNSRQVKAIPGRKTDAKDAEWLATLIAKQLLKKSYVPPIQIRQLRELCRLVRTLKAEQNRFLNRQIKLLDQWNCNFLTAFSKPETRTCQYLLLGLAQQHSWEELVAQAPTQRIQNELHHKQSQLKSKLMTDLPAAARLELQVIRRIITTHQEEIDRLETEIEVQASTLNWEPQIELIASIPGIGKQSAIALYSEFGEISKFPTPSHLVAWTGLAPSVYQSAGKQYTGHITKQGNRHIRYILYNCVVPALRDKSTDLSRFYQRLRKLKPSKVVKVALMTKILRIIHHLLTSGEFFLARPLKLKS

SEQ ID NO: 144497 - protein, 339 aa, unidentified
MKYYSGLDISLKETFISIVDEKGKIVKEEVVASESSAIAEFLLSQSREYESIGIESGQLSISMCKELRSFGLPVICVDARHMAAALSARINKNDKNDARGIAQMMRAGLYKEVLVKSDESCQVKVALGSRRQLMYCREQIMGTIRGLLKIYGIKLGKKSKIVIFSLKVQEAIKDLDKVSKDSIEALVCSLEIIEESIKKLDKILSEKGKKDEDCKLLTTVPGVGIIVAMTYKATIDNPHRFETSDTVGAYMGLTPRQYASGEVNHHGSISKMGPVECRNMLYEAAHTILTVSKKKFKLKSWGIKLAKKKGIKKAVVALARKLAVIMHRMLVDKTEFYYQ

SEQ ID NO: 144498 - protein, 348 aa, unidentified
MNQVTTIGLDIAKSIFQVHGVDAAGRPVLRQRLSRSRVLEFFGRLPRCLVGLEACASSHYWARELIRLGHEVKLMPAQYVKPYVKRSKNDAADAEAICEAVARPTMRFVGVKTTEQQSIMMLHRVRLILMRQRTQLSNALRSHLAEFGIVSPIGREGLDRLLKIVADTDDARVPAEARASLDMLAAQLEGVKAKVLENDRRIISSARATEVGRRLLEVPGIGPVLASAFVASVADPAIFKSGRDLAAWIGLVPRQNSSGGKERLGGITKAGNRYLRQMLMVGAMAVIRYAQRNSARRPWLVQLMGRRPAKVAAIALANKTARTVWALMTSGERYRDPQVVQAAVLATA

SEQ ID NO: 144499 - protein, 332 aa, unidentified
MKFSETIGIDVSKSWIDARMHLARQEKRFDNTTVGYKTLIAWIAKHGQHPKESILFAFEHTGLYSYNLSVFLSSGGYHYILIPSIEMRRSMGMARGKDDRIDAAKIALYAYRRKEEITPYKMPEIIIFRLKHLLALRDRLVVQRGGYQASLKESSCFLKKNQDPEFFKIHDQMIHLLNKKIDKIDQSLNSIIRQDEEMNHIFQMITSIQGVGAQTAYYMIVFTHGFLLFADWRKFASYAGTAPFPYQSGSSIRSKAKVSHLANQKIKSLLHACAMTSIIYNPEMKAYFNKRTESGKSKMSTLNIIRNKLIARIFAVVNRGTPYVNTCKFASE

SEQ ID NO: 144500 - protein, 420 aa, unidentified
MKQWKEITHYAGFDWARDHHAVVIVDSQGQMVADFEFDHSMEGWQSFGEKIAPWPHLAVAIETSQGAAVDQLLQRGYTVYPVNPVASESYRKRKAPSGTKTDHIDGWGLADALRVDGQGWKPLQPLDALTHSLRLLCNDEVSLIQQRTQLVNQLQQALVEYYPAALQAFDDWTSPCTWDFIIAFPTPEALEKAGKRAWEKFLHTHKLWRPQTVEKRLAIFAQATQFKASAPIVRAKSQLAVCLCKLLRTLAQQLAQYREQIETLFKEHPDHALFGSLPGAKKVLAPRLLAAVGSDPARYGKHQVLQSFAGTAPVSYQSGQIHKTQMRRACDKLMRHTVHLWADCFRKASAWGQTYYQTKRKKGMSHACALRCLGQRLLKILFRMLLDKKPYDAELHARNQQKHGSWVLKLIEKPVAKPGE

SEQ ID NO: 144501 - protein, 354 aa, unidentified
MPKTASAQIAVIGIDIGKNSFHVVGHDKRGSIVLRQKWSRGQIEARLANLPPCLVGMEACVGAHHLSRRLKALGHDARLMPAKYVRPYAKGQKNDFNDAEAIAEAVQRPTMKFVATKTADQLDLQALHRVRERLVSQRTGIINQIRAFMLERGIAVRQGIRFLRTELPIILASRTDMLSPRMLHVIEDLAGDWRRLDERIETLSREIETIARQDAGCDRLMSVPGIGPIISSAVVAAIGSGDVFSKGRDFAAWLGLVPKQISTGDRTILGKISKRGNRYLRVLFVQAAWVVLVKPMSWERHGLKSWIEAAKKRLHHNVLAIALANKLARIAWAVLAKGRGFEATRTIDGSTQPA

SEQ ID NO: 144502 - protein, 349 aa, unidentified
MALTIVEDTRAVTGGVDTHADTHVAAALDPIGGLLGVEEFPATAAGYARLLGWLGGFGTVALVGIEGTGSYGAGLARHVTAAGIRVVEVDRSDRQDRRRQGKSDPLDAVSAARAAQSGRARGAPKGRDGAVEAIRALMVAKRSARSERTQTINQARALIVTGPDDLRTRFTGHTVAGLVSELAALRPRPGDVVGYATRIALRELGRRAEFLDGQLERLDELIVSLVTARAPALLALHGVGPDTAALLLIAAGDHPHRLRSEAAWAHLCAAAPIPASSGKRTRHRLNPGGNREANHALWRIVITRMSSHAPTRAYVKRRSEQGLSKKEIIRCLKRYVAREVYRHLRAADG

SEQ ID NO: 144503 - protein, 346 aa, unidentified
MDHYAGIDVSLECSSVCAVDANGKIVREAKVASEPAALIGWFRSLGFDLARIGLEAGPLSQWLYAAMKQAGLAVELLETRHVSDAFKAMPVKSDRNDARNIAQLMRLGWFRPVHCKSMSAQEIRAMLTARKLIQSKLQDIENSLRGTLRGFGLKVGKTTKRSFASRISELVAGHPALETIAAAMLAVHMALLREFNGLEKRVRAMSLLDAKAKLLMSTPAVGPVISLTYASAIDDPSRFTSSKRAGPLFGLTPKKYQSGETDHSGRISKLGDASVREALYEAAHIILTKPIKRCSALKSWAMRIVRRAGMNKAKVALARKLAVIMLRMLKDNMPFGPAAKAAAAAP

SEQ ID NO: 144504 - protein, 425 aa, unidentified
MNYKQNEKINQVKESTLVVGIDIGSTTQYARAFDWRGIELGKVFPFSNSREGFESFKAWMQHLQDKYRKSDAIVGIEPTGHYWFDLGAYLEDEGILLVMVNPYAVKQTKELDDNSQSKNDRKDPKVIAKLVTEGRYSAPYTPDGVYADLRIMVANRKRLIREMTQIKNRFARWFAIYFPEYTDVFGDYEAQSSMLLLKKVCTPEAIVELGAEKINQIWRDAKLRAVGMKRATTLCETAKRSIGLKKGSSAARYEMKLLLEDYEYKKAQLDAVMEEIEKLCRKIPESEQMLAIKGIGVITVAGFLAEVGDVRRFESPRQIQKLAGLSLRENSSGKHKGQTTISKRGRSKLRAVLFNAAIPLIAKNPEFKSLHEYYTTRANNPLKKKQSVIAISCKLIRVFYAILANGVTYDAQKMLSDIHRQPQAA

SEQ ID NO: 144505 - protein, 344 aa, unidentified
MELFTLGIDLGKTTFHLVGMNQRGEVVLRKRFSRAQLLHFTANLKVELIGMEACGGSHFLGRALREQGHEVRLIPAQYVKPYVKTNKSDYIDAEAIAEAVGRPTMRFVPVKSDDQLDLQSLHRVRERWVMRRTAVVNQIRGLLLERGTTLRKGRRYVDEALPGIIAGGSGKLSGAVLELLAELKQELEQLAEKIDRADKSVEKIARENEACRRLVKMPGVGPVTATAIIATIGNGTAFRKGRDFAAWLGVVPEEHSTGGKQTLWKIPRRGNQYLRRLFVQGARAVMQHRTKQSSGLSAWLAQLSARTHQNIAIVALANKLARMAWAVLAKNEVYRPPLLAGNTI

SEQ ID NO: 144506 - protein, 320 aa, unidentified
MMAQNDQIVVGIDVAKDKVDACIRTLSLRNTFPNIAQGHRKMIAWLHKHKVNKAVMEASGGYERDWAKVLRQAGIEVRIVDPKRVRSFALSAGRLAKNDAIDAEMIAWFAETFSAAPGQPHDAVREELLALVKARKRLLDLQTRLKNQNEHAAPEAVQKTHARILKSLAIEIAKLEAAISTKVKATPEFADLAEIIESVPGLAETTSAVLIAGMPELGTVSKQIAAALLGAAPYDDDSGKRRGERHIKGGRRWVRNAIYMPCLGAATQNNPVLKAHYQHLIAKGKEPKVALVACMRKLIIILNTMIARRQKWDPSRYALN

SEQ ID NO: 144507 - protein, 397 aa, unidentified
MDSLESIRLEQFRQFQKEIRGSEQYLIVGLDIAKDSHHAFFGTATGRTLWKRWLFDNSQEGFQKFLLQTEALQVRHGLPQVVFGLEPTANYHKPLGEHLIRKGYQVVLVSGVAVKRNRELLDGRWDKHDTKDAANVADLISQGKCLYYEHPEQRIRDLRLLLSLKKRLKRQEQGLRVRIRNGLVAQYCPELDPSFSRLIASGKESNLLSAIREPISPIGCEVHPAVAFVAQLMVKQLQQIREVLGAVQGKIQALCSQFPEYPYLLSIPGFGPEISSQVLGAIGDPCRFQNGKQVLKMAGLDLSADRSGKTSERARPVISKKGKADLRYALYQAAFIASIRNAAFTAYYTQRLKARGQEPGIQAKRRVKLAAKLLLIAWTLMKRKEAFDPERLIPSVL

SEQ ID NO: 144508 - protein, 431 aa, unidentified
MNRSVEFLSVGIDVGADFSLMAFALPSQEPLGKPYKIIHSSQRSLNGAVEKIKTLSQKYQLPARVFMESTGIYHYPLYHKMKDAGFDVFVLNPLVTHAGRDLNVRNIHNDKYDSQKIALLGLRPGLKTSLIPSDQVISMKVILREYYAVKKEISMYICRLKNQLRQAFPQFLPLFSKVNGVTAMAILCEYPNPESLLNAGEHAVADFMKSVSHNGPLKVQKKAAALIQAAQDARSFGHWNHGISILIRHYIEMIRLLDVRAKTLLAQAKALLAEQDSKTLAHQTELLQTIPGIGFLSALTLICELGDFSAFKRPKQLFSYFGLDPIVRQSGNYNGANLKLSKRGSPFARRCVFVIALQSISLNIHKEPKNPVLRTFYEEKCMCKAKMTAIGAVMHKICNLIFAVLRNNAPFVLQTPEQHNAAYLSKTHSVA

SEQ ID NO: 144509 - protein, 344 aa, unidentified
MITIGIDPHKSSLTAVGLAPDGQALASVRLPVSTATLEELLAFARAWPDRLWAVEGATGLGLGIAQRLLAHGEDVVDVPATLAARARVLSTGHGRKTDVHDAIAVALVAQHHRRLRSVQPEDLSSVIRLVSDHRDDLVHEHTSGLNRLHRLLRELIPGGAPTGTSSRQAAALLGKVRPATAADTARKQLVRDLIGGLRALEARIKTLTDQLATLVAQSGSSLTEVAGVGSVVAAKIIGHTGDVARFPDTHHYASFNGTAPIDASSGDHSRHRLSRRGDRQLNAAIHVIAIYQISHPGPGREYYLKKLAESKTVKEARRALKRRLSDTVYRRLSHDHEATQTVAA

SEQ ID NO: 144510 - protein, 359 aa, unidentified
MKSKNTNLTFEGQKVYVGIDVHLATWKVTILLELLTHKTFSQDPDPITLVRYLERNFPGAEYYSAYEAGFCGFSVHRSLESLGIHNIVVNPADIPTTDKERKQKEDKRDSRKIARSLRNGELQAIHVPSRELEELRGLVRYRKTLVKEISRHKTRIKSFLHFNGIKVPGELVSASNHWSANFSNWLATLRLTTSYGHSVITGTLGTVTHLRAILLTTTRQLREIAKSGAFGQRVTYLRSIPGVGLVVSMTLLCELGDITRFKSLDHLCSYIGLVPTTNSSGDKNRTGSITPRSNKPLRGVLIESAWVATRNDPALALAYHNLCKRMRPNRAIVRIAKKLLNRIRFVLRNQTEYEHAVLQ

SEQ ID NO: 144511 - protein, 416 aa, unidentified
MKIVRPICCGMDVHKNIIVATIGITNKKTRITEYIQETFSTLNPDLLNLKQWLINHKCFDACMESTGKYWIPIFNILEDEINIYLTHPKYVKAIKGKKTDKKDSKWICDLFKHDLIKFSFIPPKEIRALREISRYRYKLVGMRSSERNRYQNCMTVSNIGIGSVFSDPFGKSAQAIMKEVLESDIIEDEKILKCIHRSCKNKDKILDSIKHCNIETDQRFKMNESMTHMEELQVHINNCEIEMMKRAAPMFDRFMHITQLPGISTLSAILIISEIGVDMKQFESDKQLTCWAGLAPANNESANKKKSVRISKAGQYLKPLLVQCALGAIKDKEGYFGIKYSRIKKRRGHKKAIIAIARMMLVSIYHMILTGETFNPSDYESFRNPKPPIKQQVLTEESAIEFLKKSGFDISKLTKP

SEQ ID NO: 144512 - protein, 367 aa, unidentified
MTIVAQAHPFVVGVDTHARTHALSILATPHGEVVDDGEFPATSAGMARAIEWAGRRTGGDLEVLWVIECAATYGAQLARAVSAAGYQVVEAARMNAKANRGIGKSDPLDARRIAAAVLPVQVDRQRHLRKDDGVRAGLRILMAARDHMTSERTATINALTALLRVLDLGIDARKPLTGKQIAEIAKWRTRTEDIQAVMARAEAVRLAKRTLDLDDELAANVKTTTALLKDSPARVLLDKPGIGPVTAAVALTAWSHVGRLHSEAAFASLAGVSPIPASSGNTVRHRLNRGGDRRLNKALHMAVIVRMTHDAGTKAYVERRVAEGLTKREIRRVLKRYLARQIHRALTAASRADDIAEDTIAGTPLSD

SEQ ID NO: 144513 - protein, 421 aa, unidentified
MRGLRAKRVRAVKEGTLIVTVDIGVASNTGYCATVDGRDAKTFTFANTREGFEKFWHMIVASKSRFTCNEVIVGYESTGPYAEPLVHFLGNKPVRIVQVNPMHTKRMKEVNDNSPLKTDDKDPRVIADIIRLGRALSVIVPEGDTAYLRRLNNARERHIREQTALLNQLQQLVFLIFPEFMSVFKDMKGKTARGILRNYTTPQRIGAIDRDKLGDEMRKQSMGRFRRKDAEHLISLAQNTVGIKEGLAGITLDVHHILMQLEAEARFIGEIETEMAETLERIPFSKRLLSIKGLGIVSIAGIIGEVGDFSKFKTQSEIMKLAGLDLYEISSGKRKGQRRISKRGRSLLRKILYYAAIQMIRKNGIMHRYYTRLTSTGMLRIMALVAVARKLLRIIYAIVRDNRDYVGEYQAPTRRVIKRAA

SEQ ID NO: 144514 - protein, 443 aa, unidentified
MTELVNGKAPEPDFAAFVGIDWADQKHCWKLLVTGTQASESGELKQTPEELSQWATTLYHRFGGRPIAVALEQSSGALVYQLSQYPHLWLYPVHPATAAHYRQAFYPSGSKSDPADTGLLLELVVHHRNRLRRLAPDTPETRLLRMLVEQRRRVVDEKTRWNNRLKAALKMHFPEVLDWVDIDTIMGCDLLERWPTLQQLQHAHPGTLRKFFREHKCRSESLIPERIAAIYQATPAVKDAALLEGEAAIAATCVAQIRTLLASIAKLDHQIQPLASQHPEASLFAELPGAGAALQPRLIAAFGTQRDRYANAGELQAYSGIAPITASSGHSRWVHVRWACPTFLRQTFHEFAGCSISRSEWARVFYDTKIAAGKSHHAAVRALAYKWIRVLFRCWKDGRPYDERTYLQRLAERNSPLNWGAGASTKPVWKTVGGFKKLSTENS

SEQ ID NO: 144515 - protein, 425 aa, unidentified
MPYKIAGIDVHKKMLAVVVADIEKDEYEFERVRFGSAPEELRRLCSWLLEQGVEEVVMESTAQYWKPVWGYLERFWKPRCQPGEEGNGRAGVLHLAQAHSNRGRRGRKRDFPDAERLVKRLVAQELVLSFVPEPTQRLWRTVMRRKQQLIRNRVQLQNRLEALLEEAHVKLSSLVSDLLGASARRMLKAMAEGEKDPAVLAAMADKRLRATAAQLCDALEATSELNPVYRLLLKMVLEELALLEQQVGQLEQEMASLLRPHEDEVKRLAEVPGFGVDSAQQIIAEVGAKAASFPRKEQLSSWVGWCPGEEESAEQNKNGRSPKGNRNMKRILNQCANAAVKVKGSIFELLYHRWIVRLGHKRTIGAIAHKLSNIIWLILHRGVRYEERGPAVSQKARQARTTKMIKELRKLGYRIELSNMQPAVS

SEQ ID NO: 144516 - protein, 337 aa, unidentified
MKYSGIDLHSNNSVVTVTDETDRVVAERRLPNDISKIIGFLLPWRDELAGVVVESTYNWYWLVDGLQGAGFQVKLANTGAIKKYDGLKHSGDEADARQLAHLLRLGILPTGTILPPEHRATRDLARKRMQLVRSRTSHILAIENIMARQQAVKITSNHVKRLTTVDVDQMGLPADVALAVQSNLAVVTTLGAQIELLEKRLQERLDERPEYALLTSVPGIGRILAAIILLETGPIERFRAVGNYASYARCVDSQHFSNGKKKGEGNVKNGNKYLVWAFVEAANFALRFNAEAKRFYERKKARTNNVVATKALAHKLARACFHILKERKPFDGTRCFA

SEQ ID NO: 144517 - protein, 402 aa, unidentified
MNCVGIDVSKGKSTIAVMRPFGEVVVSPFEVCHTVNELSELARQLKSLDGETRVVMESTGNYHAPVAWLLHDAGFYVSVVNAMLVHDYGNNSLRRAKTDKKDAVKLANYGLDHWLTLPRYVPEEDTRLMLKTCYRQYQQYSKVQTMLKNNLISLLDTAFPNANRLFTSPPRADGSEKWVDFVATFWHCECVCGLSEKAFTAKYQKWCKKHGYNFSEDKALDIYASAFAHFGVMPKTDTAKLLVEQAISQLRATSAALAALKQKMQSLAASLPEYPVVMEMFGVGPTLGPQLMAEIGDVRRFHSKKALVAFAGIDAPPYQSGQMDIRSRSISKRGSASLRRTLFLVMGVLLQCAPMDEPVYQFMNKKRSEGKPYRVYMMASANKFLRIYYASVKAYLDSLEHD

SEQ ID NO: 144518 - protein, 339 aa, unidentified
MKYTPVGVDIAKHLIQVHFINEHTGEVVDKQLRSRDFLTFFSNREPCLIGMETCGGSQHWARELTKLGHKVRLLQARFVKAFVMGNKNDVMDARAIWMAVQQPGKEIAVKTEEQQSVLVLHRTRRQLVKFRTAQINSLHGTLLEFGESIHKGRAAMEREFPEALERMKERLPPYLITVLEDQYNRLSELDSLIDDIEKQLTSVARQNETCKRLLDIPGIGPLIATAAVATMGEASAFKSGREFATYVGLVPKQTGSGGKIRLLGISKRGDTYLRTLFIHGARAAALLTREPGPWITELKKRRPVSVAIVAMANKLARTVWAIAAYGRKYDKNHVSIRPY

SEQ ID NO: 144519 - protein, 338 aa, unidentified
MKLYGGVDLHSNNSWFGIMDKSEKKVLRKKLPNELPKILNVLKPYRKDLVGIAVESTFNWYWLVDGLMDNGYKVHLANPSAIKQYEGLKHSDDERDAFHLAHLLKLGILPEGYIYPKEERPVRDLLRKRLQLVRHKTSHILSFKNLVSRNLGIQMPSNEIKNLTEEDVEAMFKEEHLVIAGRANIATMRFLKERITVIEKAVLKKAKLREEYIKLLTVPGIGKILVLTIMLETGDIKRFLEVGNYVSYCRCVGSSRISNGKSKGEGNRKNGNKYLSWAYVEAANFAVRGYPYVRSYYQKKAAKTNNIVAIKAISHKLARASYYVIRNQEVFNPKKAFG

SEQ ID NO: 144520 - protein, 401 aa, unidentified
MVTDQDVTAPALVACIGLDWGDERHAVHLQAADGGPVERVELEQKPDVLHAWVAQLRERFHGRPVGIAIEQRKGAVIHALMMYEFFVLYPVNPKALARYREAFRTSGAKDDPADAELLLDLLRKHRDQLRPWLPDTVEARTLQSLCEQRRKLVNRVALTNRITSLLKQYFPQALDWVGDVASLQGCDFLRKWPDLAAVQRVRPSTLRTFYQQHNCRKATVIDERIRQIASACPLTSDPAIVDPLSLSVQTYATQLRVVIEAVQAFDTRIADVFAHHPDQALFDSFPGAGPVCAPRLAAAFGTDRSRWPSAIDLQSHSGIAPVTERSGKALWVHHRLACPKFVKQTFHEFADQSIRFSQWARAYYDQQRGRGNDHHAALRSLAYKWIRILFRCWKDGTPYVG

SEQ ID NO: 144521 - protein, 428 aa, unidentified
MNEEDRTRLEEFRQFRKEVRGSAEYLLVGIDVAKDKHYAFFGTATGKTLFRRLVFENNLEGFRKLLVQAEAMKVQNGLNKVVFGMEPTANYHKPLGEHLIRCGKQVVLVSGVAAHENRKTLDGRWDSNDTRDAANVADLVSQGKCLFYEFPVGAIQDLRNLLSLKRRFKRVEHGYRVRIRNHLLAKYFPELDRYYDQSPSTSLAIVRWCLGPSVIAGLEYKEFVQRVGSGQRRLSQVKRLQAIWKMAVDSVGCEVGPAVEFEGQVMVEGLKQIQKAIEEIEEKIHGVCLQFPEYEFLLSIPGFGPDVSSKVLGAIGDPFRFQNGRQVLKMAGLDLSAERSGKTSQSAVPVISKKGKADLRYALYQAAFIASTKNQDFIIYYTHKLRGREREPGIKTKMRVKLSAKLLIIAWTLMKKKEPFNPDYLAVE

SEQ ID NO: 144522 - protein, 325 aa, unidentified
MLEVSIIGLDIAKNVFHAHGADASGRALFSRKIGRGKLLEFFAGHQRCTVALEACGGAHHWGRELTRLGYEVKLIPPAYVKPFVKRNKNDAADAEAICEAAQRPSMRFVAIKSEEQQASGLVFRTRDLLVRQRTQLINAIRGHLTGYGWVAPKGPSHVAMLGDLLEDEMASSLPEAARSMFRTMLDLLEELNEKIGDLDKEIARRAREDAVARRLMTIPGVGPITATALAALAPPAESFTKGRDFAAWLGLAPRQMSTGGKQKLGSISKMGERTLRRLLIIGCSAVVLQASKRGAPQGSWLEQMMARKPRMLVTVALANKTARII

SEQ ID NO: 144523 - protein, 331 aa, unidentified
MKDNKIVLGCDLSKDKIDIASIEKQSSKILSETTETNNLKGFKNIIKPFSSKVGELHVVLEATGNYHIKFTDFLEKENIKFSIVNPLRIKRFAQMKMLRLKTDKADAMIIAQYGIEQTPKPHKPLTTPQKELKALGTVRNHLIKQRTMTKNLLHSHNLLTDTTKESVSAIISTIKTFNVEIKKLDDKIEALIKEHYNDTYSKLLSIKGIGPKTASGTIAHLGDLGNFESYKQMASFIGITPAIRQSGKSLNKTTGITKQGNANLRTLFYLAALSASRSNLACINLYNRLILKGKQKKTALIAVANKLIKQLFAIIKFNRTYIYNYNINLVS

SEQ ID NO: 144524 - protein, 412 aa, unidentified
MDRFVERCAGLDVHKDTVAATVRVPGGAGQRLQETRTFSTTTGGLVTLADWLESYGVTLVGMESTGCYWKPLYYALEERFECWLLNAQHLRNVPGRKTDVADSAWICQLVEHGLVRASFVPPKPIRELRDLTRYRKAQIEERSREVQRLDKVLQDAGIKVSSVASETLGVSVRRMLDALVAGTHDPEVLAELARGRLRRKLPELREALTGRFRSDHHGLLVSQILAHIDYLDETIAFLSARIEQVIAPFSKQRELLETIPGVARFAAEVLIAELGVDMTVFPTSAHLASWAGQCPGNHESAGKRRSGKSRKGSKWLHTTLTESAKAASRSKATYLSAQYQRLRGRRGPGRATGALRHSILVAAYHILQQKVPYQELGADYFDRRRSSDQRMKRLVRQLEQLGHKVTLEPLAA

SEQ ID NO: 144525 - protein, 405 aa, unidentified
MQTVYERCCGIDVHKKLIVACFRNGKKAEVRKFDTLTCSIKELGNWLLDNNCQMVAMESTGAYWKPIYNILELLNIDVMVVNAHHMKTVPGRKTDIKDAQWIADLLQHGLLKSSFIPDKEQRELREIVRYRKNLIEERSRELNRLEKTLEGANIKLSSFVSSLTGVSSRKLIEQALVGEVNQENIDDLIHSSMQSKKSELLLAMDGVFSSVQKLLVNAILDHIDDMTKRINNLDNIINSYMKSYEDAIKKIDEISGIGTRSAEVILAEIGLDMSRFPTAAHLASWSGLCPSNNESAGKRKSGKTNKGNKYLKSTLIQCAKSAQKDKNSFFHAQYQRLVVRRGANRATVAVAHSMLIAIYHMLKDNVPFKDLGNDYYTKFNKEKKANYYFKKLQELGVSFPVSVAT

SEQ ID NO: 144526 - protein, 388 aa, unidentified
MQTVANRPEAPNAIRNDLGAIFISLELSRSTWLITSLSPDGGEKMSKHSVPAGDIYALLARFSEFKQRAFARTGKSFPIIVIQEAGLDGFWIHRVLQNEGIESHVVDPASIATSRRRRRAKTDRIDGEALLRTLLAYKRGEPRVCAMVKAPTPEEEDRRRLCRERKILIAERVKHVNRIKGLLFCQGVSGYKPLRRDRRQRLDELRTGDGGLLPKHLKAQIGRELARLEQLLEQIKAVEAERDALLAAQRVTARAPPAMLLDIKGIGPEFAAVLWSEGLFRHFDNRRQVASYAGLAPTPWQSGSVDREQGVSKAGNPRLRTTLIQLAWLWLRNQPQSALALWFKDRVSRNGGRLKKTTIVALARKLLVALWKYVTAGVVIEGAIVKSA

SEQ ID NO: 144527 - protein, 322 aa, unidentified
MAMLSFGGIGVSKDRLDIMVLPDEQCSWVSNDAAGWAELVEQLRGSSITAIGVEASGGYERGVVRALLAAGMSVRQINPFKLRQFAKASGTLAKNDRLDARMIASFVAIMPTRPAQRQAPMIEQLAAMLTVRRQLSDHKVATENASRLLEGAMLQRLSRRRIAGLTADIDLLDQRLVEIVTADPALAHRFRLLTSMPGVGAVLACTLIALLPELGQMSRKQVAALVGLAPYDFDSGKLKGRRCIWGGRARVRHVLYMAALSASNWNPGLKAFHDRLEATGKKPKVVIVAVMRKMITTLNAMLRDGTTWVDRYSGRRSASTAR

SEQ ID NO: 144528 - protein, 335 aa, unidentified
MLLIGCDFHTRFQQIAMLDSTTGEMRERRLEHPEEARRFYSALPSPARVGMEATGPALWFERMLQECGHELWIGDAAEIRASVVRQQKTDARDARHILDLLVSERFPRIWIPSPAERDTRQLLRHRVKLVRFRTSVQNQLHALAMGEGVCRRKKLWSKAGRKELEGLSLGPWTSRRREDLLGMLDRLQAGIEELDQAVRNEAASRPEAVRLMQQPGVGPVTALAFVLTIGPVERFRRSKQVVSYLGLNPRESSSGGQQRLGSISKQGNSMLRWLLTEAAQTASKFDPELRRDYLRLQFRRGRGVAKIAIARKLAVRLYWRLREAAQLGAAGSHAG

SEQ ID NO: 144529 - protein, 360 aa, unidentified
MIKVRTWVGLDVHAARAVACVVDGESGEMTIHRLPGATTGMVGFCVGVPAPVRVAYEAGPTGFGLARAAREHGVMVEVVAPGSIPKGPGDRVKTDRRDAVRLVRLLAAGELRFAFVPSVADESFRDLVRAIDDVRGDLMRARHRLSKFLLRRGERYPAGAWTATHMRWLRAHVFDEPCAQAAFVDYLAAVELLAGRRGTLISELEQAIPSCAHAPVIARLRCFRGIDTLSAAGLAAEIGDFKRFPRPPLLAGFLGIVPSERTSDTKRRQGSITKAGPGHARRLLVEAAHHYRYQPRVGETLARRQAGQDPRIVEIAWRAQRRLHQRWQHLHSERRKPAGVVAIAVARELAAFLWEAATLD

SEQ ID NO: 144530 - protein, 370 aa, unidentified
MLYLAMDQHSKQITVCVRNADGGTVLSRQVSTRPEKLKAFLQELTEMDREFMAILEVCGFNDWLIEELRRWNCREIVLIHPEKPSKRKTDRRDARKLADLLWLNRERLAANERVHGLRRVYMVTQRECEDRHLTALRKTLGQRRTRTLNKIHRIINCHNLIWDYPTKTFQTQAGRRWLEKIELPEFDRLEMDMLLKEWTTWNEQIAQVDEKIVERANHREPGEFVSAAQILMTAPGVSHYSALALSSRIGPIERFPRPRSLANYFGLTPGCRNTGKATDRLGSITKEGSTIARFILGQLVLHFLKQDSQMRSWYRRIKKRRGSKIARVAVMRRITTVFWHMLTYQEAYSIGGPPPRLRQLNPPATRSDAA

SEQ ID NO: 144531 - protein, 409 aa, unidentified
MTETLFVGIDVSKLSNTVRCMDFFGDSLFLKDFPNDRFGAEDIRDSIKNVILHSDFTSVVIGMESTSVYAEPLASFLQNDSFLLKWNAKVFILNPKQIKNFKNSYPELPKTDNIDSLIIADFLRFRRPSNEVVFDEKYVALRSLTRARFQLAQNLSREKARFLNTLFYKFSNLDSSKVFSNTCGATSLAVITDFFSVDEINDTPLEQLTNFIAEKGKNHFANPELVAKELKAAARGSYRLSKVAADSINQLLAVRIAGIRSLQKQITEMDKAISAYMELFPKVLLSIPGIGPVYSAGIIAEIGNIKRFQSHNSLAKYAGLSWTKYQSGKFESDNTRLINSGNRYLKYYLLEAANKVRIHDTTFKNFYASKLKEVPKHQHKRALALTARKLVRLVYSLLNTNRLYTPPTK

SEQ ID NO: 144532 - protein, 358 aa, unidentified
MSQTAAALIPAPVAYASTLVLAIEVSNKSWVLAAQVPGLPHTKAKRTIHPEAGALLAAIAGYRARAAATGHTIERVIAVYEAGWSGFWLARWLIRHGVEVYVVQPSSVPVDRRMRRAKSDGIDAELLLRTLLAWLRGEPRVCSMVPVPDEADEDARRCVRERTELISERVGLTNRIGAVLATLGVTDYNPLLRSRCRRLAELRTGLGEPLPANAHAKIKRLLARLELVLTQIAELERERDAVVETEASDKAGKMIQQLISLRGIGVQSATVLVREAFVRRFANGKALGSYAGLASSPYNSGGINREQGIGKGGNRRVRTVMVELAWLWTRYQPSAAQVCWFREGVFAKSWWWPWLENC

SEQ ID NO: 144533 - protein, 327 aa, unidentified
MTSAILGIDIAKHKFDCVLLRDAEQQRQTFPNTQAGWQRLDRWLEKNGAPTVHACLEATGRLWQGVAAHLRQAGHCVSVVNPVRIKRYGQSRLTRNKNDEVDSALIALFCREQTPPAWNPPSSGQAQLQELTRLASARKQQLQEEKNRLKSGNQNSFVLGEIRQAIKNLRAAIKRVEKEIQAVLASDPELAHQSELLRSIPGISHCTAAVILAELPAPKHFERASQVAAYAGLTPAHRQSGSSLRGKTRLCKTGNTRLRQALYFPAIVASLRNPLLRARAERLRAASKTKMCIIGAIMHHLLRLAYGVLKHQKPFDPNFAAQPPQGA

SEQ ID NO: 144534 - protein, 361 aa, unidentified
MITERTSVGLDVHAASIVAAAIDEHTGEIRERRFGGETGPVLDWVASLPGPAQVVYEAGPTGFGLARAFRAAGIRCAVAAPSKLQRPTGDRVKTDQRDALHLARLLRLGEIVEVVVPSEDAEAARDLVRAREDARFDLMSARQRLSKLLLRQGVQYREGKTWTVAHTLWLRRQKFDRPALQTAYEAAFDAMTVVLDRRDRLDAAIADLAADSEFTPVVNRLGCLRGISTLTGMALAVEIGDWTRLDGRRIGSYLGLTPSECSSGRSRSLGGITKTGNGHARRLLVEAAWHHRPAYRVSSPALRARWERASGEARARGHAGNQRLHQRWLTFNDRRKQFSVANAAIARELAGWCWSLAVMDE

SEQ ID NO: 144535 - protein, 344 aa, unidentified
MNDMHYVGLDVHKKTIAFCIKLIDGKIVEQGTVSTNKNELAAWAKTLPNSCIIAMEATMFTGWIYDFLQPYALEIKVAHPEMLKAIAAGKKKNDKLDAKRIADLLRCDLLPECYMAPTEIRELRRILRYRNLIMRQAIQMKNKISGLLMELGAEYDKKRLHGQKYFYELLENLHDVPQSVINLLKLSRSNLEMFKDSQKKLLLFLQNNPIIQHRVELLKTIPGIGEVTALTWILEIGDPHRFAKNRQAISYCGLCSAQKESAGKSSRGPISKKRNKHLQHVIIEAAKLAPIWNEQLALVRTKEIERGSDFNTATLEVARKLVSYMLSVDKSGCPFEYRGLKKAA

SEQ ID NO: 144536 - protein, 404 aa, unidentified
MAGSPADVFLGIDVGKTSHHACGLTTDGTKIYDKALAQDESALRSLFTELKDTYGRVLVIVDQPNTIGALPVAVARDCNVDVAYLPGLAMRKAADLYGGKSKTDRKDAFIIADTARCMPHTLRAVDHNDEMLSALKVLAGFDEDLAKDTTRARNRARGLLTQIHPPLEQVIGPKLAHPLILQLLAHYRGPSGLKKAGPARVAKWLAARSKQDVSDLVDQIFTALDAQTVTVPGTKAAETVLPALAHHIQSLLEQRAAIAAEVEEMVADHPLAEVLMSMPGVGIKTAAKILLTVGDGSDFPDAAHLAAYAGIAPVSRISGSSIRGEHPARSGNKTLKNALFYSAFASLRSHRPSRQYYERKRAEGKRHNAAVMCLARRRCNVIFAMLKNREYFREIPPRHEQIAA

SEQ ID NO: 144537 - protein, 340 aa, unidentified
MPVIRIGLDVAKNVFQAHGVDEQGTVVLRKQLRRREVLSFFASLPPCLIGIEACSASHYWARELTALGHQVRMMPARYVKPYVQRGKSDALDVAAICEAVSRPTMRFAAIKSVEQQSALTLHRAREILVKQETMLANLIRGCLGEFGIVAPLGIRRMAELVGIIRDEADSRIPPHARIAMTAVADQLGDLQRRIKEIEQAIRAWHRNNDASRRLATIPGVGVITASAIAATVATPTEFKSARHFAAFLGLTPKQHSTGGRQRLGRISKQGDGYIRRLLILGGTALVRYARGAGGTVWAKQLLARRPARVVTVALANKAARIIWALLVRGGVYRSAAPQAA

SEQ ID NO: 144538 - protein, 377 aa, unidentified
MIAAARSQVSVSESVLYVAFELGKKEWTLAMTSGFGKQPWLRTIPSGDLGAVERAVRSGRQRCGLAPTARVISCYEAGRDGFWIHHALIAQGIENRVVDSASIEVNRRARRTKTDRIDALKLVMMLVRAYCGEPRVFAEVRVPSAEAEAARHRSRERTALVQDQTRLRNQIGSWLATCGCRVTARTRQQAAWWTAARDWADAPLPPQVQARIARAEARLAIVADQIATIDASQKMTVQRADPASAGARLVQLKGVATTSASVLLDEGLVWRAFQNRRQLGGLLGFAPAKYDSGASERDQGISRAGNTRLQSVMVQLAWGWVHWQRQSALTRWYQERFGRGKRARRVGIVALARKLLIALWRYATAGVLPVGAVLKRA

SEQ ID NO: 144539 - protein, 332 aa, unidentified
MSAVVCGLDVHKESTYATVLDPNGQVLVQRKMPNEDIPRFLEPLHPDKLAMEASTYIIPLYCKLVEEGYTVTVSHPKKTRYIAEARIKSDRVDSKALAELLRLDSLPESYIPPRRIAEIREKVRRRAFLVRQVTKLKVKIRDALVYEGVKPPAGFGLFTVKGVEWLHGLGMEPVDCYLRLIEPLRREVKFVSSQLKHEAGHDPEVRLLMTIPGVGYYVALLVKAEIGDVGRFSGGDHLASYAGLVPSTRSSGGVERHGGITRQGSRWLRWAMVEAAKAHVRVDSPVTRFYHGVAERRGRKAALVAAARKLTTVCYSVLVHGRPYYNPLDAQA

SEQ ID NO: 144540 - protein, 324 aa, unidentified
MNMKTVIGIDIAKKSFDVCISDNSNTFHFENSAKGFDELLNLDSVRKQQISLFVIEATGNYHRALVDVLELNGFAVAVVNPRLIKNFSRAMGIRSKTDIQDARVIREYGVRMEPPVRQKCDSELLRLKAMVSRRRQLVASRTMETNRLEAQTDQEIKSDIRRHIHWLTSEIKRIDAVLAERIGKMPMLKEKVKLLREVKGVGPVVIAGLLTQVPELGTLDRRKISALIGLCPYSRDSGNFRGKRTIWGGRSDIRSMLYMAVLSAIRYNPEIKAFYENLIARGKVFKVAITACMRKLITIINAIVRDGEKKTVGQAISIHKSCGH

SEQ ID NO: 144541 - protein, 349 aa, unidentified
MQSVAIVGGVDTHGALHHAALLDRVGRRLGSREFPASEAGYASMLTWMKSFGTLETVGVEGTGSYGAGLARHLHRAEVNVLEVPRPDRRTRRQIGKSDPIDAEAAALAVLGGTNTSSPKFANGVVESIRLIRVARTGALKAKTAAVNTLRAIVITSPEPMRSQLRGLSRVRLVNTCRRLRPQLECLSDPVQAAKATLRSVAERAFILTQEADELERNLGKLLAEAAPLTTSVFGIGTDTAAALIASIGDNPDRLRSEAALARLAGVAPIPASSGQTKRHRLHRGGDRSANQALHIAVVVRLRYCERSRAYAARRRAQGLSSLEIIRCLKRYLAREVFGALRSDFLALAA

SEQ ID NO: 144542 - protein, 370 aa, unidentified
MEKDTTYVALDDSKRKIVAGILRPGDAQPELRESANDPRLIRRLFERLKREGRAVAACYEAGVSGYDLYRQITALGVECVVIAPALTPRRPGQRIKTDRRDAAKLVRLFRAGELTAIHVPAEAEEAVRDLVRCRDDLRRDVLRWRHRVLKLLARHGRAYLAGKNWSQAHWRWIREQRFDQPPLQRAFEATVFTLEQALARQAELDKELEAVAGTAPYREPVGWLRCFRGIDTLSAIILLAEVVDFQRFRRPRELMAYLGLVPSEYSSGETQRRGALTKAGNSHARRVLVEAAWHYRHRPTIGRALAGRSQGQPDEIVGQAWRAQQRLHRRYRHLIGHGKRTPVAVAAIARELVGFIWAAMTRHESRRQAA

SEQ ID NO: 144543 - protein, 389 aa, unidentified
MKPNSLMTLDRYFRQCVGIDVSKDKFTACLQMYDKASDVGCHTMSIDFDNTKSGFNQFVKWSRKEAQKGFPLTYLMEPTGVYYERLAYHLHKIGLTVYVVLPNKARKFCEAEGIKTKTDAMDARCLALMGCVSRKLKPWSPPAAIYRELRQMTRFHADLCEIRTSVSNRMEALVHMEGTNKSVVGNCKKLIEKIDKLVEENGKAMMQIVAEDKDLEAKVKRIATVKGIGEPTIVCVIAETQGFHLIENRKQLVSYSGLDVRARQSGNDDPRHVISKKGNAHIRAALYMPALVATHHNPQIKAAYGRICQKHPNEKMIGVTAAMRRLLLLIYTLWKNGEEYDPARDKTHTTQKRMKIEDAEQEYRPEDCMEPNRESVDWNATDEDGNPPF

SEQ ID NO: 144544 - protein, 350 aa, unidentified
MLIIGCDYHPGFEQIAYVDSETGEFQERRLKHPEEAEMFYRTLWEQGVKVRVGMEASGHSRWFERMLEELSFELWTGDAAKIRAKRVRKKKTDREDARHILQLMLKDDFPKIWVPTWQNRDVRQLLWHRHRMVQTRTRIMNQLQAVAINEGVRYKKRLWREAGRKQLESLSLAPWASRRRKDLLEVLDRINPTIAELTQAIEEEAEKCPQARHLMTHPGVGALTAVAFVLIIGEAHRFDCGKQIAAYLGLVPEEDSSGERRRLGHISKQGNSLLRFLLVEAGQATARCDQRWRNQFSHLAQRRGRKIAKVAMARRLAVRLYWMWRREWNYEQLQSFGSHVGQPGNPHGVQ

SEQ ID NO: 144545 - protein, 313 aa, unidentified
MDTSATVPACFIGCDVGKAEIVVYDSRTERITRVRNDAPALFDFALALDPDALVICEPTGGYEAPLLDALIRAGRAAHRADARKVKAFIRSLGILGKNDAIDAKALAHYGRERHHRLPRWLPRERQRDRLTRLVSIRHDLVEQRVACRNRLHAPGIGDLAGRLHRILGVLDAEIAGIEADMQLLVAACDPLRKTVAVLSAITGIGALTAIRLAALMPELGTLGRRQAAALAGLAPHPRQSGARDAYRATRGGRPGVKHTLFMAALTAARRNAHLAAFYRRLIANGKKPIVAIVAVMRKLIVIANAKLRDAAIV

SEQ ID NO: 144546 - protein, 345 aa, unidentified
MELHTIGIDLAKTVFHLVGFNLRGEIAVRKKFSRTQLLRFTANIHVELIGMEACGGAHFLGRALREQGHEVRLMPAQYVKPYVKTNKSDYIDAEAIAEAVARPTMRFVPIKTDDQLDMQSLHRVRERWVMRRTAVINQIRGLLLERGITLRKGRRYVDAALPLILEDADANLSGALRMLLAQLKLELDQLAVRIDEADTVIEKTAQENEACQRLVAIPGIGPVTATALIAAIGNGGAFHKGREFAAWMGVVPREHSTGGQQKLLGISKRGNSYLRRLFVQGARAVMQQRTKQSSGLSAWLAQLTARRHRNVAAVALANKLARMAWAVLAKNEQYRPPVLANVAAA

SEQ ID NO: 144547 - protein, 337 aa, unidentified
MFRKGVRGQHFTSGGSITMLGIDVSKDTLACTLFDPATQKPLWSRIVPNTSAGISRLLKQTPQDSPWALEPTGRYSLLAATRAHDAGRSVLLAQPKKARDFLRSIQSRAKTDGLDSHGIGLFALCRPLPPYPLKSESVEQLDQLLSVRKSLSASLAAFDLQARELKHAAHTLAPVIASLQEQKAAADKQIAQLTAQQEEFSITTELRKVPGIGPVTAATLASRLASRPFGHSDAFVAYCGLDVGVRQSGKKNGQTGLTKQGDAELRRLLYLAAQANVRAKNSPFRTQYERERAKGLSSTAALCAVARKLARVAWSLHKHGTSYDPKRVYQQNLLQNP

SEQ ID NO: 144548 - protein, 408 aa, unidentified
MKDSGKRYIGLDVHKHYLIAIGVDEELNVVLPVRRVEFSYLEAWMKKTLTKQDEVVLEMTTNTWQLYDELCQHAGSVLVVHPPHVALITRSQVMNDKIAASILARLLAKGLLVGVWVPPQEIRELRGLVAQRKKMTGLVTQAKNRLHAVLQRHHLAPPEGNPFQEAQSAWWLALPLGKFEKVNVQSDLETLRFAENQREQLTLMMEEIASQEEQVTRLLQLPGFGVVTAVTVWAAIGNIQRFADAQHLVGYAGLGTKVHDSGMTTHTGRITKAGRRDLRMALIEAAQVAANSHPHWKAELARLQPRLGRNKAIVAIARKLLVVVWYILAQHKTDRFAQPEAIAQKFLKFAYQLGKANRPTGQSAAQFVRQRLDVLQLGQELTSIAWGSKKPIPLPPSTNKVSDVPHTK

SEQ ID NO: 144549 - protein, 448 aa, unidentified
MAAQSVSQTPAMVVPSQLERHWQQAFRQRWQAVAPAQWRCIGIDVGKYEHVAVAYDGLGQLLAPPLRFGIRAGDYQTLFAWVATVAPAPAVAPLFGLEPTGHYYEQLVYELAQQYGPQQVYIVQTTDVARRRADWNQGTFKTDEVDAAIISELLRQGHGRPYHPDEGAYLSLYQLERYRWAREQASTRLKNQIIGHVDRLYPGLVISDKPLAERYQPLWRSLWADETPRRLLTLYADPRDLRCADVATLCQRFRTAGYWMTRPYAAKILAAVQALPLPDAELGARRSTFLERDLAGLAYVEQQLAEVAAEMVDLLDLTWGHWLRPSGVDPLRLACLVATVGDMRQYHAARQLFGRSGLHSGCRDSGTRQQHGQGQHMVKPGDRHLRRQLLRFTLSMLAHYPALQTYRNRLLQRGKGKITANIAVARKLCGMLYALASQERPFDPTRLA

SEQ ID NO: 144550 - protein, 393 aa, unidentified
MEKLYIGIDVAKYKHDCFITNAEGEVLADVFTIPNSREGFEELHRRIKSLKPHPSPENTKVGLEATGHYSDNIVGFLRKIGLPPIILNPLKVSLYSKGESLRKTRTDKTAARFIAKMLIANDFKPNLQSSYHSEELKVLTRHRQRMVCERSKFKIWYDRLRSIVFPELEGFIKSSSVTEMELMLEFATPEAIAGCHLTRLTNLVETYSRRKHSKEWATGLKELAKKSVGSSSPAKTLETRQVIRNIMSLDKDVDLIEKEIRRLVDESGMTLMTIPGIGYIYASVIMAEIGDISRFDTPAKLQAFAGLDPTKFESGQFIGKRNKMVKRGSTYLRWALLQAAHSVSQFDPIFGEYLDRKIAEGKHYNCALGHVAKKLIRVIFKLMTTGEVYAAKA

SEQ ID NO: 144551 - protein, 321 aa, unidentified
METEKEQIAFEQVIDRGCGIDVHKKVLVATIRGKGLKEETRTYSSFTESIEELRNWLKENNVTHVAMESTGVYWKPVFNILEEDFEVLLVNARHLKSIPGDKTDKKDSKRIAKLLLAGLLKGSFIPGKSVRELRDLTRYKRKVIGQVASEKNRIHKFLEDANIKLSSVVSDLSGVVASKIIDAMIGGQEDVEELVKLRHGKMKATVEELAAALTGKLTDHHRFLLRMVKKSIGDKESLIEELDKEIDRLLKENEMVLDAELLSTIPGIDKDSAASILAEIGNKMEQFPSEQHIASWAGLSPGNNESAGKKKVQESPMATIG

SEQ ID NO: 144552 - protein, 327 aa, unidentified
MIARRRSASTDLSPVAGPLCIGVDVSKDWLDIADNAGRALRIANTGAAIAEALSGPWAQSCRAMVCEATGGYERPLMLVAARLGLPLRRVHPNRARAFAKASARLAKTDAIDARMLARFAAFIADEPARPSPAPQTQTLAALVSRLDQLSDLRQSESCRAQQAHEACVKASIEAVIEVLDGQIDAIQRAIDALIASDPILSEKASLLRSCKGVGPKNAQMILARLPEIGALDRRKIAALVGVAPITCKSGSSINRASIAGGRKPLRDTLFMAALSASSHNPTFTAFRDRLKANGKPHKLIIVAVIRKLIVTLNAMIKAKTPFKPALT

SEQ ID NO: 144553 - protein, 340 aa, unidentified
MGDITTIGLDLAKNVFQLHAVDEAGNVVMRKRLRRGQVLAFFAGIPACLVGMEACATAHHWARELIALGHEARLMPPTYVKAYVKRNKHDVADAEAICEAVRRPSMRFVPVKAVQQQSALMMHRARDLLIRQRTMLVNALRGHLAEFGLIEAQGLHKVARLIAVVMDENDRRVPDIARQVLKVIVNQIEDTQTRIAGLETQVLAWHKSNPVSQRLATIPGIGPIIATAIAATVADPSMFRSGREFAAWLGLVPRQCSTGGKARLGGISKRGDSYLRRLLVNSAHTVLLCSKQAKTDPWLTSLLSRKPRLVAAVALANKTARVAWVIMSRQDTYRHAAATA

SEQ ID NO: 144554 - protein, 343 aa, unidentified
MKLHVLGIDLGKTVFHLVGLDSTGRVVIRKKCSRTQLLAFTANLQVQLIGMESCSGAHFLGRALREQGHEVRLMPAQYVKPYVQTNKSDFLDAEAIAEAVQRPRMRFVPIKTEEQLDLQALHRVRERWVMRRTAVVNQIRSLLLERGLTLPKGRGYVDRRLPRILEDGELRLSGSFRVLLAQLKIELEQLTVRIEEMDRVIQKTAKENEACQRLTEIPGVGPVTATALIAAVGNGSTFQKGRNLAAWMGIVPGEYSTGGKQKLLGISKRGNKYLRTLFIQGARSVLQQRDKQAPGLSSWLAQLLARAHQNVVIVALANKLVRMAWAVLCKNERYRAPVLAMSA

SEQ ID NO: 144555 - protein, 328 aa, unidentified
MCTLGIDVSKNKIDLCLLTAGPGGKKKHKVLTNEPAVARKVVDWLNAQKCVPESVTVVLEATGIYHENLAYGLHEAGVSVCMANPCRVREFAHGMDILNKNDAVDAFVLACYGELKSPAVWVPPSPEVRKLRALLRQRDALREDVQRTVNRLEKANSTSTPQEVIRSLERTKSWLNEELARIEKLITDHTDNDPGLKADLDLLKSIKGVKDQVGREMLALLKDGMFKSASQVAAYLGLTPVEKTSGSSVRGRPHMSKTGPSGVRAKLYVAALTASRWNKQAKAIYERLVAKGKAKKAALGAVMRKLVHLCFGVLKTRLPWDENYLATA

SEQ ID NO: 144556 - protein, 369 aa, unidentified
MHSATKYIGLDVSKEKISVAIADEGKETPRYYGTIAHTPAAIRKLIKNLGPADSLSFCYEAGPTGLETCRWIESMGANCVVIAPSLIPKRPGDHVKTDRRDAVQLARLFRAGELTPIHVPSRDSEALRDLVRTREAAKEDKHRASQRILKFLLRHQIHPPATIKRRWTKKYREWLAKLTFENEALQFAFSEMLHALEEIEQRMSRIEKVLFQLGTQGPKAPLIQALQSLRGIALLTAITIAAEIDSFARFQSPVQLMAYLGLVPREHSTGQSVKKGGMTRAGNPHLRRALVESAWSYRHRPSVKGELAKRLEGMPPALQLLSWKAQERLNKKYRRLVFGLNKHKNVAIGAVARELTGFIWAAARTCEPA

SEQ ID NO: 144557 - protein, 343 aa, unidentified
MPIVGGLDIHRKQITFDYFDTETGQVQRGQVSPADRVHLRAWLARFHGRDDVAFAAEGCTGWRYVAEELAAAGIVAHVAEPADTAFARGRKRHAKTDKTDSRHLRQLLAEGRLPECWIPPEQVLECRALLETYHALRREHTAWVQRAHAVLFHQGAPVFHALGEADGPQQLAGLARAHLSPAGQQQIGLYLRMLEVTEAELNALRGQLVTAARRLGGAKALQDNLYGVGPVTGLALTCWLGGAGRFSSARKAVRFTGLDITVYSSDGKRSPGHLSRQGPPVLRWCAYEAGKAHARGSAPDHGYYAKVKDRIDGKRAALSEARKIIRQACHLLAELGDDAFTTV

SEQ ID NO: 144558 - protein, 332 aa, unidentified
MYGVDVSKETLDICLYVNKVQGKIQFLNRKEGFRDFLQWAKSQPDGTDSACCFEATGRYHEEFADFLVEHGFKAYPVSGYSISCYRKALLQRSKTDAGDAEIIAQFGEAHQNSLYCYQPISRARKTLKTLARTRSTFTQQQTRIKNQIGSLTGSSTDSSTRKLLRKSLRSIGRQIDSLDKEMRKVIQGDLELCIMDDVIRSIPGISYISSSRILAELPMNSKSVRAWDQYAGLVGCANESGTSVHHRPRCSVVSNARLRTALYMPAVAVSKMDNPLGAFYRRLHEDARKEKMVAINALMRKLLHIVFGVLKHLEPYNPDLVGPLASKNERVS

SEQ ID NO: 144559 - protein, 346 aa, unidentified
MKIVGCDFHPSFQQVAILDTSTGEVGELKLIHASGEAERFYRELEAPILVGMEAVGNTLWFERLMEQLGHELWIGDAAQIRASYVRRQKTDKRDAGHILRLLVEKRFPRIWVPSSQERDQRQLLLHRHRLVQMRTKVKTELQHLALNQGLQKQRGLWSVRGRADLEKLPLAGWTARRRGDLLAVLAMLEEQVASLDEAVSQVAYSNARARLLMTQPGVGPITALAFVVTMGDVARFKRGKQVASYLGLIPSERSSGLKRRLGAISKQGNVFLRTMLVEAAQSAVRYDQEFKKEYAHRCHQKPKGVAKVAAARKLAVRLYWMLRTRTPYAHVVHNEGSPSLPVVGAS

SEQ ID NO: 144560 - protein, 348 aa, unidentified
MRVYKTPHAYYCGVDLHARSLFVKVLDDKGVTRLEQDLPASPHTFLDAIKPYRDGLVVGCECMFAWYWLADLCEREAIPFVLGHALAMKAIHGGKAKNDKLDAQKIAGLLKGGFFPMAYVYPKAKRETRDLLRRRSFFVRQRAQLIAHIQNTNAPYNPPPFVKKLTYKGNRSAAIADRFEHPGAQRSITSDLNLIESYDTQIAALETHLVKSAKVDDPATFQFLRTIPGIGPILGLVMLYEIDTIKRFAAVGNFLSYARLVACTHESAGKVKGVGGRKIGNAHLKWAFSEAASLMLRSFPAAKSWMQRQSKKRGTKKAHAILEAKIGRAVYHLWRKQAAFDGKKFLPS

SEQ ID NO: 144561 - protein, 340 aa, unidentified
MPGPRARIRKVGRSGVLNPSRKEHVNSTKEIFVGIDVSKARLDIHVLPSGDPWTTENQTDAITTLVSRLRSLQPTLIVLEATGGLERRVLAALLTADLPAVAMNPRQVRDFAKGMGYLAKTDAIDARVLALFAEKARPEVRPLPDAQTQELEALMVRRRQVVDMLTAEKNRLSSAPPSKRVIRAIRKTISCLEDQLEDLDKDIDNAIRESPAWREKDEVLQSVPGVGRVLSRTLLGHVPELGTISKKKMGILIGVAPLNCDSGKYRGQRHCWGGRTEVRNVLYMATLSAIRRNPVIKAFYDRISSGKLRKVAIVACMHKLLTILNAMVRSNSRWSPAFSP

SEQ ID NO: 144562 - protein, 315 aa, unidentified
MTQSSADTVGVDISKNFLDANIHPTGEARRFANDAKGHRALMAWLEGRQVQRVVFEATGAYHRAFERTLSAAGLPMAKINPRQARRFAEAIGQIAKTDTIDAAMLARFGALLSPPTRMPVSEILDEMKELHNARQALVKDRTATLNRQKQMRIAILKRLAAQRLKQIDSQLKAIDTALAGLRDSDTALTARFEILLSIPGIGATTAFAMLIEMPEIGTLENPQAASLAGLAPVARDSGTWRGKRSIRGGRANLRQAIYMPALVATRFNPDFKAKYQAMIAAGKPPKVAIVAIMRKLVVLANALLKAGRNWLPRAA

SEQ ID NO: 144563 - protein, 410 aa, unidentified
MEVMFDRVAGLDVGKESVTVCVRTPGSRRGRHSETRTFKTMTGSLRVMRDWLVESGVTIAAMESTSAYWKPPFYCLEEVMEVWLLNAAHMKAVPGRKSDVRDAEWIAQLLEHGLLAPSFVPPPEIRRLRMLTRYRVQLMGDRAREIVRLELMLEDASIKLSSVASSLKTVSARAMLTAMINGESDPLRLADMAKGRMRSKIPDLAQALTGHFDANHAWLAHSMLRRLDLVEQALVELDAVIVDACRPWQHQIELLQTIPGVGPKVAETIVAETGADMSRFPTAAHLAAWAGVAPAMHESAGRQTPAGKRHGNKWLTAMLVEAAGSVGRMHGKNYLAVQHARLTKRRGMGRAQVAVAHSILVAAYWMLKRDEPYHDLGADWHSRRNDEAHTRRLIGQLEHLGHTVIIDPAA

SEQ ID NO: 144564 - protein, 320 aa, unidentified
MDKTPVGIDIAKLKFDVAVWIERKKYKTKVFNNTPSGFSDLLKWLLPYGDCHICLEATSHYSVPLATFLVDNGIEVSVETPARIHAFAQSELSRNKTDQGDAKMIARYCALYSPARWFPAPLNERQLMALIRRLNHLVEMKQMECNRKEGADEIVQPFLTDSICALEKQIVEIKQKIKEHINNSPGLKKNKHLLESIPGIGEILSATLLAFVGDVSKFTSSKQVVAYAGLNPKLCESGAFKGRSRLSKVGCTELRKALYMPALSSITYNPIIKSQWKRWVKRNKGGKVGVCAAMRKLLQLAYGVLKSGLPFDTKIALAKT

SEQ ID NO: 144565 - protein, 451 aa, unidentified
MSKDRTRSKPSGLPIIHPFAAGIDIGSRFHVVAVSPDLCDEPVQTFQAFTGDLQRMADWLVATGTKTVVMESTGVYWVAAYEVLESRGLEVILANAREARAVPGRKSDVNDAQWLQRLHACGLLRASFRPGRDIAELRAYLRCREKYTDYAAAHIQHMQKALTFMNIQLHHVIATITGVTGMRIIRAIVAGERDPDRLAAMRDVRCKENLETIRNALVGNYQPEHVFALKQALALYDFYQQCIDECDVEIERAVAILNIAHSFPEAPLPKAKHRNKMPSDPNFDVRTAMYQLAGTDLTQIHGIGPFLALRLIGECGTDLSRWPTAKHFTSWLTLAPGCKISGGKVLSSHTRKTSSRITVALRLAAVTVGRSNSALGAFYRRLAGRIGNAKAVTATARKIAVLFYNAMRYGMDYRDPGADHYEQQYRDRVIKQLHRRAAQFGYSLQPQDSPA

SEQ ID NO: 144566 - protein, 344 aa, unidentified
MVYIGMDVSSKEFMVHAINEDKKVVFKGGIAPTRRGLRQMIGSLGGGSKLVVFEAGNQLKWIALTLKALPGVTVHVVHPNEVKWISQSSGKTDKIDARKLAELARGDMLPRKVHIVEGKVRELRELVSARHRLQSKRVALINSIRGLMKQEGYRLPVKFFQGVGWRERLAQVRVGETQKAIIGSYMKSIEGLQAAEKELTEKIIEIKDGRIELLESIPSLGRLSSRVIVGAIDGVERFESKKGVAKYGALSPRIYQSGGVTHLGRINRDGRMEVRRVLLQCSHTITRMKSYAARPLREFYERIAKRRGKKIAIVALARKLLTVAYGVLKTKKMYNPALLLNRYV

SEQ ID NO: 144567 - protein, 484 aa, unidentified
MKSKAYRAASVKDVKISEIISRLAEGPTWAGLDVGKGHTMVVIRDSQGTTLRPWKVLQPDEIRVIAELLKELKQHRPLVVAMEPTGTYGDALRQALYDAGLAVHRVSPKFTSDYAETYDGVPSQHDGKDAAVVAELAAFGKSRLWPMGPPAYGDLLQDVQWMDTQQDILQLWLGRLEGLLARHWPELTNLLELNSATLLRILAEYGGPQALCADAQASDNLKRWGRALLKPEKIEAVRESARSTQGVRMEPAECDFMQRCARAAQAARKEIQQVQNVLEKRAAGDEKLQRVGQAVGMVTACVLFATVGDPTEYSCGEAYRKAMGLNLKERSSGKHVGHLKITKRGPSMSRRWLYFSALRMIQHPAVKPWYEHKKSKHQDHGGQGVVGVMRKLSLAVYAVARGATFDAARLFPGRKPTAKPGPSETLGALPPDPRNLPPSHQSRTKNGTAGASDREPAARSASVTETALGSVSTGALSSVAAEQA

SEQ ID NO: 144568 - protein, 355 aa, unidentified
MDSKKYIGMDVHQATISVAVRDAVGKLVMESIVETKAATILQFIQGIHGSLWVTFEEGTSAAWLYDLLQPHVAQVVVCDPRRNALLKAGNKNDRVDARKLSDLLRAGLLTPVYHGQSGVRTLRELARSYLTITKDGTRVMNRLKGLYRSWAIPCAGAKVYSVRHRNAWLEQLSQAGVRRRAERLYQQLDILLELRRESRRELLTESQKHPAHQLLRQIPRLGPIRVALIIALLQTPHRFRTKRQLWAYCGLALQTHSSGEYRVSEGRLQYTKRPPAVRGLNVNHNHDLKNVFKSAATQASASGDPLGDFYQNLLAGGMRPAMARLTLARKIAAIALKIWKKGERFDPGQLKRKCA

SEQ ID NO: 144569 - protein, 475 aa, unidentified
MGRDSGKQKKENIKALSPEQEAGLKQKAEEISKGLQSYTWRDLETGGKFTHNDKLTFIRDDMLIVGCDIGSERHYARAIDAKGRELSKGAYSFENSAEGFQSAKDWALCLAAQHGKNQIVLGVEPTGHYWFSLAAWMIAKGISVVQVNPYAVKQTKELADNSQAKNDAKDPKLIAELVKNGNYGVPYLPEDVYAELRVLCTLRDQLMEDRVRNMNRLHREMKIVFPEYREAFGKIDGIFTLSVLANAPLPSELVALGEDGVKDIWHAEKLRGGGYKRAKEIVRLAGVSAGLTQGAEARKIAIVSFVGKVMELAAELEEIEAQIALKCREIPRADSILEIHGLGAATVSGILAEMGDIDRFDAAKEIQKLSGLGLVACSSGKHQGQTKISHRGRKRLRYWLFQGALSVVSHNEAFRQIHAYYTTRAENPLKKMQSITVIACKLLRIIFTILKKGVRFDPDKMLSDITHPAPLDAAA

SEQ ID NO: 144570 - protein, 397 aa, unidentified
MKGFCISLDVSKGSSFYQGFKGLEEPITKSKKIEHNLEGFKELINLREKIRKEYDEECIVIFESTGVYHKALQTFLDEHDFKYTIISPLLSAKVRKSDIRGTKTDSKDCASIASVFYLKKLRVYTKTDEIYDDLREKSRYYDFLMDEMKRWKIEFRRLLDIIYPGFDRLYDDLYGDFTQSLLLEYSHPEIIRKRRLDTIAKFLEKHTCHHEAYCLRQAKVLKEYAENCASGCSSKSYLVSQFDVVIHNLNAQIKHLNYVLEEIIDIAKKLPNYEYIRSIPGIGDNLSSRILAELGDISRFNNASQVVAYCGIDPQIYQSGQTSGLHLKISKKGNKKLRCLLYLAVTCMIKTSRNTVIVDFYKKKKADGLAPRSALVASMNKLIRIIYSLCKSGSLFK

SEQ ID NO: 144571 - protein, 346 aa, unidentified
MGYFAGLDVSLEETAICIVDEAGRILREARAATEPEALVAFFGACGMEMERVGLEACSLTAWLHEGLTQAGLPAICIEARQAKAAMGAMPNKTDRNDARGIAQIMRTGWYRAVHVKTPSCRSWRALLAARRLVLNKRRDVENGVRALLREAGLKVGTPSRKDFPARVRELAADDPVLAGLSEALLSVIEVMNQEVDKLTKRVLDEVKVEPICRRLMTVPGVGPLTALAFRATIDQPSRFRKSRDVGAHLGLTPRRYQSGETDVQGRISRCGDELARTALYEAAHSLLIRSSKWSALRAWGMGIAKRRGMARARVAVARKLAVILHRMWADGSEFRWGKQAASAVAA

SEQ ID NO: 144572 - protein, 382 aa, unidentified
MTVATTVSRIIPAHFDIFAGLDVDKKSMATTFTDHGTLFKSLRLPYSSTQLLNYVAKHFPGKRIAFVYEAGPTGFGLHDDLVAQQRTCLVVAPSMVATAPGNRVKTNRLDSKKLSVQLRGGELRGIHVPNRSYRELRHLVQLRDTQTRQLTATKCRIKALLLYEGIEFPEPSGRWNARAIDDLRTLPCTSEVRFKLDHLIGTLYFHFNSAAVVQKRIRQFCQNDPELRQSISLLTSLPGVGWITAAHAVARLGDWREIKNVRQIAGLVSSEHSTGDKENRGPITRSGDSRLRNKLVQCAWVAINKDPELRAFYRSVFLRQPKKVAARKAIVAVARKLTTRMYVVLKQQRPYIIRPDSSIAPLTAEETAGPRERLDAAQNEQR

SEQ ID NO: 144573 - protein, 347 aa, unidentified
MVMIGIDPHKRNHTAVAVNRCEDVLSKRLVHAGSAQIAELIGWADGLDDRQRTWAIESAGGLGYLLAQQLLAAGERVVDIPAVLSARVRVLSSGTSNKNDPNDAFSVAVAALHAKQLIEVRVEDHATILRLLTRRHTQLAQAHNKAACRLHALMCDLIPGGIRKEIVARQAAQLLDSITPSTRVAAQRLLLARDLLADVELLVEQRRESKRRITAAVAASGTTLTEIFGVGVVVAGTLIGHAGDPNRFTTADRFAAYNGTAPVERSSGDPNSKIWRLSRRGNRTMNHAIHMAAVTQIRHRHSIGRAFYDRKLAEGKSPKKALRALKRRISDTVYRRLTADAARAARH

SEQ ID NO: 144574 - protein, 354 aa, unidentified
MSQTPNTAIAVIGIDIGKNAFHVVGHDTRGAIVLRQKWSRGQVEARLANIPPCLVGMEACVGAHHLSRKLRALGHDARLMPAKYVRPYSKGQKNDFRDADAIAEAVQRPTMKFVATKTADQLDLQALHRVRERLVSQRTGIINQIRAFLLERGIAVRQGQRFLRAELPRILATPPDVLSPRMVRIIEDLASDWRRLDERVEGLSNEIEAIARQDAGCERLMSVPGIGPMISSAMVAAIGAGDVFTKGRDFAAWLGLVPKQISTGDRTILGKISRRGNRYLRVLFVQAAWVVLIKPKIWERHGLKPWIEAARKRLHHNVLAIALANKLARIAWSVLARGRAFEARKMDQAVNQSA

SEQ ID NO: 144575 - protein, 352 aa, unidentified
MTAITTIGIDLAKKVFQIHGVDAESKLVVARKLRRKEVLAFFAKLAPCLVGMEACGSAHYWAREIAKFGHNVKLMPPKYVKAYVKRGKTDASDAAAICEAVTRPSMSFVPVKGVEQQGLSMLHSARLQLIGQRTQMINAVRGHLSEFGIVAERGLLGFAQLTGIVRDEKDQRLPATARAALMILVRQIERVSAEIAALDTLLRKENKANELGLRLVTIPSIGQVIASALRARVTDPKLFENGRHLSAWIGIVPENDSTGGKVKQKGLSKKGDRYQRSLLITGAIAVVRQAKIRPDKYPGVTKLLGRMSTKQAAVAIANKTARIAWAIMVHGGVYEAGHRASQYRAEACAVTG

SEQ ID NO: 144576 - protein, 338 aa, unidentified
MAIVTVGIDLAKNVFAVHGVNDAGKPELVRPEVPRAKLLELIANLPPCLIGMEACSGAHHWAREFAKLGHTVRLMAPKFVAPYRMGGKRGKNDAADAAAIAEAVTRPSMRFVPVKSIEQQSRLFVHRARQGYVEQRTALINRIRGLLSELGIVLPLKAATVRREAHKHLEDLPGWCNTVVGDALSELTHLDGRIQEYDKYIEQSAKDDMQARQLMQLSGIGPTTASAIVATVGKGHDFSCGRQFCAWLGLVPGQYSSGGKQRLGRITKAGDPYLRTLLIMGGKAVLAAAKNKTDPISRWAISVQERRGYWKAVVAIAAKNARMCWAMLQQGEAFRLPA

SEQ ID NO: 144577 - protein, 340 aa, unidentified
MNVKTIGIDLAKNVFQIHGVDEHGKRLFNKQLRRAQMASFFANIPPCLIGMEACASAHFWANKLISMGHNVKLMAPQFVKPYVKTNKHDAADAEAICEAVTRPNMRFVPVKTAEQQAVLALHRSRQSFIKQRTAQANQIRGLLAEFGIVSRGIQQLQRRLPELVEDADNPLPVLFRTQLSLLQHHMAYLFDVIATLDKQIEQCYRQNALCQRIGKIPGIGPVTASALIATIGKANNFENGRQLAAWLGLVPRQHSSGGKQVLLGISKRGDTYLRTLLIHGARAVLQSAKHKQDAVSSWANQLMARRNNNIASVALANKNARTVWALLAKEREYCAPIISA

SEQ ID NO: 144578 - protein, 370 aa, unidentified
MSMYFVGIDISKYKHDCCIISAADQQIVSKFTITNDKDGFEQLLISLNSLSNSEDIKIGFESTAHYALNLELFLENANHSFMEVNPVLIKEYKKSTTLRRTKTDSVDCESIARWLMTVEYKPHSKGFYHAYSLKSLTRLRDRLIRQRSFYLVKITNVLDHTFPEFKPFFNERLSKTAIYLLENYGSAEKMAHMNSASYDKLRCISRGKFSIQQFLHLKELAANTVGVNNSIFDIELNSLLTLYNSLCKEIKNLEAEITRLIEEVHPHYMSIPGIGPISAAVIYAEYGDISNFSNPSQMLAFAGIEPGINDSGTESHGGRMVKHGSSQLRYVLLNACLPLIRFDLTFATYYAKKRAEGKKHRVAITHVAKN

SEQ ID NO: 144579 - protein, 317 aa, unidentified
MSNSESFVGIDVAKSWLDVGWSIGTTLRIDYSEEAVAGLIERMRNDPPTLIVMEATGGLETEIASALVAAGFPVAVVNPRQVRDYAKACGRLAKTDRIDALVLAAFAAAIRPQVRALPDEDTRALGDLLARRRQLIEMRVQEKLRLQRASAVQRTSLREHIAWLDERIARLDIDLTHALRTSPVWHDKDDLLKAIPGVGSLTRATMLALLPELGSLTRRQIAALVGVAPFNRDSGKHQGQRVIWGGRAQVRRTLYMAAVSAMRCNPVIRVFYLHLRAHGKPAKVALTACMRKLLTIMNAMLKHHSQWSPGLDTQHSC

SEQ ID NO: 144580 - protein, 418 aa, unidentified
MSEKFNSEIAVIGIDIGKNSFHIVGQDRRGSIVLRQKWSRGQVEARLANLPPCLIGMEACTGAHHLSRKLQALGHDARLMPAKYVRPYSKGEKNDYRDAEAIAEAAQRPTMKFVATKSADQLDLQALHRVRERLVGQRTGIINQIRAFLLERSIAVRQGLHFLRAELPGILAKRTDVLSPRMLRVIEDLARDWRRLDERIDALSDEIMMLARQDKGCERLMTVPGIGPIISSAMVAAIGSGDTFSKGRDFGAWLGLVPKQMSTGDRTILGSISRRGNRYLRTLFVQAAWVVLVKIKPEGWERYGLKSWIETAKPTPAPQRAGDRARQQARPDRLGGTPQGARLRMRHQCDSVPTCLILAPCSGPSRRGLQTLAQVEKSSRRPALTAPCARLPATPAGRDEGTARQARTKEQPEARDHR

SEQ ID NO: 144581 - protein, 327 aa, unidentified
MRLPILGIDIAKLKFNLCLVNTNGKLKHKVFPNTSTGFEQLREWLSKQGVERVHAGLEATGSYGEALALFLHQADHMVSVLNPAAIKAFAGSCLSRTKTDRVDAELIARFCLAQAPPAWTPMPAQVQELQALVRRLESLVEMRVAEQNRLQAGIAVEAVKASIEELIVHLSAQIKHTEKLIRTHIQNHPRLKEQSQLLDSIPGIAQTTAATILAEITDFTQYRSARQVAAYAGLVPRERQSGSSVRGRTRLSKIGNARLRKALYFPAITALRCSPFFQAWAEGLRKRGKSKMSIICAVMRKLLHIAYGVLKNGKAFDPEWAQKEKSA

SEQ ID NO: 144582 - protein, 380 aa, unidentified
MNRIIKIGLDVHTTNYTICIEEPLIGGEKNVYVQTQIKSELRLLINVIDTFKAKFKDDNLDITLGYEAGCLGYSLYKDLKAKGYNCIILAPTTMRTLKGGKKIKNDYRDAKEIADCLCDGGYSAVYVPSIEDNAVKEYIRMRDDVKQNLKSIKQQIIALCTRNGFNYSDSSYWTNKHISFLSKIEFEDELLKETLDEYMAEYYHLTDRIDAFDRRIEELANKEIYVERVNKLKCFSGIKTHTALSLIVETSDFKRFAKGSDYGAWLGMIPIQEASSNKDNRFGITKSGNSHLRKLLTEASQSFTRGTVGYKSRNLKSRQAKCSSEIVNYADKANIRLKKKYYRMIQRGKKANVAKVAVARELACFVWGMMTNNIEVNIAK

SEQ ID NO: 144583 - protein, 349 aa, unidentified
MLHVGLDLSRKRVDVCVISSEGELVEHVRAPCDRDGLYGLTRRVAVYEEPIRGVVESMNGARYVHDELVRYGWEVLVADAVRVKGLAPLACKTDKVDARVLAELSFRDLVPAIWLPTPELRAERERSRWRLHLVKHRAILKNRVHSSLIAYGHQVPMADLFGVAGRRLLASLDFPEPWLGHVKASLELIDDLDRRIGEIENWLRRSGADHRYLPLLLTCPGIGWITGYTIAAEIGDITRFASPVKLTGYTGLCPRVSQSGEVDCRGPISKHGPRYLRWGLMEAAIAASSHPLYRERYQRTRRRLGRQRGPKIAQIELARKLTEAIWYMLTRNQPFKPFVPAGAVLPLTA

SEQ ID NO: 144584 - protein, 344 aa, unidentified
MNNTIVGVDLAKEVIQVCIYTNKRVRSNKEMTTSEFLTFLVNLKSSIVVFEACSTSNYWKQKSCSLGHDGRLICPKLVNSVRQNQKTDKNDALAVVQASLLPDVNFISGKNIEQQQLQSIMRFRELAIKQKTALSNQLKGLLLELNIRVSSRKGGLKGVIQSTLEDGENELSFEFRSALKMSWTQYSGLLKSIAHYEEILAKISTKHSECKKLLKLEGVSTINAVNLYIALGCQPEIFNKGKDASACIGLTPIQYSSGGKVKLGSIGKYVKNSILRSNLVVGAMAAINRIITREAITKKEAWIQALVERRGKRCAAVALANKTVRTAFAMLTQGTEYKTELISA

SEQ ID NO: 144585 - protein, 342 aa, unidentified
MHITSIGVDLGKTTFHLVTLGEQSKVLARKKFSRKQLLTYTANLPASLIGMEACSGAHFIAAAIRGQGHDVRLIPGQFVKPFLKSNKNDFLDAEAIAEAVARQNMRFVPIKTDEQLDLQALHRVRDRLVQRRTAVINQIRGFLLERGITFPKRPANLRNNMAALLEDAEANLSPRMRQLLEGVWQEWKQLEAHIDEADDEIERIASADANCQRLRQIPGVGPLASTATVAAIGNGAAFRKGRDFAAWLGLVPKQRSTGGKARLYGISKRGNEYLRRLFIHGARAVLYRVKYDTGGFGRWVHQLETRAPRNKVIVAIANKLARIAWAVLSSGEVYQHQPVGTA

SEQ ID NO: 144586 - protein, 408 aa, unidentified
MQVLYTRCAGLDVHKDTIVACVRCVSPPMHQEVRSFGTTTAELLKLADWLAEHDCTHVAMEATGVYWKPVWHVLEAEFELVLANAAHIRNVPGRKTDVNDAMWIADLLAHGLIRSSFVPPQAIQQLRDLTRTRKQLVREVSQHSLRIQKVLEDANLKLGSVLSDVLGKSGRAMLDAIVAGEADPARLAALAQGTARNKTAELREALRGRITEHHRTMLRLHLQVVDALQRTLAELDAAVGKALAPIRQRARLLTTMPGVSDLTASVVVAEIGVDMSRFPTAGHLVSWAGLCPRSDESAGKRRSTRVRKSGTWIKTTLVTAAWAAVRVKTSYLRAQFLRIKARRGAKKAILAVAASMLTAAFHMLRDGTEYNDLGSEHFDRQDRSKTIRRLIKRLQDLGCDVPVGAHAA

SEQ ID NO: 144587 - protein, 353 aa, unidentified
MFSAGIDAHLTYLVVAVVSKDGELLVRPTRVSVRQPQRLRALLAPYRPLEAVVETCPAWPWLYELLTGWEVTLVLAHAKRLRAIAESDYKNDRLDTVLLARMQVAGLIPRVFAKPREQREQAALVRHRVVLVRQRTALLNRIHAHLHVVGLHIARGKLKTKAARPWLRQVAWPQLSGEPRRLIRSQLTLIDAIGPLVAGVDRRVRQVADALPVVAQLRTVPGIGAYRGLLIAVEVLPIGRFAHAKQLVSYAGLAPRSRQSGERAVRYASIPFSANRWLRGVLVRTVVSHVKCAPHSWLSRYYAEQKTRLGWQAARKLCRALHAMLRTGEGWKNETHVSMPRGELHFTHVATTT

SEQ ID NO: 144588 - protein, 442 aa, unidentified
MSKSKEAAKLEVVHPNAAGVDVGGSSHHVAIRSDAPGKTVNEFGCYTKDLHEMADWLLSSGVKIVALESTGVYWIPVYEVLERRGLEVLLVHARHVKGVSGRKSDVLDCQWLQRLLSYGLLRGAFRPQDQMCELRELNRLRTRLLREQGRSVQHMQKALTVMNVQLSNAISDVAGVTGQKIVRAIVAGERDPQELASYRDARIKASAEEIAASLQGNWRSEHLLALKVALATFDFCGQQIEQCEVEIERAMQALQRFMQEPQKAKKRSKAKNAPKFDVRERLFKMCGVDLTRINGIDVSTAMTIISEVGTDMSRFPSEKHFASWLGLCPGTNISGGKRLGAASKHSANRATVALKQAAAALRTSQSALGAYFRTLCGRMDKAKAVTAAAHKLARLIYAMLTKGQEYVDAGQLYYEERYRERAVRQLQRRANKLGMLVVPAGS

SEQ ID NO: 144589 - protein, 387 aa, unidentified
MPQRNDLSRSLLALDQNSTIIAVIEMSRSNWLVAGVIPGVDRQPLKKLEPDEEGLLHLLRRWQDEAARAGRTISRIAVAFEAGRDGFWLARWLRARGIEAYVIHPASIPVSREHRRAKTDRLDTELLKRAFLGWLRGEPNHCSMAAVPTLEQEDAKRPNREREVLVGERTRIVNRMKGTLARLGIRGFKPALPRAPERLETLRTPEGATLPPNTRAELQRDMARLRFVTDQIRELEAARAERLEHAPETGPNAMIRLLARVVGVGIETADMLVQEVLSRNLRDRRAVARYAGLTGAPDESGAKRREKGLAKAGNARVRRGMIQLAWRFLLFQKDSALSQWYRARTTDARGATRKTLIVALARKLLIALWRFGATGEVPQGVVLRPAA

SEQ ID NO: 144590 - protein, 369 aa, unidentified
MKRGSHNPDGIECQGDVFNHERRGEPHTDRTLYAMDLAKQVFQVFWVEERSRTREKRLKRAQVLEFFARLAPARVAMEACGSAHYWGRELQKLGHEVILIHPRYVRAFVKTNKTDSADARAIWTAASQPEMRAVPVKSVESQTILALHRVRQGRRDMRTALMNQLRGLLAEFGVVLKRGRAAGLAELYSRLPELEAKLPGTMVSLMREQCEWIARLEREVRELEGRIRASHAGDERFAQLTSILGIGLLGASAFLAQVGNGQQFRSGRQASAFVGIVPRQSGTGGKVRLGAISKRGDPYLRTLLIHGARSVIAKSKQHSPWLKALIARRGKNVAAVALANKNVRIAWALLRRGGRYEPDHQARALAPAH

SEQ ID NO: 144591 - protein, 360 aa, unidentified
MFTERTSVGLDVHARSVAAAAIDGVTGELFQARLTPSHEHVRSWLGDLPGPVAVAYEAGPTGFGLSRALNAAGIRCEVVAPSKLQRPSGDRVKTDAKDAVHLARLLRLDEFTPVSVPTVDQENARDLVRAREDCRGDLMRARHRLSKLLLRQGIVYSGGRAWTAAHDGWLRRQRFDAPALQLTYESDYDAVLTVKARRARLDAAIAVMAADSEFTPLVARLGCLRGIGTLTGFALAVELGDWHRFTGNTIGSFIGLVPSEYSSGQSRVQGSITKTGNSHVRRLLIEAAWHHRASYVVGKTMRDRWELASPAARARGDEGNRRLHHRWNTMRARRKRHVVANVAIARELAGWCWSLAVLED

SEQ ID NO: 144592 - protein, 456 aa, unidentified
MKSLPVINPHAAGIAVGSEKLHTSIAGDEPVVFGTFTNEVYRLRDHFLKEGVKTVALEATGVYWLYVFEVLETAGIEVVMVNGRAVRNLPGRKTDMADCQWIATLHAHGLLRSGFVPTAEIRRLQDYMRLRADHVMGAASQVQRMQKALERMNIKFHDVISDLTGVSGQKVIEAILAGERDPEHLLDLCDEQIKKKKRERLIESLRGTWREEHLFTLGQAVAAWKFYQGLLVECDRQVERVLKGLAEQSPPPNPGANGPSSPKPEAAKRQSKNAPQIDDLHELLKQVCGGRDVTAVAGIADGLLVQLIAETGTDMSAWKTEKDFTSWLGLSPGTAQSGKRKGLVKRQCNRAGRLFRLGARSLARTVDKALGGFFRRLKKAKGGLVATKAVARKIALLYYRTLKHGLAYVEKGLRQYEMQYEESQRRLLAKLAAKQGFKLMSIEAEKLQAALKTTKS

SEQ ID NO: 144593 - protein, 316 aa, unidentified
MYLGIDVSKKTIDCCLIKEDSKRQKQFKNEQGGFEQLKKWLDDNRATSELKCCCEATGTYYKQLALYLKKYYKISVENPRKIKGYAISELQRAKTDKQDAKLIAMYCQEKSHRLREWQPPEKDQQELEELTKYLDYLTRQRATEKNKLHESPEYITAHIKTTIDNLTAQIKDVKQQIKQFYKQHPEYGQNRKRLMTITGIGETAASVLLSIYKKHEFKTSKQFVAFIGLDPKPHESGTSVKGKSRISKIGKADTRKALFMPALVAYRSNAFPNLINRLKSKNKPLKVILVALMRKLAVIAFTLLKIGQDFQVERYK

SEQ ID NO: 144594 - protein, 425 aa, unidentified
MFSRVKIACGLDVHHSKIVGSIVTSYGTHETRTFTTNIDDTLKLKDWILTHKCERVAMEATGIYWYPIYNLLEEYVTVQVANPLFIKGIPGRKTDQIDAEWIGMLCLNGLIKPSIVPKREVRKMRDLVRTMTSLTHERTRHKNRIHKIMVRAGIRIGAHLSNLYGPSGLKILIGLLEGKSIDTILLDLKSTKITKKRDELVQSICGTLDENDVYLIRLELDSIEFINHQIEDLKPRLTYLITPMNDDINILMTIPGIGQDSAMKILAEIGDIHLFPSGKHLVSWAGIAPGMNESAGKKTPGHITKRGSKYLRTFLIEPAHAIARMKSDNQLKRYFSRMVGRLGYKPAIIALARKLLMIIYHLLANHEPYFEENFSKKKPIKLPVASPPSMTADQILNIMSDAIANMSEVDRAEFVRKLNRIRTPG

SEQ ID NO: 144595 - protein, 349 aa, unidentified
MRFYTKQHRFYCGVDLHADAMYVCILDATGEVVVHQNIPTKPKTFLRLIKPYRDGLVVGCECMFTWYWLADLCADEGIDFVLGHALYMRAIHGGKAKNDRIDSHKIAVLLRGGSFPLAYTYPKPMRATRDLLRRRNHLARKRGELFSHIQNTATQYNLPEPLGCIAKPSMRGDLLKKFPDPVVRRMVEIDLLTIEHYEHLLDALERQLEKMATGHDPVNLALLKSIPGVGKILGMVMLYEIEDIGRFPREQDFASYCRLVKPAKESNGKSYGHSGKKIGNAHLRWAFGEAVILMLKGNKPAQLVLQRLASKHGKGKALAILAHRLGRAVYYMLKNQVPFDQERFLRRVA

SEQ ID NO: 144596 - protein, 346 aa, unidentified
MSNHNAKNDVAVLGIDLAKTSFQLHGVDSLGATVLKKKLTRKNLCEYIAQLPKCTIGIEACGGAHHWRRVFSKFGHAVHMIAPQFVKPFVKSNKNDAADAEAICEAVQRPSMRFVPAKSIEQQDIQSLHRVRSQAVARRTAQANQIRGLLMEYGLIIPQGISHIRKSIPGMLEDAENELTTMFREILSELYDELVHLDKRIKTLEIKLETLCAQNEDCQRLLTIPGVGLLSATALVAAIGDISAFKNGRELSAWLGLVPRQHSTGGKPTLLGISKRGDTYLRTLLIHGGRTVVRVADKHQDKRNTWITKLDERRGKNVCAVAVANKNARVAWAMLSNKSIYQASSA

SEQ ID NO: 144597 - protein, 362 aa, unidentified
MFTERTSVGLDVHARSVAAAAIDGVTGELVQAKLTPSHDHVRSWIMALPGPVAVAYEAGPTGFGLYRSLSAAGIRCEVAAPSRLHKPSGDRVKTDARDAVHLARLLRLDEVTSVSIPTIEQESARDLVRAREDCRGDLMRARHRLSKLLLRHGIVYFGGAAWTGKHDQWLRHEALPQLTSRATRMTFDSDYDAVLATKARRDRLGAEIEEMAADSEFTALVRRLGCLRGVNTLTGFALAVEIGDWHRFTGNSIGSFVGLVPSEYSSGASRSQGPITKTGNSHVRRLLVEAAWHHQPRYRVGKTMRERWDLAPAAARVRGDQGNRRLHQRWVTFIERRKRHTVANVAIARELSGWCWSLAVMD

SEQ ID NO: 144598 - protein, 385 aa, unidentified
MRGNSFIPRDYDVFTGLDVSKKSMSVTFTNHQGFIRSLNMPHKAEPLLNYVRKHFPDQKIAFVYEAGPTGYGLYDGLAAQAYPCLIAAPSMIPRAPGQRVKTNRLDSKALSESLRGGQLQSIHIPSPTYRQLRHLTQLRDVLVSELAGMKQRIKSLLLFEGIEFPPAPAGSQWSFLVKDKLRKLACSGTVRFKLDQLLDSLEFNQKQVLKAIREIRRYCQNDPELSQCMKYLMTLPGIGWITASQLLARIGDWRELNNIRQLGGFLGLVPTEHSTGERTDRGSITRTGDERLRSKLIQASWSAIRQDGELRDFFRTVYRKHPREVASRVAIVAVARKLSVRIAVVLMKQRPYEVREKVHSAPLTQEETSPQGTTRREPEPGEKNS

SEQ ID NO: 144599 - protein, 398 aa, unidentified
MDLPVYYELETNNGNRDYRIQIGGHYMNYNTVYVGMDVHKESFTLCSCKYEDEKASHYQRTPASYKNVLRYLAFLRTIYGEYTRFVCGYEAGCLGYSLYHQLENFNVECVILAPTTMLEQRSKRRIKTDKRDAEIIARSLAQHNYSPVHIPTETDNQTKEFIRMRDDHKAELKKIKQQILSFCLRQGYQYDGSGNWTAKHVKWLRSLKPAGLYKEILDEYLLTYTILTDKLNRLDQRIEELASKEEYKESVSKLTCFLGIKTHTALSVIVEVGDFQRFVSARKFAGYLGLVPGQHSSGDDRNGLGITKAGNTHVRRLLVESAQSYTRGKIGYKSRVLRSRQAGNSPQVINYADRANERLRRRYYKMVLKDGKKYNIAKTAIARELACFIWGMMTDNIY

SEQ ID NO: 144600 - protein, 403 aa, unidentified
MSDMITNHADIDVFIGIDVGKHNHHAVALNRDGKQLLSKALPQNETKLKALITRLRKHGQLLVVVDQPATIGALPVAVAQAEAIPVAYLPGLAMRRIADLHPGEAKTDARDAAIIAEAARTMPHTLRGIRIADENVAELSMLCGYDDDLAKQATATSNRIRGLLTQIHPGLETAIGPHLDHPAMLALLAKYPTPKALRHAGKHRVETLLRKQAPRAWKRWAAAIFTALDGQTVVVSGTDAAGLVLPQLATSLAKTRTSRDEVLVRIEELVQAHPLFGLLTSMPAVGVRTTARILTEVVGKDFESAGHLASYAGLAPVTWRSGTSIRGDHSSRRGNKILKRALFLSAFAALKDPLSRAYYDKKRAEHKKHNQALIALARRRCNVLYAMLRDGAYFHAPEAATAA

SEQ ID NO: 144601 - protein, 452 aa, unidentified
MNKSLSLESLTLVHPNAAGLDIGSREIWAAVRPDLDGKTVRCCATFTPDLEALADWLLACGVDTVAMESTGVYWIPIFELLEARGIQCYLVNARHVKHVPGRKSDVQDCQWLQKLHSLGLLSASFRPDAEMRALRTLLRHRAQLIQHRAPHILHLQKALQQMNLQLHHVLSDVTGQTGLLILRAIVAGERDPLVLARLRHPACKSSAETLVKALTGSWQEEQLFVLRQSLELYDFYTAQIEVCNAEIEQQYAAIPPRWDAPDDLPTLPPVKPGSKSKNQPADATRQELFRITGVDLVAVEGISASLAQTIISEIGTDMSRFPTARHFCSWLGLAPHNDISGGKVLRSRTLKTDNRAGQAFRQAAAAVTRSDSAFGAFYRRKRAQIGPMQALVATAHKIARTVYYMLKHRVAYHDIGAQGYETQQRERELTYLQRKAAKLGFELTPKQAAVPS

SEQ ID NO: 144602 - protein, 397 aa, unidentified
MEYDVVIGLDVGKSMHHACALDHQGTRLVDEEITNTEGDLRALFTAMAVHGQVLVVVDQLHSIGALPVAVAQAMGIEVAYLPGLSMRRLADLHPGKAKTDARDAHIIAGAALSVPHTLRRLDIPSQAQADLSMLLGYDDDLAGQVTAAVNRLRGLLVQIHPSLEKALGENISHEATLHLLVKTGGPEAMRSWGKARIDRELAKHAPRMHARLAEAIWTALAAQTVTVPGTAAAAKVIPGLASQILQLRDQRIQIARDVDKVLDDHPLASVLTSMPGIGVKIAARILAETGGNMNAFPTAAHLAAYAGLSPVTKRSGSSIRGEHVNRGGNKRLKNALFMSAFTSLRADPTSRAYYDRKRAEGKRHNAALICLARRKTDVLFAMLRDHKHYTPSIPIAA

SEQ ID NO: 144603 - protein, 482 aa, unidentified
MKKRNIYQNQSQELLSLFEQAANNAKVMCVPIDYAKKDHVVMFCNGYGDILRKPFSVKNSPQGVDYLTDQVMRSCRQRAISEKHVFFGGEDVGSFADNFVSTLRCQGWLVAGVNAHEAKTQRENLQASTDRLDLMGIAKSLLNRRANCSPAQSGIYLNMRTVVRHRRKLVDIKTEVRNRIHTVVDRLFPGFLDEAKSGITPFSKSSLWLMKERFSAGQIRRRRRSTLIEALRRLGTKKPECTADQLQQYATQVLKPPQDYVHMLQLSLAQHVKHFCCLQESVGQLEKEIAVNLAQTQGAFLTSVRGIGIVLAAGVSAEIGNPYEQKPLNNLVSYCGIIPRVKQTGGPQGETKTGKVAKRCNRILKDYAVQSASHLGLHGPADLMSDYKRRDASGQHADFGMTRRYLRMAMCLMRTSQIYLPSRLRKAQAQIEERADYYLMSWPYLRDKWQKLGALETAFKADHPLGQWRKIVQQFYGIKLTL

SEQ ID NO: 144604 - protein, 422 aa, unidentified
MSRVIVGVDPHKKSVTIEAVDEQGQVLATGRFGTDSTGHRLMLSFVRRQWPHHRWAVEGANGMGRPLAQRLLAQGESVVDVPAKLAARVRVFDTGNARKTDAVDAHAVAMVAVRSPRLNQLAYDEELIALRLLTDRRDELSHRRVQTVNRLQRLLTELIAGGAKRDLSALQAKRLLASVRPRTLVGKTMRRMAAEEITDLVAVDAKLKAINKELRAAVQARGSHLMDLHGVGPAGAARILSDVGDVARFPDRNHFASWTGTAPLDASSGDQVRHRLSRAGNRRLNHVLHVAAIVQIRHDTEGRAYYRRKLDQSKTPMEALRSLKRRLSDAVYRQLVADALATAEAASHETGPGGHSGATPQSSAADLHTPVIDSSDKPQPGPAPSTLPRSQPRSNPTRPRQPARRDDAPEPSRWSAPPDERP

SEQ ID NO: 144605 - protein, 354 aa, unidentified
MSSLNSGIAAIGIDIGKNSFHVVGQDKRGAIVLRQKWSRGQVEARLANLPACLVGMEACVGAHHLSRKLQALGHDARLMPAKYVRPYSKGQKNDFRDAEAIAEAVQRPTMKFVATKTGEQLDLQALHRVRERFVGQRTGIINQIRAFLLERGIAVRQGLRFLRAELPTILATRSDALSPRMLRLIEDLAGDWRRLDARIEAISGDIEELARQDQACERLMTVPGIGPIISSAMVAAIGSGDAFSKGRDFGAWLGLVPKQVSTGDRTILGPISKRGNRYLRALFVQAAWVVLVKLGKKWERYGLRSWIEAAKKRLHHNVLAIALANKLARIAWAVLHNGRAFECAKIDALSVRPI

SEQ ID NO: 144606 - protein, 337 aa, unidentified
MEQVTTIGLDLAKRVFQVHGVDASGKVVLRRQLKRRQVVPFFAKLAACRVGIEACGTAHHWGRQLQGLGHDVRLIPPAYAKAYVRRNKTDPADAEAICEAVGRPWMRFVPLKGEAEQAIASVHRVRERLIAQRTMVQNMVRGQMAEFGVVAPTGAGHLKELLAALESEGAVPEPLRRALLGLGQVLAELARQIAAIDAELLAWHRASERSQLLATIPGFGPIVASAMAVRVQRPERFDSGRDLAAWIGLVPKQASSGDTVRLGRISKQGDVYLRRLLLNGAQSVLNSRRAKHDPWLQRLLASKPRLVVAVALANKMARVAWAVMVRQTRFHAVPTAA

SEQ ID NO: 144607 - protein, 347 aa, unidentified
MRFYTQQHQHYCGVDLHTKMMYLCILSQEGEIVLHRNLKTDAKAFLAAIAPYREGLVVGVECIFCWYWLADLCAREGIAFVLGHALYMKAIHGGKVKNDKVDAYKIAGLLRGGMFPQAYVYPGAMRATRDLLRRRQYLVQRRAELLAHVQNTNSQYNLEPLDKKLDRKRNRVDVPQHFADVAVRKSIEVDLALLDELDGLIKQLEAHLVREVKVHDPRSWYRLRSVPGIGQVLGLVMLYEIHDIERFPSAQDFCSYARLVKCAKQSAGKNYGYSGKKIGNAHLKWAFSEAVRLMMRELPQAKAFVDTQANKHGKGKAMSILAHKLGRAVYCMLKRKEAFDVKYFFAK

SEQ ID NO: 144608 - protein, 452 aa, unidentified
MYDSTTVTVGLDVHARSIRLAAVRADELLEERMLAYDEEAVERALRSWPVVRCCYEAGPTGFGLQRHLVERGIDCAVVAPGLVPQRPGERVKTDSRDARKLARLLAGGLLQPIHVPTPELEAARDLVRAREDARLDRMRDRQRLSKFCLRRGLRMPTSSWTVVRRKWLSEQSFPFRAQQITFDSYLHAVDLVDARIEALERSIRETAEQEPWRALVGRLRCLRGIDTLTALALVAEIGDFDRFKTAEELMAFVGLVPSEHSSGEKRRQGSITKVGNSHVRRLLVESAWHARRRPKVGYELARRQRGQDAVVIERAWRCQQRLYSRWQRMAGRGKPQQKIVVACARELAGFVWAIATEQPQPLDLEQRMRPTTRRTLEGSMRRPMPATRDLRRRQLPTVPSHAVPTRECQSDPPSLPRTIRCSRPRGQPIDRASPLDLLLHVRAYFARQGPVV

SEQ ID NO: 144609 - protein, 416 aa, unidentified
MRTEPVGCWVGVDWGDKEHTVCVVGADGVEVTQFTVRQEAAALQGLPERLRELGPVAGVAVETPRHLLVHVLVEGGFAVYPINPRVSHAWRQCSSVGGAKDDRRDAWVLADGLRHHHAKLREFVPERGPARVLGLLCEDECRLIGQRTALVQQLEDALKQYFPAALEWFTDWTTQTAWDFILAFPTAAQLATARPAKLAGFLRSHRVGLGPVWQKRIAAREAALDWPCNPDVAAAKSVLAIALAKQLRTVQATLRDYRKKIDALFEQREDKAVFTSLPGAGRKLAPRLASAFGTQRDQVESADVVQQVTGTAPITVQSAAHRSVHIRRACRKDARCTLHHFAWQSLRQSIWAKAVYSRARRKGQKHATALRFVANKWLKIIYRMWQTGEPYDEQRYLRQLMKKKSPIAYDLGLLKT

SEQ ID NO: 144610 - protein, 428 aa, unidentified
MTDHSHSRPAAAPEPATEQREFAAFVGIDWADEEHAVCVLDGERLRREVLPHTPEAIAAWAARLARDFGSRPVAVMLEQSRGALMHALLQYPQLVLYPINPKQAARYREALVHSGKKDDPTDAECLARFVREHHRELRAWQPADAATRQLAQLVELRRKAVESRKQTAQQCEARLKQYFPLALDLGDAALWIAVVERWPTQQALARANPATLRKFFAQHGRRNEDQVNELIARIRAAAPLTADRAIIDPSALAVKFLVKELRVLEAAVAEFDAAIAQCFAAHPDAELFRSPPGAGAALAPRLLVAFGTDRGRFATADEVQAYSGIAPVTKRSGKSCHVTKRHFCNKFLRQTFHEFADHARKWSTWSKAFYDHLRTRGHRHHAAVRCLAFKWIRILFRCWKNRQPYDEARYLQQLRSKGVPYLPNVQPT

SEQ ID NO: 144611 - protein, 356 aa, unidentified
MATYYIGADVDSKMTELAIEKNEKIVRRYRVPTSIPAICEVLSSIDGKKHLTFEEGPMAGWLYRNLKDSVHELIVCDPRRNNLIACDGDKDDSIDSGKLAELLRGGYLRAVHQSEDMGRVILKQWVSLYHDKVREAVRQINKIRGRCRMYGIRIPRRALRDQVIRCQWMTNLKERALAEQLSVLWIGFDTAAKQVQMSKRQLIRHSKAYEIIRYWSEVPGIALIRATTLLAYLDTPWRFSNEKKLWKYCGVGLQRTASGTDRRGRPNRGKLKLAWAVNRRLKAVVIGAAMSAINQKQNIFAYEYERMICNGLTASNARHAVARKLLSVLWAMWKTNSRFNESLVCYSPATVNGKLI

SEQ ID NO: 144612 - protein, 343 aa, unidentified
MSELYYIGLDVHKKTISYCIKKKDGTIVARGTIEATRAALTAWASSINRPWVGGLEATLFTGWIHDHLAPYAVELQVAHPAMLKAIACGKKKNDRLDAEKICDLLRCDLLPRCYLAPPAMRELRRVLRYRHLLVSEAVRMKNKISGLLLEVGEPYDARRLHGRKYFHEHLDSLRDTPESVIELLTITRGSLEMFDSLQRRLLHGLDRHPLLRERVELLRSVDAVGEVTALTWALEVVEPRRFGSIGRTVSYCGLCSAQRESAGKTQRGPLSKQRNKHLQRVLIEAAKLAPRWNPQLRAVYERELQRGPRNRATLAVARKLVAYLWAVDISGRPFVPRVEVEAA

SEQ ID NO: 144613 - protein, 295 aa, unidentified
MAAKRGPVTGGVDTHSKTHHAAVVDQVGRVLGTEQFDATAQGYRALLTWLRRFGRLVKVGVEGTGSYGAGLARHLAAEKVEVVEVDRPDRKARRRHGKSDPLDAIAAALAALGGRAQGKPKARTGPVEAIRAMRVARNGAVKARTAAINQLRGLLITAPETLRAQLAGLSKVKLAARCAELAVDHTRLADPDQATAAALQAIAQRVAHLDAEIALATKRLKPVVAKTAPRLCALPGVGPEVAGQLLATAGDNPDRLHSEAAFAHLCGAAPIPASSGNTQRHRLNRGGDRRANSAL

SEQ ID NO: 144614 - protein, 321 aa, unidentified
MTESVKVNVGIDVSKDFLDVHVGNVALRRVPNRSSGLSVLKRILSRYSVSLVLLESTGGYENLAVTYLQSLGYDVCVINPRQARDFARSMGRLAKTDRIDAQILCRLADVIDVSPERARFVKPLTDERRQRLVSMVRRRRQLCDLMTAERNRRAKTDDYGSESISTVLDFLTDEVARIDRDIAAHVGSCFSDISSPLQTFTGIGPVTASTLLGELPELGKLNRRQITALVGVAPFNRDSGYMRGRRRISGGRSGVRNVLFMAALSAVRFNPVLKAFFARLVAAGKPKKVALVACMRRMVCILNAMLRDGSRFEVAVGGGYE

SEQ ID NO: 144615 - protein, 395 aa, unidentified
MTGVIIGVDPHKLSATIEVVDHHEKLLGSGRFGTDQAGYTAMRKYVAVWPDRLWAVEGSNGAGRPLAQRLLEAGEHVVDVPAKLSARVRLFDSGHNRKSDARDAHSIAVVAVRTKTLRVLRADGELEALRMLADRREELTRSRVQTVNRLQRLLSELLPGQAKRDITTAHAKALLATVRPRDIAGKTRRRIAAEELHELVAIEVKMKKSTAELKALVLARRSRLMDLHGVGPVVAARTLADVGDVTRFADRNRFASWTGTAPLDASSGEQIRHRLSRAGNRRMNHMIHIAAISQIRLDSPGRVYYRRKLAAGKTPLEALRCLKRRISDAIYRQLRADAQAAEDADPGGHCGASLISSAVDSHPPHRHFGSATPGPATPTLRPTTNTRKSHLKPPA

SEQ ID NO: 144616 - protein, 408 aa, unidentified
MNTLYVGIDVSSKSNVVYLMLPNGDKHSNFSVANSHEGSTLLVKKIYSALTSHSLDTVLIGLEATSVYGDNLVYFLREDATLAPFNRKIHVLNPKQVKKFHDTYNDLPKNDYVDSFVIADCLRFGRINKEVYMGEYRYKALQNLTRARFFAVQNLVKEKQRFMNVLFKKYSTMTQEKVFSDAFSTTALAVYDEFESAEALANMDLHELTDFIIEKGKNRFPDPDAVAKAIQKAARSSYRLPKTVNDSVNQVLSISITSMKALESQIKEFDKAIKALMELLPNVLISIPSIGPVYSAGIMAEIGDINRFDNQAALAKYAGLAWKQHQSGGFEAEVTRLIPSGNRFLKYYLCEAAFSLVRCDKKYSDFYHLKYKEVNKYQHKRALALTARKFVRLVFRLLKDNRLYCPAK

SEQ ID NO: 144617 - protein, 351 aa, unidentified
MTSLQDIAEVVIGVDTHVATHSAAVLDSRTGGVLGEITVTADAGGYQELIGFAGQHSGLRAWAVEGTGGHGAGLARLLASRGELVLELDRPERKKRRNGAKSDPLDAIRAAREALSRTKLGTPRATGDRQALSVLLAARRSARDAGAAAQRQLFSLVIAAPEALRGRFRGHKLPAMVRLAARLRISPRWDTETATTARVLRGLARRALDLAAEAARHENDIRAIVAAWRPDLLTQRGVGPITAATLLCAWSHPGRFRSEAAFAMLGGVAPIPADSGNGRTPVRFRLNRYGDRQLNWALHTIMLSRLRWDPATQDYAKRRTTEGKTPREIKRCLKRYIARDLYRLLEHPSTA

SEQ ID NO: 144618 - protein, 377 aa, unidentified
MATTRTVLRDQLTAKPGDLFMSFELGDKHWHISIGGERRSVSHYIVEAGHTEEVADCIAKAAARLHTARVHSCYEAGRDGWWLHRWLTELGVDNIVVDPASIEVNRRARRAKTDRLDADKLLAMLVRHHSGERVWSVLREPSPSDEDARRAHRELQRLTHERIAHTNRISSLLVLHNLRPRIVIGGRDWPAWWNEHREQVPPTLRAELEREAARLKVVKEQVRAIEAARAKELAEGKQPLVAQLVRLRAIGAKGAWVLVKEVFGWRHFANRRELAGSLGLVPTPYASGDSEIEQGISKAGNRRVRALLVELAWSWSRLQPASALTQWFNRRFAGGGKRMRRVGIVALARRLAIALWRYLQTGEIPIGARLKPTGSGI

SEQ ID NO: 144619 - protein, 339 aa, unidentified
MKKFYVGIDISKSKLDVAVYDAEKKKIANKFVIKNEADGIQSLFSTLKKEKINLEDCWFCFEHTGHYGFSLCYELEQICCVYSIIPALQIKLSLGMTRGKNDQVDAERIAMFAYTFRDKLQPSKMSSDCFQKIKQLLTYRNQMVRISTQLQNSLKSHQAVCQLTHFDYVVDEIKKQIIEVKVKIESIDELLMSEIKRDKTLENNFNLLKTIKGIGPIISIYLLVLTQNFESFTDARKFNCYAGIAPFEHSSGSSIRGKTKTSSLRNKTIKSLLFNGANAAALHDKEIKNYYKRKKEEGKHHQSVMNAIACKLVYRAFSVIKRQSPYVTLYAQNFKKNLV

SEQ ID NO: 144620 - protein, 482 aa, unidentified
MKKKNIFQNRSQQLLRLFEKAGNRLKMMCVPIDYAKKDHMVMFCNGYGDIVRKPFSVKNTLEGVKYLIDQVMRSCRQRHIKKEYVFFGGEDVNSYAENFANALRTKGFLVANVNAHDAKKQRENLQASTDRIDLMGIATMLLNLRAKCSPAQDGIYRNLRTLVRHRKKLVVMKTEVKNRMHTLVDRLFPGFLNEKNTGINPFSKSSLHLMEDRFSAQQIRRRQQRTLIKVLKRCATPNAESVAAKLHSYAAQVITTPDEYAATLQLSLQHHIKHYRCLHENIDQLLSEIALVLAQTQAAFLTSIKGVGIVLAAGVSSEIGDPFEQKPLNNLTSYSGIIPRVKQSGGIEGHTRSGRVSKRSNHLLKDYVVQSAFQMGLRGPEPLLLDYKRREAAGQHADFGIARRFLRMGMCLMRSSQVYLPPKLRSPKTQMHERAGYYLTMWPLLRDKWKKAHAHQVAFAKDQPLGQWRQMVQELYDIKLKL

SEQ ID NO: 144621 - protein, 429 aa, unidentified
MNYTQNEKIEQVTDSTMVVGVDIGSQIHYARAFDNRGRELTKRIFSFHNDLEGFNSFNLWAETLKTENEKTAVLIGCEPTGHYWFAFAKYVNDHQKRLVMVNPFSVKKIKELDDNSPKKTDSKDPKTIAKLVVDGRYSIPYMPEGIYAEIRDLVYSRDRIMKQHNISANRIQRWLAIYFPEYLGLYTRFDAISGLAVLEKAPLPKDVIALGVNGIRKIWHDKKMRGRGVTEDRAKTLVEAAHNSVGLDGGIGTKSELYMLLEEHRLWTSQLEAVNKVLEEMILKVPHVEKLLAIKGVGSITIAGFIAEVGDIRRFDSPKQIQKYAGLELLENSSGKHKGRTRISKRGRRKLRKILYQVMVPLLARNKEFRGIYDYYVTRVKNPLKRRQAMVAVSCKLIRVFYAVLTKGVEYDRFKMMSDIHRKSDIIAA

SEQ ID NO: 144622 - protein, 347 aa, unidentified
MNYCGIDLGGVSSYAFVTDEKGNKLWSGPIATEKVAFERLVKKFAGGGLSIAIEAGNQTAWVHEELVKLGAEVTVVHPTKVKLIAESRRKTDKIDAKILCELLRLNALPHPVHMPGPEARELRGLLVARRQLVSARSKLSNVARGMLRQTGVRLPAGGLSSLAGWKRLLAGGFDQEHLLIIVSAYYDSFRALTKSIRELDRQLAQREKSEPRAQRLKTIPKVGRIASLTFLAAVDDVKRFSSSRKLVGYSGLAPTVRQSGERTEYGAISREGRSELRAVWVQIAHLVARDKTKATQPLRTWFSRVARKRGKKTALVALARRLLVIAYQLLKTEQDFDVGRLKKKRAA

SEQ ID NO: 144623 - protein, 365 aa, unidentified
MAEVTRGEAARVGVDLSKRVFQVHAVDRAGRVVMAEPMAPEKFFAWCAQLPAGCEVAVEACGGAHHVARRLRSLGLDARLIAGHFVTPYRMAGKSGKNDANDPAAICEAAGRPHMRFVPVKTTEQQGQLSVHRLREGDKAERTALINRIRGVLVEFGMSFPQSPEALRRVLAELIEDGSNERTGIARLVLQRAHLHWIELNLQMKWCEERIGTHVRSDERASKAAALQGIGPIGASALVASVDDFSQFASAKQFSAWLGLVPGQNSTGGRASLGRITKRGDDDLRTLLIQGAKSAVMTAHKRSDRISQWLVQVKERAGWQKAVVALANKNARILWAMLTRDGEFDANHLPERPAPHCALSQCPET

SEQ ID NO: 144624 - protein, 455 aa, unidentified
MAHARGPRRGRRRLSIVNEDAAGLDVGATFHVVAIPADRDAEPVRTFQSFTADLHVLADWLQSVEVRTIAMESTGVYWIPVYEILEQRGFEVLLVNARDTRNVPGRKTDVNDAQWLQQLHQHGLLRGSFRPRATVARLRAYLRHRERLLDYAASHIQHMQKALMQMNVQLHHVVADITGVTGMTILRAMVAGNHDPAALAAFRDRRCKASPATITAALTGNYREEHLFALRQSLELYDFHRTQIAVCDAQIEATLTQLNLDREAPAQPLPTVRHQGGPNEPRFDVRSALYTLLGADLSQVHGFGPYTVLRLVAECGDDMTKWPTAKHFTSWLCLAPGNKISGGRVLSSKTRRSANRASALLRIAAVNVGRTHTALGAFYRRLASRIGKAKAVTATARKLAVLFYNSLRFGLRYVDPGQASYEARYRTRVLANLTRRAKELGYALMKNPETALGVS

SEQ ID NO: 144625 - protein, 468 aa, unidentified
MTPHKDYCLDLPPAVPTPLLPQSPVLSEALQVCHPHAAGIDIGEAEHWVAVPPGCDPQPVRRFGTFTVDLDALADWLIDCGVTTVAMESTGVYWIPLFELLEARGLQVLLIDPRQAKRVPGRPKTDRLDCKWLQRLHTYGLLAGAFRPDAHVCVLRSSLRHRQMLRTYAAHHMQPRHKALEQMNLKLTQVVSEITGVTGMAILKAIIAGERDPQRLAKLRNPHCHHDEDDIAKALQGTWRAEHLFALQQAIALYDFSHQQITQCDQQIKAHLATFGDQSAGRPLPPKARRHKKTNEPRFDARTPLSRLAGVDLTTIEGIEEGTALVILSEIGTDMTRWPSVKHFWSWLGLCPQHKISGGKVLSRRVRPGAHRVTVALRLAARTLHHSQSALGAFFRRMKVRLGTPKAITATAHKLARLVYSLLRHGSAYVQQGLDAYEAQYRERKVTAMAKQAKALGYTLVPLAAQGS

SEQ ID NO: 144626 - protein, 401 aa, unidentified
MRSIGMDVHRSFAQLAIVEEGLCRDEGRIGVKPEDLRAWACTLRPDDQVVLEATTNSDAIATMLRPLVARVVVSNPRKTRAIAEAKVKTDKVDARILAQLLAADFLAETWVADDRTRMLRRVVMRRTHLVRQRTRLKNQVHAILSRNLVPTCPHSDLFSRVGRRWLAHQALPADEQRSVEALVRQLDFHGTELAAVDRDIALQAIDDPAAARLMTVPGIDVAVAVSLLAAVGDFSRFPDPDRLVAYLGLNPRVRQSGNGPAVHGRITKAGRSQARGMIVEAAFAAARTPGPLRAFYRRISQRRGVQVAVVAVARKMVVLCWHLATKGEDYAFARPSLTSHKRRKLELAAGARSRRGPVAGPAHDYYIKERRDHEKVVAAQAERAYELAIAHWQPKRGRPTH

SEQ ID NO: 144627 - protein, 442 aa, unidentified
MSNHSEAFVGIDTSKLRNAIAIAEGGRGGEVRFVGEIDSAGAATRKLVAKLAAKYRSLTFCYEAGPTGYGLYRLIRSLGHECVVAAPSLIPKKPGVRVKTNRRDAVQLAKLSRAGELTAVWVPDERHEAMRDLSRAREAARKHLIGKRQQISSLMLRLGRYYPGKKTWGPAHMRWLMQQKLEHREQRIAFEELLDGMRQEAERMERLERAIREAVPEWSLAEVATALQAMRGIDLVAAVTVLAEIGDLSRFQNPRELMGYLGLVPSESSTGDRVKRGGITKAGNGRARRILVEAAWSYRHPPRVGLEKQAKVAAAPRRVREIAWKAQTRLCGRFRSLIRKGKLPTIVATAIARELSAFIWAINREVLAPGAGFEIRNVPTAHSVTPCSQPSRPGLATADRVADASRRPALTAAARGVPAAARVGTKKRAPRSNKETGLEAGL

SEQ ID NO: 144628 - protein, 320 aa, unidentified
MQTPTKVLNIGADVAKDEIVMACSEGSFPVRKIANRRTALQTFLKTLPSGSRIGMESTGIYHELFASLAHKLGFIVFVLNPKDTRHYAKGVGLRGKTDRVDAELIARMIEHEHTDLHPWIPPTPEQREMARLIKRHSKLISLRQALSMSLKGMDGFATDLKAMRVRFNQLVAHIDQRVKELVEANPDRKTHVTHLRTINGVGPVVSVALVNILEHVPLESADAFVAFTGLDPRPDDSGQHRGKRRLSKRGPSELRRLLYLAAMSAKKTPVWKPLFEYYRAKGLSTTACFVILARRIARTAWSMYTYRTEFDPARFTKCLT

SEQ ID NO: 144629 - protein, 331 aa, unidentified
MVSLHYEVSANMTTEDITLGIDISKKKFDVALFRSGKLKHKSFHNDKHGFEYLAKWLADHQATKAHVCMESSGVYGEDLAEFLYDSGFQVSIVNPARVKGYAQSELKRSKTDKQDAGLIARFCAAHRPEPWQPQAKEIRQLRDLVRRLEALNDMRQQELNRLEAAVGIVEEQLNRHISYLEKEIKETKALINQHIDNHPTLKNKKQLLESIPGIGEVTINVILSEFSDISQFRNAKALAAFICVAPRVRQSGTSLRERGMMSKMGRRALRKAFFMPALVAMRYNPSIIELNQRLTEAGKPKMAIVGASMRKLIHIIYGVLKNEVPYDANYA

SEQ ID NO: 144630 - protein, 435 aa, unidentified
MEEVEDEPLFCDRVAGIDIGKATVMVTIRVPSEARAKGRQQEAREFGTTRRELLALADWLRGWQVERAGMEATSDYWKPVLFTLEQEGFDCLLYQASQVKALPGRPKTDKLDSVWLARITEQGSLAGSFVPPEEIRRLRTHTRCRRKLVQMRTAQKERCEKLLEDAHLKLSSVISDIHGVSGRDMLRAIAAGERNPKVLAQMARGVMRSKIARLEQALDCSFFTGEHAFILTMMLDSIDSLTAQAGVLDARIADMCQPYQRQLEQLDEIPGFGTTTAQDLIAEIGTDMNVFPTAGHLASYARQAPRVKESAGKRKGKNATGRGNPYIGGALGEASISAGRTQTFIGEKYRRLTRRMPKRKAQVAIMRSQLVIAHALLSDPDARYQDLGPDYYERKADIRRRARNHARALERLGYKVTLEAIDPGTGELHLIATAG

SEQ ID NO: 144631 - protein, 330 aa, unidentified
MSQNLDVSPAAIGIDIGKNSFHIVGQNQRGAIVLRQKWSRGQVEARLANLPPCRIGMEACVGAHHLSRTLKALGHDARLMPAKYVRPYSKGQKNDYRDAEAIAEAVQRPTMKFVATKTADQLDLQALHRVRERFVGQRTGIINQIRAFMLERGIAVRQGLRFLRAELPSILATRTDALSPRMLHILEDLSADWRRLDARIEDLSSEIEALARQDKGCERLMTVPGIGPIISSAMVAAIGTGDAFSKGRDFGAWLGPRQSLFAHSVRAGRLGRVGQGRAKALGPLRAQVVDRGCQEAPPPQRAGDCARQQARPHRLGGSSQRARLRVRQDQ

SEQ ID NO: 144632 - protein, 427 aa, unidentified
MEEVTDEPLYRDRVCGIDIGKAGMAATIRVPSDVNPARRAQETRSFGTTKREVLALADWLRSWQVPAVVMEATGDYWKPVFYRLEAEGFECVLADAKQVKHLPGRPKRDPSDSRWLAACFERGAITSCFVATPEFRIIREHTRYRRDLTAERTREKQRAEKLLESAAIKLSSVVTDLHGVTGRDIMDHLIAGERNPKVLAQLARARARRKISELEAALEGAEFFTPRLAALLARMLARIDQLNASIGELTAVVETLLEPYEEQLQQAESMPGWGRRSAQDAVAETGVDMTRFRTGGHLASWAGRTPLDNQSGSRSGRAKSKKGNRYLAAITGETAVAAGKTQTREGARYRRIARRRGKPKAAVALGNTQLKVYHALLSSPGTRYQDLGVDYYDNRASTRRQVRALQKRASELGYTLVPDLTGCPEIA

SEQ ID NO: 144633 - protein, 344 aa, unidentified
MIYHTALDVSLRSVSICIIDGDGVIQFEGKAASEVDEIISCLKGFSSEINSVGFEAGTLTQYLSYGLQAAGIDVICMEARQVSAALSAMRNKTDKNDARGIAQILRSGWYSRVHVKSLESHLTRALLTSRKTVLKKCVDLENEIRGLIRLLGIKLPGTVKHGSFDELVRPMIQSHTTLADALIPMLDARLALYSSYLKLDSQVTAMARKDAICQRLMTMPGVGAITALTFKAGVDDPSRFKHSRTVAAHFGLTPRRFQSGEMDNPGHISRAGDADVRSALYVAAHSLVVRSQKWTYLKAWGLRLSKTKGHRKAVIAVARKLAVILHKMWIDETDFRFSSTEALS

SEQ ID NO: 144634 - protein, 332 aa, unidentified
MENFYFIGVDVSKKKLDFCVMFEGKVVHEEETANHQSAIMSLLHHLEEDYGIDNTRMLVCAEHTGQYTFPLACACKTVECKLWLENAAEIKYSSGVQRGKNDKVDAKRIAIYASRFQDKVRYYERPTEDIERLKQLESERTLYVTDLAKYKGQMKDQKDYMPKALYERKMKRLQALMDDLEEAIQAITDEMDEVIASCPVLFRQQELLMSIDGVGRVVATNMIIATEAFTRFDDPRKFNCYAGVAPFSYSSGSSQHSKARVSHRADKVMKRLLHLAAVAVTHRVGGELKKYYERKVAEGKNKMSVINALRAKIVARMFAVIKRNEKYKPVLS

SEQ ID NO: 144635 - protein, 340 aa, unidentified
MTADVCGIDIGKTVFHLVGLSKEGHIVVRKRFTRKQLITHTVNMPACLIGMEACAGAHFLARALATQGHNVKLMPAEYVRPFVKSNKNDYVDAEAIAEAVQRPTMRFVPIKNEAQLDLQALHRVRDRWIGRRTAVINQIRGFLLEHGIAVTAGPAHLKRKIPSILEDAENFLSPRMRTLLIELRGEWENLEEQIETIDRELAQSAKTVDGCRRLLTIPGIGALTATALTAAIGNGAAFRKSRDLAAWLGLVPRQHSTGGKAKLLGISKRGNPYLRRLFIHGSRAVLARVKREEHSFGSWLNRLEARSPRNVAIVAMANKLVRIAWAVLTRGQTYCATACT

SEQ ID NO: 144636 - protein, 413 aa, unidentified
MDVFCGIDWAEDHHDIALAGRDGQLLARRRIGDDAAGLAQLVELLAAHGDSAEDPIPVAIETPRGLLTACLRATGRAVYPINPMAVARYRDRHSVAGRKSDHGDAVVLANILRTDAHAHRPLPADTELAQAIAVLARAQQDAVWARTAAQNKLRSHLREYYPAFLGAFADARGGITRSEARALLAAAPAPAAGAALTLSQLRSLLKKAGRRRGIDAEATRLRQALRTQQMRQLPLVEDAMGRQALALLRQLDAACASADDLEQATIESFNQHPDAGIITSFPGLGPIAGARVLAETGDDRSRFADAKGLKAYAGAAPITRASGKTTAVLHRRVKNQRLAAAGYVWAFAALTASPGARAHYDRRRADGDRHAAAQRNLFGRLLGCLHHCLATRQHYDENTAFPTPVTATQATAA

SEQ ID NO: 144637 - protein, 326 aa, unidentified
MEHELHYIGIDTAKEKLDVDVLRPDGRHRTKKFANTTKGHDELVSWLKGHKIDHAHICIEATGTYMEPVAECLYDAGYIVSVINPALGKAFAQSEGLRNKTDTVDARMLAEFCRQKRPAAWEAPHPLERALRALVVRHQALTDMHTQELNRTEPAREVQRPSIDSHLLWLEAELKRLEKQIKDLTDDDPDMKHRRKLLESIPGIGEKTSAVLLAYIGLKDRFAHARQFAAFAGLTPRRYESGSSVRGGSRMSKAGHVSLRRALYMPAMVATSKTERGRAFRDRLAANGKKGKVILGAMMRKLAQVAYGGLKSGVPFDASRHNPVAA

SEQ ID NO: 144638 - protein, 427 aa, unidentified
MKYAPIQVLPDVPAGGVFAGIDWAVADHVACVVDMAGRVLDRFSAAHDKAGIEMLITRLRRSGVTEVAIERGDGVLVDALLAAGLTVVVVSSHRVKNLRARYRSGGGKDDRFDAFVLADTLRTDRARLRPLVPDTPATLALRAAVRARRDLVAHRVAACNQLRAHLAVAFPAAVGLFFDLASPISLRFLASFGSQDAAADLDEQAIRAWLKTIPERGKTAPASVLCARLGAAPDGVTGEEGAAHAVITAALAATVGMLAAQIKILEAGIGIQLAAHPDAHIFTSLPRAGMLRAARLLAEIGDCRSRYPGPQSLAALAGVTPVTRESGTHTSHAFRWAVNRPLRDAVCSFADGSRHASPWAESVYQAARSRGKDHPHAIRILGRAWIIIIWRCWQEGTAYDPAKHTALQHILAQQAAQAATAGPGDTP

SEQ ID NO: 144639 - protein, 356 aa, unidentified
MSHDVKYIGMDVHQEAIVIAVLNGSGKLVMETIVKTKASSILQFLHGLRGELHVTWEEGTWAAWLYDLLQPQVQEVVVCNPRRNALLKEGSKSDKVDARKLAELLRTGMLRPVYHGENGLRTLRELGRSYQTIGKDLTRVMNRLKALYRGWGIACAGTQVYAPRYREEWLSKIAQAGVRRRAELLYQQLDGLQALRRNLRPEFLAESRKHKAVKLLRQIPCIGPIRAARLIALMQTPHRFRSKRQLWTYSGLGIETHDSAQFRFVRGQLQRSKKPQQLRGLNQNHNHEMKEIFKSTATRASCGRGPFRDFYAALLAKGMKPEMARLTLARKIAAITLTLWKKEERFDAEQLKTQAA

SEQ ID NO: 144640 - protein, 343 aa, unidentified
MSEVTTIGLDIAKNVFHAHGADTSGRVLFSRKISRTKLLEFFAGQPRCTVALEACGGAHHWGRELTHLGHDVKLIPPAYVKPFVKRHKNDAVDAEAICEAAQRPNMRFVAIKSEDQQASGLVFRTRDLLVRQRTQLINAIRGHLTEYGWVAPKGPSHVAMLGDLLEDKIGSSIPEAARAMFRTMLALLEELNDRIGDLDKEIARRAREDAIARRLMTIPGVGPITATAIAALAPPAETFAKGRDFAAWLGLAPRQLSTGGKQKLGSITKMGERTLRRLLIIGSSAVVLQASKRGAPAGSWLEQMLARKPRMLVTVALANKTARIIWALLMSKEDYKAQVAAAA

SEQ ID NO: 144641 - protein, 355 aa, unidentified
MNAIKYIGMDVHLATTSIAVLDAKGKLMMEVTTATQASALVDFIRGLSGTLHVTFEEGTSAHWLYTLLERHVARVVVCDPRQNPRRLGEKKSDRLDARKLAELLRLGSLKPVYHGNALGPALKELARSYRTLVSDTARVMNRLKALYRARGIRCAGARVYSPRFRDQWLEQLPEPGVRGRADLLYKQLDLLLPLRQEARAALLAESRKHPVHKILCSIPSLGPVRVALLIALIQTPYRFRGKRQLWTYAGLALVTRTSADYQMVDGQVTRSRKPALVLGLNANHNHTLKGIFKDAAASALAHPGPFKDFYTTRVAQGMKPELARLTLGRKIAAITLTLWKKGECFNAEQVKAQAA

SEQ ID NO: 144642 - protein, 360 aa, unidentified
MKVQRTSVGLDVHARSVVACALDGDTGEVFQRRLTPDRGEIVAWLGDLPGPVAVTYEAGPTGFGLARALTTAGIACEVAAPSKLIRPAGDRVKTDTRDAVHLARLLHLGQITEVTIPSASQEAARDLVRARDDCRGDLMTARHRVSKLLLRQGIVYSDGKAWTSKHELWLRAQRFDNPALQLSYEAAFDAMLACVDRRDRLDKAITAMAADSEFTPVVHRLGCIRGVATLTAFGLAVEIGDWHRLTGRSIGAYVGLVPCEYSSGESRTQGGVTKTGNGHVRRLLVEAAWHHRTAYRPGVELRRRWDLASPAARARGQAANRRLHLRWAGFDTRKKRPVIANVAIARELAGWCWSLAVMPD

SEQ ID NO: 144643 - protein, 413 aa, unidentified
MAIFCGVDWAEDHHDVAVVDEQGALLARQRIGDDSAGLRVLLQLLAECGDSSDEPVSVAIETPRGLLVACLRSTGRKVYPINPMAVARYRDRYTVSRKKSDHGDAVVLANILRTDMTAHRPLPADTDLAQAIAVLARAQQDAVWDRTQAHNKLRSQLRLYYPAFLQAFASLRDGIMRPEARVILAAAPTPAEAAKLTKSQLAALLRRAGRKRGIDTEAARLRQLLRAEQMRQLPPVEQAMGTQTMALLRALDTACTNADALAEAAGEAFDRHPDAEIITSFAGLGRLTGARVLAEIGDDRSRFAEARTLKAYAGSAPITRASGKSHVVLHRRVKNQRLANAGYLWAFSALSHSPGARAHYDRRRAAGDAHAAALRHLTNRLLGCLHHCLKNGQHYSEAVAFPAATPKRLTLAA

SEQ ID NO: 144644 - protein, 466 aa, unidentified
MTPRRTKTFRMPPQPAEPLPVQHPRAAGIDGHAAQHWVAVPPEAAPPPPADHPPNLPSHVRRFGACTADLEALADWLTACGVTTVAMESTGVSWIPLFALLERRGFQVFLVDPRQTRQVSGRPKTDVLDCQWIQRLHSYGLLAASFRPEDQVVVLRGYLRQRHRLLRYAGQHVQHLQKALEQMNVKLAEVVSDVTGVTGLAIIRAILRGERDPLELAELRHDKCHHTESEIARALYGNWRDEHLFALRQALELYEAYQAKLRDCDDCIERHLRTFADRSGGRKLDQKARRRRRPRHEPAFDVRAALFRFRGVDLTVIEGVDRTTALTILGEIGCDLSKWPTVKHFVSWLGLCPQHQGSAGQIKSRHTRRGANPAARALRLAAQGCHHAKNALGAFYRRIQARCGGPKAVVATARKIAERVYRLLKYGEAYVRQEMAAAEEAYRARVLKGLARKATGLGYPLVPATP

SEQ ID NO: 144645 - protein, 424 aa, unidentified
MKLQPDTEFAAFIGIDWADVKHDICLQPVNIDTREFDVLPHRPDAIEQWACSLRKRFQGRPVAVCLEISKGPLVYALQKYDFLVLFPVNPATLAKYREAFTPSHAKADPSDAEIALELLLCHRDKLKALSPQSASMRTLEQLVEQRRRLVGDRNRITNRLTGALKQYYPQVLDCFEEKDTLLFCDFLAHWPTPKDAKRARKATLAAFFREHHVRSAGLIEERLRVMKSATPLTEDVAVITPNRLLVQALVEQLRVALHAIARFDAEISTVSKTLPDYPLFSALPGAGPALAPRLLVAFGEQRQRYASAAEFQKYTGIAPVTESSGKKHWVHWRLRCSTFMRKKFVEWASETITRSFWAGVYYRQQRAKGSSRQAALRALAFKWIRILYRCWQTRTPYDESTYLNALKRRGSPLLTSIGATTKNT

SEQ ID NO: 144646 - protein, 387 aa, unidentified
MPQLNDLSRSLVALDQDSTIIAVVELSQSSWLVAGVLPGIERQPRKKLEPSAERLLGLLHRWRDEAVRAGRNITRIALAFEAGRDGFWLARWLNARGVEAYVIHPSSVAVSREHRRAKTDRLDTELLKRAFLGWLRGERGHCSMARVPTIAEEDAKRPNRERECLVGERTRIVNRMKGTLARLGIRNFKPTLRKAADRLATLHTPEGMPLPPNVLAELRRAMARLGFVVSQIREIEQARQKRLEQQPETGPHAMVRQLSRVVGVGIETADMLVHEVLSRPMRDRKAVARYAGLTGSPDESGTKRREQGLARAGNARVRRGMIQLAWRFLLFQKDSALALWYRARTADSRVGTRKTMIVALARKLMIALWRFVSTGETLEGVVLRPAG

SEQ ID NO: 144647 - protein, 326 aa, unidentified
MSNTTSSSPSSVFAGIDVGKANLQLAIRLTDGKFLEQTFGNTPEGRADLVALCQKHHVRQVVMEATGGLELDIAVDLADQDVCLSVITPAQSKAFARALNQQAKTDAIDARLLALFGLKLSPAPCEIPSQIQRDLRELAARRRQLIQQLVQEKKRAQQARDGRVKQSIAAAIAFLENQLADVDRHIGGLIAADEQLQATVQRLDSVPAIGPATATHLLIACPELGTLNRQEIASLAGLAPFNHDSGSMNGQRQIRGGRESIRTALYMATVAALRFNPVIKHFYAELVQRGKKKMVALVAAMRKLLIMLNSMIREKKNWAEFIPAAA

SEQ ID NO: 144648 - protein, 368 aa, unidentified
MKKDSIFVAIDDSKRTLVIGTLRPGSDAPEVRSIPNEPRHLRRLCERLKREGAVRVCYEAGPSGYDLYRQFTGWGVPCQVVAPSLTPRKPGDRIKTDRRDVTKLVRAFRSGDLTPIAIPDEASEAGRDLLRCREDVQEDLLRWRHRLGKFLARHGRLYREGRNWTQRHWVWIRAQHFALPALERTLQEYVFTVEQLLARVAALDQEIATLAETDGYRERVGWLRCFRGIDTLAAMILLVELGDVQRFTHPRQLMAYLGLVPSEDSSGDRVRRGSITKAGNLHVRRILVEAAWHYRHPPRLGAALARRSAGQPPAVLRHAWQAQQRLHRRYRHLVGRGKRAPVAMVALARELSAFLWAALSQAPLAQAA

SEQ ID NO: 144649 - protein, 426 aa, unidentified
MVALRSRREQLDEVSLPLKEVTVTDPQIRVGIDVGCKTHRVGIADPKGQVLEEFDISHTDAGFQEFFRRIDHHKQELDLPVAVAMEGFNGYARPLDQLIQERGYTLYNVNNLKLARFKEVFPGAAKTDPIDTRKILELFHLKDHLPLAKDVLQEVVSAPVVNDKLKRLSRRRRQLVNDKVRVANRIQSDLQAVCPELLAITNKLSNLWFLRFLTCRNDLPQLARLQHSTLLKVRGIGQKYAWTIQQWQRKASFSSEASYVGPMIISDARRILELLSQIHILDEALAELADRSELACRIGSIGGFGKTCVAELAGEIGTTKRFSSESSLALYVGMSPLSKDSGQHHGSKCPRQVNQRAKGAMMTAVARHINFVPESRVYYDRKRAEGKKHNQAVRALGRHLVRVIWSMLNNRRDYELRTPGGETNVT

SEQ ID NO: 144650 - protein, 365 aa, unidentified
MGVPTMAQARTFVALDVHVSGTVAASIERESGELRRRRLSGRAAEVVEFVAGLPGPVRVTYEAGPTGFALARRLEAAGVSCVVCAPGLIPRGPADRVKTDRRDAERLVRLLIAGELHAVAVPSIEAESLRDLVRAREDLRGDLMSARHRVSKLLLRHDVRFEGTERNWTGAHLRWLAGVRFAQPGTQAAFDDYRGAVEALIVRRTELERLIAEQLPASPWAQTARRLMCLRGVDTLTAAGLCAEIGDFGRFAHPEQLMSYLGVVPSEHSSGTRRRQGSITKSGSRHARRLLAEAAWHYRQPPRVSEPLRRRQAGADPMIVALSWKTQRRLHRVWSRMEQRGKRRTIIAVAAARELAGFCWAVATA

SEQ ID NO: 144651 - protein, 338 aa, unidentified
MKLKRIGVDLAKQVFQVHGVDSHEQVKCRKQLKRHQMLDFFRQLEPCVVAMEACGSAHYWARELGKLGHEVRLIAPQFVKPYVKGGKNDANDAQAICEAASRPTMRYVEVKTVEQQASQSVHRIRGRLIKARTALVNEVRGLLAEFGLIESRKGVAATRELLCRAIDDSDSSMPGSMRELLRGLSEELQGYDERLKKLEQLIQREAREDERVRRLMKIEGLGPISATAIVSAVGDARQFASGRQFAAWLGLVPSQYSTGGKERLGGISKRGDKYLRTLLIHGSRSVLKHCQSKTDKRSDWLSQLMCRRNKNIATVALANKNDRIIWAILSKGEQYQPC

SEQ ID NO: 144652 - protein, 353 aa, unidentified
MIHLGIDQHKKYSQVHAMNDNGEVVFKGRLNNNMDEFIKLRNQLGDDQIQSVVEASRTWVVYDLLEKLQFNPKVANPLKTKAIAEAQIKTDSIDAQILSCLLKGDLIPEVKVAPYEVRRVKNIIRQRIWLVKFQTAMKNRIHHILDRNHISFGTGISDLFGVQGRKWMKTVSKELPKSEGELLNENLELLEGVELHVKNIKGLLREHLNMKREVEICKSLPGVGDVFGPLIALEIWDINRFSSESKLVAYAGLTPTTYSSGGKTFHGKLLPQSNKLLRYAFCEAAWAAIKSSPYFGSYYQRLRERLNPQKAIVGVARKMCEITWYCLQEQRVYEERVYKRWEGKEKSKVCQTR

SEQ ID NO: 144653 - protein, 453 aa, unidentified
MAQRKRRSAKTTQSMPVLNPDAAGIDVGATEVFAAVPQDRSEQPVRSFATFTPDLEALADWFEECHIKTVAMESTGVYWIPLFQILESRGIEVCLVNARHVKNVPGRKTDVADCQWLQYLHAVGLLRGSFRPPQAICAVRSILRHRDMLVRYAGSHVQHVQKALNQMNLHLHHVISDITGKTGLAILDAILAGERDPAKLAELRDHRIKAEASVIEKALIGDWRDEHLFTLRQALATWRHYQKQIDECDLEIVQLLASFDPPDDPSASGSRSDQRVASQAVAEPKSLSDHLQRVLGVDLTEIPGLDTGVIQAVFAEIGRDLSAFPTAKHFASWLGLCPDNRISGGKVLSVKTRTVKSRAATILRLAARSLHHSKTALGDYYRRMRARLGAPKAITAAAHKLARILYHLITQRQPYTESVFAKSEQKYQQRRLARLKKEAATLGFTLVQRHAVS

SEQ ID NO: 144654 - protein, 482 aa, unidentified
MKSKPQEKNERATNHPEHHHWHEMNRKQRREMMRKMQSEDLSLEVIHPDAAGIDIGNESHYAAVPPSGDSQPVRRFGCTTAELKAMAAWLKRCGIRTVAMQSTGVYWVAVYDILEQAGLEVYLVNARDTKNLPGGKSDVQESQWLMKLHTYGLLRNSFRPAQEIRTMRTYWRQRNDLVQSAGRHILRMQKALTQMNLQLANVLSDVSGMTGQAIIKAILGGERDPHKLAAFRDCRVKASEEQIARSLEGNWQEDLLFVLKQEQDGYEFCQQQMAECDRRLEQYLQQREDRSQGATLPEEKRKGRLKKKRANKPQFDLRTDLFRITGTDLTRIDSIDVMTAMTVISEAGWDMSKWETEHHFVSWLRLCPDNRISGAKVIGKGRLPTNNPISIALKIAASTLRLSKTYLGAQFRRFRTRLGAPIAIKAMAAKLARLVYRMLRHGMKYVDQGALFYEAQHRQSQIKQLKWKALKLGFRIVQDPAA

SEQ ID NO: 144655 - protein, 421 aa, unidentified
MKNSAARKLKQVPAGYLIVGVDPHKKKHAAVAINEDLVVQTKFKFVNFRDGFDEAMEKARVEMVKAGCRGVMFAIETGGHFWRNFAYFLEERGIPFRLISQLTLKRMRDGRDLNRRKNDFRDAEMAAGVLRTGDFTETKLPQGVYAELRSTHSAYYRLVKERTRIINLMKGLLDGLFPEFTQVFKNPCGLTALVVLSICPAPAAIASMNEDVFMDVIRSGRQGRLMKQKLRALHQAAQTSIGIKPGADAVATEITLLVSRYYLIEQQVDRLVKSLIKLVDRTGEGKYLLSIPGINYLSAAALLAELGSFRSYNNAKQLIKMAGTNPIESESGGKRLGKTPMSKKGRPRLRYSAWSAVIPLFRHNPDFRAWAKRLRERPAHANPLNGKEVVGAALNRLLRLVYTLVKKQEFYRSPQIALVAN

SEQ ID NO: 144656 - protein, 345 aa, unidentified
MELHTIGIDLGKTVFHLVGLNQRGEVVVRKKFSRKQLLHFTANLQVKLIGMEACGGSHFLGRALRGQGHEVRLMPAQYVKPYVKTNKSDYIDAEAIAEAVERPKMRFVPIKSDDQLDLQSLHRVRERWVMRRTAVINQIRGLLLERGITLRQGRRHVDAALPGILEDACAKLSGAVRVLLAQLKLELDHLQMRIDEADAMINKAAAESDACRRLVAIPGIGPVTATAIIAAIGNGAAFKKGRGFSAWLGIVPGEYTTGGKQKLLGISKRGNSYLRRLLVQGARAVLQQSAKQSSGLSAWLTQLTARTHSNVAAVALANKLARMAWAVLAKNEPYRPPMLADAATT

SEQ ID NO: 144657 - protein, 310 aa, unidentified
MNSIAVGIDVSKATFVVSIDKAKPFELANTQAKCLELAQRLPKGAIIHLEATGGYERWVRHTLEAKGFVVHLHNPLNARRMSQARSVKAKTDPIDAIQLAESGPMLPQRKPKSLEHEHLADHSRTIDTFVKMVASLKKNLNRPCLDEIAAQGLALAIEDLEHRIQELEASFATRIRSSSFGAHYTLSQSIPGVGPVTARRVLAELPANYLEATGSQLASYAGMVPLDYESGKFKGKAHIGRGNSRLKGSTYMAALSLLASDPSFKAHYHRLRERGSCHQQAIVPLMRKLLIRIVAVLQRGTPWTKEAPPA

SEQ ID NO: 144658 - protein, 397 aa, unidentified
MTARIQDGTDSAAALYVAFELGWSKWLLGFSVGLGQPARRIEVHARDLGRVSEEIAKAKRRFGLQATAPVVSCYEAGRDGAWLHRWLVAHRVANHVVDAASIEVNRRYRRAKSDRLDVEKLLAMLIRFAQGERRVWKVVHVPPPAAEDLRQPERELLTLKRERTQHVNRMKGLLAGLGLDLVVDKQLPQLLSDLRQWNGLPVPPHLHSRVLREYARVELLDRQIADLENAQRRAARDDQARQVGKVRNLLGVRGVGAQSALLLVRELFGWREIKNRREVAALAGLAPTPYDSGQTRREQGISKAGSKRIRWLMVELAWDWLHWQPESRLAVWYKKRFGEGGARLRKIGIVALARKLLVAFWRLADEGEIPEGAVLTDWYKKVTGRLAKRRATQPAPA

SEQ ID NO: 144659 - protein, 316 aa, unidentified
MNEPTSFVGIDVSKNTLDVHVLPAGDHWQVANDPTGCAQLIEHLEPLGETALVVMEATNVFWRMATTALAGAGLRCAVVNPRQVRDFAKAMGLLAKTDAIDARVLAEFAQRIKPPVRALPSAQCQLAAEMLGRRAQLMGMRVAEINRLATATAKRVRKDIQTTISFLEKRLAAMDEEIDHWLMSTPIDQSRADLLQSFTGIGSTTSRSLLITLPELGSLSGKQIAALAGLAPFAKDSGNARGKRHIAGGRSVVRAALYMPALSAITHNPVIRALYQRLIHAGKHHYVAITACMRKILVILNAMLRSNQPWKPPLLA

SEQ ID NO: 144660 - protein, 393 aa, unidentified
MICVGIDVAKDKHDCFILSSEGEVLADVFTIQNNAEGFDMLLQTIRRCARPEDKIKVGLEATGHYSYNILGFLLDKGLDTYVINPLHTNLYRKSLSLRKTKTDRVDARTIAAMLMSDVDLKPYTDTAYHNEELKSLTRYRFDKVRERAKLKQSVSRLVTILFPELEKLVSSLHLASVYALLIEFPGAKQVAGAHLTHLKAILSDASKGRYGRDMAVTLRDAARCSVGSVMPAKSLELQHTIRLIRELDAEIEDIETAIQSMMDEMQSPITTIPGIGVRMGAMILAEIGDFSRFDSPDKILAYAGMSPSTYQSGQLSLSGTYSHMEKRGSRYLRYALYNATKYVCLWNPTFAAYLAKKRAEGKHYNVALSHAAKKLVRLIYAIEKSQKPYCSAA

SEQ ID NO: 144661 - protein, 358 aa, unidentified
MNNVKSSRIDFTGQPIYVGLDVHKKSWSVSISTQYGQYKSFSQPPEVDKLVHYLRQHFPGAQYSTAYEAGYCGFWIHDRLKENGVGCLVVNPADVPTKNKERKAKRDRIDCRKLSRSLRNGDLEGIYVPPREKVEDRSLIRTRLSMGRKQTRCKNQIKSMLLFYGVVIPEEKEMGHWSRRFIRWIEGIRMERASGDMALQIHLEELSHLRQIIAKLNRAILALSRTEEYRPWVLLLRTVPGISTLTAMILLTEIGEITRFPSIDELTCYVGLIPDTNASGEKEHVGGITQRSHSQLRWMLIEASWKAVQKDPALMMAFDQYCKRMRKTKAIVKIARKLLNRIRYVLKNRSEYVPAVLE

SEQ ID NO: 144662 - protein, 321 aa, unidentified
MEGSTSSSRVSCVGIDVSKAKFDALILPEATRLTCAYDAEGIGQLRAALPQECIIVMEATGGYERRLAAELIDAGHRVAIANPRQVRDFARGLGILAKNDRVDARVLAIYAQHVQLRWQEKPTEKQQELTALVVRRRQLLSLQTAESNRWEQATVKRARKSVGHMLDVLRKELKDLDAEIARLIGDDDDWRGKSELLKSVPGVGPATSASLVAELPELGKLNRQQIASLVGLAPFSRDSGQFRGQRSIWGGRGSVRTALYMAAFNAKRCNPVIRAFAERLQRAGKRPKVILTACMRKLLVILNTMIRNQTAWKMSVILENT

SEQ ID NO: 144663 - protein, 344 aa, unidentified
MEAIVTIGLDIAKSVFQVHGVDANGAVVVRRRLTRAKVLSFFERLPPCLVGLEACATAHYWGRELRKLGHDVRLMPPSYVKPYVKRQKNDAADAEAICEAVTRPSMHFVEIKSPEQQSIMSLHRVRQMLMRQRTQISNAIRGHLGEFGRVAPIGRNGLAQLIAIVADENDNTLPDDVRAAVAMLAVQLRIVNDQILELDRRVRASARATDVGRRLLEVPGVGPVLASALVATVPDASAFKSGRNLAAWIGLVPRQNSSGGKDRLGGITKQGNRYLRQMLVVGALAVIRYAQRHGTRRPWLVHLLARRTTKIAAVALANKTARIIWAIMTTGEPYREPSPASAAV

SEQ ID NO: 144664 - protein, 369 aa, unidentified
MGNRSMFVGLDVHKETIDVSIADGNRGGEIRHYGVIASDLEPLDKVVRALRAPDRQLHFVYEAGPCGFGIYRHLTKRGERCVVVSPSMVPRRSGDRVKTDRRDSLALARLHRAGELRPIYVPDDADEAMRDLVRAREDAVVGGTQAKYRLKAFLLRQGRRYPGREGWTLPYRRWLTDLSFPTAPQHITLQEYRDTIDETERRIERVTEQLRQLAPTWRWAPVVAALQALRGVSFITAVALVAELGDLTRFAHPRELMAYLGLVPSEYSSGPSVRRGGITKAGNPHVRRLLAEAAWAYQGIPRIGRQHAYRQEALPKVVCDIAWKAQLRLTARFRRLVARGKAKPKVATAIARELTGFIWAIAQKVSPAS

SEQ ID NO: 144665 - protein, 428 aa, unidentified
MTQSSSTTSPTMWVAIDIAKAHNEVLIESPQGRRRHFRVANTLEDFAKFAALLSSSGYRCRIAFEATGDYHRPLAYFLGAQGFALSLVSSIAVARTRDALYNSWDKNDPKDAQVILHLLKTGTTQVYYDPLEHHYHDLQELANTYQQISLGKVRLHHSIVTHYLPLYFPEAERYLHSTRAEWFTQLLLLAPCPAVVLKWSREEFITWARRLNAHKNDKTRWLADFYEAARSSIGLPVAENSEAIRMFRVVLNEYLHLCRLRREMEEQVVARLSNHADFRRLQTIPGIGPILALIILAEAGNLRRFSHDQKFLKYCGLDLSTEQSGQFRGTTKLSKRGNARLRYAFWMAGAVAVRAKQNSFCQKFHDYIRRDPLNPDLRRKAYTAVAAKMARVVYAVVKTGTDYRRFPEATVPGGRIPSLRAVEAISTS

SEQ ID NO: 144666 - protein, 356 aa, unidentified
MLYLGIDQHARQLTVSLRGESGDVLLARQVSTEPDRVQAFFTQPPRDRLGAGESFAAVLEVCGFNDWLIRLLKDYRCHKVILIQPDDRKKRKTDRRDAAALSELLWANRERLLNGKPVRGLRQVEITSAADQENRRLTTLRKEAGVARARLINKVKWVLRRHNLQWGMPTKTFPTAKAVTWLKGLALPEVDRLEIDHLLADLEQADRRLRDLEQAIARRSAGDQHVAVLASMPGVGRGFTALSLACRVGRVERFPRANSLANYWGLTPGCRNSGENDQRLGRITKAGSATARWLLAQLVHKVLRRDARLRDWFRRVKRRRGPTVARVAVMRKLATVIWHMLSKRQTYAECRAFAAA

SEQ ID NO: 144667 - protein, 342 aa, unidentified
MEISTIGLDLAKSVFQVHAISAAGETAVRKALRRSQVLPFFTKLPPCLVGIEACGTSHHWARELTRLGHEVRLMPPAYVKPYVKRGKTDANDAEAICEAVTRPTMRFVPVKSPEQQAALALHRTRDLLVKQRTQLVNMIRGLLAEFGIEMARGLHHALELARRVVDGCAPEVPELAQRVVTGLAQQIGNLQVQLGALEKELLAWHRSNKLSQRLATIPGVGIISATALAASVTEPERFRSGRQFAASLGLTPLQNSSGGKERMGRISRMGDRYLRRLLVIGMTSLIRRARTSPASVDPRIPAMLQRRPARIVTVAAANRTARVAWAIMTRGGTYRKPTMAAA

SEQ ID NO: 144668 - protein, 430 aa, unidentified
MKSNTQNAKIEAITEKTLVLGIDVGSETHYARAFDYRGVEYSKKPFKFSNTEAGFVTFKAWVLDIKEKHGKDKVIPGMEPTGHYWFNLGKFLQDNEMKPVLVNPHHVKKSKELDDNNPTKNDRKDPKVIAGLVREGRYMIPYLPDGVYADLRTASNIRFQLQAELTRIQNRISRWFNIYFPEYKTVYGKPDAKSGILILKEAPLPEDILTLGIDGVNQIWRDAKLRAVGKARAKTLIEAAEHSVGSKEGAVSARMEIRMLLEDYESRNIRLQEVMGLIEGLVNQIPMAEKLLEIKGVGIKTVSGFLAEVGDIRRFNDPKELQKLAGLALVENSSGKHKGKTTISRRGRKRLRYLLFEVAMSLVAKNPEFRELHNYYTTRRLNPLKKMQSLMAIAAKLLRVFYAILTKGVGYDPKKMVNDIRRPAAYAQAA

SEQ ID NO: 144669 - protein, 340 aa, unidentified
MTHIAMDVHKKRSVSAYQTPAEAEPKMVRCYTTRAGMEKLLEGLPRPWIVCLEATRQSPAVVRWLQELGVDEIQLVDPKGLKAFLQGKPKTDARDAKAMLELLQVNRLPKAYLAPAAVQEVRALTRTRAFVRRGSTSVRNQLRALLNQHGLEVPARDLCGRGGQRQLAESLAHLGPQGQAAAQTLNALLQATEATLDALDGGVRAELAHQPVAQALMALPGIGPVMALALVAELGVIERFEDPAHLISYAGLAPRAHDSDDHHGERHLPQRCSKRLRSLVVQAAQAACRSRQPSHARRTYERLRARGLHSNTAKIAAARELLKDVFYAWQQAEAPGGEAA

SEQ ID NO: 144670 - protein, 322 aa, unidentified
MAQQTVKFNQVIKCGCGIDVHQQVIVATVRHSDDNYETKEFDAYTSSLTKLREWCKSEGVTHIAMESTGIYWKPVFNILEEDFEIILVNARHVKNVPGHKTDKKDSCWISKLLVGGLLKGSFIPPRDIRELRDLVRYKKKIINQAASEKNRLIKILEDCNIKLSSVLSDVSDGASATKIINDIISGETDIDKMIKHVHGKVKASREEIRKALEGRITPHHRFMLKIIKERISETEKIILKIEKQIDKAVKQYQVEIDLLQTVPGVGKDSAISIISEMGVNMEQFPNEQHLSSWAGMSPGSNESAGKKKVPEPYTETNISEQH

SEQ ID NO: 144671 - protein, 360 aa, unidentified
MIYLGIDVAKNSHVAAAMSSEGEVLLMPFSFANSADGFTLLREKLNNLPKLPLLVGLESTAHYGENLICFLCGNGYHVAMINPLQTAAIRKSAIRKTKTDKVDAFVIAKALMMEGYTELQQSDIQILKLKGLCKTRQNLILMRTRCKIQLGSFVDQLFPELNRFFRSGLHINVSYTLLKAHPRPAEVGALHLTYLSNLLRKASRGKYKKEDAIRLRELARNSIGTDNPALALQIRQAVSQIELFSAQLKQVESEISTIMDSLDSPIMTVPGIGYLNGAMILSCIGNIQRFSSPAKLLAYAGLDPAVVQSGNFSAKSTRMSKRGNSMLRYALINASHNVVRNNETFAQYYNSKIAQGKTHY

SEQ ID NO: 144672 - protein, 418 aa, unidentified
MENRPPFSYQATVGIDWADRKHDIFVRFANGSSYRRKIGSRPEAIQAWLLELRSACAEGKIAIALEQRRGALFYQLCTHLNWIDLYPINPHSLFSFRQTFFSSRAKDDPIDGQLLEELVRTHWDRLRPYQPAVTTERQLDLYCRQRRSLLDLATKIELRLISTLKQHFPVAVDLFEAIGMKSDIALNFLSRWPTLHELRRAKPHTVRSFFYAHNSRSQSLIERRLQQIDEAHEVTDDLALIEPMVLMTKCLVGQLRQFNQTINEFNQKIKEIFKSHPDHLLFESLPGAGEKLAPRLLSLFGSDRSRWPEAADIQRYSGIAPVVERSGKSLWVHRRLARPIFICQSFHEFAQQSTRFSSWADQFYKLQREKGKSHHSAIRSLAFKWIRIIFACWKANRPYNESFYVRALAKRNPFLSST

SEQ ID NO: 144673 - protein, 321 aa, unidentified
MMMIGIDVSKRKFDVVLLEGEKVRRKVFVYDEDSAQALSSWLSGRGIALVDCHVCMEATSTYYERLATGLHAMGATVSVVNPLQIKHFGQSLMVRQKTDSSDALVIAQYCRDQRPPAWRPPAPEVRELQSLVARLESLIGMRTQELNRQHEAQAVAWESIARMLALLEAEIQRVEQLIADHIDHHPGLRTQQQQLCSIPGVGPRLSTYFLAWLPFDRMAGARQAAAFVGVTPRHHESGSSVHGKARMAKLGHRRLRSMLFMPALSAMRHNEAIRRFVTRLQAAGKPRMVIVGAVMRKLVHLMFGVLQSGKHYDPHRALART

SEQ ID NO: 144674 - protein, 412 aa, unidentified
MEVVNPRCAGLDVHKETVTACVAIREGGRLSQEVRTFGTMTTELLVLHDWLMAHRVTHVAMESTGVYWRPIYNLLEGSFKVLLVNAAHIKNVPGRKTDVKDSEWIADLLAHGLLKASFVPPQDLRDLRDLTRYRKSLTDERVRDVNRLQKLLETANIKLSSVASDVMGVSGRAMLEALTSGNTSPEALADLARGKLRKKLPMLREALNGRFRPHHQFMLGQILSHLDYLDDAIGELSKEVEARIAPFAPEIELLKTIPGVNQKVAEAVVAEIGTDMSRFPSDRHLASWAGLCPGNNESAGKRKSGKTRNGDRWLKRSLIEASLAASRKKETYLASLYHRTARRRGKNKATVATAHAIIVIIYHILAEKLPCRDFGADFFDRLNENYVKHNLIKRLEAFGLIAVPKPLSESLA

SEQ ID NO: 144675 - protein, 344 aa, unidentified
MSIVGGLDIHRKQITFDYVDTETGEVRRGQICPADRAHLAKWLARFAGQDAHFALEGCTGWRYVAEEIIAAGLTPHLADPAEAAHLRGPKRRAKTDRADARHQRMLLEQGRLPECWIPPPHVLECRALLETYLDLREQRTGWVQRIHAVLFHHGAPRIAGQQLGTAEGAAALRAAAAHCSPAGQLQLAIAAQMLLVYDERLHQVRRQLLDRARHTRGAAELTARLYGVGPVTGLALTCWLGGAGRFSSSRKAVRFAGLDITVYSSDGKRAAGHLSRQGPQLLRWALYEAAKCAAKPTAPDYRCYTAARDRRTGGLATLSVARKLARRCYHTLRDLGEDALAPAA

SEQ ID NO: 144676 - protein, 342 aa, unidentified
MAVVSIIGLDLAKNVFQLHGARADGSVAFRKKLPRGKLLEFFASAPPCLVAMEACGSAHHWAREIMALGHEVRLIAPIHVKPFVGRNKNDAADAQAIAEAASRPTMRFVAVKSVEKQSSAMVFKARDLLVGQRTQTINALRGHMAEYGVIAPNGPVHVARLAQALEEPEARLPPPVVAICRMLLAHVGSLSDQIALLERELRERACKDETARRLMTIPGIGVICATAMEALAPPPESFAKGRDFAAWLGLTPRQSSSGGKVRLGGTTKMGQRDLRRLLICGAVAMVRWAVRKGAPAGSWLARMLGRKPKLVVAVALANKNARIAWALMAKGGIYKVPGEVGA

SEQ ID NO: 144677 - protein, 356 aa, unidentified
MKNNKLDFRGQTISVGIDTHKKNMVITPRCQGMQLRTISMDPEPEQLVRYLHKNYPNASYESVYEAGFSGYWMDRKLRAAGIKNIIVNPADVPIKQKEKRKKTDKIDSRKLARELSAGNLEGIYIPSEEHEAIRALSRLRKQITKDQTRQKCRIKSLLNFVGITLPENSELKHWSGKFIKYLSEIEFKHKAMKITLERLLESLINGRQILVGIVKNLREIEKENAEMKKIIGYLQSVPGIGYITAITLYTEIMEIKRFGKFDELSSYVGFSPSTDSSGEKDKVIGLSKQQNKYLRNMLIESSWLAIRKDPALLQAYGNLVKRMSKQKAIIRIAKKLLSRIMYVWRNEKHYVCAVVS

SEQ ID NO: 144678 - protein, 344 aa, unidentified
MNQISRIWMDTSKHIFQLYGVNSVEAPVLRKKLRRKEMVAFFEKLAPTVIAIEACGASHHWGRLLQSFGHSVKLIAPQLVKPYVKRGKNDAADAEALCEAMSRPTMRFVPVKTAEQQAALMLVGVRDRLIRNRTQQANAIRGYAAEFGLTAAKGIAHLGPLLERIQADESLPLLARELFAIQAKDLMQLQAQIGELNAKLMTWHRADECSRRLAKIPSVGPIGAVLLKMKTPDPQLFRSGRQFAAWIGLTPKDHSTAGKVKLGGITRAGDEGLRSVLVAGATAVIQHAQRCGKPSPWLAGILKRKSPKLAAVALANKTARIAWKMMVTGETYTAKSAPTQAGAV

SEQ ID NO: 144679 - protein, 343 aa, unidentified
MQAVTTIGLDIAKSVFQVHGVDAEGKLLIRRQLKRRYVLAFFQKLSPCLVGIEACATSHHWSRELKALGHTVRLMPPAYVKPYVKRQKNDAADAEAICEAVTRANMRFVETKTPEQQSCLMLHRTRHLFIRQQTSVINAIRAHLAEFGIVAPVGRKGVEQLLEVVADVSDNRVPEVARACLAALGAQLRRLKEQILEFDRRIMAWHRSNETSRRLDAIPGIGPALATALVASVPNPKAFRSGRNFSAWIGLVPKQHSSGGKDRLGSISKQGDRYLRSLFTAGALAVIRYAKIHGTKHRPWLTALLARRPTKVAAIALANKIARMAWAVMVTGERYREPVALAA

SEQ ID NO: 144680 - protein, 346 aa, unidentified
MLADELDYVLGVDTHRDAHVLAVVTAPAGAALAGSEIAANRSGYREALRFAQCHASGRRAWAIEGTGSYGAGLARYLADQGELVLELSRTSRAERRLRGKDDNLDAVRTARAALASETAALPRTGERREALRLLLVARRSAVDVRREALTQLRAVIVTAPEPLREQLRRLPVGRLLDRCSRLRRSGTTDELATRIVLRSLARRIQAATLEAAELEREILAHVRALAPVLLDEPGVGPIVAAQLIVSWSHPGRLRSEACFARLAGVAPVPASSGQTTRHRLSRGGDRQLNRALHTIALYRRQHDPATRDYIARRVAEGKTRREATRLLKRYLARHLYRLLEHQPAMT

SEQ ID NO: 144681 - protein, 361 aa, unidentified
MSESMALVGLDVHQSQTVAAVLDPVSGELLVERLRGAPSAVVLEFLERLERPVRAIYEAGPTGFGLARAASERGLDLRVAAPGSIPRAPGDRVKTDRRDAKRLVRLFAAGELSFAFVPSEADEQFRDLVRCVDDVRRDLMRARHRLSKFLLRRGLRFAGRQWTQPHERWLHAQRFDDAPSRAAFIDYCCAVEALVQRRRALIAALEQAAPESAHAEAIARLRCFRGIDTLSAAGLCAEVGSFERFSKPQLLSGFLGVVPCEYTSDTKRVQGSITKAGPTHARRLLVEAAHHYRRRPAIGQGLAARQVGQDPRVVAVAWRAQRRLNARWTHLSERRGKPTGTVAIACARELAGFLWEAATVN

SEQ ID NO: 144682 - protein, 444 aa, unidentified
MQTLVECGCGLDVHQATVVACLLSVLKSGKVQKQMRMFGTTTRELLALRGWLLSQRCTHVAMESTGVYWKPVYAVLEAEGALEIVVANAQHVKKVPGRKTDVKDAEWIADLLCHGLLRSSFVPPKPIRELRDLTRYRRKLVESQAAERNRLLKLLESANIKLASVATNVFGVSGRLMLRALIEGKTTTREMAELAKGKLRNKISELEPALEGKLEEHHRFLLKLQLERLEAAEKDLAILEQRIQEKLEPYVTQLALLQEIPGVDWTLAAVIIAELGVDMKVFGNVSQLASWAGVCPGNNESAGKRKGSRIPKGNVYLKTALVEAANAAARAKGTYLRDKFFRLKARRGYKRAAVAVAHKILVAIYHMFSHRVCYTELGDLYLDKLNKHHLTRNLSSSPRAFGICGNARAKSGLSYLPEAIFRAVLTSDVGCEIGHKLGARNRIE

SEQ ID NO: 144683 - protein, 370 aa, unidentified
MTSIIYVGMDVHTTNYTVCCYSITTDQVFATATMDPDHMNIVKYLNRVDRELGGDCQFLCGYEAGSLGYSLYHQLTHQRLNCVILAPTTMATTRKKGIKNDKRDAAKIAKCLAYNTYSPVYVPTDEDIAVKEYIRMRNDAKDTLKRYKQQLLAFCTRNGRRFTEGRNNWTRKHLTWLAKLDFGIAILNETLQEYLTLYHQAAEKVELFDKRIEELSHTERYEEKVKKLTCFIGIKAHTALATIVEIGDFIRFPTAQQFTSYLGLVPGEDSSGNSIQRTGITKAGNTHVRKLLVEAAQCYSRGKIGTKPKALKERQAGNDTKVIAYADRANERLKRKCYRIMFKSKRNIAVTAVARELACFIWGMMTNNIA

SEQ ID NO: 144684 - protein, 409 aa, unidentified
MELLYDRVAGLDVHRDSVAACVRLPGPRGGAVTDKQRFKTTTAGLGRLAGWLAQRQVALVAMEATGVYWKGVYYALERDFAVWLCNAHHVKNVPGRKTDLSDAEWLADVAAHGMVRPSFVPPPPIRELRELTRYRKTQIDARAAEIQRLEKVLQDAGIKLTSVASKVLTQSGRAMVEALIAGERDPARLAALAKGKLRPRIAELTEALAGHFGSHHAVAARRILDHLDFLEASVAALTEQIDARTRPYAAVFELLLPVPGLDRLTIDVVIAETGADMDRFGSPAQLASWAGLCPGNHESAGKRRRVGTPPGNQWLRRALVEAARAAARTKGTYFAAQYRQIARRRGPNKAAVAVAHSLLDLIWHLLSTGECFQDLGDDFFDRRRDPERETRRLVHQLQQLGYTVTLATA

SEQ ID NO: 144685 - protein, 358 aa, unidentified
MNNVSQKPEKIYFGLDISQKNIEIYALKGEKGVSFGKITNTRQGLVEFFNKLPWASESIVVALETGTHSAWISHLLEVRGYEVIVAHARDLAFIYKGDKKSDRIDAEKLARVARADKKLLHPVKLMDVKRQEDLLAIKARDLLIKERTCIINAIRGFLRSFGIDDTEYSHETINQMYEVLPEEIRQNLRGLFETLKSINVSIKNYDKRIERIATNYPETKILQQIKGVGPLIALSFALIIGEANRFTSRQCSSYTGLAPKRDQSGDVDKQLGISKCGNKLLRRLLVQGAQYIMGPFGEDCDLRDFGNRIAQRGGSIARKKAKVAVARKLAITMLALWRNPEVAYDPHFKVNRKKIKSA

SEQ ID NO: 144686 - protein, 402 aa, unidentified
MNSVGIDISKGRSTVAVMRPFGEVVISPFEVRHTDSELSELARQLKSLDGETRVVMEATGNYHTPVAKLLHDAGLYVSVVNAKLVHGYGNNELRRVKTDRKDAVKLANYGLDRWLTLPRYVPEENTRLLLKNCYRQYRQYSKVQTVLKNNLISLLDTVFPNVNRLFSSPVRGDGSEKWVDFVAEFWHCRCVTEKSEKAFTNKYQRWCKTHGYNFSEAKAHTIHAKASGHIGIMPKSETTKLLVEQAVVQLRTTSTTLTALKREMLTLAAQLPEYPAVMGMFGVGPTLGPQLIAEIGDVRRFYSKKALVAYAGLDAPPNDSGDVTGKHKSMSKIGASSLRRTLFLVMSVYLQNAPLDEPIYQFMDRKRAEGKPYRVYMMASANKFLRIYYATVKAYLESLEQV

SEQ ID NO: 144687 - protein, 342 aa, unidentified
MYYIGLDVHKKTISYCVKDASGRIHEEGKIGATRNDLDSWMKILPQPWTVAMEATIFTGWIYDHLLPHAERVKVAHPLMLRAIAASKKKNDRIDAGKIADCLRCDFLPECHMASTEIRDRRRTLRYRHLLVRQMVQMKNRISGLLLETGVSHNKQRLHKVGYFRELLSTNKEVHENIRPLLRLSRETIVRCQKTEYALVSSLQRDPLLAERIKLLRTVPGVGPITAPTWALEIGDVSRFRSIKQAISYCGLCGEEKSSADTVLRTPLSKQRNKHIQHVLVEAAKLAPRQNHQLALVYEKEKQKGNANRATLAVARKMVAYLLAVDRGKRAFVLLEDHSTTAA

SEQ ID NO: 144688 - protein, 332 aa, unidentified
MENVLKIVGADLSKKSIDLAIHATQEHLRIENNTEGFKKMVHWLKYNKLDPSQVTIVMEHTGLYSYCLEEFLHQKGYRFNKVNPLDIKFSIGLTRGKSDKMDAARIAKFGFEKQGRLKAETPVSQALQALKLLNTSRENLVRTRAGLKTSIEEFRNIGLKDSNTALHSQLQIVSQLDKQIERLDKEIRTVIQKEEKIEKTYTLLNSIKGVGPVVATNTIIKTHNFERFANARKFACYCGIAPFENTSGTSVRGRTRVNHMADKGMKTILDLAAKSAIGCDKELKEFYQKRVEQGKSKMSTINIIRNKIVGRMFAVIKRQTPFEQNYFKPTWN

SEQ ID NO: 144689 - protein, 350 aa, unidentified
MVVVGADVHKRTHTFVAVDEVGRKLGEKVVTATTAGHCGAVMWAREHFGAQVVWAIEDCRHLSARLERDLLTAGQQVVRVPPKLMAQTRASARTRGKSDPIDALAVARAFLREPDLPIASHDEISRELKLLVDRREVLVAQRTATINRLLWRVHELDPERAPKPRSLDLGKHRRILGDWLDTVAGLVAELARDELADITRLTEAIDALGKRIGDRVRQVAPTLLAMPGCGELTAAKLLGESAAVTRFKSEAAFARHAGVAPIPVWSGNTAGRVRMTRSGNRQLNAALHRIAVTQIRLNGLGQAYYRKRLHAGASNREALRSLKRRLARIVFNNLHTDHQNRTRSCQTAAA

SEQ ID NO: 144690 - protein, 364 aa, unidentified
MDPALGLGWDVEESTAEQETSMNIVRIGLDLAKYVFHLHGVDERGKVVLRKTLRRPGVAPFFANLPRCVVGMEASNGAHYWAKTLSEFGHDVRLISPQFVTPYVKSNKNDRNDAEAICEAVGRPNMRFVPVKSAEQLAIQAVHRIRSRLVASRVRLVNQIRGLLGEHGVVVAQAIGNLRRALPRIIDDEANGLNSIVRALIGELREELSDLDGRITIYDRKIINLYRMSEACQRLGEVEGIGPITATALVAAAGDGKCFKNGRQFAAWIGLVPKQRSSGGRSRLLGISKRGDRYLRTLLIHGARAALGRTRGKQDPRSLWLLKMRERRHANVVAVALANKNARIAWGLLASGMNYDQHLTVSSA

SEQ ID NO: 144691 - protein, 349 aa, unidentified
MEEISTIGIDIAKSVFQVHAIDHGGNVVVRRQLRRQQMLKFFAQVPPCIIGIEACGTAHYWARELSALGHDVRLMPPAYVKPYVKRQKNDAADAEAICEAVMRPTMRFVPVKSVEQQSAAMLHRSRALLIKQRTMLLHSIRAHLAELGISIGVGIAQMARVVRELAQGERSDLPELARFVLEALAKLVCDLAQRLEAIEKKLISWHYKNDLSNRLETIPGVGFVTASALSSIVPDPQAFKSGRHFAAWLGLVPRQNSSGGKARLGHISKQGNPYIRQLLVLGATSVLRYIRRDGGSGTGWIGGLLRRRPPKVPAVALANKMARIAWSIMTRGGEYEEINDLRAVQPVNS

SEQ ID NO: 144692 - protein, 392 aa, unidentified
MVVSVGIDVSKDKHDCFIVSSEGEVLSDVFTVPNNMDGFLCLLQRIQDCSAPQDKIKVGLEATGHYSYNLLGFLLDNGLATYVLNPLRTNLYRKSLSLRKTKTDRVDARTIASMLLSDAGLKPYTDTAYHNEELKSLTRYRFDKVKERAKLKSSISRLVCILFPELEKLVPTLHMASIYALLEEFPGAKQVAAAHLTRLKALLETASKGRYKRDMALEIRDAARNSIGSRMPAKSLELQHTIRLIRELDNEIAEIEEQIQAIMDDLNSPITTIPGLGFRMAAMILAEVGDFTRFDSPDKLLAYAGMSPSTYQSGQLKNCYPHMEKRGSRYLRYALYNATKYVCHWDPTFADYLAKKRAEGKHYNVALSHAAKKLVRLIFALEKSGMPYHLAA

SEQ ID NO: 144693 - protein, 361 aa, unidentified
MDVVHPRCVGIDCSKKDAKVCVRIQGQGRRRGSSTVTTWGATTSQILALREYLVAQKVTCVVIESTSDYWKPFYYLLDDELNVMLVNASRVRNVPGRKTDVSDAAWLADLGAHGLVSASFVPPPSIRALRDLTRTRTHITRERSREIQRLEKLLEDAGIKLSSVATDITGVSGRAMLEALISGQRDPAVIADLAQRRMRSKIPALTEALTGRFSEHHSFMARLFLDRIDSHSADIARLDQRIEEAIAPFVAARELLASIPGFSRIVAEVFIAETGADMAVFPTAGHLASWAGLSPGSNESAGRVKSTKTRPGNRYLKGALGIAALSAARSKNTYFSAKYRRIASRRGPMSRPLRAPARARS

SEQ ID NO: 144694 - protein, 314 aa, unidentified
MSQNLPILYVGLDVAKRNFVVHCQERCQEFSNDASGHQRLLRLLAKVPGPVHVVLEATAGYEAPIVAALHQAQILCSVVLPGRVRAYAKALGRHAKTDPIDAALLSAYGRAIEPLPTPARRAHEQIFLETVRQRQQLVDLRTLLQNQAAHLQDPKAQKRHQKVLQTLATQIAACEHQLIALQAADAQLQQRSARLQEVPGVGPIVAATLLAEMPELGSLQPAEAAALAGVAPYNCESGPWKGTRRIAGGRAPVRRVLYMAALTARRKDGILKRCYEDLIARGKKKLVALTALMRKLILLLNRLLKDPLFQLLSS

SEQ ID NO: 144695 - protein, 324 aa, unidentified
MSKRKLDVALLNDAGKVKSKSLANDPAGFSGLMTWLKERGAESASTHVCMESTGSYSEACATALVDAGWLVSVVNPAQPKSFGQSELNRNKTDEMDAALLARYCSKMEPAAWQPPPLEYRKLRSLVDRLQALKDMRQQEANRLEATAEAAAQQSINEHLTWLDARIAELDKDVNDHIDGNKETLGKDARLLTSIPGIGKTTAAKVLGLLGDLRRFSSGKALAAFIGVTPRRHESGTSVRGRSSIGRAGHPRIRHALFMPTLVAAKHNPMIKAFRNRLVAAGKPKKSAALASMHKLVHLMHAIVCNGVAFDSRFGRMALDGQDGI

SEQ ID NO: 144696 - protein, 425 aa, unidentified
MNSISNKKINQVTDQTLVVGMDIAKKKHYACFVDERGRVLKKSFPVPQSREGLEWLYQCIVKAMEEFEKTEVIVGIEPTGHYWLNLAYFLDEKGISLVMTNPMHVKRSKELDDNLPTKHDAKDALVIARLVKDGRFSYPRTLKGMEAELRAGATFRSKLVKEQGAVRNQMIRWLDRYFPEFTQVFPSFGKMALAVLEQTPFPSDLAGKEIEEVLPLYRQSEGLQSPQKPKAKKLMELAQHSIGVTEGQQMARIEIATLVRWYRQLEEEIEALTQQLTELVQTSVEYEWLKTVPGLGDATIVELLSEIGSFSHYQDPRQLLKLAGLTLREHSSGQHKGQKRISKRGRRRLRALLFRVMMPMIRHNEAFRQLHEYYTTRPDNPLRKKQSIVVLCGKLLKVLHAVCTKHQAFDAKRMMQDIFGLETAA

SEQ ID NO: 144697 - protein, 402 aa, unidentified
MGACAGVDWAKDEHVVLVADERGEVLAEGVFIHDEEGIAALCELLVGLAVDRVAVERPDGLLVERLLDAGLCVLALHPNQVKAARPRFRSQGKSDRFDAWVLCELARTDAHRFRALAPDSDATKAIRALTRAREDLVQARVALANQLRAELERFWPGAAAIFADVDSQIALCFLERYPAPRDARGLGERRLEAFLHRHGYCGRRSPEELIARLRRAPQGRAGELEAEARRGIVLALVATLKPLVARIAELEREIAHAVRSHPDGAIFLSLFRDPRSVITAAGLLAEIGDSRLRYPSAEALAADGGMSAVAVESGKRKHAAFRWACDKRLRGALATLANTSRHHNAWAGDLYASARARGHDHQRAIRTVGRAWSRVLWRMWQDRQPYDPARHRALQRKLAPEG

SEQ ID NO: 144698 - protein, 354 aa, unidentified
MRFYKEQHEFYVGIDLHARQMYVCVIDAQGETLLHRNLPAEPEHLDRALARFEGDLVVGVECIFTWYWIADFCNERGIAFVLGHALYMKAIHGGKSKNDRIDSEKIASLLRAGMLPMAYVYPKQMRATRDLLRRREYFMHQQSELLTHIQNTNSQYNLPTFPKQIGRPGNREGLAERFEDPSVRRSIQADLDLLDVYHRLLLDLEAQVKQQAKFHDPVALHLLQTIPGVGKVLALVILYEIQDIRRFPKVGNFISYARLVKCAHESAGKRTKGGHNKVGNAHLKWAFSEAAVLFLRDNEPAKRLQQKLVSKYGKAKALSIISQKLGRTVYFMLRRKEPFHARRFFGDSVRELSA

SEQ ID NO: 144699 - protein, 405 aa, unidentified
MSANKKRGPGPSHLLLTPDHAGNVVGVDPHKLTLTATVLDPRGGVLAGEHFRVSGDGHRALEAWARQFGPIARWGVEGAAGWGRHTAIFLARRGYDVRDVCANRTARNDRARQRGKSDALDSERIARETLAHPLLPKAFKRAGADSGPDEQQQLLALWHNRRRSILTSRQHLVNEAESLLCGLPLELREQLPSSKAVRPRLAALARRNRRRRYDAPTSLRLRMLDDYHAQITALDREDKQVVAELRTLVRASGSTLGELCGLDTRSVAELLVETGDPRRFTDGGFARFNGSAPLAASTAEGPGEPVRHRYNPGGNRRINAILHRMAVTQLRCEPRAKKIYANARAEGHTKKEARRILKRHLSDVIHRRMIRDLASLPAQPLLAAQPRAAIAQSRVARQGRAKRAA

SEQ ID NO: 144700 - protein, 350 aa, unidentified
MLYTGIDYHRSFSYLTTMDEKGKIIGQKKLPSNGEIVDFLKEFDEEMEIAVEATPSWYWLYDHLESEGFQVKLSHPLKTKAIAYAKVKTDKVDSATLAHLLRSNLLPLSYVPEKVVRLNRELLRYRASLVKIQTRVKNKIHTILAKNNITHSYTDLFGKQGIAFLHSLPLAEHYKIALEGYLTVLDAVRQEIREASKKVRQVAEEDPDTLLLMTVPGMGYYSALLTKSEIGDVRRFRSAKQLCSYAGLVPSTYASGNTCFHGHITKQGSRWLRWILVEAAIHAVKRPGVLRRFYFKVERKKGGQIAKVAAARKLLEWIYHILRDGRTYQEMEKIADLLGRGEPDKKSASE

SEQ ID NO: 144701 - protein, 411 aa, unidentified
MEMLHPRCAGLDVHRDTVVACARNATAGVIALEVRTFGATTKELMALSEWLTEHSVTHVAMEATGVYWKPVWHVLEGSFELVLANAMHIKNVPGRKTDVNDAMWIADLLAHGLIRGSFVPPAPVQDLRALTRTRKQLVREHAAHVQRVDKTLQDANLKLGSVLTDIMGKSGRAILDAIVRGETDPAKLVLHIDRRVKASPEHIIEALRGKVTANHRFLLKLHLGQADGLQAAIDDLDREVGERLEPFRVSAQRVSQVPGIADRAAAAIVSEIGVDMSRFQTSAHLISWAGFCPKNDESAGKRRSTRLRKGAPWLKTVLVQCAWSATRAKNTYLQAQFLRLRARRGPKKAIMAVAASMLTAIYHMLKKGVDYHDLGPNHFSGADKTKSVNRLLRKIENLGFEVTGIREKVAA

SEQ ID NO: 144702 - protein, 348 aa, unidentified
MTLVGCDLHSRKQQVAVLDTTTGEVLEQELAHDGDAVERFYRALRPPVTIGIETTGYTQWFHALMHRLGHTVLVGEAGRIRAMVVRKTKTDRRDARHLLDLLKHDRFPTVWMPDPDTRDLRALVAHRVRLVRMRTMVKNGLQAIALNQRLALSSALWTQRGLAQLRGLALPPHTARRRDDSLELLAWINVRVDQLDAQLAAVVDADPRARRLLTHPGVGPLTALTTVLVLGPVTRFPDGKHVVSYVGLAPAINASADKRHLGTITKQGNALLRWVLGQAAPQAARADDELRRRYFAVLHRRGRPKAKVALARKLLVRLYVMLRDQIDYEEFRRRGRVGQASRAPVTVT

SEQ ID NO: 144703 - protein, 392 aa, unidentified
MYIVGIDIGKNHHEASIVSPEGKQIGRSLRFATTHKGADSLMSFIFKNIGNSPCVFGMEATGHYWYPIYSFLKAKGYTIYVINPIQSDSLRKMYIRQTKNDSIDSFLIAEVIRFGQFTTTSMADENILAMRQLCRYRDSVISSRTEIKLRISTIMEQIFPEYEKQFSSLWLSTSMGILEKYLTPENIENAPIDELFEIIKDKSHNRLTRAKAISIKEAAADTFGIKIAQDAFSFQLKQLIDRMNFLDKQIEALDCQILEYYEKFDCYLHTIPGIGMIAAATILAEIGDINRFKSSSALVAFAGIDPTVRQSGEFSSTHNHMSKRGSPYLRHAIFLAATTCSFHNSPLNAYYKKKREQGKHHLTATGAVARKLTTVIYAVLRDGKPYEPKSFC

SEQ ID NO: 144704 - protein, 348 aa, unidentified
MSTYYIGADVHSNSTEIAIDKRGKIVARYSVPTSIPAIANVLDSFQGKKHFAIEEGPMSGWLYRNLSNKVDDFISSDPRRNRLIASDGDKDDKIDAAKLASLLRGGFLRKIHQSDDAGRAELKHWVSLYHDRVRDAVRSINKIRGRCRMHGVKISRAALRNPGSRADWLLETNNRALATQLNMLWIGYDATARQVKLAKRQLALLGKKYEIIQFFGQLPGVGLIRATTLFAYLDTPWRFKKKNKLWKYCGVGLQRTTSGTDKKGKPKPARLKLPWAVNRTLKNAVLGATLSAINQKNNAFKEFYERMVQNGMITSNARHAVARKMLTAMWAMWKTNSPFDESLVFLSN

SEQ ID NO: 144705 - protein, 366 aa, unidentified
MKKISTVQTFKSDIFKEQKLTIGVDLGDRWSLYCVLDEAGKIILEQKVPTTPEAMRQTFGKIPRSLIALETGTHSPWVSRLLTELEHEVIVAHAQKVQLITKSNRKDDRHDARTLARLARIDPELLGPVRHRSVQAQIHLTVIRARAELVSARTALVNAARGLVKSYGERLPKCGTQQVSRELAAKLSTELRDVLEPLFKEVESLNERIKEYDERMEKIAKEAYPEVCLLKQVKGVGTQIALTYVLTIEDPHRFLKSREVGCFLGLKPGRRDSGESKPQKGISKAGDRYLRTMMVQGAHYILGPFGEDSDLRRWGRKLAERGGKNAKKRAVVAVARKLAVLLHRLWVSGEVYEPLRNSQRAMQAVA

SEQ ID NO: 144706 - protein, 315 aa, unidentified
MNEHDTHIGVDLAKHSFDAVVRETGEHRTFKTTRGEIAKAVRWIAKHERPMVVMEATGNYEADLVDVLHEGKIDLAVMNPRWIRKFAESLGQLAKTDKIDATLLAEYAKRMQPHPQEPTSKALKTLRELVTRRNQIVQMRTQESGHREHVRSKQVQRSIRALAKQLDNQQAEIEKIIQEHVNDDPDFKSRVELMQTVPGIGETTAIMLAVELPELGRCNRQEIAALVGVAPINRDSGQLKGRRKTRAGRRKVRTGLYMAAISASCHNPPLREFYQRLRAAGKSGLVALIAVMRKLLVILNSMLARNEPWRDIKTA

SEQ ID NO: 144707 - protein, 392 aa, unidentified
MYIVGIDIGKNHHEASIVSPEGKQIGRSLRFATTHKGADSLMSFIFKNIGNSPCVFGMEATGHYWYPIYSFLKAKGYTICVINPIQSDSLRKMYIRQTKNDSIDSFLIAEVIRFGQFGTTSMADENILAMRQLCRYRDSVISSRTEIKLRIGTIMEQIFPEYEKQFSSLWVSTSMGILEKYFTPENIENAPIDELFEIIKDKSHNRLTKAKAISIKEAAADTFGIKIAQDAFSFQLKQLIDRMNFLDKQIEALDIEIMKYYEQFDCYLHTIPGIGMIATATILAEIGDIHRFKSSSALVAFAGIDPTVRQSGEFNSTHNHMSKRGSPYLRHAIFLAATTCSFHNSPLNAYYKKKRDQGKHHLTATRAVARKLTTVIYAVLRDSKPYEPKKFC

SEQ ID NO: 144708 - protein, 455 aa, unidentified
MKVKQVSALRSKRGLHRVNGAEPQVVGLTPQTTDIRKTDTMKTYILRQPKPVESQKPARVPRRKTQPVTTINAVLGRPPAPANGPVLFIGFDVHTDSIAVSLAPSDSVEVRRYGIIGGTHDDVLKLLTKLQAAHPGTELRCGYEAGPHGFSLARCLHRHGYHCVLFAPSKIPRQPGDRIKTNRRDADQLARLHRAGELTAIYIPDPADEAIRDLIRARDQVGDQQHRSRQQLKMFVLRHNLRYTGQTAWSPAHLRYLAKLKLPFPVQQIAFQEMLDGLTEAADRLERYDTEIARAVPGWRWEPVVRALMALRGFALLHAATIVAELGDLHRFSHPMQLMNYLGLVPSEHSTGDKRCQGGITKTGNAIARRALVEAAWQYRSPARLSPHLKKRQEGLPKAVTDIAWEAQRRLHHRYIHLTRVGKKKSQVAVTAVARELAGFVWAIACQVQPRAAQT

SEQ ID NO: 144709 - protein, 342 aa, unidentified
MQTITRIGMDTAKNVFQLHGVDENEAVVLRRQFRRREMIAFFEKLPPALVAIEACGSSHHWARMLQSFGHDVRLLPPQYVKAYVKRGKNDAADAEALCEAVTRPSMRFVPVKSRDQQAACMMMTVRERLVGVRSQLSNAIRSYAAEFGIVGAVGRQNVRGLIERILDDTTLPDLARDLFRCQAQEYAAVEDRLEVIEAKLMAWHRADDLSRRIATIPGVGPIGSTMLSMKAPPPESFRSGRQFAAWLGLTPKDHSTGGKVRLGGITKAGDPAIRSTLIVGATALLRHIRKGRTKPSPWLEALLNRKPPKLVAVALANKFARIAWRLMISGGIYNRPPDMVAV

SEQ ID NO: 144710 - protein, 350 aa, unidentified
MLIIGCDYHPAFQQIALVDTDTGELQERRLQHREEAERFYRDLAAERMKVRVGMEASGHARWFERLLSELQFELWIGDAAEIRTKRVRKQKTDRQDAQLILKLILEDRFPEIWVPSWENRDLRQLLWHRHRLVQARTRMMNQLQAVALNEGLRCKKKLFREAGREQLEGFRLAPWASRRRHDLLELLDRLTPTIAELTQAIEQEVEKCPAARRLRTHPGVGPLTALAFVLIIGKADRFQCGKQIASYLGLVPLEKSSGDQRRLGHITKQGSTLLRFLLVEAAQVTARSLPEWRSKYYHLTMRRGRKIAKVAMARKLAVRLYWMMRKEWDYGQLTKFGSYAGKPENRDGVK

SEQ ID NO: 144711 - protein, 317 aa, unidentified
MTKCNTKTAGIDTSKDKLDIAIDASATCWQVENAAIGWRHVAERLAAAGVTRVGIEATGGYERGVVRYLREKGFTVLVLQPTQVKAYARMHLRRAKNDKIDAALIAACAAGLEAPAVPPDARLEALAGHLTFVEQVEEDIARLKVRLEHVEDARLRDILKADIAGLKARRATEMLRIINALRAHADLARRYHLVLSVAGIGERTAIAIIIRMPELGRISREQAAALAGLAPYDSDSGTHKGQRHIAGGRARLRRSLFAAALPAAFRWNKALIELYTRLIARGKCHKAALIACARKLLIYANTVVQRGTPWVQEQVPA

SEQ ID NO: 144712 - protein, 332 aa, unidentified
MVAGTHGSLNKAGSTKMTQISTTAGIDTSKAKLDIAVHGRIEHWQVENALGGWRRLVAALTGAEVTRVGIEASGGYECGVVDYLRHKGFIVLVLQPTQVKAYARMYLRRAKNDKIDAVLIAACAAMIDQARIDPDHRLAKLAQHLTFVEQIEEDIARFKVRLEHVGDRRHRRMVVTDIARLKARREAELARIVTALRAHDDLARRLDLVLSVPGIGERTAIALIVRMPELGRVSREQAAALAGLAPFDDDSGKHRGERHIAGGRRRLRRSLFAAALPAAFRWNKALIELYSRLTKRGKAHNEALIACARKLLIYANTVVQRGTPWTERPAAA

SEQ ID NO: 144713 - protein, 387 aa, unidentified
MPQLNDLSRSLVALDHDSTIIAVVELSQSSWLVAGMLPGIERQPQKKLEPSAERLLGLLHRWRDEAVRAGKKITRIALAFEAGRDGFWLARWLNARGVEAHVIHPSSVAVSREHRRAKTDRLDTEMLKRGFLGWLRGERGHCTMARVPTIAEEDAKRPNRERECLVGERTRIVNRIKSTLARLGIRNFKPTLRKAAERLATVHTPEGMPLPPNTLAELQRDMARLGFVVSQIREIEQARQKRLEQETETGPHAKVRQVARVIGIGIETADMLVHEVLSRPMRDRKAVARYAGLTGSPDESGARRREQGLARTGNARVRRGMIQLAWRFLRFQKQSALAQWYRARTADSRLGMRKTMIVALARKLLIALWRFVTTGEILEGVILRPAG

SEQ ID NO: 144714 - protein, 357 aa, unidentified
MSSNMKKYIGLDVHKDATSIAVLNGVGKLVMESIIETKAATVLEFLHGLRGELHVTLEEGTWAAWLYDVLKPHVEEIVVCNPRRNALLKEGSKSDKVDARKLAELLRGGLLRAVYHGENGLGTLRELARSYLTISKDQARVMSRLKALYRSWGIPCSGTQVYAPRHRDQWLSRIAQPGVRRRAELFYQQLDGLLVVRHTVRGELLTESRKHQAVKILRQIPLIGPLRAALLLALMQTPHRFRSKRQLWTYSGLGVETHDSAQHRYVDGQLQRSKKPQQIRGLNQNHNHEMKRIFKSTAMSASRCAGPLQDFYAGLLAKGMKPDMARLTLARKIAAITLTLWKTGERFDAEHLKSQAA

SEQ ID NO: 144715 - protein, 324 aa, unidentified
MTDAVLGIDVSKNTFDTNLGAGTKARSKSFANSPAGWHHLIAWLGEHKIGQVHACLEATGRHGLGIALALHQAGHVVSVVNPAQIRDFARTKLGRNKTDQVDAVHIREYAELFKPRPWTPPSPAMRRLCELQTIRAGTVAGLTEWKNRRRSGIMDDLALSLAKTTIQHFTSQLEAVDQAIAETIDNDVELSAKRDLLVSVNGVGEALAGIVLAELPGPDILGSSAAVTAYAGLNPQQHQSGISVNRPVRISKIGNAVLRTALYMPALSAMRYNPAVAALVDRLKAQGRLKGKQIVIAAMRKLLVLCFGVLKTGKEFDPAMAMGK

SEQ ID NO: 144716 - protein, 348 aa, unidentified
MAMTILEADRAIIGGVDTHLDVHVAAALDPIGGLLGVESFVAAPRGYRAMLEWLGSFGTVGKVGVEGTGAYGAGLARFLRRAGVEVVEVDRPNRQARRTRGKSDSADAVEAARAVLSGRAAGAPKSRDGEVEAIRALLVAKRSANHARSRALAQMRQLSYTGPDQLRSRFKGLSITDLVAQAAALRPRASGDPVLYATKVSLAALGRRVLALADEMTDLDELLTDLVTHCAPQMLDLYGVGVDTAATLLVTAGDNPERLRSEAAWAHLCGVAPIEASSGKVTRHRLDRGGDRDANQALWRIVMTRLAWDPRTRAYLERRTKEGLSKREVIRVLKRYVAREVFKYLPRG

SEQ ID NO: 144717 - protein, 412 aa, unidentified
MNIVHECCAGLDVHKKTVVACVLVSQASGKPRKEVRTFSTMTPDIVRMRDWLKALSVTHAAMESTGVFWKPIYNLLEGHVELLLVNAQHIKAVPGRKTDVKDAEWIADLLRHGLLRPSLIPPVWQREVRDLTRSRISVSEERSRAINRLQKILEDTNIKLASVATDIMGASAQDMLHALLDGETDPTRLAQLARGNMRSKRALLEQALQGRLTDHHRFLIRQQLAHIQVLDQEIEQFSQEIAERFRPFEAAIQRLSTIPGIKRRLAEVILAEIGTDMSRFPSARHLASWAGICPGNNESAGKRLTGRTRKGSPWLRTALVEAAQAAARSKDCYLSAQFHRLTIRRGGKKAIVALAHTLLVIVYHVLAEETDYQELGGNYFDERDRQAIQKQLVRRLEKLGYDVTLAPTAPAA

SEQ ID NO: 144718 - protein, 386 aa, unidentified
MIFIGIDIAKSNHFASAVNSDGEVLVNPFKFTNDDIGFKLFLETFKNFDLSNCLVGLESTGIYGDNLTTFLFEKGFKIGRINPIQTDSLRSSNIRKTKNDKVDTFLITQCLMLGHYTLITEKDIELIKLKTLCRFKFDIKKSQSKAKVQLVTCLDIAFPELARFFNDNLHIKSSYALLSKYPTAKIIANTRIDALNNLLYSASKGHFRTDKAIALKTLAKSSVAMDNPAIGIQIKMLIEQIQMLQKQIDLLDISINNIMEQLNSPISSIPGVGNWLGAIIISEIGDITRFSSATKLLAFAGLDPSVKQSGNFNATNTKISKRGSKHLRYAINRAAQLIIWNDDTFYQYYTTKLAQGKSYLNAIGHVSHKLTRVIFKLLTTNTTFKV

SEQ ID NO: 144719 - protein, 363 aa, unidentified
MKKVSKQMWEKEVSSPPKPAMTVGLDLGDRFSHYCLLNADAEVIEEGRIRSTEAALRLHFEGEPRQRIALECGTHSPWVSRLLKQLGHQVLVANPRKIPTITGSESKNDRNDAEALARLAASDPKLLAPVQHRSQQRQLDLNLIQARAVLVRARTMLVNALRGLIKSGGGRLPACSTEALPSRAPAAVPPFLAEVATPLIDQIALLTTQIAGMDKQIDKLGAKYPEIAVLRTAPGVGPVVAATYALTLDRVDAAPSNRSAGAFLGLRPGQGQSGDSNPQRRISKCGNTYLRSLLVQSAQYILGRFGPDTALRHWGLKLAQSGGKRGKKRAIVAVARKLAVILHSMWRSGQPFQDFPQPVRAAA

SEQ ID NO: 144720 - protein, 330 aa, unidentified
MKNWNVILGVDVSKLTLDISCAAHNLHLKIENSSKGFGLFKKWCNGNAFDLKDTLVVLEFTGGYEYRFIQFCESQRIAYTRISGLEIKNSMGMIRGKNDQVDAFRISRYGEEKIKRLTPSKPLDVNMIMLKQLLSFRKRLVRERAGLDSTLKERKHMYGVNNTDLVIRIILGKIKSNNKYIQDVEQEIIKLIKTSEGLLQNYRILTSIKGIGKVNAWMTLAYTENFNLFADARKYAVYVGVIPFERSSGTSVKGRPRVSHMAQKELKQELNQAAKTAMAHDPEIIAYAERKLQSKCYKLVLNNVKFKLILRIFSLIKRGEMYVENYKRAA

SEQ ID NO: 144721 - protein, 390 aa, unidentified
MSQPFDASRSLTAFEQDSTLVAVIEMSQSNWLVAAVVPGVERQPLKKLDAEADALLKLLQRWRDEARKAGRVVRRIVCAYEAGRDGFWLARWLQAHAIEAYVIHAASIAVSREHRRAKSDRIDTELLMRSFLGWLRGEKRHCSMVAIPTMAQEDARRPSRERESLVGEQTRIGNRVKAVLALFGIGGFNPKLRKAAEKLETLGTVEGTSLPENTRAELRRDLERLRLVRDQIRAIEGERLRRLAAAPRTATGPHAMVRLLARVFGIGIETADMLVNEALSRNLRDRRAVARYAGLTGAPDESGKRRREKGLARAGNGRVRRGMIQLAWRFLTWQKHSRLAHWFRERTADGRSTTRKTMIVALARKLLIALWRLVTTGELTEGIKLRPAGA

SEQ ID NO: 144722 - protein, 352 aa, unidentified
MDKYIGIDVHARSCTLAVVDGVGKRVGQHVVETNGETLVECLRMIPGPRHLCIEEGTQSAWLYEILSPHVQELAVVSVSDSRGPKSDERDAFALAEKLRLGALDKRVFKNLGPYQKLRELGRAHFMVVRDVVRTQNRIKSLIRSRGVAVEGKTVYRADGRQEYVDKLPEGTRAAALTLFAQYDALQEIRKRAEKELLAEARLYPITGLLATCPGIGPIRAAQLVPIVVTPHRFRTKRQFWSYCGLGIVMRSSSDWVRDKSGGWQRAKVQQTRGLNLSHNHQLKAIFKGAATTILMQWHDDPLYHDYQRLLAGGTKPNLAKVAVARKIAAIVLSMWKTEEVYDPGKQRRPLSQ

SEQ ID NO: 144723 - protein, 422 aa, unidentified
MSYCPVAGIDVSKRFSDMCILSPDNKIFAQEKIYHDETSINRANALLQKAERLFFSKPVIVMESTSHYHLILFQFFSEHGYDVIMVNPLQSNSMKDFSIRKRKTDRVDAFKLAMMYRTKTLRPSQIPQTATRALRQLCRHRAELLNDVSSYKNRLTALLDQTFPGYDKVFSDVGGVTSCAVLVRFPTPTILLVEEESELVEVIAAASKSGYSFAKKKAGLLISAAQKAQTLGIHSCADETLIVCTIQMLRTLSESVLQIETAIDNLLAQIKEMRNNVSLLQSIPGIGSHSAALLLGEIGDISLFKKPKQLAAYFGLDPTERQSGSFRGTKNKLSKRGSSYARAALHMGIVNSICKRGKDSAANPVLLSYYEKKCKNKPAKVAQAASMHKLVFIIFAVLRDQKPFELKTPEQHAVEQGFVKAA

SEQ ID NO: 144724 - protein, 387 aa, unidentified
MSFDQHREAPSAIRTDLGAIFVSLELSRSTWLITSLSPGSGEKLSKHSVRGSDMAGLLERFAQLRQKARARTGEVFRLIVIQEAGLDGFWIHRVLQSEGIESHVVDPASIATLRRRRRAKTDRIDGETLVRALLAYKRGEPRVCAMVKAPTPEEEDRRRLCRERKVLIAERVQHVNRLKGLLFCQGITGYEPLRRDRRERLEELQTGDGRPLPDHLKAQARRELDRIELLLVQIKAVETERDALLAAEHGVAPAPAAMLLDIKGIGPEFATILWSEGLFRHFDNRRQVAAYAGLAPTPWQSGSIDREQGVSKAGNPRLRTTLVQLAWLWLRHQPQSALTLWFEERVKRNGGRLRKTTIVALARKLLVALWKYVTAGVVIEGAAMTTA

SEQ ID NO: 144725 - protein, 516 aa, unidentified
MNNNATNQNVQEEIIETKKKTHAVYGQEKRKSDKVAKKAAAAKQDALKQKRNLRDKTHTNEEFLMQKANEIKNSLTAHTWRDLEVNRKFDHDKKLTFIKDDMLIVGCDIGSEMHFFRAIDSKGIELGKKPVAFPNSEEGYQGAIQWAIDLAARNDKTQIILGLEPTGHYWFTIASWMVANGISVVQVNPYAVRCTKEVGDNSQMKDDRKDPKVIAELVKNGNYGMPYLPEGVYAEIRGLSGYRNQLMEDRIRSINRLHREMKIYFPEYKSVVGKFEGAFSLRLLEAASMPEDILALGEAGIKAIWKAAKLKGCGYNKAKSILLAASNSVGLKEGQVAGRMAIKRFASQIISLSSEIDRTEELLREKCLEIPHAKNLLEIRGIGNDILAGILGELGDINRFDSTKEIQKLSGLALVANNSGKHQGQVKISKRGRKKLRYWLYQGALSVIAQSQEFREIHEYYTTRQQNPLKKIQSLIVIGCKLLRVICTMLKKGTKYDPVKLKQDILRPAVEVAKPA

SEQ ID NO: 144726 - protein, 345 aa, unidentified
MAIVGGFDIHRRQVTFDYLDTVTGQVRRGRIAPACRETLRHWLERFAGCEDVTFAVEGCTGWRFVVEELQRAGITALLAEPAETAERRGPKRRAKTGQTDARHLRTLVAGGRVPCSWIPPEHVSELRALLQLYADLRQEHVAWAQRIHATLFHQGVPSLAGQLSDPEIRARLAGAEMGLSPAGAQAVQVALRMLGHLEAELAPVHAQIRAFARRQPGCKALNKELYGVGPLVAAIIWAFLGDTRRFSSSAQAVRHTGLDVTVYSSDGKRAPGHLSHQGPPILRWALFEAGHQGSRQASPDHRYYADAAARIDANRAAISVARKLTRRAHHILRRLGDQAYAPIAA

SEQ ID NO: 144727 - protein, 312 aa, unidentified
MMTNDSIGIDISKDFLDAHRLSDGGTATFPNSLRGFRTLSAWLGCDMPARVVFEATGPYHRSLERALSGKFPLVKVNPLQARRFAQACGTRVKTDAVDARMLANFGNALSLEPDQPVDGEQIDLRELFSARGGLIKDRTRLINRLQTQTLALVRRQTKARIEQLTRQLKVLQHNINERLQACPGRARANTILRSIPGIGEVAASSILIEMPEIGSLRKKKAASLTGLAPMTQQSGKWRGKARIQGGRKPLRDALYMPALVATKHNPHMRDKYIAMVNQGKPKKVALTAIMRKLIELANALVKADREWLPNGP

SEQ ID NO: 144728 - protein, 408 aa, unidentified
MRWYMGVDVSDSEYFVLVFDDEGQEVHRRKVAHSAEGLADFGGWLNARIADGLELFASLERPHGRMVEILLDHGVTVYSVNPKSLDRARDRYRPNGGHADWFDAFVLGNSLRVDHMHLPALRPDSEESAELKMLTRDRLRASQNQTRCLNLLTQTLKEYYRRPLEVFPDLKTHMALDFLRRFATPESLDKMRWGQWLKFAREHRRSDSRAREMWEQLHAPQLPVKAHIARVHSRQLLHLVDELGIIVASVKDYDQEIERFFVTLKTVDIARSLPVCKTGTILPTLWAELGDAVGRWESFRHLQGYAGTTPFTKQSGKSKAVLFRYGCNKPLRYAIHWYAIHSLKKCVWSKAYHQRQLDRGRSYNQATRALASKWLKIIFVMWRDGVPYDEDRHLASIAKQNINQVIAA

SEQ ID NO: 144729 - protein, 417 aa, unidentified
MLKIVYRNCAGIDVHKKIIVVTIAKTNEQDITEYQTKSFLTFTEDLIKCRNWLLSNNTKDVCMESTGKYWIPVFNILEKDCNCVITHPKYVRTILGKKTDKKDSVWIADIFKHGLVEPSFMPPEDIRQLRDLMRYRNKLVYNRTGEKNRFQNSLTVSNVQIANVLTDVFGKTSLSILKLMLEQPNLTLEDIKPLLRKNLKSSPEDILKSINGTFDECQSSKMAICLKHYDSINECIEALEEQILKIAIKFKTEINLLLTVPGIKELSAIFIIAEIGTNMNVFVDDKHLISWAGLSPRCNESARKKKSVKITKAGVYIKPLLVQCALCAIKDKTCPYIKARYESLKRRRGHKKAIIAIARLLLTSIYHILNTGEVFDYERFDKLLNRNFKSQQKAKNTPEEMISYLTSLGYEVTMQNT

SEQ ID NO: 144730 - protein, 353 aa, unidentified
MHTHQKSSDPVATIGLDIGKNTFHMVGLDKRGAIALRIKVSRSQLAHRLANLPCCLVGLEAGSGSHHIARQIQALGHEARLIPAQYVKPFLKGHKNDYRDAEAIAEAVQRPTMHFVAIKTPEQSDLLSLHRVRSRLVRQRTAIINQIRGFLIERGITVRQGPGPLRKVLPEVLSSPPEALSPRLLRLIAELDRDWRHLDERLEALSAEIENLSENDGACQRLMTVPGIGPVISSAVVAAIGTGSGFKQGRDFAAWLGLVPKQDSTGGRTKLGRISKRGNKYLRTLFVQAAHVVLERRPAAAMRALWPWIAQAAKRLPHRNLLAIALANKLARIAWAVLARGREYEPRVAANAA

SEQ ID NO: 144731 - protein, 344 aa, unidentified
MSEYAGQQFVGIDLHRRRSVIVRTTGSGEVLESVRILNDVESLDRVIERAGEDPEVVLEATYGWYWAVDALQEAGARVHLAHPLGVKAFEYRRVKNDFRDAADLADLLRMGRLPEAWIAPPATRELRELVRHRATLVALRSHCKAEIHAVLAKCGIQVSMSDLFGVAGTALLDRLQLAAPYAARIASLRRLMDDLDFEIEVFTNAAQGRLDADPGYLAVQQIPGIGAILAAVFVAEVGDVTRFDHAPQLACWAGLTPKHHESDTHVRRGRITKQGSRLVRWAAVESVKRVGPHTRIGALRDRVAERRGGNIGAVAAARQQIEYVFYALRDGHVRALQHPARDSA

SEQ ID NO: 144732 - protein, 302 aa, unidentified
MGVDIAKSYLDATIGNEKRRFSNDTIGHRQLIKWVKGVTTPVQVICESSGGYERALVQRLARTRVKISLVQANRVRQFARAAGILAKTDCIDAEVLCEFGKVMRPQTITAAKLEQEHLRELESQRRHLTRLLVMEQNRAARVSDACVQKLNRSLINQIKKQIEQLDLLIKGHIEQSHELSAKAAKLMSISGVGARTAALLLAQLPELGKLNRREVAALVGVAPFNRDSGRMRGKRAIYGGRKPVRHGLYMAALVAAHHNPILRNFYLRLRAAGKPAKLALTATMRKLLIVLNSALKTDLSYA

SEQ ID NO: 144733 - protein, 352 aa, unidentified
MDTSKYIGMDVHMATTVIAVADKVGKIVAEAVIETKPPAILDFLKSQRGAVHVTFEEGTQAAWLHDLIRPHVAEVVVCNPREISVQDNKADKSDAKRLAELLRTHGLKAVYHGEHGTQALKELTRSYGAILSDSIRVKNRLKGIFRGRGISCTGTTVYSKKGRDQWLQKIDNNAVGSRISKQFKELDCLTELRNEAEKELLAEARKHPATKILRSIPGIGPLRAAVILGFTSTPHRFRTKNQFWKYCGLAVTSEVTGEYTFIDGRVCRSRKKPLVRGLNINYNHALKDAFKGAATTAAMGVWRSDFNAMVANGTRSSLVLLTLARKIASIALAVWKKGELYDSKKLKFKHAV

SEQ ID NO: 144734 - protein, 394 aa, unidentified
MKLVGIDVGKNSHHFCVMDKETGEFNVAPSSFSNNKEGFDFLINSLKPYSKKSILIGMEDTGHYHVALLKFLLSNGYTVALINPKTTDLTRKMEGGITKNDKLDTITICDVLDTPERKKQYRITKVDRFDLYEQRQLTRHHHNLKEELNVYCNRLQKSIDLVFPEFNTLFSSKYGIVYMNLLKTFGSAEAIASTDIRTIRKCFEVKGRGGRISLTPEKLKECAKNSIGISSEVETIQIKHLVSQITLIKEQIAEIDKKIEEFSITNNSPILSIPGISHFSGTSILAELGDIGNYSKPSQIIKFAGVAPYHYESSQYNAQHTAITKKGSKYLRKTLYQIILPVINNNPVFKKYYLLKISQGKGHRCAQGHCIRKLLRIIYHLLETGQSFDPALLR

SEQ ID NO: 144735 - protein, 366 aa, unidentified
MKKNSTVAVGRKQIFKQAKLTIGLDLGDRSSHYCMLDEAGNVILERSLPTTANGIRQAFSRIPRCRMALETGTHSPWVSRQLSELGHEVIVAHARNVRLIGESSRKDDRIDARTLARLARIDPGLLGPVRHRSAQAQIHLTVIRARAALVSTRTALVNAARGLTKSYGQRLNKCGTEQMTRDRAKGLSPELREALDPLLREIESLNERIAEYNRRIEQIAKEVHPEVARLKQVKGVGTLIALTYVLTLDDPQRFRRSRDAGCFLGLRPGRRNSGQSEPQLHISKEGDRYLRTLMVQGAHYILGPFGQDSDLRRWGLKLAERGGKNAKKRAVVAVARKLAVLLHKLWVSGEVYEPLRNNHEVESAVA

SEQ ID NO: 144736 - protein, 345 aa, unidentified
MMVTLGTDAHKRSHTIVAVDTAGAEIGSVTVPATTDGHLRAVQWAAQYTKRQWAIEDCRALSRRLEADLLGLGERVVRVPPKMMARARSTARQAGKSDPIDALAVGRAALREPDLPVAQLDGPSREVRLLIDYRETLVHQHTGLQNQLRWRLHELEPGFDPPPGSLNRYCTLNAIDELITTHDSMVADLARRETARIRELTAEINQLERDITRRVTDLAPSLLAIPGCGALTAGKLIGEAADITRFKTRDAYAMWAGVAPIPVWSANPNRFRLNRGGNRQTNAALHRIAITQARIHPDAQAFIKRRIETGSTKREALRLLKRKLANVVYRTLHTDTQTTPLAQAA

SEQ ID NO: 144737 - protein, 401 aa, unidentified
MPLFVGVDWGGADHAACAVDAAGSIVLRLDVRHDADGLCDLLGKLRQLGRPADLPIAIERPSGLIVETLADAGHPIIPIHPNVVRACRPRYRAAGGKSDRGDAYMLADILRTDGHRFRPLMPMSTEVKALRALVRGRDDLVGQRVALTNQLRSLLEGFWPGAACVFAAIDSPIALAFINRYPTPDSASGLGEAEMADFMRRNAYSGRRSAATLLARLRAAPAGLTIGVEAEAKAVLVGSLAALLERLLVEIANLAARIERLLADLPDAKIIMSFPRTGKICAARILAELGDVRERFPTEDQLAAEAGVSPVTHASGKSRGVVFRWACNKNLRTAITCFADNSRHASAWAATIYRNARARGCKHPHAVRILARAWVRVLWRAWQSRSKYDPARHAGALRIAS

SEQ ID NO: 144738 - protein, 338 aa, unidentified
MTIKTLGVDLGKFSCHVIGQDQHGKIVEKRKVALTKFAEYLINLPPCAIFFEACGGAHHWCRKARSLGHMSKMIPAQFVKPFVKSNKNDFNDAEAICEAAQRPTMRFAHLRSEAQQAFGCLLKLREQLVEERTAISNQAHTFLLEFGIQQNKGRGFISKVADITEDAEFDLPAALRCALFRLVQRYKMIDNEISELEWEITAINNQNDNCKRMQSIPGVGLITSSFIEAWVGNGAQFKTARDFAAWAGLVPKQKSTGDKTNLLGISKRGNSTLRKYLIHGARSVIQWKLEEDHAWSPWIKKLLASKKKTVAVVAMANKLARIIWAVLTKEQNYAAHAV

SEQ ID NO: 144739 - protein, 401 aa, unidentified
MSAFVDVRFAQKAIELLHRSEMTRMGWTGRAPPATVVRVREGLGKERNSIMPHTSTVHAVTAIGIDMGKNTLHMVGLDSQGAIVLREKVSRVRIASRLANLSPCLIGIEAGMATHYVARELAALGHDVKQVPSSYAKPFRQGHKNDFRDAHAVAEAVQRPTTRFVPAKTNEQLDLQALHRVRSRLVSERTALINQIRGFLLERGIIVRQGLRFLRQLLPDILAKRTDVLSPRMIRIVVDLAGDWRQLDERIETVTDEIEVLAKSDDSCRRLMTVPGIGPIISSAMVAAIGGGAAFARGRDFSAWLGLVPKQMSTGDRTILGRISKRGNAYLRMLFMQAARVILLRPANWPKHGFGCWLVHAAQRLHPNVLAAALANKLARIAWTVLTQERSYEARVTKAVA

SEQ ID NO: 144740 - protein, 451 aa, unidentified
MQPIRTESLEWAALPHINPHAAGLDISATEIVACVRPDMSVTPIRTFSTYTPDLEALADWLQACHVTTVAMEATGVYWIPVYEILESCGFKVYLVNARHIKNVPGRKTDICDGQWVQTLHTYGLLTNSFVPAPEIRALRAYWRQRANLIEHRAAHIQHMQKALQQMNLHLTEVLSDITGVTGLQILRAIVAGERDAQTLGQLRDQRCRRSPAEIAKALTGNYRPEHVFALKQALALYDFYTAQIADCDAEMERQYAALQPIADAADLPPQTSRKRNSHSKNAPQFDARTQLFRITGVDLVAVTGLDESSVQTIISEIGTDVSRFPTVKHFCSWLTVAPHNAISGGKVLHSRTLKARNRAGQAFRMAAQAVMRTQTPFGAFYRRLAARIGKEQAIVATAHKIARVVYAMLKHQRPFESTSQEAYERQHQERELKRLKRRAADLGFQLVPQSG

SEQ ID NO: 144741 - protein, 458 aa, unidentified
MTKRRKKAKSRRFQITNLPAQLQHINLNAAGIDIGSERHMVAVPEGRDEVSVREFGTFTADLEALAAWLKKCGVTTVAMESTGVYWIPLFELLERRGFEVKLVDARHVKNVSGRKSDVLDCQWIQQLHTYGLLAGAFRPPDEICVLRSYLRQREMLTQTASMHIQHMQKALQQMNLLLHNVVSDITGVTGMKIIKAILAGERDPRALARNRSERCKHSSTTIAKSLVGNYREEHLFALQQAVDLYEMYQAKIADCDQAIIKQLEKQPDVSDDGPPSPDKLTQARARVRDGVDVRDLLFKKSGVDLFAIPGLAADTLLTLASEVGFDMTAWKTEKHFASWLGLCPGTKRSGGKMLDSKTKRHPNRAAQAFRMAASSLWRSQTALGAFYRRIKTRSGGQQAVTATAHKLARIYYAMLTKGASYVELGQQAYEKRFKQRRIDHLNRQAKSLGFQLVPYAIS

SEQ ID NO: 144742 - protein, 456 aa, unidentified
MQTFYLGIDASKGYADFIILNCQKKVVVENFQLDDTFEGHCLLYEFLMGLLTEHRESIIYAAVESTGGYENNWYNALLAFQGSLNIQTARLNPLGVYHNSKADMKRNVTDKISAQSVAEYMIAHPEKISYQGQDHLASLRKQWGFIKMLTKQSTQLLNQMESLLYSANPEIMTYCKDGVPVWVLKLLVKYPTAANLAKAKVTSVARIPYVSTDKAEIITRNAKTSVASATDEITEQLITATVQQILHLKKNIKTQTEIMARACAVPEVELLKTFIGISDYSAIGLILNIQSVKRFKTVKKLASFFGLHPKLKISGDGVSAVRMSKEGRAEPREILFMVAMTAINKNPLISQIYQEHVQKGMKRMAAIGLCMHKILRIIYGMLKNNSTFNPEIDRRNREKSLQKRKPIKENKIRRYQDYDPNAPISRRQKIKRMEQEQSQSDNDAMSGILAPVPFPT

SEQ ID NO: 144743 - protein, 321 aa, unidentified
MEPTIVGIDIAKKKFDVALPQGEKVKSGTFHNTAAGFDMFTRWLTRHGVEHIHACMEATGTYGEELALYLHRTGHVVSVVNPAKIRGFAQSELSRTKTDKADAALIARFCRAMKPEAWQPPAPEVKELQSLVRRLESLNDMLTQERNRLPITKGKASDSIERTIRHLEAEIQTTRSLVREHIDQDPGLRSKRDLLESIPGIGPATSAMILAEFGDVERFGDARHMASFCGLTPRHRQSGSSVRGKSRLSKTGSSRIRKALYMPALSAIRYNPVIAAFRARLLANGKPRMVIVAAIMRKLVHIIFGVLNGGRPFDPAIAAAA

SEQ ID NO: 144744 - protein, 347 aa, unidentified
MEQIIRIGMDTSKHFFQLHGVNAAEQPVLRKKLWRKEMVAFFEKLPPTVVGIEACGGSHHWARLLGSLGHEVKLLPPQYVKPYVKRGKNDAADAEAVCEATSRPTMRFVPIKGAESQATLMLFGKRDRLIRNRTQLANAIRGYAAEFGLTAAKGMYKVESLLERIAADENLPELARALFALHAKEYAQLQAELEIIEAKLMAWHRENECSRRLAQIPAVGPIVASLLTMKTPAPELFRSGRDFAAWIGLTPRDHSTAGKTRLGVITRAGDETLRSAMVVGATSLLRQVRAGRGKNALPWLVNLLKRKPPKLAAVALANKIARIAWKMMVTGENYRKPAVQPDLACAA

SEQ ID NO: 144745 - protein, 443 aa, unidentified
MPELAVSAVAYVGLDVSQDEAVVCFLLADGREPVSRWAVANSASGAAALVARLAELAVEHGVGELRVGLEATSLYWWHLACALKDAPTLSAFRPCVYALNPKLVHDFRKHYGALPKTDRADAFVIAERIRFGRQLPPPFQIDVRYAPIQRLTRFRFHLAQTLAREKSYFLTFLFLKFSSFGQVHPFKDSFGATSCAVLEEFTTEELAQANLADLASYLDGKGRGRFADPDALAATLQRAARDSFRLDRVLDEPLTLVLGTTMATIRTLQAQLKALDATIARELRAIPQPLTSVPGLGPVWSAGLIAEIGEVGRFTDEAALAQYAGLVWKAHESGQFQAEDTPLAKTGNTYLRYYLVEAANSVRVHCPEYAAYYQAKFAQTPKHAHKRALVLTARKLVRLIDALLRTGALYRPPEARQDQTEVHLPATNRPSANRRSRRAAAVG

SEQ ID NO: 144746 - protein, 345 aa, unidentified
MELHTIGIDLGKTVFHLVGVNLRGEVVVRKKFSRKQLLHFTANLQIELIGMEACGGAHFLGRALQGQGHEVRLMPAQYVKPYVKTNKSDYIDAEAIAEAVGRPNMRFVPIKSDAQLDLQSLHRVRERWVMRRTAVINQIRGLLLERGITLRKGRCYVDEALPGVLEDASAKLSGALRVLLAQLKLELDHLQMRIDEADAVIKKTAGENEACRRLVAIPGIGPITATAIIAAIGNGAAFKKGREFSAWLGIVPGEYTTGGKQKLLGISKRGNSYLRRLFVHGARAVLQQSAKQSSGLSAWLAQLTTRTHRNVAAVALANKLARMAWAVLAKNEAYRPPILVAAAPA

SEQ ID NO: 144747 - protein, 335 aa, unidentified
MDFVATAMDERGKIISKDKVSTDRDSIRHYFKKVGTGETKAVMEACYGWEYFYDEVDNLIDDLIMAHPLKTRLIAEARIKTDSIDSETLAHLLRADLIPEAYAPSSETRDKKNLLRYRSSLTAIKVRIKNTIHSILARNHIEDNGFTSLSDKFGKKGRAYLRSVKLRGNDTIILNQYLDLLGETETKIAAAEKQIRAVCHQDEICKLLGSVPGIGDILAVTIRYEIDEIGRFVSGGKLCAYAGLVPSTYSSGNRTYQGKITKQGNKWLRWAMIEAAQRAPLNDMWLREFYNRISKKGKKIARVAVARKLLEIIYRMWIDRKPYCKKSVTAALQCV

SEQ ID NO: 144748 - protein, 428 aa, unidentified
MDFEVKHLICAGLDVHKKTVVAAVCITDPVTLEATYKVKSFSTNNSQIAAMRDWLLSYNCLHVCMESTGKYWIPVFNILEPHMHVILTHPKYVKAIKGKKTDKRDAKWIANLFRFDIVKASFIPPADIRALRELSRYRLKLSYMRSAEKNRYQNSMTISRIRIDCVLTDPFGKTASSIMNYLLSDVPFDEKECAKLIHGGIKVSNEEIFDSIRGFEILSEQRFKMSHAKQHMELLSSYMDEIENELFSLSRPYDEVIKRISRIAGFTERSALFVISEIGADMGVFESDKHLCSWAGLTPANNESANKKKSTRCSKAGQYLKPLLIQCALAAVKSRKNPYYAIKYNRLAKRRGRKKAIIAIARMMLTSIYHMILNNEEWKPDDYEAIIHPSKPEKVALTLDNVIQFLGEQGADPETLKLLQQQCAVHSG

SEQ ID NO: 144749 - protein, 464 aa, unidentified
MAFVTKKKARRVNVKKNRAYKRYQEKKRQVSGKRIVGIDPAKEKHQVTVVDEGGLQKGSTFSIGVTFRGYNEELWNGLRKILGQFGPEDVVFAVETSCNLWKTLVVYLSKKGYTVLLVSPLVTYQSRPIMNNDYSKTDPKDALLIGENAQRGYYADYHEYSSEVNRLHSLCIAYDKLVKDRSRNKMRLRSLMEEIFPEYLECLNVDIDTSLYLLGKYYLPEHFAGMDIKREAEHVYRLSRGNHGLETLHQLKESAQRSIGVDKRGEEDSVRLILDVWIGEIRQLDRSIEAVSARMIEIARGSEYFEIIASVPGISDISAARFIGECYGLNLFTHYKQIEKLGGLNLRLCDSGQYKGTKRINKLGNKRLSKLQYQMTTQTARFVPEVRIKFIKRQKKRECYRKNIIAASSVLLRILMALIKDKRRYEYRDDKVKELAALELTYKPQKKKRKARRTGRKSAGKEAA

SEQ ID NO: 144750 - protein, 349 aa, unidentified
MQYVGVDHHKRFSYLTVMNEKGVVLREGRINNSKESLRRFLGYSDEPKSAVLEAGRNWTVMHDWLEEELDEVKLANPKKVKAIAEAKIKTDKIDATILAHLLRADLIPEAYVPKPETRMIKNILRQRMFFVKLSSMTKNRIHNVLDRHPELRGQIDPSDLFGKQGLEWLSIVKLPKEDKRLLNEQIDLLSYLTGKIKDSNHVVEKLGSKDKRVKNLMTVPGIGKFFALLIASEIDKIDRFRTKDKLASYAGLIPSVHSSADRTFYGKIVAHGNRYLRWALIEAVWPAIRKDLHLRLVYQKIRQRKNANVAKVAVARRLSTIVYRVLSENRTYIANYPGRPHITLAVANN

SEQ ID NO: 144751 - protein, 404 aa, unidentified
MESELQVAIDVGSRVHRVAVSDADGHVLDQFDVHHTARGIDAFFNRITPLAHGTVAVAMEGYNGWARPLDQRILAQGWTLYNVNNLKLARYKEIFPAPAKSDNIDSLRMLELFRMRQSHHLARDVLQLVVAAPAENDKLKHLTRRRRQLVNDKVRLTARLVAALQALCPGLLALTGAVDNVWFLSLLTARADVRKLARLRGATLRGLPCIGKKYAALIQVWQADAMFADDVEWTGPTAISDARRLLALRREIEDLERQIAAISVKSELAQRIASIPGFGLVCSAELAGEIGDLARFSGETGLAVYLGMAPLTNSSGTFHGTKRPRQVNRHAKMAMMNAVAHHAKLVEESLAYYTKKRAEGKAHNQAIRCVGRQLVRVIWSMVKHGRDYQNAPPARPEVPDIDSC

SEQ ID NO: 144752 - protein, 384 aa, unidentified
MQMMIEGQSHFQPFGLSYWGFEDLNKGVGSMTASYEYHIGVDYHKSYSHLVVQDSSGKTLRSGRVKNDRQSLGGFLERYRENSHAVVEATRNWMVMYDWLDDICDDVVLAHPLKVKAIADAKIKTDKIDATVLAHLLRADLVPEAWAPSERSRDLRVALRERMFYVRLRTMTKNRIVTVFDRYPEQTAQLKKLGDLFGKAGRVQLAQVNVSEIDRIQIDRGLAFIGDIDMRIKQSEATIRAMTKANANVKLLKTIPGIGEFFARLIDAEIDDISRFRHPKKLAAYAGLVPSTYSSGGKTFHGKIIKQGNKWLRWAFVEAVTPAIASDPQLRAQYEHLKIKGINKARVAIARKLLTIAFQILRDQRAYEPRGTATMEGATISRLS

SEQ ID NO: 144753 - protein, 361 aa, unidentified
MEVIIERACGMDIHKDSITACIMTPEGKMIQSFSTKTVFLLQLIDWIKEHGCTHVAMESTGVFWKPIVNILEAENIEFLVVNAQHIKAVPGRKTDVKDAEWIAKLLRHGLLKASFIPNRTQRELRELVRYRRSMIEERARQHNRIQKVLEGANIKLGSVVSDVMGVSSLDMLRANAEGENDPEKLAGFARRSMKKKKAELELALRGYIQPHQRLMIKTILTHIDFLTVQIELLNQEVACRLSTHQEDIERLDSIPGIATRMAEQILAEIGTDVKQQFPSAAHLCSWAGLVPGHNESAGKRKSSTMKKGNKYLKSALIEAAHSVRGSKTYLGALYRRTATRKGKKRAGISVAHAILRIAYFL

SEQ ID NO: 144754 - protein, 316 aa, unidentified
MPDKKFLGVDVAAEWIDIALHGCAAVERIANTCESIAAWLARLRPEEVGLVAFEPTGGYERVLRRELISAGLAFARVHPNQLAAFRRRRGLKAKTDPIDARLLADFAALELADRGLGPLVEGDEALREMTTRRRQLVELLHAERCRADRAEAQIVRQGLEAVTSAVKTALDTLESAIDAHIAERSALAATAQRLRSLTGVGPITVQTLLGELPELGRLSGKEIAALVGLAPQTRKSGKTTHRATIGHGRPGVRRVLFNAARAAIRWNPIMKAFYDTLVHTNRRPGKVALTAVMRKILVTLNAIARDQQPWKHAQTT

SEQ ID NO: 144755 - protein, 340 aa, unidentified
MDNHTQYSGFAGVDLAKKIMQIHFVTEDGEITDRQVKRAEFLDFFRNRSKCLIGMEACGASQDWARKLEAMGHEVHLMSPKAVKPFVSGQKNDHNDAIGIYKAMFNGVRRVPVKSTEIRDLQTLRRIRSQVAKDRIKEINHVRGLLAEYGIVMGRSVAAFNKGISSALVNLKERGGVSPLVAEELRTTVESIKTKTERQKRLDREIEQLARGCKNYENFLKTPGVGPFTAAMLCVLLCDPDIFANGRQFAAYIGLAPRSRGSGGKNVVIGIPSKFNCDSESRAVFVECAQALTRYKNKSPWIEGILRRKPKKVAVIAIANKLARQACSTSLGNGKQRRKL

SEQ ID NO: 144756 - protein, 366 aa, unidentified
MKKISTVAKRGNEIFRKPKLTIGLDLGDRTSHYCILDEAGNVILERSLPTTPKGIHQTFSKIPRSRIALETGTHSPWVSRQLTQLGHEVIVAHARNVRLIGESSRKDDQLDARTLARLARIDPELLGPVRHRSAKAQIHLTVIRARAVLVSTRTALVNAARGLTKSYGERLRKCGTGQMNREIAKGLSQELREALEPLLEEIESLNERIAEYDRRIEKVGKEVYPEVALLQQVQGVGTLIALTYVLTLDDPHRFRRSRDAGCFLGLRPGRRNSGMSEPQMHISKEGDGYLRTLMVQGAHYILGPFGQDSDLRRWGLKLAERGGKNAKKRAVVAVARKLAVLLHKLWVCGEVYEPLRNNHKVVSAVA

SEQ ID NO: 144757 - protein, 337 aa, unidentified
MSTIHILGIDLGKHCFHAVGNNHTGKDVIRRKFSRSQLLRFLSVLEPTIIAFEACGGAHWLARKCEAYGHRVRLIPPQYVKPYVKGNKNDFIDAAAIAEAASRPSMRFVSAKSEEAQVIAAIHRVRDGYIKERTACMSRIGAILLEFGLSFPKGHAKMKALFQWLAEQDIKLPPGLVAELLSIHEHYKYLNEQVSTQDRKRKAITENNENAELLKSIPGIGDLTATLCVANISSPSNFGGGREMAAWLGLVPRQYSTGGKSKLLGMSKRGNKHLRALFIHGARSVLSRIETTGKVFGDWLVNLRATKPFNVVVVALANKLARIAWAVLYHRQAFKAV

SEQ ID NO: 144758 - protein, 366 aa, unidentified
MKKTSTVQALKNDLFKGRKLTIGLDLGDRWSFYCVLDEAGQIILEQSLPTTPEAMKQTFGKIPRSLLALETGTHSPWVSRLLSELGQEVIVAHAQKVQWITKSNRKDDRHDARTLARLARVDPELLGPVRHGSAQAQLHLTVIRARAELVRARTALVNAARGLVKSYGQRLPKCGTYQVSEKLGEGLSAELREVLVPLFQEIESLNGHIKEYDERMEKLAKEVYPEVSLLKQVKGVGTQIALTYVLTIEDPHRFPKSREVGCFLGLRPGRRNSGESEPQKGISKEGDRYLRTMLVQGAHYILGPFGEDSDLRRWGHKLAERGGKNAKKRAVVAVARKLAVLLHRLWVGGEVYEPLRNSQKAMREVA

SEQ ID NO: 144759 - protein, 361 aa, unidentified
MRIIGCDLHARQQTLAMLETTTGEVVNLTLMHEGNEVREFYSQLPRPVLVGIEATGSMQWFLNLMQELGIECRVGHPATIRAAEPRKQKHDRRDADLILKLLVENRFPAIWLPNKELLDLRALLLHRHQWVRIRTRIQNALQAIALANGLRRGPGLWSYDGQAKIAFLPLPPHASYRRSALQAMYRKMRDEIENLTKQVAEQAEQRCGARLLMTHPGVGPVTALATEVFLGDPGRFVDGKALASYVGIIPREYSSGGTQRFGGVTKQGSPLLRFLWCEAGAHAVRRDPELQRFYRRKLVQKGLGKARVAVARKLGIRLWIMLRDEIDYEEFCRRGQKPQSGAACAGMLEVGNGANSHRPID

SEQ ID NO: 144760 - protein, 379 aa, unidentified
MRTVSGLDVHKDSIFMCILDEQGKKTEEKFGVTTREIKRLGRVMQSRYVSDVCMESTSIYWMPIWRLLESDFRLHLVNPLFLKQLPGRKSDVKDAEWIATALIKDLVKDSFVPDGNIQRLRQYGRRINEINRDLVRCEQRIDTVLQRCNIRLSNHVSRTKNKSYRKVVDALIAGETSCDVLIKLIHGRTVNRCGKSAVHDCLEGCIGQSDRDMLGQYTQMFDMYETQKQQCIEAMIQMCVELYREAFLFLLSIPGIKEISAAIIISEIGDNMELFATAATLVSWAGLRPRNDESAGKIKSRKITHGNKYLRKALMECAWGAARTKGSVFYSRFFHLKGMKKHHNAIIVAIARQMLTIIWTLLTKKEHFDKEYHLKKKSV

SEQ ID NO: 144761 - protein, 310 aa, unidentified
MDMITVGVDVSKDRLDVAVCPSGEAFVVERNAAGLERLAARLQQIAPHIVALEATGGFETVAAAALAAAGLPVVVVNPAQIRSFAKALGQRAKTDPIDAAVIARFAEAAKPEIRPLPDEANRLLADLVARRRQIIEMMGAESQREKRVTVPQLRKSIARLLKALEKELASVDKDIDDVMRGSPAWRDKENLLVSTPGVGPTIARTLIAELPELGQLSRKQIAALAGLAPFTRQSGQWRGRSFIGGGRSVVRTALFMGAMVGKRHNPILKTFFDRLVAAGKAKMVALIAVARKLLTILNAILRDNRPWQIA

SEQ ID NO: 144762 - protein, 412 aa, unidentified
MTNPLLVGVDVHRKTNTACGMNLQGQEVTSRFTVDNNRPGTQAFVEEVAKQVVEGNFDAIHIAAEATGLYWWHFLQTLDQDPLLNQWPMKLYPVNPRLTANFRKTYGDQDKDDPIDAFVIADRLRMGRDLPTPFHGEERYFALRLLTRYRFHLVHALAREKTYCLTVLYLKASEYTRLKPFSNVFGAASRAVLQDFTSIEEIAAIPFDQLVEFIDTKGKRRFPNPNDNARTLQQVTHDSYPLPQALQQPVNIILGMSLQHISFMERQCKRLDTAIKDQIQPIPHTLNSIPGFGPVFSGGILSEIGDIQRFHHNQAKVAKFAGLKWKHAKSAEFEAEETPLTRTGNRYLRYYFCEAANTVRMRDPDYAAYYKRKYNEVRKHQHKRAIVLTARKLVRLVVALLSTNQPYQTRRP

SEQ ID NO: 144763 - protein, 414 aa, unidentified
MSHKIAGIDVHKKVLMVVVVDASTPEQKPERRRFATMPSELRRLLIWLREQGVEEAVMESTAQYWRSVWLELEPYMRLHLAQAFSNRAPRGRKHDFKDAERLVRRLIAQELILSFVPDGEQRTWRSMTRMKLQLTRDRVRLQNQIECLLEEMRIKLSIVVSNLLGASGLRILRALAKGKTDPKQLAQLGDERLQCTEEQLVDALTGRAQPMHREMLALQLERLQLIDTQIAQLNGLIAQAMKPHQEAVIRLAEVPGLGVDSAQQVIAEVGVQASTFSSAAELTSWVGTCPGKEESAEENHNSRSAKGNKYLRRVLNQAAHAAVKKKGSHFQVVFRRLLPRLGYQSAIWAVAHRLCRLVWKILHEGVRFIEHGVEPDSKAKNKRARMLTRALRKLGYEVAITPINLATVENGGQM

SEQ ID NO: 144764 - protein, 419 aa, unidentified
MKKIKPKRPYAVNKKVLIATVDGGKEKHYGYFRCPDGTDGKSLPFENSGKGFREFLERITSAARTHGLEEIIVGFESTGPYMEPLAQFLKSKRGIRLVQVNPMHTKRLKELAGNSPLKTDRKDPKVIADIIELGHALTVVIPEGPAAELRRLTQGRERTITSRTRLFNQLQCLLASFFPEFLQVMNDVTTASAQHLLKHHPTPQDIVNLGEAALASLLRKVSRGKLREDRARALFEASSASVGIRDGRDSMLLEIRLILETIDAYDRFIEDSEAGMVRQLEQIPYSRIILSLKGIGSVTAAGLIGEVGDFTKFGTISEVMKLAGLDLYEVSSGKHRGKLRISKRGRPLMRKLLYLAALSAVRKNGVMHAWYQQALNRGMQKTKALVAVSRKLLVLIFALVRDHSVYVENYVKPILQEAA

SEQ ID NO: 144765 - protein, 422 aa, unidentified
MDTLIERCAGIDIGKDEVVACVRTPKPGGRGRIKTTRTFATFTASLEAMLEWFAAEGVSAVVMEATGSYWKPVWYLLEERPWELLLVNAHHVKILPGRKSDVLDAEWLAELLEHGLLRGSFVPPKTIRELRDLTRYRKRMIQAHTSECQRIQKTLEDAGIKLDSVASDVLGVSGRAMLAALVRGERDPELLAELARGVLRRKLPALRQALRGRFSEHHALLIGLALEHTAHLEAVITRLDERVDALFASSTSQGDHGGVPFARARDHLDTIPGVGKRAAETIIAEIGVDMSRFPTAAHLASWAGVAPGNNITGGKPGSGTTTKGDVWLIDILTQSAWCAARTRDTYLAAQFWRLARRIGKKKAAIAVAHSILVICWHLLHDDADYDDLGGDYFTRRNTDRQRDRLINQLHNLGYRVTLDKVA

SEQ ID NO: 144766 - protein, 375 aa, unidentified
MKEKVRFLGLDVHAETIAVAVAEPDGEVRSLGTIANREDSIRKLVKKLGPVEQLRACYEAGPTGYVLYWQLTQLGVECAVVAPTLVPVKAGDRVKTDRRDAEKLARNHRSDDLTAVWVPDEGSEALRDLVRAREAAKQDQLRARHRLSKFLLRTGRRPAMGLKAWTERYLAWVQQIQFSQPAQEFTLLDYLHEVQHMDERVKRLEQAIAEAVKLASPEVQEVIRGLQALRGVAHLSAVTIAAELGNISRFESARKLMGYSGAVPSEDSSGKRQRRGNMTKTGNAHLRRIAVESAWSYRFRPAIGPRLHQRQEGVPEEIKEIAWKAQIRLHKRYSKLMAAGKDKKKIITAVGRELLGFVWAIGIKAETAGKLPMAA

SEQ ID NO: 144767 - protein, 314 aa, unidentified
MSIQEVTVYVGVDVASKHLDLYFPDSGKSQRINNDAQAIRAFCDRLAGDKRYMFVMEASGGYERLLCAHLGDGNVAYAVVNARRVREFARCMGIDAKTDAIDAQVISKFASALKPIPTASQSDEERKHAALVTRRSQLVDLITQEKNRLKQTWDSDAKKSVQKTLKHLENELKSIDQKLTKMLNNGSMDQRKIEILQSAKGIGDVATSVLLAHLPELGKLNREQIAKLVGVAPMNRDSGGAVGKRFIMGGRGGVRSVLYMATLVAIRFNMKIKALYIHLKSKGKESNVAIVACMRKFITTLNYCLKTNQLWNAN

SEQ ID NO: 144768 - protein, 345 aa, unidentified
MKKILKQALGIDVAQKELVVSLGRLHEDLSIEIYAYKVFPNTRNGFSTLVSWVQKRVDPNVKVRYVMEATGVYHESLAYYLAQEDCEVSIVLANKISNYFKTLEVKTVTDKTASETIARFGLERKLDLWKRPKPVFKKLRQLTRERDQIVQERTMAKNQLHAEQAEAEPHPSSINRIQKRITLLNKQEKEIQQEIAKMAKEDLEVSSSIEGIRSITGVGLLTTVTVLAETNGFELIRNKRQLTSYAGYDVREKQSGTSVRGKARISKRGNRYLRKAMHLPALTAIKHSDRFKAIFVRLVSKHGIKMKAAVAVQRKLLEMIYTIYKTKTLYNEDYLKMKCEQTVTT

SEQ ID NO: 144769 - protein, 340 aa, unidentified
MNISVIGLDLAKSIFHLVGLDRHGKQGLKKKLRRTQMLPYFANLKPCTVAMEACASSHYWARELRKLGHQVKLLPAQHVKPYVRGNKNDYNDALGIAEASRVPQMREVAVKSIEQQSIQALHRLRRSAVGDRTALCNQVRGLLAEFGISLNQGVATLRKAIPCLLEDAENGLHALFRDALSLKYEQLCQLDELVKNLSDTIQKEANAHPEMKLLQSIPGYGPILSSTFYSVIGDGKGFRTGRDVSASIGVVPRQHSTGGKNVLLGISKKGDKYLRSLMVHGARSLIKHAHKKEDALSVWVTALIERRGKNKATVALANKLTRIGWAVVRTGKPYKENYAV

SEQ ID NO: 144770 - protein, 316 aa, unidentified
MTPFQSPADYVGVDVSKQHLDLAMAGARVVRVANTPAGMVRLIAHLAGLSRPHLVCEATGSHTRLMASQMARHGIALSRVNPRRVRDLARASGQLAKTDAIDAQMILRFAHTMQPHPSPAPEPAAAELADLVRRRRQVVDMLAMEKQRRDHPEAETVKASIAAHIAFLVDTVAQLDKAIAGRIRTEPAMARRMDLLASIPGIGQTTAAVLIAEMPELGSIGNKQAAALAGVAPFTRDSGQMRGQAHIAGGRLSVRCALYMATIAAIRANPPIKAFYRHLRDQGKPAKLAIVAAMRKLIITANAVLTNQKPWTKSQT

SEQ ID NO: 144771 - protein, 357 aa, unidentified
MLSSNVKYIGLDVHKEAIVIAVLNNAGKLVMESIVETKASTLLDFLHGLRGELHVTLEEGTWAAWLYDVLKPHVREIVVCNPRRNALLKEGSKSDKVDARKLAELLRTGMLRAVYHGEHGLQTLRELSRCYVTVSKDQRRVMSRLKALYRSWGIPCAGSQVYAVRRREQWLSKIAHAGVRRRAELLYQQFDGLLVLRHTVRGELLAESRKHQAVKILRQVPAIGPLRAALLLALMQTPYRFRSKRQLWTYSGLGVETHDSAQHRYVDGQLQRSKKPQQIRGLNQNHNHEMKEIFKSTALSASRLAGPLQDFYAGLVAKGMKPDMARLTLARKIAAITLTLWEKGGSFDAKHLKSQAA

SEQ ID NO: 144772 - protein, 343 aa, unidentified
MSEVTTIGLDLAKNVFQVHGIDASGQVVVRRQLRRSQVLSFFERQHPCLVGIEACATSHHWAREIAKLGHEVRLMPARYVKPYVKRNKNDAADAEAICEAVTRPTMRFVAVKTEEQQSVLMLHRTRQLFVRQRTTLINAIRAHMAEFGIVAGVGRNGVERLLRLIDEGSDERVPPVARECLQALRTQLVLVKRQILEADRRILAWHRSNELSRRLETIPGVGPLIATALVASIPDPHAFGSARDVPAWIGLVPKQNSTGGKERLGSISKAGNRYLRSLLVVGALSVIRRAKQVGYTRRAWLAELMARRPVKVAAIALANKIARVAWALMVSGTRYREPVPQAV

SEQ ID NO: 144773 - protein, 393 aa, unidentified
MEHDRDRIRDFALSYTEAWCSHDPEKVARHFAPGGTIAIWVGMDVHARSTEAAAIDVLTGELRRARFGSGLEPVVEWLDALPQPVHACYEAGPTGSGLYRAAQAAGIRVDVVAPSKTPRAPGDRVKSDRKDAQLLVRLLMAGALTAVAVPPAEFEAARDLTRAREQVRRDLMRCRHRVSKLLLRYGRVYEGGSTWTQAHRRWLASQRFAHTASELAYLDALAAVDGLASRKVALEERLSRLALEPQWWPTVARLRCFRGLDTLSALVLQLEVHDWERFRRAPQVAAWLGLTPSLSQSGESTSQGPITKTGSGYARRILVEAAKHYARAPRIGATLVNRQQGQPDHVLQIAWRAQHRLYRLDRRLRERGKPANVVTVALARELSCFLWAAAVAP

SEQ ID NO: 144774 - protein, 357 aa, unidentified
MRNQSDFYGKKVYVGLDVHKKSFALCAICDGVQVGKASMNSCHDGLLTHLANHFKGADITLAYEAGFSGYSLHRFLQGNGITCLVIHAASIEVSSRDRVKTDKRDAAKIAHQLAQGRLQGIRIPEEQEEQNRSLSRGREQLVQLRADIARQIKSKLMYFGLLAATDDRLISESFLKEIEAMKLKKEITFVLRSFANIWRDLSKQIKAFDQELEKQAESDQKVEEVYRSVPGIGKVSSRLLANELGNLKQFSSVDKLYSFTGLTPSEHSSGDTVRKGHISRQGSSRIRKTLVECAWRAVEKDPALKADYERIAVRAGKKRAIVGVARRLIGRVRACFLQECQYKIGYEPKTGENTMAN

SEQ ID NO: 144775 - protein, 418 aa, unidentified
MQTIAWNEREYFAALDWASDHHDVVVVDQRGAVVCELRIEHTAAGWAQLREQMRGYEPLAIAVETNQGLAVEQLLDAGYAVYPVNPKSAKRYRERKAPTGVKDDGRDAWSLADALRVDGHGWRGLSPEDPLVAELRMLTRDEVALIQQRTGLVNQLHSALAAYYPAALAAFADWTRPSTWAFIESFPTPAALAQAGPKRWEKFLRAHQLWRESTCDKRMDCFAHALDLRGSAAAVAAKSFLAVSLAKVLRALEQQLGAYRERIEQRFGEHPDHDLFGSLPGVGPKLGPRLAAEIGSQRDRFESAEGLQAYAGTAPVTFQSGQIERHVVRRACAPFLRAAVHHWADHSRKQCAWAKAYYEKHRQDGDSHACALRCLGQRWLKILWRMWQDGAPYDEARHTRAQLQHGSWVLTLQPAKST

SEQ ID NO: 144776 - protein, 410 aa, unidentified
MDDLKTIPKRYIGLDVHKHYLIAIGVDTDLNQILGPKRVELCHLEQWMEKTLNQEDAVVLEMTTNTWQLYDELTPHVQSVTVVHPPHVALITRSQVMNDKIAASILARLLAKGLLVGIWVPPVEVRELRALIAQRSKMTRLSTQAKNRLHSILQRHHMSPPDGNPFIQDERSWWLELPISYLEKVNLQSDLDTLNFAEKQVEELVVALKCLAAKDERVTRLVQLPGISIITALTILAAIGDIHRFEDAKNLVGYAGMGARVHDSGMTTRTGRITKAGRKDLRSAMVEAAQVAANTHPFWKEELKRMEPRLGRNKAIVAIARKLLVTVWFILAENATDCHAQPEIVARKFMQHFYHFKKDDRPANQSAPVYVRQQLDLLGIGSELKRISWGGKKKPIPLPPSDLLAPATHR

SEQ ID NO: 144777 - protein, 316 aa, unidentified
MINKQVVYGVDVAKATLECAIYDSEGTFTVNNSADAIGVWLARLPRGSIIAMEATGSYHKLLAAMAHASGMCVFILNPHALKHYAQGIGLRAKTDPLDAHLIARYAMHERAKLVQWQPAAAELDRLSQLLQRRDRLAHARRSLGQSLSGIPMLTAQRQSLLASLKRMIGNVELLMRAELARLPELAQLHRRLASIVGVGFVTACQLVACLMRFRFSRVDSFIAYTGLDPRPDDSGERRGRRILSKQGPRLLRQLLYTAGMAAAHSKLFKPVYLALLARGLQTTEAIVILARKIARIAFALYRSGEDFDSQKHLTTV

SEQ ID NO: 144778 - protein, 416 aa, unidentified
MSKRMYAIAKTKDWRKQMNAVGIDVSKGKSKVAIMRPFGEVVASPFDVGHTAAELDKLVSFIRKIDGETRIVMEYTGTYYEPVAYALYDAGLYVSAIHSQLAHDFDNNSIRRVKTDKADAVKLANYALQHWLELPKYTPQEDIRRQLKICSRQYEKYSKLKTMLVNNLIALTDSVFPGVNELFTSPPRKTDGHEKWLDFLLRFWHAECVCGFTQKVFADKYHKWCNKAGYRFSESKAEDIYISACGHVGLLPKDDVTELLIKQAVEQVNGICASIAAMLKQMTFLASQLPEYPVVMGFFGVGENLGSRIIAEIGDVGRFKSKNSLVCYAGLEAPPYESGKFESHDRKISKKGSPHLRKALFQVMACIIQTAPDDDPIFQFIDRKRSEGKHYYSYMNAGCAKFLRIYYARVTEYLYS

SEQ ID NO: 144779 - protein, 326 aa, unidentified
MPNTERGFAQLVDMFTAHHVQRVGIEGSGSFGRAVAVHLALCWQSGQPVAVVEVPTLMTSRERHGQLGKGKTDPVDALAIARITTREQQLPPVRLTVGAAADLRALLDYREDLVRERGALVNRAHAELGGLRPGYQQQIPIMTTRARVRAAVDLLGDDSSIRATLCRRRLERVIAIDAETAELKQQITRLVAAADTTLTDLYGVGPLVAARFLAEVVDIRRYPNRNAFAAANGTAPLPASSGRTVRHPFNPGGNRQPNRSLYTIALTQIRGDTEGRAYYERKRAAGKSKREALRCLIGEVSVMRPGIGLDRGFSVVSGDGLVAEPL

SEQ ID NO: 144780 - protein, 346 aa, unidentified
MEESNINIKRIGIDLAKQVFQLHGVDSHEKVALRKQLRRAQMLDYFKKLPPCLIGMEACSSAHYWGRELQKLGHTVKLMAPQFVKPYVKSNKNDANDAEAICEAVARPNMRFVAIKTIAQQDTQAMHRIRSELVQQRTAKVNQIRGLLAEYGIVVGRRVDVLRHALPQLLEDADNGLTADFRVLLEGLKQDLVTLDERVDDLDKSIKTLANNNPAAKRLQQIPGIGPMIATALICAIGDGKQFKRGRDMAAWLGLTPRQHSSGGKDRLLGISKRGDAYLRTLLIHGARSALIVADKKEDPRSRWLQNLCSRRNKNIAAVALANKNARIAWALLSKATDYLPEGEPA

SEQ ID NO: 144781 - protein, 342 aa, unidentified
MRLDEGGGIDVHKETFKVAACHENEAPQERTFGTFTKDIYAMRDFLLEQKIKHVVAESTGVYWKPMYRILSAAGIEVSIVNPTRVKQMPMEKTDKKDARWLAKLLMNDMIKKSFVPDEQQEQLREFSRMHTKYIRQMTRVKNQVVRLLESCNFKIRSIVSDISTQTAQKLINAISNGQTDTDLLIALCHHSVRKRQGDERLKLALEGRFTKYMQQQLRMLLDDLHYFEKQKMQTENVLKELFTNEQMEKIKKLDEVEGVSQQQAEIIMAEIGAGIDSFSQADQAAKYAGLTAGQRETADQQKPVRAVPGNKHLRVVMVQIAWSAVKVKNGYWKAEYQHLKKE

SEQ ID NO: 144782 - protein, 416 aa, unidentified
MNAVGIDVSSRKSTVAVLRPLGEVVCLPFDVTHDIVGLASLAEKLKTIDGETRVVMEHTGRYYEAVAKALHEAGLFVCAVNPLLIKEYGANSLRRVKTDKADAIKIARYALDNWADLRDFTPMDAIRYDLKTLNRQFQLASKQRTASANNLIALLEQSFPGIRKCFDSPVRSDGTQKWVDFAHSFWHVDCVRKQPFPAFCERYRKWCKLHTYFFKLRNAEKVYALAKRAVVLTPKSKVVKVLVQEAANQLISISRSVEVYRAEMDRLAAMLPEYPVVMAMYGVGKSYGPQLMAEIGDVRRFERKQALVAFAGIDPMPNQSGDKNVRSNKSSKRGSPYLRKTLFNVIRTYLQCAPQDEPVFQFLNRKRAEGKPFYVYMLAAANKFLRRYYAKLRDYFASLDTLQSVDPIPTTLKASL

SEQ ID NO: 144783 - protein, 347 aa, unidentified
MLALHPGLDVVIGVDTHNDTHTAAAVGATGAVLEHLTVPADPAGYRQLIAFGRRHDATLWAIEGTGSFGAGLTTALLSRCARIVEVDRPQRPARRGGVKSDDIDAVRAARQALAGVGLSEPRRRGDREAIRVLLATRAQAVTFRTRAISALHALVASAPDGLRERLRTLPLGQLLQTCAGLRDSSRRSVEESATVLAMRSTARRALACEREAAELEVQLDRLVRRLAPELLGKLGIGPVVAGQVIASWSHHGRVRSEAAFAKLGGAAPIEASSGIITRHRLNRSGDRQLNRALHTIVLVRMRQDGATKDYVQRRLAQGKTIRDIKRCLKRYIARQLFRQLEALSSTT

SEQ ID NO: 144784 - protein, 341 aa, unidentified
MEQITRIGMDTSKHIFQLHGVTAAEEPALRKKLRRNQMVTFFEKLAPTVIAIEACGASHHWARLLQSFGHTVKLIAPQLVKPYVKRGKNDAADAEALCEAASRPTMRFVPVKTAEQQAALMLVGVRDRLIRNRTQLANAIRGYAAEFGLTAAKGKAHLDPLLERIRADESVPALARELFAAQAKEYAQLRAQIDEVDAKLMAWHRADECSRRLAKIPGVGPIGAVLLKMKTPAPELFRSGRQFAAWIGLTPKDHSTAGKLRLGTITRAGDEGLRSVLVVGATAVIQHVRRGGRSSPWLTELLKRKPPKLAAVALANKMARIAWAALRQGGTYQKPEAYPAV

SEQ ID NO: 144785 - protein, 419 aa, unidentified
MSFKIFKFNCCGLDVHKTWIYACIGITDSNNRTEYKQARFSSFSKGLHQLCVWLAKYNCNDVCMESTGKYWIPVFNILEQHKIRVTLSHPKYTKPMKGNKTDRKDAKWICDLYMCGMVKPSFIPPADIRELRDLVRYRFKLTCMITGEKNRAQNCLTVSNLKLDDVFSDVFGKSSRSITEQILQHPGEKFDVSPFVDSRCKTPIEEIQAAVDGNISKEQDVKLRQCLDHIDELQKHISEVEQEILRLSDKYEAALNLIRTVPGFDKNPMTAIQVLSEIGGDMSVFPTAKHLVSWAGCCPRNDKSDRKIKSTRISCAGSYFKPVLVQIANALIKSKKHFEFTTRYKRIKTRRGHKKAIIARCRMILTAIWHILTDLKPYTSDGFLESRPVKKEKVLTTSQALNLLRQRGYLIKDEPSPVS

SEQ ID NO: 144786 - protein, 387 aa, unidentified
MQKPNDLSRSPVALTEDNTLIAVIEMSLASWLVAGRIPGVNRSPLRKQDPDPEKLLARLQQWRDEARQAGHPIARIAVAFEAGRDGFWLARWLRAHGIETFVIHPTGIPVKRDHRRAKTDRLDTALLMRAFLGWLRGEPDHCSMAAIPTLEEEDRKRPNREHQNLSGERTRIINRVKGALIRWGIRNFNANLRHAAGRLRELRTPEGVALPPNTLAELERDLARLRFIADQARAIEKMRLSLLQATPQDRPHAMVLLLAKIIGVGIETADMLVHEVLSRGLRDRRAVARYAGITGSPDESGAKRREKGLAKAGNARVRRGMLQLAWRWLMFQKESALTKWYRARTENAPPRARKTMIVALARKLLIALWRYTTIGEIPEGVVLHHAA

SEQ ID NO: 144787 - protein, 300 aa, unidentified
MKITRVGLDIAKQVFQVHGVDEHGKARVRKQLARAKVLEFFAQLPACLVGIEACGSAHYWGRALSKLGHTVKLMAAQFVIQYRKRGKNDANDAEAICEAVGRPNMRLVATKTEDQQSVLMVHRARTLVVANRTAQVNQIRGLLGEFGLVVPKGVARLRRELPSILENAQNGIPTLAREVLAGLLEQFHIFNTQVASYDRQIRVLAEASEPARRLMQVEAIGPQTATALVASMGDPHVFNNGRSYAASLGITPRQHSSGGKERLGQITRQSDGYLRTLLVHGARAYLRVVDKKCDAKSAWA

SEQ ID NO: 144788 - protein, 347 aa, unidentified
MNLVAIDLGKFKSVACLYRSDDDVTYRTIETGPQSVHDLLVEWAPERLVVEVGTVTGWVHDIAVSLGIEVQVANPNTEGWRWKRVKRKTDRDDALKLARLSVLNQLPMVWMPVRRVRQWRSLINYRHELVSRRTAIRNSIRSILDAQGYRMAMGARAWTEAGIAALRSLARSAMDCEPDELWKGQLETELTLLEALGRQIDLVESKLDSLAAQEPRTSRLRTIPGVGPRLSEAVVAWIDDPHRFRNARAVGSYVGLVPRRRQSGTYDRSGRVTKHGPGLLRKLLVEVAWIMRQHNPHAAALYNKLNKGEKTRRKQATVALGRRLLTWCWAMLRDETTWDAHKVGIAV

SEQ ID NO: 144789 - protein, 352 aa, unidentified
MSNVPVFVGLDYHQDSIQVCVLNQKGDVLLNRSTRNDCDELARLVNPLGIVQRVGIEACCGAADLGEELVERLGWNVSLGHAAYIARMKSSPDKSDYSDGRLLADLTRVGYLPRVWLAPANIRELRQLVNHRQRLVDRGRALKLQVGAVLREHRVKIDKERGSRWTKAWTASVRDNEQLSKHARWIANDLLDDIVQTKGKIAATDARLREATEGDRVVAKLLEQAGIGEVTAWVLRAYVGDFSRFKTAKQLSRYCGLSPCNASSGQRVADAGLVDGCNKLLRATIVQAAHRLIRTVDRWANLAESLRKRGKPKCVIVGAVGNRWVRTLHHAMKEPVAPPSPREGRKEIPAMN

SEQ ID NO: 144790 - protein, 409 aa, unidentified
MQPILESCCGLDVHKSMVMACIAHGALDKPPKFEIRKFSTMTSDLRDLKKWLEEYNVTAVAMESTGIYWKPIFNILEDGFDVVLANAQHIKNVPGRKTDIKDCQWIAQLFRNGLISGSFIPPRDIRELRDLTRTRRKLVEEMASEKNRVQKVLEDANIKLSSVVSKVFGVSSMSMIVLLLEKDELSAEEISKLAKGKLKKKVNQLVKALEGNVTDHHRFLLKQHLAHIDFLVKQIETFDDAIRKKLSPYETQFNDIQSVTGVKDISAASVIAEIGVNMSKFPDEAHLSSWAAICPGNNESAGKKKSGKTRRGNNYLKATLTESAWAASRTKGAALNAVYHIIARRRGKKRALVAVGHRILIEIYRVLKTGKPYQDVGEDIVNERRSKKREQAMIRDLERRGYAVSKTTI

SEQ ID NO: 144791 - protein, 333 aa, unidentified
MTAVLTIVTAYVGIDVAKTKLDVVLRLGERAIHQVFAKTAEGFTALDAWLSSFGLSPAQVRICLEATGSYSDALALDLFARGYTLSVLNPAVLVDYRRSQNIRSKTDKLDAHLLARYAQEKQPRAYTPLPDEIVTLRALLHHRDDVQHMLRQERNRLEAGRMTQAIQQRVRTHVEALQAEFKTTEGEIKAHLKAHAHLKAIWQRLQTIAGIGWLTAARLLAHLGEIERFEKVGSLVSLAGLAIKEHSSGSSVRGKAEIDRHGRKDLRQTLYMSALVAKRVSPHMQGWAKRLQAQGKPKKIILVAIMRKLLHIVYGVWKKEQDYQPALAFPVAA

SEQ ID NO: 144792 - protein, 350 aa, unidentified
MIIIGVDFHPEYQEIASVDTDTGEYQEKRLAHPKEAEEFYRSLSCVGRVVRVGMEASGHGRWFERLLEGLGVELWRGDAEVIRAKRGRKQKTDREDARHILKLLQKDDFPRIWVPNWENRDLRQLLWHRHRMVQARTRVMNQLQAVALNEGLRCKKRLFRADGRQQLESFQLAPWASRRRRELLELLDRLNPTIAELSQAVEREAEKCPEAQRLMTHPGVGALTALAFVLIIGETERFQCGKQIAAYLGLVPLEKSSGNRRRLGHITKQGSSIVRFLLVEAAQVTVRSLPEWRSKYIHLMMRRGRKTAKVAMARKLAVRLYWMWRKEWDYEQWKKFGSYVGQPVHRYGVQ

SEQ ID NO: 144793 - protein, 369 aa, unidentified
MEKRIKYIGLDVHKNSIAIAIADQGQDQEVRFYATIINRMDLFDKFTRKLISDGSELRFVYEAGPCGYQLYRHLTKKGFQCMVTAPSQIPKKSGSRIKNDRRDAIDLARLYRAGELTAVYVPNAEDEAMSDLSRAREDAKFATRKAKQQLGGFLLRNGHIFTGKSNWSKAHFNWIADIKLAHPCQQITLQEYVDAVQTGCERVDRITEQIQKLTKTWRMAPVVKALQAMRGVSTIVATTTVAELGDLGRFDHPQQLMAYLGLVPSEHSSGEKVKRGAITKTGNGHVRRVLVEAAQAYRLPARISRVLLKRQDGLSPQIREIAWKAQLRLCQRYRRLMGRGKPANVVITSIARELIAFMWAIAKQVAPVV

SEQ ID NO: 144794 - protein, 365 aa, unidentified
MTEITRAPVARVGVDLSKRVYQVHAVDRAGRVMLVKAMPPQRFFEWCAQLPAGCVVAMETCGGSHHVARRLQGLGLDVRLIAGHFVTQYRMAGKSGKNDANDAAAICEAASRPHMRFVPIKTAQQQGQLALHRLREGYKEERTALINRVRGLLAEFGLVFPKSPEALRRVLADVVEDAANELPGLARLAIQRTHEHWIDIELQIAWCDDRIAEHVRADERAKKAAALLGVGPVTASAIAASVGDFKQFVNARQFGAWLGLVPSQNSTGGKASLGRITKRGDDYLRTLLIQGAKSAVMTAHKRSDRISQWLVQLKERTSWQKAVVALANKNARILWAVLTRDAAFDPDHVPPVPAARISPKLQPAG

SEQ ID NO: 144795 - protein, 344 aa, unidentified
MEHFAGLDVSVNETSVCIVDDAGRIVREAKVASEPEALLSILKSGVYHFKRIGLEAGPLSQWLYSAFAEAHLPVICVETRHMRAVLKAQINKTDRNDARGMAQMMRAGLYRPVHVKTLRSQKLRMLLTHRKLLQSKAIAIENDLRGTLRNFGLKVGVAGAVRFEARIRELVKDLPDIAILVEPLLVVRRTLREQLGILHRHLLTIARDDEVCRRLMTIPGVGPVVALTYRATVDVPARFRNSRAVGAVVGLTPCKYQSGESERTGAISKCGDEMMRVMLYEAAQILLMRSTQWSWLKAWAVQIARRRGVKKAIVALARRLAVVMHRIWVDGTTFRWTREEATAA

SEQ ID NO: 144796 - protein, 345 aa, unidentified
MEQISRIGMDTSKHVFQLHGVNAAEVVVLRKKLRRKEMVAFFEKLPPTVIAIEACGASHHWARLLQSFGHTVKLMAPQLVKPYVKRGKNDAADAEALCEAMSRPTMRFVPVKTAEQQATLMLVGVRDRLIRNRTQLANAIRGHAAEFGLTAAKGMAHLAPLLERIQADESLPALARELFAMQAKEYEQLQAQIEEVDAKLVAWHKADECSQRLAKIPSVGPIGAMLLRTKTPDPALFESGRQFAAWIGLTPKDHSTAGKVRLGVITRAGDEGLRSVLVVGATAVIRHALSSGKASPWLLELLKRKSPKLAAVALANKTARIAWKMMLTGETYSAKPAAAASVGAA

SEQ ID NO: 144797 - protein, 343 aa, unidentified
MGEVSTIGLDIAKSVFQVHGVDVDGAVVIRKRISRAKVVEFFATLTPCLVGIEACPTAHYWSRKLQALGHTVRLMPPSYVKAYLKRSKNDANDAAAICEAVTRPSMRFVPTKSEQQQSALMLHRSRQLLVRQRTMLSNAIRGHMAELGVISAKGRNGTAELLKIIAKDEDNRISGVARLSLTVLARQYAAITIEIGTIEKQIHALHRSCEESRRLAEIPGVGPIVATALIAEVGDWTVFSSGRSLAAWIGLVPRQHSTGGKDRLGRISKQGNRHLRWLLVAGAMAVIRYARQHGTKRLWLVRLMGRRPVKVAAVALANKIARMAWAMMVRGERFNEPKLLSAA

SEQ ID NO: 144798 - protein, 387 aa, unidentified
MSQAFDASRSLTALEQDSTIIAVIEMSQAKWLVAGVVPGVERQPLKRLAADEAALLKLLHRWRNEAGQAGRQIKRIVVAYEAGRDGFWLARWLRVRGVEAYIIHPASIAVSREHRRAKTDRLDTELLMRAFLGWLRGEKRHCSMVAIPTVEEEDARRPNRERGNLVTEQTRIVNQIKAVLTRFGIRTFRPTLRKAEEQLEGLRTAEGAPLLENTRAELRRYLARLRVVREQIRAIEQSRLGKLATTPEKGPHAMVRLIARVLGVGVETADMLVNEVFSRHWRDRKAIARYAGLTGSPDESGRRRRERGLARGGNTRVRCGMIQFAWRFLRFQKDSALAQWFAARTADRRASTRKTMIVALARKLLIALWRLATSGEVSDGIVLRPAS

SEQ ID NO: 144799 - protein, 368 aa, unidentified
MKKKVLYVGLDVHKKTTDVAIAPGRSNGKVRSYGKIVSTLDALNKLINKLQVDDKQLQFVYEAGPCGYQIYRHLDAKGIDCSVVAPSMIPRRSGDRIKTDRRDALNLARLFRAGELTSIYVPTVEDEAIRDLIRCRDDMKRFERKARQRLLSFLLRHGYQYSGKRNWTKGFYNWLATVKFSHSAQQVTLHEYIEATNECSQRIKRITEQIQAHVEGWSRARFVKAYQALRGVSLIVSTTVAAEIGDMRRFPNPKQLMAYLGLIPSEHSSGKTVRRGPITKTGNSHVRRVLIEAAWTYKMQARISTILLKRQQGLPKSVCDISWKAQTRLCARYRRLMARGKTKQTVITAIARELSAFIWAIDKEIQFA

SEQ ID NO: 144800 - protein, 391 aa, unidentified
MIYVGIDVAKDKHDCFITNSDGEALFNVFTIPNNADGFHNLYQKISSLTNDFSNVKVGLEATGHYNYNLLGFLMDKGLPTFVINPLHTNLFRKSLSLRQTKTDKVDAHTIALMMMSGVNLQSYSDTSYHNEELKSLTRYRFDKVKERAKLKTSLSRLVNILFPELEKLVPTLHMVSVYALLAEFPSSSQIASCHLTRLTNLLENTSKGHYTKEKAIEIRNAARQSIGSNMPAKSLELKHTIRLIQELSYEIDEIECSIKSIMDDIRSPILSIPGINYRMGAMIIAEIGDFNRFSSPDKILAYAGLSPSTYQSGQLDSCYSHMEKRGSRYLRYALFNATKFVCIWDNQFSAYLAKKRSEGKHYNVAISHSAKKLVRVIYQLEKSGQLYHKAA

SEQ ID NO: 144801 - protein, 298 aa, unidentified
MRQPWQLDLAGQPHTLANDAKGHAKLLKLLRDHPTAQIVCEATGGYEQPAVRTLHAAAVSVSVVEAGRVRHFARAKGQRAKTDLIDAAVLSEYGRAFEPAPTTAPTAQQTRMAALSTRRGQLLQTRLAEANRAEHYVDKLCLSQSRQLLRTLDKQIAAGEAAIAELIAADEILQAKATRLDAIPGVGAITAGTVLAELPELGQISDEAVAALAGVAPYNQDSGNMTGTRHIAGGRRSVRCALYMATLSTIRYDKILKAFYLKLRAAGKKPKVALVACMRKLVVLMNRLLKNPEFQLAN

SEQ ID NO: 144802 - protein, 422 aa, unidentified
MLEETQDDAEIIQRIAALDIGKAEVVCCVRVPAPGSAGRRVQEVRICSTMTRSLAEMADWLGGLGVSRVVMEATSDYWKPVFYLLEAHGFQTWLVNARDVKHLPGRPKTDKLDAIWLCKVAERQMLRPSFVPPEPIRRLRDLTRYRVDLVGERGREKNRVEKLLEDAQIKLSAVASDIFGVSGRAMMDALIAGERDPAVLAGMARTRMRTKIGQLHEAFIGHFTNHHAFLLQRMLAHIDAVNADITAVEERIEEVIDPFAHAVTRLDEIPGIGVTAARAIIAEIGTDMGRFPTPAHLASWAKFAPGVKESAGKTKGTAATGHGNPYLARVLGEAAVGAARTNTFLGERYRRIARRRGKKKAIVAIGRSILTIIWHLLSDDHATYTDLGPGYYDTHTGTQRALRNHLRNLEALGYTVTLHPAA

SEQ ID NO: 144803 - protein, 326 aa, unidentified
MKNLVTGIDISKDTLDYCGLDKENVQVKFKGVLDNNSRAISNWLEEFDKNTTVFALEHTGHYGSALISCLSKKGFVLYLITPLDLKKSLGIQRGKSDAKDAYRIAEYAIVKSHKLTPYRLPSKNLRTLKALITARERYVKMSVQVQNSLKANEILNRTLDVKMLIKEERKHYGFLQKSIKKIDSEMQKIIEADHELKRIYKKVTRIIGVGPVIATKCIVETDNFTKFDNPRKFSCHCGLAPFPHQSGSSIRGKTRTHFMRDKTLKAILTKGAISAVQHDPQLKAYYNRKTKEGKHHMSVINAVANKLVLRIFAVAKREEPFVKLAA

SEQ ID NO: 144804 - protein, 367 aa, unidentified
MKKVSTAVRNRGSNFSQPTWTIGLDLGDRNSWYCVLDEAGQIQLEQRVRTNAQGLREVFGDMPRSRVALETGTHSPWVSRLLSELGHEVIVAHARKVRLIGESRKKDDRLDAQTLARLARIDPQLLCPVKHRSAQAQADLTVIRARAGLVRARTALVNTARSLAKSYGERLRGCNVRNMNPEKAESLSPELQAALEPLLACIESVSANIAEYNQRIEALAENSYPQVELLKQIKGVGTLIALTFLLTLEDPHRFRKSRDVGCYLGLQPGRRNSGQSEPQMHISKEGDPYLRTLLVQGAQHILGPFGPDCDLRRWGLKLAERGGKRGKKRAIIATARKLAVLLHHLWVSGEVYEPLHNSRRVASAAAA

SEQ ID NO: 144805 - protein, 354 aa, unidentified
MIIVGCDYHPSFQQIAFVDTETGELKEQRLVHREGAEEFYRALAATGQRGCVGMEASGHARWFERLLAELRIELKVGDASEIQRKRGRKQKTDRQDAQHILNLLLKNDFPPIWVPSWENRDLRQLLWHRHRMVQARTRIMNQLQSVALNEGLRCRKRLWRAGGREQLESFRLAPWASRRRHDLLELLDRLNPTIAELSQSVEREAENNPAAQRLKTHPGVGALTALAFVLIIGDASRFQCGKEVASYLGLVPLEDSSGNRRRLGHITKQGSSMLRFLLVEAAQVTARSLPQWRSKYLHLMMRRGRKTAKVAMARRLAVRLYWMMRQGWDYQAWNKFGSHAGQLGNRDGVRSNIE

SEQ ID NO: 144806 - protein, 364 aa, unidentified
MKKSIITRQSPRQAGKASQPITIGMDLGDKTSRYCALDARGELLGEGSVATTRKALAEKFAGLGRCRMAIEVGTHSPWVSRLLTALGHEAIVANARQVRLISESSRKDDKLDARLLARLARIDPELLRPIRHRSEKAQAHLLEIRVRAALVDTRTSLVNTARGLAKAMGERLPACDADSLDVSKATEALPAARKEALRPLLEQVESLTEKIKQADRKLEQIARIEYPETKLLRQVSGVGVVIALTFVLTLEHHQRFEKSRDVGCYVGLRPRRSESGQCQPQLPITKEGDRYLRTLLVQGAHLILNRRGPDTDLKRWGLKLAARGGKNAKKRAVVAVARKLAVLLHRLWATAEVYRPLRSQPLAA

SEQ ID NO: 144807 - protein, 339 aa, unidentified
MKVTTVGLDLAKNIFQVHGVSDSGEVAFNRALRRAQLLKFFECLEPCLVGIEACGTSHHWARELLKLGHDVKLIPPIYVKPYVKRGKSDAADAEAICEAVTRPTMRFVEIKTPDQQAILALHRTRDLVVRQRTQTINMLRAQLAEFGIVFPQGVGHATQFAKRLSDGDSADLPDTASSVIAELCEQILFLHAKIAHYTHEMTQVARREKQVALLQTIPGIGPITASAIVATIGTGKQFSTGRDFAAWLGLTPLNRSSGGKERMGRISKMGDQYIRRLLVIGMMSRMRQITKNPERYDPWFADIMARKPGKVAAVAMANKTARMVWAVLTKNQPYRVRAI

SEQ ID NO: 144808 - protein, 430 aa, unidentified
MKQYELLHSLFVGIDVSMKENVVHAMPFSPEDHPGHAHLRFSAPNTPAGSVGIVEKVSDFLKFYPDVIQVVIALEATSVYSFHLATFLSVAHFNGHIPAIVYSVNPKEIHAYKKTFTDVGKDDYVDAMVIADYARSNKIRSRPWKGPELLGLRVLTRLRFRIAKLMGIVKNSTGNSIYLECSGLMTGENPFCNVWTTTCQELLTTFQGPDEILSLSDEELLNFITEKGHGRFSHPLDVVEKVKKATRNSYRLDKRVYEPLTSGLSVSFFIIHSLEAAIKKLDKSIETMAKSFSSDSYQILLSIDGVGPVIAGGLLAEIGDIKRFKTDDALAKYIGLTWRGKQSGQSESPVKHLSKAGDVYLRYYVLLATGQIINYSAKYREAYERIRSRKTLFPYRAALNLVARKIVRLIFTLLDKHQLYSDNKVMVTLE

SEQ ID NO: 144809 - protein, 361 aa, unidentified
MAASNIVGVDPHRKTFTATVLDSRGGELGHAHFPNTREGHDAGLAWAAGLGPTDRWGVEGASGLGRHLAEFLVAAGCDVRDVPPHKTSVRQRGRHEGKTDRLDSHRVAAETQTNPRLARAFKHAEPAAPDSVRDRIALWHNARTSLTKVRVQLLGELDALVHDLPEDLRSQLRPAKTVSARVNSLRRLDTTGVTDPTVALRLRLIGHRVAMLREVLEQDKAATAELAALVDETNSTLTELVGIAPRAAAEIIVEVGDIRRFTEAGFARFNGTAPIPASSGEGENAPVRHRLSRGGNRRLNATIYRIAMIQLRYEPRARQIHDQARAHGHTRREAMRVLKRHLSDAIYRTMLRDARRGADLT

SEQ ID NO: 144810 - protein, 366 aa, unidentified
MKKHNSNKQITTKGDQKETFAFYIGIDLGDKMSDVCVLDQVGEVSEQFRLRMKGTDFQAYFTAIPRSRVAVEAGAQSRWVAELVERCGHQVYVSNTRRVPYIHESDDKDDPGDAYKLAELVHLKPRLLHPIQHRSQEAQVDLSWIRAREVLVESRTQMLNAIRGMSKAFGERLRKCSVESFTTQRAEQIPATIRAAVGPLLEMIDQLNEQIGYYDQMIHHVARTRYPKYWLLDQVGGVGVHTALAFMLTIGEPERFAKSRTVGCFLGMRPRKKDSGERKPQLGITKAGDMYLRKTLVNCAHYILGPHGPDSDLKRFGLRICERGAQNAKKRAIVAVARELAVLLHRLWVTGEVYEPLRNSQTATAA

SEQ ID NO: 144811 - protein, 334 aa, unidentified
MGKITTVGIDLAKSVFSLHGVDGAGRTVLRRTVRRDQLERAVAGLSPCLIGMEACSGAHEWARRFERHGHTVRLMAPKFVIPYRKSGKNDGNDAEAICEAVSRPSMRFVPVKSVEQQALLALHRVRQGFVVERTATINRLRGLMAEFGVVLPLRSVTVRRQAALAAEALPELARRMVAELLEQLRLLDERIGAHDRELGAQARLSEPAQRLMKIRGIGPTTALAIVATVGNAREFDNGRQFAAWLGLVPGQYSTGGKARLGRITKRGDAYLRNLLVYGARSVLHTAAGHRDRISRWALELQARCGYHRTLVAIANKNARIAWALLARGEALRPE

SEQ ID NO: 144812 - protein, 448 aa, unidentified
MPKRNDNPAGAVPTRVANPNAAAIDVGGEAHFVAVPADRDPQPVRSFGPFTGDLAEMARWLKACRIDTVVLESTGHFWIPVYDALEAAGFEVVLVDPRTLTRHLRKKSDVIDCQWLQDLHAVGMLKGCFRPDDQVRALRALWRHRARLVVEAGRLLQRMQKVLIEMDVHLHLAVADIAGTTGMRIIRSIVKGQRDPAKLAGLREPNCKRDEAEIARALEGSWRDEHLFELKQLLKSWDFHREQTSACDRQVAKVCGAFEDKGQGRPLPEGSKRPKENRNTPEFDGPGIIHRITGVDLTAVDGLGVSTVLTVLSETGPDLSKWPTAKQFASWTKLAPRRDQSGKRVRSPSYPARGTSRVAQAFRLAARGLWRSQSVLGHFLRRMKSRLGPASAIRATAHKLAKLFWRLLTTGESYRRGDMVAEQERHRQRHLRSLERQAQELGMRLAPA

SEQ ID NO: 144813 - protein, 418 aa, unidentified
MSDTFEWFLGIDWGSEAHEFCLVDARGRLCGTRSVAHTATTVHEAVQWVQQQTGVASAQIAVGLETRWGVLVDTLLEQGFAVFAINPKQLDRFRDRFTAGGAKDDRRDAHAAADALRTDRRAFRRVHPDDPPIIHLRELCRLVEDLHEEEGRLANRLRDQLYRVHAAWLTLSPAADEPWLWTVLAAAPHPDTWAQLPRRRITPVLQQHRIRRVSAEDVLTALRQPRLTVAPGVADAVETRVASLVPQLVLVHEQRLTAERRIGRLLEQLAPTEATDGERREHRDVEILQSLPGVGRIVTATMLTDATGPLAERDYPTLRAHAGTAPVTKRSGKRAFFVQMRYACKPRLRNALYHWSRVSIQHDPPARTYYDALRARGHSHARALRSVADRWLRILIAMLTTRTLYDVTRFSRMHVEPV

SEQ ID NO: 144814 - protein, 343 aa, unidentified
MKLFVGLDVSLEKTAICVISEHGKIVKEAQVASEPEALSCWICDQDGAIAAVGLEAGPLSQWLHRGLSDAGLPVVLMETRQVKGALKAMPIKTDRRDAEGIARLLHLGWFRPVHCKSVSAQEVRAVLSARKAVQQGFITLEMSLRGLLRNFGLKVGTISRGRFEQRIRELAAGNLMLEAATEPMLRARSALRRELAGLERNVRQLSLEDPVCRRLMSMPGIGAVVALTYRSAVDDPDRFTSSKNVGPWVGLTPSRNQSGERDVSGGITKAGDVNLRRALCQAATVMMHRGRANWLRTWAAKLARRRGAKRAMVGLARRIAVILHRMWKNDTDFHFDIRVLHAG

SEQ ID NO: 144815 - protein, 343 aa, unidentified
MKVSTIGLDLAKSVFQVHGIDAAGQVVVRRQLRRRQLLGFFEKLGPCLVGIEACATAHHWGREIAALGHEVRLMPAHYVKAYVKRGKNDAADAEAICEAVQRPTMRFVSLKSPEQQSLLMLHRTRALLVRQRTMLVNALRAHMAEFGIVTRVGLPQIKELLAVIANKDDRRLPLDARACLESLGRQFLSVHEEICAADRRLYAWHRSDPVSQRLATIPGVGPVTASALAASIADPSVFTSGREMAAWIGLVPRQNSTGGKQRLGKISKQGDPYLRWLLVAGAMTVIRHAKRRGTANQPWLDDVMARRPTKVAAVALANKMARMAWALLRHGGAYRPPAITASL

SEQ ID NO: 144816 - protein, 352 aa, unidentified
MIVIGADTHKSTHTLAAVDAATGQLLGQRTVRADRDGMLAAWRWAHELGGERVWAIEDCRHVSGRLERALTGQGERVVRVAPRLMGQARRGERVRGKSDAIDATAVARVALREGVDALPCAWLDERAMEIRLLNDHRSDLVAERTRLQNRLRWHLVELDDALEASLPIGSLDRPVWLDRIARRLTRLPQTARTRVARDQLRRIRELTRAERDLHRELARLVAAHSPALIAERGCGTLTAATLIGRTAGAQRFPTDGHFARHAGAAPIPASSGRRDRQRLNRGGDRQLNCALHRIAVTKARGCPETRAYLDRKLAEGKTRPEAYRCLKRHLARRIWHILTAPNPVQTSPSPLT

SEQ ID NO: 144817 - protein, 458 aa, unidentified
MVCVLAPVGQQLPAKKRKFRTYTRELKQMRAWLKNCRVTDIAMESTGQYWRPLWNLLEGEFDKLLLVNPQHIKGLNGYKTDPKDAQWIADLLEGGKWKGSWVPSRPTRELRDVTRQRVNLLEDLNRVKNRIEQLCQSGNIKISSAATDLFGVSGRKMLDAMVEGKRDAGWMADYAQGRLRGKRRELELALDGTFTAEQRWLLRQELRQVEWLEAQIETLEREIERRVGECEEAIARLRTIPGIDRKTAWTIIAEMGVDLSAFPTAKHLVSWAGLCPGNRESGGKRMSGRVRKANRYVKRAMCQAAWAASHTKNTYLAAFYRRMSIRKGAPKAIMALAHHMMVVIYQVLSRREEYVEFGGDYYDRRNKPRTVARLVARLAKLGYDAELREISCEPREPEAYHLLEPSELRPEVKPRTPQPKRRRGRPCKCVERGIICKHATSARPNSMIPEEVRGNEFS

SEQ ID NO: 144818 - protein, 340 aa, unidentified
MEQVYGAFDLHSTNNHLAISDHEDKRLYKKKLPNYQDVILAELEPFRQRLAGIVVESTFNWYWLVDLLMNEGYRVHLANPAGIQKYKGLKYSDDNHDAFWLAHLLRLGILPEGYIYPKEDRPIRDLLRKRCHLVGLRTSLINSLQGIIERNTGQKLRANEMKNLSEDHVSPFLANQEDLALSGHVSKEIIDQLTCHIKRIETAAKEKIKIRKSFDKLQTMPGVGNILALTIMLETGDIRRFSKVGNYTSYCRKVPTEWTSNGKKKGKGNRKNGNRYLAWAFSEAAEFARRFDETARRYYNRKASRTKAIVARGALAHKLARAAYFIMRDEVEFDHQKLFT

SEQ ID NO: 144819 - protein, 354 aa, unidentified
MIIIGVDFHPEFQPIALLNTRTGEVEEKRLAHPEEAEKFYRALAGAGETVRIGMEASGHARWFERLVAELQFDLWIGDAAEIRTKRVRKQKTDRQDAQLILSLLLEDRFPKIWVPSWENRDLRQLLWHRHRMVQARTRVMNQLQAVALNEGLRCKKKLWRERGRQQLESFGLAPWASRWRRDLLELLDRFNPAIAELTQAIEREVENCPAAQRLRTHPGVGVLTALAFVLILGDAERFHWGKQVASYLGLVPLEDSSGNRRRLGHITKQGSSILRFLLVEAAQVAVRSLPEWRSKYFHLVLRRGRKIAKVAMARRLAVQLFWMMRKEWNYEQLKKFGSHAGQPGNRHGVQSNTE

SEQ ID NO: 144820 - protein, 334 aa, unidentified
MLDTETGEIVRRRLEHENGEARAFYAALPKPSLIGIEATSYTQWFERMAAEQGHQLWVGDAAKIRASETRKQKYDGRDAEHLLDLLLTKKFPRIWVPTHQERDLRQLLKHRDKLVHMQTALKLQLHFLAMSQGICRKRKLWTEQGRGLLQSLSWDPWASRRRQELLELLGSLAPRIEPLDQAVERQAQQRPDAVELMKQKGVGPVTALAFVLLVGPVERFPNSRKLVSYLGLNPAEHSSGGRQRLGHISKQGNAMLRWLLVEAGQSASRFDPQLRRKYQRLKFRRGANVAKVAIARHLAVRLYWALRQMRDASPPVRKPGSPVSSVVEATPSTL

SEQ ID NO: 144821 - protein, 415 aa, unidentified
MEKQRNKVCGADIHKKFLVATILSRDGTKTTERFGMNLDDIIKFKEWVVKNNCEQVAVESTGVYWVPIYTVLEDKIEVIVANAYKIKHTPGRKTDVRDSEWLAQLCLNGMIEPSRIFPKEDREIRTLTRARESLVNNSTQMKNRIHQALESSCIKISSVLSDIFGKSGRHIIDGLIEGRSIDEILSGIKSKRVLKKEQDLRDAIKNSLDPAQILMIRNCLELIEEIQKRIEKLDAEILSRIEKRKEDVEIAMSIPGIAFTSASAILSEIGDYRDFENGEKLAAWCGLTPSVSQSANKLVTGRITKQGSKHVRRMLVQVAHAISRTKNSVLKRFFLRIQAKKGAKKAAVALARKVLCILHHLLMNREMYQENGKTKSKPVKFDRTSSPIQMTEQDMIDVLSNAGYIIKKRGVWGCI

SEQ ID NO: 144822 - protein, 355 aa, unidentified
MNDEKYIGLDVHQATIVVAVLDSTGKLVMESILETEAATILQFFAGLRGTLSVTFEEGTWSVWLYDLLHPHVDKLVVCNPRKNALLKDGNKSDRIDARKLAELLRGNQLKPVYHGETGVRMLRELARSYLTIVKDLSRVMNRLKAVYRSWAIPCAGRDVYYRRHRTEWLDKIREAGVRRRAGRLYEQLDMLQHLRQQARRELLAESRKHAITAKLRQIPYLGPIRSALAVALIQTPHRFRTKRQLWAYSGLALETRISAEYRLVEGQVRRSKKLLSIRGLNKDHNHDLKGLFKGAATMASVRPGPFQDFYQAALAKGIQPTMARLTLARKIAAITLTLWKKGENFNAEKLKSQAA

SEQ ID NO: 144823 - protein, 410 aa, unidentified
MDVVYPRCCGIDIHKKTAVACVIVSETKGPPHKQIRTFGTMTDDLLALADWLATEGVTHVAMESTGVYWKAPFNLLEGQFEVLLANAQHIKAVPGRKTDVKDAEWIADLLRHGLLKASFVPDRPQRELRELTRYRTALVRERAAEANRLQKTLEGANIQLGDVATNVLGRSAREMLEGMVAGTADPATLAQFARGRMREKIPQLERALAGHFAAHQRFMVAQQLAHIDYLDDAIEHVSTEVAERLAPFVSTIERLDVIPGVGRRTAEILLSEIGTDMTRFPSAAHLASWAGMCPGHHESAGKQHDGKTRKGSPWLREALIEAASAAGKTKGTYLAAQYHRLLRRRGRNKAAVAVGHSILVIVWHLLEHDCPYVDLGSTYFDERDRTATEHRLVRRLEQLGYSVHLDRPAA

SEQ ID NO: 144824 - protein, 359 aa, unidentified
MRIIGCDLHARQQTLAMLDTVTGEVVTRTLMHEGNEVREFYSQLPRPVLVGIEAIGPMQWFLNLLEELGIECQVGDAAKVRAAEPRKQKHDRRDAELILKLLVEKRFPAIWRPSKEQLDLRALLLHRHHWVRLRTQIQNALQAIALANGLRRGPGLWSYDGQAKIAFLPLPLHASYRRSALQAMYRSMAEEIKDLTEQVAERAGQRCGARLLMTHPGVGPVTALATEVFLGDPRRFADGKALASYVGLIPQERSSGRRQRLGKVTKQGSPLLRFLWNEAAVHTVRRDPELQRFYRRKLVQKGLGKARVAVARKLGIRLWIMLRDQIDYEEFCRRGQKQSGAACAGMPENALGAKSSPAD

SEQ ID NO: 144825 - protein, 354 aa, unidentified
MLIIGCDYHPGFQQIAFVDTGTGELQERRLGHSQEAEAFYRELKQRGASVRVGMEASGQARWFERLLAELQFELWIGDAAQIRAKRVRKQKTDRQDAQHILDLLLENRFPRIWVPSWENRDLRQLLWHRHRMVQTRTRLMNQLQAVALNEGVRRKKGLWREAGRKQLETLALAPWASRRRRDLLEMLDRLTPRIAELTEAVEQEAEKYPAARRLVTHPGVGPLTALAFVLIIGEVERFRCGNQVASYLGLVPAEDSSGEHRRLGHISKQGNTLLRFLLVEAAQVTIRSDAEWRRKYFHLALRRGRKIAKVAMARRLAVRLYWMWRKEWDYEQWKKFGPHAGQPGTGVGVQSNTE

SEQ ID NO: 144826 - protein, 328 aa, unidentified
MQGKVSSERTAMATVYVGIDVCKEWLDIHLHPLGRSFRVTNDTAGMRRLKRELDALDQMPRSALHIVMEATGKWHRAVQRSLHADGFYVSVVDPLRARLFAKACGFLAKTDRLDARLLAIMGEALKPAQTPPQDQALEALQELVNARSAANGERTALSNRMKTAVTAFLRKELTRRLAALDTHIARLDVEIERSIGAEPEMRRRLDILISIPGIGAVTAASLIAGLCELGACSGKQAAMLAGLAPLACESGERAGHRAIRGGRPAPRNAIYMAALSASRHNPDLAHFAERLKKAGKPNKVVLVAVMRKLIVLANTLITKNRIWTPNPP

SEQ ID NO: 144827 - protein, 417 aa, unidentified
MKPPLFTAGVDWSENLNDVAVVDRSGEVVARARVEESPEGVKQLLRLLAGLRSSHRHSRKQVPIGIESTRSLLVEGLRAAGQTVIAINPTVVDHYRGQLTPTKRKSDKGDAALLADILRTHGHRHRSLPENSESAEAVAVLVRAHWQAQRTRQYQYNRLRSLLREYHPAALTAWADLPGRLLRPEARAVLRLAPTPSSAARLTIRQLRRTLAEAGRTRLLDQHADRLHTLFRATVLRRRPGVEEAMGVQALACLDMLDLACATVDALAERIEDAFLRHPQAKIYLSFPGVGVLTGARLLAEIGDDPLRFADARGLRAYAGAAPLTWASSTSTSVTHRRIANLRLKATGHTWAFATLTRSLGCRAHYDRRREQGDRYAAALRHLFGRLLGCLHRCLAREELYDEQVAFPARRPDALEG

SEQ ID NO: 144828 - protein, 357 aa, unidentified
MPNIEIGVDFMVKENFIYVGIDLHKETHTAVMIDCYNQKLGEITFPNRPADFPKLVTKVKKCNTDAKEVVYGLENAYGYGRPLAVWLIDKGYFVKDVNTAISHRQAKHRGAMYRKSDSDDAEAIALATLNMLDKLPDACPNDAYWSLGQLVHRRDNIMKQRTRLVNQLHEQLCIAYPSYKQFFNDISRPTALYFWEHYPSRKYLKGKSVEELRTELVPVSHNRCSTKNCEKILDAVASDKVKNNAYQDARDMVTLSIVSDLQHYDSQLAEVDKMLEQMYKMLGCTLTTIPDVNVITAVKILAEIGDIKRFSNANKLAQFAGIAPLHLSSSGKGKDVATKQGNRRLQATIYFLAIQMV

SEQ ID NO: 144829 - protein, 292 aa, unidentified
MKVSTLGIDLAKNVFQLHGVGCNGQTVLKKKLTRDKFLPFLMQLEPCLIGMEACASSHHFARVLRQYGHEVKLIPPQYVKPYVKTNKTDAADAEAICEAVARPNMRFVQIKTAEQQAILVLHTERNILIRERTACANSMRAILAEFGIIMPRTLSQLYKKIPEILEEYDNELSPFVRCSVARQLEHLQGVEDQITLIEQELSRWGKKHNPALPSRVMKVPRSGIDDGDLPLWRQWGNGQQFHSAKQFAAWLGLVPREFSSGGKQRLGRISKRGDRYFRYLLVPWCAGSCSRY

SEQ ID NO: 144830 - protein, 322 aa, unidentified
MSQLNPLCVGIDVSKATLDIAASSDVAQFTVSNDSDGFNAIITGLRRHSVALVLMEATGGLEVAVACSLQAEGFEVAVVNPRQARDFARAMGYLAKTDRIDARVLTQMAEVINRHPERKRFIRALPDAERQALAAMVVRRRQLIAMLVAERNRLHPSHPQNKKSINTIIKALEDELVRLEKEMDSHIRNHFKEIAERLSSIKGVGTMTVSAMLAEIPELGTLSRREISALIGVAPVNRDSGTMRGRRTIFGGRAGVRSALYMAALVATRFNPVIKTFYVRLLAAGKAKKVALVACMRKLLTILNAMLRKNEEWDESYHHVAP

SEQ ID NO: 144831 - protein, 388 aa, unidentified
MQTTAHQPQAPTAIRTDLGAIFVSMELSRTSWLLTSVSPGDGERMSKHAVRSGDVAGLRARFSLLKEKVRTRTGLAVSIIVIQEAGLDGFWIHRLLLCDGIESYVVDPASIATSRRRRRAKTDKIDGEALVRALLAYKRGEPRVCAMVRAPTPQEEDRRRICRERKTLTAERVEHVNRIKGLLFAQGIADYEPLLRKRRERLDELRTGDGRPLPQHLKAQVGRELDRLELVLQQMKSVEAERDASPNASDKETPTPAAMLKRLKGIGPEFANVLWSEGLFRSFANRRQVAAYAGLAPTPWQSGSVAHEQGVSKAGNPRLRTTMIQLAWLWVRHQPNSILTQWFHQRVQFNGGRVRKVLIVALARKLLIAFWKYVTAGVVLEGAETTAA

SEQ ID NO: 144832 - protein, 511 aa, unidentified
MINGASFGSPFLSMVPDSVLKTVVTAAPHWGTSIPFKRVLCSAQSGPSRMAECFKRRAMSRKRKNNKTKIGAPVLHCLNPNAAGVDVGATEIYLAVPADRDPQPVRHFSTFTEDLHAAADWLKACNIATVAMESTGVYWIPLFQILEARGFTVFLVNARHVKNVPGRKSDVSDCQWLQYLHSVGLLSGSFRPEQAVCTVRSILRHRDSLVQMASSHVQHMQKALDQMNLQLHHVISDITGVTGLTIIEAILAGERNPHTLAALRDGRVKATVDTIAKSLVGDYRREHLFTLRQSLAAFRHYQELIRACDREIAQYLEAFESKLDPPEGSLPESQDRQKSDDGEPRFDLGSHLHRIFGVDLTLIPGINVLTTQTLLGEIGPDLSRFANAPAFTSWLGLCPDNRVSGGKVLSVKTRKVKNRAATALRMAAQALHRSQSYLGHFYRRMRAKLGAPKAITATAHKLARIIYQMVTTRQDYDETICVQNEVRNRECLEARLRKQARQLGFQLVAAS

SEQ ID NO: 144833 - protein, 368 aa, unidentified
MKDNTKYVGLDVSKEKIAVAIADEGREAPRYWGVCQNNSESIRKLMKQLGTPGQLKVCYEAGPTGYPLYRLLLSLGIECSVVAPSLIPTKPGERVKTDRRDAIRLSQLFRAGELTPIYVPTEDDEALRDLVRAREDSKEDQLRARHRLTKFLLRYDLNPPAGIKKWTAGYRDWLDALKFSRAAQSTVFQEYLHHLDEIEQRIKRLEAEIHDQATDSVHAPMIQALQTLRGVAELSATSLVAEIGSFTRFGSARRIMSYTGLVPSERSTGETRHQGKMTKTGNAHVRRILIEAAWSYRYTPAIKGEIRKRQQGKPPEITMIAWKAQDRLHRKYKRLMGRGKPSGKVIAAVARELAGFVWAIACEVEKAS

SEQ ID NO: 144834 - protein, 367 aa, unidentified
MLFDFSAPYMEELVMALNHRWCVGVDLHKDTLTACVFCGCCGEVSFQKIACRNRRQIAEYFAALPGPHAVAIESVGFYRWLWEMLEPIVEELVLADATQARALAGRRLKTDREDALNIAQLLAAGRLPRSYAPPIEVQWLRDLTRHRNSFSRQHARVLHRVKSIMNANNRPGPARMQSDGLIRYLKAQGEKLPARHVEMLWQCVDALVLTERQIAQVERTIGQIVQRDSFREVYGILTSFPGVALVTAATIIAEIGDFKRFSGGKAVGRYAGLNPRVYASGGKQRMGHIAKAGSPDLRWILQQAAWTAIRYDEHVKRIFLRIAKRAGRKAAAVAVARKLLTWMQIAVKKGEPYRTPGPGHTLLPGAA

SEQ ID NO: 144835 - protein, 454 aa, unidentified
MTRRPRILRAERKIIGELEVKHPNAAGIDAGSETHLVSVREDRADDAVREYGTFTEDLHALAEWLVRCGVDTVAIEATGVYWMPLYEILEEHGLNPQLVDSRSIGKKSKKTDVLDCQWIRQLHMYGLLDGAFRPSAEILPLRALNRQRAMLIRYAADHIRHMQKALDLMNVKLHLVVSDIVGVTGLHILRAILGGTRNPGELAKLREPGCKAAEEEFVKALTGNFRDEHVFALAQALELFETYQEKIKACDAKFEEFLGNFAKVADRTRLSNKPRQKRRKNQRHFDGRSLLYEVMGVDLTAVPGLEQSTLLTIFSEIGFDVSAWRSAKAFASWTALAPNNRITGGKPIRRKNRIVDPNRVALALRLAAQTVERTRTSLGAFFRRVQFRLGRSGAIKATAHKLALIIYSMIKNRQEYRELGANYYEDRYRERLLKSLKKQAANLGFSLSPVQPVH

SEQ ID NO: 144836 - protein, 323 aa, unidentified
MSSKATKKRRSFIGIDVSKELLEVAVHQSNYHFRCPNDPKQFPTLISELISLRPARVVLEATGGLERPLLQALQTIGLPVVVMNPRQVRDFAKALGLLAKTDRLDARVLAHFAASVQPPPSPIKTQQDTELDALMGRRNQLTDMLTAEKNRLGSAATKTTRDDIEEHIEWLEERLQELDEKLKQQLECSAIWQRKDEILQSVKGIGFVTSMSLLADCPELGQLNRHQIAKLAGVAPLNRDSGKQRGTRHIYGGRAQLRCKLYMATLTAIRCNPVIKSFYQRLLDKNKHKKVAIVACMRKLLTIINVMVRDNKLWNVKAQPVSA

SEQ ID NO: 144837 - protein, 367 aa, unidentified
MAPRERDRSQRSGSVLLKTVGQLGSSRSSVHQPGQLKGPRARIVQGRETRRCIMGAEIFVGMDVSQACVDVAVHPGTAFQIAHDERGIAQAVERLHALQPTLIVLEATGGLEVPLTGALAAAGLPVVVINPRQVRDFARATGQLAKTDRLDAQILARFAEAIRPPVRPVPDAQTQALAALVARRRQLIEMLTAEKNRLRLAAQPIQQRLRAHITWLEKELGSTNTDLEATIRLSPVWREKEEVLRSVPGVGPVLVTTLFANLPELGTLTRKEVAALAGVAPFPRDSGTLKGRRTIWGGRAHVRAVLYMAALVATRRNPVIRAFYQRLCQAGKAKKVALTACMRKLLTILNAMLKNGTPWRVAASQPA

SEQ ID NO: 144838 - protein, 325 aa, unidentified
MDIVGIDISKAKFDAALLVGERVRHGAFSNTEAGFEQFLAWLARHRPDPAAPMHACMEATGNWGLDLAAFLHGRGVRVSVVNPARVRAYGASELARNKTDRLDAALIARFCRAHVPSAWTPPAAGLRELRELVRRCDALKAARVQEMNRRAAGFASPAVAASIKAHINWLDEQIEAVMGEVRRLVASDPALSTNLALVRSITGFGEVSAIILLAELPNIAEFTPKALAAFAGLSPSEHSSGTSVRRPGKICRTGNQRLRSMLYMCALSAKRNNKALADFVRRMAEAGKAPKVILVAVARKLLVYAHAVVRTQKPFTSSPDAPSSI

SEQ ID NO: 144839 - protein, 409 aa, unidentified
MEVLHSRCAGLDVHKKTVVACARCVEGREVRHHVRTFGTTTKELLALCEWLEQQGCTHVAMEATGVYWKPVWHMLEGHFELVLGNAAHLKNVPGRKTDKNDAMWIADLMAHGLIRSSFVPPQAIQQLRDLTRTRKQLVREVSQHSLRIQKVLEDANLKLGSVLSDVLGKSGRAMLDAIVAGETDPACLAALAQGTARNKSAELREALRGRITDHHRTMLRLHLQVVDALQRTLAELDAAVGKALAPIQERARLLTTMPGISDLTASVVVAEIGVDMSRFPTAGHLVSWAGLCPRSDESAGKRRSARVRKSGTWIKTTLVTAAWSAVRVKTSYLRAQFLRIKARRGAKKAILAVAASMLTAAFHMLRDGTEYNDLGSAHFDRQDKSKTIRRLLKRLQDLGCDVPELAHTA

SEQ ID NO: 144840 - protein, 339 aa, unidentified
MNSIPVGVDIAKNVIQVHYVDEETGEILNKTIKRAKFLDFFANRTPCLIGMEASGGAHHWARQLSKMGHHVKLMPGEFVKAFNIRNKNDTADAQAIWRAVQQPSKAVAVKSEGQQAMLALHRMRSQLMKFRLMQTNELRGLVAEYGEVMGTGRAHLVTAMPGILARLSEQLPSVLIESLREQLGEIERIEKRIVDIEGRIRELSKGDPAVKAISDIPGVGLLTATAAVAAMGDAKAFRSGREFAAWVGLVPRQTGTGGKVLLHGISKRGDKYLRKLLVNGAHSVLLHSKEPGAWISELQKRRPKNVASVALANKTARMIWAVLAHGRPYQRDHVSVRLS

SEQ ID NO: 144841 - protein, 467 aa, unidentified
MKTKAKKRKTKSRKKRSAIKNLNSLSAININAAGIDIGSEEHWVAVPQDRDENPVRLFGCFTSDLHAMAKWLKKCGIDTVAMESTGVYWVPLFQILETQGFDVKLVNARHVKNVPGRKTDVQDCQWIQQLHTYGLLSGSFRPDDSICILRSYWRHRDNLIRYAAAHIQHMQKALTEMNLQLHRVISDITGVTGMRIIRAILNGERNVVKLAQMKDPRIKKSTETIAKALEGDYRREHLFALEQAVELYYFYHQKIEACDQQIEDYLKQLNSKVDPGVDLKPVKRTKQISKNEPSFDLATHQYHLTGVDFTKIDGLNVTTVQTVLSEAGLNPQSFGVSKRFTSWLGLCPENRVTGGKIKSARTRKVVNRAAKAFRIAANSLKNSPSALGGYYRRMRALHGPAKAITATAHKLARIFFHLWVNGGNYHDLGADYYEQKYKNRIVKNMKKRAKQLGFEISLHPISNPGVS

SEQ ID NO: 144842 - protein, 400 aa, unidentified
MAVAVGIDVAKEIHWAEIKVAGTGKVLASHRVENTPAEIGDLIGQIRAAEGEHGPATVGIDLLGGIAALLEAMLLEAGLTVVHVPGLAVNRARRGTRGGEHKSDPKDARVIADQVRMRDDLRRVERMRDDDVELRLLAGRRSEIVTDQTRRANRLRELLTSIHPGLERVVDVTTKTGLRLLTRYVTPAEIRAAGQRRLLAHLRKTGHVKDATIEALAGAALAAAQAQHVTVPGEAVTADLIRGLASEALTGRDQLAAIDKRIEAVLARHPDAALIRSLPGMGATLTAEFLAITGDTSRFAAGDQMAAAAGLAPVLRQSGKVRYLQRPAAGDKALKRVFYQSAFIATGCDPASKTYYQRKRSEGKTHHQAVLALARRRVNVLHAILRNRQPYDPRHTATAA

SEQ ID NO: 144843 - protein, 342 aa, unidentified
MKIIGCDFHPSFQQIAMVDTETGEQTEKKLTPGEAVQFYSRLPGPVLVGMEACGNTLWFERVLAKLGHQLWLGDAGKIRALEVRKQKTDRRDAELLLQLLLEKRFPRIWVPSPEQRDLRQLLLHRHKLVGMRRQVKNQLQHLALNQGVQQKHKLWTAAGRKLLQELVLTGWTAQRREELLALLDDLDPRIGKLDQAVREAAEKDRVAQRLQTHPGVGPITALAYSLTLGDISRFAHSRQVVSYLGLNPAEHSSGGRLRLGSISKQGNPMLRSLLVEAGQSAARLVPELKRAYQRLKHRKHSSVAKVMVARKLAVRLYWMWRNQQPYSATRMQGSPSHPVAEV

SEQ ID NO: 144844 - protein, 417 aa, unidentified
MADYAALIGIDWADSKHDICLIDPATGQHEASLLRHSSQTIDEWATTLRVRFGGEQVAVCLEQSRGPLIYALMKYDFITLYPINPSTLSRYREAFSPSRHKDDSTDAAYLAELLAHHRDHLRVWKPDDEQTRTLRYLVEHRRRLVADRTRISNRMTSLLKGYFPQVLEWFPDIRTTLVCDFLLRWPSLDTLRRVRRETLSKFFRAHNSVRKETIEKRVAGIAQAVPLVTDQAVIASSVVMVKALAAQMKTTLCAVAEFDSEIAALCAANQDFALLKSLPGAGPNYAARLTAALGSDRERWQSADELACLSGIAPVIERSGKSGRVRWRYFCPKFLRQSFVEYAGESVKHSFWAKAYYEQQRAKGKGHHAAVRALAFKWIRIIFQCWKSKTAYDEVKYLEGLRKKGSSLLNYAANNPT

SEQ ID NO: 144845 - protein, 353 aa, unidentified
MIVLGADAHKRSHTIAAVQTSTGQVLGDKTAAATARGFGVLLIWARDLDRERVWALEDCRHVSGALERFLIARGERVVRVSTRLMAGTRRSSRERGKSDRIDAISVARAALAAGLETLPTAALAGPELDLRLLVDHRERLVRARVALNSTLQWNLHDLWPELELPGGALFSTKWSSRIGRRLARAEQSMRVRIARDELRRLRELTQTIRSLEAEISDLVGRLAPQLVAEPGCGPLTAAKLVGEIAGADRFATDAKLARAAGIAPIPISSGKTNRHRLDRGGNRQINAAIHRIAITRARCHPKTRDYIARKHAEGKTTRDAIRCLKRHLTRRIWQLLQPPSPIPNQTITPTSLT

SEQ ID NO: 144846 - protein, 485 aa, unidentified
MAEHSMAYVAFDTSKLHNAVAIAEAGRAGEVRYLGEFENTPAATANLVRKLTAKHGALSCCYEAGPTGYGLYRQIIELGQACIVVAPSLIPRKPGKRVKTNRLDALSLAKQLRAGELTAVWVPDERHEAMRELTRARGAAVLDWRAKCQQVSSMLLRLGRHYPGKKTWGKAHMAWLAGQKLEHLEQRIALEERLVAVRQSQERIERLELAIREAVPAWSLAPLATALMALRGIDFIAATTLLAEIGDLGRFRTPRELMAWLGLVPSEFSTGEHSKRGPITKAGNRRARQILIECAWSYRHPPRVGRDKLVRVNAAPAAVRDIAWKAQVRLTGRYRSLCRAGKPDVVAITAVARELSGFIWAIARALADGAKVATAEAKPTDADNGSGGTRPAAKRSAISSRNEIPGEPAHGTQATGRTRTERRRTPGALPDTAQPAAGAAAGAAPAARTATQRQPGAALARGGRRDRRLAGGVCRMAAGHAGGNP

SEQ ID NO: 144847 - protein, 344 aa, unidentified
MTIVGAFDVHRAQLTYDWLDNQTGQVSRGRVMPAHREQLREFLTRFDAAADVHFALEGCTGWRYVVEELQAAGITPHLADPGETRTARGRKHRAKTDRADAAHLRALLDQGRIPESWIPVGVVLDVRALVRLYKDLLAERTDWEQRIHAIVFHHGAPALIGALTSPHARQQLAAADLPPAGRYATQVALGQIERLGEQLGPIHATIAAYSRRQPGCAALRERQYGIGGITSVAIWSELGDTRRFASSDDAVRHAGLDITVYALDTHRAAGHLARHGPPVLRWAAYEAAFASTRSTSPDHAYFLAVHERLGTVRALLSVARKIVRRCHHRLRELGDTAWEAVAIL

SEQ ID NO: 144848 - protein, 363 aa, unidentified
MDNGITWVGMDVHKESIVVTAVSHDSDRAAARFEIPNTDTGVHRLVKRLREMGDVRCAYEAGPCGYELRRFLASQEIPCDVVAPSLIPKKPGDRVKTDRRDAEKLARLHRMGELTPIRVPTPAQEALRDLVRTREDAKEDALRRRHRLQKFLLRHGRRYEGKSWTQVHWNWIRSQKFADDNAQAVLTEYLVALEQELERIQRLNVKIEEESRRPEIAPAVARLRTLRGVDTVTAMTLVSELVDFSRFSRAHELMAFAGLVPSEYSSGGRECRGRITKTGNAHVRRVLVEAAWHYRHTPTGTGISLRKRREGQPPDVLEIARRAELRLCRKYRKLTAKGKNSRLTVVSVARELAGFVWAIGRSR

SEQ ID NO: 144849 - protein, 409 aa, unidentified
MEQKVCGIDVHRDTLVTTILDQKGHKQTQTFQNSLIDMEQLKNHLRANNCTDVVMESTGSYWITLYTTLEDAGFKPVLANAHQVKAIPGRKTDQRDSEWLAYLLRSDLIRPSYVPTRPIRELRELARTRVRYVESRTQYKNRCQKLLSKNNLRLSSVLSDIFGKAGKEILDGLMAGKTVEEILNTTQNEYLKKRKTEVIDAAKGALSEVDMFLLQQMSRTIESLTVQIKELETRIAELVDPRALEIICSVPGVGRLSGATVLAELGDVTRFSNGQQVASWCGLAPFVSQSAGMTKIGGITKRGSRWLRRVLVEVAHVAVRMDCRFKDMFWRIASKKCKNVAYVAVARKLLTVIWHLLLNDEVFVEEGFSKKSIVGVKSKISGDSSEGLSLDDVAGILGCVVKLVSVDDG

SEQ ID NO: 144850 - protein, 339 aa, unidentified
MKEVSTVGLDLAKKVFQVHGVDARGTVVVRRALRRSQLLAWFAKLPRCLVGMEACATAHYWARELVKLGHDVRLIPPAYAKAYVRRNKNDPADAEAICEAVSRPAMRFVAIKSERQQAAAGIHRVRDLLMKQHTMLRNQLRGLMAEFGIVAAKGRCGLGELLAILADAEDQRIPSPLREGLLLIGATLRETDRKLEIIDRQLAAAGREDATYRHLITAPGYGPILSSAMAAMVIDPAAFRRSSDFAASLGLVPRQEGTGGKVWLGPISKRGNGYLRRLLVNGATSLLNSKRAKQDPWLVKLLATKPRKVVAVALANKLARIGWALMVRQEDFRGLPAAA

SEQ ID NO: 144851 - protein, 393 aa, unidentified
MLYLAIDQHKHHLTINIRNEHGVVMQKGQVSTKHADLDDFFGTFVKKARKHRGYMAIVEVCGFNDWLLAKLQKTGCSEIVLIQPDNSALNKTDRKDADALGALLWNNRKLLQDGHRPNGIRRIALAEPADAEARQLANLRQHLIKQRTRVLNKIKGIINKHNMAQDAPTEDYSTKKFKEWIKSVSLPVVDRLEVNMHIQSWELHDKQILEIETELVKRSEARSADVIRLKSIPGISAMGAITLLSRIGDIKRFKNPDSLANYFGLTPGCHNTAGKHRVGGITKRGSALARQVLNFSVIHVVRKDPAMKAWHKKIKSKHGSKTARVAVMRRLATIVWHMLRWDKPYQFRYDPPVLASKKGDLRSPKEVLGGISNRNHTRKKKGSPLKCRCKPKA

SEQ ID NO: 144852 - protein, 368 aa, unidentified
MLSSIAPTFVGLDVHKDPISVALLRPGRDDPDQERIPNTPEEVRRLVGRWADPASVRACYEAGPCGYELQRQLRSLGVECTVIAPALTPRRPGDRVKTDRRDARKLCRLFRAGELTAIRIPPPDEEAVRDLLRLREDLGEDILRARHRLSKFFLRHGRIFREATNWTQAHWTWIRAQRFELPLLERLRDEHVVAIEMRVAQRDQLERELHAIALEPRYAAEVRRLSALRGVQTLTALTLIVEVGDFARFASAAEFMGFTGLVPSEHSSGGSRRQGAITKTGNSHLRRVLVEAAWAYRSRPRNAGLGQGRRRDQPPAVLALCIGVEQRLYRRYWRMVQRGKLSQIAAVAIARELAGAVWALMRETPAAA

SEQ ID NO: 144853 - protein, 341 aa, unidentified
MSSLSVIGLDIAKRFFQIHGIDESGAVLVRRQLRRSEMLRYFARLSPCLIGIEACATAHYWGRELRILGHQVRLIPPQYVKPYVKRSKTDAADAEAICEAVTRPSMRFVGIKSVDQQAILVLHRSRDLLVRQRTMVSNALRGHMAEFGVVEKLGMAGTMRLADIIADESDERIPDLARQVLACMVEQLCAVIKRIDELRRDLLVWHKQNPVSQLLEGIPGIGPVTATAIAATIPDASVFSSGRQFSAWIGLTPRQHSSGGRQLLGGISKRGDGYLRRLLVTGATAALERSKSTRQRPWVQSMLKRHAKKKVAVALANKMARTAWALMITGEIYRAPKSAAT

SEQ ID NO: 144854 - protein, 319 aa, unidentified
MSIAADQDNIIHVAIELSYSTWLVAARLPQARKPLLFRVAGGDTSELLTLLSSLRARITGNTRQVHQIICCFEAGRDGFWLHRLLTAHGVTCYILEPTSILVNRRARRAKTDRLDAEGMLRVLMAYLAGDSKACSMVRVPTPDEEDAKRPHRERQYLTQERLRIENRIEALLFTQGIRGRPSLRSWERDLDAMRTGDGRVISQHLQSELNRLRRQLVFTLELIREVEAERDLASQAAPEEPVNCKIAALCRIKGIGSNFAAVLAREVFYRSFANRRQLASYVGITPMPYQSGNLNRDRRIGRAGNPRARTTMIPMPLTA

SEQ ID NO: 144855 - protein, 348 aa, unidentified
MMIIGCDYHPSWQQICWLDTLTGETGEKKLEHASGEAERFYRQLPAPALVGMESTGNCQWFVEMAAALGHDVWIGDAAKIRAAEVRQQKHDRRDAALILKLLLEGRFPRIWTPSREEKDLRQLLIHRYKLVRIRAQVKTELQHLAMNQGVTKKRKLWSKAGEKVLRELPLKHWASRRREDLFRIREMLHGQIDLLDQAVVEAAEKNEKARLMMTQPGVGPITSMAFVLTMGDVSRFQRGKQVASYLGLIPREYSSGGHRRYGSISKQGNRFMRMLLVEAAQGAVRCDPGMRSEYLHRCHRKAKGVAKVAAARKLAIRLYWMLRTNTGYPEVVRVESSSRVPVVVRHGG

SEQ ID NO: 144856 - protein, 343 aa, unidentified
MQIRSVGIDLGKTTFHLVALGDNGKVLVRKKFNQKQLITFTANLQTSLIGMEACSGAHFLGRALRSQGHDVKLIPAQFVKPFVKSNKNDFLDAEAIAEAVERKNMRFVPIKTDDQLDLQALHRVRDRLIARRTSVINQLRAFLLERGMTFAKMPTKLKFAMPEILENADSNLTPRMRNLVGLLWSEWKELDQQIIAMNTEVEQIASSDPACQRLRQIPGIGPLIATAVVASIGNGAAFRKGRDFASWLGLVPRQYSTGGKAKLLGISKRGNSYLRKILIHGARAAVVRVKRERSPFGSWLDALQTRAPLNVVVTATANKLARIVWAVLSTGEEFRPGGRLLAS

SEQ ID NO: 144857 - protein, 345 aa, unidentified
MQLHTIGIDLGKTVFHLVGLNPRGEVVVRKKFSRKQLLLFTANLQVELIGMEACGGSHFLGRALREQGHEVRLMPAQYVKPYVKTNKSDYIDAEAIAEAVGRPKMRFVPIKSDDQLDLQSLHRVRERWVMRRTAVINQIRGLLLERGITVRKGRRHIDAALPGILEDASNQLSGALRVLLVQLKLELDHLQMRIDEVDATINKAAGENEVCRRLVAIPGIGPVTATAIIAAIGNGAAFKKGRGFSAWLGIVPAEYTTGGKQKLLGISKRGNSYLRRLFVQGARAVLQQSAKQSSGLSAWLAQLTTRLHSNVAAVALANKLARMAWAVLAKNEPYRPPIVVGAATA

SEQ ID NO: 144858 - protein, 360 aa, unidentified
MTTDRESCRIVIGVDTHKSTHHVAAVHADTAKLLGDQEFPATMAGYRKLLKWAHSHGELVKAGVEGTGSYGAGLHRYMSAQGVAVIEVSRPNRQDRRARGKSDPMDAINAARAVVAETATVIPKDRDGFVEAVRMIRAARRSAVKARRAALHQIHGLLWCAPEDLRAQLSRYDRAALVARCARLRIPRTAIIDDATVTTRRMLRRLAKRIEFLDEEIAEANEELDDLLSENTPNLLSVKGVGTEAAGQIITTAGENIDRLKSESSLARICGVAPIPASSGSTTRHRLHRGGDRNANSSIYLIVVNRLRWDEPTKAYAARRTQEGKTKKEIIRCLKRAVVRELYRALQADLTRRKVILDAA

SEQ ID NO: 144859 - protein, 400 aa, unidentified
MSVAIGVDIGAYKHAVAVCRSGEREADRRTIQIAANRAGFRQLAGWMGSLPEPVSLVVMESSGHYWYNLASHLHRAGIPVAVVNPLESKYFGKRRLQRSKSDKADARTLAALGMHDQPRVHRPLAQSELREAARFTMRLVREQAEVCQRIQRLIDLGFPELREAWEDPTCVSALAVLRKAPTAPAVSRLRLETLAALKRPGAGGRAIGRAKAEQLKTLAKESVAAPEMEAQVAFEMRLLIQQHDFLDRQIAEAETQLASLLDGETARRLLTIPGVGPATAATLLAEIGDIWRFADVDQLLAYAGVHPKEQSSGKKGERPETSWTMAKTGNAYLRAAAYRMAIVGITHNPVIRNHYARKRAAGKSAMNAVGHCMSKALSLVWGVWRSGQDFDPRHAEPRSA

SEQ ID NO: 144860 - protein, 385 aa, unidentified
MQKRHDESKACLTAFVQDNTVIAVIEMSLASWLVAGLLPGVNREPLKKIAPDPEVLLRLLYRWRDEAIRAGKEITRIAVAYETGRDSFWLARWLQDRGIDAHVIHATSVAISREHRRAKTDRIDTAMLKRAFLGWVRGERGHCSMAAIPTIAEEDAKRPHREREALVKERTRVINRMKAILTQFGVRSFKPALRKAAEKIAEVRTPEGVPLPPNAAAALRRHIEHFRLINGQIKIIEKARLQRLQQNPTDKFNAMVFLLVRIVGLGVETAEQLVHEILSRKLRDRKAVARYAGMTGSPDESGARRREKGLSRSGNERVRKILIQLSWRMLRFQPTAGLVLWFKGRTANSRRSRKPMIVAFARKLIIALWRYVNAGLVPEGFQLAK

SEQ ID NO: 144861 - protein, 321 aa, unidentified
MLPTLGIDISKAIFHVEVLVNEKLRQRRFNNRPEGFKELCAWLAKHKAERVHVCLEATGRYGDDLALYLYQQGHTVSIVNPARIKAFGESELLRNKDDRPDAGLIRRFCEKQQPPAWQPPAPELRELQALTRHLDNLLETRQQQLNRLDGVSTKTVAKSLRKLVAHLDTEIQRTEKQIQDHIDDHPDLHQSQQLLASIKGIGKLTAAKLLAELEDISHYQTARQVAAYAGLTPRNRRSGTLRGKTRLSKTGNSRVRKALFFPAIVAKRHNPIVRSFCQRLADSGKNKMQIIGAAMRKLVHIAFGVLKSGKPFDPNHELLLN

SEQ ID NO: 144862 - protein, 342 aa, unidentified
MADHSQAVVEVFAGLDVSAREISVARLRSRDGALMLASFPNNASGHKALLSYLLQGTKHVRVCLESSGNYSLDLALALHAHPQVEVSLVNPRRARRFAESLGERSKTDPVDARVLCQYAARMPWVVWCPPTARALKLRAITRAIESLGVMNTQEKNREHALKASQALPSLVIREAQRHQRYLEHRIEQLRHEARRLIAKDAELERRFRLMLTVPGIAETSALQVLGELAVLPENLDARQWVAFSGLDPSQFTSGTSVQKRPRISRGGSAHLRRALYMPALVGLRREPHLRIFYERLVSRGKARLQAVVAVMRKLIHALFAMFRTNQAYDGAKLCSAELALSA

SEQ ID NO: 144863 - protein, 351 aa, unidentified
MSQKTNAVAVRTIGIDTGKNTFHLIGLDQQGTIVLREKLARGRIGRRLANASPCLIGIEAGMATHYVARELLALGHDVRQIPPAYAKPFRQGHKNDFRDACAVAEAVLRPSTRCVPVKTDDQLDLQALHRVRSRLVGQRTAVINQIRSFLLERGIAVRQGPRFLHQQLPEILAKRIDVLSPRMIGMIEDLAGDWRRLDERIECVTEEIEQLAHGSESCRQLMTVPGIGPLIASAMVAAIANGAAFAKGRDFAAWLGIVPKQRSTGDRTILGHISKRGNRYLRTLFIQGARVILLRPANWARHSFGAWLTAAAKRLHHNVLATALANKLARIAWTVLAQRRNYETRVVTVAA

SEQ ID NO: 144864 - protein, 408 aa, unidentified
MIFVGDDWAEDHHDICVLDEAGKLLAKRKVPEGIEGVTQLHALVAAHSPEPAEVVVGVETDRGLFVQALVASGYRVYAINPLAASRYRERHTTSGAKSDPGDAKVLAEAVRTDRHNHRQIAGDSELAEAVKVLARAHQNLVWSRQRQLNNLRSTLREYYPAALEAFGDDLGSRDAMAVLGRAPTPALAKALSAAKIASAMRAAGRRRYLDSRAQEIREHLRGAHLEAPATLAEAYGAAVKATVGVLTEMNAQLAALEGELQSCFEKHPDAEIIVSLPGLGFVLGARVLAEFGDDRTRFADARGRKCYAGTAPITRASGKSKVVLARFAGNRRLADACYRWAFASLTASPEARAFYDAHRAAQGPKAKNAHAKAMRALANRWVGILHGCLKHHTPYDAAKAWHREEAAA

SEQ ID NO: 144865 - protein, 412 aa, unidentified
MDTLYRCCAGLDVHKETVAACVRRLDAAGRVQRRVRTFGTTTGELLQLLDWLTAQAVEAVALESTGVYWKPVWNILEGSLPLLLANARHIKNVPGRKTDVKDCDWIAQLLQHGLLRASFVPDRPQRELRELTRQRSQLVAEQSRVANRIHKTLEDANIKLASVATDILGVSGKAMIRALVDGQEDPQALAELARGRLRGKLPALRESLRGELTAHHRFLLSQLLEHLEYLDGQIARFDARIGELMAPFEAAVQRLMTIPGVGLRTAQNLLAEVGTDMSRFPSDQHLASWAAVCPGSRESAGKRQSGRTNHGNRWVRAALAQAAWAASHTKKSYLSAQYRRLAARRGKKRAIVAVSHTILVMVYHLLREGVAYHELGPDYLDRLQPQRLTTYLVKRLEALGHTVTLTPKEQAA

SEQ ID NO: 144866 - protein, 404 aa, unidentified
MIFVGDDWAEDHHDVYLMDADGARLASRRLPEGLTGIGALHELIADHVGEPSQVVIGIETDRGLWVQALGVSGYQVFAVNPLAVARYRERHRVSGAKSDAGDAKVLADPVRTDRHNHRSLAGDSPEAEAIKVLARAHQNLIWARTRHTNMLRSALREYYPAALNAFDDLHDRDALAVLSRAPTPAEGTRLSLSKIRSALKHAGRQRNIDARAHEIAVALRTEQLAAPATVTAAFAATTRATVGIIGELNRQITDLETQLATHFETHPDADIYLSLPGLGVILGARVLGEFGDDPNRYTTAKSRKNYAGTSPLTVASGKKCAVLARRVRNRRLYDAIDHWALGAINHSTGARAFYDQHRAAGDLHHQALRALGNRLVGILHGCLRHHTTYNEHTAWAHRQTAQAA

SEQ ID NO: 144867 - protein, 341 aa, unidentified
MVHVGLDLSRTRLDVHVMDEAGSPLAITTAAPDRGGLAVLASRIDGFGGPVYAAIESMNGARFVHDQLELAGWQVEIADAQKVKGLAPLACKTDKIDAWVLAELSRRDLVPAIWLPTPTVRAERERARWRLHLVRHRTALKNRIHATLLAFGHPCPVSDLFGVGGRELLHRLELPEPWAADTTAALQLIDQLDVEITAGERALRRLGADHRYVPLLMTTPGVGWVLGYTIAAEIGDITRFATPTKLAGYTGLCPRVYQSGGKDHRGSLSKNGPKYLRWALIEAATHACRHPIYAERYRRTKTRLGRPRGPKIAQVDLARRLSEAIWHMLSTNRPFAPAGAA

SEQ ID NO: 144868 - protein, 451 aa, unidentified
MSASRKAQLQAESLKRVNPNAAGLDIGSQEIWACVPQDRDAQPVGQFDTFTPDLYALADWLAACQVDRVAMESTGVYWIPIYEILEERGFQVQVVNARHLKDVPGRKSDVQDCQWIQRLHTYGLLEGSFRPEGEMCALRAYLRHRGMLLEHRAAHIQHMQKALLQMNVQLTQVLSDITGTTGQAIIRAIVAGERDPVQLARFRDGRCKSSRGEIAKALTGNYRGEHLFALKQALALYDSYTEQLGECDGEIERQFQAIKPVWPEELPPLDHEDKKGSHSKNAPAYDARTLLYQVTGVDLVAITGLNAITVQTIVSEIGTDMSKWPSQKHFCSWLGLAPHHDISGGKVLRRGTLKTRNRAGQAFRLAAQGVSRSHSGFGAFYRRLRAKVGPKAAIVATAHKLARTFYHMLKHRTPFHDLSAEEYEQRAREREIANLRKKASKLGMALVESPA

SEQ ID NO: 144869 - protein, 311 aa, unidentified
MVQPVYAGIDVSKDWCDVALETGEAVARFDQTPEGRAALTRWLADHGAGYAVLEASGGYERPVLRAIDAAGLQSCLIPPHRVRALAKASGRSAKTDALDARVLAAFGRLLSPRVKQPQDDQSRALAALVRRRRQLVDLMALEDTRRQQEEDPGVLVDINELLGLLRRQIEAINQRIADQIKRSKALRERHEVLTTFPGIGAVTSAVLLAEMPELGTLEAKQAASLAGLAPFNNDSGASEKKRSIHGGRAGVRCALFMAALSAIRHNPDIKAFYKRLRDQGKPQKVAHVAAARKIIVILNAKLRDAFSPEPA

SEQ ID NO: 144870 - protein, 325 aa, unidentified
MLAKTDTTLNTQASAMHFGIDVSKIHLDIHCLEANRSWRIANTPAAIRAFIRDQRALLKGALVVVDGAGALEYDVCTILAKAGVRVHRANTFQVRNFIRSFGQLAKTDRMDARMLARFAAERETHLRLFVPEGGTQRHLRLLARRREDVVRMRASEKNRLKSPEGKEMAASIRRLIRALDAEVARIEAQMERLVMREEALRRRREVLLAIPGIGKTTAHVLLAAMPELGTLDRRQVAALAGLAPFARDSGMQQGRRHTGAGRGLVRRTLFMATLSAIRFNHVMRAFHQRLVNNGKKAIVAIIATARKLITVINAKLRDANLAQLS

SEQ ID NO: 144871 - protein, 406 aa, unidentified
MRVYTGIDWSENKHDVVFMNQAGAVFAQLTIAHTVGGFLQLDAARQQLQVRPAECLVCLETAHNLLIDFLWSRGYVHVYVIPPSVVKANRGRQGQSQARTDPSDAELIADILRTDRGRLQPWHPDSVLTQQIRAQVSLVRHLTRDVVRTSNRLRAALVRYYPAALHVFSSLRMQVALDFIRAYPTRQAAAALSFAEFEAFAKAHRYPRPSQLRGNYARLQGPYPEALPETVSVFQAEAVQLAGLLLEELQANKEAKRRLKTLFDQHPDAPIFASLPGAGDLLAPALLAKFGDDRQRFPKAASVQALAGTCPVTVSSGKRCSVRFRFSCDRAFRDIAQKWAMCSLSQSLWAAAYWQQTRPRCHSDSHAYRCLANRWLSIAWAIWQKRECYDESYHLQQRALRSKKHP

SEQ ID NO: 144872 - protein, 312 aa, unidentified
MEAKFVGIDVSKARLDVDCLPVSTARQFSNDAGGIAALVEWLLGSGVERIVVEATGGYEIAVASALAAAGLPVVVVNPKRVRDFAKAQGVLAKSDRLDARVLALFGERIAPPVRALPQAAQRDLTELLDRRHQLVSMRAQEQARLATVLPVARGDVEQHIAWLDQRIRKHETVLLKRLRANEIWDAKVKLLDSVPGIGPVNLFTLVGRLPELGTLNRQQIAALVGVAPFNDDSGKRRGQRYIRGGRAEVRCALYMATLTAKRCNPVIAQMFERLIAKGKPFKVAMTACMRKLLTILNAILKSTQPWENRLAT

SEQ ID NO: 144873 - protein, 361 aa, unidentified
MSGMVTYAGLDVHARSTHAAAIDVSTGELVRARFGPGVEEPVAWLAGLRGPVRACYEAGPTGFGLYRAAVAAGVDLEVIAPGKTPRGPSDRVKTDRKDAEFLARLLLAGSLTTVVVPPVEVEAARELVRAHDACRRDLMTARHRVSKMLLRHGRVYPESSTWTVAHRRWLAAQQFDETASELVFADLIAATDGLSARKAQVAERLSRLAEDEAWWPTVARLRCFRGVDTLTAFALHLELGGDWQRFKRASALSAWPGLTPSLHQSGESSHQGSITKTGSTLARRLLVESAWHYGRDPRIGATLRNRQQGQPEHVLQIANRAQHRLHRVYHRMRGRGKPHNVTVVACARELACFLWAAATAD

SEQ ID NO: 144874 - protein, 363 aa, unidentified
MHESTTVTVGLDVHARSIRLAAVRADELLEERTLPYDEQAVERLLRRWPAVRCCYEAGPTAFGLSRHLTEGGIDCAVVAPGLVPQRPGDRVKTDPRDARKLARLLAGGLLEPIHVPTPELEAVRDLVRAREDARLDRMRDRQRLSTFCLRHGRLLPTSAWTVIRRKWLGEQRFEHSAEQITFDTCLHAVDLVDARIGQLERAIRETAEQGPWSELVARLRCLRGIDTLTALALVAEIGDFGRFKCAEEFMAFVGLVPSEHSSGEQRRQGSITKVGNSHVRRLLVESAWHARRRPKVGYELSRRHRGQDAAVIERAWRCQQRLDQRWQRMAGRGKPHQKIVVACARELAGFVWAIATEQPLRTT

SEQ ID NO: 144875 - protein, 432 aa, unidentified
MFNMNFKPIAGIDVGKFFSEMAILSPSNKVVARMKINHDSYTDVKRAIELLKKAEKDFDSRPSIVMESTGHYHKILFHSLCKFGFEVSIINPIQTDSIKNIGIRKVKNDKIDAQKIALLHRFQELETTNIPNEDIECLKSLCRQYYKLSDELTTYKNRLTGIVDQLMLNFKDVFPDIYSKTAIAVLEEYPTPTTIIKADKDKLVSIIKGNSRKSLEWATAKYELLVLKAKEFEPLSVNNTANVTMLTVYISMVKNLQDSLTKILKAIHQLIDDDLSKDVPVISPTLELLQSIPGIGFLTAATIIAEIGDFSAFSKPKKLVAYFGIDPSVMQSGEFTGTRNKMSKRGSRLLRRVLYTTALANIRTKRNSEPCNPVLMDFYKRKSQSKPKKVALGAVMHKLVYIIFAVLRDRKPFELRTPEEHAKMLKRKHTAA

SEQ ID NO: 144876 - protein, 343 aa, unidentified
MKLSRVGIDLAKNVYQLHGVDRSGKTIWKRRLKRHQWLKVLLDKTEPGCVIGMEACASAHHWGRQLQSRGYTVRLIPPQFVKPYVKSNKNDARDSEAICEAMSRPNMRFVTVKTVEQQDIQATHRIREELKVRRTAKANQIRGLVAEYGLVAPKHLSSLRAAIPCWLEDAENGLTHYFRCLLHGLWNDLLALDDRMCEMNKTIKRLAKDNEDCVRLEQLRGIGPMTSTAMIATLGDARQYHKSRQMAAGIGITPRQHSSGNKQRLLGISKRGDVYLRTLMIHGARSVVTAAKHKDDPLSRWVTEIAKRRHPNVAAVALANKNARMAWAILRNKTDYDPDFAMS

SEQ ID NO: 144877 - protein, 358 aa, unidentified
MNYIGCDCHISSMDCAVVNERGHETKKQKINTGVKELMGFVRSIPKPRTIIIEEGSLAGWLLEICTAYGEKLIITDPKRNRWIGRADQKNDTIDAQKLAHLARGGYIKEIHHPIGHRRRFRELVLSYHDTVKSQTRIKNKLKAKFRQNGIKCSGETVYSAKHRKEWKKKLPKDKVVQVIVEGLWQQLDQVHEVQEELLNHIQKQSRQYPEIKRFKKIPGIGTVHATTISAIVENPHRFAHKKKLWMYAGFGLIEKGSGEKVYSRNLTRDYNRLLKKALKQATEAAIIARDNQFRRQYLRLTIEKGIPSHLAKLTVARSILATVYGMWKSGEEYDPNIDKKRLESDKTHVRAYHLVRSG

SEQ ID NO: 144878 - protein, 343 aa, unidentified
MDYAAIDLHKTASQIRIIANGETVDCRIPTTRDRLRTTFEGRARMRILLEAATESEWVAQLLETIGHEVIVADPNYTPMYGERSRRVKTDRRDVVALAEACRLGLYRQVHRRSPENWAVQWHLTVRDQLVWARTRAIVLIRCLARMGGVHIAMAGHAETFVKRLELTELPPAVHHAITPLAAMIAMLNGHIAETDAYFKATAEADPRMRRLMSMPGIGPITAAAFVAAIDEVTIFRGPGQVTSYLGLVPREYSSGDQLRRGRIVPSAHPRVQALLVEAAWRIWRSANPDTQALRDWAQAVGQRRGKRVAAIALARRLARILYAMWRDETDYTATRIRPRRAAA

SEQ ID NO: 144879 - protein, 314 aa, unidentified
MSDFVVVGIDVAKAHLDVEVIGAQLESGRFDNDMDGLAKLTEGLHRLGPKVVLMEASGGYEVELVCTLQAAGLTVVVINPKRARDFARAMGHLAKTDRVDAQALAALAAVLIHREDFQRFVKPVVEAEQQDLASLVSRRRQLVTMLGAEQKRLSMARSLVRASIKALIEAIRRQLEHVDIEMQAHVAKHHAELDALLRSAKGIGPIASASLIADLPELGRLNRRQISALVGLAPFARDSGTFRGRRRVSGGRFELRRTLYMATLVATRHNSLIKAYYQRLLAAGKAKKLAIIACARKLLTILNAMVRDAKRFSA

SEQ ID NO: 144880 - protein, 388 aa, unidentified
MDGGGDTLSRFTVPNDADGADKLHEKLRYTLLHTDYSKVTVGMESTSIYADHLAAYLRNDDFLRKWDCTVYVINAKNIRNFKKSYPDLDKTDDIDTLIIADYLRFNRVPKSVHLDEKYLALRNLTRARFQAAQNLSREKTRFLDTLFQKFSTLQTSKVFSDTFGATSLAAACEFLSVDDIIYTPIDELADFVNNKGKGKFADPQAVAESLQAAARSSYRVPKTVNDSLNQLLAIRLIGIRSIEDQIKSLDKAIESYMGAFQNVLISIPGIGPVYSAGLMAEVGDITRFKGQASLAKYAGLSWSRHQSGSFEADDTKLIRSGNRYLRYYLLEAANKVRMHDAEFAEYYRFKYREVHRHQHKRALALTARKLVRLAYSLLDANRLYTPRF

SEQ ID NO: 144881 - protein, 342 aa, unidentified
MGEITTIGLDLAKHVFQVHGIDAAGQVVVRRQLRRGELLKFFAKQPPCLVGVEACGTSHHWAREIAAIGHTVKMMPPAYVKPYVKRGKTDAADAEAICEAVTRPTMRFVPTKTMEQQSVLMLHKVRDLLIKQRTMLINALRSHLAEFGIVSAQGPAGLQAAIVSLHEMQDQWPELARAALHGIVDQLRDLARQIEKAETRLQAWHRKDEISRRLAQVPGIGPITASAIVATVPDASIFRSGRQFAAWLGLTPKTHSSGGKEKLGAISKQGDSYLRRLLVVGATSVIRVARKETSSKLWATRLLERKPARVVSVALANKTARIVWAMLKRGEDYGAPPPAMVA

SEQ ID NO: 144882 - protein, 412 aa, unidentified
MSVVQFTQVLSRGCGMDIHKKVVVATVQGEGLCKETRSFDTFTRSLTQLREWLVSLGITHVAMESTGVYWKPIYNVFEGFIPHIWIVNARHIKNVPGHKTDKNDSEWICQLLMAGLLKPSFIPPKAQRELRDLTRYRRKLIQSVSANKNRIIRILEDGNIKLSSVLSDTSGATAVKLIDMLCDGKQITLSDIESVRHGRCQHTKEEMLEACTGCLDEHKVYMLGKIRECNASLKEDILDFDKRIKDVLSPYHDAIERMCEIPGIQNRVCEDLVAEIGLDMSNFPTSAHLCSWAGMCPGNNESAGKKKSSRTNHGDKQVKETLVEAAWAASRAKGTFFMERFNRLATRKGSKKALIAVGHSLLKCIHYVLSTGGRYKELGDNYVPNKKEQKRKEYLKKELQKLGYSVKLSKED

SEQ ID NO: 144883 - protein, 395 aa, unidentified
MSKKNTSLSYAVIGLDLAKADCAVAAVPCSDDELGLIDRMDYESLFEQAEKLEPTLFAMEPCCGYSQISLRLQNMGHEVKVISGHAVKNWIATHKSNQKTDLNDATALAKLALYDHDLQPIRVKNVEECRIASVQAIRIQLRTQATKSLVCFKSLCQCWGIVIRRGSSNTKKMAEAVAAVEKLLGAEVASSLMILRDAYKFTMKQINALDKLLDALVEANEQARTMKTVLGIGTQTAARLAVTTGDIKRFPMPRSYVAYFGLAPRNIITGHSGTPSPSKRGALKPVSSRGQGKVSRRGDRVARSFIIQGAATIYMLYCKDMLPECQLRRWLHEQIKRGKPYGKIIVSLAAKLLRIVWALLTYGEKFDSHKAGVPRSVLAAMEKPLKHDAAAESAA

SEQ ID NO: 144884 - protein, 423 aa, unidentified
MTKLTSTPAGAVLVAIDMSKNRQEVLIERPEGGRRRRLTVMATRKDYDGFAEQLAAIGRPIVVGFEATGNYHRTLAHRLLTAGFELRLISSVALARTREALHNGWDKNDSKDAQVILHMLRIGATQRYVDPLAAGINDLQELSKTHETISRMKTQTWHRILTHYLPLYFPEIARFAGNSRSDWFLALIEQFPTPATITALDREAFSAAAWPLIGRKVSKARLINDIYETASASTALPVPEDSAAITMFRMVIAQGRSLIHQRDEIERLAHARLTDDVDYQLLRNIPGIGPINALTILAEAGDLRRFNHHRQFLKFCGLDLATCQSGTFRGRTKLSKYGNARLRRTFWMAAQVAARQRDNSFRDKLGRYTAGHADDADRRRKAMTALTAKMARVAHAVVKTGTEYRPFLERSDARWKDPSLQVP

SEQ ID NO: 144885 - protein, 414 aa, unidentified
MDIVHYRCAGLDISKRDVKVCVRVQEPARARASSTVTTWGAMTNQILALREHLIEQKATLVVMEATSSYWKNFYYVLEDGPFELMLVNPRHVKNLPGRKTDVSDAAWLAQLGAHGLVRGSFVPPEPIRQLRDLHRARTTIVRERSREIQRLEKFLEDAGIKLSSVVTNLTGVSGRAMLEALVAGERSPDVLADMAKRRLRPKIPALTEALTGRFNAHHAFLVKVHLNLIDGHTRAIDELTARIEEEMIPFQAARDLMITIPGISTKVADVIIAETGADMSRFPTAGHLASWAGTCPGSNESAGRVKSTHTRPGNPYLKGALGIAAMAAAHSHDTYYSAKYRRIAARRGPIKAVVALEHAMLVAIWNMLQTGATYNDPGDDFYTRRTPDKTKSRALNQLRNLGYTVTLEPTAEVA

SEQ ID NO: 144886 - protein, 323 aa, unidentified
MTRVICGVDVSSRTLEARIGRDGQFVSFPNSVEGIASLGRFCRDHAAGLVAMEATGGYEQRAFAQLSGQGQPVAILNPRAVRQFAQAMGLLEKTDKIDTGAIAWYAEVKKSQPAELASASQQKLRALVTRLRQLTETRASQRNQARLVTEAEVAASFERLLDLIEEQIEQLAASIAALIAEDPLWRELNQAFRSIKGVADRTVARLMAELPEIGTLSNKAVSKLAGVAPLARDSGQFQGKRAVRGGRATVREILYMAAGVAGLHEPDFMDFRKRLKDAGKPGKVVRIALAHKLLVRLNAKAREVRQRMESSASRCEQPLAAAV

SEQ ID NO: 144887 - protein, 360 aa, unidentified
MLVPFSFQQKPGQFIRPQEPVLRIDKPMLISFIKNLIMCKYTGIDISKQTFDCSITMENGKVETKKLSNNEKGFEKLRNLLPSEAHVVMEASGPYYCKLATYLHQHHIHVSVVNPLVIRRFCQMRMVRTKTDKKDASMIREYGLTEKPALWKPDEASITKLKQLNAAIELLDKHITASSNQLEAFKEMPDTDPELIKALKKVMEYNVKTKEKLEDEMGKVASLSYGNNYKALQTIPGIGPKSAAMLIAVTGNFKNFNHYKQLVAYVGLNPRIFESGTSVKGRGHISKMGTGRLRKLLYLCSWSAKRHNIYCKELYERLKAQNKPEKVIKVAIANKLLRQAFAIGRDESIFENNYQKTFGS

SEQ ID NO: 144888 - protein, 336 aa, unidentified
MNSKRKKQSYMFYVGVDLSKLKFDVVLRSCTAELGYRVFTNNNSGIKKFIIWMESQDGFGFEQALFCMEHTGLYSRELVKELMKRDAFVWLESSLQIKKSLGFTRGKSDKIDSSRIAYYAEKYSDKARLVQPNNEVLQQLQDLLSARDRLLKTIGQLQKPLKELKRIDSFSYQELEKINRPVILQLKESLKQIKAELITVINSDERIKRQYLLATSVKGVGMVLAVQLLVYTHGFTRMQNGRQLACYAVVAPFEHTSGTSIKGRTHTSNFANMLLKSTLHLSAISSIQHNPELKKYFERRVAEGKNKMCVINAVRAKLLYRILAVVRRGTPYQNIA

SEQ ID NO: 144889 - protein, 361 aa, unidentified
MTQTMTWAGLDVHARSTQAVAVDARSGELARARFGGGIESVVEWLASLTGPVHAVYEAGPTGYGLARAGGELGLRIDVIAPGKTPRAAADRIKTDRRDAELLVRQLMAGTLHPIHVPSPALEAARDLVRAREDVRCDLSRARHRVSKLLLRHGEVYPKHRSTWTREHRRWLSSRRFDEPNTQLAYIDALAAVDGLTHRRDPLAERLSHVAADSVLWPVVSPLRAFRGIDTLTALALVCEVGDWHRFQRPDQLAAWIGLVPSLSQSGESRTSGGITKTGSRHARRLLVEAAWHYQRPPRIGATLRNRQHGQPDHILQIAWRAQHRLYRVHQRLRQRGKHPNLATAAAARELACFCWAAVTAP

SEQ ID NO: 144890 - protein, 416 aa, unidentified
MLFPGSVHLAEGGGAGPVLLRWLDEKPARLVAASRGPLQACLEVSFRADAANDVVYWKEINVAMPIVAEQYAFVIGVDTHAANHSFALINATNGAIIDQAVFPTSPAGLDRACTWITRGIDEKSALVVIEGAGSFGAGLAERVTNSGLPIAEPAVMPAAQRRGVGKTDSLDAVRIARSVLGVDITRLRRPRAAGQRVALRVLTVAREEMVAERTRAINALTALLRTVDLGLDVRNALPHSQFKVIAAWRDRREDPVIATCRQEAVRLAKRIVALDGELVDNRKSLDSLVEDVAPELCQLPGVGSVVAACVLTAWSHPGRVRSEAAFAALAGTCPIPASSGNTVRHRLNRGGDRRLNRALTTVVIVRMRTHAPTHAYVARRRAEGRTTKEIMRSLKRYITRQLYRTLTAAHPVPATP

SEQ ID NO: 144891 - protein, 385 aa, unidentified
MDILMECCCGLDIHKDMVEACILKGTLERPEAIRARFSADRQALRELAGWLGEHECYYVAMESTGIYWRTVYETIEEYACRCDCLMVVNAQHMRNLPGRKSDVKDAEWIATLLRHGLLEPSFVPPKDERMIREFSRLHRSLLCEKNRCAAQLEKFLQAHGFKLSCVMNDIHSVIGRKLLDCLAQSGELTAEDVLCQAGRRLKLPLETICAAVCGVLHPAEQRMLQLLLKRLDEVRENLKEVDGELLRLAEPYGRQMEILDSIPGIDKLAAATILGEIGTCPQNHFPTSQQLTSWAGLVPRNDESAGKIKSRKILPGNPYIKCILCQVSWVAVRTRKSHFHEWFWCRQGRLGRKKAIVAVSRKMLELIYYLLASDQLYNLELAHVR

SEQ ID NO: 144892 - protein, 479 aa, unidentified
MHETFATLRRRRHRGRYSLGAIKPDLKLDPGFLEHLRLSPRAVIGPGARFLEFFFTGPYADDATQEEEEMELLHRRCCGLDVHKETVVACLRLVSDGQVTTEVRTFQTTTADLLRLSEWLAANECTHVAMEATGVYWKPVWHILDDGEFELVLANAAHVKNVPGRKTDVNDAMWLAELLAHGLIRASFVPDTQTQEMRNLLRTRKQLVREQSSHVLRVQKTLEDANIKLDSVLTDLMGKSGRAMMEALIAGETNPTKLASLADPRVKASHEEFREALRGRVTKHHRFLLRLHLNQIDALDAAMATLDAQVEANLGPFRTAVDLIMSIPGIKNLSAHVIISEIGIDMSRFPSDAHLISWAGVCPGNDESAGKRRSNRLRKGAPWLKTTLVQCAWAAVKKKNSYLQAQFYRIKVRRGPKKAIMAVAASILTAIYHMLKDGTMYQDLGCNHFDRRSTDQQKNRLVKRLTDLGYAVEIKPLAA

SEQ ID NO: 144893 - protein, 357 aa, unidentified
MKVTTIGIDLAKDVFGLHGVDGEGRVAFKKRLVRRRLLEFMSQLPPCLVGLEACSSAHYWARKIERLGHRVKLMSPRFVKPYRKSDKNDANDAEAICEAVTRASMRFVPIKSEAQHEVQALHRVREQLLKSRTALVNQVRGLLAEHGIVVPLGIARARRLLLEILADPERHGLSGLFRETLQEMAERLRFFDERVGAYDDRIERRFKEDERCRRLAKIEGVGPLVATAVVAAVGNASEFKSGRELSAWLGLVPRQHSSGNRSQLLGISKRGDRYLRTILIHGARAALRRADHKRDQRSRWAMRIKLARGYNKAAVALANKNARIIWALLTRGENYRPPAIAMASPTADRISLIRVQA

SEQ ID NO: 144894 - protein, 381 aa, unidentified
MATSIFRKNFPQVEKLETKLVQARYVIGLDLHKKTSAITVIDTTKQNKLVLQRKRLENKKLFSILDVLEEGHKMIVAEASYGWSPLRIAMEERTDVTLAIFDTRKTSAWISSSGIKNDKIDSEVLAYACLNGGIPRLAVYQSSMTAKENFKLVNLRDKLASQKAGIKNQLKALERDYGINPFTLKQMEKSDTVHAMENSLLEQLAFLNKQIQNIEKEMKKIGKKDEIVAILDSIPGVGPITSFALRWKMENIERFKNSKHLASYFGFGIRERQSGDHLQKGKITKTGNNLIRKLLVQGAQVISRTHPEYLKLYFPDLASPDQMKDKKHVNKVVVALARKQLVFAYYCWKNKTKFSIMEYKKRRNDSINLREDSSTDSSKSS

SEQ ID NO: 144895 - protein, 343 aa, unidentified
MGEISTIGLDIAKSVFQVHGVDGTGAVVMRKRISRSKLLEFFGGLSPCLVGIEACPSAHYWSRELQVLGHTVKLMPPSYVKAYLKRNKNDANDAAAICEAVTRPSMRFVPIKSEQQQCGLMLHRTRQLLIRQRTMLSNAIRGHMAELGVIAAKGRNGTAELLQIIGDLTDDRIPPVARFCLDLLARQYLTLNAEVSSIDKRIHSWHRSCEQSRRLEEIPGVGPIVATALVAEIGDWRAFRSGRSLAAWIGLVPKQHSSGGKERLGSITKQGNRYLRWLLVAGAMAVIRYARQHGTKRAWLTRIMDRRPVKVAAVAFANKIARMAWAIMVHGERYREPKLLLAA

SEQ ID NO: 144896 - protein, 338 aa, unidentified
MKLYGAIDLHSNNNVTVLIDEKDKVVYQKRLANDLPLIVEQLSPYASSVEGIVVESTYNWYWLVDGLMDKAYRVHLANTAAIQQYEGLKYTDDESDARWLAHLFRLGVLPEGYIYPKEERAVRDLLRKRSQLVRQKTANVLSIQNLYSRNTGQSISANRIKQLSSEEVDAVFPKVDLALAIKANLTVMRSLETQIGMLEGVIKERIKLRPAYRYLLSVSGIGQILALTIMLETGEIGRFAKVGRFASYCRCVGSEKLSNGKRKGSGNTKNGNKYLSWAFVEAANFAIRFEPLIARYYQRKKAKSHKVVAIKAVAHKLARACYYVMRDEVPFDVNRAFA

SEQ ID NO: 144897 - protein, 337 aa, unidentified
MYDKILGIDIAKATFDVALLPPSAPTAGQTERPRTHHFANTPDGMAALQRWLATQQAPQVFACFEATSTYGDALAAALCAAGHTVACVNPYQIKRYAQSELQRNGTDRQMAAVIARFARERQARLPAWTPPDPALHTLQDLVRHADDLQTLCGQVQNRLERPGHSDTVINSLTEMAHCLETERQRILQLISDWIAEHPALTQQTALLQTITGFAETSAVAVLSEVGDVRRFVSTRQAAAYAGVTPSRTQSGTSVSTAAHFSPHGNRRLRKALFYPALVAIRCDPRLKAFYQRLLKAGKPKMAAVGAVMHKLLKIAVAILRSGRVYDLHLPSKEVLTN

SEQ ID NO: 144898 - protein, 344 aa, unidentified
MSTIKVLGIDLGKSSFHVIGRDYSDNQIIRKKFSRTALIHFLHQLTPCTIAFEACGGAHWLGRQCESMGHKVRLIPPQYVNPFVKSNKNDFIDAEAICEASTRPNMRFVSVKSEEAQVISAIHKARHGYIKDRTACMSRIGALLLEFGIALPTGHSVMKQLFNWLAQQRQELPGLLMQELAELHDYYLFLNESIEKQDKKLKQLVETNAIGQLLKTIPGIGDMTASLCIANISSATDFKSGRNMAAWLGLVPAQYSTGGKPKLLGISKRGNKELRTLFIHAARAVMSRPDKTGKIYGEWLINLRATKPFNVVTVALANKLVRIAWAVMKTKQAFNSKALAPGLQ

SEQ ID NO: 144899 - protein, 399 aa, unidentified
MISVGIDVSKGKSTVCILKEYGEVISEPHEINHTEADLKALVESISELNEETRVVMEATGAYHLPLLTYLKNHGIFVAVINPLIMKKYSAIGLRKGKTDKLDSIKIANYGIDNWFKLTDYEATDEVYSELKLLGRQYSHYIAMRIESKLVLSNLLDRTMPGIKNLLKNRSDKPEKDKLNDFVKEYWHYDNITKKNEKQFINSYFKWAKKKGYHQSETKAKQIYALAQEGIPTLSSSTPSTKMLVLEAVRVLSEIDRTLSMILSQMQELASSLKEYNVVRNMPGVGDTLAPRLIAEIGDLKRFYNKKALIAYTGIDSPPFESGQFVANKRRISKRGSALLRKTGYEIMKCIKSAKPKDDPIFLYMLKKEAEGKPKKVAKIAALNKLLRIYYARVKEVYNT

SEQ ID NO: 144900 - protein, 390 aa, unidentified
MIYVGIDVAKDKHDCCILDVEGRKLYPVFTISNDKVGFDELFSKIEEVTSDKTEIKVGLEATGHYSSNLLASLVDKGFPTVVINPLHTNLYRKGLSLRKTKTDKVDASSIAMMLMTDRTLKPYSKTSYHNEELKSLTRYRFDKVHERSKLKSSLARLVNILFPELEKLVPSLHLNSVYTLLEELPGADYIAGCHLTHLKKLLETSSKGRYSRDKAIEIRNAAIDSIGTPMDAKSMELRHTIHLIWILSEEIEEIEASIKAIMDEMQSPIMTIPGISYRMGAMILAEVGDFERFDNADKILAYAGLSPSTYQSGQLDSSHSHMEKRGSRYLRYALFNATKFVCKWDESFGIYLGRKISEGKHYNVAVSHAAKKLIRTIYRMELTGQAYSPS

SEQ ID NO: 144901 - protein, 323 aa, unidentified
MQKQIFIGIDVSSATLDICVRQEHSLESFVITNQTKDIQRFFKSYSKAELIIGMENTGRYNWPLYDVLTNTEHKIFVLSPLHLKKSIGLVRGKNDKVDAERIACYIEKHYKDLKPWKATSASIQKIRILLTERSFRIKSKSQLRKQQQDYAKMKKLGLDRSLTKLNEQLILQLEKQIATLEAQIEAIINADEALNNQASLIQTVPGVGKVLCWTMLAKTEGFTTIDNPRKMACYSGVVPFDYQSGTSIRGKHRVSSYADKTIKSILHLAAMSAIRLNNDLRQYYLKKVAEGKNKMSVLNAIRNKIIHRIFAVIKNQKEYLVLS

SEQ ID NO: 144902 - protein, 410 aa, unidentified
MEVILRCCAGLDVHKDSVEACVRRMGAAGKLEHEVRHWGTTTRELVAMAEWLAAMGVTHVAMESTGVYWKPIFNILEAQFEILLANAHHLKNVPGRKTDIRDCQWIAQLLQHGLLKGSFIPPRPQRELRDLTRQRTQLIDEASRIANRIQKVLEDANVKLGSVASNVVGASGRLMLEAMVAGQDNPAQLAELAQRRLRSKIPQLQQALYGKLTEHHRWMLKLLLDQLQTTEQFIARLDERIAELTRPLKPVLEKLDAIPGVDRRVAEVLMAEIGPDMTPFPSDAHLASWAGISPGNNESAGSKRNGKTTKGSRWLRQALVQAAWAASHKKDSYFQAHARNLMHRRGRKRGLVAVAHSLLTVIYHMLKEDTAYRDLGPQFLDRLRATHLIRFHVRRLQHLGLQVAITPVAA

SEQ ID NO: 144903 - protein, 365 aa, unidentified
MTKSIKYVGLDVHKNSIAIAVADFGRTNDVRYWGQIENNMEQLNKVLQKLVENGAELSCVYEAGPCGYGIYRHLTSNSIDCSVIAPSKIPRKSGDRIKNDRRDAISLARLHRAGELTAVYVPSPDDEALRDLVRAREDAQIASRKSKQQLKAFLLRHDIVFSGRSMWSKAFFNWLSTIAMDHLAQQFTLQEYIDTVEHCNSRVLRFTEQIKYLSEQSRLYPLIKSLQAMRGVSLIVAATMVAELGDLKRFESPDKLMAYLGLVPSESSSGAKVKRGSITKTGNSHVRRVLIEGAHAYRFPARISRVIRKRQEDLPEKICQIAWKSQVRLCKRYKQLLARGKNVNVTKTAIAREMAAFSWAIAQEI

SEQ ID NO: 144904 - protein, 407 aa, unidentified
MQEATQHDAVDVFVGVDVDVGVDVGKGQHHAVALDRNGKRLYNKALPNDEVKLRALIAELKTHRRLLFVVDQPSTIGALPVAVARAEGVLVAYLPGLAMRRIADLHAGEAKTDARDAAIIAEAARSMPHTLRSLRLADEQLAELTMLRGFDDDLAAQLTQTSNRIRGLLTQIHPALERVLGPRLDHPAVLDLLERYPSPSALAAANEKTLANRLTKLAPRMGKNWAAEIVQALNEQAVIVPGTQAATIVMPRLAQQLAALRKQRDEIAAEVERLVLAHPFWPVLTSMPGVGVRTAARRLTEAAQKAFATAAHLAAYAGLAPVTRRSGSSIRGEHPSRRGNKVLKRALFLSAFAALRDPVSRAYSSRKIQQGKRHNQALIALARRRCDVLFAMLRDGTIYPPKSAPDA

SEQ ID NO: 144905 - protein, 338 aa, unidentified
MTMFAGLDVGFKRTAVCVVDGSGRTVWRGVVDTHPEAIAAALKRWRNKLEKVGLETGSMSPWLARGLSVLGFPVVCMDARRAADAVKSRRVKSDKADAFALAEMLRTGWYSAVHVKSEESHRLKALLGERDQLVRAKRALGNQVRGLLRPFGIRLPSRQGTKKFAEAAHQAVAHDTMLSASVTALMEALAAIEGQLARLDERLKDLARRSPVCWRLMSVPGVGPIVALAFIAAIEDVGRFARMRDIGVYLGLTPKRYQSGETDVGLGISHQGDSMARHYLYEAANVLLTTVRSPSALKSWGLKLVKRRGPKRARVAVARKLAAVLGRIWKDGTHFAAA

SEQ ID NO: 144906 - protein, 280 aa, unidentified
MGAFAALDVSQKETAICLVDQVGTILAETKVSTCPEVIASWLAERCNDLERVGMETGPLAVWLWNALAARQVPIVCLDARHANGVLKMMPNKTDRHDARGLAQIVRTGWFKAVQIKSHAAYVNRALLTARETLVGMRVRLENEIRGLLRTFGVMFGKRVGGFKRRAEEIVRGELAVAPELVPIFEALMQARRDISARIAALDTRIRAIARQHATVRLLMTAPGVGPITAMAVVTAFDDAARFRRSSSAGAYLGLTPKRYESGEVSRNGRISKRGDRFTRK

SEQ ID NO: 144907 - protein, 328 aa, unidentified
MSNIKVLGIDLAKDVFQLHGTDAKGHGVLRKRLSRGKLIEYTANLTPCLIGIEACGGAHYWARVFGSQGHRVKIMAPQFVKPYVKSNKNDARDAEAIAEAVTRPTMRFVPIKGIEQQDILMLHRVRELAMKQRTAHSNQIRGLLAEYGVVVGKGVSQLDKLPEILELNQNKLSLVSTEVFVQLHEQLKIYSEQVSHYDKKIKRHAATEPRCIAVQEIEGVGPITASAIVATISDPSVFKNGREVSAWLGLVPKQHSSGNKIVLGGITKRGDRYVRKLLVHGARAVVKTCENKKDKRSEWVLDKKQRCGYNKATVVDSVTNPLINGAGL

SEQ ID NO: 144908 - protein, 451 aa, unidentified
MEILYTNCAGLDVHKKTVKVCLLTQGSNGQSHKEFRTYVTTTEELLKLSDWLREQGCTHVAFEATGVYWKPIFNLLEDHFELLVVNAQHIKAVPGRKTDIKDAEWIADLLQHGLLKASFIPSGPQRELRDLTRYRVRLTEEKAREVNRVQKTLEDTNLKLGDVVSDIMGKASRMILHAIVDGETDPVRLAALAVGRVHASQEALEAALTGKVTEHHRFLLGEHLTQIHHLEQAIDRVTAEITRRFTLPVPPEDTSTSETKASATPERVSDSALLPEAPSASQAALSWAQAVVLLSSIPGISERNAIGILAEIGLHMQQFPTAAHLASWAGVCPGNHESAGKRLSGKTRKGNPWLRCLLVQAAHSASHQKHCYLAEQYRRLTKRRGSKRAALAVAHSILVIIYHLLKNQTTYREKGETFFEERDRQGMEKRLVRQLSSLGYHVELQPIALAG

SEQ ID NO: 144909 - protein, 401 aa, unidentified
MPAVWAGIDSGKWTHHCVVLDQSGTLLLSKRVENDEAVLLDLIDTVVGMADGDKVCWATDLNSGRAALLIALLAAHSQQLLYIPGRIVHHAAATYRGDGKTDAKDARIIADQARMRTDLQPVRGADQISVDLRLLTARRTDVICDLVRAINRLRATLLEYFPARGRAFGYSKSKAALTLLSGYPTPDGLRRIGTSRLTAWLKKRRCRNSAAVAQKAVDAAGAQHTALATQAMGSALVTKLAAGITAIDHELADLDAQITERFTRHESAEVLLSLPGFGVVLAATFLANIGGNLDGFDTVDRLAAVAGLAPVPRDSGRISGNLHRPRRFNRRLLRTCYLAALSSLKNSPASRAFYDRKRSEGKSHKQALIALARRRINVIWAMLRDHTTYQEPCPAARSLVA

SEQ ID NO: 144910 - protein, 368 aa, unidentified
MSTDRLTPCPNENATARIIVGVDTHKHVHVAVAISRLGTRLGECSVPANRAGYADLLTWARSLGTVDAFAVEGTGSYGAGLASFLRRHAVRVVEVSHCDRRKRRKDGKNDTLDAESAARSVLAGTATAIPKTADGTAEMVRQLKVARDTAVKARSAALIALKTLIVNAPDELRAELEPLGDRLLIERCAQFVPQPLRTPAATAEHALRALALRWRMLSAEIAEHDTLLDALTAEAVPTLRAAFGIGPDAAAEMLIVAGDNPSRIRSDAAFAKLCGACPIPASSGLTHRHRLFRGGHRQANAALYRIVIVRLRWHQPTIDYVARRTAEGLSKKDIIRCLKRFVAREVYRALLADHTARDTTIEAVSAAA

SEQ ID NO: 144911 - protein, 346 aa, unidentified
MWIIGCDFHPRFQQVAFLNTETGECGNRRLEHSNGDAERFYGAFQGQVVRVGMEAGGHSLWFERLLEKLGYELWTGDPAQIRAKRVRKQKNDVLDAEHILSLLVEKEGKGFPRVWRPTLAERDLRQLVLHRYRLVQIRPRVKNQLQALAMNQQMCQKQKLWSKAGREQFEALALPQWAARRRQDNLELLDELNRRTEPLNQAVKLQAAQRAEVARLMTHPGVGEVTAVAYAMTIGDPRRFHCGKQVASYLGLIPAEDSSGGKQRLGHITKQGNALLRGLLVEAAHVAVRHEAELGRCYRRLAMKKNRSIAAVAVARKLAVRLWLMWIRGLDYGQMCFESGSHAGQA

SEQ ID NO: 144912 - protein, 399 aa, unidentified
MIYVGIDVAKTTHYAAAADSDGVVLVEPFAFDNDAPGFAKFISKIASFPKEQLIIGLESTGIYSENLICFLFDSGYKLAVINPIQTATLRKTNIRKTKTDKVDTLLIIKSLMVNSYRLYTEQDTQSLKLKSLCRFRQSLKKSKARLKIQLSGYVNLLFPELLSFFKSGIHISTCYTLLKRCSSPAEIAALRLVSLSRLLSNASRGRFSRSTAEALKSLAKSSVGVKNPYISIQIAQTIQQIELLEQQIDEIENVIKDTICELDSVIMSIPGIGAIDGAMILGEIGNIDRFASPAKLLAYAGLDPTVCQSGKFKARSTKMSKRGSKILRFALINSAWQLTLKNDTFFNYYQLKLSQGLSHYGALGHVAHKLVRVIFTLLKHNVLFDPTRLVKSYFSLDFS

SEQ ID NO: 144913 - protein, 343 aa, unidentified
MQCYVGLDVSLKQTSICVVDQTGAVVREGVVDSDPEAIAVYVRSKAPDAVRIGLETGPTSTWLWTELKRRGLPVICIDARHAKAVLKMQINKSDRNDAIGIARIMQTGWFKEVHVKDIDSHSVRALLASRALLVKIKRDLENHVRGLLKNLGLVIGRAKFNVFAVRAEELIEGRPELIAAIRPLLEARNAVGQQVSELDRKVMKLARHDAQVGRFMTVPGIGPITALAFKATIDDPARFARSRSVGAYVGLTSRRHASGEVDWSGRISKCGDAMLRSYLFEAAGVLLTRVPKWSAVKAWGIRLAKRNGLRKAKVAVARKLAVILHRMWIDGSEFNWSTKEIAA

SEQ ID NO: 144914 - protein, 400 aa, unidentified
MRFYTRQHRHYCGVDLHARSMYVCILDAEGAVLASKDIAAAPEPFLELIAPYREDLAVAVECMFTWYWLADLCEREGIVFVLGHALYMRAIHGGKAKNDRIDAHKIAALLRGGLLPQAYVYPRAMRATRDLMRRRNYLMRKRSELLVHIQNTNSQYNLPAFGARLAKPHLRRQAAEHFGEAAVRKSVALDVSLIDHYDRELPQLERYIESAAHGHDPVALALVRTVPGLGEILGLSIVYEIERIQRFPRVQDFLSYGRLVKPTKSSAGKVLGHSGGKIGNAHLKWAFSEAAVCFLRRNKRGQALRARLAAKHGKGKSLSIIAARLARAVYFMLKRRAPFDEERFFAQSSSAEAKGSSPNVLTGATPKGARPAQSLTEVTVPSSTTGKLGRKRMRPVAQPH

SEQ ID NO: 144915 - protein, 367 aa, unidentified
MKTYYVGMDVHRASIVIVVLNGAGKVVMQSVIETGAERVRGYLKQLRGKVYVTFEEGTQANWLHEVVRLLATEVVVCDPRHNKLLQSGNKNDRVDAQKLAELLRNGALKAVYHGDNGMRTLKEFVRSYDCLVSDTTRVMNRLKAIYRGRAIGCAGHDIYRQDLREQWLEKLTERGAKQRASCLYQQLAALKPLRHEAKRMMVKEARRQPAYPWLMSMPQLGSVSVAQLLAIVGTPHRFRSKRQFWTYIGLAVVTRTTADHEVVNGVLRRSKRPVSTRGLNRNHNHLLKRVFKNAAKGACHGGPFKTAYELRVAQGMVPSLARLNCSATVGGYHFSGVETRRAVQSRKDETAGGLSSNLQSSRGEFDE

SEQ ID NO: 144916 - protein, 411 aa, unidentified
MHHRQNYLYVGVDLHKEQHTAVIINCWQEKLGEIQFENKPSAFSKFLLEVETYVSDGLSVVFGLEDVGGYGRALAKYLVDHEQVVKEVNPALSFLERKSQVMIHKNDSWDAECVARILINKFNQLPDAKPNDLLWSIQQLVSRRNALVKAQSALKNQLHIQLNHHYPSYKKFFSELDGKTALAFWQQYPSPSCLEGVSIKKLTAFLLDVSNNTCSVKKASDILKLVKEDGQTMKEYQEMRNFLVRSIVREIEFKKKEMKYIERELKQLVNLLDYQLETMPGIELVTASALIAEIGDVRRFPNANKLARFAGIAPVYFGSGGKGKTHKSKQGNRALHALFYNLAVQQVQVAKGSKKPRNPVFHAYYQKKLKEGKTKGQALVCIMRRLVNIVYGMMKYKTAYELPVVEEKEVV

SEQ ID NO: 144917 - protein, 315 aa, unidentified
MSDVPCFLGIDVAKAQLDMALRPSGERWAVPNDASGVATLVDQVQTLHPTLIVLEATGGLERAVTSALATAGLPVVVVNPRQVRDFARATGQLAKTDALDARALAHFADVIRPTPRPLPDAQTQELRALLGRRQHLIVMRTAEQNRLAGTSERLTKDIAAPITWLNAGIATLDADIETMLRASPLWRENDDLLQSAPGIGPVCARTLLLELPELGTLTRQQIAALVGVAPLNCASGTLRGRRTIWGGRAHVRTVLYMGTLVATRSNPQIKAFYERLLAAGKVKKVALTACMRKFLTILNAMLKHRTPWQPQEVQS

SEQ ID NO: 144918 - protein, 438 aa, unidentified
MSNKVFFNLDDLFISVGIDIGADFSWMSIALPNQQFVGKPYKILHNSIDSLTTAVSKIKEAEELYSLESRIFLESTGIYHYPLFCYLRDKGFNCSVINPIITKNSTNINIRKVHNDRFDSKKAALVGLKPDLKVSLMPSDLALNCRNLCREYYDLMDNRSAYVNKLQGELRMVFPQYLGIFSKVTINTSLTLLETYTSPSAFLKADKQEIIDIIKSTARFGLTYAQNKYNAIIQAATDANQFGYIIDSNIKRIRLYISFIRKYDEEINNILESLHELVDANEDADFVKQIHLIETFKGAGFLSAVSIMGEIGDFSAFSKPKQLFAYFGLDPAVKQSGKFEGTKVQMSKRGSAIARRVIHTLTLQSISISRNGEAKNPVLREYYLKKCDSKPKLVAMGAVSHKVCNMIFAILRDNKPFKIIAPQEHIKQYNAAKCDIAA

SEQ ID NO: 144919 - protein, 316 aa, unidentified
MKRCESNTSVAGLDIGKAWLDVALADSDEHLRVANTAVGIDELIAWLEVHCVTRVGMEASGNYERDVREVLEAKDFEVIVHQPQEIRAFARFKRLRAKSDKIDAGLIARATAQWEGTIARRDKDIVEMAEILTLYEHVADILAETRTIAEHQRLPEVCSVQAELVNQLHRQKQNLLAMILRRIRNRADLTARFDLLKSLPGVRQVVAAVLVIRMPELGLLKPGQAAALLGVAPFDRDSGTMTGPRFICGGRARPRLFVYIAALAAKRMDSHFKVFAERLIAAGKPTKVAIVAVMRKLIEAANLVLKRLTPWEQKLV

SEQ ID NO: 144920 - protein, 363 aa, unidentified
MFTERTSVGLDVHARSVAAAAIDSVTGEVQQTRLTPSHEHIRSWISELPGPVAVAYEAGPTGFGLQRVLTDAGIRCEVVAPSKLHRPSGDRVKTDARDALHLSRLLRLDEVTSVSVPSVSQEAARDLVRAREDCRGDLMRARHRLSKLLLRHGIVYYGGAAWTGAHDRWLRTEAAPQLTAPATRMAFDADYDHVLTMQARRGRLDSAIEHIARDCEFTPIVRRVSCLRGVSTLTGFALAVEIGDWNRFTGNTIGSFVGLVPSEYSSGSSRVQGTITKTGNTHVRRLLVEAAWHHRARYHVGAVMRSRWEQASPAARARGDEGNRRLHGRWVGFLERRKRPVVANVAIARELAGWCWSLAVMQD

SEQ ID NO: 144921 - protein, 357 aa, unidentified
MATTKQALLNDTSVKLMLYMALELSASKWKVALADGQRAASQHTLVGGDVDGLLRLIDRAQKRCGLQGKVRVMSCYEAGRDGFWLHRWLLEQGIDNVVVDSSSIEVNRRARRAKSDTLDAAKLYEMLVRYVAGEKRVWRVVRVPSVQQEDERRLHRELERLKKERNAHVNRIRALAVLHNVRLQRVGGRGWSERLEELKGQLPAGMVAEIERQSARAKLVGEQIAALEKSRQEQLRAMIEQQQDGPLLALLKLRAIGVQTAWVLVRELFSWRRFSNRRELAGCVGLNPSPYDSGASQREQGISKAGNRRVRALLVEIAWYWLRYQPHSALSAWFNRRFGGAGKRMRRVGIVALPRWS

SEQ ID NO: 144922 - protein, 403 aa, unidentified
MIFVGNDWAEDHHDVYVMDQAGEKLAAKRLGEGIEGIRAFHALLGTHAEDPTQVRVGIETDRGLWVNALVAAGYLVHAINPRATARYRDRHHVGGAKSDAGDAKMLADLVRTDAHNHRLVAGDSAQVEGVKVLARAHQNLIWSRARETNRLRSALREYYPAALVAFEDLDDRDALTVLGRAPDPETGARLTLSQITAALRAGGRRRYLEATAERIQHALCTEQLAAPLPVVQSYAASTKALVGLLAAFNTQIEDLETQLNQSFEQHPDADIYLSLPGLSDILGARVLGELGDDPERFADAKSRRNYAGTSPITKASGKKKIVLARYIRNKRLYDAIDQWAFCSLSTSPGARAYYDERRAADYEHHEALRALGNRWIGILHGCLKHRTPYDEHTAWAHRHPAAA

SEQ ID NO: 144923 - protein, 354 aa, unidentified
MGIKYIGMDVHQATIVIAVLNETGKCVMETIIETKTSTIVDFICGLRGMLYVTLEEGTYAAWLHDVLSPHVEKVVVCDPRKNKLLPSGHKSDKVDARKLAEWLRNGQLSPVYQGRQSLRTLKELARSYRCLVEDSTRVMNRLKALFRGRGIACSGQAVYQARQREQWLQQLTQPGARQRAEWLYQQLDQLQPLRKAAHQALLAESRCQAAQRILCQIPGLGPTRAALIQAIVETPHRFRSKRQFWTYVGLAVVTHSSADYRMVEGRVRRSNKPIATRGLNRNHNRVLKEVFKSATTGAIQRDPVFKLLYFRLTERGVAPEMARLTLTRKLAALTLALWKKGARYDPEQLKAQAA

SEQ ID NO: 144924 - protein, 347 aa, unidentified
MERTTIGLDIAKRVFQAHAVDPASGQVSRSKLQRGELLPYFAQLRPALIAMEACGAAQHWAREFTKLGHEVKLIAPQFVRPFVKTNKNDVADAQAIWTAAQQPEMRVVAVKSEEQQAVLALHAIRERLKKARTAAVNQLHGLMGEFGTALSKGWRTMLPQAAAVLGQADSGVPALLRAQLRRQLEEVRRLTEQMAEVECQIASWNRRQEECERIAAIPGVGLLTATAAVATMGDARTFRSGRQFAAYLGLVPRQIGTGGRVQLLGISKRGDKYLRMLLIQGARSVLARSRASKDPSTWLGRLIQRRPRNVAAVALANKMARQIWAILAHNRTFEPNYRAPQLSARPA

SEQ ID NO: 144925 - protein, 367 aa, unidentified
MKKVSTAAVKASRNFSQSKLTVGLDLGDRSSCYCVLDESGRIVMEQRVSTTAKGLQAAFGAMPRSRIALETGVHSPWISRLLSGLGHEVIVAHARNVRLIGESRKKDDRLDAQTLARLARIDPQLLCPVKHRSAKAQADLTVIRARAGLVRARTALVNTARGLAKSYGERLRGCNVRNMNREKAEGLSPELQTALEPLLACLESVSEQICEYNERIEKLAQDSYPQVALLKQIKGVGTLIALTFLLTLEDPHRFRKSRDVGCYLGLQPGRRNSGQSEPQMHISREGDPYLRTLLGQGAQHILGPFGVDCDLRRWGLKLAERGGKSGKKRAIIATARKLAVLLHHLWVSGEVYEPLHNSNRVALAAAA

SEQ ID NO: 144926 - protein, 384 aa, unidentified
MNRIVKIGMDVHSTNYTLCAMEPVLDGEDRIFANIKVTPDYKNVIQFISKLKNKLGASDTYSIECGYEAGCLGYSLYHQLTDAGVKCTILAPTTMLTPQGKRIKTDKRDALMIAQCLSYGGYHAVHVPDEKDDAIKEYLRMRDDHKLVLKKIKQQINAFCLRHGHFYDGNKWTIKHREWLKTLKLSDLYRETLDEYMTTYEEQESKIERLDRRIEELASDSAYKEKVKKLGCFLGIKTHTALSLIVETGDFKRFAKGNTYAAFLGLAPGESSSGDNVNRTGISKAGNSHLRTLLIEGARGICKGKIGHKSKDLRLRQAGNSAEVIAYADKANVRLRSRYYRFMRHEKKKNVVVAAVARELACFIWGMMTDNISIVPERGKQNVA

SEQ ID NO: 144927 - protein, 443 aa, unidentified
MTKKAKTENFQLVRPNAAGIDVASQMHYVAVPPDRDDEPVRKFGSFTSELHLLAQYLKKCRIDTVAMESTGVYWIQLYLILESYGFEVFLVNARHIKNVSGRKSDVSDCQWIQQLHTYGLLNPSFQPDNLTRELRSYMRHRKNLTESYSTQILLMQKAFEQMNIKLHNVLSDICGKSGQSIIKSILAGERDPKKLIINIDKNVKSSEDNFIQSLTGNWREESVFELKQAYELYLIFKEKIRECDEQIEKVLAKSETINQNNHINHKKARGVYTKNRFDFNATNYLKNILGVDITKIFGISEVNATEIISETGTDMSKWKTQKHFTAWLNLAPNNRVTGGKLLKPKKTKKKNKAGQSFLMAAYSIQRSDNWLGAFYRRMKAKHGPLIATKSTARKIAIIFYKMVKEKVDFNPISVETYSQYFKEQKMKYIQKQASILGLTLVPA

SEQ ID NO: 144928 - protein, 336 aa, unidentified
MKLIPVGVDIAKNVMQVHFVNTDTGEIFNKALKRDKFLEFFTNRSPCLIGMEACGGAHHWARQLMCLGHTVKLMPGEFVKAFNIRNKNDIADAQAIWRAVQQPGKAVAIKTEQQQAMLALHRIRSQLMKFRLMQTNALHGLLAEYGEVMRKGHASLVRNVPDILDRLSGRLPAVLIDSLREQLGEVERTDTRIMDIERRIRELSKNDPGVKAISEIPGVGLLTATAAVASMGNADAFRSGREFAAWVGLVPKQTGTGGKIQLLGISKRGDKYLRKLLVNGAHSVIQNAREPGPWVTDLLKRRPINVTSVALANKMARTIWAVLARGRPYRKEAALN

SEQ ID NO: 144929 - protein, 392 aa, unidentified
MRFAGIDIAAETHFVAVVDEGSAIIVKPTSFTEDAVGYEKLLGLLGQPGDLLVAMEATGHYGQNLFAALAAAGYAVALLNPLRTRRFAGEDLERTKTDAIDAFGIARFAAQKRPVATRLPDSATQELRELVRFRDRLMQDFGDRVRQLHRLVDLGFPEFTRYVRGLDSELASAILHEYPTAEAFLGLPFKRLAKLCYDGRHKVGEEIAKGLVEAAPTSVGRHHGPAYRVQVRCACEDLDLLRRRLREVDSDIERTLKDHEVGTLLTTLDGIGPTTAARLVAELGDISSFQSAAAIASYVGVIPSLRQSGKHQTIRAGLTPHGHARLRAALWMPTLTAVRKNAWLRAYYQGLLRRGKLPKVALVAAMRKLLVAVYFVAKHRKPFLPILAEVHP

SEQ ID NO: 144930 - protein, 316 aa, unidentified
MFIGIDVAKAELVIAVRPSGERWTVANDERGVKTLVDRLVLDRPELIVLEATGGYELLVVAALAAAALPVVVVNPRQVRDFARATGQLAKTDRIDADVLALFAERVRPAVRPIADEEARELDALLARRRQLLEMLQAERNRAGQVFGRGQRVVKKSLKAHIAFLERELRMADTDLGTMVRESPAWRERDDLLQSAPGIGRVVSLTLLADLPELGRLSRREIAKLVGVAPLSRDSGTMRGRRFVQGGRATVRAALYMGALVATRRNVVIRAFYQRLLAAGKPKKLALVACMRKLLTMLNVMVRTNTPWRAPHNTATA

SEQ ID NO: 144931 - protein, 401 aa, unidentified
MNAVGIDVSKGKSMVAILRPYGEIVSSPFEIKHTSSNIQSLIERIKSIEGNSRIVMEHTGRYYEPLARQLSLAGLFVTAVNPKLIKDFGNNSLRKVKSDKADAVKIARYTLDNWIDLKQYSLMDELRNQLKTMNRQFGFYMKHKTAMKNNLIGILDQTYPGVNTYFDSPAREDGSQKWVDFATTYWHVDYVRKFSLNAFVDHYQKWCKRRKYNFSKDKAEEIYGAAKELVPILPKDDLTKLIVKQSIEQLNTASKTVEELRTLMNDTAAKLPEYPVVMGMKGVGPSLGPQLMAEIGDVTRFTHKGAITAFAGVDPGVNESGTYEQKSVPISKRGSSSLRKTLFQVMDCLVKTKPQDDPVYAFIDKKRAQGKPYYVYMTAGANKFLRIYYGRVKEYLMSLPE

SEQ ID NO: 144932 - protein, 365 aa, unidentified
MSKRSIQVQETMYCGIDVSAKSLTVAIQRMHQPVEQRSFPNTSVGHKALIVWLRKAKLPVRVSLEATGIYSLDLAFALDAAEGIEVAVLNPKVANRFAQTIRRSKTDAADAELLAEYARRMPFTAWVAPSPGSLRLRSIVRHVESLSVQSAQNQNRLHAAHGSTSTPGCIVQDLKRSVASLELRIHKLRREAMTLVRQDDLLRKRFELLVSIPGIAQVSAMQLLAELSTSPPDLTVREWVAHSGLDPAHEISGSSVRKASRISRAGNRHLRRALYMPALVASRCDPHAKAFFESLFARNKARLQALIAVARKLLHAIYGIFRSGLKYEGQSCFQGSRCPDPVSCRSASFRQLIQIRLICGHNPGG

SEQ ID NO: 144933 - protein, 434 aa, unidentified
MSKLYDLPVIGIDVAANFSVATVLKPNGDVYKKNFRFNHSLEGFNSFLTLFYKAEEELDSKPKVFFESTGIYHLTLLHFLIDRQIDVRIINPLITNSNKNYNIRKVKNDKLDSFSIARLCKFNDVKTSFFTSKDMLHLKLLVRDYYKIVDLKANAKKAFTNALYVHYPGMQKAFTDITGKTPLAFITKFPTPHDLLNASSDEVLNFLITSSRRGLKWANAKLEKLLSIASDASVLGITPLTFASKVNRFVSTYHFYEKQCIDILDEIKAFINSAPFADEFNHNISLLRSFKGAGFVSAVTLLVEMNDIKNFTKASQLVAFFGVDPSVNESGNFKGDSNKMSKRGTAIGRRALYALALASIRKTKNGVPMNQILYDTYHNKLKGKKKKVRLVAIMNKLLRYIFSVLKNQKPYEVRDPRIHQQMFMSVDKNISEVA

SEQ ID NO: 144934 - protein, 372 aa, unidentified
MADCSEVFVGLDTSKLRNAVAIAEGGRNGEVRYLGEIENAEVATRKLVRRLAASHQRLTFCYEAGPTGYGLYRQIKALGHECVVVAPSLIPKKPGDRVKTNRRDALNLAKLLRAGELTAVWVPDARHEAMRDLVRAREAAVDDLKSKRQQVLSLLLRLGLHYTGKRTWTRTHMRWLAGQKLAHREQRIAFEELLLAVRQAEERVIRLEQAISAAVPEWSLAEVVTALMAVRGLNLISAVIFLAEIGDLSRFASPRQLMAYLGLVPGEESTGDRVWRGGITKAGNHRARRILVECSWSYRHPPRVGKKKLAKVEAAPPAAQAIAWKAEARLTARYRALARRCKRPTLVVTAIARELSGFIWAVSRAVGAPATM

SEQ ID NO: 144935 - protein, 349 aa, unidentified
MTEQRRSYAGECVDVGVDVPKETSTVTCVCHQQIVKTATVQAEPAGLAARLLRWFPGATLYSAYEAGFSAFVLHRVLTTAGITNIVVNPASIAVAAHEKGKTDRRDAKKLASDVADGRLRGLSIPTEAEELARLLPRTRAQMVEHRATIARQIKAKLHQCGLIAPSSRRMISHRYVREIAAWSLAPELRVRLTLLAEQWRCATRQRIERRRLLQEQAAAQAARETVSRSVPGIGAVVARTLATALGEMTRFANERALCSSTGLTPSAYASGASGRRGPMSRQGSGRVRHLLIDTAWRALPRDRVLQAMCDRIAATRGKKRAMVAIARRLTGRIRACFRQGTTYAVGTYA

SEQ ID NO: 144936 - protein, 351 aa, unidentified
METQQITTPKLYIGIDIHKRSWKVHCATDISSGKTFSMNPDPAKLKSYIERHYNGHEVSTAYEAGCCGYYAHRSFEGYGWRSLVVNPADIHRRGKEKHTKTDRIDAQLIARELKDGRLQGIHVPHIEREQLRSLFRRRNDLVKNYRRIKSLIKGLLLNQGIITPLEFDNSHWSHDFRNWLDNLEFAYSPARMTLDSHMRYFRFVDKELRDVSTALRRYCKVHYKKDYILLRSIPGIGGIVACGIICELGDLRRFNNLKQLAGYVGLAPGIYQSGNKLRSTGLTRRAHRLIRSYFIEAAWQAIRTDPVMQDYYRKHLGINVKTIIVKIARKLLSRTLAVIKTGIPYQIGVVS

SEQ ID NO: 144937 - protein, 403 aa, unidentified
MRSVLSIDVANGKSEVLLITEYGEVLIEPYEVKHCLSEFNLLKEKIDSFNLNDLTIFMESTSTYHLPIQRFFTKNNYNVQVINPILGKNNTRNLRKTKTDIEDCYNLADLFFKNTVKIHTKTMNDIYSSMIELSRQEKHLTESLVRSKNRFKQIIANAFPEYLKCFTASDIYGETSLNFIKEFPHADIIKSKRIDALANNIYKSTKGYLPYSKCLNKAKKIKELANNSYPGIDINSCEVKNLINIIEIISYGDAKLFEVKQDIIKLAKQTPYFNIINSIYGVGETSTAQIIAELGDINRFENIKQLNAFCGLDPTIIQSGKSINYNGPISKRGNRNARKILFITCCSIIRASVLHNVDNDLLLYYRKKQAENKHFKECIIACSTKLLRTIFAMCKNNSLYVQK

SEQ ID NO: 144938 - protein, 450 aa, unidentified
MAKTKKGVDFEVVNPHCAGIDVGGKFHVVAIGQSEEETVQFDCFTEDLHRMCQYLVKHGIKSAAMESTGIYWKPLYLMLLSYDIEVLVCNPGYLKSFGKKTDRIDSRWIQKLHAVGLLKGSFHPDNFTDELRELVRHRQILIASNVSHVQRMQKQLVLMNIRLPEVINDLMGKSGQSIINAILSGERDALKLASLADRRCKANLETLAKALTGTWSDQHLFLLSEHYQFYQFTCQKLRVCDQHIEKLLAQEVKKKSTTQTLANYEPKHDKQSAKNNPTFAIDKYAYQLLEGVDLMQIPGISYNILLPFLAEMGACIVRFPTAKHWTSWLALAPNNKVSGGKVISRKTKSKKLRLKNTFLNAASGLHNANCPLGDDFRRLRARKGHSKALTAIARKLAVIVYNLVTKKEAYDPSLNEQKEAQQKQHSIKRIRMQMAKHEITIDDLVLKKAN

SEQ ID NO: 144939 - protein, 393 aa, unidentified
MDEAWAGVDAGKEFHWAHVLDASGTELLSRKVQNDEADILRLIEDALSLSLAEEVLWAIDQPGGGAALLLALLWERDQKVFYVPGLSVDRARDTYRGESKTDARDARVIADQSRMRSDLGELGPGEQEISELRLLLARRRDLITDRSRTITRLRETLLSLFPALERALDLNAKGPLTLLTHYQSPAQLRRAGHKRVATYLRNRGVKGSAIVARKALSAAESQSVILPAQEVASRIVAELAEEVLAFKERIESIDEEIGQRFFARPEARILNSLPGMGPILGAEFLVCVGDVSAFESADRLAAYAGLVPAARDSGKRVGNRRRMRGGNKTLKRVFYQAAFASLRGSTESRVFYDRKRAEGKRHKQALIALARRRVNVVWAMLRDGSTFETRSAA

SEQ ID NO: 144940 - protein, 367 aa, unidentified
MTCFFGVDLHKTQFTVHARTENRVEALDQIIQYPTTNEGYVNFLKRIRNLRTRGYSVKVGVESTGNTRFFKNQVEKAGAEVTVINTLKFKVINESTKKTDKHDASTISEFLSKDMLPESHICSKETENLRRLLKSRERLVRSIVGQKNEIHALLVSMGFSDELRSLQTKKGRQKVLDTLESNDDYVLEAQSVKLMISIIEQMEASVKSVEKQLEELTKDDEMVNRLLTIRGCGNITAWTIRAYTESISRFSNAKKYAAFCGLVPWVQDSNETVHHGKITKHGPQELRTAFVQLVLGIRRCKDTSDWRMMQRYEYMKKNKGSGKSIVAAARKLAEVVWTMLSEKQDFDCRKMKGTYKSPNLVSQALAG

SEQ ID NO: 144941 - protein, 422 aa, unidentified
MDILYERVAGLDVHKDTVVACVRIVADGKTRRECRTFAATTEQLMDLRAWLEECRCTHVAMEATGVYWMPVFRILGDGGFELVLANAAHIKNVPGRKTDMNDAMWIADLLACGLIKASFVPNEAVQELRGLTRTRKQLVREQTRHVQRIEKTLAEANIKLGSVISDIMGASGRRMIEAMIAGVRQPKQLAALAGKQIKASPKELYDALHGRLTDHHRFLLELHLAQWDSIDEMIRKLDLEVDQRIARMDAKAGSKTPFRTLIKLLTTIPGVSAVAAPAILSEVGDDMSRFLTAGHLVAWSGLCPGHNESAGKRKSSRLRKGAPWLKTMLVQCAWAAKRKKDSYYRAQFFRLQAKRGPQKAICAVAASILTAVYHILKHGTEHHDLGAAYFDRRPVEVKASRLVARLKKLGFTVQLQPIAEAA

SEQ ID NO: 144942 - protein, 348 aa, unidentified
MSQSKQYVGLDVSLKETSICVIDDVGKIVWRGRTESTPEAIASAVKQHAPHAVRIGLESGQLSSWLFHGLKVAGLPVICIDARHAKAALSLKVNKTDANDAFGLAQIMRVGWYREVTVKGLDCQAVRALLVARAQIVSQITTTKNCVRGILKTFGRVLPKGLRSQFSGRVRAAIDGDPILGAIIEPTLRVLEAMRAQLLVYNKAVIQRARGDDTARQLMSAPGVGTVVALAYMTGVEDPARFKRSSSVAAYFGMTPRRYQSGEVDHAGRISKCGDAMVRGLLFESAKVLLSRSARPSALKTWGEALGKRIGPKKATMAVARKLAVILHRMWTTGTTFQWNAEAASPAA

SEQ ID NO: 144943 - protein, 346 aa, unidentified
MEYIALDVHKKYTWARVENTEGQRLYESRLAHAHGNIKNFVHRWSAGSPVAVETVGNWYWVVDEIEAGGGKPQLVNARLAKVMMGMVNKSDKLDAKGMNRLQRTGTLPTVWIPSASVRDARELPRTRMVLSEQRTQLKNRVHATLGKYGYVVEGVSDAFGKRGREIVMELMGKLPPHTQQALQRVLDQLDHVAENLKAIEAEMIEVFAPCPQTTLLKTVPGVGEILAVVIWTEIGSIERFSRAEQLASYCGLVPREHSSGGKFHYGSVRRDVNVYLKWAFVEAANSSILNRERCGYDHVSRLYQGIRARRGHNKAKVAVARHFSEASFWMLKKGEPYREPVSSTQR

SEQ ID NO: 144944 - protein, 391 aa, unidentified
MVCVGIDVAKDKHDCCILDSDGTIRADCITIPNNMDGFKQLLQTIRDCTKKSDKIKVGLEATGHYSYNILGFLLDNGLPTYVINPLHTNLYRKSLSLRKTKTDRVDARTIATMLLSDVDLKSYTDTAYHNEELKSLTRYRFDKVRERAKLKQSVSRLVTILFPELEKLVPSLHIASVYALLSEYPGAKQISEIHLTKLTNLLATASKGRYGKDKAIQIRDAARTSIGSVMPAKSLELKHTIKLIRELTSEIDEIEDSIQQIMDELHPPLLSIPGMGIHSAAMILGEIGDFSNFESPDKILAYAGCSPSTYQSGKLTNCYAHMEKRGSRYLRYALYNATKYVCHWNPVFAEYLAKKRAEGKHYNVALSHATKKLVRLIYALQKSGKAYLVAA

SEQ ID NO: 144945 - protein, 340 aa, unidentified
MRALYAGSDLHGNNNLLGIIDEEGKRVFKKKVPNDPQLVRDVLEPYKGEIVGIAIESTYNWYWLVDTLMEEGYQVHLANPSAIQRYSGMKHADDKHDAFWLAEMLRLGILPEGYIYPKEERPVRDLLRKRGHLVRLRTSLVNSLQNILSRNLGLSVVANEVKRLREDRITPLLGESEDLAMAGRVSKETIDFFTHQIRRIEAMVERRMLLKEGYRYLLTLPGVGKILALTIMLETGPIVRFETVGDYVSYCRKVPSEWTSNGKKKGSGNKKNGNKYLAWAYSEASDFARRFYPEPRAYYNRKMQKTNPAVAHSALSHKLARAGYYIMKDQVPFRPEKLFG

SEQ ID NO: 144946 - protein, 370 aa, unidentified
MLYVAIDQHAKQITVVVRNDQGEDVLKRQVSTRREKIDEFFARVMAMDSEFMAILESCGFNDWLLDELRRHGCQEIVLIHPEKPSKRKTDRRDAKKLCDLLWLNRERLAEGKPVHGLRRIYIATQQEKEDRQITSLRQSLGQRRTRVVNKIQRILRRYNLMWDYPTKSFQTKTGKKWLETVSLPQIDRFELNLLLEEWTSIADQIKQVDEKIIERASRSESDKLFNSAQILMTAPGVSHYSGLGLASRIGPVERFPRPRSLANYFGLTPSSRNSGESKDRLGSITKEGSKFARFLLGQRVLHFLKHDSRMRDWYRRIKLRRGSKIARVAVMRRITTIFWHMLTYHEPYSIGGPPPRLREQQASNQRGIAA

SEQ ID NO: 144947 - protein, 350 aa, unidentified
MVVVGADVHKRTHTFVAVDEVGRKIGEKTVKAIAAGHAEAVMWVRERFGAQVVWAIEDCRHLSARLERDLLTAGQQVVRVPPKLMAQTRASARTRGKSDPIDALAVARAFLREPDLPVASHDEVSRELKLLVDRREVLVGQRGSTINRLLWRVHELDPERAPKPRSLDLAKHRRILGDWLATQPGLVAELARDELADIARLTEAINALAKRIGERVGTVAPTLLAMPGCGELTAAKLVGETAAVTRFRSEAAFARHCGVAPIPVWSGNTAGRVRMTRSGNRQLNAALHRIAVTQIRLSGLGQTYYRNRIDAGDSTTEALRCLKRRLARVVFHNLHTDHKNRIQPRQPAAA

SEQ ID NO: 144948 - protein, 354 aa, unidentified
MRLYCGIDLHGNNSVISIIDETDRVMFEKRLPNDIEAILSSLETYRADLVGIVVESTFNWYWLVDGLMDKEYKVHLANPAAIQQYDGLKFSNDKSDARWLAHMLRLGILPEGYIYPKKERAVRDLLRKRGQLVRYRTSNLLSINNLVSRNYGSSVSVRQIRQLDKEGESESKMKMKMKMKMNMNMNMNKNLGLAVNANLAVLRCLDEQIKVIEREVIKCAKLRPEFALLHSVVGIGDILALTIALETGDIGRFPNVGDFSSYCRTVSSERISNGKKKGKGNTKCGNKYLAWAFIEAANFAVRYNEQARKFYQRKSAKTNPVVARKALANKLARACYYIMRDKVPFDNERLFTTK

SEQ ID NO: 144949 - protein, 416 aa, unidentified
MDLVHPRCAGLDVSKRDAKVCVRVAGAGRAGAKSTVTTWGAVTSQVLALRDHLIAEQVTLVVMEATGDYWKPFYYLLEDGPFEVMLVNARHVKNMPGRKSDVSDAAWLAQLGAHGLVRGSFVPPQPIRQLRDLTRTRTTIVRERAREIQRLEKLLEDAGIKLSSVASDISGVSGRAILQAMITGQSDPTVLADLAKRRLRNKIPELTEALNGRFGEHHAFLAQLHLDLIDQHTQAVAELTARIEVTIEPFRRFRDLIVSIPGISTGVADVIVAETGTDMTRFPTAAHLASWAGTCPGSNESAGRVGSTHTRPGNPYLKGALGIAAMSAARSKNTYLSAKYRRVAARRGPIIAIVAVEHAILIAIWNMATNDQPYLEPGGDFYLRRNPDKTKNRAIDQLHKMGYAVTLTPLQPVVGR

SEQ ID NO: 144950 - protein, 313 aa, unidentified
MGHHNIAVAGVDVGKSWLDAAVASSAARWRFANDPEGREALAALLSKLGVRRVGLEASGGYERAIVEDLHKSGFDVILFQPRQVRAYAVYRLRRAKTDKIDAGLIAACAAEYGAVRPRPDPRLQALAEPLRLLEQVEDDIARLKTRREAYRSPDIRAALANEIKRLKLSRTALIKRLRAALAAEPDLAHRFKLIVSIAGIGVRTALTLSIAMPELGTLSREQAASLAGLAPFDHSSGKHDGRRMIAGGRANVRTALYAAALPAAFKWNAALVAFYRRLKAAGKSHKQALVACARKLLTYANVVLARGTPWQLQ

SEQ ID NO: 144951 - protein, 428 aa, unidentified
MNCNTQNAKIASITEKTLIVGIDVGSETHFARAFDWRNYEYTKKPLEFSNTEAGFMMFKAWVEDIAEKQGKTAVIPGMEPTGHYWFVLGKFLQDSGMKPVHVNPHHVKKSKELDDNNPNKNDRKDPKTIAALVNEGRFSYPYIPTGIYAEIRSLSNLRFQTQEELTRIKNRIARWFAIYFPEYKDVYGDLMAVSGRMILKEAPLPEDIRILGVNGVNQIWRNAKLRGTGMKRAKILVSAAEHSVGSKEAPEAARIELKNLLNDMDVYVSRMEELLQTIEEKLKTIPYVDKLMEIKGIGLITVSGFIAEVGDIGRFDNPKQLQKLAGYAIVANDSGKHNGESRISYRGRKRLRYVLYEAAISLVGKNAEFKEIHEYYRTRKENPLKKMQSVVAVACKIIRVFYTILTKGVDYDPMKLMSDIRRPQLQAA

SEQ ID NO: 144952 - protein, 297 aa, unidentified
MTTKSHRSILVLSSIGLDIGKDVLHLVGFDPSGTVVLRRKIKRLTLVKEFEKLPCCIVGMEACLSAHFVSRTLRGLGFSPRITPAKYTKPFLKGQKNDYNDAEAIAEAALRPNLKLVQEKTKDQLDLQALHRVRSRMVSRRTATINQIRAFLIEQGITVRTGARALRNSLFAILQNREDEISPRMSDIIVGLHEDWLWLDERIESTTNEIELISKREGHCQRLMTIPGIGPMISTAMVAAIGTGEAFDRGRDFGAWLGLVPRQYSTGGKPILGRISTQCPQRGISGHPATRRRMAAN

SEQ ID NO: 144953 - protein, 372 aa, unidentified
MNYNQNDKITQITSETLIIGVDIAKYKHVARAQDFRGLGFGKAFYFENTNSGFNHFLDWIQQLMNQQGMEKVFVGMEPTGHYWLNLAHFLIEHRINFVVVNPMHVKKSKELDDNSPTKNDVKDARVIAQLVKDGRYAVPNIPQGVYAELRVARKIRDLLSVDLQAVQGQIHNWLDRFFPEFLTVFKDWEGKSALQLLKLNLLPHELSKLTGKEILMHLRKAVIRAVGLKKITELKEAASHSIGIREGSAMAKLELRTLIDKYELINEKFDELEANIDDLLKQIPGVEQMLAITGIGKDTVAGFFSEVGDLSNYSHPRQIIKLAGLSLRENTSIAICNKLMRILFTIGRKQCEFSEERMLRDIPHMVEVPKVA

SEQ ID NO: 144954 - protein, 417 aa, unidentified
MSEYAALVAIDWADQQHAVCLLDPSTGEREQTIVKHTPAALQEWALGLRQRFAGQPLAVCLEQSRGPLIYALLQYDFFVLYPINPATLAKYRQAFSTAHGKDDPTDADYLLDLLEHHRDRLRRWHPDDQKTRTLRLLVEQRRRLINDRTRICNRLTALLKGYFPQVLDWFEDIRTRLVCDFLERWPELAALQRTRPATLNNFFRSHHSTSKATNQRRLTEIKTAIPLTNDLAVMTSSVLNVKVLVAQMKTVIAAIAEYDRHLEALCLTHQDYELFASLPGAGPVHAARLTAALGSDRSRWPSADELVTFSGIAPIIERSGKQFRIRWRYFCPKFFRQTFHEFAAQSIQDSFWARAYYYQQRAKGKEHHAAVRALAFKWIRVIWKCWQSRTPYNEVIYLETLRKKGSSLLKFAADYRP

SEQ ID NO: 144955 - protein, 355 aa, unidentified
MMRTVYCGVDFHARMQTIAYCDSADGEIHLIQLDHRKDDVRDFYSKLTGQVIVGLEAGGYSTWFEAMIEELGHTVWMGHATEIRRRANWRQKNDRRDAELILEIMLKGDFPKIHRHSRESVEVLRMLRYRARLVKMRTMISNNLQAIAISSGLSERSQMRSRAGQQRLKNARMTPAIRHQSDDLISLLVPLNERIARVERWLKEQASTDERVKLLMTHPGVGLLTALGVVHTLEPFNRFTSQRSVVAYVGLEPMERSSAERKRYIGISKAGSRLLRFLLGEAAHTAVRIDPELKQFYARVGTRRGKSKATVAAARKLLIRCWIMLRNNIDYVEFRNRGVEARLARNMPRPCVPAE

SEQ ID NO: 144956 - protein, 343 aa, unidentified
MTHHVGLDVSVRETSICIVDEAGTIVKEARVPTEPSIIIEVLTTPGIACQRIGLEAGPLSQWLFNELARAGLPAICVETRHMKAALAAQVNKTDRNDARGIAQMMRVGLYRPVHVKTRISQEKRTLLMSRKLLQGQIRALENDLRGSLRTFGLKVGATSAGAFDERVRELVVEHPALAAIVGPLLTARGALRTQFVVLHRMLLKLVRSDPICARFMTVPGVGPVVALTFQATVDQPQRFAKSKAVGAHFGLAPRQHSSGETDYSGRVSKCGDAMMRSALYEAAHTLLTHTRRWSSLKAWGVRIAMRRGLRKATVAVARKIAVILHRMWIDSTEFRWGAEPVAA

SEQ ID NO: 144957 - protein, 311 aa, unidentified
MREIESYVGIDVSKVRLDVYVLPQKEAFVVLQDDEGLASLRERLRALGRSLVVLEATGGLQERAAATLVAAGLEVAVVNPRQVRDFARSRGLLAKTDRLDARIIATFAEVNRPEPRALPDEERAALIDLVGRRRQLVDMRAAEKIRRPQLKPNLRPKLDEHLDWLTTAIEDLDREIGEAIRRSPAWRVEDDLLKSVPGVGRIASAILLAKLPELGKLNRHEIAALVGVAPYACDSGTFRGKRRIQGGRADVRAVLYMATVTATRCNPSIKAFYQRLIAKGKLPKVALTACMRKLLTTLNAILKNASPWKIA

SEQ ID NO: 144958 - protein, 426 aa, unidentified
MRVLYDRVAAIDVHKDMVKVAIRVPGAKRGTRKTDVLEFRTFYGVLQAMARELRGRGVTHVVMEASGVYTDPVYYALRELDFEEVMVINPAHAKALKGHKTDAKDAIRLLDLYECGLLSGSYIPDPDLREVRDLGRYRMKTVQARTSEIQRLQKALETAGIKLSSVVSDVTGGSATAMIEALISGERRGTVMAGLAQTRLRTAGKMADLSMALTGRFTDHHALMCRLHRDRIKVFDDAVTDLDAKIAPLVARYAREAELLKTLPGFGDVIVAGWLGAIGPAPHQHFATASRLASWATLCPGNYMSAKKSKGGRTGDGGAYIKPLLIQAAWAAVRVPGRLQARFRRLVRKFGGPRNKGAQKRAITAIAHTLLKIAYSVLKTGTPYADLGADFYTRRESPDARQDYLMRQLQTLHPGCVITITPAETA

SEQ ID NO: 144959 - protein, 449 aa, unidentified
MSRPQVIDDEEHERIHDKVAAIDVAKDAGVVCTRTPHPSRPGARRSRIWTVKARMNTIRALGRQLHKDGIEIVTLESTSDYWRIWFFVLEAAGLAVQLDGAAQAKNLPGRPKTDKLDAQWLARLTEMGLLRASFVPPKAIRDLRDYTRARTRLVQERTRCWQRLEKLLEGAQVKLSSVASKLTTVSAQDMIRAMIAGQRDPRVLAALARTGMKAKHDELVQALDGMSGDHHGELAQLLLDQIAGLDGKITQLGTRIEQAVTALPDAWGINAGGTTGPQAGTGPDAAVIPAVTRLAEIPGISENLARAVVAETGLDMRRFPTAGHLVSWAGLCPTARQSGPRTRAGKKGQGNTWLRGHLGQAAAGAARTATFLGERYHRIARRRGKAKAQVAVARSILVIIWHLLADPSARYTDLGYGYYQDRTDKDRKLRNHMRQIEALGFTVTLNKTA

SEQ ID NO: 144960 - protein, 407 aa, unidentified
MSRCFAGIDWASEEHACCVVDEQGRIIEGRRYRHDERGIAALCRRLVELKIELVAIERPDGLLIERLLNAGVAVIAIHPNQVAAMRPRFSASGGKSDSFDSFVLAELARTDSHRYRILVPDSDATKALRALTRAREDLVQTRVGLANELRAQLGCFWPGAAEVFADIDSPIALAFLRRYPSPADAHGLGEQRLARFLARHSYCGRKTPRELLDRLRGAAQGRAQALETDARRQIVIALVSALEPIVARISELTAEIRGALADHTDGDTFRSLFKDPKSAIAAATMLAEIGDCRDRYPTRQALSADGGQSPVAVESGKSKRARFRWACDHRLRDAIGTLADSSRHHNPWAKDIYQRARARGCSHPHAIRILGRAWCGVIWRLWQDHDTYDPAQHTALQRLLATQTTTA

SEQ ID NO: 144961 - protein, 326 aa, unidentified
MIFLGIDVSKKKLDAKLLVDPAHVKFKSKSVANTAQGVAELLAWTLRHGGGAVAEVHAVMEATGVYHELAATTLFDAGVRVSVVNPAQLKEFARGLALKSKNDGIDSAVLARYGALLHPAPWQPEPREVRELKALLSRLDAIEADLRRELNRQEKTEHAAIPAEVLESLANSVAFLREEQTRLQQRIKDHIDGHPSLCQDRTLLETIPAVGDKTAFRMLALLRSRSFASATQAAAYVGLVPVEHQSGSSVCKRPRLSKAGNARIRAALYMAAVVATRYNPDIRAQYHRLLAAGKSKMSALGAAMRKLVHICFGVLKHQTPYVAQCT

SEQ ID NO: 144962 - protein, 347 aa, unidentified
MRFYNNMHPYYCGIDLHARTLYVCIIDQDGNICVHKEIPADPNKLLNILEPYIGNIIVGVECMHCWYWIADFCEEMNVDFILGHALYMKAIHGGKAKNDRIDSFKIAKLMRGGNFPLAYTYPKEMRATRDLLRRRMKIVRHGADLKAHVVNTTSQYNLPPNKLNLKNVCAREELKSAFPDIAVQNNINLDMEVLDCYAKQLSKVEIFIEKQAKQHKPIHLHVLKTIHGIGRILSLTIIYEIGHIDRFESVQTFASYARLVKCKAESAGKSYGTQGNKIGNAHLKWAFSEAAALYLRGNKDAQNYLLKLQKRMSKAKALSVLAHKLGRCVYFMIKNETVFDENKFLKG

SEQ ID NO: 144963 - protein, 408 aa, unidentified
MEVIHERCAGLDVHKETVVGCLRVRERGQVRREVRRWATTTAELLELGDWLRQAGCTHVAMEATGIYWKPVWHVLEGEFELILANPAHIRNVPGRKSDVNDATWIADLLAHGLIRASLVPPSPIQELRDLTRTRKQLMREIVQHKQRIQKVLEDANVKLSSVVSDVFGESGRRMLKAISAGQTDARQLAALGDGRLSASRETLAAALQGKVTAHHRFLLSQHLRMIEYLEQTVAAFEARIEAAVEPFRAAIENLVTIPGVGATAAHVIIAEIGVDMSRFAKVGHLRSWAGLCPELHESAGKVMSRRLRHGAPWLKTVLVQCAWAATRNKNNYLHAQFVRLRARRGPQKAIIAVAASILTTAYYLLRDQVAYRDLGSLYFARMDKEQTAQRLARRIKELGYEVEIRKAA

SEQ ID NO: 144964 - protein, 375 aa, unidentified
MVEYSAYVGLDVHKETIAVAVALPGRGSPEYRGEIAARRGSLGRLMGRLSPHGEVLSFCYEAGPCGYGVYREVTEAGHDCQVVAPSLVPRKPGDRVKTDRRDALALARLHRSGDLTPVWVPGPEQEAVRDLTRAREDMKGLELKARQRLGAFLLRHGRVYGGRSRWTQAHARWLEGQAFESPAQQVVFQEYVDAVAQAGVRVASLEAQMREALAGWSQAPTVAALRALRGVDTVTAMTLLAELGDLTRFDSPRQLMGFLGLAPSERSSGSRRRQGAITRTGNGHARRVLVEAAWSYRHPARRTAHLRRKAEAAPEAARALAWAAQKRLCARFRHLSNAGKPSNQVTVAVARELAGFVWAIACEVAGRPHGSRAAA

SEQ ID NO: 144965 - protein, 394 aa, unidentified
MGKLYVGIDISKDRSSAKGIDEHGESRFEISFAMDGTGFAELLKAIRANSDGYGDVTAAMESTACYHINLYSFLSAKGIDTVVINPLLISNFAKLSLRKTKTDKKDAGTIAQFILAHKDSVKQLAVSQDLQDIRDMARERESLSHHISATKVEIQRILQTTFPELATLINPLTKVMLHFIQRFPSARLVSVAKPKVIEEILKEKPCSCRLRFTPKDLIELARKSIATVSPAKEFILSGKIETLLHLEKRCDELSKALTKYCESTIVEDLRIVTSIAGINNKMATTLLAEIGQISNYHSHKNLIAFAGIDPSVYQSGKYEGASRISKRGNRHLRRVIWLMAISVIQHNPIFRKYFMKRRNEGYPFKKAVFATAHKLMRVIFAMLSHRTFFEEQCV

SEQ ID NO: 144966 - protein, 367 aa, unidentified
MTLKHTERRLAMSNCSKLDFTGQHVYVGLDVHRKNWSVCIMTQQFEHKVFSQPPDPSVLVNYLHRNFPGATYHAVYEAGYSGFWIHDRLREKGIDCIIVNPADIPTTDKERSGKTDKVDCRKLARCLRNGQLTGIYVPTRIKIEDRSLIRTRRSMVKKQTRCKNQIKSMLAFYGIHLPTDIVHRNWSSAFIHWLEEIQMERASGNFVLKVHLDELGHLRRIITALNRNIRVLSRTDDYKVNVQLLKIIPGISTYSAMTFLTELCSIDRFQSLDKLASYVGLVPSTDSSGEKEIIKGITNRRNQPLRDIIVECSWIAVRKDPALLMTYERLIKQMPKTRAIVHIARKLLNRIRFVLKNQMEYVPAVIQ

SEQ ID NO: 144967 - protein, 440 aa, unidentified
MRPVEEVTDEPLYRDRVCGIDIGKAEMHVTIRVPSDTNPQRRMSETRAFATTKRGVVALADWLRSWQVPAVVMEATGTYWMGPFFRLEAEGFECVLADARQVKNLPGRPERDPSDSSWLAQCFERGAVRACFAATEEFRVIRLHTRYRRDLINERTREKNRTGKLLETAAVKLSSVITDLHGRTGRDIMDHLIAGQRDPKVLAQLARTRARAKITELEHALEGAEFFTARHARLLKTMLGRIDQIDDQIDELTAVIEELLAPYEEQLQQAEPMPGWGRRSAGDAVAGTGVDITRFATGGHLVSWAGRAPLDKQSGKRKGQARHKKGNTYLGGVLGETAISAGRTQTREGARYRKLARSRGKDKACVAVGNTQLEAYHKLLSNPGMRYQDLGPDHYERQAATRRKISRLVREIEAEGFEVTLCRPEPGPAEDNPAGTRHLA

SEQ ID NO: 144968 - protein, 358 aa, unidentified
MQTKGRTIDFKGQNVYAGIDIHLKSWKITIMLEGREHKTFSQDPSAETLWNYLKKNFPGANYYSAYEAGFCGFHAHREPEKFGVSNIVVNLADVPTTDKEKKQKEDKRDSGKIAKSLKNGELSGIYIPSKGMEELRGMVRYRKTLVKEIARNKNRIKSFLYFNGIEIPIALGTASRHWSGKFTQWLKTIKMATPYGDLVLDETLDTTEHLRGKLLKVNKELRKINCDSGYSNRSKLLQSIPGIALIMSITLLSEMEDILRFKNLDQLCSFVGLVPTTKSSGGKEKVGKITPRSNRFLRGNIVESAWIASRKDPSLAYSFNELCKRMQPHEAIIRIAKKLLNRIRYVMKNEKEYVHSVI

SEQ ID NO: 144969 - protein, 353 aa, unidentified
MQRPEEGQVVIGVDTHKEIHVAAAVDWQGALVDERCFATTRQGYRQLESWARSLGDVLRVGVECSGSYGSGLARHLAKNGFTVLEVTSPDRTVRRKRGKDDFIDAEMAAEAALSGVRTVTPKSRDGMVEALRMLQKTRSTAVAARRAALQMTRAHIVSAPEELRDRLRGMTRMQLIRHLSAIRPDSTDFKSPVGAARMSLKRLAKRYVDLDDEVSELDEMIEAILADAVPLLVKCSCVGPQSAAQLMVTVGDNPERLKSEAAFAMLCGVAPIPVSSGMTYRHRLNRGGDRQASSAIHIIAIGRLRTDERTKDYVARKMAEGHTKMEAIRCLKRYIAREMYYVIKKQRKLVNCS

SEQ ID NO: 144970 - protein, 397 aa, unidentified
MYIVGIDIAKRKHEAAVIDGEGTVIIKPFSFTNNCSGYNRLLAMLAKAKLPLDEVSFAMEATGHYWLALFTRLQKEGFRVQVINPVQTNSIRSFYIRQAKTDPRDALLIAEVIRFGHFSESTLHPENIYELRELCRGRHAIVSMQADVKRKVVALLDQVFPEYETAFTNMFSDTSMAILQTCPTPKELSEMPLEELCHLIEVSSHKRFRMAKAQELQELARNSFGFAMAGDVFSTMIRLYAKHLVFLKQQVQEMDRKIAEIMDTLDTPITTITGIGPTLGAYILSEIGDISRFSSAAKLAAYAGIDPTMRQSGEYNGVRNRMSKRGSPYLRHAIWLAASSAVLHDPALKLYFQKKRDEGKPYMASVGHACRKMVSIIYAVMRDNKAYTPCIPNEISA

SEQ ID NO: 144971 - protein, 368 aa, unidentified
MNELIIGFVGLDAHAESTAIGFAEAGRAAPRFIGTVGPKRSELTKALGRLGEPQSLLIVYEAGPCGYGLARELGALGYRCEVVAPSKIPRKAGERVKTDRRDALKLASLARAGELTSVRIPDERDEAIRDLCRARVDAVRARLKARQQLQALLLRHGRRYTGRSAWTAAHERYLATLAFEHSAQDIAFTEYRQAVGECDTRVRRLSETLAHEVESWRMQPVVGAVMTLRGLDLVAATTVIAELGDLKRFARPRELMGYLGLVPSEHTTGAKRRQGAITKTGNGHVRRVLVEAAWNYRFPARVSRALQIRQEQQPAAIRQIAWRAQLRLSHRYRRLKARGLQHNKICVAIARELAGFIWDIGRHVGPNA

SEQ ID NO: 144972 - protein, 338 aa, unidentified
MSAIKVIGIDLGKSTFHLVGHDYSGREQYRHKLSRSKLLHFISVHEPTLIAMEACCGAHWLARKCQEYGHQVKLIPPQYVKPYVKSHKNDFIDADAIAEAATRPRMRFVSPKTEQAQLGVVIRRIRTGYIRERTATMNRIGSILTEFGFSFPRGHANMKRLFQWLADTGQPVPSLLVFELRDQLSHYNDLNDKIKEQDKKLETLNRDNELFTILQTVPGIGPMTASCCLSSVSDPKDFSNGRNFAAWLGLVPFQYSTGGKPRMLGISKRGNKELRELFIHAARAVLWRDETAQRYFGSWLTDLKLRKPFNVALVALANKLARIAWSVMATKKPFEIRV

SEQ ID NO: 144973 - protein, 377 aa, unidentified
MIAAVRSLVSVNESVLYVAFELGQKDWKLAMTSGFAAKPWLRTIAAGDLAAVERTIGAARRRFGVSASARVISCDEAGRDGFWIHRALQRLGIANRVVDSASIDVNRRARRMKTDRLDAVKLVLKLVRVCAGDQDAWQEVQVPSAEVEAARHQSRERTALIQERTRLRNQVGSWLATCGCRVSRRTRQQPAWWTTVRDWAAAPLPAPVQARIARATVRLAVVDQQIATIDRAQAATAQAAAPASAQARLVRLKGVATTSAAVLLEEGLEWRGFRNRRQIGGLLGFAPAKYDSGASSRDQGITRAGNTRLQAVMTQLAWSWVHWQPQSALSRWYRERFGRGKRARKVGIVALARKLLIALWRYATAGVVPAGAVLKVG

SEQ ID NO: 144974 - protein, 410 aa, unidentified
METIIERAAGLDVHKAQVTACVRVPGRGRERRQEIAEFQTTVRGLLALRDWLRAHRVAEVAMEATGVYWKPVWAILEDEFDCLLVNARHVKQVPGRKTDVSDAAWLCQLLEAGLLQRSFVPPKPIRSLRNLTRYRKAQIGERQREANRLHKILEDTGIKLDCVATDILGASGRAMLDALVSGTTDPEVLAELAKGKLRAKIPALKEALVGRFDRQHALIVSAILTHLDFLDEQIQLLSDEIEAQLAPFAPAVELLCTIPGVQRRTAEAVLAEIGTDMSRFPSERHLASWAGQCPGNDRSAGKRRSGKTRHGSKWLDTALTEAAMAATRTNDVYLGAQYQRLRPRRGHGRALGAVKHSTITACWHMLTTGELYRELGRDYFTHHDPERATRRLVAQLERLGHHVTLGAATA

SEQ ID NO: 144975 - protein, 356 aa, unidentified
MKKDSTQSHEGQVIYVGIDVHKNSWRVTELSDGVVRKTYSAPPSAAALGARLRREYPGAEYRSVYEAGFCGFHIHRELEAQGIANIVINAADVPTSWKERAGKNDTVDSRKLGRELANGSLNPIYAPPPENLRLRDVVRAESQSVKEVTRELNRLKGHLALRGEELPGDSGRALKLRLRQAWRDGDRGTSIRIVKVLNRRAERAAVIREERAVLDELGLWPLLLRVTSVPGVGFRTAVVVLSEVWDMSRFPTESRLASFAGLAPRLTGSGEHERLGGIGKRKHRLLQGILVEAAWVAVRKDAELRGKYRELAFRKTQQKAIVAIARRLLMRIRAVWLREEDYAPRPGVVAEGAAEE

SEQ ID NO: 144976 - protein, 324 aa, unidentified
MNRIIIGVDISKKKFDIAYLATNQKWQRRIFANTLQGFEYFLKYLREEKFQNFHIVMEATGRYGEPLACFLYEKGCHVSIVNPAQIKHYGRSLLKRTKTDKIDSQLITEFALRHDLSLWHPLSPSLQALKEQVRCLEVFKKDVTRASNRLEHAQDFMVKKTLKEHLAFIQKQIKELILTITKLVQDDPKLTRQVTLLKGIPGIGTITALSLLAELPDLSTFKCAKQLAAFAGLNPSIRTSGTSVKGKQSISKMGRDSLRKILFFPAMTLLRSSSPIKPFVEKLRTKGKVGKVIVAAVMRKLLHIIFGVLKRQSLFQEKLCSKTL

SEQ ID NO: 144977 - protein, 340 aa, unidentified
MGDIITIGLDLAKNVFQVHGVDEAGSVVVRKRLRRGQVLAFFAGIPPCLIGLEACATAHHWARELIALGHEARLMPPNYVKAYVKRNKHDVADAEAICEAVKRPSMRFVPLKTAEQQSVLMMHRARDLLIRQRTMLVNALRGHLAEFGLIEAQGLHKVARLITIVMDEMDGRVPDIARQVLKVIVSQIEDIRRGIAELETQVLAWHKNNPVSQRLATIPGIGPIIATAIAATVADPNTFRSGREFAAWLGLVPRQNSTGGKARLGGISKRGDSYLRRLLVNSAHTVLLCSKAAKTDPWLISLLRRKPRLVAAVALANKTARVAWAIMSRRETYRHVAAAA

SEQ ID NO: 144978 - protein, 338 aa, unidentified
MTIVMGLDQHRAQITADWVDTWTGEVSRARVAPADRAGVRRFLERFGDQELEVALEATTGWRFVVEELRRVGAGVHLAEPAETAARRGNKKRAKNDRADARHLRELLMVSRLPESWIPPDHILDLRARVRLRHTLSAQRGEWQQRIQAVLYHHGCPQRRNLMTGEGQRWLAAQPLPACAREQIAVALAMIDALDLQLAPLNKELRAYARRQPGCRALMAHYGIGELTAVTILAELGDAGRFSSSREAVRYAGMDITVHQSDQRRAPGHLSRQGPPALRWALFEAAQSAARAGSPDRDYYRHAADRLGANRACLSVARKLLKRSYHTLRELGEEALQPA

SEQ ID NO: 144979 - protein, 334 aa, unidentified
MTTWILGIDISKRKFDAALSMGEKFKTKAFPNTPSGHRALLEWLARYDADHVHACMEATGSYWEALATFLHDEGHRVSVVNPAQIHAFAKGLLTRTKTDRQDARLIARFCEAMKPGFWQPRPREERELFALIRRLDALKGMRDQERARLQEAHEAVADEIEGHIEGLERAIRELEERIRDHIDRHPGLRDKRDLLASIPGVGETTVHQILSRLSVLSLLGSAKQWAAYAGLSPGERSSGQRQAASSGMVRLGDARLRKALYFPAMVAKQHNPVFQRFAQRLRSNGKRPKQIVVACMRKLLHIMYGVLKSGQRFDPSCYGMAAHTISEMRVARTS

SEQ ID NO: 144980 - protein, 342 aa, unidentified
MNHYAGIDVSLECSSLCVVEANGNISREAKVASEPAALIAWFRSSGFELERIGLEAGPLSQWLFAAMRQAGLAVELLETRHVRKAFEAMPVKSDRNDARGIAQLMRLGWFRPVHCKSMSAQEARSLLTARKLVQSKLRDVENSLRGILRGFGLKVGKTTELKFAGRIEELVANHPHLQVITKALLSVRAVLRTEFAAFEKQTRKMAQSDARTRLLMSTPAVGPIVALTYASAIDDPARFKSSKQAGAHFGLTPKKYQSGETDYTGRISKSGDSSVRTALYEAAHIMLTKPLKGCTQLKSWAMRIARRAGMSKAKVALARRLAVIMHRMLADRTPFNPDAAVT

SEQ ID NO: 144981 - protein, 347 aa, unidentified
MVMIGIDPHKRTHTAVAVDDHETVLGEQLVHARAGQVGELVAWAGTFGESRTWAVESAGGLGYLLAQQLLAAGEAVVDIPATLASRVRLLGTGRSEKNDPNDARSVAIAALRAPVLVPVRAEDHATVLRLLARRHSQIAWARNKSVCRLHALVCELVEGGIAKELVVSQALELLERVEPAGAVARERHRLACELLDDIARYDEQRKASQQRIKTAVIASGTTLTEVFGIGDVVAATLIGHTGDISRFATEDKFAAYNGTAPIEWSSGNLKRPTHRLSRRGNRTMNHALHIAAVTQLRHAHSPGRAFYDRKRDEGHTTKAAIRALKRRISNTAYRHLVADARRATTTP

SEQ ID NO: 144982 - protein, 362 aa, unidentified
MTFFIGVDLHKTQFTVHVRTDEMTETLKQIRQYKTDKSGYAEFIERIQAYRESGACVKIGVESTGNTRFFKHQVEKAGAEVTVINTLKFKVINESAKKTDKHDAATISEFLAKDMLPESYLCSKETENIRRLLKSRERLVRSIVGQKNEVHALLVSMGLKDEQRSLQSKKGRQKILDVLESNNDYVLEAQSVKLIVEIISQMEAAVKVIEKQLSELTKDDQMVNKLLTIRGCGKITAWTIRAYTEDISRFSSAKKYAAFCGLVPWVSDSNETIRHGKITKRGPQELRVSFVQMVMGIRRCKDTANWRIMQRYDYMKTHKGSGKSIIAAARKLAEIVWAMLSNNNDFDREKMYGKYKPAPLAV

SEQ ID NO: 144983 - protein, 391 aa, unidentified
MEVMVETCCGIDVHQKSIVCCILDGPLDTNRPKKQHRTFGTTTKKLREALSWVLSQNVTHVFFESTGQYWIPIFNIFYDSNLTLILANPQHIKNLPGRKTDMNDAEWIAQLGRCGLIQPSYIPCEEVQQLRLLTRRRKTYTERITQCKNEIHNILQRANIKLTSYLSNIYGVTGMNLLEMFIDGEVITEETILPKIHGKIKATTAQLVEAMDGKLSGEDRFLLDQSLDYYRHLVKQLEEITVVIKQYVLERFEREYNLLIELPGVSAIVACVILSEIGPNVEAFQSQGNLASWAGVCPGSYESAGIKKSSHTTQGNKYLKSSLFQAGGTAGRSKDEAFQSLYARISGRSSKMKAIIACAHKMIRIIYKILSTGEHYDTKKALGLRQQARAN

SEQ ID NO: 144984 - protein, 373 aa, unidentified
MPKYSTAFGMDVHLRSTTVCALDADTGEAVTRRFPGNPWGEIAGWMDGFPGPSLAAYESGYLGFAPQRELAGLGVECAVAAVSKIPRSAADSASKNDRNDAARMAKAILAHDISPVWVPSPEVEGIRDLAGAYDGATARLATAKQRLLAFLAKRGFVYGGTTPAGNPRKYWTYDFLRWLDKVRPEDDGGVRALAALRNEVEAAAEARADLLSEYRAAVDASPIAAEVAALQSIKGCAFALAAAFSAEVGDFTRFRSGRQVTAYFGLAPSQRSSGDSVRLGGISGAGNALVRKLTVEGSWCYAAARHQPKLMPRDTGVPLEIRMHGRKGSERLLRRREEMLARGMPAAKANAATAAELVRWLWALGMMCREGAE

SEQ ID NO: 144985 - protein, 322 aa, unidentified
MNIYTDYLGIDISKETFDVINKEGKHLQYCNSNKGFLRFYKVIPKGSLCVMEVTGIYYLCLAKFLYSKGIAVSVVNPLRIKRFSQMHLRRNKTDKADAQLISLYAQKQELELWSPAPVVIEQSKDIYQIMEQYIEFRAGLKNKLDALKSKDAPERLIESIISQIDHMTGSINELQTELDELITGYNPVMLSNITSIVGIGQRTAALLIVATEGFKNFENAKQLCSFFGLAPTETRSGTSVKGKQKISKMGNPLVRKKMYMCSLQASRYNKTCINLYQRLLAKGKPKEVALIAVANKLLKIVFAIAKSGLPYDREYMSYIASR

SEQ ID NO: 144986 - protein, 399 aa, unidentified
MTPDDIDVWVGLDVGKSAHHAHALDHDGNTLYDKPLKQDEKAIRTMLGKLSKHGRVLLVVAQPNTIGSLPLTVARNMGIAVAYLPGTAMRRTAQLLPGDAKTDRRDAHVIAWAALKLPETLRDAGPDDETLAALKLLAGHDEDLAHESTRHVNRLRSLLLQTHPAFERALKGERITRDATLALLERYGGPMGVKRAGIEDVKDWAKSNGLRAGRIIDDMFKAIGEQTVTVPGTLMAETIIPSIAHDIKTIRDRRREVGRQVEKLLEDHPLLTVLTSMPGIGVRTASNILLGIGGDIANFKSSAHLAAYAGISPVTGQSGTSIKGERPSRRGNKRLKNALWQTAFVASTKHPPSVAYYKRKREQGKHHNAAIICLARRRCDVIYSMLKNGTLYQEPALVA

SEQ ID NO: 144987 - protein, 404 aa, unidentified
MPAISGIDWAAEWHDVRVADERSGQLLVEQRFAHDEAGIEALIELLITQRVARVAIERPEGLLVGRLLAAGIRVLAIHPNQVAAARDRFRAAAGKSDRFDAFVICELCRTDHHRFAALAPSGDETIALQALVRTREDLVAVRVHLANQLRAQLDCFWPGAKLIFADIDSPIALAFLARYPSPEAARGLGRKRLAAFLARNGYSGRRPVEDLLDRLRNAPIAAIGELEHEARHNTVAGLVAALAPIVAQISLLTSQIAGAIRTHPDGPIFLSFFRDPKSVVCAAGLLAEIGDNRGRYPTPDSLAADAGQAPVTKQSGKHRAVSFRWACDKRLRNHLGILADATRHWHPWAHDVYHRATTRGCDHPHAIRILGRAWTRVLWRCWQDHTTYDPTRHRAATRHHRHEG

SEQ ID NO: 144988 - protein, 330 aa, unidentified
MKNYREVVGIDVSKKTIDAYCYHAQVHQEFKNDIAGYKSLLKWVLKQTKESAVFYCFENTGYYSLKLALYFHSKKVVYVEESPLKIKRSSGIVKEKTDKLDAQVIAKYGWFYREELMPSTVKSSSHLELGRLLALRDQLVRNNAGLKGTLKEMKVLLTSSTTDLGCISLKRSIDYLSKQVKSIEIRIEEIIFDDVSMSKNYELLKSMKGIGLVVACQLIYHTGNFTRFKSWRAFSSYCGTAPFEHRSGTSIHRRKQCHYLGDRKMKSLLSMASVSAIQHDSELKLYYQKKLAEGKDKMLAINNVRNKLIARAFAVVKRGTPYVVLQNYAA

SEQ ID NO: 144989 - protein, 410 aa, unidentified
MAERFVGIDVALREHRVAVLDRDGEAVGPSFTIAASQDGMAMLLRTLAARAATAAQTLIGLEASGHLWENLEAALVGAGYRVLVLNPLQTRRYRDVVRRKAKTDDIDAHVIAGLIRSGAAQASYVPDEQIQSLRELARLRARLLTDRQDYLRQLIAQLDVVLPEHRRILGDLLSARARGILAQFPTAPHLARANPRTIRRAAEDAGTRGFSLNDAIAVRDAARQSIYSGKAAAARAHVVRTLVSQLERLTSAMDEVDRAATTLLPPSEPGAGPSDAELLQTIPGIGPQTAATLIGELGALTRFTDARALVAYVGFYPVIHESGDRAVPPRLSPVGPRLARHSLYLAAVNAVRRSGAWRTIYLRKKAQGKTAKQALVVVAVKLLHAVYAMLKHRQPYNPSRLLVAPATSRT

SEQ ID NO: 144990 - protein, 523 aa, unidentified
MVTTRRHKRSRSRPQQVLHKPSGAIHHRVQKVGPEHFGIVSVDCAKARSKWMLCDFYGNLLIPPTIVEHNRAGFEAAVAQLRQALPAHGIHDLLVAVERTGRYHRPVQRAFAAAGFEVRIVHPFATKQFRQPSNPDYKTDDTDLVAIHLAAVNGFALVETTLDETWKTLQLLIRHRRDLVFKMSLVCCQVREHLDAAFPGYAACFDKLWESACAWHLVRHFAAPRDIAAAGLAGLCRSLDGAGVRYQCPTVQRVLEWAALAAAPDLAAAQHRAIALALNDDRVRKTQEIMGLERQIAARLVRTPYILLLSFPGINVVSAADYAGEMGPITDYAHHRCITGRAGLRPCRYQSDQVDRPNGPLVHNCNRKLRAAILGIADNLICCNHHFNILNHRWHATGKDPRDIRICVADRFVRISFHMVAGGQVFHHPSVQGRHYILDKLTAFHREHETSGVELLRDLEAAIAQLPPKEYQAEAKPLHEELHKIQQGRRRRPQLLGDILPIVLARLGVGAVQSTASGDDDPH

SEQ ID NO: 144991 - protein, 339 aa, unidentified
MQVTTVGLDLAANVFQVHGVSENGEVAFNQALRRAQMLAFFERLPPCLVGMEACGSSHYWARQLSKLGHDARLIPAMYVKPYVKRGKSDAVDAAAICEAVTRPTMRFVAIKPEEQQGVLFLHRARDLIVRQRTQLSNMLRGLLAEFGIVIAQGIGSAVRFAKGVLDGDKPGIPEVAIDVLGNLSNQLVALHLRVRWYEMRMQLQARQDPRAMLLRTIPGVGPVTASAIVATAGDASQFRNGREFAAWLGLTPLNRSGGGKEKLGRITKMGDRYIRRLLVAGMTSRPRQMKTHPDRVDPWSRALLERKPVRLAAVAMANKTARIIWAVLTRNQHCRPHMV

SEQ ID NO: 144992 - protein, 405 aa, unidentified
MDNTAYYVAGIDVHKRMLAVVVANARDRELQFEGRRFGTTISELQKLSTWLQERTVQEVVMESTAQYWKPVWFELEGQFQLWLAQAPSNRDFRDAKRSVSRLLSDELILSYVPDAEQRGWRTLTRTKYQLRRDRVRLQSQLQSLLEECQIKLSSVVSDLLGSSGQRILRAIAAGETDPARLRGLGDRRLHATDEELRDALNGQPLPLHRKLLTLYLQRLDLIEGQIAELESMIAEAMKAHQDAVVRLSQLPGLGVDSAQQIIAEIGPRAESFPSAGQLASWVGVCPGLQESAGESSSNRSAKGNRAMRRLLNQLAHAAVRKRDSYLQIVFKRLSPRLGYAKAVWAIAHRLCRLIWKVLHEAVQYVEYGPAVSALTLKRRKQRLVTQLAKLGYSVQLTPILARAGS

SEQ ID NO: 144993 - protein, 343 aa, unidentified
MQTIATIGLDIAKSVFQVHGVDAAGQMVVRRQLKRRQVLAFFAKLPPCLIGIEACASSHYWARELQALGHTVRLIPPAYVKPYVKRQKNDAADAEAICEAVTRPNMRFVPIKTIEQQGCLVLHRTRHLMVRQQTATINSIRAYLAEFGIVAPVGRRGVEQLLEIITDASDARVPEVARSCIAALGAQLRQLKAQILELDRRITAWHRSSELSWRLNEIPGVGPLLATALVASITDPKVFRSGRDFSAWIGLVPKQKSSGGKDKLGNISKRGDRYLRSLFTAGALAVIRYAKIHGTKHRPWLVALLARRPTKVAAIALANKLARIAWALMTKGSHYRQPAALRV

SEQ ID NO: 144994 - protein, 342 aa, unidentified
MLHAGIDLHKRTSVVTVVDDAGKDVVVGQRLDNDEAEIREFFSSFDEELNAVLEAGPSWHWMCDLLDDMDIDNVLCHPLKVRAIASARIKTDRIDSGILAQLLRMDFLPESYKPDLKTRQLKDLLRYRSSLVKTRTSLKNRIHALLSQLNVRHGFSDLFGKAGTAFLGELELIPVHRQAMDGYLSVLETIRGLLKEVEAELLVFYQSSEGAQLLSTIPGVGPILSLTIISEIGDIERFGSARQLASFAGLVSTTSQSGDHCWHGHITRHGSPWLRWALVEAVVHTINYPGPLRTSYDRLKKRKGAKIARVASARKLSTYIYYMLKENKEFSEVMAYRSGDLG

SEQ ID NO: 144995 - protein, 342 aa, unidentified
MDHYAGIDVSLERSSVCVVDATGRIIRETKVASEPEALVRFFRELGLPLTRVGLEAGPLSQWLHAGLTGAGLEAVLLETRHVKAALSAMIVKTDRKDARGIAQLLRMGWYRPVHRKSPDAQEARALLAGRKLLQAKLRDVELSIRGILRGFGLKVGEVSKGRFAARIGDLIAGHEMLEAVTGAMLRAREGLRAEFARLHRRMLAIVRGDAVCRRLMTVPGVGALVALTFKTAVDDPERFRRAKAVGAHFGLTPKRYQSGETDVSGGISKVGDASVRTALYEAANAMLTRTSGISALKRWAMGVAKRRGMKRAKVALARKLAGVLHRMWANGADFRWGEEAVA

SEQ ID NO: 144996 - protein, 385 aa, unidentified
MKEQNFVPYEFDIFGGLDVDKKSIAVTFMNHEGVLQSFSVPYRAEHLLSYVSKHFAGQKVAFAYEAGPTGWGLYDRLTAQGHPCVVAAPSMIPKVPGQRVKTNRLDSQMLSEHLRGGQLKSIHVPTEPYRQLRHLTQLRDTFVKDVVAMKLRTKGLLLFEGLEFPPAPAGSQWSYLVRGKLKQLPCSGSVRFKLDRLMESLESSEKQALETIREIRRFCQQDAELSQAIKHLKSISGIGEIVASHLLARTGDPDQITNVRQLGGFIGLAPREHSTGDRIARGGIMRTGDGRLRSKLIQAAWSAIRHDPELREFYRSVSQRHPRDRAARKAIVAVARKLTTRIYAVLKQKRPYVVREKVNSAPLTQEETSPQGTTRRLKEPGEIIS

SEQ ID NO: 144997 - protein, 387 aa, unidentified
MDWSRVTQVGLDAHRKFSNVTGRDSEGRIVCRMRVDHRDRRILREDLALWPRGTPVILEGTFGWGWLCDELEAVGLKPQLACSRKVAGWRDVRGIAKSNRTDADLLSELPSEKSPWWKVWLAPQEVRDQREWMRYRMSLVQMQTRLKNQIHAIMHRHGVVHEFSDLFGRDGRCFLKGLTATRNETLRRSAKATLKGYLQVLAQVRRQIAGATQEIRRQLRKDPDGERLRTIPGIKWILGYTILAEMGRIDRFKSARHLASYALLVPRAHDTGEPDDEPPKGRHVGRMGRRTLKWAFIEAAHGAVRKGGRFREIFDRHTDGGKKNRNRGYITVGHELARVVYVMLSKRVDYMATPPDRPGRTSKRKKRIRRTSRPGTGQPDHPLVVAV

SEQ ID NO: 144998 - protein, 307 aa, unidentified
MFVGIDVSKDRLDVHVLPSDEAFAVARHGEGLDVLVERLRALPAELVVLEATGGYETVVAAALAAGGLPLVVVNPRQIRDFARAAGQLAKTDRLDARIIARFAQAMRPEPRPVPSAAAQALGELVARRRQIVEMIGAENNRRRHLTHKRVLRGLERILAELQTQLSEIEREIDDNVRGTPAWREKENLLKTVPGIGNTIARTLIAEIPELGTLDRRKIASLAGLAPINRDSGTLRGRRSIAGGRRPVRAALYMAVMVSIRHKLPLAQTYQRLRDAGKAPKAAITACMRKLITILNAILRDQKPWQPA

SEQ ID NO: 144999 - protein, 400 aa, unidentified
MYKYFLGIDISKDSFDFCFTDQTEKVLHKDHYLMDIDNFTNLANYLASFSNDEILIVMEATGIYHLNLLSFFLEQGLNVSVVNPLFIHAFTKSMTIRKTKTDSKDAHIISIFAKRNYSSLKLSKSSDLETIKPIVREKDKLTSQISAIKTDIKSIVNQLFPEMLKNTNIFTKSSLNLLLQAPSKRVIRNLKEKKIASYLSCDTKRGAKPKVDTKEILLMAKNSIGINNPSLEKILISKIKQMSFIQTQIDEYNEIIENFVDEYHSDDIDKPTSISGVGKTTASSFITELGEISNFATHKQLTAYIGTDPTIYQSGTSVNVKGSISKRGNSHLRRAIWNMARAATVWNETLKAYYDKKRSEGKTFKQSVIAVANKLIRIIFSMLKNNTKFETNYQTQGVSM

SEQ ID NO: 145000 - protein, 456 aa, unidentified
MAREVGAVMEPQEIEDEGHEQILERVAAVDVAKGSGMVCMRVPDAARPGRRRSLVWQVDATTNAVLELAERLVAERVQKVTLESTSDYWRIWYYLLEAAGLDVQLVRARDVRAAPGRPKTDKLDCVWQAKCTERGLLRPSFVPPAYIRELRDYTRLRTDLTRERTRHWSRLEKLLEDALIKVSAVASSIDLASVRDMIEALIAGERDPQVLASLARGRMKAKHGKLVQALTGRFDAHHGELARMLLDQIDALTVQITRLTIRIGELIAAIPDAQGVDPDGTTGPDAGKAPGSPVLPAVDRLDEITGIGRDAAQVIIAEIGLHMDAFPTPGHLVSWARLTPTTMQSGTRSRTAPAGKGNPYLKGVLGSAVAATARTDTFLGQRYRRIARRRGKLKAIVAVARSILIIVWHLLTNRAARYHDLGSDYYTSRIDKNRKTRSHVRQLEALGYTVTLIPAA

SEQ ID NO: 145001 - protein, 368 aa, unidentified
MGRKSSKLYVGMDVHKDSIDVAVAEEAGEVRHRGRIGGDSNALARAVRKLESQGRPLVFVYEAGPCGFGLYRMLKARGHECWVVSPADTPRRSRDRIKTDRRDSLKLAGLARAGALKPIYVPDAADEAMRDLVGAREDAVIVQRQGRQRLAALLLRNDIRYAGKTAWTEGHRRWIARLTLPAAAQRIAFEEYVEAVEEASARVERYTRAIEQELAHWRWQPVVAALQACRGIQLIHAVRIVAELGDLTRFGHPRQLMAYLGLVPSEDSTGERRRQGSITKAGNSSARRALVEAAWAYQHRPAVSPVIARRQARLPKAATQIAWSAQLRLCARFRRLHARGVNRNKIAVAIARELSGFVWAIGQQVKPT

SEQ ID NO: 145002 - protein, 452 aa, unidentified
MLNMTVARCVHSTDVALRALTAAAMDTGRQSTKRTCLIDDWGVRCGGCRSVEGAGRWALYVPAARTGWLSIELLADRFLHRGVARKRREHDQPESGVPTSVSITEKGFQLMTITIGIDPHKGSHTAVAVDSNEHVLDEIRVRSCSTQTVRLREWADRFEERTWAVESAHGLGYLLAQQLVAAGEDVVDVPPVRASRVRVLGSGKSQKNDPNDARSIAIAALRADDLATVCADDHGQVLKLLSKRHRDLGRLKNKASCRLHALLLEMVPGGAGFRITTVTRINAVIDEFEPTDAMGRQRQDIARDLAGDIDRYNDLLDSSKQRIQAAVAASGTSLTTISGIGPITAAMIIGQAGNINRFKSKHHFASYNATAPVEASSGSKVRHRLNQRGNRQLNWALHVIAISQLRHDTLGRQYFDRKVAEGKTTKEAIRSLKRRISDVVYCHLASDARQQR

SEQ ID NO: 145003 - protein, 402 aa, unidentified
MNCVGIDVSKGKSMIAVMRPFGEVVVSPFEVRHTANELSELAGLLKSLDGETRVVMESTGNYHTPVARLLHDAGLYVSVVNAMLVHDYGNNSLRRAKTDKKDAVKLANYGLDHWLTLPRYIPEEDTRLMLKICYRQYQQYSKVQTMLKNNLISLLDTTFPDANRLFTSPPRADGSEKWVDFVATFWHCECVCGRPEKAFTTQYQKWCRKHGYNFSEDKALDIYASACRHFGVIPKTDTAKLLVEQAISQLQTTSSALAALKQEMQSLAASLPEYPVVMGMFGVGPTLGPQLLAEIGDVRRFHSKKALVAFAGIDAPPYQSGQIDVRSRSISKRGSASLRRTLFLVMSVILQCAPIDEPVYQFMDKKRSEGKPYRVYMMASANKFLRIYYASVKAYLESLEHD

SEQ ID NO: 145004 - protein, 386 aa, unidentified
MQHATTSPAPQRTCSRGDCPTLFVSLELSRSTWVATALAPGSSKMSKHTLVGGDGRKLLDLLARLKTTAEQRIAAPVKVVTIHEVGLDGFWIHRLLEANRIESHVVDPASIAVPRRHRRAKTDAIDGETLLRTLMAWQRGEPRVCAMAVPPSPSEEDRRRVSRERAKLLQERVRHTNRIRGLLFGQGITNYNPLHKNRRKNLEQLRTGDGRSVPAHLKSAILREIDRLELVLRQIGEVETERDEMLQLAEPSSPAALLMRLKGIGAEFATVLYLEGLFRRFENRRQLAAYAGLTPSPWKSGSIDQEQGISKAGHPRLRSTMVELAWMWVRYQPASALSCWFRQRVGSKRGRIRRISIVALARKLLIALARYVSYGEIPAGAVMNAG

SEQ ID NO: 145005 - protein, 389 aa, unidentified
MKYVGIDLHKKTISGCVVVKERGKKKVAARKRLECRDEAGIKSWFSELGKFEVVVEATASYEWFVKLVEPLACRVVLAHPKKLRIIAESKRKSDKLDAQVLAEFLASDEIPLAYRPGPRVREHRALVRWRNYIQRRLTSVKNKLRHILAAYNADVPHLFTVEGREHLATVKLSASDRFVSEQLVAELEQHQQRLVTANRQLREFAATAPLAEREVRVVLDSIPNVGPVTTDVILAELGDWRRFHSQADVACYAGLAPGFRESAGKAKQLGITKEGSRLLRWVMIEFAWRMVGASRKWGGHYHRLEARVGAKKAIVAIARRLLGMIFALLRTGQKYALALESPPPASCRSKSPRDTNPSDPSCLRGQPRQASSLGAGVNYGGPLSVPETE

SEQ ID NO: 145006 - protein, 349 aa, unidentified
MSMYVGMDVHRKRSQIAIIDAAGDQQRNRNVPNDPAELTPILATLAAGTPVAFEAAYGWGWLVELLEELGLEPHLVHPSRCKAIASARLKNDKVDARTLAQLLRADLLPEAWIAPQPVRDLRALLRHRASLVRLSTTLKNRAHAVLADRGIRERPSLWTVPGRAWLATLDLPGTQRAIVDDCCTLLDALTAPIARLEGEIGKLAKPDPRVAALMALPGIGQLTAMTLVAEIGDISRFPSARKLCAWAGLTPAVRNSDRKVRHGHITKQGSVWVRWILQEAAQRGQDPAAVRPHLRPDRPPPRQADRHRRNRPQAAGPLLSHPHRAGGAHHRGGHHRARSHFRMSLQYGR

SEQ ID NO: 145007 - protein, 465 aa, unidentified
MKNKSNVTKKKKQKITINPDWEPINPDAAGIDIGSREHWACVPPNRHAQTVCKFGTFTADLEALADWFSECGVKTVAMEATGVYWIPVFQILERRGFHVVLANPLQTKNVAGRKSDVQDCQWIQRLHTYGLLSTSFRPGDAYCVLRTCLRYRDELIGARSTQCQHMQKALQAMNVQLHHVLSDITGLSGLAIITAILKGERDVVGLAALVHHRVRASQETIQKALAGDYRPEHLFVLQCAFDLYHTYEEKILACDQRIVAEVAQLPQQVDPACKPLPAGKAGRSASANQLAGQDVRLALYEKIGVDLTAIEGIGITTALVVLTEVGPDVSGFASEKKFASWLGLCPDNRISGGKVLSSRTRRVVNRVSDALRLAATSLERSPSALGAFLRRMKARLGAAEAVTATAHKLARLIYRLLKHGEAYVRQGMEDYERKFQEGKLNRLKKTAAAMGFELTAKQPVTLPVS

SEQ ID NO: 145008 - protein, 339 aa, unidentified
MKINVLGMDLGKSALHVFGVDQQGKAVLRQRMTRRKLREFMVNLPPCLVGMEACGGAHYWARVLERYGHEVRLMSPQFVKPYVKSNKNDFLDAEAICEAVTRPTMRFVPIKSVEQQDIQSLHRARELAISHRNAQANQLRGLLLEYGLVVPQGIGTLRGRLPAILEDAENGLTDGTRSLLAALGEELVRLDARVGEFDRQIKALSQGHEVCRRLMSIPGIGPLIATALLAAVGDAAVFKSGREMAAWLGIVPRQQSTGGRAVLLGISKRGDTYLRTLLIHGARAVLRVAHKRDDKRSRWAVALQGRRGPNVAAVALANKNVRTAWALLTRGTTFEVQAA

SEQ ID NO: 145009 - protein, 323 aa, unidentified
MEEGRIQSTVAALEKHFGGEPRMRIALEAGTHSPWMSRWLKSYGHEVIVANPRKIPTLTGSESKNDRNDAEQLARMAAFDPKLLHPIEHRSLERQQDLNLIHTRSVLVRARTMLVNSARGLVKSAGGRLPSCSSEVFPEKVSVAVPGELKAACEPLLKQIAQMNRTLAAMDKQIEGLAKKYPEIALLRTAPGVGPVVAACYVLTLGNPETMETNRQAGAYLGLRPGQQQSGDCDPQCGITKTGNSYLRSLLVQSAQYILGRFGPDSALRCWGLKLAACGKKRGKKRAIVAVARKLAVLLLSMWRNGKKFEPFPQSATQLAKAV

SEQ ID NO: 145010 - protein, 420 aa, unidentified
MLMNIPSQSSYRATVGLDWADQKHDVFVRFANGDSYRRKIDSRPEAIQEWLLELRSTCGEGKIAIALEQRCGALFFQLCTHLSWTDLYPINPHSLASFRKTFFSSRAKDDPVDSQLLEELLRTHPERLRSYQSEPTAERKLDQYCRHRRSLLNLATKTELKLISTLKQYFPLAVHLFGEVGLKSDIALNFLSRWPTLDELRKAKAQTLRCFFYAHNSRSQSLIEERIQLIAQAHSVTDDLALIEPLALTTKCLVAQLRQFNKAINEFDHKIKELFKSHPDHFLFESLPGAGEQLAPRLLSLFGSDRSRWADATDIQKYSGIAPVVERSGKSLWVHRRLARPLFICQTFHEFAQQSTKRSSWADQFYRRQREKGKSHHSAIRSLAFKWIRIIFACWKANKPYDESFYVDAIAKRNFASSST

SEQ ID NO: 145011 - protein, 346 aa, unidentified
MRYSTTVGVDLAKNVIQVSVVSPRGKELLNRSFTRRKFAEFLGKQKPSLVAFESCASAHYWARAAKRHGHEARIIPAKAVAPFRQGHKTDSNDALAVAEAARRPNIKDAPMKTAEQQGLQAIQRSRELLIGECTALSNHLRGILLEFGVAIPQGFASLLRALPEILEDGDNELPDLYRPTLQRMHHRLLELRDDIESMTREVDGLVKQHPVCKRLTAIEGIGPIGALSLYAVMGSGKAFTKSREFSAYLGLTPRQYSSGGKTNIVGISKKVGNRRLRSILIQGALAYVYRMKEPRSLKDRWLRDLIERAGPRRAAVALANKNVRTAWAMVTQGTEYQRREQLEMAA

SEQ ID NO: 145012 - protein, 367 aa, unidentified
MKKVSTAGTARNRKISQQKLSIGLDLGDRSSCYCVLDESGTVVLEQRLSTTAKALREALGGMPRSRIALETGTHSPWISRLLSELGHEVIVAHARNVRLIGESRKKDDRLDAQTLARLARIDPELLGPVKHRSAKAQADLTVIRARAALVRARTGLVNSARSLAKSYGERLRGCNVRNMNPEKAEALSPELQRALEPLLEAIESLSERIAEYNDRIAALAQESYPQVALLKQIKGVGTLIALTFLLTLEDPHRFRKSRDVGCYLGLQPGRRNSGQSQPQMHISKEGDPYLRTLLVQGAQHILGPFGVDCDLRRWGLKLAERGGRNGKKRAIVATARKLAVLLHHLWVSGEVYEPLYNSNRAALPAAA

SEQ ID NO: 145013 - protein, 417 aa, unidentified
MKPIDEGGIGVWVGLDWADEEHAYGLRMSGSSEIETGEVKQTPEALASWINELRQRSGGGWVAIAVEQSRGALLYALMDYDFVLIYPINLKSLSSYRKAFYPSGSKDDPRDADLVLDFLLKHRERIRLWQPQSPEVRCLRLLCEQRRKLVDLRAELTNQWTANLKNYFPQALKWAGPLKGNKACDFLNRWPSLQILQRARPSTIRRFFKSHRGGGSEQLQLQLEEIKQARALTGDTAIVTACSLLTQSLAGQILQLNDSIQRFDAKIEELFNHHPDHFIFSSLPGSGKALGPRLLTTFGEDRDRFECAEEVQTVSGIAPLLRTSGKSRIVSYRWACPKFVRQGVHEFAALSRHWCPWTQAYYQMQISQGKDHHVAVRSLAFKWLRIIYRCWKNRVPYDDAIYMDSLKANNAPLLAFL

SEQ ID NO: 145014 - protein, 530 aa, unidentified
MVTRFKKRKFTGSKKRFIGKPGGQIQQRVQAVGPEHFGIVSVDCAKRRSKWMLCNFYGKVIVEPTTVEHTTGGLRMMTQQAADACRAEGLTDTIVAVEMTGIYHKPVQRAFRKAGFDTRIVHPFASNHYRRPLHPDEKTDDHDLEAIFHAAAKGYGLATLPVGEVYQSLQAVSRHRHNLVKQRSRLMVQMRRLLHQTMPGFADLFEDDKLFHKSIALPIALEFASADAIRHAGVAGIETHLTQTKVRFQTRTIERIVAWAGTAAEPSELAAMHTRQWQQLNEVRQLFDEHVAAAEREMAGFLAQTPYVLLLSVTGINVVSAARLAGEAGPIEHYTSARAINGRAGLYPSRYQSDEVDHAGGALVRQCNRQLRGAAMLVAENLIKCHPYYRGLSALWAQRKVDPRDRRCRIANRAMRMVYQLVGGRQVWRGRGVDRESLLAKLQEFHRVHHTPIEQSIRDLNAAFVWLPKSTYTAEAKPLTQLACRKRRGPQRIGDLLIPLLLRLGLGREELGVPGEETLESTTSEARSSG

SEQ ID NO: 145015 - protein, 430 aa, unidentified
MEASITTVGAVAAYIGIDWADQKHAIALRSATEPNKIEHQLIDQKPEALMDWIGQLEQRFGNQGKVLVCLEQSRGALIFHLMGYEFFELYPVNPLQLARYRETFSPGGAKDDRPDAELLNELLYCHRDRLRALKPDSELGRKLSFFNQGRREAVDQRTRLSHAIKSQLKVYFPLVLELLDQDTSTALAADLLLRWPTLEAIQKQNTATLRKFFYGHNCRGEQRMLDRLELIQKAKALTKDSAVIEPAALRVQMLARQLKNLLPDILRYDNKIAELFAAHPDRFLFENLPGAGEALAPRLASAFGSDPERWQSALEMTTLSGIAPVRRASGMKSGKKGERKASVHFRQACPKFLRQSFHEFAGCSIRYCSWAKAHYDIQRARGKGHHAAVRSVAFKWIRILFACWKKRKPYDPQLYLKTLKERGSPLANAC

SEQ ID NO: 145016 - protein, 356 aa, unidentified
MQLHDALTIPKIFIGLDIHKKSWTVSIQTDLFFHKTYSMPSESEDLYQYVERTFPGHEVHLVYEAGCCGFSVARYFLNLGWHVLVVNPADVKTGDKERYQKTDALDSKNLSHQLKQGVLKGIYIPTEEHEQFMTLARHRTQITKKLRQTKSHIKSMLLFHGIKIPAQFDNSNWSQDFVTWLEELKFSTACGDLALQGKIRLYKFIKSEYLEIANQMRRHCRKNTKKDYYLLKSIPGIGGYLASVIIAECGDLRRFNNERQFSSYIGLVPGIYNSGDSEKCLGITPRSRSQLRSYLIEAAWVAIRKDTEMQLYYRKHHGKNVKSIIVKVAHKMARRILSVIKTETPYQINKNLVLEK

SEQ ID NO: 145017 - protein, 339 aa, unidentified
MSEITTIGLDLAKTVFQVHGVDASGQVVVRRSLRRKQVVAYFAKLPRCLIGMEACATAHYWARELRQLGHEVRLIPPAYAKAYVRRNKHDPADAAAICEAVSRPSMRFVTIKTAEQQAAAGIHKVRDLLMKQRTMLINALRGHMAEFGIVAAEGPQHVKELLAVLADPEEKRIPALLHGALVQFAEALRSLERRVEMLEKQIVTWARGNATCRHLMTAPGYGPILSSAMAAMVTDPSVFRSGRDFSASLGTVPRLTGTGGKVQLGPISKRGNGYLRRLLVNGAMAVLTSKRARQDPWLAKLLASKPLKVVAVALANKMARIGWALMMRQEDFRTAPAAA

SEQ ID NO: 145018 - protein, 327 aa, unidentified
MIQPVLGIDISKATYDVVLQIEEKKSHRQFSNNPEGFKQLGIWLKQNQIKKAHTCMEATGKYGECLANDLYQNGHDVSVVNPARIKAYACSKLRRNKTDKADAELIADYCLKEKPVLWCPPEADFRDLQALERHLEDLQTMVRQEQNRLESGVKTSLVVRDLKGHIHYLEERITETKKAMQDLINANLKLREQRDLLVSIPGIGELTAAKLLGEIRDIHQFDSARQLAAYAGVTPRHFVSGTSVHKKSRISKTGNTNIRRILYMSAISAKHCNQIVAPFCTRLLQNGLTPLQVVCASMHKLLHLIFGILKSGKPFDPNFLQNQAFTP

SEQ ID NO: 145019 - protein, 334 aa, unidentified
MWHVGIDLHRETVVIAAVNDTGEVIKPVSVRCEDTATIVKVVKALGSFRAVIEASATYRWLYDLLQPYGTILLAHPFRLRVMVQRRSKTDKLDAQLLANLLRINQIPLAYIPPEPYQQLRELTRRRARLGRELAAAKIHLRALLARQNRQAPYRVPFGVRGLAWFRGQDFGWIENLVRDELLARLKHYGRQATILDRHLERLADAFPQVEAILDIHGIGLYSALLIVAELGEPDRFRWAKQVGAYAGLTSRVHQSGGHCYRGSITRQGSTWLRWILVEAAIKVIREDAALKNFYTRVRKRSSAKIARVAVARKLAEICWKRLRRWQREHANQAA

SEQ ID NO: 145020 - protein, 351 aa, unidentified
MDRYIGLDAHASSCTAVVLGPSGRKLQCQVLETSAKALISFLQTIPKNRRLIFEEGTHSNWLYEVLAPHVQEIVVVAVRQSRGPKDDKIDAFGLAEDLRIGNVKVRVYKKQGEFATLSHLVRAHNTLVTDTVRCQNRIKSLLRSRGITAGGKQVYSVKSRDQWLAKLPAHAHGQAGLLYQQYDALLELRKRAEKQMLTEARKHAAYRVIKTCPGLGKIRTAQLLPIVVTPYRFANKRQFWSYCGLGIVMRSSSDWVRTQGGEWIKAPIQRTRGLNRNFNRSLKHVFKGAATTVIGCAKKDDPLYQHYQQLLDGGTKPNLAKLTIARQIASIVLSVWRAQEVYDPKKLSPTT

SEQ ID NO: 145021 - protein, 373 aa, unidentified
MMLHSPLPPWVTKPVRELMACNISRLSKARTVAGGVHVVRVTTSYLQGGVMMNASEMIFVGIDVSKDRLELALDDKSKTSNFANDEQGIAALIAAIKAAPDTPGAVVLEATGGFEHSAAVALCMGKLPVMVVNPRQAHDFAKSMGHLAKTDAIDARVLSHFAQTLYHSDKREQLFMRLPDLQEMALHAMIVRRRQLVEMRVAEDNRRLMSPKAQHRSIDAVRELLKKEIGRIDSEVQTQLKTHFANKLKLIDQCKGIGPVTQAVLISALPELGSLSHRKIGKLAGVAPLNCDSGKFRGRRVTWGGRTEVRCALYMATLSAIRYNPVIKVFHARLIAKGKPKKVALVACMHKLLSILNAIFKSGKPWDENYFAT

SEQ ID NO: 145022 - protein, 361 aa, unidentified
MFCERTSVGLDVHARSVVAAAIDGRSGEVFRARLTPAHAEVIEWVGKLPGPCAVVYEAGPTGFGLARALSAAGLRCEVAASSKLLRPAGDRVKTDRRDALILARLLRLDEVVPVRIPNESEESARDLVRAREGARVDLMRVRHRLSKLLLRHGIVYDDGKAWTERHDRWLHHQRFDAAPTQSAFEDAYEAVVLATARRARLDEKIITLAAESEFGPMTRRLACLRGISTLTGFALAVEIGDWERFSGGSIGAYLGLVPSEYSSGTSRVQGAITKTGNTHVRRLLVEAAWHHRSTYRPGVALRRRWDQAPAAARARAHAGNQRLHDRWVGLNLRRKRAVVANVAVARELAGWCWSLAILPPD

SEQ ID NO: 145023 - protein, 347 aa, unidentified
MKRIAVDLAKSVCQVAESVQIGRVDRRKRLDAGAFARYVQEQIEPVEWVMEACGTAHHWGRLMQEKGHRVVLLHPRYVRPYRRRNKTDRNDCDAILEAARCQDIRPVPVKSVQQQQVQQLHKLREGWKKTRVQRINLLRGILRESGVEAPNGIKPFLRQACELIERPEVRALRGALQVVLAEINLYEQSMRECEEQLARWHADDEIVHKLDEVSGIGLLTASALKTAVGKPERFASGRQLSAWLGMTPSEYSSGERRRLGRISCKGNVYVRTLLIHGARAALLAAKRCKARTPERLTQLQSWALQTAERIGHNKAAVALANKLVRICWAVWCHERRFSGNWHSTKPA

SEQ ID NO: 145024 - protein, 482 aa, unidentified
MKKRNIYANQSQEILSLFETAGSSAKVMCVPIDYAKKDHVVMFCNGHGDILRKPFDVKNTPEGIEYLTEQVRRSCRYHRIDENHVFFGGEDVGSYAENFESTLRSGGWLVAGVNAQDAKKQRANLQASTDRLDLMGIAKTLLNCRGNCAPAQSGIYRNLRNLVRHRRRLVAMTTEVSNRMHAVVDRLFPGFLNEKSSGIAPFSKSSLWLMENRFSAPQIRRRRRNTLIEALRRLGTQKPDFIAAKLQEYAQQVLNTPEEYVSTLQLSLSQHVKHYRCLQENVDQMEKEIAGWLGQTQGAFLTSVRGIGIVLAAGVTAEIGDPFEQKPVNNLVSYSGIIPRISQSGGPEGEIYTGKVAKRSNRILKDYVVQSASHLGLHGPDDLMRDHKRRDAAGQHADFGIARRYLRMAMCLMRTSQIYLPSKLRKKGIEPAERAGYYLMTWPYLRNKWRKLGALDAAFSEDRPLGRWRNMIQDLYEIKLSL

SEQ ID NO: 145025 - protein, 353 aa, unidentified
MPSMQLRRDDVIVGVDTHKDTHVAVALDGLGGRVGDIAVPATTAGFAQLLEFCLALVGATGQLVGFGIEGTGSYGIGLARFLRRHGHSVDEIARPARAAERRLAGKNDTIDAEHAARRLLAGEGLSQPKTADGAVESIRVVKIACDGAVQARTTTMITLKATLVTAADALRAELEPLTDHKLVLACAALEVPEPLPPSRRGAPAITVPGNPDAAMRYALATMAKRWLALHEEAKALAASLKVLTHAAAPDLVEAVGIGYDTAAQMLMTAGDNSDRVKSEAAFAKMCGACPIPAGSGKTNSRHRLYRGGNRQANAALYRAVIVRMRWHQPTIDYTARRTAEGLSKREIIRCLIG

SEQ ID NO: 145026 - protein, 320 aa, unidentified
MDAVLGIDIAKAKFAAALLRPDGKVRHKSCANTPTGFADLAAWLLRQQVTHVHATLEATGTYGEALALWLHDAGHLVSVVNPSVIHAYARTQLTRSKTDRIDAELIARFTASHQPAPWTTPAPEIRQLQALVRRLDALQGMRTQELNRLASGVTVAEVRASIETVIASLDAQIAHVHQLIRDHLDRHPGLRAQRELLITIPGIGEATAAVLIAELFDKRYTSARQAAAFAGLVPRLVESGTLRGRTRLSKIGPGRLRKALYMPAMTALRWNPTIRAVRARLHAAGKPPMVIIGAAMRKLIHLAYGVLKSGRAYEPTCAHP

SEQ ID NO: 145027 - protein, 342 aa, unidentified
MTHYAGIDVSLEQASVCVVDANGKIVAEGKVASEPAALLAWFRSLGVELARIGLEAGPLSQWLYAGMTAGGLAVELLETRHVHAAFKTMPVKSDRNDARGIAQLMRLGWFRPVHCKSLAAQETRALLTARKLVQSKLHDVEMSVRGILRGFGLKVGKTTACGFAGRVRELVAGHPTLEVVAAALLAVRATMVRELSGLEKRVRTIARSDARARLLMSTPGVGAIVALTYVAAVDDPTRFKSSKGVGAHFGLTPRKYQSGETDITGGISKIGDPSVRAALYEAAHVILTRPIKGCTSLKSWAMRLAKRAGMKSAKVALARKLAVILHRMWVDGTTFNAAAAAA

SEQ ID NO: 145028 - protein, 339 aa, unidentified
MQLYAGLDLHSRNTYIGIMDREFKRVFGKRVSNDLPLIIKTLEPFQNQLKGIVVESTFNWYWLIDGLMDAGYQGLHLANPSAIKQYEGIKHTDDQHDAFFLAQMLILGILPQGYIYPKKDRPVRDLARKRLFLVRHKTSHILSLQSLISRCCGQRVSANDIRKFTVTDLQQLLAEEHIVLSAQANLETIVFLKQQIQRLEKAITNKVKLNKAFQQLLTVPGIGLILAMTIMLEVGDIGRFPEVGNFASYCRCVSSKRLSDGKSKGHGNRKNGNRYLSWAFTEAAHLSRRYNERFRSYYNRKLAQANTSLATKALSNKLARICYYIMRDQVPFRENLLSQ

SEQ ID NO: 145029 - protein, 388 aa, unidentified
MNKIIYIGMDVHSTNFTLCSFEPGYGFEADKIFGQTQIKEDIFNSTVKYINKLKSMRPDVDVVCGYETGCLGYNLHRKLKAKEIESVILAPTTMAVSRNSSKKKNDYRDAITIAKCLASSAYKAVYIPDEKDEDVRDFIRMRDDHKTALKQIKQQLNAFCLRHGHHYDKTKWTGLHLNWLRKLELSKFQRETVEEYLATYEALTSKIAALDVRIEDIASEERYAEKVNKLKCIKGIKTHTALSFVCEIGDFNRFKSADKFAGFIGLVPGECSSGNTERMLGITKAGNRHLRRLVVEISNTYRRGAVGRKSAALKERQKDMPKDVVAYADKAINRCQRKYQRMMFKGKNSNQAVAAVARELCCFIWGMMTGHHSRTAQAEASVYRSELD

SEQ ID NO: 145030 - protein, 371 aa, unidentified
MEHTRFIGLDIHKERISVAVAESGRSGAVEYLGEIANEPGAISKLCDRLRRPGKPLAFCYEAGPCGYGIHRQLTRLGHRCDVVAPSLIPTKAGDRVKTNRRDATMLARLHRAGELTPVWVPDADHEAMRDLIRLRSVVRQIVTRARQHLQGFLLRHGRKHARGTAWRMAYRRWLSTLAFEHPAQQIALQDYVDAVMDAERRLKRVEEQVFGLLPDWNLRLVVDGLQAMRGIALINAVVLVTEVGDFTRFSNPRQLMAYFGLVPGERSSGETVRRGAITKTGNAHVRRALVEGAWAYRMKARIGRHKVDRIEALPKVVRDIGWKAQVRLCTRYRRLRARGKTANVVNVAIAREMVGFIWSIACTIQSAPRAA

SEQ ID NO: 145031 - protein, 376 aa, unidentified
MNRIIKIGIDVHSTNYTLCALEPVIGAEDRVFANIQVTPDYKNILMFIQNLKCKLGTSDDYSIECGYEAGCLGYSLYNQLTSAGVKCVILAPTTMLTQQGKRVKTDARDALMIAQCLAYGGYHPVYIPTESDDSIKEYLRMRDDHKLALKKVKQQINAFCLRHGYHFTGTKWTSRHIAWLRELELSALYRETLDEYIVSYNEQTAKIERFDNRIEEISNQKEYQQKVKELGCLLGIKTHTALSLIVETGDFKRFSKGNTYAAYLGLAPGENSSGDHVNRTGLSKAGNAHLRRLLIESSRGICKGAIGYKSRELRSRQEGNSVEVIAYADKANTRLRGKYYKMIRHGKKRNVAVAAIARELACFIWGIMTSNIAIVS

SEQ ID NO: 145032 - protein, 339 aa, unidentified
MGVYAGIDLHSTNNYIGIINDTDQRLFKKRLPNDLDVILAALKPFQQDLQGIAVESTYNWYWLVDGLQDHGYRIHLANPSAIKQYEGLKHTDDRWDSFWLAHLLRLHILPEGYIYPKEGRPIRDLLRRRMLLVRQRTTHILSLQSMITRNLGMNLSGSAIKKLTGDDATQLFTDPCLILSARNSISIMRVLQEKIRLIEQAVLSRVTLRKEFAPLLTIPGIGKILGLTIMLEVGDINRFANVGTYSSYCRCVKSERISNGKKKGSGNRKNGNRYLAWAYVEATHHAKRSCPRAHRFFQRKQAQTNGIVAVKALSNKLCRASYYVMRDRVPFDEEKLFGI

SEQ ID NO: 145033 - protein, 457 aa, unidentified
MKRKGKRTRGIEEAHPFSSLSRVNLHAAGVDIGAIEIVACVAGDENTQIVKAFGNYTVDLQALAQWMKDHHVKTVAMESTGVYWIPLFEELERQGLECLLISSRSLRRVSGRKSDISDAQWIQTLHSYGLLEGSFRPQAELVALRTLLRHRSQLVEHRSPHVQHMQKALLQMNVQLPQAVSDITGVTGQTIIRSILAGIRDPQTLASMREPGCKKSEEEIGKALTGTWREEHLFILKQSVALYDFYTQQIHACDEEIERLYGMTRPDWEAGEVQPLSWRKRNSHSKNIPHNSEAIRKHLKRISGVDLSVVDGFGVSLAQTVIMEVGTDMGKFPDDKHFCSWLGLAPKHEISGGKVLKNSTLKTKNRAGQAFRMAANSVKQADCVFGVMYRRLRARLGPAQATVATAHALARLVYRMLKFQVEYEPLSVNEYQKHYEEQQIKYMRKKAAKFGFQLVPA

SEQ ID NO: 145034 - protein, 460 aa, unidentified
MFEEARKMRELCEEFGSKKILVAGVDVSKNKFTIAVMNANYEAKIKPRDVNLNTKSLEKLYAEIDGIVEKEEIEKLIFGCEPSGIYYKPILKELIRKYPDAMFKLINPSSTKANRDQRMEREKTDPIDAYAIADLLIRGECYDIALEDNRFEIIRAYVRELDHLVKELVRLKNQIHAHTDELYPGLESESNSFLESNYGLRFLKSLPEPRVLPKLSVEGWQKLIDTEEYRLPEHLAIKLRDKSNVMVVNKHDNFETLRDYILFFVEGYEQLSNRKEEIGKKLERLIDSLDFGENLKEISGIETLTVARIIAYTGNPYRFKSGKEVVSFAGLIPKSNQSGKLDMNKIISKKGHKKLRTTLVQAAQQVITSTAYFTAYYNRLVLENRKDPMVAIVATANKLTRVITKMIHTGEKFDPPTARDKELAKSKIERLTRKRLNDLHKIKRPDSVTQDTNELYLIRV

SEQ ID NO: 145035 - protein, 355 aa, unidentified
MKSLKYIGMDVHTATISVAVLDVAGKLIMESVIETKSSTILELMHGLRGDLHVTFEEGTWAAWLYDLLKLHVAKIVVCDPRRNALLKEGHKSDRIDARKLAELLRANLLRSVYHGERGLRAVKELVRGYVTLGKDLTRVMNRVKAIFRSWGIPCEGRSVYDPRYRAEWLSKIAEAGVRRRAELYYQQLDALVSLRQQARRKLLAESKKDSAGKWLRSIPALGPIRVALRLGIVQTPHRFRSKRPLWRYSGLGVVTHSSADHRYVEGQRERSKKPVLVRGLDPNHHHHLKDLFKGAATQAATREGPFREFYKALVARGMKPEMARLTLARKMAAITLTIWRKGVAFDASYLKPQTA

SEQ ID NO: 145036 - protein, 376 aa, unidentified
MNKFSNIYVGLDVHKATIAVAVARTGRSDPQYYGEIGNNPGAVRKLLKQLSPDGEVLNFCYEAGPCGYGLYRELKRLGHECEVVAPSLIPRKAGERIKTDRRDGLKLARLHRSGELTAVWVPDEEQEAVRDLTRAREDMKALELKARQRLGAFLLRHNRVYEGKSRWTQAHFRWLETVKFDLAVQQIVLQEYIDTVKELQRRVADLEEQMRDALHGWSLGPVAEALMALRGVSLITAMTTLAELGDITRFNSPRELMGYLGLVPSEHSSGGSRRQGRLTRTGNGHVRRILVESAWNYRYPARKTKVIERRAEKTSKRVQAMAWQAQKRLCGRYQTLMWAGKEKKQVTTAVARELVGFIWAIACEAMGKQHGSKVFA

SEQ ID NO: 145037 - protein, 314 aa, unidentified
MQALKTHVAGVDVHKEILAITVLVGAADEEPVAHHFECSTFTEDLMAMGLKLKEMGVTDAAMESTGVYWKPVFNVWNPLGIKVIVGNATHIKNVPGRKTDLNDSQWIAELHRFGLIRPSFIPDGEFQRMRLLSRHRTNLTNDLSRVKNRIQKVLEDGNIKLGSVVSDVFGVSGLKILELIADGVTRADTLTAAVTTKIKRMEDVKKALTNCLTTEHCFVIAELMTQYRDIRARIEKVEQELYKKVEKYAHLVKELDAIPGIDQILAIGIIAEASTDMNSFRDERAFAAWAGVAPGNNESAGKKKDLTADTVIQD

SEQ ID NO: 145038 - protein, 455 aa, unidentified
MKMCEFYMGVDASKGYSDFVLLDKQKRIVEENFQLDDTFFGHQALCKFLEDFLSQNSGAAIYGGVESTGGYENNWYNLLWKLQERFNINVSRVNPYGVKYHKEASLERIDTDKISAKKIAEYLITYPEKVTYNQEDYFAPLRRHWKVLRLLKKQCAQLLNQLESQLYVAQPQLLRYCSDGVYDWVLQVLKKYPTAEKLALAKTKELSIIPFVTKQRAKELIEDAQKSVASTQGTSMEMIIKSLAQQILNLRKTINDQVKVMISSYDFPEIKIINSFTGIAEYSAFGLLLEIGTIERFSSVKKLASFFGLHPVYKQSGDGTGKMRMSKRGRKEPRWLLFNIAKNAISKNEMIKELYEEYVQRGKSKMSAIGIIMHKILRIVYGMLKNKTMYDPELDKRNRNKKRTKELEEKAITKVDKNRRLQPYDANAPISARQMKKRKMKEVEGEKQDRRRGEK

SEQ ID NO: 145039 - protein, 269 aa, unidentified
MDGHPFVGIDVSKERLDIGVGADGEFWQAANDEVGIRETLRRLSALQPALVIIESTGGLEWPLVSELCAGRVPVALVNPGRVREFAKALGLLAKTDKLDAHLLSTSLSLRHGVQEHVAWLQQGIDQLTEQIQKELQDTPGFRDKDRILRSAKGVGPITSLILLSDLPELGQLDRKKISALVGVAPSNDDSGRRRGARRIKGGRASVRQALYMAAMSAARFNPVIRTFYQRLLASGKRRKVALVACMHKLLIILNAMIRDMTTWQAPLSA

SEQ ID NO: 145040 - protein, 338 aa, unidentified
MNLSRIGLDLAKQVFQVHGVDRHEHVVCRRQLKRAQVRDFFRQLPPCLVAMEACGSAHYWARELRELGHTVRLIAPQFVKPYVKGDKHDAHDAEAICEAASRPSMRYVPVKSAEQQAVQSVHRVRSRLVRARTALCNEVRGLLGEFGLIATRRGRAATMALLETVTATEPAPLPAPMGELLRELKDELQTLEARIARLERQIQAHVRGDARIQRLLAVDGIGPISASAVAASAGDARQFRTGRQFAAWLGLVPRQHSTGGQQRLGNISKRGDTYLRTLLIHGARAVVRCCANKTDARSRWLQVLLQRRPANVVAVALANKNARILWALLSRETCYRPG

SEQ ID NO: 145041 - protein, 358 aa, unidentified
MKTQVREKMSYKGQPVYVGLDVHKKTWKVATCTMHTNPGPWTITIERPFVQKLKEHLDKHYPGADIVCGYEAGFCGYWIHDELNAVGLKTTVLHPADIPTTDKERDQKEDRSDARKIAKALKNGDVKGIYVPSAQAQWDRSLVRERYSIAKNSRRIKVQIKSHLALYGIEIPEEMEGRHWSRNFITWLEKVRDERQDGTLELQIGRLHLMRDLQLKADRDIRSLCRKERNKEVFMVLISVPGVGALTSMLLRTEIVDMKRFSSFRRLCSYTGFIPTKYSSSDKEAPGTITSRRNKHLRTALIESSWVAMKYDSELMLKYEEYRKRMNAQRAIVRIAKILLRRIRYVWMNMQPYKKAFA

SEQ ID NO: 145042 - protein, 356 aa, unidentified
MQTQVTKKIDFSGKDLFIGLDVHKKSWSVTIVIDGIEHRTFTQPPDPGTLNNYLQRMFPGGSYNSAYEAGFCGYGIHRELNSLGIRNIVINAADIPTSQKDKLQKRDPIDSRKIARGLENGSLHGIHVFDRGMEELRSLNRTRFYLMRDLRRSKNRIKSFLQYYGVSIPPEYDNNQWTLKYISWLKQIKMQTMSGQDAFSNLIESYEHHRQQLLILSRMVRLRISQYDNELYSLLKTISGIGPLTSSALITELGDINRFPHIDHLSSFVGLIPRVRESGETIHTGGITFRCNSFLRTLLIEASWQAVRMDPAMMQYYQKHVINNKGHKVIIKVARKLLNRIRYVMKNRQPYVTGVA

SEQ ID NO: 145043 - protein, 489 aa, unidentified
MTDSMVRYVGLDVHKRVVEACILDANGKVVLRQRFELEGPGLRRFAREHLEPGDRVALEATTNCWAVAAVLRGRVAEVVVSNPLATKAIAQAKVKTDKVDAFVLAQLLRCDYLPRVWQPDEATQQLRELASRRSALVGQRTAVRNRIHSVLAMRLLTPPTAKLFSPAGVAWLRSVDLDAQGRLLIDTDLRLAAAIETEIAALDHDLAVRGYRDPQVKLLMTLPGVDVTVAEALVAALGDAGRFADGAHAASYLGLVPSTHQSARHCYHGPITKRGRSHARWMLVEAAQHLDKHPGPLGCFFRRLAKKKNRNVAVVAAARKLVAIAWQMLVTGEPYRYAIPRATEKKLLCLRVKATGQRRKGGSPKGSKSVAKLPGGSRTIRALSGVCQAEGLPEPRPLSAGEKRTVARCGCGAFVDQLANVHVVPRRSGKTPAGNHEGASKSPATCQASMRGFRRLHGGDQGDEAPPPGPPTLFSIPEQGTARKSAPAS

SEQ ID NO: 145044 - protein, 329 aa, unidentified
MDSLYIGIDLHSASFQACAIAADGTRCWEDNFPRTEAGIAAFRARCPRESRVAIEATTPTWHFADAIGDAVACIAVVDPVRTRLKAGYAAKTDRLDARRLADALRRESVVGIYYPPVAIRELRELCRSRHVLVRTRTALVQRLRAVLLRQGIRDAAQRLTRAQGLGWLDTLTLSPEARASVQRTRRVLEVVIAEVTTVDAVVAATAARDPIVTALTTLPGIGPVLGLTIRSELGDVGRFATGGHIASYAGVVPRVDASAGHIRYGRITKQGSPWLRWALVEAAMHGTRRVDAQGRWARRLALRKGALKARLGIARALCDEIWRVWPRGR

SEQ ID NO: 145045 - protein, 360 aa, unidentified
MSEVTRGMIVRVGVDLAKRVIQVYAVDANGRVVTCRALARDKFMTWCARLPRGCLVAMEACSGAHHWARKLIALGLDARLIAASFVTPYRMEGRCGKNDANDAAAVCEAASRPKMRFVPVKSIDQQSVMSVHRLREGIKEERTACICRIRGLLGEFGLVFPQSPKALRQVLPDVLEDASNEMGGMARLALQRAQQQWEELDKHMAWCDERVGAHVKNDTQAKSAAKLHGIGPITASASVASVGDFKQFSSGSQFGAWLGIVPKQNSSGGKVSLGRITKRGDEYLRTLFIQGAKSAVMTAHKRDDPISKWAVQLRERVGWQKAAVALANKNARILWAVMTKGERFDAHHVSVKPPVPTPAG

SEQ ID NO: 145046 - protein, 353 aa, unidentified
MATLTTATPKLYIGMDIHKKNWAVHIRTDISDHKPMTIPPKPEVLYDYVSKNFSEHEVNLVYEAGCCGFSASRYFLNVGWNVKVVNPSDIPTMNKQYYQKNDKFDCRNLSKQLEADQLRGIHIPDENEDQLKSLARQRISITRQLRATKTGIKALLLYQGIELPEQYDKATWTKEFINWLENIEWTNATGKACMQSKLRIFKCVYQEHLTVANELRAYCRKHLKKDYYLLKSIPGIGGYLAAVILAELGDIRRFNKATEFASYVGLIPMMRSSGGTENIFGITPRSRGHLRSYLIESAWVALRIDPEMQSYYRKHVGKNPKSIIVKIARKITNRILSVIKTEQPYVINRNINN

SEQ ID NO: 145047 - protein, 427 aa, unidentified
MTRFATDEFAAFIGLDWADTKHDICLQVAGSAKREFKVLEHRPEVIDAWATDLLQRFQGRPIAIALELNKGPIVEALRKYDGLVLFHINPMMLARYREAFTPSRAKDDPTDAELQLDLLLRHQDKLKPLAPQSPGMRALSQLVEHRRRLVADRVRITNRLTSALKTYFPQVLQWLPNKETQLFCDFLSQWPTLKAAQLARRSTLERFFRQHHVHGEQRINERLEAMKSATALTSDEGIIMPQALLVKALVAQLRATLEAIESFDHAIAERAQHHPDFAFFEALPGAGAALAPRLLVAFGEQRERYGSAAEVQTYAGIAPVMERSGKQSWVHWRCQCPKFMRQTFVEWAAESIQFSFWARAYYQQQRDKGASHQAAVRSLAFKWIRIVFRCWQTETPYNESTYLAALQRQGSPLIPNLEKSSKRGENM

SEQ ID NO: 145048 - protein, 362 aa, unidentified
MGKNTIVGTQNRKKQRLTIGLDLGDRSSRYCVLDQQGEVVSESSVATTRKGLAQAFGSKPRSRIALEVGTHSPWVSRCLKDLGHEVIVANARRVRLIAESNRKNDRLDARTLARLARIDPELLSPIQHRGEQAQADLMLIRARAALVEVRTRLVNCARGMAKSYGERLRSCGTPVVREELSEALSEPLRDALKPLLAEVESVSGRISEYDKRIENIAQSRYPETELLKQVHGVGTLTALTYVLTVEDPQRFGRSREAGAYFGLRPKQRESGGCQPQLGITKEGDAYVRKLLVQCSHHILGPFGPDSDLRRWGLKLAERGGKNAKKRALVAVARKLAVLLHKVWVTGEVYEPLRVGKAHRAAA

SEQ ID NO: 145049 - protein, 339 aa, unidentified
MNIKRIGLDIAKQVFQIHGVDRFEKVLVRKQLRRAQVLDYFKGIAPCLIGIEACGSSHYWARELSQLGHHVKLIPAQFVKPFVKGGKNDANDAEAICEAVGRPSMRFVTIKSVEQQVIQAEHRIRTRLIRARTALSNEIRGLLSEFGIAIGLGITQIRKALPMLLEDKETRLSARFKLLLSELAEELRQIDTHINEHEERLKAAAKEDDRIKRLLAIEGIGPISASALVAAVGDATQFANGRDMAAWLGLVPSQHSSGGKERLGHISKRGDTYLRTLLIHGARSVINHCEGKEDRRSQWVNQLSKRRNRNIATVALANKNARIAWAVLSRRETYLQSVV

SEQ ID NO: 145050 - protein, 461 aa, unidentified
MEIVHRCCCGLDVHKKMIVACLIVLDAAGQRQRETRVFGSMTKDILALADWLTGAGCTHVAMESTGVYWKPIFNLLEGQFEVILANAQHLKAVPGHKTDIKDAEWIADLLQHGLLRPSFIPPAPQRHLRELTRYRSTLVAERARLVNRVHKLLEDTNLKLTTVVTDVTGVSARAMLAALLTGETDPETLALLARGKLRKKREQLAQALHGHLQPHHRFLLTTQLAHLDFLDEQVAHCDSEIQRHITQSIPPAVSAEPSVTATRDEPPPELTPLQATPPSSPGEEAQRAPAASTPLSFAEALTLLDTIPGVNQRLAEIFLAEIGTDMSRFPDDQHLASWVGICPGNHQSAGKHLSGKTRKGDRWLRQALIEAAHGAMRSKDTYLSAQGKRLGARRGKRRAVVAIGHSILVIVYHVLKHKQPYQDLGRNYFDERDRTMVARQSVRRLEQLGYTVTLETPGEAA

SEQ ID NO: 145051 - protein, 324 aa, unidentified
MIDGVLGIDVSKNTLDASMSSCNKVRARSFANSPDGWRHLLDWLITQRVRRVHACLESTGRYSLGIAGALNEAGHVVSIVNPAQIRDFARTKLGRNKTDGVDASHIREYCELFKPQPWAPPSEAHRRLGELQTIRAGIIAGLTEWKNRKNSGMIDAVAQSLADVTISHFISQLSAVDEAITQTIDNDSVLRRKRDLLLSISGVGETLAGVVLAELPGPDVLHSSAEVVAYVGLNPRQHQSGTSIDRVTRISKIGNAVLRAALYMPAMSAMRYNPAIVALVARLKSQGRLKPKQIVVAAMRKLLVLCFGVLKTGKPFDPAIAMGC

SEQ ID NO: 145052 - protein, 435 aa, unidentified
MEEVTDEPLYRDRVCGIDIGKAGLVATIRVPSEKDPARRAAGTRSFGTTKREVLALADWLRSWQVPAVVMEATGDYWKGPFYRLEAEGFECVLADAKQVKNLPGRPKRDPADSRWLAACFERGAVTACFVATPEFRVIRLHTRYRRDLTEERTREKQRAEKLLESAAIKLSSVLTDLHGVTGRDIMDHLIGGEWNPKVLAQLARAAARRKISQLEQALEGAEFFTAEHAALLAKVLERIDRLSADIGDLSQVIERLLAPHEEQLAQAESMPGWGRRAAQDTLAETGPDMSRFPSGAHLASWAGRAPLDHQSGKRAGRSTAKKGNRYLGAVTGETAVAAGRTQTREGARHRRLARRRGKAKACVATGNTQLKVYHKLLSSPGMRYQDLGPDYYERQRDARRQVAHHVGKLGALGFEVTLCRILEPEPDPTGPAQAA

SEQ ID NO: 145053 - protein, 393 aa, unidentified
MILVGIDVASKKHDVLIMKNTGEVYKKHFKIDNDLEGYKKLLSEIESAKEFFNVSSVSIGIESTGVYSKNILYYLSSFNYNIYFINPLLTNMDRKASSVRKTKTDIIDTKAICMFLIRNRSELHPYTLSSYHINELKTLVRIRKSHKKILNMHINRLHALLSEAFPEIYKVFSKVNSKTCLNLLSKYASIGEFKSVRVNTLVKHLISTSRGRSRLELAEEIKQFANNSIGIDSKALSISIKQHVLLVNQTNKLINEVEMLIEENVNSLNTNILSIPGIGYQTGAIILAEIGDINIFKTDDALLAYAGLDPSVYQSGNQDSSYKMSKRGSSLLRWALFQAAKITVIYDPVFRKYHESKINQGKHYFVAISHSCKKLLRVIRSILKNNTVYQISQ

SEQ ID NO: 145054 - protein, 421 aa, unidentified
MDKNDDSRLAGFRQLKREIRGSTRHLVVGIDIAKERHHAFFGTPSGRTLLHRLVFDSNKEGFEKLCFQAEALKTQKGLADLVFGVEPTADYHKPLGEYLIQKGHTVVLVAGTAVKKNRELLDGRWDKNDTKDAANVADLITQGKCLFYDLPSMDLRELRSLLSLKRRLKKSEQGYKVRIRNHLIAQYFPEMDDYFTYKEGPHIVRRCLDPKKLAGLDFQEFARMVPSGNGKQKERLGDIYAKASSSIGCSAHPSVGFEASILLDGLKGLRLTMEETDKRIAEVCMRFPEYPFLLSIPGFGPDVSAQVLGALGDPYRFENHRQVLKMAGLDLSASQSGKRTATTPVISKRGKADLRYGLYHSAVVASTRNPHFMRYFTDKVKGRGKEKGITTKMRTKLAAKLLVIAWTLMKKKEVFDPDCMK

SEQ ID NO: 145055 - protein, 408 aa, unidentified
MNPVVGLDVSKGESQVQAFLDKKKPYRKSFKVDHTRDGLATLHEFLKHLKEITDQNPAIVLEATGHYHAPVVQFLEEHNYLLIIVNPLVSFRAKSSNLRKVKTDAVDAYLLCELYYKEDLEPYKKRGIQLLNLRNLTRHHENITGNFIQTKLQFQAVLEQVFPEYKGVFGELYSFVSLRTLKEYMSSEEILRTSEDRLANRIADLCTSRSEKWAYEKAQTLKAAAARNPFKKTLYQSHLLSMGMYIDMLLQFKEHLSKLEAEIDTLAKEIEEYKIIKSIPGIGEKIAATIISEIGEIDRFNHPKKLVAFAGVDPSVFESGRFTASNNRITKRGSSRLRHALYLAVCCAIRDKRKKKTTDEILPRNKKMREFYDKKRNEGKPFRVAVIACVNKLLHWIYALLKSKTNFQ

SEQ ID NO: 145056 - protein, 457 aa, unidentified
MYRELHSLRQALHHELESTLPPLPGVEPSKLLQTYLDQLTLYVGVDVADQTVTLLALNANQEELGDLPDCPNTPKGHVQVGAWLEHLRVQHHLRIVAVACETTGVFYWGLWDYLATCPNVARVLFNPRTTEHMGEVLSKRVRNELVDALLLAEQLRLGSTPEVLLTEDADLLTARLCSRAARDLAQQINRKKNQLRSLVRGYNPVLLQVFRGGKFHHPAVYALLEHYLLPDEYVTAGVGLLTELLTEHSRSAFGREHAQALVDQCRECLSRPIGRAIIHQRVNDLTTEIRLARTHQKDMLQKGYALIRHRPEAQLLKASTGAGISNTLALVTEVGDIRRFPDGAHVASFLGLTTSKHISGTTIYHAKHITKQGSPNGRYAAVNMALHLSQRVPKYRAMYQAIKSRKPPRKGHFVALVAIARDFVTNVLYDMWRYQRPFFVKVEDYRQYLRNHPRVAA

SEQ ID NO: 145057 - protein, 361 aa, unidentified
MSRMAEIAGPVTGGVDTHAGAHVAAVVDQVGRVLGTESFPAGADGYAGLLAWLRGHGVLARVGVEGTGSYGAGLARFLASQDVPVLEVPRPDRQRRRRRGKSDAVDAVSAAIAALSGEDCGTPKSGNGAAESIRALRVARAGAMKARTQAGNQLRDLITTAPERLRAQLSHLSTPRRVRAAAAFTCGDAADPAEGAKAAMASVARRWQDLDTEITRLEAVLDQLVARVAAPEYLALTGVGYLSVAALIAAAGDNPGRIRTEAAFAALCGVSTVDCSSGKQERHRLNHGGDRQANSALWRIAVTRLRHDPRTQDYYARRTAAGKTRKEIIRELKRYAAREAYRKLIRPGFLQAAAIPSEKAA

SEQ ID NO: 145058 - protein, 412 aa, unidentified
MIKEDYVYVGIDLHKETHTAVMIDCYNNKLGEITFANRPADFPKLVNKVKKSNTDGKAVVYGLENAYGYGRPLAVWLIDKGYLVKDVNTAISHRQAKHRGAMYRKSDSDDAEAIALATLNMLDKLPDACPNDTYWSLGQLVHRRDNIMKQRTRLVNQLHEQLCIAYPSYKQFFNDISRPTALYFWEHYPSRKYLKGKTVVDLREELVPVSHNKCSTKTCEKILDAVASDKVKNNDFQDARDMVTLSIVSDLQHYDRQLAEVDKMLEKMYDMLHCTLTTIPGVSIIMAVKILSEIGDIKRFGNANKLAQFAGIAPLHLSSSGKGKDFATKQGNRRLQATIYFLAIQMVQVSSKGTPRNPVVRAYYEKRKAEGKTSQQALICISRRLISIIYGMLKNGTEYRMPVVENAGEKLW

SEQ ID NO: 145059 - protein, 358 aa, unidentified
MNRIAAQGAGQIIGLIDGRQVVGLDIAKSVFQLHSVDMSTGEIVNMQLKRAKVLEYFANRVPCLIGIEACGGAHHWARELTGLGHSVRLIHAKAVRPFVAGNKTDVTDARAIWLAIQQPGTKFVGMKTQAQQATLVLHRQRELLMRMKVMQINALRGLLYEFGATFARGKNALFSEIEATLESLALDIPQYVADSLREQVQRIKKLVQDIKAIEQRLAQRLRDDEDMKRVAAIPGVGLLTATAAIATMGEAKAFKSAREFCAWLGLVPQQRGTGGKVLLLGISKRGDTYLRTLLIHGARSVLAHAKEPGQWLEQLKARRPDNVVVVAQAAKMARTIWAVTARQQDYQRGHQSTKPQAA

SEQ ID NO: 145060 - protein, 453 aa, unidentified
MSRKRKNNKTKIGAPVLHCLNPNAAGVDVGATEIYLAVPADRDPQPVRHFSTFTEDLHAAADWLKACNIATVAMESTGVYWIPLFQILEARGFTVFLVNARHVKNVPGRKSDVSDCQWLQYLHSVGLLSGSFRPEQAVCTVRSILRHRDSLVQMASSHVQHMQKALDQMNLQLHHVISDITGVTGLTIIEAILAGERNPHTLAALRDGRVKATADTIAKSLVGDYRREHLFTLGQSLAAFRHYQKLIGACDREIAQYLEAFESKEDPPEGSLPKSQDGQKPSDGEPQFDLQSHLYRIFGVDLTCIPGINVLTTQTLLAEIGPDLSQFPSAPAFTSWLGLCPDNRVSGGKVLSVKTRRVKNRAATALRMAAQSLHRSQSYLGHFYRRMRAKLGAPKAITATAHKLARIIYHMVTTRKAYDETFCVQNELQNRQRLEARIRKQARELGFQLVLAS

SEQ ID NO: 145061 - protein, 353 aa, unidentified
MMRILALDLGKYKTVACEYEAETGRHRFATVLTTPKALHDLIVDREPQRVVIEICSIAGWVSDLVRSLGIELQVANTADERWQWRKVKQKNDQRDALKAAQLSAVNQLCPVHVPELAMRQWRALIAYRSKLVQRRTKVKNHIRDLLLREGQVLPRGRTAWTQVGMTSLAAMVKPFSELSADELWRGELGIELAQLTELQQQITIVHAKLDEMGAADPRVQLLRTIPGVGPRLAEAIVTMFDDVTRFTTAGQVGAYIGMVPKQFDSGEMQRSGRITRHGNRLVRSLLVEIAWASLRHNPWARQTFQRISGGKKSRRKIAIVAVGRKLLVRCWGMLRHQTPWRVSVPPAAATGSM

SEQ ID NO: 145062 - protein, 325 aa, unidentified
MALDENEQEVFNKKLRSNKVLAKLATLKRTDDCEVAVESCGMSHYWRRECEKLGYKTVALPPRFVKAYLQGEKNDANDARAIAEAASRPNRQTVRLKSIEQQDLALMVNQREGFVQTRTQFSNRLRGQLAEYGIILPKRVSTILQRVPEILEEDSNALTLQSRDLINRLYQMLRTVDEEVKALDKRLAAQADNNEDSRRLMTIPGIGPITATSLLALIGDVNEFKRGRNLSEYLGLVPRQNSSGGKDRLGGITKKGNTKLRTLLVHGARSALRVAQKRQDRLSLWAQDVAKRRGNNVAAVALANKHARIIWAMLKNKEDYRMTAA

SEQ ID NO: 145063 - protein, 331 aa, unidentified
MKKCHRVGVDVSAKELVVAIEASGRREAPIVFSNDADGHRKLIQRATKRGASAQVVLESTGTYGLDLALALHRAKRVEVMVANPRAIAHFARASLQRSKTDRLDAETILGFAMRMPFEPWSPPAPQILELRALSRRIEAMSKTMVQEKNRLHANDQSEELSEFVKQDIRELAALLECRIVRLRQQALLVIEQSEDLAKAFAHLTTIKGIADASGITILAELAVLPADMTTRQWVAHAGLDPRQYQSGSSVYKPARISRTGNAHIRRALFMPALVAVQWEPHIKAFYEHLLDRGKTKMQANVAVMRKMLHAIHGMLEHDQDFVGEKFFAMNG

SEQ ID NO: 145064 - protein, 359 aa, unidentified
MRYVGIDYHKRYSVLCATDERGQELKQRRISGNSATGFAQFFSELGEESKVVMEACWNWGWLYDLLAKIDGIDEVMLAHPYKTRLIAEAQIKTDRLDAQMLAKLLRGDLIAQSHAPSAATRARKHLLRQRLFWVRLRTMLRNGMHAILDRQQGLERPQLKNFFSRRGQTWLEEVQLPCAEDQPLLTQDLEVAELLEEKIKQLDRSIGQSQSEEEKLLESIPGIGPLFSSVIATEIDGVGRFNSATKLAAYAGVVPTTHASGGRVFNGRLLWQCNKWLRWALIEASWSAIQFSGYFGSIYRCARARGKNKNIAITMVAHRMIKIIWLLLTERRPYTETLPDRSEDGMTVVVRRKVLGLAS

SEQ ID NO: 145065 - protein, 316 aa, unidentified
MKTYIGIDISKDTFDAATSSQKQSVTFKNSPAGFKKLIKWLGELDTPHIAMEATGKYYLGLALHLYEQGYPVYVINPYKIKHHAQSQLKRVKTDSEDAKLIAEFCEVHTLKPWQPDSPVISKLQEFSALQDLLIRTKTCFKNQMQSTLDPEVQKSQKRQIEQLEEQIEQVQLQMKVCVEQDIDLNKQVELLTTIKGLGEKTAIELVTHIKDIDRFDNAKNLASYSGLVPQIQQSGSSLNRSSLSKMGNVNLRKCLYMPAINSMAYNPVLKSFADNLRKRGIAGKKIVAAVMRKLIHLVYAILKSGKPFDPEYKIRA

SEQ ID NO: 145066 - protein, 346 aa, unidentified
MLHAGLDLSRKRLDFCLLDESGERIEVGATPPDADGLRSLAQRLARHDQPVQAAIESMNGARFVHDQLELAGWQVEIADALKVKGLAPLACKTDRIDAWVLAELCRRDLVPAIWLPDPSVRAERERARFRLHLVRHRSSLKQRVHAALLAHGMPCPVSDLFGVSGRALLERLALPEPWSGTVAASLQLIDELDRQITTCEAELRRLGADHHYVPLLMTVPGIGWVLAYTIAAEIGDIARFPAPRQLVGYTGLCPRVYQSGNSDRRGPLAKNGPRYLRWALIEATAHASKHPLYRDRYQRTKTRLGKQRGGKVAQVDLARRLADAIWHMLTRDQPFAPAGATDPLAA

SEQ ID NO: 145067 - protein, 345 aa, unidentified
MPIVGGLDIHRKQLTFDYLDTVTGEVRRGQIAPADREHLRFWLARFAGRDDVSFAMEGCTGWRYVAEELSAAGVAAHLAEPADTAAARGRKRHAKTDKTDSRHLRTLLAEGRLPECWIPPGHILECRALLETYHDLRTEHTAWVQRIHAVLFHQGVPRLGEEALRTERGMAALRAAAAAHLSPAGQLQVATALDTIAALEARMDVVRKQVLAAARHLTGAKALAARLYGVGPVTALALTCWLGGADRFSSSRKAVRFTGLDITVWSSDRKGPPGRLSRQGPPVLRWAVYEAGKTHARAAAPDHGYYAAVKDRKNGKRAALSEARKIVRQACHILAELGDDALTAA

SEQ ID NO: 145068 - protein, 347 aa, unidentified
MSITMIGLDTAKSVFQVHAVDAAGNAVIRRKIQRKDLITFFEKQEKCTVVMEACGAAHHWGRTLTGLGHDVKLIAPEAVKPYVKKGKKNDAADAAAICAAAVRPDVKFVPIKTVEQQAILALHAARSLLEKQKTALANSIRGLATEFGLTVPKGVENIEGLVVEVQADESLPVELRQAVKEAHEQFLEANGHIEKLEKKIVHHARTDDTARRLATIPGIGPITASLIAASVVDISAFKSARHFAAWLGLVPRQHSTAGKTRLGRITKAGNSEIRRMLVLGATSMIRHAGQWNSAAGAWFRSILERCPARLATVALANKNARIAWALMTRNEIYRPSGNGAAAAKAAA

SEQ ID NO: 145069 - protein, 333 aa, unidentified
MVEGTEGSHHKEGSKKMSKDSMVCAGIDTGKHKLDIAVEGSAERLQIDNSAESHPALSAWLRRCGVERIGIEASGGYEQAVVSTLRAAGFHVIVFQPVQVRAYAKFVLQHAKNDGIDAALIARCTAAATDIHEPTDVRLAPLAQHLTMIEQLTADVAQLKTRREACRNQRIQAFWKQEIDRLKRLLQAELKQLVLAIREHRDLADRLDLIASVDGVGLRTAVAILVRMPEIGRVSREQAAALAGLAPYDDDSGLRRGPRHIKGGRQRLRQSLYAATLPAVFYWNAQLKAVYKRLIAAGKTHKLALVACARKLLIFVNTVVARGTPWTSPPATT

SEQ ID NO: 145070 - protein, 366 aa, unidentified
MKKISTVRVKGNMIFKGHKLTIGLDLGDRWSFYCVMDEAGQVILEQKLATTAEAMKQTFAKIPRSLIALETGTHSPWVSRRLGELGHKVLVAHAQKVQLITKSTRKDDRHDARTLARLARIDLELLGPVRHRSAQAQIHLTVIRARAELVRARTALVNAARGLVKSYGERLPKCGTQQVNRELAAELSVELREVIEPLLQEIESLNERIQEYEVRMEKIAKESYPQVALLKQVKGVGTQIALTYVLTLEDPQRFRKSRDVGCFLGLRPGRRNSGQSEPQKHISKEGDRYLRTMLVQGAHYILGPFGEDSDLRRWGLKLAERGGKNAKKRAVVAVARKLAILLHRLWVNGEVYEPLHNSQQAMRAVA

SEQ ID NO: 145071 - protein, 346 aa, unidentified
MKVKTIGIDLAKETFGLHGVDGCGRVVVHKRVTRKNLLGFLVKVEPCLVGMEACGSAHYWAREIEKLGHTVKLMSPQFVVPYRKGNKNDPNDAAAICEAVTRPSMRFVPIKCEEQQDLQALHRVREQLIKNRTALANQIRGLLRERGIVVAQAIARLRRALPLILEDASNGLSGVMRELLGEMAERLRMLDDCLRPYDQRIERLCQQDERCRRLVKVEGVGPLVATALVAAIGNARQFKNGRELSAWLGLVPRQHSSGQRTVLLGISKRGDRYLRTLLIHGARAAARVAERKGDARSIWLSRLKLRGGPNVAAVALANKNARVMWALLARGDSYRVRKVMHSEAAA

SEQ ID NO: 145072 - protein, 424 aa, unidentified
MLGVGIDWAETFHVVALGRPGEGVVQVLRVEHSKPALEALLEQLRALEPDPGEVRVVLETRHGLLVERLVEAGFVVVPVNPDLIARRRGPAKKKDDVEDARIACLLALDRFQPLRPLIPHGELAAELRLLGRDDERACQDERRLLNRLRADLLAVFPAAVQIAGPDMGAPTFLRMLQRWPTATALAATSRQELVAFARAAHSGYPERFADRVGQALGREHFTARQTLAQAKVDTIQLAVAQLLLIGAQRRTWERRMGQLLLGAPRRRGGALPSQAERDRGRAVPGGEIYLSFPGLGDRLAARIAGEIGDHPEQFQTPNSLQCYAGQAPVTRRSGKRELLITRRLACNRHLADAVHKWAFASLRRSIWAKDYYDSQRDRGKDHHAALRALGNRWLEILWHCLQRQVPYDEAVHLANRTRALHPAA

SEQ ID NO: 145073 - protein, 350 aa, unidentified
MFCAGIDTHKDFHVLVIADELGREIYHESFSADEQGICSLTSALSNAGECIVCGIEGTGSYGATLAAHLLAEGFPIVEVSRPKRSRIKGARDKSDHRDAHRAALRALAGEGVSVKPRGGDAQAVQCLLAAYKRLRDTCTSLSNCICALIVSAPEPYRARFAGLKGTKLMDAIARTRVGAGGKSEAQQATLTSLKTLERTWRTAHEQAEKILSQMEAIIVDHAPALLDIFGVATVTAAEFIALGGENPSRIKSESAFARAAGAAPIEASSGRVVRHRLDRGGARSANAALHTVVLCRMARDERTRAYVERRTKEGLSKREIMRCLKRYVCREIYRVLCAEERRRNQQKEAS

SEQ ID NO: 145074 - protein, 465 aa, unidentified
MKPNRRLPRKKPVAGPSLLERLNPNAAGIDCGADTHYVAVPADRDATPVRAFKTFTTDLHRLADWLTTCGVTTVAMESTGVYWIPLYEILEARGVDVVLVNARHVKNVPGRKTDVVDCQWIQELHSVGLLRGSFRPTAAIAALRAYLRHRETLVQSAATHVQRMQKALVQMNLQLPIVISDITGVTGLRILRDIIGGQTDPHALAQHRDHRCQASEAEITAALTGHYRPEHIFVLRQNLALFDAYQGQLAVCDAAIEAHVLTLAAQTPAPSGLLPAPRTRKKPRDNEPRFEIRTPLHQLTGVDLTQIDAIGPYSALRLLSEIGTDMRRWPTEKHFTSWLTLAPHNKISGGRLLSSRTQPSANRAAAILRMAAMNLGRTDTALGAFYRRLAYRVGKAKAITATARKLAILVYRTLRDGLVYQDPGAAAYDAQHRVRVLHRLRQRAAHLGFSLLNRETGELLEGAVS

SEQ ID NO: 145075 - protein, 356 aa, unidentified
MNKISKLDFEGQQIYVGMDIHKKSWSISVLTDEFEHKTFTQPPEVSTLVNYLKRNFPGASYKSVYEAGYCGFWIHDCLQEHGVQCLVVNPADVPTKDKERRKKSDRVDCRKLAKSLRSGEIEGIYVPCRPKVEDRTLIRTRHSMVKKQTRCKNQIKSILQFYGIQIPEELADSHWSKRFITWIEAIRMQRASGNVALKAYLEELNNVRKIIADLTRSIRSLANAEEYRQNVCLLKSVPGISILTAMTILTELYEISRFKNLDKLCSYVGLIPDTNSSGETDRDMGITKRRNAQLRGILIESAWVAVRKDPALLMTFNTLCKKMPKNNAIVRIARKLLSRIRYVLKNQQKYVSAIVQ

SEQ ID NO: 145076 - protein, 397 aa, unidentified
MSTGDPFVYPNEGTVQMIVLGADTHKRSHTVAAVGELTGRVIADTTVRATQRAFEQLLVWARGLDDRDRVWAIEDCRHVSGALERFLLAHGERVVRVPPKLMAGVRTSSRERGKSDVIDAVAIARAAIREEVGTLPVAQLAGPELEVRLLVDHRERLVGQRTALINDLRWGLHDLWPEFEIPPRALIGPGWQDRVARRLSRAEQTARVRIARDELRRIRELTRSTAALEAELAPLIAQLAPGLLAERGCGVLTAAKLIGEIAGISRFATDAKLARTAGSAPIPASSGRTDRHRLDRGGNRQLNCALHRLAISKARLDPETAAYLARKQAEGKTRREALRCLKRHLARRIWRLLQPPAEPSAGQPASPPATQQPGTMIHCNTPHERFALTYRGAEDRP

SEQ ID NO: 145077 - protein, 351 aa, unidentified
MKTQQTATPKLFIGIDIHKRSWKVHCSTDLFSGRTFSMSPDPEGLREYVERHYPDHEVSTAYEAGCCGYRAHRCFEGYGWCSLVVNPADIFRRGKERHTKTDRIDAQLIARELKDGRLEGIVVPDPEREQLRSLFRRRNDLVKDMRQIKSYIKMQLLYYGIKVPERYDNDHWSHGFRDWLDGLDFEYDTGKEVLESRMRSFRFIDREFRDVSTQLRKWTKKHYKGDYMLLRSIPGIGPIVASGILSELGDLRRFGNIKQLAGYVGLSPGIYQSGDTIRHTGVSMRAHRLIRSYFIEASWQAIRTDPVMQGYYRKHQGKNVKSVIVKVARKLLSRTLAVIKTGIPYEIGVIA

SEQ ID NO: 145078 - protein, 349 aa, unidentified
MVEERSYKGKKVFVGIDVHSKKYVCAAVCSDAVVKQWTTAPDNESLVSQLKRNFVGAQIYSAYEAGFSGLSLHRALLKGKIKNIVIHPGHLQIRANDRVKTDKRDAKKIAKQLSTRDLKAIYVPSETEEAKRSLSRGRANAVRRVTAASNKLKMKLYYLGLEVWKTKISETYLKKLESLNLPHEHKFAISELILEYREAKACVKRFDNELAKQATTDKLEAIYRSVPGVGKTSSRVLSNELGDMSRFDNVKQLYSYLGLTPSEYSSGEHVRKGRITRQGPARNRSVLTEVAWRAISKSGVLKSFYNRLARKRDSNRAIIAVARKLAGQIRGCLLRNELWNESKMILNNV

SEQ ID NO: 145079 - protein, 367 aa, unidentified
MKKVSTVAAAQSRNILQQKLTVGLDLGDRNSWYCVLDESGQIQLEQRVRTNAKALREVFSEMPRSRIALEIGTHSPWISRLLSELGHDVLVANARKVRLIGESRKKDDRMDAQTLARLARLDPQLLSPVKHRSAKAQADLMMIRARAGLVRARTGLVNTARGLAKSYGERLRGCNVRNMNPEKAEGLSPELQRALEPLLAGIETLSERIAEYNDRIEALAQTSYPQVELLKQIKGVGTLIGLTFLLTLEDPHRFRKSRDVGCYLGLQPGRRQSGKSNPQMHITKEGDPYLRTLLVQGAQHILGPFGIDCDLRRWGLKLAERGGRNGKKRAIVATARKLAVLLHHLWVSGEVYEALHNSSPTTVRAAA

SEQ ID NO: 145080 - protein, 416 aa, unidentified
MSGKREIACGVDVHNKFIVATILSSDGLKLQNRFETSLEDLLKFKNWLKENGCHKVALESTGNYWLPIYHVLEGSANFILANAYQIKHIPGRKTDSLDSEWIAELCLKNLISPSRIFTKDHRELRSLTRARESLIKIRTKIKNRVTHELEAACIKLSSVIADVFGKSGRHIVDGLINGMDLEKILESIPSGRVRKNKEEIRGIIQANLSPSQIFLLRSHLNMIDAVTEQIGEIDAKILDQISPRNEDMKIALSMPGMGFISASTILAEIGDFRDFSSANKLAAYCGLVPSVYQSAGKLINGHITKHGSPHIRRIIIEVAHAIILTKKLSKLKKFFLRIKARRGAKIGIVALARKVLCILYHLLVRRELYQDDLLSKPRCIKNPRLHPKTAMDLDEMIRTIIKAGYEVRKNECLESG

SEQ ID NO: 145081 - protein, 348 aa, unidentified
MVDVGVDLHKNYSQVAVLDAWGEIRQEHIEHQGRDMEEFVRKLEPGSRLAVEATGNWWWFVDLVESQGHQVVMSNPKETKAIAHARLKNDRVDAEKLAILLRSGFLPQVWIAPAPIRYAKEVLRYRSLLVGMRTKLRNHLGAMLRKRNRQAPGQKLWGRKGRAYVESVALNPEADQMRGEALEQIKALDRLIGGWDQALRRRAQGDPLTRRLMSVPGVGEQTALAFQTFVGEVERFASAKKVASYFGLAPRERSSGNRRQLGHITKEGDSLMRHLLVEAALIATRRPGPLREFYRRLLRHKGKAKARVAVARKLTEILYQLWKQGCDYHGYLLRGLRTVGEPVIRTGL

SEQ ID NO: 145082 - protein, 355 aa, unidentified
MSKTNPVKIIIGVDTHKDIHVAVAINGIGAHLGTLAIPVSPKGYQNLETWARAFGSIHAFGIEGTGSYGAGLARFLQAKGHTVVEVNRPNRQLRHQNGKSDPLDAESAARAVLGGQANARPKSADSSVEMIRHLKVARDTAVKSRTQAMVTLKTIIINAPAALRQALDRIIGKMALIRHLAARPGPILSVTASAKGALRAIARRWLTLDAEIRAHDADLEALTASCVPAMLEAHGISTGTAAEMLILVGDNPERIRSEAAFAKLCGVCPIPASSGKTNRHRLNRGGNRQANAALYRVVIVRMRNRQPTLDYVKKRKADGKGKMEIIRCLKRFVAREIFGYLCGAQRSVPSISKAT

SEQ ID NO: 145083 - protein, 364 aa, unidentified
MYYVGLDVHAKRSSLSILDANGKLVKHLEVKGSWQKLLEVVDAQVPKPFAICYEASCGYGYLYDQLGRRAERVSVAHPGQLRLIFRSKKKNDRVDGEKLAKLLYLNEVPQVYVPGLDVQSWRGLINYRRKLVGRRAAVKTQIRAHLRGLGQLAPATGGLWTKKGIKWLREQAMSATDGLRRDIMADDLDGLEEKIRKVEKELNKIAKSHPGVMLLMTIPGVGVRTAEAFVAHVDDVTRFARTKQVGSYFGLVPCQDASADRNRLGHITKDGPAPVRWLVAEAAWQGRRRSARIRGFFDRVMRNDPSRKKIALVATAHYLTRVMAAMLRTGEAWREEESPAPAAEPGPRPQERNKTKKKKGANKE

SEQ ID NO: 145084 - protein, 288 aa, unidentified
MAVYIGVDFHARQQTISYLTTEEGEIGRLQLDHGQPEEVRKFYQQFAGQEVIVGFEASGYAAWFEELLEELGYEIWIGHATAIRLFARRRQKNDRRDADLILDLLLRGDFPRIHRYSAESRAVLQQLRYRQRLVKMRTMMVNSLVFMAASRGVSLRTQLKSRRGLERLQQMTLPAPLAQQRDELCQLLLELKGKLDTVEQWLEAKADSDQRVLRLRTHHGIGPLTGLCLVSTLENVERFANPRKVTAYAGFDPVEDSSGERQRIGSISKQGSRLLRFFLVEAWWRRVR

SEQ ID NO: 145085 - protein, 362 aa, unidentified
MRIIGCDLHARQQTLAMLDTGTGEVVNQTLAHEGESVREFYSRLSRPVRVGIEATGSMKWFLNLMEELGIDCEVGHPATIRAAEPRRQKHDQRDAELLLKLLVENRFPSIWQPSKELLDLRALLLHRHQWVRLRTRIQNALQAIALANGLRRGSSLWSQSGQRAIASIPLATHTAQRRSDLQAMYARFEAEIEQLNEQVRERASERPTAALLMTHPGVGPITALATDVFLGDPKRFSDGKALASYIGIIPREHSSGGRQRLGGLTKQGNPLLRFLWCEAAVHAVRRDPELRRFYRRKLVQKGLGKARVAAARKLGIRLWIMLRDQIDYQEFCRRGQMQQRSGGACAGMPGLRYGAKSHRLID

SEQ ID NO: 145086 - protein, 358 aa, unidentified
MEIIGVDLDARQQTIAMLDTDTGEIVEKTLEHESEKVREFYAALPRPVLVGIEATGSMPWFLKLMEELKIDCQVGHPAKIRKAETRQQKHDRRDAQLLLKLLVENRFPSIWMPSTEQRDLRTLLRHRHQWVRMRTRVQNTLQAMALSHGLRRGHGLWSQAGQQALEALPLAPYTGQRRAALLTLYPRLQKSIDDLDQQVGEQARQRLPARRLMTHPGVGPVTALATEVFLGDPRRFADGKAVASYIGMIPSEHSSGGRQRLGALTKQGNALLRFLWCEAAMHAVQRDPELKRFYRRKVVQKGLGKARIAAARKLGIRLWILLRDQIDYKEFCRRGQRRQKSGAARAGMPAYNNGSALQ

SEQ ID NO: 145087 - protein, 343 aa, unidentified
MQTVTTIGLDIAKSVFQVHGVDAGGHVVIRRQLRRCYVLAFFQKLPRCLVGIEACGSSHHWSRELQALGHTVRLMPPAYVKPYVKRHKNDAVDAEAICEAVTRVNMRFVATKTPEQQSCLTLHRTRHLFIRQQTSVINAIRAHLAEFGIVAPVGRHGVEQLLGVVADASDKRLPEVARACVAALGVQLQTLKAQILEFDRMIRAWHRCSEASRRLDDIPGVGPVLATALIASVGDPRAFRSGRDFSAWIGLVPRQNSSAGKDRLGSISKRGDRYLRSLFTTGALAVIRYAKIHGTKHRPWLTALLVRRPTKVAAIALANKIARMAWAMMAKGERYKEPAALAA

SEQ ID NO: 145088 - protein, 339 aa, unidentified
MANVAVLGIDIAKNVFQLHGVDADGQAVLKRRVMRDQLLQVTEAMPPCLIGIEACTGAFHWQRHFEAQGHTVKIIAPQYVKPFLKGQKNDGNDAQAICIAVQQPHMRFVPKKSIIQQDIQGLHRARQRLVNHRVALIFQMRGLLLERGVAIAKSVSIAQRTIPEIINNPTIDITELTRDIIGTLHAFLLQINEKIRYFDKQIDAVFRESDVCQRIAKIRGVGPKTATAVVAAVGEGADFKNGRHLAAWMGLVPRQHSSGDRRVLLGISKRGSQHLRTLLVHGGRSVVRTAQRKSDPASEWVNELRERRGYNRAAVAVANKNARVIWALLQHGGEYRANP

SEQ ID NO: 145089 - protein, 286 aa, unidentified
MGSPGSERGAPSNGRPYRKKHVFQLHGVNAAEEPVLRKKLRRQDMITFFEKLPPTVISIEACGGSHHWARLLQSLGHEVRMLPPQFVKPYLKRGKNDAADAEAICEAMSRPTMRFVPVKSADQQAALMLVGLRDRLIRQRTQLANAIRGYAAEFGLVAAKGLVKIEPLLERIREDDTLPALARELFEIHTREYAQLQAQLEEVDDKLMAWHRADECSRRLARIPGVGPIGASMLVMKTPTPEAFRSARHFAAWLGLTPKDHSTAGRVRLGVITRAGDEALRSVLDP

SEQ ID NO: 145090 - protein, 424 aa, unidentified
MKFKMQDKQNQLIERISDKHLVVGVDIAQQIHVARAVNYRGIVIGDPLSFENNEDGFARLLDWISKLKNEKGLDTEIVGMEPTGHYWLNLSQWLYDRNIDVVTVNPHLVKKNKENRDNTQSKSDKKDALVIADMVKNGYYSFIRPTTEAFEKLRVLMSNRDVIVKRHVSAANQIHRWVDIIFPELRQVFKDVTCKGAIVTLRLFPTPKELRSMEAIDIVTGWRTEMKRQPGIKKAEALIKLAKNSVGNDKAHDAYKLHLKQLLEEFDLATSQLEIVDKEVSEALGSITFTEKLLSIKGLTIVMLGGILGETGDLSQFAHGNSLLRHAGLHLVEASSGKWKGQIVISKRGRSRLRRFLYLATMCLVMNNPEFREIHSHNVKVKKMKKMKSIMKLIGKFARMIVGIARRNEHYCAEKVHPLAPLAA

SEQ ID NO: 145091 - protein, 433 aa, unidentified
MSYRIAGIDVHKKMLAVVVSDVEVDSEYQFERRKFSGNPEQLRLLAAWLFEQEAEEVVMESTAQYWRPVWEALERYWKPICEKRAGARRKSGSLHLAQALSNRGRRGRKRDFPDAERLVKRLVAQELTLSFVPDAEQRLWRTVTRKKYQLRCDRIRLQNQLESLLEEAHIKVSSLVSDLLGLSAQRMLKAIADGETSPATLAALADKRLRATPEQLCDALGACTQLNPVYRRLVKMALEELRLIDEQIGRLDQEMAGLLLQHQDAVQRLAEIPGLGVDSAQQIIAEVGPTAATFPSQKCLSSWVGACPGDDESAGVNHSHRSPKGNRHMRRLLNQAANAAARTKGSLFEIVYRRSVPRLGHNQAIGVIAHRQCRLIWLILHQGVRYEERGPAVTKRSKQLRTWKMIRQLRNLGYRIEPPNPQPSQAQAQAQAQ

SEQ ID NO: 145092 - protein, 358 aa, unidentified
MKKIVVGIDISKEKIDASAIDVTGSQPGVVRLDYREFGNRPMGFRRMLVWVRHLKEDACLDDVLFCCETTGGYDRRLCDYIYAKGLSIWREGALQIKRSMGVRKGKDDKADSLMIAEYAMRHMDKAVIYETPSQSVRDLKSLLLYRHKLVQEKTEKTVRMKELQATSAGSKSLSFILRDARKSIKSIEKSIKECERQILQLYKENNDLNKSYEHLTSVSGIGIVNATAFIAYSNNFTGITTANKLASYWGCASFRERSGTSLDRRAYVKCYSSSLLKAYLTQAAECAIKEHGIYHEYFLRLTAAGKPYRVIINNVRNKLIHLAYSLVTNDVNYERDHESLRKKRKSEQGKSVSLEIIN

SEQ ID NO: 145093 - protein, 325 aa, unidentified
MQYVGIDISARKLDVAVRTPRGEWRGEFENNQAGHEALLKVLRKNGAARIVVEATSTYGLDLALRCHEAANVEIMVINPRVAAHFAKALNQRGKTDAADAAMLMEYAATRPFTAWTPPSATALQLRQISRLVQELVEQRTQQKNRIHAAEQTGSTLPAVLDTLRAHVQQLDEHIDTLEEAALALIATDPVLSRRFALLDSIPGVAARSALYILAELACLPDDLDVRQLVAFAGLDPRPWQSGTSIRGRRHVSKRGNKHLRHALYMPAVQAARFNPVIKAYAAELDARLEGRKQTLCVVMRKILHSIVGMFKADKPFDARKFRRAA

SEQ ID NO: 145094 - protein, 390 aa, unidentified
MEARTVNNLLPAAPHHDAVGCLVAIELSKKSWIVAVNTPLADKISRHTLKPGDGKELLDLCERIRTRVTRETKRRVEIVSCYEAGYDGFWLHRLLEAHGIRNYVIDPASLQVDRRARRAKTDHVDVERLLRSLMAYLRGEPKVWSVVCVPSVAEEDDRRLNRERGRLINERIQHVNRIKGLLAIHGIYDYQPLRRDRMLRLERLRTAADGQTLPPRLKAEILRELQRLELILGMIKTIEAERDAIASPKTEVEHTNAKKIQDLAKIKSIGPEFATTLIGEVLYRSFDNRKQLASYVGLTPAHFQSGAMCRDQGISKAGNGKARTVMIELAWLWLRHQPDSPLSVWFRERVGKLKGRIRRITIVAVARKLLIALWRYLETGLVPKGAILKA

SEQ ID NO: 145095 - protein, 339 aa, unidentified
MCILYVGIDLAKNVFAVHGVDEHGKAVLVRPSVARAKLHELIAALPPCIVGMEACSGAHHWARLFLQHGHTVRLMAPKFVAPYRLSGKQGKNDAADAMAICEAVQRPNMRFVPVKSQDEQARLCVHRVRQGLVEQRTATINRIRGLLSEFGIVLPQRAATVRREATVHLEDLPGWANTAIGDSLSDVHRLDERIAQYDHHVLQMARDDQRSRALMQLSGIGNTTASALVSTIGNAHDFKNGRQLAAWLGLVPGQYSSGGKTRLGSITKAGDRYLRTLLVLGARAVLAAARTKVDRLSRWALALEERRGYWKAVVAIAAKNARMAWAVLAKGENFKLFET

SEQ ID NO: 145096 - protein, 364 aa, unidentified
MNKCHLNTELSSHEGTRCQFNGGRCAIKLGIDVHQDFYVVVEQVGGSNPKPPQRFGKQAFLSWAAKLKQSGAEVQAVYEACGFGFALQRQLSALSIVCHVVCPQKLDERNKRVKTDGLDAKALCLKLDRFIQGNRDAMALVRVPTEQEEQLRAIHRQREQLVGARKRLEAQGRSLMVNHGLEPVKSWWKRGNFGALQVPEWMKELLLNSQPILLGLQQKIAALTLQLQVAAASKQPRGLGAMTSVIIDREIGDWNRFNNRRQVGSYTGLCPGEYSSGNTRVQSCVTKHGNPRLRAALVELAWRLVRFQPSYKPVLKWRAILAKGALATGAARKKAIVAVARQLAVDLWRVRTGRCKPEALGLEI

SEQ ID NO: 145097 - protein, 467 aa, unidentified
MDENLMMNHGKAGGLSTSWVEEPSFQSVPCLPSHNKLIGSENPCQDGGLVGRQFLLLSCVDWRGGADMDDKERFGWFLGIDVSKETFDACCITKQGERVFSISTSMDRRGFEELIHQLSTVSVAQESVLVGMESTACYHLNLYSFLISLGYPAIVINPLLISNFVKLQLRKTKTDKKDAWVIAQFLLLNRDSLCQTVGSSELSDIRDLSRQRESLVDQMSSIKSDMKRLLTITFPELEHIAGIFTKSMLRLLCQYPSAASMRRAKRSKIARILIPGSYGKQTDTSVQRILKAAEASIGTASPAKEIILKQKVSLLIQLEEHLQELTTILIEHCQEKMRRDMNILTSMKGIGEKTAMNFLIEMGGDIKQFESHKKLIAMAGLDPALYQSGKIDRKGKISKRGNRHLRRVIWLMTTKVIQFNERFKQYHLKRIKDGLPYKMAVLATAHKLIRVMFAMLTNRTLFNPRMN

SEQ ID NO: 145098 - protein, 337 aa, unidentified
MKEITTIGIDLAKNVFHVHGVDRSGHTVLEKRLGRGGLEKLMRNLPPCLVGMETCGGAHHWARMFQGFGHEVRLMAGQFVKPFVISNKNDKIDAQAICEAVGRPKMRYVAVKRLEQQDILSWHRIRERRVRQRTALVNEIRGLLQEFGIVFAQGVSRFEIGLKGLLAEEDLRLPLREFLEDLWKEYQVLNERVVQGTRRIEQYAKANERCQRIMKIPGVGALTASAMEASIGNPHVFARGRHVSAWLGLVPRQHSTGGKTRLLGISKRGDRYLRYLLIHGARAALIHAPKKKDRTSRWVVEVAQRRGNNKACVALANKNARRIWAVLATDQPYREAA

SEQ ID NO: 145099 - protein, 408 aa, unidentified
MNPLYVGIDVSSKNNVIYLMLPNGDKHSSFSLANSHDGSTQLVKRIFTAMTSNNIDSVLIGLEATSVYGDNLVYFLKEDTTLASFDRKIHVLNPKQVNKFKESYNDLPKNDYIDAFVIADCLRFGRINKEVYMDDYRYKALQNLTRARYFAVTNLTKEKQRFINVLFKKYSTMTQEKIFSDTFSTTALAVYEKFESAETLAKMDLQELTAFIMEKGKNRFPDPDAVAKALQKAARSSYRLPKTVNDSVNQVLAISITSIRALESQIKAFDKAITKQMELLPNVLISIPGIGPVLSAGIMAEIGDINRFQNQAALAKYAGLAWQQHQSGDFEAQTTRMIHSGNRFLKYYLCEAAFSLVRCDKEYSRFYRLKYKEVNRFQHKRALALTARKFVRLVFALLKDNRLYRPAE

SEQ ID NO: 145100 - protein, 389 aa, unidentified
MSEPFDPSRSLTALEQDSTVIAVIEMSQSKWLVAAFIPGVERQPLKKLDADEEALLKLLHRWRNEANRAGRAIKRIVVAYEAGRDGFWLARWLRTRDVEAYVIHPTSVAVSREHRRAKTDRLDTELLKRAFLGWLRGERRHCSMAAIPTVAEEDARRPNRERENLVGERTRVVNQMKAILARFGIRTFQPTLRTAEEKLEGLRTAEGTPLPENTRAELRRHLARLRVVREQIHAIEQERLRKLAAAPAGDKGPHAMVRLIGRVLGVGVETADMLVNEILSRHLRDRRAVARYAGLTGSPDESGRRRRERGLARAGSARVRCGMIQLAWRFLRFQRNSALAQWFHERTTDGRRNTRKTMIVALARKLLIALWRLVTTGEVPEGVVLRPAS

SEQ ID NO: 145101 - protein, 316 aa, unidentified
MSAQELWIGVDVAKAWLDVTGTSEETVRRFANDEPGIAALVANLAARGPRLVVLEATGGYETAVTAALAAAGLAVAVVNPRQVRDFARATGRLAKTDALDAQILARFAQRVQPPARPLPDATTQELASLLARRRQLIEMRSAERNRRPGLPPRLQPGLDEHLALLERQIAALDDELDQTLRDSPVWREKEALLRSIPGIGPVVARTLLGELPELGTLSRQEAAALAGVAPLNHDSGQRRGARRIWGGRAPVRAALYMAVVSATRFNPAIRALHDRLRRAGNPPKVAFVACMRKLLTIANAVLRDGTPWTPHPVPSA

SEQ ID NO: 145102 - protein, 413 aa, unidentified
MDVLHPRCCGLDVHKSSISACILVYEAGRVQKHQRRFGAMTQDLQELGNWLRQFEVAQVAMESSGVYWKPVWNILEGQFTVVLVNAQHIKNVPGRKTDQKDAEWIAQLLQHGLLRPSYVPCEIIRDLRDLTRMRASLSQEASRISSRVQKVLEDANVKLASVATNTVGKSGRAMLEEIIAGQKDPEHLASLALGHLRAKIPQLKLALEGKVRPHHRFLLRRLLDQLRFVEHEILLLDERLEDIGRERPELSEAVARWDTIPGIDRVAGWTLLAEVGHNMAQFPTAEQLASWASLCPGNHESAGKRLGGTTRKGSPWLRRIACQCAWAAARTKNTYLSAQFRRLAARRGNKRAIIAVAHSLVIIGYYLQKSQRNYEDLGGDYFDRIDSAGLRRYFVRRLEKLGHRVTLVPIQAT

SEQ ID NO: 145103 - protein, 420 aa, unidentified
MGFIGGGVREQFVARIKDADPGRLLAVPIDVGKHSAAALVCDFWGEIIAPPFDFVLDEDGFKRFSVTVARAEAERDATWTRVGIEQAGHYHRPLQARLEAAGIEVTLFNPAQVKENRNQDLLRSLKSDAIDLAAMAELLIRGKGRLATTGSDAVAIQGVLALHRARKIRARTALKLQIHAQLDLVFPGLSRCVWNPIESKVGRIMLDEGLTPERVRRLGNERFLRFCANRGVRVTRIKAAEIVACAQGAFALDATMSQVHLRLLMADMELLAKLDQEVRDTEEQLAEILPETPADILTTLPRVSVVRASNYGGALGDPTRFKSAAQVYRLSGLVPRRYESAGKIWTTTKISREGRVELREAILELGKALRQGHPNFARYAAGLKERGKPGGVVQCAVGQRANRLAFAMMRDQQPFDPFRW

SEQ ID NO: 145104 - protein, 371 aa, unidentified
MNNVTGIRKYVGLDVHKATVSIAVADAQAGEVRDVSTVANDLHAIRTVLRKLGGPGALRVVYEAGPTGYGLYRWLVAEGYAAQVIAPSLIPRKAGDRVKTDRRDARLLARLARAGELTPIQIPDVADEAVRDLSRAREDLVEARTSARQRLQALLLRHGMVFSGKTRWTKAHDRWLSTLAFASPAQQTAFTEYWEAVKRADAAIERLTQALRDAVQAWQWQPVVTALMAMRGFDLVAAVTVVAELGDVRRFTHPRELMAYLGLVPSEHSSGATRRKGGITKTGNGHVRRIMIEASWCYRFPARIGKGLNERQQGQADAICDLSWKAQHRLCRRFSALRARGLHQNQVCVAVARELAGFIWAMARIAQPAAT

SEQ ID NO: 145105 - protein, 355 aa, unidentified
MTALADKVDGVIGVDTHRDTLSAAAVTAVGGLLGQLVVAADAVGYRRLLAFARIHVPGRRCFAIEGAGSYGAGLARMLVDGGEWVVEVDRPTRPARRSGKTDALDAVRAAREVLVQERPAVPRRRGDREALRVLLATRHGALVARTCAINQLKALIVGAPEELRAELRSRSTSGQVAYCAALRDRPARSLEHCMTARALRATAQRTRALAIEAAELHDDIGRLVQAVAPWLLELPGLGPISAARVLVSWSHAGRLRSEAAFAALAGVSPIPASSGQVTRHRLNRGGDRRLNRALRTVALVRLRDDPTTRAYAARRRAEGKSPREIRRCVKRAVARHLFKLLCRYDRPEVEIVRTC

SEQ ID NO: 145106 - protein, 338 aa, unidentified
MNNSVVGLDIAKNIFHCYSLDADGKASKKKLKRAELLRFFANYPASLIGMEACGGAHYWARELTKLGHEVVLLNARYVKGFVVGNKNDFNDAQAIHEAVLRPNKRVVRVKSDEQQDMQLLHNIRQDLVDKRTALVNQLRGLLMERGIVIPKGINYVRKELPFILEDAENGLTHLSRELFAEQYQKLKELDNAIKSHDQRIGRLCQQNQLSKRFLEVPGVGIITASIIAADIGDGKGYASSRDYAASLGVVPKQHSSGDKQVYLGMSKRGNRYIRTMLIHGARSVLKTCHGKTDPLSRWLQALIERRGFNKAAVALANKNARILWAMASKDQDYQVQTA

SEQ ID NO: 145107 - protein, 326 aa, unidentified
MLYFLGVDVSKAKLDVALLLGNDKFKSKVFANDARGLQDLLHWLPAHVPEALSSVHICMEATGIYHEALACFLSDQRLWVSVVNPLLVKRFAQASRLRNKTDSIDAKCLALFCKSSGPERWEAPPVAVRALQALVGRLDTLQAMRQAECNRLDVAHSSVADSVRHVIGDLDEAIAQVRAQIARTIDDDPDLKRRAALLESIPGLGDKTVPQLLAYIGRPERFRTVKALIAFASLTPMIRQSGTSLDSRRGTHPMGHQELKRALYFPAMVAGRYNPVVAAFWNKLKAQNKPGKVIVVACMHKLLAIAYGVLRSGKPFDPNHLKQIST

SEQ ID NO: 145108 - protein, 353 aa, unidentified
MEKAYDGRQVVGMDLHRRRSVIVRMTEDGRRLGMARIANSPAELRAQIARAGKSPKVVLEATYGWYWAADTLAAAGAEVHLAHPLGVKAFSYRRVKNDERDAADLADLLRMGRLPEAWIAPAEVRELREITRYRQKLVHLRTSCKDQVHAVLAKLGVPVTCSDVFGTAGSAWLDGLGLPQPYAGKVTSLRQLTGELTTEITMLSEVIADLLAGHRGYQVIQQLPGIGPVLAAVIIAEIGEVTRFKNAGQLCSWAGLTPRHRESDVKVSRGHVTKQGSRLLRWALIEAIQRVPADTVIGAVKTAIIARRGKEARNTAKVAAARRLLTLIFYGLRDGQIRCLSSPPVTQPPAQAA

SEQ ID NO: 145109 - protein, 316 aa, unidentified
MSAMQRFVGIDVAKAQLDIALRPTGERWAVANDDCGIAALVERLQAVQPTLIVLEATGGYQRAVVAALAAAGLPVAVVNPRQARDFAKATGQLAKTDALDARALAHFAEAVRPTPRPLPDTQADELRALLARRRQLVAMRTAEQNRLGNAPPRLQTDIQAPITWLNTRLAALDDNLDTTLRASPVWREREDLLRSVPGIGPVCTRTLLLDLPELGTLSRQRLAALVGVAPLNRDSGTLRGSRTIWGGRAHVRATLYMSALVAVRYNPVLKTFYRRLRAAGKAAKVALTACMRKLLTILNAMLKSHTPWQPQEVSAD

SEQ ID NO: 145110 - protein, 347 aa, unidentified
MRFYTTQHKFYCGIDLHARTMYFCILNQEGRIVLHRDIKTNPEVFLKTIAPYREDIVVAVECIFTWYWIADLCSQEHIPFVLGHALYMKAIHGGKAKNDKVDAYKIATLLRGGMMPMAYVYPADMRATRDLLRRRNHLAHKRAELIAHVQNTLHQYNLPEIGKNLGKKGNREGVAKRFPDMIVQKSIELDLGIIDHYDQLLHRIEHEISLIAKKCDADSYFRLRSIPGIGRILGLTILYEINDINRFPRVQDFVSYCRLVKCTKESAGKITGTSGKKIGNVHLKWAFSEAAVLFLRRNPEAQKYRAKLERKHGKAKSLTILAHKLARAVYKILRQKEVFQPQTFYAK

SEQ ID NO: 145111 - protein, 445 aa, unidentified
MRRCIGLDVHREFAQVAIWEAGVVRQAGRIQTTPEALREFAASLCISDEVAIEATGNSYAIARLLERHVGRVVISNPQKTRAIAEAKVKTDKVDAAVLAGLLQANYLPAVWLPDDATFALRRQVARRAHIVRQRTRLKNQVQSILHRNLVPRCPAADLFGRKGRTWLATQDLPQDEQQAVQALLRQLDFHAAELRIVDAELGRVALEHPEVRRLMTIPGVDATVALAIVAAVGDFGRFSSPQRLVSYLGLNPRVRQSGGQPAQHGRITKQGRAHARGMLVEAAWAAAKTPGPLRAFYERVRARRGMQVAVVATARKLVTLCWHLAVKGEDYAFARPSLTDKKLRALELRAGLPPRRGRKGTAAAYSLKEVRRRERALAEQAEVAYRQLVVGFKPKPPPREPTRKGVAAATGARRSGPRRDQAARQDSQPHGPALRSGVDHAQHRA

SEQ ID NO: 145112 - protein, 341 aa, unidentified
MQITTIGLDIAKNVFQVHGIDGDEQVVVRKQLRRSQVIGFFHDLPPCLVGLEACATSHYWARELSKLGHDVRLMPAKDVKAYIKRNKNDAADAAAICEAVRRPTMRFVQVKSAEQQAQLMQHRARDLLMQQRTQLINAMRSHLAELGIITPQGREGVKELLAIISNEDNKHLPNDARASLIVLAAQLQALQTTIGAIEKRIVVQHRANKESKRLQTVPGIGVIGASAIAATVTNPKIFRSGRDFAAWIGLVPRQMSTGGKPKLGPISKQGDRYLRRILVVGAVSVLRRAKNNPEKFPWITRLLARRPFKVVAVALANKMARTAWALMMYGKTCRAARFATT

SEQ ID NO: 145113 - protein, 465 aa, unidentified
MARKHKNVKNLKRQPRSLKTIQPNAAGIDLGSREHWVAGPALPDASPNVQRFGTTTPELLRLADWLEQHQIATVAMESTGVYWIPLFEILDSRGFEVLLVNARQISHVPGRKTDMIDCQWLQLLHACGLLHGSFRPGDDICRLRALIRERNTVVDQRSDWVRRMQKSLDQMNVCVHHAVSDITGVTGMAIIRAIVNGERDPKALASLRDRRCRKSEDQIAEELTGNWRPEHLFNLEQFLKVYDQLCAVVADYDTEILNYIKSLQPPEAKGSSAPPPASKAKALALVKRGQEPLRQALYRMSSFDLTMIDGIGVDTAAVVISELGLDFSAFTDERRFVSYLRLAPNISISGGKKVPGRFKATTCTRVCNALRMAASTLRNSKTALGAYYRRISWRKGASVAVFATARKLAQLIYRLVRYGQAYVDAGADAYEARFTQRRLTSYTKALKDMGYKVEPLTAQETVGAL

SEQ ID NO: 145114 - protein, 421 aa, unidentified
MSETKRWYAGVDWGSQNHCVFLTDGEGRKLGERTFKHSGEGLAEMAAWLMKTSAAEEPAQVFVAIEVPHGPVAETLIERGFAVHAINPKQMDRFRDRFSMAGAKDDSRDAEVMASSLRTDARCFRALASADPIIVELREWSRIAEELGVERNRLANRLREQLWRYFPAVLELETDVGAEWLLEFLDLAPTPERAAKLRESTIARLLKARRIRRLDAGTIIRTMRAPAPQLAPGTVEAASAHVASLIPRLRLVNRQIRDAERRLEALTDRLRAPEDGEPAPESEPEPNKPSDAAILASLPGVGTTVLAALIAEAPEPLQRRDYPALRSLTGVAPVTRRSGKSSIVLRRQACNERLANAAYHWARVAVQHDPRSRAKYAELRKRGCTHGRALRSVADRLLNVACAMLKSGRLFDPALAGQKTA

SEQ ID NO: 145115 - protein, 413 aa, unidentified
MEVLYRVCAGLDVHKKTVAACLRGPGPKGTRTEEIRTFGTTTRELLQLADWLTGAGCTHVAMESTGVYWRPVYQVLEGRVELLLVNAQHIKTVPGRKTDVKDCQWIARLLEHGLLRASFVPPAPFRELRELTRYRRQLVEDRARDANRVQKVLETANIKLAAVATDVLGTSGRAMLKALIAGERDAEKLAALAQGLLRKKAAQLREALVGRVTDHHAFMLQGLLSHIEFLDQQIALFDARIMAQTRPFAAALERLDTITGVARRSAEQILAELGDDMRRFPTAAHAASWTGICPGNNESAGKRKSGRTRKGNRWLRATLVECARGAVRARHGYLAAQYHRIARRRGDKTAITAVGHSILVIAWHLLRNGGSYRNLGHEYFDRLDRDRLVRYHTRRLAELGVVLPPPSPASAAS

SEQ ID NO: 145116 - protein, 430 aa, unidentified
MEEVDEQELHVERIAALDLGKAVLEACVRVPHDSRPGRRMQEVRTYPTTTAALLEMADWFRCWGVTRVVMESTGDYWKGAYYLLEAEGFQCWLVNARDVKNVPGRAKTDKLDVVWQAKVAERGMCRPSLVQPKPIRELRNLTRYRRSLTRDRTREMQRVEKLLEDAQIKLSAVVSKLFGVTGRLILDALVAGQRDPRVLAQLAKGRLRSKTAQLREALRGFFTDHHGAILAMMLANIDRLSAQITTLDTMIEQAITPFIHQAQQLAQITGAGPIAAQELIAEVGVDMGRFPSAAHLVSWAKFCPSTHESAGKRKNKGRAKGNPWLAATLGNIAATVARTGEGFLGARHRRIARRRGPQKAIVATGNAILTIVYHLLSDPTAQFHDLGANYFTTRIDKNRRARSLAAALQAVTGQKITIRDGQAVIEAQAA

SEQ ID NO: 145117 - protein, 321 aa, unidentified
MTNPTTCAAGIDVSKHSLDFAIHGQPIRLTVENRLPGWRRLAAELSRAGVNRVGLEATGGYERGVVAFLRVAGFTVLVLQPLQVKAYARLHLRRAKNDPLDAALIAACTAAIDATPEPPDPRLVPLADALTFVEQIEEELVRLQTRLEHIELPRFRHMVMADIRRLEGRRRAELRRIVEALAGHDDRRRRLHLVQSIRGIGERTAIALVVRLPELGRLTREQIAALVGLAPFDDDSGLHRGQRHIGGGRKRVRRSLYMAALPAATLWNPACIALYKRLMAKGKCHKAALVACARKLLIFANAVVQRGSPWTERTAAAGVAG

SEQ ID NO: 145118 - protein, 422 aa, unidentified
MSYCPVAGIDVSKRFSDMCILSPDNKIFAQEKIYHDETSINRANALLQKAERLFFSKPVIVMESTSHYHLILFQFFSEHGYDVIVVNPLQSNSMKDFSIRKRKTDRVDAFKLAMMYRTKTLRPSQIPQTATRALRQLCRHRAELLNDVSSYKNRLTALLDQTFPGYDKVFSDVGGVTSCAVLVRFPTPTILLVEEESELVEVIAAASKSGYSFAKKKAGLLISAAQKAQTLGIHSCADETLIVCTIQMLRTLSESVLQIETAIDNLLAQIKEMRNNVSLLQSIPGVGSHSAALLLGEIGDILLFKKPKQLAAYFGLDPTERQSGSFRGTKNKLSKRGSPYARAALHMGVVNSICKRGKDSAANPVLLSYYEKKCKNKPAKVAQAASMHKLVFIVFAVLRNQKPFELKTPEQHAVEQGFVKAA

SEQ ID NO: 145119 - protein, 356 aa, unidentified
MISSTKYIGMDVHKESISIAVRNAAGKIVMESLIETKASMILQFIDGLRGDLHVTFEEGTSAAWLYDLLKPHVTKLVVCDPRKNKSMREGNQNDKIDARRLAELLRLNHLNPVYHGEHGLRTLKELVRSYLTVTRDLARVMSRVKAIYRSWAIPCSGKQVYAQCHRAEWLAKITEPGVHRRAEFYYQQLDALRGLRREVRRDLLAESKKHKAWKRLCQIPAIGPIRAAVLLGILQTPHRFRTKRQLWNYGGLAIEMHSSADHRSVDGELQRSRKNVLVRGLNRNCNHDLKNLFKGAAAVASSKPGPFEKFYAALVAKGMKPEMARLTLARKIATIVLIVWKKGVSFDANHLKPQTA

SEQ ID NO: 145120 - protein, 402 aa, unidentified
MNAVGIDVSKGKSMVAIMRPFGEIVSTPFEIKHTSSDINSLVKLIKSIEGESRIVMEHTGRYYEVLAHQLSEANLFVSAINPKLIKDFDNDSLRKVKTDKADSVKIARYALDKWQNLKQYNVMDELRNQLKTMNRQFGFYMKHKTAMKNNLIGILDQTYPDVNTYFDSPARSDGSQKWVDFASTYWHVDCVRKMSINAFIDHYENWCKRKKYNFSKSKAEEIYGKAKELVPVLPKDDITKLIIKQAVDQLNSASITVESLRTLMNETASKLPEYPVVMAMKGVGTSLGPQLMAEIGDVSRFTHKGAITAFAGVDPGVNESGSYEQKSVPTSKRGSSDLRKTIFQVMDVLIKTHPQDDPVYQFLDKKRAQKKPYYVYMTAGANKFLRIYYGRVKEYLASLPES

SEQ ID NO: 145121 - protein, 403 aa, unidentified
MIFVGDDWAEDHHDVWVMDEQGQRLANARVIEGTEGLTAFHQLLAQYVEEPELVVIGIETDTGLWVTALDAAGYQVYAINPMAASRYRDRHTVSGAKSDSGDAKVLADLVRTDRHNHRRLAGDSAAAEAIKVLARAHQSLVWARTRHSNVLRAALRQYYPAALAAFPDLDHRDALAILHRAPHPDHGAALSVSKISALLKAAGRQRHIDARAREIQAALRSEQLAAPGPIATALAATTTATVAVLIVLNTQIDELQTQLAAHFEAHPDADIYLSLPGLGVILGARVLGEFGDDPNRYTDAKSRKNYAATSPITVASGHKRTVVARYVKNRRLYDAIDAWAFASLRSSPGARALYDHRRAQNDTHHQALRALGNRLVAILHGCLRHHTHYNEHTAWAHRMPAAA

SEQ ID NO: 145122 - protein, 313 aa, unidentified
MDGRPFVGIDVSKQRLDIGVGANGEFWHAANDEAGIQEIVHRLTALQPVLVVIESTGGLEWPLLSELAARKLPVTLVNPGRVREFAKSLGLLAKTDKLDAHLLARFGEAAKLQPTVLPDEAVQKLSALMGRRRQLLGMLVAEKNHLLSTRLNLRPRVQEHIVWLEQEIDQLTKQIQKDLQDTPGFRDKDRILRSAKGVGPITSSILLSDLPELGQLDRKKIAALVGVAPFNDDSGGRRGTRRIKGGRTTVRQALYMAAIVAARFNPVIRTFYQRLLASGKRKKVALVACMHKLLTILNAMIRDMTPWREPLTA

SEQ ID NO: 145123 - protein, 376 aa, unidentified
MANVRYGFAKGKPIFVGIDVHKRDWTVHVVCQGEELYHSTITPEPERLIAALRRFDASEVHVVYEAGPTGYWLHDALLAAGFDSMVTPPSLVPRIGGRMKTDHRDSTKLATMLAGGFLKRVHILSPEERAHRQLLRTRNQIERHRKQTQAQIKSMLLFHGMRAPTGLLERWSEAHVKWLADLEWDFPALKASMMALVELFLYLDKQLKVMNVQLETLAQTDKYRERVGLLTQIPGMGMYSAMTILIELQDVERFQRADQLASYLGLTPSQRSSGESVRMGGITRCGNPRLRTRFVESSWTLIRYDKTMRATYDRIKHQTGSGKKAIVAVARRLALRVRRVLLDQQPYHYGDGTRPEFAKDKRREIRRFTVHQVQTV

SEQ ID NO: 145124 - protein, 353 aa, unidentified
MIVIGIDPHKSTHTATALDPATNSEVGTLRIEASVFDYQRLMTWAKTWPQRRWAIENAQGLGHHVAQWLLARGEEVVDVPTTATARVRELSRGGGRKNDRIDAAAAASVAALQGDARPVRAESTADSLALLDERRVNLSQSRTRAVNQLHALLRELMAGGAPTSLTAATASRVLSGFRPRTGTDRVRVALAKDLIADVRRLDQQLAASNAAIAAVLDEHGTRLREIAGVGPVLAARLLGRTGTPSRFASDASYANYTGTAPVQIASAETNRHRLSRYGDRQLNSAIHTVAMVQIRMPGSAGRAHYDTKIAEAKSPRSAARALKRHLARHLWRVMIADEKRSARKASKTEVEPT

SEQ ID NO: 145125 - protein, 362 aa, unidentified
MRPAPNMRVGGQAMEHYVGIDVSLELSSVCVVDVGGKIVAEAKIESHPDAIVNFLRRLGLSIERIGLEAGPLSQWLHAGLTKGGFETVLLETRHVKAALSAMTVKTDRRDARGIAQLLRMGWFRPVHCKSPGSQEVRALLVARKQLLGKLLDVEFSIRGILRGFGLKMGVVTRTGFEGRVRELCAGQAMLEQIAEAMLAARAALRKEYSKLHKAMLALVRRDAICRLLMSAPGVGPLVSITFKTAIDDPTRIRKSKAVGALLGLTPRKYQSGETDVTGGVSCVGDEMARTALYEAANAILSRVTRFSALKRWGMDVAKRRGTKRAKVALARKLGVVLHRMWMEGTSFRWTKEASKAPQVARA

SEQ ID NO: 145126 - protein, 417 aa, unidentified
MEYPPDTLPAVPPGGVTCGIDWANDDHAVCVVDLAGKIVQRFIAEHTGKGLAGLVRQLRRAGVGEVAIERPDGTVVDTLLEAGLTVVVISPNQLKNLRGRYGSAGNKDDRFDSFVLADTLRTDRARLRPLLPDSPATVTLRQACRARKDLVGHRVAVCNQLRAHLKLAFPGAVGLFRDLDSPISLAFLARFDCQDRAGWLTPRRLAAWLKSQGYPGRKDPAALHARLAAAPRGAVGDDGAAKAHITRALLAVLASLVQQIKALDAQIAEQLALHADAPIFTSLPRAGTIRAARLLADLGDCRARFPTPEALICLAGVAPSTRKSGKTTYVDFRWAADKQLRDAVCDFAGDSRHASPWAARLYDDAIARGKDHPHATRILARAWLYVIWHCWQNRTAYDPARHKALQRILTGQKPAAA

SEQ ID NO: 145127 - protein, 347 aa, unidentified
MKKIIIGIDISKEKIDASAIDVRNSQLGVLKLDYQAFENRPMGFRRMLVWARHLIKGVTLEEVMFCCETTGGYDRSLCDYLYAKGLDIWRESSLQIKRSSGLRKGKDDKADSLTIAEYAMRHMDKAVYYISPSETVRELKALLLYRRKLEQEKTSKKVRVAELKATAAKSKSVSFILRDAQKSIRALEKSIKECEKQILALYDSDEELKRSYDHLTSIKGISIVNATAMIAYTNNFKNITTSRKLASYYGIAPFREMSGTSVNKKAEVKCYSSSMLRAYLTQAAQWTIKEHGIYREYYLRMSAKGKCYGVILNNVKNKLLHLSVSLIANDMDYEENHEFLRAQRMAQ

SEQ ID NO: 145128 - protein, 408 aa, unidentified
MQVTFGIDVSKSTSTVCELIGESKNELTITNNHPGFIQLLHELAAFSKHPQIIFEATGVYSRRLQSFLEDYGYDYVIINPLKAKKEMDMGLHHNKTDKTDAYHLALIQRLYHHPINQLQSQTYKQLNSLSRFYNQLTADLVMAKNRLHQALQSTFPEIENLFSAAKGKNYWQIVNHYPHCDLVRKADKKQIITWLTNLKGIAFRHAQRTADKLIKLAHQAYPVVSCSSIEVEQVQYYAHRLLNLSDQRENLIARMVKLAKSLPNHDLENLESIPGFAQTIAVRVLAELGDLRRFSNPNKINAFIGIDPGRYQSGEMDSNLSITKHGNAVARKLLYRAIGQIDNAAKTNPCHIADYYESKKLSSQTKGFKKIAIASIHKLIRTIYALIINDQPYDYNVATHNQKDFSRN

SEQ ID NO: 145129 - protein, 356 aa, unidentified
MTTGYPKREILATGRVVYVGVDVHKDSWHVTARTEREEIFTASMPAQYVALRKLLDRFKECTIKVAYEAGPCGFWLYDKLCSEGIEAIVVPPSPIPVESGNKVKTDKRDSHKLANLLENNMLKRVYVLTEEDRAHRELIRTRRQISDHRTDVMRQIKSKLLFNGIASPFRPKQSWSSQYVTWLKKLSVGQEMLRASLDTLIDLYEYLTEQLKNISRKVVLLSRSPKYASKMNLLKTIPGVGTLIGIEILVELQDVARFSSAEKIASYIGLTPSEFSSGQYVHHGKITRCGNKRVRTCLVESSWILISKDPFMRNKYQQLKYRKGGKRAIIAIARILIMRIRRILLTNEPYVIKAAA

SEQ ID NO: 145130 - protein, 402 aa, unidentified
MNCVGIDVSKGKSMIAVMRPFGEVVISPFEVQHTASELSELAKLLKSLDGETRVVMESTGNYHTPVAWLLHDAGLYVSVVNAMLVHDYGNNSLRRAKTDKKDAVKLANYGLDHWLTLPRYVPEEDTRLLLKNCYRQYQQYSKVQTMLKNNLISLLDAVFPEVNRLFNSSPRADGSEKWVDFVSTFWHCQCVSTLPLKSFSARYLKWCRKHGYYFSQEKAFEIHSKAQSCISVMPRNETTKLLVQQAIAQLKATAAALAALKQEMQSLAAALPEYPVVMEMFGVGSTLGPQLMAEIGDVRRFHSKKALVAFAGIDAPPCQSGQMDIHSRSISKRGSAALRRTLFLVMGIYLQSAPLDEPVYQFMDKKRSEGKPYKVYMMASANKFLRIYYASVTAYLNTLARI

SEQ ID NO: 145131 - protein, 449 aa, unidentified
MGNGNGVSRGDRNRNARLGRLRELVPVENAIVGIDLADRKQMVVVTDHDSKVLARRTFRCRAWDLGAALDWAAEKAAAKGFLGVTVACEPTGHRWRVLGQLAEQRSMPFVCVQPMQTSWARRSEDLTFDKTDEKDAVLIARLTAQLRCYLPEPVDETWARLRHLGARRQQLLEDTGSQVQQMRALLECAWPAALGTAKHPFRSATWAAAMVVILDRDGGDLARTRRLGLSRLEQAVRREIVRAGRQKPCLRIVRLLFSALTDPAGVTAHRVGAFERVALLLADWTETHRRLADTEARMTTVLDELQLTALATSITGLSPVGAAAILAETGDPRRFATARALVKHSGLAPREKLSGTFVGRTKLTGQGRPALRLAAWRAVWGAQRANPVYAARFTHLTTRQVNKLTVTQAQAVIAATILRHLHAVVTTGQAWDPIIATHGTKNPTVPVAA

SEQ ID NO: 145132 - protein, 409 aa, unidentified
MEVLYPRCCGLDIHQKTIVACVLLTEADGTPHRFVRTFGTMTADLLALGDWLDLHDVRHVGMESTGVLWRPVFNVLEEGRTLILVNAQHLTTVPGHKTDVKDSEWLADLLRHGLLRPSFVPPPTIRVLRDLTRYRKSLVELRTQEINRVHKVLDTANLKLGAVASNVVGVSGRQMLRALEHGECDPAVLAELAKGRLREQLPALRLALTGRVHPHHRQLLGELLDHIVYLEQAMHRVEVSLAALLAEQEAAVQVLLTLPATGPVTAAAILAEIGTDMTRFPSARHLASWAGVCPGNRRSAGKQLSGATTKGNTQLKTILCEIAASIARSPGTYLHALYHRIARRRGKPRAMLAVAHRLLVSIYYMLRDQVPYQDLGPDYFDHLQAQRLERHYVGRLEALGFQVRLTPAS

SEQ ID NO: 145133 - protein, 375 aa, unidentified
MGADAGGGCNSSRADGTEPVEIHGGCLGRHRSEAWSPRRLFATPVRLHGHETVCKEGITKMSDSVVIAGIDVSKDKLDVHVLPSNLVFGAGRNPGGLKDLARRLRKAGTERVALEASGDYERAVIEALEAEGFLVQLLNPKRVRRFAEAAGILAKTDPIDAKMIALYAQHFPDSGLVRRPEQARKLGEFLAMRAMLLGIVNEARSRLEHLREPALRAMLEQSIADAKANLKTVEIGIAAVIAEDEAMARKAELIRSFAGAGPVLASNLLARVPELGRVNRRHAAHLCAVAPADRQSGKSRRPARIDGGRHQLRPVLHMVALAAIRSNPVIKAFAKRLTAAGKSKRLVLAACARKIIVILNAMLRDQTPWQHANAA

SEQ ID NO: 145134 - protein, 391 aa, unidentified
MIVVGIDVAKDKHDCFITNSDGEVLFNAFTIPNNLDGFNELYQKIETVIEDISKIKVGLEATGHYSYNLLGYLLDKGLPTYVINPLHTNLYRKSLSLRQTKTDKVDARTIASMLMSDVNLKSYSDTSYHNEELKSLTRYRFDKVRERAKLKMSISRLVCILFPELEKLVPSLHMNSVYELLYEFPGARQVATAHLTRLSNLLKKASKGHYSKDTAITFREAARKSIGSNMPAKSLELKHTIKLIRELDAEIAEIESEIKAIMDKINSPILSIPGISYRMGAMIIAEIGDFSRFDSPDKILAYAGISPSTYQSGQLDNCHSKMEKRGSKYLRYALFNAAIYVCHWEPTFSAYLSKKRAEGKHYYVAISHAVKKLVRLIFHLERTEQQFISAS

SEQ ID NO: 145135 - protein, 324 aa, unidentified
MSASSVVVGIDVAKAHVDVSVLGAKLDAQRFDNLAEGHSALTAALKPLGVALVVMEATGGYETELACALQAAGLPVAVVNPRQARDFAKSMGRLAKTDAVDARMLAEFAAVLLRREDLARFLRPLADAQQQWLTALVTRRRQLLAMLLSERQRLQITPKGLHPSIEAIVQAIKAQLDDIEAQMVGHVREHFGELDRLLQSASGIGPVASATLIAELPELGQLNRREIAALVGIAPMANDSGSSKGRRRIQGGRFDVRRVLYMAALTASRRNPVIKAFYERLIAAGKLPKVALVACMRKLLTTLNAMVRARKAWQPDYKPAAARP

SEQ ID NO: 145136 - protein, 326 aa, unidentified
MEHELHYIGIDTAKEKLDVDVLRPDGRHRTKKFANTTKGHDELVSWLKGHKIDHAHICIEATGTYMEPVAECLYDAGYIVSVINPALGKAFAQSEGLRNKTDTVDARMLAEFCRQKRPAAWEAPHPLERALRATVVRHQALTDMHTQELNRTETAREVQRPSIDAHLLWLEAELKRLEKQIKDLTDDDPDMKHRRKLLESIPGIGEKTSAVLLAYIGLKDRFAHARQFAAFAGLTPRRYESGSSVRGASRMSKAGHVSLRRALYMPAMVATSKTEWGRAFRDRLAANGKKGKVILGAMMRKLAQVAYGVLKSGVPFDASRHNPVAA

SEQ ID NO: 145137 - protein, 363 aa, unidentified
MAYIGVDLHTNRLTAHFKNSEGKGKSASYDIDDKGMNRFIEVLKKDDHVFIEASTNTFAFSDVIKDRVKKVTVIDPFQFRVIADSGKKTDKIDAKKIAEMGKYHVETGEDFLPEVYIVDETIRRLRSLFTTYNLITKEITMTRNRIYSLFKQNLKPFTRQYIFTILRYDLDAAGLAQEYQLQVQVSFEILECLEAKKEQIKKTILLCGEPFQEDIDILVSISGISIFIALASITDYATIDRFTKAKEFSKYLRSTPRSEISNKKRKDGKTHKSGRKLSVKLVLQGLHHSLKRNRYMNDFYWRLRKGKGACKARMAVVRKTFVTMFYMLKKREYYRYMDKKLHDRKMAEYQRFLAKNKEIHERT

SEQ ID NO: 145138 - protein, 320 aa, unidentified
MMAQDDLVVVGIDVAKDKVDACIRRFKLRQTFPNTLQGRRKLTVWLRKYQVGKAVMEASGGYEREWRNVLHSAGIEVRIVDPRRVRNFALSAGRLAKNDPIDAEMIAWFAETFSQAPGQVPDAAREELAALAKARKALVDVKIRLQAQNEHAAPEPARKAHARILKSLAAEIDKLEAAISAKVKATPEFAERAEIIQSVPGLAQTTSAILIAGMPELGQVSDEVAAALIGLAPYDDDSGKRRGERHIKGGRRWVRNAIYMPCLGAATQNNPVLKAFYQRLIAKGKEPKVALVACMRKLIIVLNTMLARRQKWNPGCHAVA

SEQ ID NO: 145139 - protein, 428 aa, unidentified
MVHPFLSVGIDVGADFSLMAVALPTQEIVGRPYKILHSSLNSLQGAVSRIRALEAQHGLSAKVFMESTSIYHFPIYYRLKDEGLDVFVLNPLITHANSNINVRGVHNDKFDAQKIALLGLKPKLKTSVVPDDEVAAVKTLVREYHTMKKECSQYICRLILQLRQTFPQYLPLFSKVNGKASLEILSRYPTPEAILGTEKSEIIAVITRHGRGKINAEEKYRRLIQAASEAALFGHSNAGNVYLIQHFIEMIRLIDIQTEKLLAQIRDSLNGQPDARLSRQVGLLQTIPGVGFLTAVTLVCEIGDFNAFRRPKQLYAYFGLDPKVRQSGNYSGSELKMSKRGSPFARRSFFILAMQSVSLRKNGEPKNPVLRAFYLEKCKTKAKMTAIGAVMHKVCNIVFAVLRDEKPFVFITPEEHRVLFAALTEDAA

SEQ ID NO: 145140 - protein, 339 aa, unidentified
MQVTTIGLDLAKNVFQVHGIDEYGEVAFNRALRRGQVLVFFERIEPCLVGIEACGTSHHWARELIKLGHNVKLIPPAYVKPYVKRGKSDAVDAAAICEAATRPTMRFVEVKTPEQQAILAVHRTRDLIVRQRTQTINMLRAQLAEFGIILPQGVYHALRFSKECVNEGLPNLPNDAGEVVIDLCDQLLFLHSKILRHSRHMTQIAKREKRVALLRTIPGVGPITASAIVATIGSGKQFNNGREFAAWLGLTPINKSSGGKERLGHISKMGDQYIRRLLVLGMTSRIRSIRLKPEKFDPWFADILSRKPSRVAAVAMANKTARMIWAVLTRNKPYTVRTV

SEQ ID NO: 145141 - protein, 346 aa, unidentified
MENIALDVHKHYTWARVESPEGHRLYESRLAHARGTIKNFVGRWTPGSAVALETVGNWYWVVDEIEAGGGKPQLVNARLAKLMMGQVNKSDKLDAKGMNRLQRTGTLPTVWIPSSAVRDARELPRTRMVFSEQRTKLKNRVHATLGKYGYVVAEVSDAFGKRGREIINERITKLPPHTQYGLQRLLDQLDHVGENLKAIEAAMIKAFAPCPETSWLKTLPGVGEILAVVIWTEIGTIERFARAEQLASYCGLVPRENSSGGKIRFGAVRRDVNVYLKWAFVEAANSAILNCQRCGYGHISRLYQRIKPRRGHGKAKVAVARHLSEASFWMLKKGEPYRQPMSSTQR

SEQ ID NO: 145142 - protein, 418 aa, unidentified
MTQEREATRFVGIDWAAEEHEACVLDATGKKTTAFTIAHTREGFDKAVAKLASLGAPAGTLVAIERPDGRLVDRLLEAGHPVVPVSGKVIKAWREAEVASGAKSDPGDAEVIAEYLRLRLRHLRVLEPLSEQTRALRAVVRARDDLVQARVAAHNQLEACLDAFWPGAKGVFADVTSEIALAFLERYPTPASARALGEKRMAAFCTKHGYSGRRSPAELLERLGAAPEGIGAGPEAEARRDAVAGYVTVIRALNASIKALARSVAAHLGEHQDNEIFTSLPRSGQVNAAQMLAEWGDCRGAYDDAEAVAAMAEITPVTKASGKHSAVHFRWACNTRFRVAMTTFADNSRHESAWAADVYQRARGRGCDHPHAVRILARAWVRVIYRCWVDGVPYDATKHTAAVRFAEQRAQSDAAEAA

SEQ ID NO: 145143 - protein, 466 aa, unidentified
MTLNPSPSGVERVIGLDSHPDTFTAATIVGQTPAQAIVQTTYNRIPMARLQTWATKNTTPKDLIVLEASGNSFQVVRSLAQVQRQALVLESCHLGKLKEAHANNDKISAVRIAKAYLAGTAKTVWVPDALSQERRDWLHAHRKCVKRTTQTQNRLLSYLSDNGVRLAKGQALEESLVLDGPVGQTRKWSPRQRQVLSGYFMELTHAQRQREHWQSLIAQEVLADPLLLSMVRLCGVREIVAFSLGAIIGDIKRFANSAKLVKYIGLNPAFDHSGEGQWKGGIGGHGRKDLRALLIESAQSIMRSPDHPQAKWGRHLMASKGSANLAVAAVARKLTVAIWYLMMGKWSALEEVDSRLDAKLGKIIANVGPPGLKALDKTRKQLKEESRQTIRTGRIYILHPLKKPAPRPEPDPLPHQKPDRCQHCGAPKALLTKKTNKTAGAQTSNQPQPSNQPLRPKTSAPQGHNP

SEQ ID NO: 145144 - protein, 364 aa, unidentified
MKKITTKKAMTSKRLERQEEFSCYIGIDLGDKHSCVCVLDRQGRIVEELRGRTTVQEFEEFFRKLGRSRVAMEAGSQSRWVSELAKKYGHEVYVANPHKVQYISGGDDKNDPGDAYKLAELSYVRPSMLHAISHRKRQEQVHLEAIRARDLLVRSRADMINAVRGMSKAFAETLAQCSAESFTAKAAGEIPEDLRTATAPLLRVIDQLSEEITELDQWIEHVARQHYPAYVLLEQVNGVGTLTALTYLLTLGDAGRFQRSREVGAYLGMRPRQKDSGSSSPQLGITKTGDAYLRKLLVNCAHYMLGRFGADSDLRRFGLRLAGRGGKNAKKRAAVAVARKLSVLLHRLWVGGEAYEPLRNSQAA

SEQ ID NO: 145145 - protein, 377 aa, unidentified
MTHAQMIQSKDSTQSNVMYIAFELSNRSWKMLSSNGIKRRQKSVTARDLKALKAEIEKAKHWLRCHEHATVYSCYEAGRDGFWLHRFLHSIAVNNIVVDSASIEVSRRYRRVKTDKVDAGKLLAMLIRHHNGEQKLWSVLHVPSVAQEDDRRIHREIERLKKERTSHSNRIRSLLVLHGIDMKVNRDFIQLLRQFKQWDGQALPQHLVAEIVREHDRYELVNEQIKQLSDQKTKQLEDQSEQMQQVCQLMMLKGIGPIRAWNLVYEFFGWRRFNNVKQVGAASGLAPTPYCSGDSSIEQGISKAGNRRVRTLMIELSWHWLRYQPGSQLSRWYQRRFGPNGKRMRRVGIVALARKLLVALWKYLEKGLVPEGATIKA

SEQ ID NO: 145146 - protein, 393 aa, unidentified
MICVGIDVAKDKHDCFILSSEGEVLADVFTIPNNAEGFDTLLQTIHRCARPEDKIKAGLEATGHYSYNILGFLLNEGLDTYVINPLHTNLYRKSLSLRKTKTDRVDARTIAAMLMSDVDLKSYTDTAYHNEELKSLTRYRFDKVRERAKLKQSVSRLVTILFPELEKLVSTLHTASVYALLSEFPGAKQVSEAHLTHLKAVLYDASKGRYGSDMATTLRDAARCSVGSVMSAKSLELRHTIRLIHELDAEIEDIGVAIQSMMDEIQSPITTIPGMGVRMGAMILAEIGDFSRFDSPDKILAYAGMSPSTYQSGQLSLSGAYSHMEKRGSRYLRYALYNATKYVCLWNPTFAAYLAKKRAEGKHYNVALSHATKKLVRLIYALEKSKRPYSTAA

SEQ ID NO: 145147 - protein, 324 aa, unidentified
MIQPALGIDVAKEKFNVCLINASDRLKHKVFPNTPAGFEQLSVWLEKFGIQSVKACLEATGTYGERLALFLHKAGHTVSVINPAAAKAFAASRLSRTKTDRVDAELIARFCLAQQPTAWTPPAAEVRELQALVRRLESLTEMRVMEENRLSSGISVQAVQESVRELLNHLSEQIKRTEKLIREHINRYPRLKQQSELLDSIPGIAETTAASLLAEIVDVTQYKSARQVAAFAGLVPRERQSGSSVRGRTRLSKIGNARLRKALYFPAMTALRCSPFFQTWAEGLRQRGKCKMSIIGAVMRKLVHLAYGVLKSGKPFDPQWAKSA

SEQ ID NO: 145148 - protein, 402 aa, unidentified
MKEFTPSETRIETVSALSAVSKVVLTMDDYAAYVGLDVHKDTIAVAVATPGREQPEYRGEIANRAKVVAKLLGRLSEQFDGGVLLFCYEAGPCGYKLYRQLIELGHDCQVVAPSLIPRKPGERVKTDRRDALKLARSLRAGDLTPVWVPDEEQEAMRDLTRARADMKGQEQKARQQLSAFVLRHGHSWPSNKSRWTQAHLNWLESLSFAHDWQQVVLQEYVDAVKAATQRVADITAQLMGAWPQWTLAPVVHSLVALRGVDKVAAVTLLAELGDLSRFDSPVQLMAYLGLVPSENSSGPRKRKGAITLAGNGHARRMLIESAWSYRFPARQTMHLKRKAKEASEPAKAIAWKAQKRLCGRYRTLLQAGKNQKVVTTAIARELAGFVWAIVCEVMPQVRTHAA

SEQ ID NO: 145149 - protein, 451 aa, unidentified
MAKTTKKENQSLQLAIIRPCCAGIDVGSMMMMVSYSDTEGNLYLMETDAFTEDLEKAAKTLRDAGISEVSMEATGSYWMAFYQILEEYGMKITLVNPRHFKDVDAQKTDARDSRWLHQLHAHGLLRASHIPQEVYRELRSYLHERNLLQQQKSDTLNRIQRVLTEMNIKVQHLISDIEGVAGMKLLRGIAKGISDPHALLELIDVHKLKAGREDLLKSLNGHYRPQFIKILQRQLVAFDFLKEQMKDYELLIEEVLKKMLPQDEQGNKPEIKKKKTLARKNQYSINVKDHLTHIAGIDLTEIDGLDEISVLEIISVTGLDMSKWKTSDHFTSWLNLSPRPKKSGGKIIGYDIRISNNKATQAFRMAAQTMWQNKGALGQLYRRLSAQRGTKKAIKAIARKLAVIFYVMVRNKIAFDKEKLKIDTARQEAKKIAFLKKEAAKYGLVLQNIAA

SEQ ID NO: 145150 - protein, 424 aa, unidentified
MSQKKSSLAGLQALFARVCGLDVHKKLIVACVRILDPKDGTVQSTLRKFGTMTADLIELRQWLVEAKVTHVAMESTGVYWQPVFNLLEGHFQVWVVNAQHIKKVPGRKTDMKDAEWIAQLLQCGLLRPSFVPDRQQRELRDLTRQQTKLVQQRNAVDNRIQKVLETANIKLGSVASDVLGASGRKMIEALIAGEKDVTVLAELAQKKLREKIPELQRALEGELSEHHRYLLRQLLGQYDFLEKEIKSVSERLGAVAPPSFRAAVEQLDAIAGVGERGARALLAETGTDMSRFPTHKHFASWAGRCPGNHESAGKRRSGKTPAANRHLDAVLTEMAHAAVRTKNSYFKSQYHRLAGRRGKKRAIGAVKHSLLITVYFMLRDNKPYKDLGVDYFDKLNPQQRIRYHVRKLQELGQEVELSPMATAA

SEQ ID NO: 145151 - protein, 460 aa, unidentified
MTLLERLGSPLPRRNYLGVDVGYKEHVAVVISLQTFARGDGRWKRARCIHFPSTQAGLRKLQRYLDGFSTDRSEFLGLCEPTGGYYGATVFQYLLDQEYNMNLVENATTRHMREKIFPGVPKTDEMETRVMARIGYLHEAVGEEFTLRPLELPDPDDADLLALCRDSWKLSTMITRARNQFTQLMAVIFPELKTFFTGSVSTVVPVSLVATYPTPALLAEAPAEEVHQVLWKAKGYHHARRVVELQALAHDSSGLLPDPGRAWRLEWLTNFLLTNFQHQAVLNKRIKELVEQREDYPLIVNVPYSGPTTLGVILAVTHDVSRFPNYRQYVAYSGYFAGLEKSQTIDRTRMSRRGNRDLKRALFQIAAPLVWFDQGDNDYKGLFQHKMAEGRAWYEAMPFVCAALARHIYHCLKFKDPYDAEKAFRGSSSTPASEQELADLRADLDEKFEEMEAYLHQMEG

SEQ ID NO: 145152 - protein, 410 aa, unidentified
MEVLHAHCVGLDVHKDSVVACARHMVDGKVSTRVKTFKTTTQELMALSEWLSAEAATHIAMEATGVYWKPVWHILSDGEFELILANAAHVKNVPGRKTDVNDATWLADLMAHGLIRASFVPDEPTQQMRDLLRTRKQMVRERSSHVQRIQKTLEDANIKLDSVVTDIVGLSGRRIVEALIAGQTMPQALASLAHRRIHASVDELEAALRGRMTAHHRFMLKLHLDQVDAIDAALARIDEEVNANVEPFRVAVEMLSTIPGISRLSAEVIFSEIGIDMNRFPTAGHLISWAGLCPKNDESAGKRRSNRMKKGAPWLKTTLIQCAWAASRKKNSYLQAQYLRIRSRRGAKKAIGAVAASMLTAAYHMLKEGTLYQDLGANHFDNRAKGKQVLRLVNRLQNLGFDVQITPLAA

SEQ ID NO: 145153 - protein, 401 aa, unidentified
MNMNAVGIDVSKGKSMVAILRPYGEIVSSPFEIKHTSNDIHSLIEQIKSIDGVSRIVMEHTGRYYEPLARELSRAGLFVTAVNPKLIKDFGDNSLRKVKSDKADAVKIARYTLDSWTDLKQYSLMDEIRNQLKTMNRQFGFYMKHKTAMKNNFIGILDQTYPGVNTYFDSPARDDGSQKWVDFATTYWHVDCVRKLSLNAFTDHYQKWCKRKKYNFSKTKAEEIYGAAKELVPVLPKDDLTKLILRQAVEQLNTASKTVEELRTLMNETAAKLPEYPVVMEMKGVGPSLGPQAEIGDVTRFTHKGAVTAFAGVDPGVNESGTYAQKSVPASKRGSSALRKTLFQVMDALIKTKPQDDPVYMFIDKKRAQGKPYYVYMTAGANKFLRIYYGRVKEYLMSLPE

SEQ ID NO: 145154 - protein, 414 aa, unidentified
MEVIHPRCAGVDISKKDAKVCVRIQGRGGRSTASTVTTWGSMTGQILGLKEHLLEEHVDLVVMEATGDYWRPFYYLLEDDGLNIILVNAHDARNVPGRKTDVSDAAWLADLGAHGLVRASFVPPPPIRELRDLTRARTIITQERTREIQRLEKLLEDACIKLSSVASNITGVSGRLILQALIDGQTDPAALAEMAQRRLRSKIPELTQALTGRFTEHHRYLTELYLHRIDAHTADINDLSTRIEAAMEPFRFARELLVSIPGFSTTIAEVFIAETGADMSTFATAGHLASWAGTSPGSNESAGRIKSTKTRPGNRYLKGALGIAALSASRSKNTYFAAKYGRLAARRGPMKALVAIEHAILTAAWHMLTTGELYNDPGADYFTRQKPAKAKARAIAQLASLGYQVTLEPLRQTG

SEQ ID NO: 145155 - protein, 358 aa, unidentified
MSIVAHLYSFFIGVDTHARNHVYSIVTNTGILVETRSFPTTSAGIKRALTWAGRRTSGDLDILWVVEGAASYGAVLTGHIAAAGYPVVEAGRMDAKARHGVGKSDELDSRRIAASVLPLDADQLRWPRHGEGVRQALRVLLAARDAMSTERTRAINSLTALVRTIDLGIDARKSLTSDQVDEIAKWRTRNEDVDLSTAREEAIRLAKRVLALNDDLQDNHDRLTELVEASPAAPLLDEPGIGPFSAAVCFTAWSHPGRVRNEAAFAALAGVNPIPASSGNTRRHRLNRGGDRQLNRALHTVIMNRMVHDERTRNYVARHYGEEPTKKSKREIKRNLKRYLARRVYKILNALDTVPRPA

SEQ ID NO: 145156 - protein, 442 aa, unidentified
MSKNLSEPESNTEPYLSVGLDVGADFTFMSIALPNGTFVGNPFKITHANPESRELAVKKIKEAQEQFSLKSRCFLESTGIYHIPLMRFLSDKGFVCETINPIITKNSTNIGIRKVHNDKFDSKKIATIGLMSSVKTSITPSDEVVNLRNLVRDYFYFKDLQSAIIMKLTAELKVSFPQYKGIFSKITTKTSLKLLEKYPLAKNILEADKDNIVELIRSTARFGEKYAKTKYDALIAAAQDATIFGRSIDSNATRIQLYVRQINFYQTQIAELLIALHKTVDNLNEPLIRERINLLQTLQGVGFLSAVVLIAEMGSFELFSSPKKLFAYFGLDPAVKQSGKFTGDKVHMSKRGSKLARRVLHMIAINNLKVSGKDKIPVNHVIHDYYVAKCSSKKKNVAVGAVMHKVCNIIFAMLRDNRPFEIITPVEHCKHFWDTKSTKNVA

SEQ ID NO: 145157 - protein, 322 aa, unidentified
MELFHLGIDVAKAKLDCALRSPEGKIRHKVITNDAAGFAQLQAFLSRQHALTLHVCMEATGVYWEPVAEFLAALPHVTVSVINPAQIKAFAASRMVRTKTDKVDAALIALFCHERSPEPWQPPSEAERTLRALVLRLDSVQSMRTQESNRLLVAQSALQQGITQHIEWLDAEIERLARAIRDLLDQDDDLDDKRRLLDSIPGLGERTIAILLAFYARVSRFDNARQATAFAGLDPRQHQSGSSVCAKPRMSKVGHSFLRKSLYMPAMVALYRTAWGKLFRQRLSSAGKPPKLIIGAMMRKLIHVAFGVLRSGKPFDPTAHGA

SEQ ID NO: 145158 - protein, 343 aa, unidentified
MPYRIAGIDVHKKMLAVVVADVEIDGDFHFKRQKVGTTPADLRRLVDWLVEHEVEEVVMESTAQYWRPVWEALEQHWRPRRRARDGVPRLAGTLHLAQAQSNRGPGGRKKDFPDAERLVKRLVAQELTLSFVPDTEQRLWRTVMRRKYQITRNRVQLHNRLEALLEEAHIKVSSIVSDLLGVSARRMLQALAEGETDPAALAALAASRLRATPAQLCDAFHACLTLHPVYRRLLKLTLEELRVIEDHLGQLDQQMADLLAAHHDAVQRLAEVPGLGVDSAQQIIAEVGATAATFPSPKHLASWMGACPGNEESAGRELQPPVPQRQSSDAARPQSGRQRRRES

SEQ ID NO: 145159 - protein, 390 aa, unidentified
MFYLGIDIGKSFHVASLIDNKKNVIFKGFQFKNTTGDANLLLEKIAPYPEIEIGMEATGHYWLALYSFLVKNNFVVHVVNPIQTDSWRNSTKIRPHKTDKIDSLIIADFIRYGEFSETSLASEEILEIRNLSRFRISLVDSIGDLKRKTICVLDQIFPEYESVFSDIFGKTSKEILNFFNSPADFENISAENLNRLLEKVTMKKFTETKIKQLSNLAKNSFGISFGLQSLKFQLQLLIKQMSFIEEQVADVEQKISELLDKLNSPITTIPGIGKVIGATILGEVGDIKRFSSPAKLVAYAGLDSRVEQSGTSENFSGKMTKRGSPYLRTALFRAALVASNIDPVFKAFYQKKRAEGKHHLTCIGAVARKLCYTIHAILSKNCVYEIQSTS

SEQ ID NO: 145160 - protein, 342 aa, unidentified
MYYIGLDVHKKTISYCVKDVSGQVHQEGKVGATRWELDDWMKTLPQPWTVAMEATIFTGWIYDHLLPHAQQVKVAHPLMLRAIAAAKKKNDRIDAGKIADCLRCDFLPECHMASTAIRDRRRTLRYRHLLVRQMVQMKNRISGLLMETGVSHNKQRLHKVGYFRELLTSNEEVNESIRPLLRVSRDSIVRLQKTEYALVSSLQRDPLLAERVKRLRTVPGVGPITALTWALEIGEVSRFPSIRQAISYCGLCGDEKSSADKVTRTPLSKQRNKHIQRVLVEAAKLAPRQDHNLALVYEREKQKGNANRATLAVARKMVAYLLAVDRGQRDFVPFADSQSAAA

SEQ ID NO: 145161 - protein, 412 aa, unidentified
MDIVHERAAGLDISKRDAKVCVRVPGTRAGTYTSRVTTWGATTQAILELREFLEREQVTAVVMEATSDYWKPFFYLFEETLPVMLVNAKAARNIPGRKTDVSDAAWLAQLAAYGLLKGSFVPPEPIRELRDLTRARAIAGRDRTREIQRLEKFLESSGIKLSSVVSDLTGVSSREMLEALISGERDPEVLAGMARGTLRSRVPALVDALTGRFKPHHAFMARLHLDQIDAHTRTIEALTARIEEAMEPFREARQALATIPGVSLKVAEVIIAETGADMRVFETPARLASWAGVCPSANESAGRIKSSHILPGNKYLKAALGTSALSATRTQGTYLAARYHRIAARRGPMRAVVAIEHSILTAAWHMLANGECYTDPGADHFTRINPSRAKNNAIKQLNNLGYNVTIAPITAA

SEQ ID NO: 145162 - protein, 346 aa, unidentified
MQFYTKQHKFYCGIDLHTKKMYVCILDETGQVRAHKNMKTDPESFLATIAPFREDIVVAVECMFTWYWLADLCQKEGIPFVLGHALYMKAIHGGKAKNDKIDSQKIAALLKGGLIPQSYVYPEKMRATRDLIRRRNHLVRKRAELLAHIQNTNSQYNLEEPFGCLTPVKNREGIAERFTDPVVQKSMEVDLTMIRSYDIMLGDLERTIIRLARHHEPISYALVQTIPGVGKILGLVILYEIENISRFSTVQDFASYARLVKCAHESNGKKYGNGGGKIGNAHLKWAFSEATIIFLRGNEPVKKYLERLTRKHGKGKALSILAHKLGRAVYFMLKNKEAFNQEKFMR

SEQ ID NO: 145163 - protein, 355 aa, unidentified
MDSKKYIGMDVHKESISIAVMNGAGKIVMECIIETKASMILQFIDGLRGDLQVTFEEGTSAAWLYDLLKPHVTKLVVCDPRKNKSMREGNQSDKIDARRLAELLRLDHLTPVYHGEHGLRTLKELVRTYLTVTKDLTRVMSRVKAIYRSWAIPCTGKQVYAQRHRAEWLGKINEPGVHRRAEFYYQQLDALRVVRQEVRRDLLAESKKQKAWKRLCEIPSIGPIRAAVLLGILQTPHRFRTKRPLWNYGGLAIEMHSSADHRRVNGQLQRSRKNVLVRGLNRNCNHDLKNLFKGAAAVASSKPGPFQEFYTALLAKGMRPEMARLTLARKIATIVLIVWKRGVCFDAQHLKPQTA

SEQ ID NO: 145164 - protein, 316 aa, unidentified
MNEEPVVVGIDVSKRHLDVALADRLERVTNDAAGLAALIAMTAAAAASLVVLEATGGYETAAVLALQGAGIPVAVINPRQARDFARAQGRLAKTDAIDARVLGRFGAVMRPSPLPPIEPGRAALVGLVARRRQLVDMLVAEQNHLEHAAAAVRSWIEDHCVALRNQLAQVDAAIAAAVEADLALARRRAILVSVNGIGQATAAVLLAELPELGRIEHRQLAALIGVAPVNHDSGQFRGQRHIAGGRASVRCALYMATLSAVRHNHTLQTFYQRLRANGKPAKVALVAAMRKLATILNAVVRDDRPWQPSSPLQHGC

SEQ ID NO: 145165 - protein, 359 aa, unidentified
MSSISPPEPLSKIIIGVDTHKHVHVAVVLNNDGQRLGDLRVPVDSLGYQELDSWAQSFGRIIAYGIEGTGSYGANLTSYLRRQGRKVVEVNRGDRRARRANGKSDTLDAELAARSVIAGTSTAVPKSADGTVEMIRKIKVARDIACKNRTSAIISLKTVIVNTPQELKEQLDSLGDKALIQKCSGFRPGTVDDPISAAKHTLRALARRWEFLNAEVKDHDAVIAKLTTSLSPTLCDGFGIGPDTAAEILIVFGDNPDRVHSEAAFAKLCGVAPIPASSGMTTRHRLAWNGHRQANAALYRTAIVRMQHHQPTKDYVAKRTAEGLSKRDIIRCLKRFIAREVYGRVMTDFRARTALSAAA

SEQ ID NO: 145166 - protein, 360 aa, unidentified
MQWSHLEHTSYLIEQLKALEVSITVVMESTSTYGDSLRYQCRQAGFAIYQANAKKVHDAREIYDGVPSLHDAKAAWLIAKLHKDGATKLWCEPTMEERRMNALRLEYELHQDQHLRNQNRLEAYLSRHWPEVLTIMPLDSVTLEQLIKTYGSPQKIAAQAEQAALDMRGWRKSGLLTDKIANVIASAKNTLGEPCIEAERQFLMALASELQHSRQHKQLAKQALETIVENDEELREMGRTVGKVTTAVLLGLHLDPRRFATPKSYQKVFGVNLTEKSSGQINGRLRLSKRGSAIARKFLYLAALRLLVNDPMVGKWYEAKKDERAKLKTVIALMRKLPLALWHIARGETFDAGKLLKVAV

SEQ ID NO: 145167 - protein, 335 aa, unidentified
MEFEFFIGIDVSRNELDFAVQKGERLLFHREITNQAGAIAAFIKELGKLSGFVLSKAVFCMEHTGIYNNHLLQVLHKKKASICLEAATQIKNSLGNIRGKNDKIDAIRIAGYAYDKRSKLRLWQPKREVVQQLAHLSATRLRLITVKKQLKVPLKEQAAFNTKQNSRQNLQICSHSLKAIDADITRADKAIEQIIAADEELSRIFKLVTSVSGIGKVTAVQIIITTNEFKDINNPKKFACYSGVAPFTDDSGKVVKKARVSHMANKKVKTLLHLSAIVAIQHNSDLKLFYERKVIQEKKNKMSVINAVRNKLILRIFACVNQNRPYEKNYIKSVA

SEQ ID NO: 145168 - protein, 419 aa, unidentified
MFKIFRFNCCGLDVHKTWIYACIGITDSNGRTEYKEKRFSSFSKGLRELDEWLTLYSCDDVCMESSGKYWIPVFNVLEKNHKVTLAHPKYTKPQKGNKTDRKDAKWICDLFMCNLIKPSFIPPPDIRQLRDLLRYHRKLTNMETGEKNRAQNCLTVSNLKLDEVFSDVFGKSALSITKYILDHPGESFDVSPFVHGRCKTPIEEIQAAVDGAISKEQAIKLRQCLEHIDQLEGHKQSIKDEILTITKSYSETLELLRTIPGFDKNPITAITVLSEIGSDMTVFPSAKHLCSWAGCCPRNDQSNQKVKCRRISQAGTYLKPILVQIANALIKSKSHTEFVERYRRLKSRRGHKKAIIAICKMLLTAIWNILSKHVPYTNEGYFLSSPTIKKNRVFTTAQALTLLRLRGYTISDDNRHLTV

SEQ ID NO: 145169 - protein, 344 aa, unidentified
MQLTRIGIDIAKQIFQVHGVDRHEQPIWRKRLSREQFLKAVLKAAGPGCEIGMEACGGANHWARQLQAHGYRVKLIAPQFVKPYVKSNKNDANDAEAICEAMSRPSMRFVKVKTTAQQDLQAMHRIRASLVQQRTAKDNQIRGLVTEYGFVAPRELHSLRRAIPCWLEDAENGLSMAFRQLLDGLWHDLQGLDARVTELDAQILAAAKADPAAQRLQQLRGVGPLTATALVACVGDASQFANGRQMAAALGLTPRQHSSGGKERLLGISKHGDAYVRCLLIHGARSALQTAPRHDDRVSRWAVRLAARAHPNVACVALANKTARMAWALLYRNTDYQPERAAAA

SEQ ID NO: 145170 - protein, 367 aa, unidentified
MDHFAGLDVSVKDTSVCIVDDAGRIIREVKVASEPDALLAVLTNRIYHFKRIGLEAGPLSQWLFSALAEAELPVICVETRHMRAVLKAQINKTDRNDARGIAQMMRVGLYRPVHVKTLRSQKLRMLLTHRKLLQSKAIAVDNDLRGTLRNFGLKVGMVGTAKFEARIRELVENLPDLAVLVEPLLVVRRVLREQIGILHRRLLAIVRDDEVCRRLMTVPGVGPVVALTYRTTVDVPARFRKSKSVGAVFGLTCSRDQSGERDRPGAISRCGDEMMRAMLYEAAQSMLGRSSRWSWLKAWATQIAKRRGMKRAIVALARRLAVIMHRIYGPAVRCKGIRTEWSFWSALIYPASRGSSCSGPSWLSAHT

SEQ ID NO: 145171 - protein, 360 aa, unidentified
MPMLAEVVDAVVGVDTHRDTHEVEIASPSGVPIARCSIRNDSTGYAQLLAWIVDHAPGPRLVASIEGSRSYGVGLSRALTAAGLPVLESEQPPRSARHGKGKSDAIDAHLAVLSALRLDATHLPAPRVDGDREALRILLGARHDLTVAATAQTNRLRALLLGSDNDADRDLARGALSDAVLTELADRQPRASATREQAVRHGEIRRLALAIRDGGRALKENRAQLQAVVEDMAPGLTDRRGIGPVTAAQVIVGFSHVGRCRNDAAFAALSGTSPLEASSGRTVRHRLNRGGDRALNSALHTIAMVRMRCCPRTKAYVARRTAEGKTTREIRRCLKRYIARELHRALTATMAATTASDSPA

SEQ ID NO: 145172 - protein, 356 aa, unidentified
MRTQVIKKIDFSEQNLYIGLDVHKKSWQVTVLSEAICLKTFTSPPEPNSLFHFMECNFPGASYYSAYEAGFSGYATHRQLNALGIENIVVNPADIPRRDKDSHYKTDKSDSRMIAEALRAGLLKGIYVFDPESEGFRGLFRSRLALAKDIRRTKGRIKGFLAFKSISIPGEFIRNPKSSKYLNWLKGLDFQFPTARIQLDQLINNLLFLMEQRRMLEQKLRDTARKRDRHLFKILQTVPGIGPITAIGIMAEIGEIGRFKHFKQFASYVGLVPRLHQSGEKDQTGSITYRSNNYLRPLLIESAWQAVRADPAMLKYYQENCLKGNAKKAIVKVARKLLSKIMHVMRNRVKYERGIA

SEQ ID NO: 145173 - protein, 286 aa, unidentified
MNNEKYIGLDVHQATVVVAVLDSTGKLVMESIVETEAATLLQFFARLRGTLAVTFEEGTWAAWLYDLLQPHVDRLVVCNPRKNALLKDGNKSDRIDARKLAELLRGNQLKPVYHGETGVRMLRELSRSYLTIVKDLSRVMNRLKAVYSSWAIPCGGRDVYYTRNRAQWLAKLREPGVRRRAERLYEQLDMLRHLRQQARRELLAESRKHAITAKLRQIPYLGPIRSALAVALIQTPHRFRTKRQLWAYSGLASETHISAEYRLVEGQVRRSKKVYTNHDPGGPQGT

SEQ ID NO: 145174 - protein, 338 aa, unidentified
MKTYAGIDLHSSNNYIGIINEQDQRLYGKRIPNELDRVLMALEPFKDTLQGVVVESTYNWYWLVDGLQKHGYKLHLANPAAIKQYEGLKYTDDKWDSFWLAHMKRLNILPEGYIYPKQHRAVRDLLRRRLLFVRHSTSHILSLQSMITRNLGFKMSGNAIKKLKGKEVEEMFDSSNLVFMAKNNIATIQFLKKLIKDIAKKVKSQVKLRKEFNRLLTITGIGDILGLTIMLEVGDIKRFAKVGNYSSYCRCVKSARFSNGKKKGENNKKNGNKYLSWAYVEAANFAIRYSVKAHSFYQRKKAERNGIVAIKALSNKICRASYYIMRDRVPFNEEMLFR

SEQ ID NO: 145175 - protein, 349 aa, unidentified
MSQIAQTAVAVIGIDIGKNSFHIVGHDERGAIVLRQKWSRGQVEARFANMPPCLIGMEACVGAHHLSRKLNSLGHDARLMPAKYVRPYSKGQKNDFRDAEAIAEAVQRPTMKFVATKTADQLDLQALHRVRERLVSQRTGIINQIRAFLLERGIAVRQGQRFLRAELPRILATPPDVLSPRMVRVIEDLAGDWRRLDERIEGLSAEIGALARADSGCERLMSVPGIGPIISSAMVAAIGAGDAFSKGRDFAAWLGLVPRQMSTGDRTILGKISKRGNRYLRVLFVQAAWVVLIKPTSWERHGLKHWIEAAKKRLHHNVLAIALANKLARIAWSVLARGRGFEASKLHAA

SEQ ID NO: 145176 - protein, 344 aa, unidentified
MDHFAGLDVSVKETSVCIVDDTGKIVREVKVASEPEALLAVLKNPFYHFRRIGLEAGPLSQWLYSALAEAELPVVCVETRHMQALLKAQINKTDRNDARGMAQMMRVGLYRPVHVKTLRSQKLRMLLTHRKLLQSKAIAIENDLRGTLRNFGLKVGMAGTVKFEARIKELVGKAPELAALVEPLLVVRRVLREQLVILHRRLLAIVRDDEVCQRLMTTPGVGPVVALTYRATVDVPARFRKSKSVGAVFGLTCSKYQSGEIDRSGRISRCGDEMMRVMLYEAAQSMLYSKKWSWLKAWAMQIARRRGMKKAIVALARRLAVIMHRIWVDGTEFRWTRGQTAAAA

SEQ ID NO: 145177 - protein, 345 aa, unidentified
MKVMIGVDPHKGSHTATMLDGHERELRRIKVRAGGRQVAELLEWADGVKPRTWAIESAGGMGYLLAQQLVATGETVVNVPATLASRVRVLASGQSTKSDPNDARSIAIAALRAPALAPVRAADHTTVCRLLVKHHNDLARWRNKLCCRLHALVGELVPGGIDREVVVSQARRLLEAIDPHDVAAVERHRQAVELVAEIVRLDAQLRDSRQRITTAVIASGTTLTEIFGIGPIVAGMLIGYSGDPTRFMTASRFASYTGTAPIEFSSGGRITHRLSRRGNRRLNHALHIAAITQIRYPHSPGRAYYDRKLAEGHTPREAIRSLKRRLSDVVWRHLVDDARHRLAAR

SEQ ID NO: 145178 - protein, 429 aa, unidentified
MSYRIAGIDVHKKMLAVVVSDVEIESEYQFERRMFSSNPEQLRSLAAWLVEQKAEEIVMESTAQYWKPVWETLERYWKPLCEKREGARRRSGTLHLAQALSNRGRRGRKRDFVDAERLVKRLVARELTLSFVPDAEQRLWRTVTRKKYQLRRDLVRIHNQLEALLEEAHIKLSSLVSDLLGVSARRMLKALADGETNPAALAALAHQRLRATPEQLCDALGACTELKPVYRRLLKMTLEHLQILEQQIGQLDQELATLLHPHQDAVERLAEVPGFAVDSAQQIIAEVGPAAATFPSEKCLSSWVGACPGEEESAGVNYSHRSPKGNRHMRRLLNQTANAAVKAKGSIFEIIYRRCVPRLGHNQAIGVIAHRQCRLIWLILHQGTRYEERGPAVTKRSRYQRTWRMIRQLRNLGYRIELPNPQAGQAQAQ

SEQ ID NO: 145179 - protein, 428 aa, unidentified
MIDNQIHHLGCDRSDYHLDLTLLEAADEQPEHTKIPARAAELSGYLGQWRRRYPRHQLAVCFEQPAANLIAMFSRFEFVILYAINPATLASYRDAFVTSGAKDDPSDSYWLADLVRTHADKLSAWNPHSPQLRRLAALVQARREAVNLLTAHNNRLISLLKSYYPEALDLIGENHTSMMAVDFLSRWPTLQQLKKSRWSSVLLFYRKHRCVRKSALERRRELIEHAEPISDDAALLEPAVMHLELILGQITPLTQAIDRYAQQIQACFQQHPDHGIVASFPGAGPVFAPRLLAAIGEHRDRFEDASALQCFSGIAPVMKRSGTMCRVKRRHACPKFIRQSFHEWASESIRHCRWARAFYAQQRLRGRRHHTSVRSLAFKWQRILFRCWQSRVPYDDETYMKALQRSNPTLYQEATQIRLPKDKPLAAA

SEQ ID NO: 145180 - protein, 310 aa, unidentified
MDIIAVGIDVSKDRLDVALRPSGEIFAVERNASGLDRLIERLRQLAPRIVALEATGGFETVAAAALASASLPVVVVNPAQIRAFAKALGQRAKTDPIDAAVIAHFAEATRPEPRPLPDEATRLLADLVARRRQIIEMIGAERQREKRTSMPRLRKSIGRVVGMLEKELAGLDADMDDAVRGSPAWREKEDLLASVPGIGTTIARTLIADLPELGTLSRKQVAALAGLAPFARQSGQWRGRSFIGGGRASVRTALFMGALVAMRHNPVLKGFFERLRAAGKPKMVALIAVARKLLTILNAMVRDNKRWQNA

SEQ ID NO: 145181 - protein, 340 aa, unidentified
MSVLYAGCDLHGNNNLIGIIDGEGKRVFKKKLSNDLGLVRDTLKPFQEKLVGIVVESTYNWYWMVDGLMEKGYQVHLANPSAIQQYSGLKHSDDKHDAFWLAEMLRLGILPEGYIYPREERPVRDLLRKRGHLVRLRTSLIISLQNILSRNLGRRVKVNDVKALKEDRISPLLERNEDLALAGRVSKEAIDHLTGQIRKIEGVVEKKIKLKEEYRYLLTLYGVGKILSLTIMLETGPISRFETVGDYVSYCRKVPSQWTSNGKRKGSGNSKNGNKYLAWAYSEASEIARQLYPEARAYYHRKMQKTNAAVAHSALANKLSRAGYYVMRDQVPFEPEKLFG

SEQ ID NO: 145182 - protein, 389 aa, unidentified
MLLDHPSDGPTAIRTHIGAIFVSLELSRSHWLITSLSPGKGEKMSKHSVTAGDVAGLMKLFAELRRKAAARTGESYPIVTIQEAGLDGFWLHRVLQQNGIESHVVDPASIATPRRRRRAKTDRLDGETLLRALLAYKRGEPRVCAMVVAPSPEEEDRRRLCRERRTLIEERITQVNRIKGLLFAQGISDYAPLRRDRRARLEALRTGDGRELPSHLKAQLGRALDRIELLVDQIKAVEAGQEALLAAARKPASEEAVPDPVTMLLALKGMGANFAAVLWSEAFYRQFANRRQVAAYAGLAATPWQSGGIRHEQGVSKAGNPRLRTTMIQLAWLWIRHQPQSALTRWFKERSQQGRKRAIVALARKLLVALWKYVTQGVVIEGAVMKPAA

SEQ ID NO: 145183 - protein, 388 aa, unidentified
MPRQLNDLSRSLVALEQDATLIAVIEMSQSSWLVAGIVPGIERQPLKKLAPDQHALLQLLHRWQKEANEAGQVIKRITVAYEAGRDGFWLARWLRAREIEAYVIHPSSVPVSREHRRAKTDRLDTELLKRAFLGWLRREPKHCSMAAIPTIADEDARRPSRERENLVKEATRLVNRIKANLAGLGIRGFRPHLARAARQLQTLQTPEGAALPANTLAELRRDMDRLRFAKQQIKQIEAARIERLEREPTEQRHAMVRLLGRVVGVGVETADMLVHEVFARRLRDRRAVARYAGLTGAPDESGTKRRERGLAKAGNARVRRGMIQLAWRHLLHQRDSALAQWYRARTADARSRTRKIMIVALARKLLIALWRLLTTGEAPAGLLIRPAA

SEQ ID NO: 145184 - protein, 388 aa, unidentified
MTPTSGSLSHPITLDYENTLVLAIELSKASWVLAAQVPGLPRIKAKQTVEPRTEALLAAIDGYRARSRAAGRTIERVVAIYEAGWSGFWLARWLARHGAETHVVQPSSVPVDRRARRAKSDGIDAELLLRTLLAWFRGEPRVCSMVPIPDEADEDERRRVREREDLVAERVSLVNRIGAVLATLGVRDYNPLRRDRRARLEALRTALGDPLPPHARARILRMLDRLELVCAQIAELERMRDAVLEEEAPDKAEGMIQQLAGLRGIGVQSATVLVREAFVREFANGKTLGSYAGLTPTPFSSGTTEREQGIGKAGNRRLRTVMIELAWLWQRYQPGSAQASWFRERVGGTGRRMRKVMVVAMARRLLIALWRFATQGVVPEGAVLNPAP

SEQ ID NO: 145185 - protein, 385 aa, unidentified
MLYVGIDIGKFHHEASIVNEQGKEVKKSLRFSNNREGFQRLISWLPHSAISFAIEATGHYWFTLFDFLTNKNFPIKVVNPIQCDAYRQSKIRKTKTDKRDSFIIADLLRLGLIQETISTQKWILELRDLSRFRFSLIDQISDLKRHLIAILDKIFPEFEDLFKSPFLKSARELLKAHPTPEDIASLSIKELTQLLTQNSHGKFTEEKAEKIKLQAANSVGLTYLKDSATVQIRCLLLHIEFIEEQVKLLEEKITEIVQQHQTFLTTIPGISNVLAGTIIGEIGNIDRFSSPRKLTAYAGIDPTTFSSGEFEATQTHMSKRGSPYLRRALWLAATCAWKFNPDLRDYYNRKIAQGKHYGTVIGAIARKLIYRIYTVVKEQRPYKVS

SEQ ID NO: 145186 - protein, 354 aa, unidentified
MKNLQRLKSLPANADIFLGLDLAKTSWHVTARYAGETLADFAAPAKPTSLVPPLDAVGHCRVHSVYEAGPFGYSLHDWLAARGVDSIVCAPGLVPTQVSNRVKTDRRDALKLATLLEAGLLRSIVIPTLQQRADRELVRERDRIVRRRRAVMVQIRAFLLTYGIEPPIRCVGPWTKQFVAALEALALDDRLLQATFDSLLRGYREVDRHLLEHTRLLRQLARDDRHAATVTLLSSIPGFGLLTSLTFSVEIFDWSRFESGETLSSYLGLTPSQYSSGERVRMGRITRVGNRRLRSLLVEACWNALRVDPALRKTYDDLKRRRGGKRAVVAIARRMCHRIAAMTRTGECYRLEAA

SEQ ID NO: 145187 - protein, 365 aa, unidentified
MFVGIDISKGSLMAHAIDQDGKDIFHSFKVKNNKPGCNKLIDFIYKHANQADFDVIKVAMEATNVYWEHSFRLINNSEKLNLNFKLSISTFNPKVVKNFKGAYNNLPKTDSVDTWVIADKLRFDRVSNSSVPEEVYRPLRELTRFRFKLVRNIHSEKSRALNLVFLKFSNFENEAPFKAFSEASLDQIITDLKKAARNSYRLKPKMNQAIAQTLSMTFDNIRFLQNQLNKSKKVIKKELKAIPQTLVTVPGIGVILSVGISSEIGDINRFNNQAALASYGGLTWSKHQSGSFIAEETSMTKTGNKYLRYYLVEASNSLRVHNEEYKKYYESQKHKHKRALVLTAHKFVRLVFALLSKGEIYQPRR

SEQ ID NO: 145188 - protein, 416 aa, unidentified
MDTKQRKYDLVKGVLVVGVDTGKRRHVAALRAPGRSVEKRVPFDNDRKGFQRLAEEVDQYRERMKLTRVVLGVEPTGHYWLPLAYWWEENQGPVVLVNPMHTKRAKELEDNSPLKNDPKDAAVISWLISDAKYRECHLPRGIFATLQNLVQQRARCGNDEGRLVNQLHQTVEHIFPELEQAFSSFRVKSCREMLLRYADPEVVAQMRAEDLGKQLRKWSRGKLGEERAEKIIGLARESVGLREGKAAINSEVQRLVRRLALVGEERKDLEDKIKNCLPEVPGAALLLSVPDFGVWTVAAILAQTGDLRNYEHPDQVIKLAGLNLYEISSGEHKGRVRITKRGQGSLRKILYMAALRACRRRGTLHSYYESLVGRGLAPTSALVAIMRKLLRVTWTLVKKSQRFDRERLIPAPAKAA

SEQ ID NO: 145189 - protein, 428 aa, unidentified
MNCNTQNAKIASITEKTLIVGIDVGSETHYARAFDWRNYEYTRKPLEFSNTEAGFQTFKAWMGDIAAKHGKTAVIPGMEPTGHYWFALGKFLQDSGMRPVHVNPHHVKKSKELDDNNPNKNDRKDPKTIAALVNEGRFSYPYIPTGIYAEIRSLSNLRFQTQEELTRIKNRLARWFAIYFPEYKDVYGDLKAVSGRMVLKEAPLPEDIRKLGVEGVNRIWRDAKLRGAGMKRAKTLVSAAGHSVGSKEAPGAARMELKNLLNDMDVYTSRLEELLVKIEEKLKEIPYVDKLMGIKGIGLSTVSGFIAEVGDIGRFDNPKQLQKLAGYAIVSNDSGKHNGESRISYRGRKRLRYVLYEAAISLIGKNAEFRAIHEYYRTRKENPLKKMQSVVAVACKVLRVFYTILTKGVDYDAGKLMGDIRRPQIQAA

SEQ ID NO: 145190 - protein, 399 aa, unidentified
MLAVVVGHPSQPRETEWKRRKFGATVPELQRLREWQGAEGVQEVVMESTAQYWKPVWIALEGEFELQLTQARSNKAPRGRKSDFADARRLVKRWRAEDLTVSYVPAAEQRRWRAMTRFRRQAIRQRVQLQNQIESLLEEGQIKLSCVGSDLLGMSGRRILRALADGETDPQKLAEMRDARVRASEEEVKAALGGQLHPLHCRLLRLSLDRVEQIDQQIGELDMDLGQAMQAHQEAIARLVALPGLGVDSAQQVIAQIGPEAAAFPTPEQLASWVGVCPGRQESAGVSMSQRSPKGNRPMRRLITQLAWAAVKAKESYFQILFRRWVPRLGAKKAIWAVAHRLLRLIWKVLHKGVSYEERGPLGLNKNALHRRKRRLLRDLRALGYKVILEPLPTQGSTV

SEQ ID NO: 145191 - protein, 358 aa, unidentified
MPMLADQVDAVIGVDTHHDTHTASIVTPLGAELAHLQAPADAAGYEALLDFARTHAPGPRMVWALEGTRSHGTGLARALQDCGERVVEVDRPKRPVRKRGKSDPIDATRAARDALTQERLAEPRADGAREELRVLLVARDHHARMRTATVNTFKAFLLTAPEPLRAQFRGMPTTAQIVHAAGLDAAEQADDAVLTATLAQLAGVVRMLDTFLAANKTQLTALTSAWMPELPAEFGIGPVAAAQLLVSWSHPGRCRSGAAFAMLAGTAPLPASSGRVTRHRLNRGGDRQLNRALHIIAIHRLRHDPRTRDYADRRRAAGSTDRETRRCLKNYLARHLWRVMEHHQPAGGPVPAPEYTAA

SEQ ID NO: 145192 - protein, 359 aa, unidentified
MATNVKGNRIDFNGKTVSIGIDMHKHSWRITALVEGDIVLAVTLARPSYDSFNKILAQFKGNYVRIAYEAGPGGFNLYDRLTADGIECMVTPPSLIPTQSGSRVKTDKKDSLKLAKLLESNMLKKVWVLSPEQRAHRQLVRTRRQIVNHRSDVMRQIKSFLLFQGIEIPFSSRQQWSGPFIKWLHELDCGDEYLQKSLEALLRLFESLSAERKRLTHEVVELSREKKYLQRVKLLKTIPGIGCVSAMEILVELQDITRFHTADELAAYLGLTPSQYSSGEHIRMGHITHAGNDRVRTTLVEASWILIGKDPSMRGKYEHIKCRRGGKRAIVAVARILSARIRRMLLDQVPYAVGFQKAA

SEQ ID NO: 145193 - protein, 411 aa, unidentified
MDVIVERAAGLDVHQASIVACVLIGRPGQKPHKEVRHFGTMTADLEALRDWLQELGVTHVGMESTGVYWKPVHNILEGHFTLIVANAHHIKAVPGRKTDVKDAEWIADLVRHGLVQPSFVPPPEIRELRDLLRQRRTLAETLATERNRTLKLLETANIKLSSVATDVFGVSGTAMLKALVEGEMTPEAMAELAKGRLRTKLEPLVKALQGRLTEHHRFLLRLHLRRLDEIDRDVAELEARIAEQMRPFRRHVRLLKQIPGVDEIIAAEIIAEIGIDMTVFGNARRLAAWAGVCPGNHESAGRQRKTSTRKGNLYLKTTLVRAAVCAAKATGTYYKEKYYRLKARLGAKRAAMAIAHKILVAVFHMLAGETDFRELGAAHLDQHQKHRVTKGLVRRLDALGYEVILRPKLAA

SEQ ID NO: 145194 - protein, 442 aa, unidentified
MRLLNANANEHPLRIKLSAHIRTGIIMELQRNKVCGIDVHKRFLIATILSRDGKKDTQRFSVTLEDLLKFRDWVIENGCEQVAIESTGIYWHPVHSVLEGKIDLIVANSYKIKHTPGRKTDANDSEWIAELCLNGMIEPSRIFPKDDRELRRLTRAREGYVKQMTQEKNKIHQSLDSACIKLASVISDIFGKSGMYLLNCVLEGRDIDEIIEGIPSGRLKKKADQIKESIKSRLEISQVILIRGSLSLMRSIQERIDELDGEISARIQYRKNDLAIAMSIPGTGFVSATAILAEIGNYIDFKKPEQLAAWCGLVPSLYQSAEKTILGGITKQGSKHIRRMLIQVAYAISRTKDSKLKKFFLRIQAKKGSKVAAVALARKVLCILHHLLMNQEMYLEDRDKKNMRQKPLKQPSPIEMSIKEMIDCIVRAGYVVTKSDSIGGFG

SEQ ID NO: 145195 - protein, 338 aa, unidentified
MAIVYLGIDLAKSVFALHGVDEGGKPALVRPSVARAKLLDLVAALPPCTIGMEACSGAHHWARLFAAHGHTVRLIAPKFVVPYRLSGKRGKNDAADAAAICEAVQRPNMRFVPIKNVEQQGQLCLHRVRQGFIEQRTACINRIRGLLSEFGIVLPLKAATVRREAMQHLEDLPGWANTAVGDCLSELHHLDERIALYDRHLAQMAREDSRARALMRLCGVGETTATALLAMVGSGHDFKSGRQFAAWLGLVPGQYSSGGKNRLGRITKAGDPYLRSLLVLGARAVLNSAKNKSDGISRWAVALAERRGYWRAIVAIAAKNARLCWAMLHRGESFAMPA

SEQ ID NO: 145196 - protein, 422 aa, unidentified
MTSKPSPPSTDLPLLAGIDWADREHAVCLLGEAGPEHAPLTQHPCDIAQWRTQLRQRFPGRPLRVAVEQSRGPLIYALLAQGDVEVYPVNPKQLARYRESLYPSGAKSDPNDAELLALFLREHGERLRVLKPDSPQTRQIARLTECRRKLVDDRKRLVNKLRDELKSYFPLLIELFRKKLACGLVLDLLKRWPTLATLRRVHPNTLRSFLKEHGTRNEQKQTQLIEAIRAAAPLTKDPAIIEPAALYAQALARQIANLNASVRAFDEQLEPLVQAHPDQALFRSVPGAGDVLVPRLIAAFGTDRQRYRRAENLLNYSGIAPVSKTSGRSRLILKRQHCPKFLRQTFHEFADQARKWSPWSKAFYDMKRAQGMKPPAALRALAFKWIRILHHLWTTRSTYSETHYQQRLQQTNSPLLKYLQFT

SEQ ID NO: 145197 - protein, 461 aa, unidentified
MEKKPTVEFNELNRNVAGIDLASRGNNYVCGPRGEDGECEIASFGTTTPELHRMLHWLQERQVESAAMESTSVYWIPVADLLEANGIKAVLVDTREVRMVPGRKSDVKDCQWLQKLHSCGLLHGAFRPPEDVAAVRSILREKDNLTAMRTQIIQQMQKSLDQMNIRVHHAVSDIDGVTGTAIIKAIVEGERDPVKLAALRDKRCKKSELEIAAHLTGTWRDEHLFNLGQAFKMLQFLDERIAEYDAKAERMFEALAAAAVQPENPTPPPPSPCKKLSAKELVEAAIKKAMQKFMGIDLTVIPGIGCGTAKVIASELGTNFDCFPTERHFASYLGLAPSLGKSAGKNVRQKKRCKNTSRAGRALRMAAATLYKSKTELGAYSRNVARQTDKKTAVKATARRMAHMIYRGVKYGQEYIDQGANAYGERLRERTIRTVNKLIKTYNISDSEITGVAVSPAALAI

SEQ ID NO: 145198 - protein, 421 aa, unidentified
MIEHETFTWFAAIDWGTDKHQACVVDVRGGIAGERAFSHDGAGLALLCDWILSIAGNATIVAVAVEVPHGPVVDALLDRGLAVYAINPKQLDRLRDRFSVSGAKDDRRDAYVAADGLRTDRHLFRRLQIADPRLIQLREWSRLAEELQQERVRLSNRLYSQLWRYYPQMLGLSDDLAAGWLLDLWTMAPTPVKAMHLRKTSVVQLLKRNRIRRIDAETVLRALRGPAINVADGVVEAATLHIGSLVTRLRIVGRELHDAMRKLDELCACLDEPSPTAAEHGGSGRHDVKILKSMPGIGKIILGILLAEASGPLSRRDYQALRTLSGVAPVTKQSGKSRMVVRRYAAHVRLRDAVYHWARVAIQHDPRSHSRYVALRQRGHSHGRAIRGVADRLLALACTLLQRQTVFDRDFSKGEKLTAVP

SEQ ID NO: 145199 - protein, 412 aa, unidentified
MTEEYDLFVGLDWGEASTSACVLDGAGKVVKELTVAHSGPALERFFENLTRMSAGGPERIAVAIEIPRGALVDGLLERGFAAHSINPKQLDRFRDRHTVAGAKDDRRDAFVLGDSLRTDRPLFRRLKLDEPQVIELRELSRLHDDLTEEFRRVANRLRQQLHRYFPQILALSPAADEPWVWALLHPALTPAQTSSLSPRRLRKLLQDNHIRRLDVLQVAQALCAPALPVAPGVVQAASGHARILLDQVELIHRQLKECDRNLKALLDQMQSEGDGPEPRSVAILLSLPGIGTSVAATLLAEAHEPLVAADYPALRSLCGVAPVTRQSGKSRRVLMRRACHRRLRNAVYHMARIFMHRDPDGRVRYDALRARGHSHGRALRQLADHLLRVLSAMLRTGSTYRPSIPSPAPVAP

SEQ ID NO: 145200 - protein, 400 aa, unidentified
MHKESVTACVLWAEGNGKKRKAKRQFGTMTRDLLALADWLRDCGVTHVAMESTGVYWKPVWNILEGQFEVLLVNAQHIKAVPGRKTDQNDAEWIADLLQHGLLRSSFVPPIPIRELRDLTRYRVSLAHECNRIANRIQKVLEDGNIKLASVATDALGASGRAMLKAMIEGEEDSGKLAEMSCGLLRRKIPELQQALEGRLRDHHRFLLRELIEHLEFVESKMARLEQEIGEHLRPFEEEVERLRTIPGVDWVTAAGLIAEIGVKMEQFGDAEHLSSWAGLCPGSYESAGKRKSGKTRKGSAWLRRCLCQGAWAISTKRGNYLAAQFRRLAARRGKKRAIIAVAHTLLQIAFYILRDRKCYRELGADYFDQLHPNRVKRYLVKRLERLGFQVSLEPAAQPA

SEQ ID NO: 145201 - protein, 440 aa, unidentified
MCFGCVEGHREWKRSTRSNWWCSGVAALDLGKATLEACMRVPHSSKPGRRMQEIRPYATTTAALLEMAIWLRQWGIERVVMESTSDYWKGVYYLLESEGFDCWLVNAREVKNVPGRAKTDRADAVWLAKVAERGMCRPSLVHPPPIRRLRDLTRYRRALVSDRSREMQRVEKLLEDAQIKISSVLSDIHGVSGRAMMEALIAGQRDPWSLARLAKGNARKKIDRLEEALRGFFTDHHATILQMMLDNIDRIGAQIAALDARIAEATGPFSRQVAQLTDIPGVDTVAGAELVAEIGVDMARFPTAAHLVSWAKFCPQIHQSAGKSRSKGRGKGNPWLAGAVGRIVFSASRTDTFLGARYRRLARRRGKSKAIIAVGNSVLTIVYHLLSDADLDFCELGPAHYESRINKNRRARDLATQLQALTGQRIVIRDGKAIITDNAA

SEQ ID NO: 145202 - protein, 338 aa, unidentified
MLYSGIDQHKLFSVITTVNDDGIIVKQAELKNNDFDILNYFASLGSEHSATVETTGGWYWMNDLLSSHGINLKLAHAKYVKAIAYAKVKTDKVDSHILAQLLRMNFIPEAHKISDDVRPLRDTLRARLRLSQKRTSCLNFMNRMLEKFNISDSSLLSDFYKLQYEQFDFQEQLLKQQMLTLEKSLYPTLIPNDDIQRLLWIPGIGKMNAFTILLEVGDINRFASEKNFFSYCRLVPAARNSAGKSKQRSSKDGNKYLKAVFSDAAVHALQYYPTIKRYHDSKLRRKKKQVAHAILAKEIARIVFYVLKDKYDFNNYFKGIKLDHKKSGQWPRITSPVV

SEQ ID NO: 145203 - protein, 344 aa, unidentified
MSTIRVVGIDIAKSVFQVCVWMVDGSVAWNKKISRSKLLDTIRQFEPGTLVAMEACATSHFWGRTFASMGYCVRLIPAQHVKAFVRSQKNDANDALAICETAFRPGIHFVCVKTTEQQDIKALRNTRQLMVEQRTALANQLRSLLAEYGFTIPVGILRLQQQLPELIEDASNSLTFTLRRLLSSLREDMQALNERITSLDNEIAALSSQQTAYRHLLTIPGVGPLIAAAFLSEVDATQFSSGRELSAWCGLVPRQHSSGGKQRLSSVTKNGNRSLRTLIIHGARSVMRCVKKRDDSLSIWLQRLEARRGFLKTTVALANKLTRIIWRVLTDGIDFNMQKAVAMS

SEQ ID NO: 145204 - protein, 392 aa, unidentified
MYIVGIDIGKNHHEASIVSPEGKQIGRSLRFATTHKGADSLMSFIFKNIGNSPCVFGMEATGHYWYPIYSFLKAKGYTIYVINPIQSDSLRKMYIRQTKNDSIDSFLIAKVIRFGQFGTTSMADENILAMRQLCRYRDSVISSRTEIKLRIGTIMEQIFPEYEKQFSSLWVSTSMGILEKYLTPENIENAPIDELFEIIKDKSHNRLTKAKAISIKEAAADTFGIKIAQDAFSFQLKQLIDRMNFLDKQIEALDCQILEYYEKFDCYLHTIPGIGIIGAATILAEIGDISRFKNSSSLIAFAGIDPTVRQSGEFNSTHNHMSKRGSPYLRHAIFLAATTCSFHNSPLNAYYKKKRDQGKHHLTATGAVARKLTTVIYAVLRDSKPYEPKKFC

SEQ ID NO: 145205 - protein, 333 aa, unidentified
MKSDTVHIGVDVSKEKLDVFVPAQKEGMRPTAKELDNNVTGFRELRDLARKTKATVCVEPTGGYELELIAFMHRFDVPVAYTDALRVRQFARAEGNLAKNDRIDAALISRFADKIGVRLIEAQDVETVELKRKAKFRQTIMDSRTAMANRLETEVNPEMRAMLRAQIKGLDRLIDKTGRLCLETVGKNERMNTLRERFTLVGGVGDLTAISILAGLPEIGTLSDGKLNRLVGIAPEEKQSGTKEWQRRIWGGRKDVRNALYMAAVASIKWNAILGSYYHKKRAEGHPHKWAIVPTMRKLLSLLNRIARDPGFIPMPEPESTKQNANVGRKKAA

SEQ ID NO: 145206 - protein, 428 aa, unidentified
MKKHMLSTLFVGVDVSLRSQHAVMLDFFGEQHASIPFPNNTSGASLIISEIIKHATIIKATHVVVAMESTSFYSFHLCNYLFQSPELAAYQTKVYCLNPKVISAYQKTFIDVDKDDPHDAYGIADFARTGKITSEPFQGSQFVALQRLTRARLHLVENLSREKSYVLTNIFIKFSELAAISVKDPDSPFSNKFGVTSMAVLEEMSPDQIAYASLDELIDYLMEKGKGRFTDPEAKAKLLQKAARDSYRLDKALYEPLNAAIAASFNCIKALETEVKAVDKAIEKAIGGLASNDYKCLLSIKGFGPVISAGLIAEIGFISRFSSEEKLAKYAGLTWRKKQSGAFTSDITYMTKTGNQYLRYYLGEAVMSLLKNHNSEYTDFYRKKYDEAIRFKHKRALALTSRKLVRLIFALLRDNRLYTNRKERVKAI

SEQ ID NO: 145207 - protein, 304 aa, unidentified
MNSIIVGIDVSKETFDAAVLINHKVQTRKFNNNSEGFNKLVTWLKSRGTGHICMEATGIYWKSLAKYLYDYGYKVSVVNPARIKGFAMSKLSRTKTDKADSVLIADFCEAMKLEAWYPQPHYIQELQQLVNRLNVLIKHKTQETNRLEGASKAIANNIQMHIKFLETQIKEIEQLINDHIKNNKDLHDKAMLLESIQGIGAKTQAIVLAFLANIEKFSSAKQVVAFVCLNPKHRQSGGSVRGASRISRTGNSDLRKSFYMPAMSALRHNCIIKQFSQRLSDTCKPKMFILIAAMRKLLHKTSCW

SEQ ID NO: 145208 - protein, 407 aa, unidentified
MANPPLTRSRVLPAIGLNDGMDSPRSFGIIVPAGVIWCECQRNQEESEMNATTVAVDLAKNAFQLAYADANWKVVSTSRLTRSQFQRCFHNSSVSLVIMEACGCAHYWARQMQSLGIEVRLLPARYIRAYVKRNKTDAADAAALLEAARCADIQPVRIKSVEQQALQSLHRTRSLWMSTRTSRINALRGFCREFGIDIAQGARVGLEQIARALADPNSLLPQLLRTSMRSMLDEIRLLEVRISDLEKQLGELARQSAACTTLLSVPGVGLLTATAMVAATSGEVSHFKDARHFAAWFGLTPKEHSSGSTRRIGRISKRGDRYLRMLLTHGARSVLNAANVATRMQRPIDPLRRWALQIQQRSNHNKAVCALANKLARICYAVLRDHEPYGAARLKHKLQRASFAMPA

SEQ ID NO: 145209 - protein, 385 aa, unidentified
MRTVCGLDIHKDSIFMCIMDEQGKKSEKKFGVSTREVKSLSMTLKSHHVSEVCMESTGIYWKPIWHLLENDFRLYLVNPQFIKQLPGRKSDVKDAEWIATVLLKNLVRNSFVPDNRIQQLRLYGRRINELNKDLVRCQQRIDMILQSCNIRISNYVSNINGKSYQKVVQAIMEGERSPEELVKLIHGRTVNKHGREVVRDSLEGNIGHADVDMLKQYMEVLRMCQAQKETCLAEMITSCKKHYHRAFSLLLSLPGIKEQTAAIIISEIGADMSLFATAAALVSWAGLRPRNDESAGKIKSRKITHGNKYLRKALMEAAWGASRTRGSIFYNKFWRLRQRGKNRNKCTVAIARHLLGIIWSLLSKDEYFDSEYRLDANPRRAREAT

SEQ ID NO: 145210 - protein, 418 aa, unidentified
MNEEGNTRGTKRYLALDIHKHYCVIAGVDREGRIVLQAVRVEHADLEGWLKKNLLPTDHVVIESTTNAWHVYDLLVPLVEQVVVANPIKVKQIACARVKTDVRDTLILARLLAANLVPEVWVPPAHVREMRQLLSQRRQLVETHTQTVNRMHSVAHRHHLDHARGKRFNEKTTVWQKDKRLSKVEQFQLELEMENRAYIEKQISRIGKEVARMSHQKPWADSMTYIMQLPGFGVITAMTVMAAIGEIQRFDSARHLTSYSGLTPGLEQSGTKYNEKGITKEGRKELRWALVEVAQRAVKSDPLWTRRFQELQKRMHRNQAIVAIARRLLELVWHVLTRRQPYRYFSQERIAYKYLTWAWQMDDETRDGLTRQQFTRYYLMHLGIGHDLTRIALDPKHPRKISSETELLALRPELDHIE

SEQ ID NO: 145211 - protein, 403 aa, unidentified
MEKACGVDVHRDLLVATILSDETKETRRFVNDPDDIDHLKEWLKTRECKRAVMESTSVYWVQLYLALEEAAFDVVLANAHQVKGIPGRKTDQSSSEWLAHLLRGGQIKPSYVPEKRLRELRELTRLRVKLVQSRTAFKNRCQKVLNRVNIRLRSKLSDVFGRAGMEILNGLMTGKSVEYILEHTENKLLKSRCDEIKAVARGALSETDIFVLKQLTDMIKHLNDKVHEVEARIETLVNQGDLEIVCSVPGVGKRSAAAILAEIGDAKRFSSGKKIASWTGLVPSVYQSAGTFVLGSITKQGSKWLRWNMVEVAHAAVRVRDSRFRALFLRVMAKKGKKTAYVAVARKMLTIIWHLLVNGEKYVEDGFEKTVRKVRVAYGGHVPLEQMAEVLRSAGYIVSGPGD

SEQ ID NO: 145212 - protein, 336 aa, unidentified
MKYSGIDLHSNNSVVTVTDEEDRVTAEKRLPNDLATILGFLLPWRDELVGVVVESTYNWYWLVDGLQEAGYRVHLAHCSAIKKYEGLKHSGDEADARHLAHLLRLGILPTGTILPREQRALRDLGRKRMQLVRSRTQHILAVENITARERGARISSEQVKRLSVETIDQMPIPEDVALAVKANVAVIHTLSVQIDLLEKRLQKAVPRTEYDLVTTIPGIGRILATTILLETGPIDRFASPGNFASYARCVDSQHTSNGKKKGEGNTKNGNKYLSWAFIEAAHFAMRYCVEAKRFYERKKSRTNNMVAIKALAHKLARAYFHMLKERKPFDVTRCFA

SEQ ID NO: 145213 - protein, 342 aa, unidentified
MEVTTIGLDLAKSIFRVHGVDTTGQVVVRRPLRRAQMLPFFARLPSCLVGMEACGTSHYWARELIKLGHEVRLMPPAYVKPYVKRGKTDAADAEAVCEAVRRPTMRFVPVKSPEQQAVLSMHRARDLLVKQRTQLVNVIRSLLAEFGLNIPKGLERALLMARRIVDGKAPDVPMEAAKIVSTLSQQVLDIHVRLRQIDRDLLVWQRGNDVARRLMTIPGIGPVGATALAASVTDPHQFRSGRQFAAWLGLTPLQKSSGGKERLGRITKMGDKYLRKLLIVGMTSVPCKAQSPDDRATVGQSARAKARAGCNCRHGKQDSTDYLGNHDTWRDLSGRPSAGTGA

SEQ ID NO: 145214 - protein, 425 aa, unidentified
MSEKIVVGIDVSKAFSDICILSPNNDIIKRLKISNDITGMKSLIYVLEKVEDEYKDRAIIIMEATAHYHQILANFFRKHNYEVIVINPIQSGALKNINIRKIKSDKTDAYNIALLYRIKNYNETITHSDTVNSIKKLCRQHKELTDEIVEHINRLIAFLDISFPDFKKVFTDLQGKTPLSLLEKYPTIQEVLSPENKQDIIQMIKENSHKSSSYAEAKYENLLKAAKKSIEVCIVNLSSAVLIQTTVKVIFSLQEALKAIDDEIKRLSLLDEKFHKEIVLLQSIPGVGEYTACVVLSELGDISNFSKPKELVAFFGLDPGVSQSGTYNRKNNKISKRGSPHVRSILHMLAKSNVYPNRNREYLNPVMRAYFEKKIAEKPYKVVMCAIMRKMVQIIFAVLRNQKSFELRTPEEHQKLIREKSKLVA

SEQ ID NO: 145215 - protein, 422 aa, unidentified
MLEETHDNDQIIQRVAALDIGKAELVCCVRVPHPDRPGKRLQEVGSYPTMTRSLLVLVDRLGELGVTRVVMEATSDYWRSPFYLLEAHGFEVLLVNARDVKHLPGRPKTDRLDAVWLCKVAERQMLRPSFVPPPAIRRLRDVARYRVDLVEVRTAEKQRVEKLLEDAQIKLSVVASDIFGVSGRQMLAALIAGERDPKLLAQLARGRMRAKLSVLAEAFTGFFTDHHGFLLAKMLARVDALDADIAELDRKLEELIVPFGQAVDRLDEITGVGRTAAQLILAEIGTDMGRFPTAGHLASWAKFSPGVKESAGKKKGKSSTGHGNRYLARVLGEAAVAAGKTNTFLGERYRRIARRRGTKRAIVAVGRSILVIVWHLLSDPDARFHDLGPGFYDARIDAERKKRNHIRQLEALGYRVTLEPAA

SEQ ID NO: 145216 - protein, 370 aa, unidentified
MWRDGVVDAPRRHRCAKEEVSMTPLEGASVAEASTIGLDIAKHVFQAHGADSSGRVVFRKKITRAKLMQFFASQPRCLVALEACGGAHYWGREIGKLGHTVRLIPPAYVKPFVKRQKNDAADAEAICEAAQRPSMRFVPVKDEAQQANSVVFRARDLLVRQRTQCINALRGHLTEYGHVVPQGTAHVDTLVALVEDATSSVPESARTILTVLIGTFRALQTQITQLDAEIARRAKADPVARRLMTIPGIGPIAATAITALVPAPEGFRTGRDFAAWLGLTPLQKSTGGKQKLGAISKMGERTIRRLLILGASAVVRWATQRGAAEGSWLARMLGRKPRMLVTVALANKMARIVWALLVKGGTYRVPAAAA

SEQ ID NO: 145217 - protein, 365 aa, unidentified
MYKKLNSTGTLIQRTTTEAPHGHMYYIGLDVHKKTISYCVKDVSGRVHQEGKLGATRCELDIWMRTLPQPWTVAMEATIFTGWIYDHLHPHAAQVKVAHPLMLRAIAAAKKKNDRVDASKIADCLRCDFLPECHMASTEIRDRRRTLRYRYLLVRQMVQTKNRISGLLMETGVTYNKQRLHKVGYFRELLASNEEVNESIRPLLRLSRDTIARLQKTERALVSSLQRDPLLTERIKRLRTVPGVGPITALTWALEMGEISRFRSIRQAISYCGLCGDERSSAEKSIRTPISKQRNKNIQFVLIEAAKLAPRQDHDLALLYAREKQKGNANRATLAVARKMVAYLLAVDRGQRDFVPAEDGRCDAA

SEQ ID NO: 145218 - protein, 418 aa, unidentified
MIRGDDSKIIEVVHSVCCGLDVHKDSISACLIFFDDHGRERIEVQAFGTLTGDIMRLRDWLLDHECPVAAMESTGIYWRPVHNILEGFVQVILVNARDVKNVPGRKTDIGDSKWLAGLLKHGLLKGSFIPPKEVRQWRDLTRLRRRYVQTAADYRRRMQKLFESANIKIDSVISDLFGVSGRNLMNLLVSGKEITLSDVRGCMKGKLKASEAEIYRSIQGFFNDHHRFQLSLLLGTIQHLSEEIGIIDSRIRDLMMPQQDILERMKKVPGISEIASRDILAEVGPTLEAFATDAALSSWSGLCPGNNESAGKRRSGRSPVFKHHLKTIMIEVAWAAVRTKGSYYKDKYHRLKSRIGAKKAIVAIAHRIMKAIYRIIKDGAVFKDLGEEYLMLRNKSKKINHLKKQAQLLGFTLVPQTT

SEQ ID NO: 145219 - protein, 338 aa, unidentified
MTIFAGLDVSDKMTHICVVDGEGAIVWRGVCATDPEVLAKTLRRRAGRLVRVVLETGALSAFLYHGLIERDVPVTCICARHAKGVLSTRVNKSDPHDAEGLAQLARTGWFKAVRIKQETTHIDRAQLKIREQLCRSHRSMANQLRGLLKLFGLRMGQVTTPNKRTERLAVLFAQKPELKAVMQPLVESLEALEVQIRRSTKLLAASAAADPVASRLMTVPGVGPMTALTFKSSIEDPDRFDRGEDVGAFAGLVPRRNQSGERDYKGRISKAGDRMLRSALYEAANSLLVRVKRPSPLQTWGKALAETKGPNRARIAVARKLAILLHRLWQSETEFCWN

SEQ ID NO: 145220 - protein, 323 aa, unidentified
MDKNNTFFGIDISKDVFDVMDPEENHYQFENNVKGFRKFSRLLNLQTTCVMEATGYYHLQLAYFLVEKHFKVSIVNPLSVKRFIQMKLSKIKTDKSDARMIRLYAQGNEVKLWQGQSKNQIEALQIARLQEQYTKQSTALKNKIHGEKTLGNPCKIVSNSLKKSLMQIKKEQAKLDERLVDLVRVENRQLLTNLESIPGMGRKTATMLVIQTDGFKRFDSAAALCSYCGTTPIIRKSGSSVNGRSRISKMGNQKLRNLLFLCSFTASIHNRACRDIYNRIVNKGKSKKLALIAVSNKLLKQSFAIAQSGIPYDENYKSVLIMA

SEQ ID NO: 145221 - protein, 359 aa, unidentified
MISERSYVGLDVHARSVVACSIDAQTGEMTRARLTPEHEDVWRWLRDLPGPVAVAYEAGPTGFGLARFLMERRTRCVVAAPSKIMRAPGDRVKTDARDAVLLARLLLHGDLVAVTVPSRQAEAARDLVRAREDARSDLMRARHRLGKLLLRQGIVWSGGHAWTGAHDAWLRRQRFDDPARQLAFESDYEAVASIVARRDRLDAAIEVMAAGSEFTDVVLRLGCLRGISTLTAFGLAVEIGDWHRFTGSTIGAFVGLTPSESSSGASRTLGSITKTGNTHARRLLVEAAWHHRRQNRAGKVMLERWQRAPMQARLRGQEGNARLHARWRRFDALGKRPTVANVAIARELAGWCWSLAVMD

SEQ ID NO: 145222 - protein, 420 aa, unidentified
MGRLKIVYPVCCGMDVHRDFLIACIAATNAQGVTEYQSRRFSTYTGSLRELRDWLLANDCKDVCMESTGKYWFPVHNILEESCHVVVSHPKFVKAIKGKKTDKKDAQWIADLFKHDLVRGSFIPPKDIRQLRDLCRYWVKLSSYMTGEKNRAQNCLTVSNFKLDDVFSNVFGKSASAITTQLLEHPGEQFDVAPFVDGCCKTPIAQIQEAVDGIFTYEQAEKLKIIRGHMDSLERHKAELESLILEIAQNYLPQIELLLTVPGIHDAFTAIRILAEIGADMTVFDTSKHLCSWAGLTPQNAESAGKKKTTRIGKSGAYLKPLLIQVALAASRGEKHPEIYGKKQALQKRRGKKKAIVAIARRLLTAIYHILSKNEPYNPAAYIQEDKNPMARQISQEKAFEMLARMGFIVSNPSPLSSSG

SEQ ID NO: 145223 - protein, 351 aa, unidentified
MLIIGCDYHPGVQQIAFMDTETGEFGERRLEHGEREAEKFYRDLQQAGISVRVGMEATGHARWFERLLEELHFELWIGDPLEIRATRVRKQKTDRHDAQLLLKLLLEDRFPRIWVASWENRDLRQLLWHRHRLVQMRTRIMNQLQAVALNEGVRQKKRLWGQAGRAQLESFVLAPWASRRRKELLELLDRLNPSIRELNAAVEQEATRRPEVRRLMTHPGVGSLTALAFVLIVGTPQRFACGKQIASYVGLVPTEESSGGRRRLDHISKQGNSLLRFLLVEAAQATVRSDPDWQRKFLHLAMRRERGIAKVAMARKLAVRLYWMWRKGWDYEQVKRFGSHAGQPGNPLGVQ

SEQ ID NO: 145224 - protein, 408 aa, unidentified
MKVFVGDDWAEAHHDVHLMGETGEKLAAKRLPEGLDGIAGLHALIAEHTTDPTEVIVGIETERGLWVQALIAAEYQVYAINPLSVSRYRDRHNVAGAKSDPGDAKLLADLVRTDRHNHRPVAGDTDQADGLKVLARAHQNLIWDRTRHTNRLRNDLREFFPAALLAFESLADRDTIAVLTKAPHPDQARRLSIAQIRSALRKGGRQRNLDRRASEIQQALRTPQLDAPPAVTTAFAATTKALVEVIAGLNTSIAELETELAAHFDEHPDADIYLSLPGLGVVLGARVLAEFGDDPDRYDNAKSRRNYAGTSPLTIASGKKHAVLARHVRNRRLYDAIDQWAFCAITTSPGCRQFYDHRRTTGDLHHQALRALGNRLVGYLHGCLRTRSTYNEHTAWAHRQPAPTQTAA

SEQ ID NO: 145225 - protein, 367 aa, unidentified
MKEQENKRNKITIGLDLGDRRHRFCVLGEKGEVLEEGSVGNNRAALSELGGRYPETLVVMEAGCHSPWVSRHLEQAGCEVVVSNPRKTRAIYQHERKSDRRDALMLARIARMEPALLYPVRHGSEEAQQDLLRIKLRDSLVRARVALINSLRFTLKSLGYSIANPSTERFHKVIQSALPQSVAQVIAPSVQALEELTLRIKLLEREISDQARSKYPDTAWLEQIPGVGPITALYFVLKIEDPARFKRARDVGAFLGLCPRQDQSGENDPQLRISKRGDAYLRRLLVSSAQYILGPFAPPSALRQYGLALASGATARAKKRAVVAVARKLAVLLLTLWKNKSSYQAFPQRSSKEKMRTNDLERLRCIA

SEQ ID NO: 145226 - protein, 411 aa, unidentified
MDKIYDKCCGVDVHKKLMVACFRQGRKQEIREFGATTRELLKMADWLKSGGCELIAMERTGSYWKPLYNILETSDLKAMVVNAGHIKNVPGRKTDVRDAEWIADLLQHGLLKASYIPNKDQRELRELVKYRKSLTEERTRELNRLQKMLEGANIKISGTIKDINGKSSRNILELIVSGETIDSARYDLLYKQKAIAHNLKASKEQIIDDLNGVMTDLQRKVIRVLLRHVDELTAHIKELDDDIDNFMKPEEKQAAKKIQQVPGIGNTSAQAVIAVIGTDMSRFPTQAHIASWAGLCPGDNTSAKKRKTGKTRKGNQLLRTTLVTCAHSAVKNKASYFYAQYMRISAHRGKKRAIVAVAHSILIAIFHILKCDYPFRDLGADYYNQFNRERKITAYLKKLKALGWEPSPAAC

SEQ ID NO: 145227 - protein, 434 aa, unidentified
MKTTTRINPINPNLLKVTFDIGKDSLYAYTELPLADHAADCLEETLPNRNQPILKALERFQALATQHGFAGLCVLCEPTGGWERRLLRLARQSGHFTAYLNAESVRKLRVVQSNDPSKTDLKDPKTMFLLATLGKTLTHRHLSGPWLVLRETNAFYQNLDDQNVSLRCQIHRVLTQLFCEFSFKKDFLFGSPALPHLAQEFGLNPYRIVAAGQASFFRRMKKHRVRLSTLERLWRDAQRSSLQQLDSGYSDLLELNLRQLFEDFWRCQQRLETAAQSMIDLLHQLQEQGQVRLQARKGLINDFLLARILAETGPLEDFKCCAQLLRYGGLNLCERQSGTMVGRRRISKKGRTLLRKVLGQAVLPRVRKTDLYGPYYHGKKADGMVGQKAMMAVARKFLKLLWGLNRSAQGFAQGRVFCCQSQFQPAAQPVAQAA

SEQ ID NO: 145228 - protein, 387 aa, unidentified
MPHANDLSRCLAPLEQDCTIVAVIEMSQSSWLAAGIIPGIERQPLKKLEPDKSALLRLLHRWRNEAATAGRTVTRIAVAFEAGRDGFWLSRWLRAHGAEAYVIHPASVAVAREHRRAKTDRLDTGLLKRAFLGWLRGERGHCSMAAVPTLAEEDAKRPSRERESLVGERTRIVNRMKGTLTRLGIRSFKPTLRNAVECLPTLRTAEGVALPPNTLAELRRDMARLRFVSDQIKEIEDTRLERLEQQSQEGPHAMVRLLARVIGVGIETADLLVHEVLARQLRDRRAVARYAGITGSPDESGARRREKGLAKAGSARVRRSMIELAWRFLRFQPDSGLARWYRARTADARGGTRKTMIVALARKLLVALWRFVTTGETPEGIVLRSAA

SEQ ID NO: 145229 - protein, 344 aa, unidentified
MVQYAALDVSDKDTAIHVLDEHGRLVWKGKRASEPEVLAAALRRHAPELQRVGLETGQLTPWLYHSLKALGIPVVCLDARHARAATALQRNKTDARDAETLAQLVRTGWYREARVKGWAAHAVRHLVNARSQLVGISTDLSNQLRSVLKTFGLRARGRAGGAFEAKVREAMADRPEVAAVAEPLLTVWRTVRDEIAGLDRRIMAAAKDDPTCRLLMTCPGVGAVIATSFSAAVEAPGHFRRSRSVGAYLGLTPRRHQSGEMDRSAGVSKRGDKLLRSYLFEAAACLLVRVQRASALKAWGLALVQRLGFKRAAVAVARKISVVLHAMWKSNAPFQAWPGLPAAA

SEQ ID NO: 145230 - protein, 362 aa, unidentified
MIGQRTSVGLDVHARSVVGCGLDEQTGEVLRTRLTPAHEQVIGWLRSLPGPVKVTYEAGPTGFGLARALQAAGIDCLVAAPSRLLRPSGDRVKTDAKDALHLARLLAVGEVSAVAVPDAETEAARDLARARDDVRGELMSARHRVTHLLLRQGIVYAGGTPWTRLHENWLRRQRFSLPALQAAYDAALESLAAAQARRDRLDEAIAVMAAAGRFTPVIDRLACLRGVATLTAFTLAVEIGDWQRLSGATIGSYLGLVPCEDSTGERRSQGGVTKTGNSHVRRLLVEAAWQHRTPYRPSADLQRRWKRAPAVVAAHAAKGNRRLHARWRSFDARRKRPVVANTAIARELAGWCWALAVMDTDR

SEQ ID NO: 145231 - protein, 366 aa, unidentified
MHATTVAIDLAKDVFQLAYTDAERSAIEPLRVTSRLRFAALFENRAPLRIVMEACGSAHYWGRRFGRLGHTVRLLPAHDVRPYVRRNKTDRTDTAGLLEADRCPGLSSVPVKSADQQGIQALHRVREHCKSARTASINLLRGLLREFGIVFARGAAQVRPAVLAALEDADNELPMSLRHTMAAVLDQIRGCECAIAAIEAQLAQFATRDLRSQRYQQAAGVGLITATALSASVGDIERFRSGRHFASWLGITPREHSSGNTRRLGRMSKRGDAYLRMLLVHGARAALRAARLRHKRGQALDRLAHWALEVQQRHGHNKAAVALANKMARRLWAAEHHRRDFDPDHVSTRPAQRGVTATEPGRAGMH

SEQ ID NO: 145232 - protein, 407 aa, unidentified
MNAVGIDVSKGKSMMMALQPMNQVVLKPREYSHTKAGLGQMAHDILRLGEETWVIMEATGRYHEPVAAALHEYGIRVTVMNPLFIKQSGGGSIRKVKTDKADAKKIAKYGLDNWMDLREYAPVEAIREQLKLVSRQFNLYMKNVVALQNNLISLTDKVFPGVNEVFSSKDRADGSQKWVDFIMTFWHCECIALVSEAVFTERYRKWCKRKGYHFSGTIAAELYIGSIGHITTLPKNSNTKLIITTAAKELASAKSTLAVLRAEMDRLARQLPEYDTVRAMYGVGEKTAPQLIAEIGDVRRFPRRSSIVSFAGVDPAVDESGKHISKSNPITKRGSPHLRKTLYQIVCTYLKKSPTDEPVYQFLDKMRAEGKPYFVYMTAAQNKFLRIYYARVKECLIMASVQEFSES

SEQ ID NO: 145233 - protein, 411 aa, unidentified
MEVMFSHCAGLDVHKKTVVACVLVPDPKGGVRKVTRTFATTLAGLEELARWLLGHGVTHVVMESTGIYWKPVYNVLAPQCEVWIVNAQHVKQVPGRKTDVSDAEWLAQLMRLGLLARSFIPDVEQRDLRDLTRYRTRLAQERATAANRLQKILEDANIKLASVASDIQGVSAHAMLEALIGGETDATVIADLALGRLRAKIPALTEALTGRVREHHRFMLRELLDHLAHLGECIETVNARIRELTAPHEAIILRLMRIPGVKRHTAEVILAEVGTDVTPFPTAKHLASWACLCPGNDISANKRRSGKTRHGQKWLRAALVEAAWATTRSKDTYLAAQFQRLRSRRGDKRAAVAVAHSILTIVYQLLAHPEAVFTELGGDFFIKKNADQERRRAVKRLETLGFQVTLTPTSG

SEQ ID NO: 145234 - protein, 335 aa, unidentified
MGAYLGIDLHRRRSLAVCLNEEGDRLWWKRFDNSPGNLAEVVERAGPDPEVAMEATWGWYWAADLISDMGGKVHLGHPLGIKGYENRRVKNDLADATLLADLLRMNRLPESWIAPDSIRQLRELVRYRHKLSQMRTGLKGQIHSVMGKEGVIPTLVEMWGPAGSAYLDSLDLADAYALRVDSLRDLIEVFDEEIHTLDKRIHQQLKDDVGYKTIQQLNGVGRVHAAVFCAEIGDVHRFGSAKKLSSWAGLTPKVRESDLKSYRQRISKQGSRLVRWSAVEAVSRYHGGAEIRDLYTRVAERRGRNIGRVAAARKLLMLVYYGLRDGEIRCLRDAA

SEQ ID NO: 145235 - protein, 437 aa, unidentified
MSMTFARLLDPAFEDDHDPFRYYDPTGEPLEDRLYLPCGVDPHSKLCGVAFVHPLPHRQDILVEREIRNNSLEDVTWLIETGRRLALQFQAHPIYVFEATGPFWKPYRNFLHQAGLATATICGRQSRHARGTGTRKTKNDLKDAYTIAKVFKQGESHASRIPPEPLASLREYTRLHLFFVEYSVAIQNRMYNLRYQLHPDFDRHFSQPVLPTTLALMQEELVYPEHLKACSLDTLTQLIRQASHGKLGAELAQALVQSAHTTFSVPTAGEALSFNLKMLAQAYEQIHRLILPPIRQRIEAGLTKLPFEQHLDEIPYFGPIVIGTFLSELGLPAWFRTVDSVVAWFGFDPSVSESADKPSGTTHLTKRGTKYGRRIMWLVARNWAEYTPEGQALVRKEMEQKGLSYDGAICVLAAKLVRIAFAMVRDGSHFNMKRAFV

SEQ ID NO: 145236 - protein, 466 aa, unidentified
MKHNRRRSTGKPRVSPTVLDRINPNVAGIDCGAAEHYVAVPPDRDPTPVQSFTTFTTDLLRLADWLTACGVRSVAMEATGVYWIPVYEILEARGFEVLLVNARHLKNVPGRKSDVSDCEWIRELHTVGLLRGSFRPADSIVALRGYLRHRQTLIESAGTYIQRMQKALVQMNLQLPLVVSDITGLTGLRILRDIVAGHRDPAELAAHRDPRCHASKAEIIAALTGNYRPEHLFALQQNLALFDACQAQLALCDRAIDTHVQTLTAHVPSPASPLPAPRVTKKPRDNEPRFEIRAPLYQLTGGVDLTQIDGIAPYTALKLISEIGTDMSRWPTEKHFTSWLTLAPKNKISGGRLLSSRTQPSANRAAAILRMTAMSLGRTQTALGAFYRRLAARIGKPQAITATARKVAILIYRALKGELTYRDPGADAYDVQQRTRVLRRLRQRAATLGFSLVNRETGEILEPAIS

SEQ ID NO: 145237 - protein, 343 aa, unidentified
MLIIGCDYHPSFQQIAFVDDATGEYGQRRLEHGNEEAQQYYRSLKGQKVLVGVEATGSMRWFERLLAECGHELWWGNPAKIRAAAVGRQKTDKRDADLILQLLIEKRFPRLWVPSVEQREGRQLVLHRHRLVQMRTRVKNQLQALAMNEGVQRKHKLWSQAGQAELQGLSLGPWASVRRTDLTDLRKDLDGKIDVLNQGLEQQVEQRPEVRRLMTHPGVGPVVATAFVLTIGEPGRFKKSKEVAAYLGLVPLEDSSGGRQRLGHITKQGNSMLRGLLVEAAHVAARREPEWQRKYKRLAMKKNRSIAAVAVARCLAVRLWWMWKLGLDYGPMKESRSHAESLV

SEQ ID NO: 145238 - protein, 395 aa, unidentified
MNKVIHYIGLDVHKESIAVSIAPAHSTEVRRYGIIGGTLAAVDKLIKKLSLEGVELRLVYEAGPCGFVLCRHLRAKGLHCEVVAPSLIPKKASDRIKTDRRDADQLARLHRAGELTCIHVPDQEDEAVRDLIRARFSAMTDQRQARNRLKGFLLRLGFRYTGKSSWNDAHQRYLSGLVMPQAPQQIAFQEYIHAINDATDRLERLTRAVEDALAGWKWEPVVRALMSLRGVQVLTAMTLVAEVGDFSRFDDPRSLMHFFGLTPSEHSSSDKRVQGGITRCGNAHCRRVLTEAAWQYRLAPKVSAAIQIRQQAQSKEVRLIAWEAQQRLHKRFKQLSAKKKSVIAATAVARELAGFVWAIACQVKPARQAPAPEIIRTCRGKVYRLDPNTKLQKNK

SEQ ID NO: 145239 - protein, 289 aa, unidentified
MLNTTTFVGLDVHARSIKAVALDAMTGEVRSATFGYDAAEVAGWVSSVDPSAKCVYESGVTGFDLQKRLASMGIDCVVGAVSKMIKPPADRKRKNDRNDAEFLARMLSVGNVVEVWVPDDGCEAARDLSRALDDAREDLKRCKQRLSKFLLRHGYVFSETTPTGRRKGNWTAAHWAWIKSISFPEKADNDVLAYYVDAVRQAMEDKARLERLVEAEASKPRWKCRVDSVRCLKGIDVTSAADLVFEAGEFSRFKSARSFAAWIGLTPSEHSSGEGVHRGGITKAGNRCF

SEQ ID NO: 145240 - protein, 350 aa, unidentified
MKKICIGIDVSKETLDVTVIHIESYELMEKLGYSKFENRPSGFRSMTAWVRKVIKSRGQMDEALFCMETTGSYDLPLCHWLHKNGLNVWRESALQIHCSKGFQRGKSDKEDSEIIAQYAARHQNRYTAFVPDAEAIADLKELICYRDSLVERRKECKVRLANKKETLVNKNSKAWKCIERLSKAEIKRLDKVIGECDEEIRNLMKEDEEMEKNYQHLTSIVGIGLINGAALIAYTGNFKKITTPNKMSCYCGCFTFYEDSGTSVHRKSPYRNACCKMLKGYLRMAAKSAMLANTELRKYSERLREKGKPYAVILNNVANKLLHIMFSLVKHDYDYEYNHEVVRRMEREIA

SEQ ID NO: 145241 - protein, 377 aa, unidentified
MIRFTGKPPSSMMALMLAAGLTRVIQNHYYKEALMNIMHFIGLDIHKKIIAFCVKTKEGIIHSKGVIPATRPALIEWMKTLPQSWTVAMEATLFTGWIYDFLKPHAFEVKVAHPEMLKAITAAKKKNDQSDAQKICDLLRVDLLPECYMAPSDLRELRRILRYRTYLVRTAVQIKNKISGLLMEVGADYNKKKLHTKKYFFEMLENIEDVPPSVIDMLKLSRSNLEIFNGIQKKLVLVLKNNQLIRDRVKRLQTIEGIGEITALTWVLEIGEPERFSSIAKAVSYCGLCAAQKQSAGKEFRGPISKKRNKHIQTVLIEAAKLAPHWNPQLAEVHNKELTKGNRNRATLAVARKLVAYMLSVEKNKKDFHHIESDQAA

SEQ ID NO: 145242 - protein, 347 aa, unidentified
MRFVGIDIGKAKCRAAIMDQGGVILDEFTFTNNHVGIESLAARLSMDDRVVMESTGSVWTNLYNHLDEKHIHVVLANPLKTKAIASAKIKSDKIDARILAHLLRSNLVAESYVPPKQLREIRALIRHRVGIVKIRTMVKNQIHAIVDKHGFACPYSDMFGKGGFEWLRHLQLPSLDRLIIDNHLTHLESLNQQTERVDEEIHSKACEDEDVRLLLSLTGIDIYSALLIKSEIGNINRFPEYKKLVSWAGLAPSLHQSGNVEYHGNITKQGSKMLRWIMVEAARVAVNHDERMQSFYERVKHRRGDQKAIVAVANKMLKIIWFMLTRREPYESRNMKRYQQKLNSITA

SEQ ID NO: 145243 - protein, 330 aa, unidentified
MKPCTIIGVDVSKLKLDSVMLPHQKNLQIANHQKGFTRWMLWLKEHSVDVSEVLVVMEDTGHYTHLFELFLQSHQVGYLKKPAVEIKRSAGLSRGKSDPVDAARIAQYGWLRREELSPQLYPTKAIMKLRDLLSYRDKLVRDRSGYKARVKEQLATGRISKGDFLYREQLKDIHYLDKKILGVEKQIWLLLKANAALQKNFELLQTIKGVGKITAAYVIAYTSNFTRFTDARKFNCYAGLAPFEHSSGTSIRGKSRVSHLANKHIKCVLRLAAFVSVRYNRELKQYYQRRVQEGKSKMSTLNIIGSKLISRMFAVVRKQIPYVEQLPTAA

SEQ ID NO: 145244 - protein, 426 aa, unidentified
MGMGKFTKTLCISKRKEYHIMEGPIITVDVSKGSCHYQPFIENGHPMRKPKQLSATIDGFQKLGQTIKDLETKTEREDIPVIFEATGVYHRPLQKYLEDHKIRYYIISPLLSATYRKTDLHSNKTDALDCAHIAKAYYCEKELRQYQAQPQEYKRLYQLSRIYESELVHLRKRKVSLRSMLDIIYPRIDKTFKGNQNLYDPIPMEILKRYPHPSLLLSHREDTIVKAVGHRTGHLKGYTERIVHKIYEKAKECYSGCEINDIEVINLPRLIENVQEQKKKCDSLLKEMIEIARTCPYFAPIVSIVGIGENLAARIIAELGDVNRFDNRAAIVAYAGLNPKIQQSGDIDGLHLKISKKGNKHLRCLLYLGAQCNYRLRKEDPLYEFTKKKRQQTQCPLSSKAAYTASAHKLLVIIYSLCKNGTLYHS

SEQ ID NO: 145245 - protein, 325 aa, unidentified
MAIVVGVDIAKKTFDIAVLQSNGKYRTKGNLSNDQSGFSVFDLWLQKHAEPGAWVVMEATNIYHEALGDYLLARGYRVCVMNPARIASYAQSQLQRVKTDKVDAKLIALYGARHVEDLQLWQPDPVSVRQLRALVRRYEELKELFQMEINRLETAKSDVVKESILSVSAHLEQQIEQTLEAIRQHIDDDPDLRGKRDLLTSIEGISDKTAALLLAELGSISRFESARAVVAFAGLNPRLRESGQHKGQVRISKIGSRLLRAGLFMPAICAMSHNQAVRALRLRLEEKGKAGKQIICAAMRKLLQIAYGVLKSGQPYNVELALARG

SEQ ID NO: 145246 - protein, 354 aa, unidentified
MTSIKYIGMDVHKESISIAVMNAVGKIVMECVIETKANMILQCIDGLRGDLRVTFEEGTSAAWLYDLLKPHVTELIVCDPRKNASMREDNQNDKIDARRLAELLRIDHLSPVYHGEHGLRTLKELVRSYLTVTKDLARVKTRIKAIYRSSAIPYKGKEVYAACHRAEWLAKIKELGVRRRAEFYYQELDALRMLRQEVRRELVAESRKQKAWKRLCQIPAIGPIRAAVLLGILQTPLRFRTKRPLWKYSGLAIETCSSADHRSINGQLQRSKKNSVRGLNQNCNHDLKNLFKGAAVSASSKPGPFQEFYAALLAKGMRPEMARLTLARKIATIVLIVWKKGVCFDAQHLKPQTA

SEQ ID NO: 145247 - protein, 354 aa, unidentified
MASRKQKGPVTGGVDTHKKTHHAAVVDQVGRVLGTEQFDATEAGYRALLAWMRRFGDVVKIGVEGTGSYGAGLARYLTSAKVDLVEVDRPDRKARRRNGKSDPLDAISAALAALSGRANGVPKARTGPVEAIRVLRVVRAGAVKARTAALNELHGLIVTAPETLRAALRPLSAAKLVTHCAAFLADPTRLIDPEHATTAALGALARRIQHLNAEIKQADKQLKNLLATTAPRLCAVRGVGPQVAGQMLVTAGDNPDRLRSEAAFAHLCGVAPIPASSGNTERHRLNRGGDRHANSALYMLVLSRLAHDPRARAYKERRTTQGKTNKEIIRCLKRYAAREVLTALQADFAALNHA

SEQ ID NO: 145248 - protein, 319 aa, unidentified
MTPTPVFVGVDVAKATLDVALRPSGEPWSVPNDEAGVAALLERLRPLSPALVVCEATGGFERAAIAMLAAAGLPVVVANPRQVRDFARATGQLAKTDQIDAAILALFAERVRPTPRPLPDEAAQLLDALLTRRRQLLEMLVAEKNRLGFAPRPLHKGIQQHIRWLERQLDDVTKGLADQIERSPIWRAKDDLLQSVPGVGPIVSAVLLAELPELGTLSHKQIATLAGVAPLARDSGTLRGKRMVWGGRAGVRTALYLAALCGRRWNPRLKVFYERLLAAGKPKKVALIACARKLLTILNAMLRDTARWRAPELAIQHSC

SEQ ID NO: 145249 - protein, 345 aa, unidentified
MERYIGIDTHRDSSTICVLSAAGKRVRRDIVETNGLALVSYIRKLSGTLHVCVEEGTWSEWLYEILSPHASELVVYQNVWTPGAKSDAIDAHGLAEKLRIGQAGPGVFKAPKRYRNLREWVRVYQALTQDTTRAKNRLKSLLQRRGVQCLGTSIYDPQQRDQWLEQLPAAMRLPAKLLGIELDCVAELKTEAEAALVKASHRVRISKILETAPGIGPIRAAVLIATVITPHRFRSKRQFWSYCGFAVVTRSSADWVPTKGGWIRVQAVRTRGLNRHHNPTLKAIFKGAAFTAIHQTKTDHPLRVAYARLLDSGTRPPLARLTIARKIAATVLAMWKNEEVYKAVS

SEQ ID NO: 145250 - protein, 410 aa, unidentified
MKHSKSKIKANTVQVDERNIVGIDIGKRKHAATAVSPKGVTIAQLKSFENNRKGVDQLERHVLVPATARRKPMIAMEATGQYWNALHDELQRRGYACVVLNPIQTNARGRNQIRKSKTDLGDSGLIARTILSGDARWTIVPDETMFELRLLVRHRWRLIRTHGIILRYAISLLDRIFPEYEGVFSKPFLPSIRQLIRDVGITPRALIGKRKLVQTVLEQASRKRFSQEKIDLLLSRAKESIGTQQGDKTVNHQFRMIVDYLDFVEKQVKEVNVELRKRMTETPNPITSLGIGPELVATILAESGDVTMFAGPEKYSAFCGLDPSEYKSGDSIQGRTPISKRGSPLLRWAMYMSAVTVCKKHHDFTRIFDRHAHRGYRYAMIAVAHKLARVIWRLMKDNRDFTKRPPKRTT

SEQ ID NO: 145251 - protein, 358 aa, unidentified
MNNHMIQGYVVKGKEVFVGLEDSKKTWKLAVRCDRMLIRQASMEARYPVLLSYLRNNFPECTINLIYEAGFKGFTLHDRLTEDGITCVVIPPHLVTEPKVNRVKTDRRDAGRLALILENGDMPSLCCVPDRERREDRQVSRTLIAVVRDIIRTRNRIHKLLDFHGIGVPFETKAKWGEKEFGILRELPVSAPLRASLDVLLDLLEHLWRHRETLLAYLKGLCDKERYRKAFAIAESLPGIGWKTAIRFVLEFGEDFSRFTSGKKIAAFAGLTSREHSTGETERRGKITGLGQGFIRSTLIENSWAAIRKDQALLAKFTRVWRNSGSKKKAIVAVARTLVIRLRACMVSGTPYATGIVR

SEQ ID NO: 145252 - protein, 392 aa, unidentified
MNAQALGWDNHRKFSKVSLMEQSPEGQICAVERARLEHNDKDAMRDWLARLDPDIPVALEATFGWPWVADLLEELGHPVHLGHPPIIRALAKHEAKTDRCDSDRLGKFQLRGILPESYLAPPEVRQRRERIRYRMALSTLRTAVKNRTQAILHRHGILHDFSDLFGKAGRRFLDSLELPDGSRQALHGCLELLDHLTLLIGEVEQWMTNNLEEDETLRLLLTIPGVGPILAHVIRAEIGEIQRFPTVRHLASYAGLAPMSNDTAGREGARHCSMACNHVLRWAFVEAVHGVQRTKGPHGMRLRQLYLRLCSHSQRRGCKSSAKVAVAHELSKLVHVVWSKREAYTDSPPPRPGSREDRRQPQETSTMKTTLRSDQPRPPMVRRRATVGQTRL

SEQ ID NO: 145253 - protein, 414 aa, unidentified
MDVIVDRCAGLDVHKKTVVACVRSPGTGRRKRDCEVCTFGTFEHELVSLRNWLREHGVTQVAMEATGVYWKPVWQVLDDGDVFDAVLLVNPAHIKNVPGRKTDVNDATWIGQLLECGLLRGSFVPPTEIRQLREITRYRRQLTEERSREVQRLQKLLEDANVKLSSVASDILGVTGRMILDALCDGERDPDVLAGMAQRKLKAKTEYLRQCVPGRFAEFHAVMTRQLLSHIDYLEQAAVALDEQVDRLMIPFVQARDRFDTIPGIGKRNAEIIVAEIGVDMAQFPTPAHLASWAGLCPGNNESAGKHKSTKTRVGNPWLTSALVEAAWSAVRTKDCYLAVRFRRIAKRRGDQRALIAIAHTILVICWHLLVDETTYTELGTDYLAGKDQPDRRRRLLVQQLEQLGYTVELTTAA

SEQ ID NO: 145254 - protein, 332 aa, unidentified
MEKNHYIGVDISKKTIDVAIYKKEKTGKAALCEKFHNSPNGFKDMKRWLRKCGVTLAESLFCMEATGHYTYELCLFLEQQKVVYSVQSPLHLKRSFGLAHGKSDKVDSYRIAYYAYLHREDIKPSQLATNSIRKLKALMAERKSLVVEIARCKAQLNESGSHSSSPGTIKRTKELLEFLETQVIELENEMVESINSEEELKSNYQLLLSISGIGIVNAVNTIIATHNFKMFDNARQYASYIGVAPFEHTSGTSVRGKTRVEPGAKMLKADLTGAVRTCINHDNEIRKYYGRKIAEGKPYGVVANAIKFKLLLRMFAVIKRGTPFVKKADHLI

SEQ ID NO: 145255 - protein, 394 aa, unidentified
MCQQYKTEASMIKHNILFIGLDTHKTFTEVAYIEDQRGAKSIHLGKILSNKAAFKKLARQLQSKYPDATLHFVYEAGPCGYWIYRLLTSLNHCCYVIAPSLIPKKPGDKIKTDKRDALKLAKLLKSEDLTPIYVPEPEDEAVRDLSRARETGMKDLKDAKYQLKALLLRNNINSKIKDNWSLQYLRWLAELVLPHPCQQIVLQEAVSTITERLKRLKRLDNELTHQVKNWRFYPVVKAIQALRGVRLLVATGVIAELGDLSRFDHPRKLMSYLGLVPSEHSSGTKRHLGAITKCGNSRARRLLVEGAHSYKHNANISKEMQLRQEGLSKEVIDMAWQAQLRLCRRYNRLMHKGKHRNVVVTAIAREMIAYIWAISREVVLPKIDVKLRISRVPA

SEQ ID NO: 145256 - protein, 369 aa, unidentified
MHDDITAFVGLDVHKDTVAIALAPAGRDAPRFVGTCGPKLAELIKAISKLGKPANTLLAYEAGPCGFALARELIAAGWRCQVIAVSKVPVRPGERIKTDRRDALTLAGYLRAGELTPVVIPDAHDEAIHDLSRAREDAVRARLKVRQQICAMLLRHGRYYPGKTRWGPTHERYLCEIAFAHPAQQIAWAEYRSAMTEAHERVQRITAALREQAELWRFGPVVNALMCFKGIDFVAAVTLVAELGDLHRFEHPKQLMAYLGVVPSEHSSGQSRSRGCITKTGNSHVRRILIEAAWCYRYSARMSRPVTDRNRGQPKAVRDIAWRAQLRLCSRYQRLAARGMHSNKVCVAVARELAAFVWEAARCVEPAKT

SEQ ID NO: 145257 - protein, 242 aa, unidentified
MGDQKRFVGIDVAKAQLEVFIRPDGETFSVANDEVGIGELLRQLEPADFVILEATGGLEMPVASALAAAGIAVAIVNPRQVRDFARATGRLAKTDRLDAEVLARFGEAVRPEARPLANEQAQALEALVTRRRQLVEMLTAEKNRRANAPKVLHRSIDEHIRWLEKRLSGLDDELAELIRDTPLWRERDELLRSVPGVGKVLSSTLLAHLPELGMLNRKQVAALAGLAPFNRDSGSLRGGRCI

SEQ ID NO: 145258 - protein, 334 aa, unidentified
MEEAPSSSSNLAFSLGIDVGKTNLELALRSEESIVARTTVSNDPEGHNILVRWLEDRGAQPEKACVCMEASGDFEKAIANRLYEEGYRVSVVNPRRIKGYASSQLQRTKTDSADAALIARFSQREDPRPWEPPEAAESRLQELTRARQALQKEKTRAQNRLDEAEDEAVRNAHENLLDEVKRQIEELEEEIEEHIEEEPEVNDQCSLLETIPGVGLQTAAIVVSELGSPEQFQSARQAAAYAGLVPRHRESGTSVRGNPRMSKVGNGRLRRAMYFPAMTALRFNSAVKAFGDRLKERGKETMVVIGAAMRKLLHICYGVLKSGRPFDPSLHPGT

SEQ ID NO: 145259 - protein, 343 aa, unidentified
MDHFAGLDVSVKKTSVCIVDDMGKIVREVKVASEPEALLAVLKNPAYQFKRIGLEAGPLSQWLYSALAEAGLPVICVETRHMRAVLKAQINKTDRNDARGMAQMMRVGLYRPVHVKTLRSQKLRMLLTHRQLLLSKAIALENDLRGTLRNFGLKVGMVGKVKFEARIRELVETLPDLAVLVEPMLIVRRVLREQIVILHRRLLAVVRDDEVCQRLMTTPGVGPVVSLTYRATVDIPARFRKSKSVGAVFGLTCAKYQSGEVDWDGRISRCGDEMMRTMLYEAAQAMLRSKKWSWLKAWAMQIARRRGIKKAIVALARRLAVILHRIWVDGTEFRWTREQAVAA

SEQ ID NO: 145260 - protein, 399 aa, unidentified
MLKKAFGIDAHKDVMVVTKLGEDIKETRRFGVDADGLRRCIEWLREDSCLDGVMESTGIYWVPIYASLKDAGFNISVANAYQVRMVPGRKSDQKDSEWLAYLMRAELIKPSYIPDREYQELRTLTRLRARLTQTQTAFKNRAHKILQLCNIRLASKLTDLFGSSGMKILDALVNGVSIDEAIEKCDRRVKKQRDEIKASIIGTLSRTDIFELKICLDNIKLLEEQIKQVDEKIASKVDKDLVDKLCKIPGIAPTSAATIIAEVGEPKRFESEKKVSGWSGLAPSHHQSAGVDKRGRITKQGSVWLRRTLSQCAKAASTSKSSLAQFYSRVMGRRGKSIATIALARRILTIAWRTMITGQEYIEEQFMKKARYKMIRAKEDDYTIDHMAGILSQASAAIH

SEQ ID NO: 145261 - protein, 397 aa, unidentified
MYIVGIDIAKRKHEAAVIDGEGTVIIKPFSFTNNCSGYNRLLAMLAKAKLPLDEVSFAMEATGHYWLALFTRLQKEGFRVQVINPVQTNSIRSFYIRQAKTDPRDALLIAEVIRFGHFSESTLHPENIYELRELCRGRHAIVSMQADVKRKVVALLDQVFPEYETAFTNMFSDTSMAILQNCPTPKELSEMPLEELCHLIEVSSHKRFRMAKARELQELARNSFGFAMAGDVFSTMIRLYAKHLDFLKQQVREMDRKIAEIMDTLDTPITTITGIGPTLGAYILSEIGDINRFSSAAKLAAYAGIDPTMRQSGEYNGVRNRMSKRGSPYLRHAIWLAASSAVLHDPALKLYFQKKRDEGKPYMASVGHACRKMVSIIYAVMRDNKAYTPYIPNEISA

SEQ ID NO: 145262 - protein, 410 aa, unidentified
METLVERCAGLDVHKNSVVVCLRLPGHEGKRQVVHRRFGTTTPQLLALRDWLEAEQVTLVGIESTAEYWKPVFYLLEEAMECWLLNANHLKQVPGRKTDMNDAAWIAQLLEHGLLRPSFVPPKPIRELRNLTRYRRAQIEERTREVQRLDKVLQDAGIKLSSVASDIMGVSGRSMLRAMVAGSRDPEALAELAQGALRKKLPALREALTGRFSSHHGLLISEILAKLDYLEAAIERLSAEVERLMTPFEPQVELLDTIPGVNRRTAEGLIAEMGVDMGRFGSPGRLASWAGMCPGQHESAGKSRSGKTRKGSKWLSAHLREAAKAAAQSKGTYLSAQYKRLRGRRGGPKATVAVQHSILIAVYYMLERGVPYQDLGADWFVTRSPEKRARKLLHELRHLGYEVTIDSEVA

SEQ ID NO: 145263 - protein, 389 aa, unidentified
MKIYVALILPNLIIFAAAISSDGEIIIEPFKFTNDADGFQLLVSKLESFDKNSLIIGLESTAHYGDNLVRYLVTELYQVCVLNPIKTCQMRKNNVRKTKTDKVDTYVIAKTLMMQDNLRFVSFFDLDMMDLKALGRFRQKTIKQRTRLKIQLTTYVDQVFPEIQYFFKSGLHQHAVYALLKEAPSPKEIASMHMTHLANLLKVNSHGHFTKEQAKELRVLAQKSVGANDSAISIQITQTIQQIELLDSQLEKIEAEMTDIMKFNDSVIMTIPGIGYINGGMILGEIGDIHRFSNPNKLLAFAGLDPSVYQSGNFQAKTTRMSKRGSRVLRYALVNAAWNVVRNNATFKAYYDAKRAEGRSHYNALGHCSGKLVRVIWKMLTDNVEFNLK

SEQ ID NO: 145264 - protein, 452 aa, unidentified
MKKLSMEIVNAFSAGIDVGSRFHMVAVNQNNDDVKQFGVYTEDHHEMIAHLKHHAITSIAMESTGSYWQTLFSALQTAGFEVLLVNGRQTQNIKGKKTDVQDCVWIQRLHSLGLLSGSFLPAHHTEQLRTYYNHRLHLVEQTSRYINKMQKALRLMNIRLDVVLNDITGKSGRAIIEGILKGERNPELLASLADVRVKKSKEEIARSLEGNWREDLLFEIKECLSLHDIYEKKIVQCDQQLNKVLQSIESPVCAIGPISKDVCMKRRTKHSPKFEVRTLAFGHFGVDLFAIPALSYNTILCLLTNMRREDIQKFPSVKNFTSWLRLAPNNKKTGGKIISSRTPKGKNKIALAFRQAANCIANMKNHPLLMFFRRIAYRKGRAAAITATARKLAAIFYQMVNKQEPYEPINNEALTEKIKMQQIKNLKRQLQKLSLNGEQLNTLFQNLSFSTP

SEQ ID NO: 145265 - protein, 431 aa, unidentified
MLKINPLSTLYVGIDVSSKSNYVCALDFYKNKYINSSFANNQPGAEELALKILECLKEHPDITTIVAALESTSVYSIHIANYLSSCEELMRFKPYVFVLNPKCTANYKKSYIGLGKSDPIDAFVIADYARAGNIESEPWRGSQFLALKRLTRHRLHLVECMTREKTYLVSNLYLKFSELQMLEGDDQPFCDIYGATSSSVLMEYFSPEEILDSSEEDLIAFLAKKSRNRIKDISKTADLLKKAARDSYRLDKALYEPLNVSIASSFNCIETFKREIKVIDNAIKKEIKGLNPNAFIILQSIDGIGPVFAGGIIAEIGDITAFHSSDALAKYAGLTWKSNQSGDFDGEDTPMIKAGNRYLRYYLGEAANSMRKHNVEYGTYYRKKYNEVPKHQHKRALALTSRKFVRLVYGLLARNQLYSGVSLDTSIKDSN

SEQ ID NO: 145266 - protein, 368 aa, unidentified
MAKSITYVGLDVHKDTIAVALAEGGLRGEVREHGKIPNTPAALKTLSAKLAPGRELRFCYEAGPCGYSIQRQLTGTGHDCAVVAPSLIPRKPGERIKTDRRDAINLAKLHRAGELTSVWVPDQAHEAIRDLVRARQAAVRSLRQARQQLSGFLLRHGHHYHRPAWTQLHRRWLASLKFEQAVHHIVLEDCIAAVEAATARRDRLEAHIEAALPEWSLAAVVQALQALRGVSMVAAATLVAELGDITRFANPRQLMAYLGLVPSEHSSGNTRRRGGITKAGNGAARRMLIEAAWSYRFPARISREQLLRQERLAKPIRDIAWKAQERLCRRYRQLARAGKLPTVITAAIARELAGFIWAIARQAQPATR

SEQ ID NO: 145267 - protein, 339 aa, unidentified
MKKISTVGVDLAKGVFQVHAVDEQGTVVVRRALRRSKVLSWFMQLPPCLVGMEACATAHYWARELRKLGHDVRLIPPAYAKAYVRRNKNDPADAAAICEAVGRPSMRFVAIKTEEQQAMVGIHRVRDLLMKQHTMLINQLRGLMAEFGIVAAKGVPHVDELLAVLADADDRRIPEPLRGGLTATAEVLRAIDRKLEAIDRQIVAAGREDASYRHLITAPGYGPIVSSAMTAMVVDPAAFRRAGDFAASLGLVPRQDGTGGKVKLGPISKRGNGYLRRLLVSGAMAVLRSKRAKDDPWLAKLLATKPRKVAAVALANKMARIGWALMMRQEDFRRPSAAA

SEQ ID NO: 145268 - protein, 366 aa, unidentified
MYIVGLDVHAKRSSMCILDENGKLVKHLEVKGSWQRMLQVVDEQVPKPFAICYEASCGYGYLHDQFAKRAERVTVAHPGQLRLIFRSKKKNDRVDADKLAKLLYLKEVPAVHVPGVDVRAWRGLINYRRKLIGRRAAVKTQIRAHLRGLGIAVGVKGGLWTKKGIAWLSEQAMSSSAADGLRRDVMVDDLTELEAKVRKVERELDRIGRAHPGVTLLRTIPGVGPRTAEAFVAHVDDVSRFARVKQVGSYFGLVPCQDASADRNRLGHITKDGPAPVRWLVAEAAWQGRRRSPKIRAYFDRVMRGDPQRKKIALVATAHHLTRVMAAMLRSGEVWREEEPQQPQTPPPASDQQEAKKTKTKTSNKE

SEQ ID NO: 145269 - protein, 413 aa, unidentified
MTERAKGPPPAPEKLNVEQGFTTKDFTALRAYVESIAPAVFARTYYDPGHNEMATPTPRAGYAGAYFPREAIMQDVTLVGIDLGKHSFHLHGQDRRGNMVFRRKVTRRQLIEFFASFHACTVVMEACAGAHHMARKLATSGHEVKLISPQFVRPFVKSNKNDFVDAEAICEAATRPAMRFVTPKTESQQTLSALHRVRESLVHDRVKVINQIHGFLLEFGISLPIGLAVIRRLPAVLAEQPLPPRLVVLLERLHAHFKYLSEQIGELDKDLARQLADDDLGQRLLTIPGVGPVTASLLTAEMGDGKQYGCSRDFAASIGLVPRQYSTGGRPNLLGISKRGDKSLRRLLVQCARAYMMRLERQTGRLAEWTRALLTRRHSNVVACALASKLARTAWALAVHHAAFDPGQAAMPA

SEQ ID NO: 145270 - protein, 429 aa, unidentified
MAGLPVTKENPVSKTKPAQRPVDDGFEVFCGIDVARETHHAVALDRRGQRLVDRPLPNSEPDLLKLFEDLEAHGRVLVVVDQLASIGALAIAVARARGLAVAYLPGLAMRRIADLYPGETKTDARDAHVIADAARTLPHALRRVGPEEQITVELSVLAGYDADLAQEATRLTNRLHDALLHIHPSLERLLAKHFRRRGVLRLLAATGTPAAVAALGLDGIKTQIASGSPRMANTLPAEILAALDEQTVTIPATEQYGRAIRGLAGQLLAVLEQRDILHGELEELLATHPLAEVITSMPGVGSRTAIELLRTVGDGSTFASAAHIAAYAGLAPATRQSGRTIKGEHQARRGNRALRSALYISAFASLKHPPSRAYYDRKRAEGKSHTAALTCLARRRVDVMHAMIRDRQTYRFDHLNPPRLPTPKAPTAA

SEQ ID NO: 145271 - protein, 351 aa, unidentified
MKVTTIGIDLAKSVFQIHGIDERGNVVLRRQLRRAQMVLFFSKLETCLIGLEACGSSHYWARKLAALGHTVRLMAPQFVKPYRKNDKNDGNDAAAVCEAVGRPSMRFVPVKSPEQQAELSVHRVRQRLMRQRTALINQLRGLLAEYGLVLAQGATHVRSQLPALLENSSNSLPPLALELFRDLYEELCQLEQRIAHYDRTVERLYRGNPLCQKLGALQGIGALTATAFVATVAHAAQFKNGRQCAAWLGLTPKQDSSGGKTRLLGISKRGDVYLRTLLVHGARSIMRHTPKRDDPKSRWVEQLRKRRGENIAAVALAAKHARILWALMVRSEPSAQLIAAHRIEPPAQPNL

SEQ ID NO: 145272 - protein, 348 aa, unidentified
MVIVGIDAHKRTHTAVAIDEAGRQLGSKTTEATTTQAHLELLRWADGFGPERRFAVEDCRHLSRRLESDLLGAGEQIVRVPPKMMAHARDAARTYGKSDPIDALAVARAALREPGLPVARLDGPSRDLRLLVDHRDDLVKDRTAHINRLRWHLHELDPAWDPAPRTLIRFTQLRVLAERLEHLDGIVARIARDLVVRIRELTVHVNALQREIEARTKVLAPSLLELPGVAGLTAAKILAETADVRRFSSKDAFARHNGTAPLPVWSSNKVRHRLSRTGNRQLNAAIHRIAVTQMRMHPDARRYLERRMTGGNTKTEALRALKRRLSDVVYRTLLADANSTAACVGEAA

SEQ ID NO: 145273 - protein, 350 aa, unidentified
MNVNHYIGFDVHKKSISYCVKTADGQIVEEGKLRATHDALRQWAGKRREPWHGAMEATLFSGWIYDTLKPFAAELQMGHPALMKAIAASKKKNDQLDARKIADLVRCNLLPACYVAPAQIRELRQMLRYRNLVVEQAVRMKNKMSGLLMEAGAEYSKQQLHGKKYFTKLLDTVKEVPESVKDLLRLSRGAMEMFETTQQQLLGRLRSDPRLAERVILLRSIRAVGEVTALTWILEVGDPQRFTSIAKAVSYCGLTSALVSSADKQQRGPISKQRNAHLQTVLIEAAKLAPRWNPQLAALHARELEQGNRNRATLAVARKLVAYLLAVDKSGQPFQPRTPSAAETEVEKVA

SEQ ID NO: 145274 - protein, 416 aa, unidentified
MEHALQFAALIGIDWSDAKHDVCLVDSATGAQELSVIKQTPEALNEWARTLRTRFGGEPVAVCLEQSRGPLIYALLKYDFLVLYPINPKTLARFREAFTPSRAKDDPRDAEYLVELLTHHRERLKAWLPDDEKTRTLQLLVEHRRRLVGDQTRISNRLTALLKSYFPQALAWFPDIRTALVCDFLLRWSSLDALRGVRRATLLKFFRQHNSHRRETLETRLDSIREAAPLTTDQAVIASSVTMVRALASQMKTTLAAVKEFDQQIEGLCAAHEDFELFASFPGAGSVYASRLLTALGSNRERWASADELLRFSGVAPVVERSGKSSWTRWRYFCPKFFRQSFVEYAGESIRHSEWAQAFYASQKAKGKSHQAAVRALAYKWIRIIWKCWQTRTKYDEARYVECLRKKGSVLVPATA

SEQ ID NO: 145275 - protein, 322 aa, unidentified
MAQNDLVVAGIDVAKDKVDVCIRSLSLRRTFASTAEGRRELTSWLRRQKVGKAVMEASGGYEREWAKALRDAKVEVRIVDPKRVRSFAQSAGRLAKNDTIDAEMIAWFAETFDEARGQAYDATREQLHQMVHARQALMEMQAKLENQGEHALPAAVERMHARILKTIAVELVKLEAAISAMVQATPHFAGLAEIIESVPGMARNTSAALIAGMPELGQANDKIVAALLGTAPYDDDSGRRRGERHIKGGRRRTRNAFYMACLGAATQHNPVLKAFYDRLVAKGKEKKVALVACMRKLICILNVMITRRQKWDPSRYRLSERT

SEQ ID NO: 145276 - protein, 365 aa, unidentified
MNTIYIGVDFHARQQTICYLKTETGELVFHELKHQDKPKVRAFYAEFRGQVIVGLEASGYSPWFERLLEELGCEVWLGHATEIRRRARWRQKNDRRDAELILDLMLHDEFPRLHRPAVQSREVLRLLRYRQKLIKIRTMSKNSLQAIALQAGLAKGSRLFTKDGQQQLATAEMSPVMHWQREHWLQLMEPLNQQLLETMVWCKAQSKGDVSITRLRTHPGIGLLTSLCIVHTLQPVSRFRNTRKVAAYAGFDPVERSSAERKCFLGISKAGSRLLRYLLVEAAQTAVRKDEDLKRFYQRLADRRGRPKAKVAAARKLLIRAYIMLRDEIDYAEFRHRAVAARLARRSQRPNVPEVLIGQPASPEP

SEQ ID NO: 145277 - protein, 376 aa, unidentified
MGTPSAQTLDDVGVREIFQELEEVPLMTMVGGLDVHRAQITFDYVDDDGLVHWGQIRAATRKTLRGWLAEHCPDGDAEFALEGCTGWRYVSEELAGAGVGVHLGDPAEIAVLRGPKKRAKTDRADARLLRTLLLQGRFPESWIAPAHVLEIRTLGRRYCTLMDERRAWQQRIHAQLFHQGCPPVRALLSVTGRAALAGAELSAVGGQYVDTALGRIDELSTEIEPLRAQLVNFARHQTGCQALQRHYGIGWLCAAIIWAEIGDARRFSSSDQLVRFAGLDVTVYSSDGKRSPGHLSRQGSPELRWAAFEAAKCAARRGSPDYGYYRKLAAKRDGHNGKNPTLAVERKILRRCHHTLRELGDAAVALPVAEPQEVAA

SEQ ID NO: 145278 - protein, 366 aa, unidentified
MRKNSTVVKNGSKIFKQPALTIGLDLGDRTSCYCVLDGLGNVIVERGVPTTPSGIRQAFGKMPRSRIALETGTHSPWVSRQLARMDHEVIVAHARNVRLIGESSRKDDQLDARTLARLARIDPGLLGPVRHRSAEAQIQLTVIRARAALVSTRTALVNAARGLTKSYGERLKKCGTEQMNRDSSEGLSPELRAALDPLLREIESLNERIKEYDQRIEQVAKEVHPEVARLKQVKGVGTLIALTYVLTLDDPRRFRHSRDVGCYLGLRPGRRNSGKSEPQLHISKEGDRYLRTLMVQGAHYILGPFGQDSDLRRWGLKLAERGGKNAKKRAVVAVVRKLSVLLHKLWVSGEIYEPLRNNRKAVRAVA

SEQ ID NO: 145279 - protein, 444 aa, unidentified
MLKSSRETKYEIENLGDVIHPVCCGLDIHKTWIYAAILIYNFEKKQIHWITTRVTSFKKKLDKLAKWLIVNGCKYICMESTGQYWIPVFEALEDAGLKPIVAHPKYLKVLSGKKSDPNDARWIAKAFACGRVVASFIPPKVIRNLRSLVRFMIKISHEATSNKNRARNCLTSLGLKLDDVFSDVFGKSSRSIINYIIAHPGEKFDVAPFVDKACKTPIAMIQDSIDKAIDAKQDAGTLLKLRKALERLDDAEKDIQELKGNITQQMGAYKKQLDLIRTVPGFDTDPFTAMRVLIEIGPDMKVFPTMKHFCSWAGVCPHHDSSAYKVKGRRISRSGTYLKPLLVNIAKAVVRSKNHPEISQRFNRIKNRRGYMKAIIAVCRMFLTAIWNILSKGEPYRADGFMPVNNGNNKAISISQALAYVRSRGYAIIDDNSGALTTTGSQGT

SEQ ID NO: 145280 - protein, 353 aa, unidentified
MKSDKYIGMDVHQETTVVAVVDCDGKVILETIVATEGSAIVRLLNGLSGPLHVTLEETTQAAWLYEVLRACAGDVIVCDPRRNGLLREGSKGDKPDARKLAELRRAGLVRAVYHGHDGTRKLKELVRGYETLSIDTERTMVRIKAVFRGRGIRTPGTAVYQAKQREQWLGLLNEEGARQRTTWLYDQLDHLRALRKEAKRTMLAESQQHRATALLKTIPQLGPIRSALIVATVDTPHRFRTKRQLWSYSGLGIVTHTSAEYEIQAERVVRRRKAVSTRGLNRNFNRRLKNVFVAAAIGGSHCEPYRKYLEGLTQKGMRAEMARLTLARKIAAVALSIWKKGETFDPKKLNWAT

SEQ ID NO: 145281 - protein, 351 aa, unidentified
MVMLAENYDFVIGGDPDRDTIDLAVLDTSAGRVQAHLADSADGPGYGRMLTWAGEHAPGRRIWALEGTGSFAAGLVVFLLDAGETVVEVGALRRARGAKNDRIDAIRAARQALARDEQGSPRAGGLREALRMIFACREGVLGSRTKAINELKSLIVVAPEQIRAELRGRSLAVQLTRIEALQAPTAAPVEQRLSVFSLLSITARIRFLSTQLAELDPQLLSLIKQHPAGPTLLAEPGVGPVVAAQLLISWSHHGRVRNEAAFASLAGVSPIEISSGQRSRHRLNRGGDRALNRALHTVAITRLRCHPESIAYEIKRSAQGKTHRDIRRSVKRALARRLYRRIEGRVHGRGV

SEQ ID NO: 145282 - protein, 387 aa, unidentified
MEARTMSLPPAASNDDAERCLLAIELSKKSWIVAVNTPLSDKISRYTLKPCDWKELLKLSERIRTRAAGELKKRVDVICCYEAGYDGFWLHRLLEARGIRNYVIDPASVQVDRRARRAKTDRVDVERLLRSLMAYLRGEPKVWSVVRVPSVTEEDDRRLHRERGRLIGERIQHVNRIKGLLAIHGIYDYQPLHRDRMQRLKGLQTADGHQLSPRLKAEIVRELQRLELVLGMINTIEAERDAIASAKAKVEHSNAKKIQDLVKVKSIGPEFATALVSEVFYRSFDNRKQLAGYLGLTPSHFQSGPMCRDQGISKAGNTKARTTMIELAWMWLQYQPGSALSIWFHNRVGKLKGRIRATIVAVARKLLIALWRYLETGLVPDGAILKI

SEQ ID NO: 145283 - protein, 402 aa, unidentified
MRFFVGLDWASEAHAVCLIDQRGRVRWRTSVAHSAAGLAALVQRLRRWRQQGPLAIALERPSGLVVDTLVHAGLDVVPIHPNVVKATRPRYSAAGGKSDPGDAFLLADLLRTDGHRFRPLQPPSDDTRALRTLVRGRDDLVAHRVALANQLRALLERVWPGAAHIFADVDSPIALAFLTRYPTAQSAGRLGEKRLAQFLIQHAYCGRRSPRELLARLHAAPPSQLGDAEADAAGDLVRSLVAVLTPLGAQLQQLGAAVTAALHHHPDAPIVHSLPRGGTINAAQILAELGDERRRFTTAEHLAAEAGVAPVTHASGKHHAVTFRWACNKRLRTALTTFADNSRHASAWAAAVYQRALARGCDHPHAIRILARAWVRVVWRCWQSRTPYDVSRHGAAAALTAA

SEQ ID NO: 145284 - protein, 349 aa, unidentified
MFILGVDYHPSFQQIAFLNQETGECGERRLDHSDGGAEKFYRGLQSQGVHVRVGIEATGYARWFERLLAELGIELWIGDAAEIRTLRVRKQKTDRHDAQLLLKLLLENRFPRVWIPCPENRDLRQLLWHRLVQMRTRILNQLQAVAMNEGQRWKKRLWNKRGRALLENLQLAPWASRRRQDLSELLDHFNPVIAELTTAIEREANKRPEVVRLMTHPGVGPLTALAFVLIIGDPFRFARGKQIGSYVGLVPCEDSSAGRQRLGHISKQGNKLLRFLLVEAAQVAVRFDLDWRRRYLHLATRRDRRIAKVAMGRKLAVRLFWMWRKGWEYSQVVEFGSHAGQLESTPGGQ

SEQ ID NO: 145285 - protein, 344 aa, unidentified
MGEVSTIGLDIGKSVFQVHGVDDAGAVVIRKRVSRARVLEYFGELPPCLIGIEACPSAHHWGRELQLLGHMVRLVPPSYVKAYLKRSKNDANDAAAICEAVTRPSMRFVPIKTREQQAALMLHRTRQLLVRQRTMLSNALRGHLAELGIVSAKGRNGTAELLRIITNGADSRVSPAVRGILDVLARQYSAIGIEIASIDRSIMALHRGCEASRRLAEIPGIGPIAATALVAEIGDWKTFSSGRSLAAWIGLVPKQYTTGGKDRLGSITKQGNRYLRWLLIVGAMAVIRYARKHGTEKRPWLGRLMERRPTKVAAVALANKIARMAWAIMVRGERYKEPKLLLAA

SEQ ID NO: 145286 - protein, 391 aa, unidentified
MLICGIDIGKFRHEACLIDETGKQLSKPLKFTNTTDGGERLLEYFDKHNQDNKVIVIGMEATGHYHLSLYCFLFDKGYQVNVINPIQSDAIRNLFLRKTKNDAKDSFLIAETIRIGRFSSTPLADEDILSMRQLCRHRMDLVDYIADQKRKIIGVMDRLFPEYQHIFSDMFGKTSTELLHKAITPEELLAIPTTELCELLNKHSRGRFGVAKAEQLRSAAQSSFGITVGTAAFSMQLRQLLEMIALLESQLVELEEEIVQYLRKLDTYITTCPGIGDTLGAIILSEIGDVSRFSEPKKLVAFVGVDPSVKQSGEFVGTQNKMSKRGSPHLRRAFFLAANVAAFRDPVLSAYYQKKRAEGKHHYTAVGAIARKLICIVYAVLRDNKPYTPHY

SEQ ID NO: 145287 - protein, 408 aa, unidentified
MERYYVGVDWADKFHQVWVVDGQGDKVTEKKVVEKAEDLAEFGRWLDGCRAKGVELWAAIEKPHGRIVEFLLDHGVLVYPVNPKALDRARDRFRMSPSKSDSFDAHVLAEFLRTDHGHFRALEPNSNEAQELKLLTRDQHRLGRQKTRLLNQLRVTLKEYYPRALEIFPNLETKSALDFLKQYPTPRALSALTRRKWNRFAKREHYLGEERCKELWEQMNEPQLAVPEHVVRAKAQLVGVLVVQLEALSDAVDRYNERIKSFFASMPAAKLVKTLPGAKTGTIVAMLWAELGDAKNRWESFRHLQAEAGVVPVTKASGKSRVVHFRFSCNKMLRHAAYWLAFVSLNQTEWANHYYREQRAKGHGHHHALRALGAKWLKIIFVMWRDHKPYDENYHLANITRQKMRQAA

SEQ ID NO: 145288 - protein, 320 aa, unidentified
MMAQNDLVVAGIDVAKDKVDVCIRSLSLRRTFASTAEGRRELASWLRRKKVGKAVMEASGGYEREWAKALRDAGIEVRIVDPKRVRDFARSAGRLAKNDAIDAEMIAWFVETFGEAPSQAHDAAREKLAQIVNARQGLLDLQTKLLNRGEHAGPEPVQKMHARLLKKIAAEVAKLEVVIAAMIKATPHFAELAEIIESVPGLARTTSAGLIARMPELGQVSNKVAPALLGAAPYDDDSGRRQGERHIKGGRRRVRNLFYMACLGAATRHNPVLKAFYDRLIAKGKKPKVALVACMRKLIVILNIMIARRQKWDPNLHVLG

SEQ ID NO: 145289 - protein, 377 aa, unidentified
MEKDSRFVGLDVHAETIAVAVGEPGGEVHSLGTIPNTPEAVRRLVKKLGPPETLRVCYEAGPTGYVLYRQLSALGVPCAVIAPTLVPVKAGDRVKTDRRDAEKLARSYRSGDLTPVWVPDPGHEALRDLVRAREAAKKDQLRARHRLGKFLLRQGRRAPTGSKAWGVKHRAWLQTIRFAHAAQDATLLDYRTEIDHAADRIARLERAIATAADLTPAPVRAVIAGLQALRGIAKLSAVSVVTEVGALSRFAKPRQLMGYSGAVASEHSSGPHRRRGGITKTGNAHLRRIVIEAAWAYRHRPAIGGTLRTRQAGLSEEVKALAWKAQHRLHGRYARLIAKGKAPTQVVTAIGRELLGFIWAIGVHVEQHAAGGAPAGA

SEQ ID NO: 145290 - protein, 323 aa, unidentified
MKHILGIDVSKDKLDLALRLPDGKARHKVVTNDPEGFAALRAFLTKQGTAELHACMEATGIYWEAIAEYLADAGFTVSVVNPAQIKAFGHSRLQRTKTDKVDAGLIADFCAAQAPSPWQPPGPALRELRSLVARRQALDTMRTQEKNRLGVAREAVRTGIAEHLDYLDQAIAEIDRMIREKIDNDPDLKQQRELLDSIPGLGDKTIPVLLAYYGGELRFTTAREAAAFAGLDPRQHESGSSVRGKTRLSKVGHSALRKALYMPAMVTITKTLWGRVFRDRLKAAGKSPMVIIGAMMRKLVHVAFGVLKSKKPFDPALHGVLGA

SEQ ID NO: 145291 - protein, 330 aa, unidentified
MKNYEEVVGIDVSKKTIDAYCYQAQVHKAFVNNVVGYKSLLKWVFKVTKDSSVFYCFENTGYYSLKLALYLSSQSIIYVEESPLKIKRSSGIVKEKTDRLDAQLIARYAWLYREELEPSTVKSNSQLELGRLLALRDQLVRNNAGLKGTLKEMKVLLSSPSTDVGCLSLKRSIDYLEKQIKGIEERIKDILCEDASMRKNYELLTSLKGVGFVVACQLIYHTGNFTRFDSWRAFSSYCGTAPFKHESGTSIYRRKQCHYLGDRKMKSLLSMASISAIQHDSELRLYYQRKLAEGKETMIAVNNVRNKLIARAFAVVKRGTPYVVLQQYAA

SEQ ID NO: 145292 - protein, 360 aa, unidentified
MTYRTTEARTAAGLTVGLDVSDIYTSLCTLDEEGNVAEEGRVRTTTPGLERWLHGLAPCRMVLEVGTHSPWMSRLLAGFGHEVIVANARQVRLIAESDRKRDRTDAEVLARLGRLDPALLRPIQHRGPEAQQDLALLRARDTLVRTRTGLINHLRGAVKAAGGRLPACSASSFHRKAEPALPRALHHALLPILAIIADLTARIREYDQVVERALDERYPVGRVFQQVVGVGPLTALAYVLVIEDPGRFQKSREVGPYLGMVPRQSQSGERAPQLRITKAGDALLRRLLVQSAHYILGPFGPDTELRRWGLRLAGTGSSRAKRRAVVAVARKLAVLLHRLWVTGEVYHPLLTESEAAAHVD

SEQ ID NO: 145293 - protein, 407 aa, unidentified
MDEIIIDKGCGLDVHKETVVGCVMGSGIKKEIRTFSTKTNDLLRLKTWLSGLGITHIAMESTGPYWKPVFNVLEDGFTVILANARHIKNVPGRKTDVKDSEWICRLLRSGLLSASFVPPQGIRELRDLTRYRRKLTQAVSSEKNRIQKVLEDANVKISSVLSDTFGVRGLQMIEAIMEGKLSEEQISELAKGRLKSKKAEIREALVGYFQDHHRFMIRASLEHIKHLEKLVEELGREIKEKLGEKYQKEYSLLQTIPGVKEQGAATIIAEIGADMDIFPSEGHLSTWAGMSPGHNESAGKKKSGKTTHGNKNLRAALTQCAWAASRTKNTYLSAKYHSLVGRRGKKRSLIAVGHKILVMAYHIIKNGVPYKELGKNYLLHRREDKIVKNHIKRLRDLGYEVELKKAA

SEQ ID NO: 145294 - protein, 424 aa, unidentified
MSQNQPEIQYAAFLAIDWADQKHVWSLQDANSGTCERGEVDHMPEAVEAWVAQMSQRFAGRPIAVAVEQSRGALVFLLSKYEQLHIFPVPPAMTANLRKAFYSSGAKSDPTDADLLLDLVQRHREKLRRLSPDTEATRLIQNLVEERRRLVDEKTAQSNRLEAHLKIYFPQIPRWFGDLGSPLVCALLERWPTLEALQKARPDTLRSFFRKHHSRKEELIESRIKAIGEAMPALKDRAVVEAKVAVVKVSVQLIQDLHEGIEGLNRQIQEAAEAHPDFFIFESLPGAGAVMAPRLLAAFGSQRERYQNAAEVQIFSGIAPVSESSGKSSWVHFRFACSKFLRQSFHEWAALSITQSQWARAYYELQRRRGKKHHAAVRALAFKWIRIVYRCWKEQVAYDEKVYLAALAKHNSPLLAATKAAVAS

SEQ ID NO: 145295 - protein, 418 aa, unidentified
MNFTQNDKLNQVTADTLIFGVDIGSQTHFSRAFDWRGVELGKRVFKFSNTGVGFLTFVKWIDEMQQKTGMKKVIVGCEPTGCYWLTFQSFLEKQGIKLVTVNPYSVKKSKELDDNSPEKSDLKDPKTIAGLVKDGRYSTSYIPTGVYAEIREASVCRDQIMKQHIRLSNQIQGWLQKYFPEYLECYRDFDSTSGLMLLQNTPLPHDIVKLGAGGINEIWRNAKVRAAGIKRAQTLVEASQNSVGLEGGEAARLEIWILVNDYMAKKQQLERLDEYLAQKVMEVPNVEKLLAIKGVGLSTVIGFIAEVGDIGRFTDPKQIQKLAGLEITKLSSGKKRGQPGISKRGRSKLRRTMYESARALMNWNPAFADVFLYYRNRTRNPLGGMQAKIAVACKAIRVFYTILILVVLLTKQDFERIS

SEQ ID NO: 145296 - protein, 416 aa, unidentified
MLEDVRWFVGIDWATQSHSVCLLDAEGRQVAHREFAHDGAGLTELCNWLLQKTNAVPGQIAVAIEMPHGPVVEMLLEHGFAVCAINPKQLDRFRDRFTVAGAKDDRRDAHVLGASLRTDRAAFRRLVVDDPTMIELREWSRLADELQQERTRLANRLRKQLWRYYPQATKLTDDVADEWFLALWQMVPTPARAAKASEKAIARVLKAHRIRRLDAAGVLETLREVPLFVAPGTTEAACAHIRSLAARLHLVNRQIKEAHQNLDRLCVAIEGEEKASGQSSEQCDVTILRSWPGIGRIHLATLLAEAAEPLRRRDYHALRALAGAAPVTRQSGKQRFVIRRLACNRRLQSAIHHWSRVAIQHDEASRRRYDALRQRGHGHARALRTVGDRLLFALCTTLKRHTPYEADYRARACAKA

SEQ ID NO: 145297 - protein, 348 aa, unidentified
MAMTMVETTRPVTGGVDTHLDVHVAAAVDASGGVLGVQPFATTTAGFVELHAWLETFGSLERVGVEGTGAYGAGLARYLRSRDLEVIEVDRPNRQLRRRAGKSDTIDAIEAARAALSGRASGIAKTADGNVEAIRVLLIAKRSARDTRIKCLNQIRHLGFTGPDELRERLRGVPRGRLAGTAAGLRPTAGSDPVVYATKLALQTLGRRVVDLETTTQRLDATLDQLVCATAPNLVAVAGVGIDTAAILLVAAGDNPERIRSEAAFAHLCGVAPIEASSGKTVRHRLNRGGNRQANHALWRIVFTRMSADARTRAYVARRLEQGRSKPEIMRILKRYVAREIYKHLPRD

SEQ ID NO: 145298 - protein, 424 aa, unidentified
MNCNQNFKISQVTEGTLVLGIDVGSNTHYARAFDWSGLELSKVFKFKNSFEGFQSFVLWVNDLCCKYNKSKVIAGLEPTGHYWFSLGELLKENNITIAIVNPYHVKQSKELDDNLQTKNDSKDPKVIAKLVIDGRYSFPYIPEEIYGELRVADKLKNDITQQIISIKNKIHRWLSIYFPEYEKIYSSIDSKSGFLLLKETPLPKDIVELGSEGIVERWKQTKLRAVGLDKAKKLEEAAKKSIGCKNITSSARFEIKLLIEDYEYKQNQLNSITEELNKLCEKIPMIKEIAEIKGIGIATAISFVAEVGDIRRFKSAKQVQKYAGLALKENSSGKHKGLTRISKRGRKKLRTILFRATIPLIGFNKEFSSIYNYYIERKDNPLKKKQALTAICCKMIRIFFTILSKGIKYDETKMLHDIKRPVAA

SEQ ID NO: 145299 - protein, 341 aa, unidentified
MQTITTIGLDIAKSVLHGVDATGQVVIRRQLKRRSVLTFFQKLPPCLVGIEACASSHHWSRELQALGHIVRLMPPAYVKPYVKRQKNDMADAEAICEAVTRANMRFVPTKTPEQQSCLMLHRTRHLFIRQQTAVINSIRAHLAEFGIVAPVGRKGVTELLHVVADPSDKRVPEVARACLAALGTQLLSLKQQILEFDRMILAWHRSNETCKRLHYIPGVGPMLATALVASVADPRTFRSGRNFSAWIGLVPKQHSSGGKDRLGSISKQGDRYLRSLFVAGALAVIRYAKIHGTKHRPWLTALLARRHAKVAAIALANKIARMAWAMMAKGERYKEPIALAR

SEQ ID NO: 145300 - protein, 419 aa, unidentified
MRFIALDVHRDFSEVAIAEGGQVRLAGRVETTPAGLELFAQSLGADDQVVLEATGNALAIARVIEPHVARVVLANPKAVKGATQTAKTDKLDARTLAQLLAAGFLPEVWTPDERTRALRRRISRRAQLVRQRTREKNQIHAILIRNLKARPPVTDLFGVQGRKWLSGQGLPDDEREMVAACLRGIDFLDREVLAIDRALAELVLASPEMRRLMTLPGVNFVTAAGLLAAIGDAKRFPTARHLVSYLGLDPRVRQSGSEPARHGRISKQGPGEARHVLVEAAWHAARTTGPLRAFAERVAARRGANVATVAVARKLTVIAWHMLTRGEDYAFVRPSLVREKIRRLELMVGAERRQGRRNPVRVFATSEQHRLEKELAAQAELAYRRLMVDWKAQRRKGTGAAPGRASSAARQGTAPHPAL

SEQ ID NO: 145301 - protein, 411 aa, unidentified
MRLFVGDDWAEDHHDIEVMDEAGTVLAKRRLPEGAAGMTQLHALIGRFLPEDAEDAEVVIGIETDRGPWVAALIAAGYTVFPVNPLQASRYRERHGVSGAKSDGGDAHMLADMVRTDSHQLRPAAGDTPEGQGIKVVARTHKTLIWDRTRAVQRLRHQLREYFPAALEAFDDLDAPDVLELLGKAPDPARAAKLTRAQVAAALKRARRRDIAAKTDAILAALRGEHLGQPAALTAAYAATARSLIAVITTLNIQVKILEEQVRDHFGRHPDAEIYQSQPGLAAILGARVLGEFGDDPGRYVTAKARKNYGGTSPITRASGKKKVVAARFIHNDRLVDALMSWAFSSLKASPGARAFYDEQRAKGHDHSDALRRLANRLVGILHGCLKTRTLYDEATAWGHRENLPQSSAAA

SEQ ID NO: 145302 - protein, 450 aa, unidentified
MSKGSGVSRGDRRRNARLAELRRLVPRENAIAGIDLAENNQAVVVTDHDSKVLARRSPRCKAWQLGEVLDWAVAKAQARGFGSVTVACEPTGSRWMHVQHACAERGLNFVCVQTLVTHNAREAEDYTRDKSDQKDAVLIARLAAELRCYRPEEIEEDWAVLRCLGQRRDALVTEATRCRQQITDRLALAWPAALGVAAAPLDSVTFLACLQVAADRCDGDPGKLRGYGLAEFTQIARGVLPAWGGQRICRRIAAGFHAALGDSRGAVPARRRGALKLAGHALADLRRARMLLAAVEAEMVAQLHVLGIADVLATIDGLSLEVAACILAETGDPSRFGSSRALVKHAGVAPCENSSGNSAGQAKISRRGRPVLRKAAWRAAWAMIHGANPVLAAKYAHLTSRGTGQLAKGQAHVACMATLLRWIYSVTTSRAAWDRRVAAGTISHTAAMAA

SEQ ID NO: 145303 - protein, 417 aa, unidentified
MKKKSLHFTAFVGVDWADQKHDVSVSSSDGSNPVHQVIPHTPEALNEWMLTLRQQYPEGQIALCLEQSKGALIFHLLGYDFLTLFPVNPKNLARFREAFTGSGAKGDPSDADYLRELAAVHHERLRPWKPDDEQTRTISFLVQGRRKTVDERTRLTNRLRSTLKMYFPQAIGLSGETLHKTMALDFLRKWPQLSDVQRAKNKTIQLFYSIHNSRSAELIKKRQELIRSTIPLTTDQAVIKSCLITVKMLLGQISQINSTIDEFDMELKELYSNHPDKGLFDSFPGSGEALGPRLLCAWGTDRERYDSADSMQKYSGIAPVTKASGQSKVVIRRLACPKFLLQTFHEYANSSRRSSIWAQAYYEMLRERGKSHHMAIRSLAFKWIRIMYCCWQNRTAYDEIKYIQALKRTNSPLLKFV

SEQ ID NO: 145304 - protein, 378 aa, unidentified
MIEHTPEALDVWLTELHQKVKGRIAIAVELKKGPVVYALQKYPFITVFPVHALSLARYRQAFSPSGAKDDPQDAELALELMLRYPQKIKAIEPDNADIRLLQQLVEQRRQLVEDKRRFVNRLINTLKQYYPQPLEWFSHRGSLLLCELIMRWPSLQQLKRARRDTIRNFLNAKGGRAMALTEQRVVSIDNAIPLTTDPSVIEANALMATALATQIKVVSEIIKTYDERIETLFDTLPDSGLFKSLPGMGPCLGPRMLAALGDNRDRFNSAEEIQNYAGIAPVTERSGQKSWVHWRWQCAKFVRQTFVEWAAKTVNSSYWARLYYRGLREKGKSHQSAIRALAFKWIRIIYRCWKTKTQYDEAKYLLALEARKSPLLKP

SEQ ID NO: 145305 - protein, 419 aa, unidentified
MKVEYGNVAEDAVWAGVDTHAATNWLSVVDARGSELFSGEFATDPEGYRKLCDEIRRLGSPVAAGVECTGTYGAGLVRAMAAYGIACYEVITPGRPRRGPGCDKDDAADALRAAKQALSGENLAVPKSQDGWVEEVRNMTVAREELVKQCTSLANLALATVRKGPDEIRARLERLGTAKMMGVLAGWDEAEADPICDAVMFSLAALGRVWAEARRSARLLEERIERTLKAGNPALASMYGCGPISAAMLAIAAGDNPERMGSEASFAALCGVSPIRASSGKVERHRLNRGGNRNANKALHIIAMHRMRTDPRTAEYVERRRAEGLSDREIRRCVKRYIAREAYRLIMHPYDVPIEGKGPEMRAERIASGVSQKDAAIALGVTASTLCDLELGHHQFRELALRYRQWIDDGFPLEAGIAS

SEQ ID NO: 145306 - protein, 361 aa, unidentified
MRIIGCDLHARQQTLAMLDTETGEVVNLTLMHDGNAVREFYSQLPRPVLVGIEATGSMHWFLNLLEELGIECWVGHPATIRAAEPRKQKHDRRDADLILKLLAENRFPAIWLPTKELLDLRALVLHRHQWVRIRTRIQNALQAMALANGLRRGPSLWSYDGQAKIAFLPLLPHASYRRSMLQEMYRKMEAEIENLTQQVAEQAEQRSGARLLMTHPGVGPVTALATDVFLGDPKRFADGKALGSYVGLIPREYSSGERQRFGGVTKQGSPLLRFLWCEAGAHAVRRDPELKRFYRRKLVQKGLGKARVAVARKLGIRLWIMLRDEIDYEEFCRRGQKQQSGAACAGMLEVGNGANCRRPID

SEQ ID NO: 145307 - protein, 383 aa, unidentified
MSSTSNSTAIRVDLGAIFVSLELSQSKWLVTSLTPGGGEKMSKHLVKAGDIGDLLLRFAELRRKALVRTGQIFPIVVIQEAGLDGFWIHRVLLQEGIESHVVDPASVAISRRRRRAKTDRIDGEALVRTLLAYKRGEPRVCAMVRPPTPEEEDRRRIARERKVLVNERVAHVNRIKGLLYSHGVGAYEPLRRDRRERLDELRTGDGRPLPPHLQAQISRELDRLELVLAQIKDIERASTDMLTAEALAFPGAAPLLGLKGIGAAAAAVLWGEGLCRHFDNRRQVAAYAGLAPTPWQSGQMDHEQGVSKSGNPRLRTTLIQIAWLWIRHQPDSALTLWFKDQVARNGGRLKKTMIVAVARKLFVALWKYTRAGVVIEGAVLKAA

SEQ ID NO: 145308 - protein, 357 aa, unidentified
MGGGFRGTVIGLDLGRKYSWCRAISTETGEVLGNERVSTRREEFLSFLQGLPRPIRVVMEATGNWQYPYECLEGWVEEIQLAHPLKTKAIASAKIKTDRIDATILAHLGMADLVPQAYIPPREVRDLREILRHRAFLVYLQTAVKNRIHSYLSKQGLEPPFADLFGKSGLAWLRALEIREPYRSLLDQDLRVVESLRQEITRTTRRIESLAEEDPRARLILPIRGLGKYSVMLILAEIGEVTRFPTAKHLVSFAGLCPSTFQSGQTCYHGRLTKQGSKWLRWILVEAAQHYAKAPGRLGDLSRWIRQRRGAKVARVAVAREILVCIYYCLKKGVVFDETPRRNGYSVPQHAPTSSGR

SEQ ID NO: 145309 - protein, 339 aa, unidentified
MRIVGGLDVHRAQITYDYVDLRTGEEVRGQIRPATRTEVRAFLATFGRKTAAFALEGTTGWRFVVEELRRAGMEAHLAEPAETRARRGPKRRAKTDRADSRLLRDLLLAGNLPESWIPPDHLADLRTTVRLRRALIAEKGMWLRRMHAQLFHHGLPVPPDLQSKAGREYLEKAALPPAARQVLDIGCLLLDRLEEQLETIDAELIPLARRLYGCQVLCRQWGIGPVLAATILAELGDTRRFSSSRQSVRFAGIDVTVSESDGKRTRGHLSRQGSPTLRWALYEAAGGAWRVASPDHSYYLETKRRLGTKRARLSVARRILRRVHHELAEAGDAAFADAA

SEQ ID NO: 145310 - protein, 377 aa, unidentified
MSDTTRTAEDILPARLCMALDLGASRWHVAFLRDTTRRPKVHVVAAGDFGTLLDKAVAAKKRLGLSADAPISSCYEAGRDGFWIHRELVRRGVDNHVIDPGSIEVERRSRKRKTDRIDATKEVVRLVRFVGGDKHAFRTVKVPDEAAEDARRMTRERRRLKKECTQHQTRIRALLATIGVREERVMVLALRADGQPLPPLLRAELEREMERLKLVREHLRAVEANIKAYVETSPDATAEKCRMLSGLKGIGIRSAASLCLEFFGWRQLRNRRQVGGLAGLTGTPHQSGDMNHEQGISKAGNSSIRTSMVELAWGWLRYQPNSDLSRWFVERFGGGKSRQRRIGVVALARKLLVALWRFVDQGVVPTGALLTPMPRLS

SEQ ID NO: 145311 - protein, 326 aa, unidentified
MNIIGVDVSKQKLDCGYFRDLETGKVKTKVWPNTPQGHQALQTWAMRNLGVALSQLTFVMEATGIYHEALAYALHEAGAQVVIVNPAQVRDYAKSLAIRTKNDRRDSLVLARFGATQPWRVWQPEAPEVRELRALLARLTALEKDLQREHNRQEKAQISAASARVLQSIELVVATLEQEKQRLDRLIDDHIDRHPRLKQDRRLLEGIPGVGKVLSRHMMAAFRSRAFRSARQMAAYLGVIPVEHTSGSSVRQRPRLSKAGSATLRAKLYLPAVVALKYNPHAKALYARLVAQGKAKKSAIGAVMRKLVHLCFGVLKHQQAYVPPVA

SEQ ID NO: 145312 - protein, 345 aa, unidentified
MQSMYYIGLDVHKKSISYCLKDGSGRIHAEGAIPATRSDLDRWMRTLPQPWTAAMEATLFTGWIYDHLKPHATALKVAHPLMLRAIAAAKKKNDRIDANKITDCLRCDFLPECYMASTEIRERRRTLRYRNLLVRQAVQLKNKIAVLLMEAGVSYNKQKLHKVGYFRELLATNQDIDDGLRSLLRMCRETVVRLGRTESALVRSLGRDPLLVERVERLMTIPAVGPVTALTWVLEVGDVRRFSSIKKAISYCGLCGAEKSSAEAIKRTPLSKQRNKHLQSVLIEAAKLAPRRSPELALVYDQEKQKGNANRATLAVARKLVAYLLAVDRRQKEFLTVERENRTAA

SEQ ID NO: 145313 - protein, 405 aa, unidentified
MKKVIKVCGLDVHKDTIFACVKKGNYQSEVKKFSTMSCGLAELNHYLKGEQVSKVAMESTGIYWMPVWRALENDFELLLVNPYFIKQMPGRKTDVQDAQWIATLLDKQLLRGSVVPCKTIRILRAYLRRYAQLQGQTTRCLQQIEKQLSQCNIKIASLSSTIGSKTVIDIVESISKGNHAPEELLALVHGRIVKRHGEKVKQSLQGIIEEHDVFLLRQIYEDYRHIERQCNELLAQAQKIAETHYKGQLDLLQTLPGIKQLSAVIILSELGGNIKLFETAERLTGWCGLRPKNDESAGKIKSRSITKGNKYLRRILVQTAWAASRTKTCYLKTKFEQLSVRKSSKKALIAIARKQLVIIWNVLTKQEVYQEPKIKLSAQQISRKQKYYQEKLSKLQLLQDIEKAV

SEQ ID NO: 145314 - protein, 412 aa, unidentified
MQTLIERGCGLDVHQATVVACLLIVRKDGKVQKQMRTFGTTTRELVDLREWLRAEGCTHVAMESTGVYWKPIYAILEGALEIVVANAQHIKKVPGRKTDVKDAEWIADLLCHGLLRSSFVPPKPIRELRDLLRYRRKLVESQAAERNRLLKVLETANIKLANVATDVFGMSGRLMLRALIAGKATPQEMAELAKGLLRKKIPELELALEGKLEEHHRFLLALQLQRLEAAEKDLAALEQHIQQKLEPYAAQLALLDEIPGVDWTLAAVIIAELGVDMSVFGSVSQLASWAGVCPGNNESAGKRKSSRIPNGNVYLKTALVEAANAAARTKGTYLRDKFFRLKARRGYKRSVVAIAHKILVAIYHMLSQQVSYNDLGDLYLDKLNKNHLTRNLVHRLERLGYAVTLTLPQQAA

SEQ ID NO: 145315 - protein, 407 aa, unidentified
MQGRNHNGENQRDRSTDSAHKTTARYGRHFSYACNDEMDSSCDLVGIDVPKSREYEIKREEPIMSKPIRIAVDLAKNVYQIAISTRPGKITGSRRLSRDQVLHFFATQPKARVFMEACGTAHYWGRKIQSLGHDVILLPPHHVRPYVRGNKTDTTDARGIMDAGGNEDIHPVPIKTVDQQQMTALHRMRAGWMKGRVKRLNSLRGHLREFGIFIPVGAHNVVPKTWEALEDADSGVPDGLRPVLAEACQEIRDIDARIKIATKQIEAIAKQTPVVALLMTIPGVGLLTATALVAFLGDIRRFKSGRHLASYLGLTPREYSSGLKRYLGRISKRGDGYLRTLLIHGARSTLTHAHRRVPDHFRDWAHQLEARVTHNKAAVGVANKMARMIWAVWSKHDEYSSPTVTAH

SEQ ID NO: 145316 - protein, 414 aa, unidentified
MLPPEIRCVVGIDVAKQAHVVCALEAPSGAIRHKPSRIEATAEGYGLLGAWLQTWGSPEQILIGLEATGPLWEPLYEHLAQAGYQVLLLNPRQTASWASSLGLRAKTDGIDAQTLAAGLLAGLARASTLPSETVQALRTLTRARRDLIQSRTATRQRLHDDLVTLFPEFVRFLPRLPGHTDLGNPAVLDLLSTYSSAQALAQVPLEELTTTLERVSGGRWTREQAQALQDLAHHSTASARAVTARSLVARMLAQQLQELAVHSTAVEAAIAELLKDDADGQRLQAIPGIGPHTAATIRAELGDVRRFGRVDAVVAYAGLDPRTRQSGAFVGQKQLSKRGPGALRHALYLAAFVAARCVPEWRTRYERLLARGRAKKEAFTILARALLRVIYHLLRTGDAYDPALLNQSSPATTG

SEQ ID NO: 145317 - protein, 345 aa, unidentified
MQHLAVDLGGKESQLCIRLSDSKILLERRILTSQLPSFFKVQPPSRVILETGAEAFTIADAALAAGHEVRVVPATLVRTLGVGSRGMKSDRRDAQILSEVSCRIDLPTVHVPSHRSREWKAMCGMRQALVDSRTKMVNTVRGWMRGRLTRVALGTVSTLPSRVRKKCPDLPQFVERQLSAIEQLSEMIRAYEKDFAAMAELDPVCRRLMTIPGVGPLVAIRFVSAVDDLSRFEGPHALQSYLGLTPGEDSSSERHRITGITKAGNSRTRWILVQAAWTVLRCRAGDPMAQWAEQIAARKGKKPAVIALARKLAGIMFAIWRDGSEYNPTKGAKSETPRVYVMKPS

SEQ ID NO: 145318 - protein, 313 aa, unidentified
MASHPFVGIDVSKERLDIGVGAGEEFWQASNDEAGIQATRGRLSELQPALVVVESTGGLEWPLVSELATRQVPVALVNPGRVREFAKSLGLLAKTDKLDAHLLARFGEAAKLQPTLLPDEDIQKLSSLMGRRRQLLEMLVMEKNHLLSTRLSLRSGVQEHITWLEQEVDQLTEQIQQDLQDTPGFRDKDRILQSAKGVGPITSMILLSDLPELGQLDRKKIAALVGVAPFNDDSGRRRGQRRIKGGRASVRQVLYMAAVAASRFNPTIRVFYQRLLASGKKKKVALVACMRKLLTILNAMIRDMQPWRSPLTA

SEQ ID NO: 145319 - protein, 342 aa, unidentified
MRLFIGLDVSLEKTAICVVSAHGEIIKEAEVASEPEALARWLSDLDGSIAAIGLEAGPLSQWLHHGLTEAGLDAVLMETRQVKGALKAMPIKTDRRDAEGIARLLHLGWFRPVHCKSISAQETRAVLGARKAIQQNMIALEMSLRGLLRNFGLKVGAISRGKFETRIRELADGNPMLEAATVPMLRARASLRQELAILEKQVRHLAQADPVCHRLMTMPGIGPVVALTFRAAVDDPARFRSSKRIGPWIGLTPSRNQSGERDVSGGITKAGDVNLRRALCQAATVMMNRGRSTWLRTWGAQLAQRRGRKIAMVALARRIAVILHRIWIDGTIFQSDAPPKAA

SEQ ID NO: 145320 - protein, 382 aa, unidentified
MHASNICTPIADHNGTIFVAIELSQKTWLAVVRSPERDRISRHKLEGGNDAGLLALIASVRARAARALGTVPAVVSCYEAGYDGFWLHRRLVAAGITNFVFDPSSIAVEQRRRRAKTDRIDGELLLRSLMAHCRGEPRVVRIVRVPSPEQEDVRRGSRERERLIKEQTAHTNRIKALLRTLGLAAGNPRRRDWLRWLAEQRDWEGRAVPPHYLAELAREHARLLLVVAQLGDLSQAPEATDGPAAARMAKQKTQLRQLKSLGLASAGTLVDEALYKDFDNRRQVGSYIGLAPSPWRSGATSREQGISKAGNPRARHQAIELAWLWLRHQPDSALSRWFRQRTAGASARTKRIAIVALARKLMVALWRYLTTGLIPDGAVVKA

SEQ ID NO: 145321 - protein, 387 aa, unidentified
MGVIIGMDPHKRSATIEVIDERGRVLAAGRFATDAAGYKAMLAEGRRFADRVWAVEGCNGIGKHLAHRLVHDGESVLDVPPKLSAQVRVFATGNGRKTDPVDAHSVALAALHTPGLLRVEVDDDLLVMGMLTDRRDELGRTRTQTVNRLHRLLLELFPGGAKQFLSAQQARTLIATIKPRDLPGKTRRRLAVELIGELEAIDRKIKTAKTELTALVDARGSTLLELPGIGPSSAARLLVDAGDIHRFGNRDRFASWNGTAPLDASSGNQQRHRLSRAGNRRINRALHIMAIMQLRHATEGRAYYDRRKAGGMPSMMAMRALKRRLSNVVYARMLNDQQRREAAGPGGHPGTTLQSSAADLTPDIGSSEQPHPGPATNKPKTLVSARP

SEQ ID NO: 145322 - protein, 338 aa, unidentified
METYAGIDLHSSNNYIGVINSKDKRLYGKKHHNNLDHVLRALKPYKKTLKGVVVESTYNWYWLVDGLQEAGFDVHLANPNAIQSYSGMKYTDDKWDAFWLAHLLRLNILKTGYIYSKQERPVRDMLRRRLMFVRQRTTQVLSLQSMITRHRGLNFPGSSVKEFGDHFIEKLFDDPNLVFIAKNGMATIRHLGKVIKEIESTVLSMISLKREFKLLLTTPGIGPILGLTIMLEVGDIKRFKKAGNYSSYCRCVESKRMSNNKKKGENNKKNGNRYLAWAYVEASFHAMRNNPKAQKFFQRKMSKSNRALATKALANKLTKATYYMMRDGVPFDEDKLFG

SEQ ID NO: 145323 - protein, 342 aa, unidentified
MEHYAGIDVSLEYSSVCVVDGNGKIVREAKVASEPQALIAWFGSLGFGLERIGLEAGPLSQWLFAAMKAAGLAVELLETRHVRKAFEAMPVKSDRNDARGIAQLMRLGWFRPVHCKSMSAQETRSLLTARKLVQSKLHDVENSLRGILRGFGLKVGKTTGQKFAGRIEELVAGHPHLQTIARALLAVRAVLRTEFAAFEKQTRRMVRSDMQARLLTSVPAVGPIVALTYASAIDDPARFKSSKQAGAHFGLTPKKHQSGETDYTGRISKIGDASVRTALYEAANVMLTKPVKGCSQLKSWAMRIKRRAGMSKAKVALARRLAVIMHRMLADGTPFNAAAAAA

SEQ ID NO: 145324 - protein, 338 aa, unidentified
MTIVYIGIDLAKSVFAVHGIDEHGKPALVHPRLARARLLGLIASVPACTIGMEACSGAHHWARLFQRFGHTVRLMAPKFVVPYRLSGKQGKNDAADAAAICEALQRPSMRFVPIKDEAQQARLTIHRVRQGFVEQRTAITNRIRGLLSEFGIVLPLKTATVRRQAALALEDLPGEANLAVGDLLSELHHLDGRIADYDRRIVEMARQDDRAQHLMRLRGVGATTASAIVAEVGNGHDFRSGREFAAWLGLVPGQYSSGGKPRLGRITKAGNPYLRTLLVMGAKAVLSCAARKTDPVSRWAVSLQQRRGYFKAIVAIAAKNARMAWAVLRKGENFVMPA

SEQ ID NO: 145325 - protein, 345 aa, unidentified
MKKIAIGIDFAKEKFDVTVKNVETGASEYGQYPNTPAGGRSMVRMVRKFAKGIDSSQWLFCGEDTGYYSQTIARYLTEKGYFMWLQNPYSIKHSEGDIRRGKDDRADSAAIADYAHRYEDKARKWELPSKVSEELHLLLTRRDAYVRAKRVIQSGASEIPKRDKQGESVSLIKSSAKRLLREIDEEIERLEEQMKKIVKEEEAMQKNYEILRSFTGIGLVNSMCFIAYTDNFKKFDLNARKIATFWGVAPFGKDSGKTVHVDPHVSQFCNHWLKAIISNAANSALKWNPIIIAYNERLVKRGKCEGIRRNNVKNKIIQTVVAMIRKGEKFDPEFKFTNKMVPVEC

SEQ ID NO: 145326 - protein, 346 aa, unidentified
MYDHKDIILAVDYHAENTEVRWLNCCTGEERRLNIPTTRIGILRLVEKAVGEAAQVGGKVIWIMESTTGWARVKELIGSRVQFIMANVLQMPLPPKAYRRKSDKIDTGRILREFLNGSLPRSYQPVSRWRELRRLVDSRQDLVERQTAVKNWITHFLHHETWGDRDGLWTLKGLKRLGGLNLSASDRMVLNLKLQELEQLADRRKQMEAAMQAAYDQWPEAQHVDEVRGIGMVTAVSILAHIGSIRRFGSAEDLISYAGLAPGHRQSDGTSHNSRIGGGGTDSHLRYLLIESMQWVCQIPRYRDAFDRAVTKHGKNIARIIVARMLLRSIFKMLRDGVRFNQVSAA

SEQ ID NO: 145327 - protein, 337 aa, unidentified
MTLYCGIDLHSNNSVVAVLDEKDRTVYEKRLPNDIATITEVLCIYQSELAACVVESTYNWYWLVDGLMDAGFPVRLAHTSALPEYSGLKYSNDFSDARHLAHLLRLGLLPTGYIYPKKERALRDLLRRRLLLVRQRSLHHVSLQSLIARHSGQRLNTLQIKQLTKGHLADYLQGHALLGGEITRQARCWLETAVKRIERELQSHIQPREDYQLLQTIPGVGPVLGTTIALETGTIDRFASPGNYASYARCVKSEKISNGKYKGRGNKKNGNKYLAWAFMEAGHYGAIWNPRIKRFYQRKKAKVHIMVAKKAVANKLARACYHMLKRGEVFDVTRAFS

SEQ ID NO: 145328 - protein, 374 aa, unidentified
MMQTSSTSLLVSNVVGIDPHKRMLSATVLDGRGAVLDQAHFKVSGVGHRALEAWASEFGPVLRWGIEGASGFGRHTAIFLARRGYDVRDVCPTRTAQHGRGRFQGKSDVLDSERIARETLAEGRLPAAFKRAAGDSGPDPLLEQLGLWHRARRSLLKMRQQLLGESEALLGALPEALRDQLPDTQAVRPRLRALAGVDCAEDVDDLARLRLAMLDDHRASIRALDQREHVVTREIAQLLGQLHTTLPGLCGISHKNTAELIIEVGDPRRFTEAGFARFNGTAPIPASSGEAAGDPTRHRLNRGGNRRVNSIIHIMAVTQLRVDPRAQELLTACRARGHTKKEAMRILKRHLSNAIHRMMILDQTERPERVTLAT

SEQ ID NO: 145329 - protein, 330 aa, unidentified
MKNYVDVIGIDVSKLTIDAYIHKKEIHRLFTNNRKGFKELLIWVNKHLGSILYFYCFENTGNYSLNLSIYLDERSIDYVEENPLLIKRSAGIVREKTDKLDSAMIARYAWLHREELSLSSVRDNKHQELGRLMALRDQLVRNRAGMMSSLKELKSHLSSPSTDVCCKSILRSISYITKQILMLEKRMKEIIKSDTRLDRNFKLLSSVRGIGLILSCQLLYHTSNFNRFNSWRQFSNYCGTAPFAYSSGTSVKRANKCHHIGDRKMKTLLSLASVSAIQYDSELRLYYKRKIEEGKPKLVALNNVRNKILARAFAVIKRGTPYVELHQYAA

SEQ ID NO: 145330 - protein, 345 aa, unidentified
MKITTIGIDLAKNVFQVHGVDERGKAVLRKQLKRKDVASFFANLEPCLIGMEACGSAHYWARKLSALGHTVRLMAPQFVKPYVKTNKNDRNDAEAICEAVARPNMRFVAVKTADMQAVLALHRARQGFVKARTAQANQIRGLLAEFGIVIAQGIGHIAQRLPEILEDGENELPGMMRQLLERLGEELKALDKQVGELERQITLWHRDNEQSRKLEAIAGIGPITASAYVAAVGDAKSFRNARQVPAWLGMVPRHEGTGGQARLGRISKRGDVYLRTLLIHGARAVISSFERKPVQADGWLKRLLARRNKNIAAVALAARNARIAWALLAHERSYEHDYVATRPAA

SEQ ID NO: 145331 - protein, 344 aa, unidentified
MATIIAVDVAKSVFEVAVSERAGRVREHHRLSRAQFSRFLSVQRPATILMEACGMAHFWGRQAQARGHRVMLLPPHAVRPYVPRNKTDRADAKGILEASRNQAIRSVPVKSITQQTIAALHRLRSTWLAARTARINTVRGLLREFGVVIPVGASHVVPRVRQLVAEPLSVLPEALRPALTQAADEIRELEGRIRSIEKQLDAQAVQISAATRLRTVPGIGLLTATALFAFVGDVERFPSGRHFSSYLGLTPRESSSGLRRRLGRISKHGDAYLRMLLIHGARAVLWHAKTTARRSRLQSWALKLEAQRGHNKAAVGLANKLARIAWAVWKFGADFTDQPLPRRH

SEQ ID NO: 145332 - protein, 408 aa, unidentified
MKTLHKRCAGLDVHKVEVVACLRLISKRKVEREVRRFPTTTQGLLALAEWLESAGCTHVAMEATGVYWKPVWHILEGRFALILANAAHVKNVPGRKSDVNDATWLADLLAHGLIRASFVPPPAIQELRDLTRTRKQLTREIVQHVQRIQAVLEEANVKLCSVITDIMGVSGRRILKALIAGETDAAKLAALGHERLGCTRAELVQVLTGCVREHHRFLLGQHLRTIEQLEDSIAAFDARIESALLPFHDVVERLHEVPGLGATAVETVIAEIGIDMSQFPSAGHLLSWAGFVPGLDESAGKRRSTRIKKGAPWLKPVLLQSAWGAARKKNSYLQAQFLRLKARRGAKKAAIAVAASILTIVYHMLRDGTYYQDLGPEYFARRNPAKTAARLANRIRNLGYQVEIRAAA

SEQ ID NO: 145333 - protein, 346 aa, unidentified
MTIVEAGRTVVGGVDTHLDVHVAAALDPIGGVLGVESFLAAPQGYKAMLEWMGAFGTVSKVGVEGTGAYGAGLGRFLRRAGIEVIEVDRPNRQVRRTKGKSDPVDAVEAARAVLSGRATGAPKSRDGNVEAIRALLVAKRSAREGRLQAIHQMRQLSFTAPDQLRSRFKGLPIKDFVAEAASMRPRVSGTSVAYATKTALASLGRRVHALEDEIACLDELLAELVTETAPRMVKLFGVGIDTAGALLVTAGDNPERLRSEAAWAHLCGVSPIEASSGKVTRHRLDRGGDRNANSALWRIVMTRLSFDPRTREYMERRTKEGRSKREVIRVLKRYVAREVFKYLPRG

SEQ ID NO: 145334 - protein, 392 aa, unidentified
MYIVGIDIGKNHHEASIVSPEGKQIGRSLRFATTHKGADSLMSFIFKNIGNSPCVFGMEATGHYWYPIYSFLKAKGYTIYVINPIQSDSLRKMYIRQTKNDSIDSFLIAEVIRFGQFGTTSMADENILAMRQLCRYRDSVISSRTEIKLRIGTIMEQIFPEYEKQFSSLWVSTSMGILEKYLTPENIENAPIDELFEIIKDKSHNRLTRAKAISIKEAAADTFGIKIAQDAFSFQLKQLIDRMNFLDKQIEALDCQILEYYKNFDCYLHTIPGTGMIAAATILAEIGDINRFKSSSALVAFAGIDPTVRQSGEFSSTHNHMSKRGSPYLRHAIFLAATTRSFHNSPLNAYYKKKRDQGKHHLTATGAVARKLTTVIYAVLRDSKPYEPKKFC

SEQ ID NO: 145335 - protein, 413 aa, unidentified
MGKKTAEVELHYERCCGMDVHKKLIVACFRNGSKNTFKEFGTTSKELQRLAEWLISVDCEMSVMESTGSYWKPVYNILELLGLDVMVSNARDVKNLPGRKTDVNDAEWMARLLAQGLLKPSFIPDRPQRELREVTRYRKSLTEERAREINRLGKMLEGANIKLTSIVRDVLGKSSRKLLDAALLGTPLTEMTIEGIINRQMRGKSALLVDAMDGILSKTQRMLIRAVLDHIDDMARRIADLDDIIHDEMEKYDEAIIRLDGIPGVGVSSAQAILAEIGLDMNQFPTAGHLAVWAGVCPGNNVSAGKSRSGTTRKGNQTLKTTLVQCAQSASNTKDTFFRAQYDRLVVRRGKNRAKVAVAHSIIIAIWHMLKNGTDYIELGGNYYNYFNPEKKINMYLKKLNELGWMPTVPAVV

SEQ ID NO: 145336 - protein, 323 aa, unidentified
MNKFPAISNDQTFIGIDVAKDSLAVFVDSTNHHLSCLNQTKDLTKLAKQFKKLHPTLIVLEASGGYETAAAVVFAEFELPFAIVYPRRVRQFALGVGIIAKTDAIDAAALAYYGRVANIAPKPLPSDRLRHLQALTLRRQQLIEMRLAEQNRLETAHPKMHRNIKKHLDWLVKQIEDLETEIDNQIKADETLQETAQLLQSVPGVGQVLSSTLLTELPELGILSNKKIASLVGVAPFPRESGKCNGKRFCQGGRNSVRRILYMATISATRFNPAIKQFYDNLLEKGKLKKVALIACSRKLLTILNAMVRNNSHWQPKSLPLSA

SEQ ID NO: 145337 - protein, 320 aa, unidentified
MAELSHCGIDVSKDRLDVVVLPNEQCFSVVNAAAGWAELIEKLRGLNIAAIGIEASGGYERGIVRALLAARYSVRLINPFKLRQFAKACGVLAKNDRLDARMIARFVATMPIRPMQRNVAVERLAELLTARRQLSEEKVAAENGSKLLEDSMLQRLYRRRITRMEADIMLLDKRLADMVAADAALAQRYELLISMPGVGPVLACTLVALLPELGQMSRKQVAALVGVAPYDFESGKLKGMRCIWGGRAPIRRVLYMAALIASRCNPALKVFHDRLQATGKKSKVVIVAVMRKILTTLNAMARDNVLWNDRRNGRCAVSAA

SEQ ID NO: 145338 - protein, 421 aa, unidentified
MKKIKPKTTKAVNQKVLIATIDGGKDTHYGYYRCPDGTEGKSLPFRNNGRGFCEFWERISTTADARGLEEIIVGFESTGPYMEPLAQFLRNKKAVRLVQVNPMHTKRLKELSGNSPLKTDRKDPKVIADIIELGHALTVVIPEGPAAELRRLTQGRERTITSRTRLFNQLQCLQASFFPEFLQVMKNVTTASAQHLIKHYPTPQDIVNLGEPALAAQLRKVSRGKLREDRARALFEASSASVGIRDGRSSMLQEVRMIVDTIALYDRFVDGLEADMVRYLEQVPYSHVILSLKGIGPVTAAGLIGEVGDFTKFGTISEVLKLAGLDLYEVSSGKHRGKLRISKRGRPHMRKLLYLAALSTVRKGGVMHEWYKRALGRGMIKTKALVAVSRKLLMIIFALVRNHSVYVENYSKTQQQLKEAA

SEQ ID NO: 145339 - protein, 353 aa, unidentified
MNHLGIDVGKRKCRAALKDDKGKILDEFFFGNDAIGIGNLLLKIPSKEIGATQAVLESTGNMWMRIHDTLEDNGIDTILANPYKTRIIAEARIKSDKLDALILSDLLRTDLICESYVPKKEDRDKRSLVRHRITLSRTKTRLVNKVHSILDKYDYKTDVTDIFGVSGIEWLKSLLPKVNSVDRIILVTSLESIQAINHQIDAVSKEISKYASRDSTNVKLLLSITGIDIFAAMLISSEIVDVKRFSTPWKLVSYAGLAPSIRESAGKMITGRITKQGSPWLRWVLLQCALVAVRHDKRLGSFYTRIKNKKGHGKAIVATAKELLVIIWYMLTRNQLYRNMNKQRYEKKLRKLG

SEQ ID NO: 145340 - protein, 359 aa, unidentified
MKIVGCDYHPEWQQIAVLETETGEISEHRLRNGDGEAERFYRALPAPALVGIEACGNSEWFRELLQRLGHEVWVGDAAEIRASCVRKQKTDRRDAGHILRLLVEERFPRLWMPTAEQRDLRQLLIHRHKLVEIRTRVKNGLQHLAMNRGVQKKSSLWSVRGRAELKNLALEGWTRQRREDLLELLEGLDRQVGQLDEAVEQAAVGHAQARLLMTQPGVGAVTALAFVVTIGDVSRFAHSGQVASYVGLIPSEHSSGGRQRLGAITKQGNRFMRQLLVEAVQTTCRLDEGFRREYQARCFHKPKAVAKVAAARKLAVRLYWMLRQNVGYPEIAHIESSSRVPLAGGQQAAMLIERSRTRR

SEQ ID NO: 145341 - protein, 413 aa, unidentified
MRMVLFVGDDWAEDHHDVEVQDATGRRVGKVRLPEGVAGIARLHGLIGEFTDPDDEAGAGQVLVGIETDRGPWVAALVAAGYRVFAVNPKQVARYRERGCTSGAKSDAGDAHVLADMVRTDAHQLRPVAGDTALVEGIKVVARAHQSLIWDRTRHVLRLRSALREFFPAALEAFPDLAAADALELLAAAPDPETAAGLSRNRIAGALKRARRRDVAGKAEHIATVLRSPALRQPAVLAGAYAVTVGSTVAVITVLNTEIAALQGQVEAHFGRHPDGEIYRSQPGLGQVLSARVLGEFGDDPHRYHDARARKNYAGTSPITRASGKKKVVLARYACNDRLADALHQQAFCALSASAGARVYYDELRARGTGHHAALRQLGNRLVGILHGCLKIRTCYDEDTAWAHHMKDQQQAA

SEQ ID NO: 145342 - protein, 344 aa, unidentified
MGEVSTIGLDIAKSVFQVHGVDVDSAVVIRKRVSRAKVLEFFSILPSCLVGIEACPSAHHWGRQLQRLGHTVRLMPPSYVKAYLKRSKNDANDAAAICEAVTRPSMRFVSTKSELQQSVLILHRSRQLLVRQRTMLSNAIRGHMAEFGVVSAKGRNGTAELIEMIADAEDGRIPVAARLGLDVLARQYGILTTEIVAIDKRIHAWHRSCAESRRLEEIPGIGPIVATALIAEVGDWKAFSSGRNLAAWIGLVPRQHSTGGKQRLGSISKQGNRYLRWLLIAGAMAVIRYAREHGTKRLWLARIMERRPIKVAAVALANKIARMAWAMMVRGEPFKEPRLLPAAA

SEQ ID NO: 145343 - protein, 340 aa, unidentified
MNIKRIGLDLAKNVFQIHGVDHHEKVVLRKTLRRAHMMTFFSGLSPCLIGIEACGSSHYWARELTRMGHTVRIIPPKLVKPYLKGNKNDANDAAAICEAISRPGMRFVALKSEAQQTLQAEHRVRARIIRERTALCNEIRGLLSEFGLVLPVGINHVRKALPEILSQQEQWNDRFIRLLCELSEELQMLDERISRHDRRLQQAARDDIRIKRLMEIEGFGPIVASALVAAVGDAKQFKNGREMSAFIGLVPRQHSSGGKERLGHISKRGDSYLRTLIIHGARAVLRFSAGKTDRRSLWLQSVAERRNNNIAVVALANKNIRIAWAILSRSEEYRGVENAA

SEQ ID NO: 145344 - protein, 412 aa, unidentified
MRRVIGMDIHRTFGEVVFWEEGKLRHGGRVDMTRTALEGFGKSLLATDEVVIEATGNCMAVSRVLSPFVKRVVIANPLQVKAIAHAHVKTDKVDAGTLASLYAAGYLPEIWTPDAATERMRRLVARRYQVVRHRTRIKNEVHAILHAHLIPKCPHADLFNGRGRAWLMRQPVPDDERVAIERHVRELDRLAEDLTILDREIAESTLDDTAIKRLLTITGVNLTVAVGLMAAIGDIARFKSPQKLVSYFGLNPRVRQSGLGAAHHGRISKVGRSHARAMLVEAAWAAAKAPGPLHAFFVRVRARRGHQVAAVAVARKLAVLVWHMLTKEKDYLWARPSLVAHKMRGMELQAGKPQKKGNSRGPTYAYHVKELRHQEMNIARKAEESYEHFVGTWRPRPPKERARGRLNPARLE

SEQ ID NO: 145345 - protein, 321 aa, unidentified
MGEELKFADVYVGVDVSKARLDVAVWPSQQVFSDTNDAEGIGRLAMRISGLNPKIVVLESTGRLEVPMALELGERGVPYRIVNPRQIRDFARAMGKLAKTDRIDALILARWAESAKPEAKPLPDPDRRELRALVTRRAQLIENLTREKNRLQGETVPHVRRSIKDSIAWHERQIARLDKELDQFMKNSANFSGQSDRLQSVPGVGPVLTRMIIACLPELGTLNRYKIAALVGVAPLNKDSGKSSGKRFCWGGRVEVRCALYMAALVGTRYNPIIQALYERLRAKGKPAKVALVACMRKLLTILNAMMRDQTCWRQTSPAEA

SEQ ID NO: 145346 - protein, 430 aa, unidentified
MIDTGDIDVFLGLDVGKGEHHATAVTPAGKKAFDKRLPNTEPKLRELFAKLQAKHGTVLVVVDQPASIGALPLAVARDMGCPVAYLPGLTMRRIADLYPGEAKTDARDAFVIADAARAMPHTLRAIDGEDETIAELEMIVGFDDDLAGEATRVANRLHGLLTQIHPSLERVLGPRLQHPAVLALLERFGSPAQMRKAGRRRLVTLLRPKAPRMAERLVEEIFAALDEQTVTVPGTEAAALIVPSLAGSLAAVLDQRKLVAGRIEELLEDHPLSKVLTSMPGVGVRTGARILIEVGDGSTFPTAGHLAAYAGLAPATRSSGSSIRGEQPSRRGNKQLERAFFLSAFAALGDPASRAYYDKKIGQGKHHTQALLCLARRRADVLFAMLRDGTFYEARRPRRREMPARPRQPLRAGRQKPRRPLSKRWPEHHK

SEQ ID NO: 145347 - protein, 432 aa, unidentified
MDSTKKAKQNEETIAAYVGLDWADSEHEVTMLVVETGEVETRKLKQESEALAEWVQSLQERFSGRKVAIAVEQTKGALIYALMCYDFLNLYPVNPKTLARFREAFNTSGAKSDPCDSDLLLDLIRLHRDKLRAWVPEDADTRLLQMLVEERRSLVDDVTGLTNRLGSTLKQYFPQALEWAGELNSRQALDFLTRWPTLQSIRKAGAAAVEKFYRQHGLRNKDKVEQRVKAIKESRALTTDRAVVEGSKMKALATVRQLHALAKSIAEMDARIQELFEQHRDHEVFSSFPCAKKVLGPRLLAAFGGDRSRYKSALELQSFSGIAPVTRSSGKSKTIHKRMACPKFLRQSFHEYAAQSIKKAGWARVYYQMHRDKGVKHHAAIRALAYKWIRIMFRCWQEQEPYDEAKYIASLKRRSSPLVPGLPPAPSSPVEV

SEQ ID NO: 145348 - protein, 358 aa, unidentified
MVDKVTKAAVVGGVDTHKDLHVAAVVDQNNKVLGTQYFSTTRQGYRQMLAWMTSFGTLKRIGVECTGTYGSGLLRYFQNAGLEVLEVTAPDRMERRKRGKSDTIDAECAAHAAFSGIRTVTPKTRDGMIESLRVLKTCRKTAISVRRVALQIIHSNIISAPDELREQLRNMTRMQLIRTLGSWRPDASEYRNVTNVYRISLKSLARRYLELHDEIADLDVMIAAIVDELAPELIKRNAIGYESASQLLITAGDNPQRLRSESGFAALCGVSPVPVSSGKTNRYRLNRGGDRAANSALHIIAIGRLRTDAKTKEYVARRVAEGHTKMEAIRCLKRYISREVYTLLRNQNRRINSIPITA

SEQ ID NO: 145349 - protein, 407 aa, unidentified
MEVVYRCCCGIDVHKKVIIACLVNGGEQELREFGTTTSEIKTLANWLTESGCEMIAMESTGVFWKPLYNLFELMDLDAMIVNAAHMKALPGRKTDVKDAEWIADLLRHGLLKASYIPNREQRELREITRYRKSLTEERCREVNRLQKILEGANIKLDSVVKDITGKSARKLLQRIIDDDIPDSDEVSKLVHGRMRPKLDQIVASIEGITTPLQRKLLAQIIDHIDDLNRRIGELDKLVQEYMAEYEAAIEAIDEIPGIARRSAEVILAEIGLDMGRFPSAAHLCSWAGVCPGNYQSAGRRKHGKTTKGNKALKTILTQCAKSAKTVKSSYFFAQYQRISARRGKNRATLAVAHSMLIAIYHILKNKTAFHDLGSDYYDSFNRDRKINSYLKRLKALGWEPDAIPSSA

SEQ ID NO: 145350 - protein, 408 aa, unidentified
MVVQVAPVTSSTVVVAIDVGKTEFAFSVTDATRTPLLKPRTGCPMTGPSLARMVADIDRVLPGSAVVKVGIEAAGHYHRPLLNAAWPTSWEVLELNPGHVTEQRRVLGKRTIKTDVIDLQAMTELLLTGRGQPVRDRGLELGALTAWSAHRTSRVALRTATKNQLLGNLDRTFPGLTLALPDVLGTKVGRLIAAEFADPARLATLGSTRFIRFGATRGLLIRQPMADKLVQAARDALPTADAAVARAVLAADLALLVDLDDQVDQASDQLAQLLPSTPFALLLSVPGWAAIRAGNYGGALGDPARFDNHRQVYRSAGLNPIQYESAGKRRDSVISREGSVELRRALIDLGVGLWLNDPAAKNYAAQLRARGKKGLVIACAMAHRANKIAFALVRDQSTYDPTRWTRKD

SEQ ID NO: 145351 - protein, 344 aa, unidentified
MNSTTIAVDVAKSVFEVAVSEQPGEVRERQRLSRERFRRFLAERPPATVLMEACGSAHHWARQAQALGHRAVLVPPHVVRPYVLRNKTDRTDTKGLLEAFRNEDVRPVPVKSETQQALAALHRLRSMWLAARTVRINTVRGLLREFGLIMPIGAHHVVPHVATLLEDADSAVPGLLRPALADATTDIREIEARLRAIEHQLESVASENVVVRQLRTIPGIGLLTATALVATVGDVARFPSGRHFASYLGLTPREASTALRRRLGAISKRGDTYVRMLLIHGARSVLCHAKTKTAPPPDRLRAWALQVERLRGHNKAAVALANKLARIVWAVWRHGKDYVGTPAV

SEQ ID NO: 145352 - protein, 428 aa, unidentified
MEVIYPKACGVDVHKSFIVAVICDSTSITPKYSRKRFSTYSNSLIEFKNWLIENDCQNVCMESTGKYYVPVYNALEGFISNVVVANPKWVKAIKGEKDDNKDAKWIADLFKMGLVRSSYIPSKDFRVLREFTRYRYKLTNTKSSEKNRFTNALTVGNCKLDMVFSDIFGKSSQSIIDTILNNDNFSDEDIISCLRKNCKSSTEDILSSVNGIQLTNEQKLRINIVKDHIDYLNNQIIKLNDIIDILVEPYKSYIDLLYTIPGIDRNSAIGILSEISNDMSQFKSHYRLTSWAGLAPGCNESAGKKKSVKISRAGVYLKPYLVEVAHCAVKDKSNSYYAKKFEKISKRRGKKRAYIAIARKILVAIYHMFETGEAWNPTDLASVETPIEDRIKYTKNNFNQSFKQLLSLGLTSEELIELINQNANKLLV

SEQ ID NO: 145353 - protein, 354 aa, unidentified
MQNDRQSSETVILGVDTHLDIHVGAVISQAGKLLGTHIIQTNQAGYLELLDWARSFGSLERAGIEGTGTYGAALTRYLIKNSIYVVEVNRPDRSKRRLEGKSDPLDAENAARTVLSGSSKAIPKMQSGACEALRIISVARRSAVKACTQAINQLRALLVSAPQDVRDKLWKSKPHECVTACINSEMSEHSPLRIALCSTLRSLAKRWMALTEELNELDESLDKLTRKYASNLRSQFGVGPQTAATLLAVAGDNPERLKNEAALASLCGVNPLPASSGKTVRHRLNRGGSREANNALWTIALVRMRSDPRTRIYVDRRTGEGLSTKEILRCLKRYIVRELYPLILSGLAYANRRS

SEQ ID NO: 145354 - protein, 392 aa, unidentified
MRFAGIDIASETHVVALVDEGSSVVVKPTSFDEDAGGYEKLFGLLGGPGDLLVAMEATGHYWQNLFAALAAAGFTVALLNPLRTHRFAGEDLQRTKTDAIDALGIARFAAQKRPMATRLPDGATQELRELVRLRDRLMQDFGDRVRQLHRLVDLGFPEFTRHVRSLDSQLATAILHEHPTAEAFLGLPWKRLAKLCYDGRHKVGEEIAKGLVEAAKVSVGRHHGPAYRVQVRYACEDLDLLRRRLRQGDSDIERTLGDHEVGTLLTTIDGIGPTTAARLIAEFGDICAFPNPAAMAAYVGCIPGLRQSGKRAPTRAGLTPHGNARLRAKLWMPTLTAVRKNAWLRAYYEGLRARGKLPKVALVAAMRKLLIAVHFVAKHRKPFIPICAEAGT

SEQ ID NO: 145355 - protein, 430 aa, unidentified
MGFIVPSAIEAEREEQPLPYAWFVGIDWGSRQHQVSVLDRDRRRVGERVVDHDGASLARLADWLWTLSAGQPQRGAVAIEVPRGAIVEGLLDRGFHLFALNPKQLDRFRDRHSAAGAKDDRRDAFVLADSVRTDQPSFRRVQLGEPQLLLLRELSRAEETLLEDFRRHANRLRDQLHRFYPQMLQLCAAADEPWLWALIDLAPPPAHTALLIEEQVQRVLKAHRIRRVTAQEVLTCLQALALPVAPGAAEAAQAHCQFLLPCLRVLAEQLQACSQQVSALLSTLAEAPGKGEGPSDVAIVLSLPGVGRKITAWLFAEAAQPLAERDYQRLRTHGGVAPVTKQSGKRRVVVMRRGCNPRLRHALYHMARVARHRDAHCNRVYTALRAKGQRHGQAVRNVGDRLLRILMAMLRHRTCYDASRIRREPVVQMG

SEQ ID NO: 145356 - protein, 565 aa, unidentified
MNTIGIGIDTARYGHRVTFLDENRQPAAPPLTIQETQQGYDRLADAVGQLQRKFPQATLRVRIDAAGHYAANLESFLRRLPLRLQISLGQPKQNKDYQQVHFPKRKSDDTDSQAVARFAVVEAPPASAASSPEILTLREVASWLQSQATDCTRAVNQLHNLLARVFPELATLTKNIAGAGILRLLSKYPTPEHIARARLESLQRIPHVKPELAERVQQAARISVASLRGEVAAQLVQHHVQQLQLRQQAKRKLEKLLQATFAKIPSSACRQVATITGIGPATAAALVAKIVDIDRFATPDKLVGYFGCFPEERSSGVDQAGRPLPSKSLRMSAKGNDLVRHYLWMAAKCASLHNPAIRALYRRQRAAGKRGDVALGHCLRKLLHLVYAVWKTDRPFDPRHYRWEADPSAESPTPPAVAESPKAERAAEPEVTSATVNTVTAEMSADKSLCASQPCPPSRSVDYPYLRQQLSITAVLGLLNYPQRLLGTGAQQRGPCPLHEDHRRRATFSVNLERGLFQCFARQCAAHGNALDLWAKATGLSTHQAALDLANRLNLKLQRNREENP

SEQ ID NO: 145357 - protein, 391 aa, unidentified
MIFVGIDVAKDKHDCFILNSEGTVLADVFTIANNRIGFETLLSRIQSCSQGESKIKVGLEATGHYSYNLLGFLLDSGLATYVINPLHTNLYRKSLSLRRTKTDRIDARTIAMMLMSDVDLKSYSNIAYHNEELKSLTRYRFDKVKERAKLKSSVARLVNILFPELEKLVSSLHIAVVYALLSNYPGASYIANANTEELAETLCTASKGRYTKSKTAEIQVAAGVSIGSKMPAKSMELKHTIALIRELDKEISEVESAIDKITSQMDSPIFTIPGIGRHMGAMILAEVGDFSNFASADKLLAYAGLSPSTYQSGQLQNCYAHMEKRGSRYLRYALFNAAKYVCLWCPTFSAYLEKNRSEGKHYNVAISHAAKKLVRLIFAMQRSGKAFLADY

SEQ ID NO: 145358 - protein, 365 aa, unidentified
MASVSHLAPTHLGLDVHKDTISVAILAPDRDGPDVDRIPHDEASVRRLVGRFPEPRLLRACYEAGPTGYELARLLHSMGVRCEVIAPSLIPKAPGDKVKTDRRDCRRLARLHRAGELVAIRIPTVQEEAVRDLCRARADMVEDRTRARHRLGKFLLRHGRAWRGGNAWTLTHERWLLAQRFEEPALAATYAHYRAVLAARDAALEAIEADLAVWYDRAPFADAVHRLAAYRGITRLGALTLASEVGDWRRFPRAAAFAGFCGLVPSEYSSGTSTWRGHITKCGNEHLRTQLVESAWAYQHRPAVGLELHQRQQGLDPQVVARAWAAQLRLCGRFGRLAARKDSKNVVVTAIARELAGFLWAEMAA

SEQ ID NO: 145359 - protein, 351 aa, unidentified
MKNYQMGIDISKEKLNICLKKGTQTIREEEIKNTVMAIKKCVKRIEKENCVANDDVLVCAEYTGRYIYPLVCACEEMELFLWMEDPTRIKNSFGVTRGKDDRVDARRIAEYAFRFSDKAVAYEMPDRPLVSLKNLLSDRDTLLADRHKYEMQLHDQKGYMDAADYARKKRSWTAVVKTLDKQIALIDDEIQVLVESDEKLKHQTELLKTVDGVGDRIAVRMVVVTMAFTRFETPRQFNCYAGLAPFRYTSGKSIYSKSKVSQRANKQIKALLHLAAVSAATHMKSSEYRDYYERKTEEGKHPMCVLNVIRAKLVSRMFAVIKRDEAYQRNYKIFTPTEKTLKKSLSIHKNR

SEQ ID NO: 145360 - protein, 412 aa, unidentified
MTSKERHVDLNQQCRNEVGVFMTFFIGIDIAKYKHDCFILNHEGEVIRESFSFTNDRSGFAYLKEILSALDSNQTMRIGFEATGHYAMNLKVFLEENGFTYMQFNPFLIKRFAQATTLRKTKTDKVDARVIATYLLSVDYKPYPSQSYHIKNLKSLTRDRDDLIKQRSRQLVKLTNLLDLIFPEFKPFFGHSLTSSTCLYLLDHYLIPSKMAHMNLDSYHKMTFELRRTLSYARFCTLRQLARDTIGSENQTLTYLLKKALELYHTMDDQITEIQMLIEQTYSQIDSHIHTINGIGIQSAACILAEYESIERFSTPDQMLAFAGLEPSRKQSGESESKGKMVKHGSSLLRQTIMNVAATSIIHNPILYEFYRKKRNEGKLHRVALSHVAKRIVRIIFHLEKHHLDFNLAKMR

SEQ ID NO: 145361 - protein, 358 aa, unidentified
MLIIGCDFHSRFQQIAMADTETGELIERRLEHRNGEAAKFYTSLQKPVRVGMEATGYAQWFERILAKLGHELWIGDAAAVRAAMVRKQKTDARDARHILDLLLENRFPRIWIPTPVERDLRQLLRHRHKMVCLRTSLKNQLQALALGQGTYRKQKLWTSLGRTELEALVLDPWAHRRRQELLQMLDQLAPLIAELDRAVAEEAAQRRDARRLMEQPGVGPVTALMFVLTIGPAERFRSSKQVVSYLGLNPRESSSGGRQQLGAISKQGNSLARYLLTEAAQTAARYDEELRRNYRRLKFRRGSAVAKVAIARKLAVRLYWMLRNQSAPPARMQGTSRKPAGRRTPIVSVIGGPASSSQ

SEQ ID NO: 145362 - protein, 355 aa, unidentified
MLLVNPIFCASSDRSANLLAMFALFYIGIDISKKTLDVAVFKEGRVLESFVIENRESAIKDLLVVLKERYHSISENTIFCAEHMGIYADFLRAVMVKKQARLCLESPLRIRLSLGIQRGKSDALDAVRIAQYAWRFSDRLELWTPPRPPIQQLRTLMSIRKRLIKMGAMLKSPKKLEAYYLSEPDKKALARYIDASYNAIRADIKQIDTEVELLFKTDERLNRLLTVMTSVPSIGIIIATEIIICTNEFRDIDCPKKFASYCGIAPFSKNSGTSVRTKPRISPIANKDIKTMLHLASMGVTRKDRCKFQVYYQRKVAEGKNKMSVLNALRNKLVTVVFACVRDNASYHEPEPAPG

SEQ ID NO: 145363 - protein, 386 aa, unidentified
MDQAAVFGTEVKPTLYVAIELSRASWVVALLAPGARRPSRHQLEAGDVEGVLAVIARHRADATRVSSCYEAGYEGFWLHRRLQAAGIESRIVDPSSLRVDRRARRRKTDAIDAETILRALTAWDRGEREQCSMVHVPDVALEDARRDSRERERLVKEQTGHLNRIRGLLTAMGIYGFNPRHADRLEQLAGLVTGDGRPLPERLGLEIRREIERLGVVERQIAELERARRKPAPRGRPRKDASPRPAPDLATPDGRIRHLQRLRGIGPDIASVLQNELFYRSFANRREIAAYCGLDPTPFASGNRRHEQGISKAGNRRARHAAIELAWLWLHWQPDSALARWFHDRVGVATGRLKRVMIVALARKLVIALWRFLHTGTVPEGSILKA

SEQ ID NO: 145364 - protein, 370 aa, unidentified
MQFIGIDLHTNKFTCSYRDENTPPDAKKGNRTETFDLNDFGINKFIETLEAESYVLVEATITTFAFVRLIRLFVKNVFVANTYELKQISQARNNTDKIDANILSRTIKMQVISGEQLISSVFVPPEDIQELRALFSTYRLQKKQTTQIKNRIHSLLKEQLYGFTQEEIFDIRSREKIRNLQCGAALFFQLNQLFDLLEFIEAQVELLKEQILMQAAPYMREIEIMTSMKGISVFIAAAIIADIITVDRFKNSKHFTSYLRSAPKVSNSNTSERTKGINKKGRKLSSTLISQSLNHVLEASRRLSRWYENQTENKKAGIVRTGLRRKVFTEIYKMLVKGEYHYAREEQKHKAKMSQYRNFLKKRKVLLEIA

SEQ ID NO: 145365 - protein, 338 aa, unidentified
MTIETLGVDIAKNVFQLHGVNRNGRVLLKRRVMRDQVLAAIAQIEPCTVVVEACTSAFYWQRQFEALGHRVKIISPQYVKPFVRRQKNDGNDAEAICTAARQPHIPLVPKKTVEQQDIQALHRARQRMVNHRTAVVSQIRGLLLDRGFAFAKSITRARRIIPEILSDLENELTPLAREAIAELYDLFRDLDRRIASFDRKINRVFRESEACQRLARIKGVGPKTATAVVAAVGDGSEFKNGRHLAAWIELVPRQFSSGDKTVLMGISKSGNQHLRSLLVHGARTVVCAAPGKTDLGNQWVNQLRERRGFNRATVAVANKNARIIWAVLQKGEPYRAAL

SEQ ID NO: 145366 - protein, 358 aa, unidentified
MKIYRVQDFVVKGKEVFVGLEDSKTTWKIAVRCERMLIHEVSMEAKYPALMGYLRNKFPECATHLIYEAGFKGFNLYDRLTEDGIDCVVIPPHMVTEPKVKKVKTDKRDAKRLAYILENHDFKDPCHVPDKERREDRQVSRTLMAVQKDIIRNRNRIRKLLDFHGIDVPFAGKNEWGRKEFEALRGIPLSEPVKVGLNVLLTILEHLWDQQTTLRDYLRGLCKKKRYSKAFEIARSLPGIGWFTAIRLILELGEDLSHFTNGKKIAGFVGLTSSEYSSGDTERKGRITGMGSGFIRSALIENSWAAIRKDQALLSKFSRVWRSSGSKKKAIVAVARVLIVRLRACILAGTPYRIGVVR

SEQ ID NO: 145367 - protein, 402 aa, unidentified
MNALYTPNKLQVGIDIGSMNHSVAISDNKGRIVREFEIPHSQKGFDHFFAILDKESLRRDATIEIAMEGYNGWARPLDGLILKHGYRLYNVNNVKLARFKEIFPGAAKTDAIDARKIVELFSLQKHLPIAKKVLQEIQTSDESNTQLKKLTRRRKQLVEERMVITSRMGADIQAEAPDLKALPSSVDDLWFLRFMTLRKDIRLLAKVHQSTLEKIPRIRKKQIEKITVWQAGAKFTDAIAYIAEMFYDDALRILELKQKIKDIEKQIDTLIPSSKIASVLTTIPGFAVVSAGTLAGEISTLNRFENEGSLALYLGMTNLDNSSGKQKGSKRNMATNRHAKKAMINATMQHSRNAKESNIYLKKKLSQGKRYQQAIRSLGRHLVRVIWSMIEQERKYEIREKE

SEQ ID NO: 145368 - protein, 356 aa, unidentified
MNALHYIGFDVHKKNISFCVKTAAGEIVEEGSTPAQRGALREWAAARPLPWRGAMEATLFSGWIYDTLKPYGEQLEMAHPAKMKAISAGKKKSDTIDARTIADLVRCNLLPACYVASPRIRELRRLLRYRSLVVSEAVRMKNKMAGLLMETGALYVKEKLHGKKYFASLLEELEEVPESVVDLLRLSRGALEMFENTQRRLVRELLADPELAQRVERLMTIPAVGEITALTWALEIGDPHRFGSGSAAMSYCGLTAALKSSAGKQQRGPISKQRNRWLQSTLIEAAKLAPRWNPQLAALHARELERGHRNRATLAVARKLVTYLLAVDKSGQSFQLRAAWPEDRAEKEGAQKIKTA

SEQ ID NO: 145369 - protein, 345 aa, unidentified
MQTTQVAVDLAKSVFQVAVSHAPGRVDKQHRLSRQRFRTFFLHHPPTHVLMEACGSAHHWGRELQALGHQVSLLPPSHVARYRQGNKTDRADAKALLEAARNEDITPVPVKTLDQQAINALHRLRSGYIGTRTARINAVRGLLREFGIPVPLGARTFLAKAHLALDDDTLPAYLRAALTQALTEIKELQAKADDLKSQLEHLAPLIPGVPFLMTVPGIGILSATALVASVGDVHRFPSGRSFAAYLGLTPRESSSGGSRRLGPISKRGNRYLRVLLIHGARAALLAAHRTQEPDTLQAWALHTAEARGHNIATVALANRMARIAWRVWRDQRPFQRRFTAQEDAA

SEQ ID NO: 145370 - protein, 428 aa, unidentified
MEVVAVTRRCIGLDVHRDFAQVAIWQDGLVRHAGQIATTPESLRLFADSLASSDEVALEATGNTHAIVRLLESHVARVVVSNPQKTRAIAEAKVKTDKVDAEILAQLLAADYLPGVWVADEDTQARRRQVARRAHLVRQRTRLKNQVQAILHRNLVPRCPAADLFGKKGRAWLACQELPADERQAVGALLRQLDFHAEELALIDAALAKIALGCEDTKRLMTIPGVDVAVAMSITAAVGDFSRFSEPNKLVRYLGLNPRVKQSGGQPASHGRITKQGRSHARGMLVEAAWVAVKTPGPLRAFYERIRARRGMQIAVVATARKLAVLCWHMINRGEDYTFARPSLTAKKLRALELKAGRPARRGQKGSAAAYSLKEVRAREKRMAEQAERAYAQMVADWQAKAPKKGVAATNGARLSRPSTGQAARQGS

SEQ ID NO: 145371 - protein, 403 aa, unidentified
MNNVAGIDVSKGKSMVSVLRPFGEVVAKPFSVGHTGSELKELADYLKSLDGETRVVMEHTGRYYEPVARFLHDEGVFVSAVNPKLIKDYGNNTLRKVKTDKADSRKIARYGIDNWAELRQHTPMDTIRMQLKTLNRQQSLYAKTKTMMKNNLIALLDQTYPGVNALFDSPVREDGSQKWVDFATTFWHVDCVRNMSLTAFAERYRKWCKRHGYNFSQSKAVEVHTGAQDLIAMLPKDALTKTMVRQAIDALNAVSASLERLKAEMQALAAQLPEYPVVMAMHGVGDSLGPQLMAELGDVTRFTHRNAITAFAGVDPGADQSGTHEAKSTRVSKSGPPELRRALFLVMDCLLKTQPQDDPVYRFMDKKRAEGKPYLVYMTAGANKFLRIYYGRVKEYLASLEEN

SEQ ID NO: 145372 - protein, 349 aa, unidentified
MIYVGIDIAKLNHFASTISSDGEIMLQPFKFTNDYDGFHLLLHKLDSFDPDSLIIGLESTAHYGNNLLEFLVKHNYKVCVINPIQTSAMRKNNIRKTKTDKVDTYIIAKTLMMDPHRFFSQHDLSIMHLKELRRFRMKLIKKRTQGRIQLMSYVDQAFPELQYFFKSGIHQKSVYAVLKEAPTTKDIASMHLTHLSHLLEVSSHGHFKKDTATELRFLAQKSVGCNDSSISTQITQTELIELLDSQVHDVESEMELIVNSLDSVIMTIPGIGFINGGMILGEIGDITRFSSPSKVLAFAGLDPTVYQSGNFNASHTKMSKRGSRPLRYALINAAHNVVKNNKTFRDYYD

SEQ ID NO: 145373 - protein, 445 aa, unidentified
MSESLITAASEPEWAAFAAIDWADQKNFWRLLPAGSQRQEHGELDNTPEAVEVWAAELQQRFSGRRIAVILEQSRGALVYMLAKYPHLVLFPVHPTTAARYRETFCPSGAKADPSDTASLLDLLLRHRERLHQLRPDTVETRLLQFLVEERRRTVDERTRQSNRLVDCLKLYFPQAVQWFDDLTSPLVGDLLERWPGLEQLQRAHPGTLHKFFHAHNCRGEKRMEERIQAVYQAIPATQDAAVLEAGAMRARGLVRLLATLRDQIAAFDQRIAELVLAHPDGGLFASLPGAGPALIPRLIVAFGTQRDRYQAAYQVQCYSGIAPVKEASGKTERVHFRLACPKFLRQTFHEFATHSIRRSEWARAYYEHLRGDEKKSHHAAVRALAYKWIRIIFRCWKDGKPYDERVYLDSLRRRGSLLGAGLKAATRPEWKTVSGFQKLSENNA

SEQ ID NO: 145374 - protein, 401 aa, unidentified
MPTIWAGIDAGKRTHHCVVLDQTGSTLLSTPVDNDETALLALIDSVVGVAAGGQVCWAIDLNAGGAAMLIALLAAHDQQLLYLPGRIVHHAAATYRGDGKTDAKDARIIADQARMRTDLQPVRRADPIATDLRLLTARRTDVVCDRVRAINRLRATLLEYFPALERAFDYSKSKAALTLLSGYQTPDSLRRIGAARLTAWLKARGCRNSATVAQTAVDAAHAQRSTLPTQTIGALLVARLAAEISAIDVELKCIEADITDRFEQHRSAEILTSVPGFGPVLAATFLAQIGGSLEGFDSVDRLACVAGLAPVPRDSGRISGNLHRPRRFNRRLLRTCYLAALSSLKNSPASRAFYDRKRAEGKSHKQALIALARRRINVIWAMLRDHTHYQEPQPANTALAA

SEQ ID NO: 145375 - protein, 377 aa, unidentified
MGDYSEAFVGFDTSKLRNAVAIADASRGGEVRFLGEIENTPAATAKLVRKLAAKYERLTFCYEAGPTGYGLHRQIKDLGFECVVVAPSLIPKRPGDKVKTNRRDALSLAKLLRADELTPVWVPDGPHEAMRDLTRARETAMLDLRTKRQHVSAFLLRLGRPYPESRKTWTKAHVSWIASQKLEHPQQRLVLEEMMLAIRQAQERLQRLEQAIAAAVPEWSLAPVVTALMAMRGMDLVSATTLLAEIGDLSRFQTPTELMAYLGLVPSENSTGDTVKRGPITKAGNRRARRMLVECSWSYQHPPRVGQAKQPKVDAAPPAVREIAWKAQCRLYRRYRALIRKGKRKTVAIVAIARELAGFIWAVARAVTTGRVAAATA

SEQ ID NO: 145376 - protein, 344 aa, unidentified
MNHYAGIDVSLELSSVCIVDATGKVVRETKVETRPEALVKFFKGFDLPLTRIGLEAGPLSHWLYAGLTDAGFETTLMETRHVKAALSAMTVKTDRRDARGMAQLLRMGWFRPVHAKSAGSQEVRALLVARKQLQHKLTDIELSIRGILRGFGLKVGKVTDKSFEVRIRKLITGHPMLEQIAEAMLVARATLLEQFNKLHKAVLKIARHDDICRRFMTTPSVGAIVAITYKSALDNPHRIKKSRNAGPLFGLTPKRYQSGETDVTGGISRVGDEMVRTALYEAANVLLSRVTRFSALKHWGLEVAKRRGSKRAKVAVARKLAVILHRMWIDGSTFRWSKTKSAHS

SEQ ID NO: 145377 - protein, 408 aa, unidentified
MNTLFVGIDVSKKSNAVRFLNSSGDTLLIFSVPNDQDGALVILDKLKIALSSNDFTELSIGMESTSIYADHLATFLRNDEFLKKFHLSVRILNARQIAKFKESYPELPKTDYIDTLIIADFLRFGRIANEVNLDEKQMALRTLTRARFQVAQNISREKTRFLETAFYKFSSLESSNVFSDTMGATSLAILTEFFSTDDIVSMSLEDLTDFIVKKGKNHFNDPEQIALDLQKAARSSYRLSKTVNNSVNQLLAIRLVGIKSLMKQIKELDEAISSYMELFPDVLSSIPGIGPVYSAGIIAEIGNIHRFKNHASLAKYAGIAWTKHESGDFKKDHTRLIMSGNKYLKYYILEAANKVRVHDTEFRRFYLTKYKEVLKHQHKRALALTARKLVRLVYALLDTNKLYIPPTR

SEQ ID NO: 145378 - protein, 323 aa, unidentified
MDSQGKKRLHKRLRCEPEALLRALEPYRSDLVVGSECIFCWYWLADLCAREGIAFVLGHALYMKAIHGAKAKNDKIDSHKTAVLLRGGAFPIAYVYPRDMRATRDLLRRRLFFVRKRGELFAHVRNTFHQYNVARPSGQLLYKKNRVGLAQAFDDPMTQSTIEADLALADRYDPVIRELERTVEKEARVHDFATLDRLQTIPGVGRILGLTLLYEIHDIARFSTVQRFSSYCRLVKPEHRSAGKRTGSGGAKIGNAHLKWAFSEAAVLFLKDNTRGQAHLKKLTRRHGKGKALSILAARIGRTVYFMLKNSEDFDTERFYART

SEQ ID NO: 145379 - protein, 357 aa, unidentified
MSCKLEAAIATVIGIDIGKNSFHVVGQDRRGAIVLRQKWSRGQIEARLANLPACLIGMEAGVGAHHLSRKLKTLGHDARLMPAKYVRPYSKGQMNDFRDAEAIAEAVQRPTMKFVATKTADQLDLQALHRVRERLVSQRTGIINQIRAFLLERGVAVRQGLRFLRGELPGILATRTDVLSPRMLRVIEDLAGDWRRLDARVEGLSSEIEALARQDRHCERLMTVPGIGPIISSAMVAAIGTGDAFSKGRDFGAWLGLVPKQISTGDRTILGSISRRGNRYLRTLFVQAAWVVLVKLGPRQWERYGLRSWLEAAKKRLHHNVLAVALANKLARIAWAVLHKERVFQCVTMDEIAPRSA

SEQ ID NO: 145380 - protein, 343 aa, unidentified
MKVTTIGIDLAKSVFQVHGVDERGHVVVRKQLRRDQVAVFFANLPACLVGMEACGSAHHWARKLQGFGHCVRLISPQFVKPYVKSNKNDAADAEAICEAVARPNMRFVPIKTMEQQAVLSVHRVRQGFVKARTAQANQIRGLLTEFGLVLPQGITNVFRRVPQLIDGAADLPASMRQLIERLLENMKALDRQVKELEAQIKAWHQGSELSRKLEKIPGIGPLAASALVASIADARSFKNGRQVAAWLGLVPKQDSSGGKPKLLGMSKRGDTYLRTLLIHGARSAIVAAQRKGKPNVWLSGLLARRHPNIAAVALANKNARIIWALLAHEREFRPDYVPRPATA

SEQ ID NO: 145381 - protein, 337 aa, unidentified
MEVTLIGIDLAKSIFQVCGVNQAGKPVFNRQVRRGMLMEFLAQYPDACMAMEACSGSNYWGRELQERGFKVMLIPPQHVKPFVKGNKNDRNDAFAITEAARRPDLKCVEPRTLAQTDMIQVHRVLDRMIRQRTALINQIRGFLNEYGVVVGHGKEKLLAAMPDLLEDAENGLTPSSRALYQEMYEQWRQANEAIDRIEKKLKRQATTDEAAQRLMEIRGVAVKISTATIAHAGNGHGYKSGRHFSANLGLVPKEHSSGGQQKLGGITKRGNQYLRRLLIQGAWSVIRNADKNDDRMSRWARQVVERRGKHKAVVAVANKMARIMWSMLYHQTKYRVN

SEQ ID NO: 145382 - protein, 381 aa, unidentified
MDTLSNTVAAIDSEQQKAKLFVALELGQATWVVALHSPIADKISIYRIEGGDTDQLMALIEKKRVQAARLGRAAQVVSCYEAGRDGFWLHRFLIRRGIDNRVLDSASILVDRRARRAKTDRLDARALLRVLMALVRGEEQVCRVVRVPSIAQEDERRLSRERERLLHERNSHIARIKGLLILHGVRDYRLIERDWKERLDAVRTTEGQALPARAKTEIERECRRLWLAKQMLAEVEREIEQMIAHDGAVAGKLIQVRGIGQTFASVLTHEVYYRSFDNRRQVGSYLGLVSIPWQSGSVRRDQGITRSGNARARRCAIELAWLWLRHQPGSALACWYRTRVGTMTGRMRRIALVALARKLIVALWRYLQNGIVPEGAVLKAA

SEQ ID NO: 145383 - protein, 362 aa, unidentified
MQYIAFDAHKHYTLASVEREDGRLVREQQIPHERGALQAFLQGCDPESPVAVETTGNWYWIVDEIEGAGCLPRLVHARKAKLMMGMINKTDKLDARGLNRLQRAGTLPAVWIPPSALRDQRDLPRTRMVLVRQRTRLKNRIHAALAKYGVSRSDVSDLFGRQGTRWLQEHLGQLPPQTAYAAQRVLEQIETLDRQVAQLEQRMSELFTPTAQLELLRSLPGVGFILGVVILLELGDVRRFPRSAQLAAYSGTTPRVHASGGRTRYGPLRPDVNRYLKWAFVEAANIICRRRGRAPDRHVCQLYARIARRRGHQTAIGAVARHLAEATYWILTKQQPYREPQSRPPQGPAAGIVHGGVSAPMP

SEQ ID NO: 145384 - protein, 339 aa, unidentified
MNEVTLIGIDLGKHSFHLHAQDAAGRMVFRKKLSRQQLLRTLANVPCCRVVMEACAGSHWLARQLAGMGHEPRLISPQFVRPFVVGNKNDFGDAQAICEAACRPSMRFVSPRNEAQQTVSAMHRLRERLVRERTATVNQIHGFLLEFGISLPRGAALMSRLPTVLDHETLPPRLVGLVVRLRAQVHYLEEQLRQVVQDLKAALREDDKSRRLLEIPGIGPITASALAVELGDARQFANARQFAASIGLVPRQYSTGGKPTLLGISKRGDRNLRRLLVQCARAVMQHTASRTDALSLWVKTLSTRRHSNVVACALANKLARIAWAVLARGTHYQARALTT

SEQ ID NO: 145385 - protein, 373 aa, unidentified
MSKVIMIGCDLHEESMVLKVAEDRQPPQTRLVKNTSSGRAGMIADLRRRAKAAAGARVVFAYEASGQGFGLYDQLTAAGIECYVLAPTKIARSPRRQREKTDEKDALDLLEVLRAHLLAGNRLPTVWIPDAQTRDDRELVRMRLDVGEKITALKTQVQSLLKRCQLRRSSGLGKGWTKAFRGWLQRELADPLTTRESPLGRGGQAALFSLLRQLQSLEEEEKRLNQEVAALAWSPRYEARMRELTGLCGVGVLTAIVFLTELGDLSRFVNRRQIAAYLGLSPSSHESGEQSDRKGHITHQGSARVRKVLCQASWCRVRRNEEEKAVYERIKAKNPQKKKIAVVAGMRRLAVRMWHRGCDVTVPDEVLSPAASG

SEQ ID NO: 145386 - protein, 437 aa, unidentified
MSKSQNSMKEVIPIMKKRIYRRMPVNDFQPDSVSQPDLGGKLVFAIDVAKVDMVAAIAAADGRVLQTISWKAPDENPRVLEILRAFRSAGLAVEPVMEPSGTYGDVLRHQLEQDGFPLFMVSGKRTFDAREIFDGVPSLHDAKSAAIIARLHADGLSTRLRDEGPDRRQLRASLAIMDLYQERYLQLVHRLESWLARHWPELPTLIELTSSSLMALLARVGGPADVAAAPDKATKLLLGISHRLLPDDKVAAIIASAKSSVGVPLVGVERDALIAIADEAYRAHRAFTTAKTRVDKLAATTPAAALAPAVGHTTAAAVFAEVGDAKSYSCTRAFVKAMGLNLKEKSSGTVHGQLKITKRGPSRVRQYLWLAVFRWIQNDPIANAWYQRKKQRDGGRSSRAAVALMRKLAKALYHVGRGAIFDSSKLFDVRRLHLSEG

SEQ ID NO: 145387 - protein, 401 aa, unidentified
MPAVWAGIDSGKRAHHCVVIDQAGEMLLSQRIDNDETVLLEIIATVTEIADGHEVVWATDLNSGGAALLISLLVDHGQQLLYIPGRIIHHAAATYRGEGKTDAKDARIIADQARMRTDLQPVRDSDQISVDLKLLTARRLDIIHDRVRAINRLRATMLEYFPALERAFDYSKSKAALTLLSTYQTPGALRRMGVTRLAAWLKARGCRNSATVAQKAIDAAREQETTLRTEIVAATLVSRLAAVITAIDADLVDLDKTITARFNEHENAEILESMPGFGPILAATFLASTGGDLRSFESPDRLASVAGVAPAPRDSGRISGNHHRPRRFNRRLLRTCYLAALSSLKNSPASRAYYDRKRREGKNHKQALLALARRRINVLWAMLRDHTLYQEPAEIPMLKTA

SEQ ID NO: 145388 - protein, 362 aa, unidentified
MTEITRAPVVRVGVDLSKRIYQVHAVDVQGRVVLAKAMPLDRFFAWCAELPNGCVVAMETCGGAHHVARRLRLLGLDARLIAGNFVTPYRMAGKSGKNDANDAAAICEAAGRPHMRFVPVKTTEQQGQLAVHRLREGFKEERTALINRIRGLLAEFGLVFAQGPDALRLVLAGVIEDASNEIPGVARLALQRAHPHWIDIDLQIAWCDERIAAHVRADARATKAATLLGIGPTTASALVASVGEFGQFANARQFGAWLGLVPSQNSTGGKARLGGITKRGDDYLRTLLIQGAKSAVMSAAKRSDRISLWLVQLRERVGWQKAVVALANKNARILWAVLTRDGQFDPDHVPQIPAARQKPQLV

SEQ ID NO: 145389 - protein, 443 aa, unidentified
MRSIGIDVGKRFAEIAIAEPGGRTRSGGRISASPESLSAFAATLGPDDQVVLEATTNTWPIVELLERHAGRVVVSNPLRTRAIADAKVKTDTIDATTLAELLAADYLPTVWQPDPATRALRRRVAGRAALVAERTRLRNRVGAVLMRNLVACPWSDPFGRSGRAWLAEVGLPADERELVDLTLRLLDGLVAEIELAEAGIARAVVDDGRIRRLLSIPGIGLQTAVGLVALIGDVGRFPRPNKLVGYLGLDPIVRQSGGRPAYTGHISHAGQGHVRGLLVEAALGAIKVPGPLHAFYARVADRRGHAVAIVAVARKLAVLAWHLLTDDVDYRWAPARLTAAKIRAVELAAGAPSRRGRVSGSGDARQRARLEREVERAVLAQAEAAYVTFVAARQEKDAVAATRGATGLSQGLGPARPRGGVQSPTSALRHGVNRVRAEDTPTA

SEQ ID NO: 145390 - protein, 339 aa, unidentified
MRKVAGLDAHSTYVVVTIVSNDGGRVAGPHRIRNEDADQLVALLDEHAPLEVVVEASGSWPWIYDRLEGPEVHVVLAHPKKLRAIAESNYKTDAIDAELLARMRFVDLIPEVYPKPIEQRELATLVRHRARLVRQRTGAAGRIHGELHSLGLSLRRGELLTQAGRRWVHTEAWPLFGPEQQCLIETHERLIDVLTEMIRGLDRRIARIGREIPAVQLLETIPGIGAYRALLIVSETDPITRFPGPKHLVSYAGLAPVSSRSGKSVRYGSIPAGANRWLRGALVQAALSHCRFAPDSRLTTYYEDVKDRKGWRIARIATARKLARVVHAMLRTGEVWSLA

SEQ ID NO: 145391 - protein, 343 aa, unidentified
MDHFAGLDVSVKATSVCIVDETGKIVREVKVPSEPIALLAVLKNPAYHFKRVGLEAGPLSQWLFSALAEAELPVVCVETRHMRAVLKAQINKTDRNDARGIAQMMRVGLYRPVHVKTLRSQKLRMLLTHRKLLQSKAIDIENDLRGTLRNFGFKVGMVGKVKFEARIKELVENLPDLAVMVEPLLIVRRVLREQIVILHRRLLAIVRDDDVCRRLMTTPGVGPVVALTYRATVDVPARFRKSKAVGAVFGLTCSKYQSGEIDRSGRISRCGDEMMRVMLYEAAQSMLRSKKWSWLKAWAMQIARRRGMKKAIVALARRLAVIMHRIWVDGTEFRWTREQSAAA

SEQ ID NO: 145392 - protein, 370 aa, unidentified
MGPAVEPQLREAPVMSEGSCVGLDVHARSVVAGVIDMGSGEVRSLRVPPGAEATVAWLKTLPAPVRVVYEAGPTGYRLARSCAEAGISCVVAAPSKIRPAADRVKTDRRDAERLARLLRLGEITPVRVPGPAEEAARDLVRAREDARGDLMRARHRLSKLLLRHGAVYDATAWTRAHDAWLRKQRFQDGPLAIVFDECYSRMIDAKTRRDTLDKAIAELAASEPYVDVVERLVCLRGVSTLTAFALTVELGDWNRFRPESLAPFLGLTPSESSSGERRRQGGITKTGNTHARRLLIEAAWHQRSAPRLSVTLERRRTGKSLAVRAQADSSARRLHGRWNALEARGKPRLIVVVAVARELAGHCWALATME

SEQ ID NO: 145393 - protein, 381 aa, unidentified
MVDAIMTIGGHMKSIVSVGMDVHKNSYNLCAYDSKTGEIIREIKCASEAKNVLKLIDNIKKDYDGEVKFKAGYEAGCLGYSVHNQLEKLNIECDILAPTTMQHSSKNKVVKNDRMDARNIATNLANGTYKKVYVPCEHDKDVKEYLRMMKTAKEALKKIKQQLNAFVLREGHNYQQKSKWTEAHLQWFRGLETSDILKEVLNEYLSQYDSYTDRIERYSARVEEFSHEENYENKIAELRSIAGIDTTSAMTLHIEISDFNRFPTANAFTSYVGLVPGENSSGEKSRRTSITKQGNSIVRTTLIECAQALVKANPYIKSKRIKAKQKGQSCEVIDYADKALFRLSKKYHRMMNKGIHRNKIITAIARELACYVWGMETGNIH

SEQ ID NO: 145394 - protein, 347 aa, unidentified
MKQIYYGIDFHKNTSTICASFQNGIQAEKPVTIKSERLLEYFSNRQGIIAIEATGGSNDKVQKLRDQGHEVKIVETNRFKAIGINGKKTDYRDAEALTTALRLNAVPEVHLRSLYARQLKSLLKSREIVVTTRTRFISHIRGTLREYGEVFPTGIENFWKHAGQSISRIECGFIKDSLETLLEQCRVLKAQEDQIELHLKEYTKDDPRIGRLKSVRGVGDITSYTLVAVSDDIHRFASAKQFASYLGLTPSVSSSADKTFMGSITKSGSEMARRCLIHGSRSWLKIDDPQDKHWRWAKQLEKNKNKNKAVVALAHRMARICYAILRDESLYYRNYKSKAQTLPSQAS

SEQ ID NO: 145395 - protein, 341 aa, unidentified
MPNSTDFQTIVGIDIAKSVFQVYSCDIKTGIVSNEKIKRDRLLEHFTNVPACKIGMEACGSSQYWARKLTDLGHTVKLMDPKLVKPFVSHNKSDRADAEGIYHALQQGTRCVPVKNDTERDIDTLLTLRTRLVKLQTGDINHVRGLLAEYGQIMPRSTVRFLDEVGNCINSLEGDAAQAVIEELRLVVDGIRKRAERIKTISSNIAALAKKTKHAANLLTVPGVGIITMAYMCVLLSEPQVYSSGRQFAAFLGLVPMHTGSGGKTITTHIPMRCNQQLRALMIECAQAVARAKYKTPWVTAILAKKPKKVALVAIANRIARQCWAVASKGEAWKDLSVTTA

SEQ ID NO: 145396 - protein, 385 aa, unidentified
MQTIIKQCVGIDISKASFTACVCRKSLSGEALLSSVESFENSKPGYNQFVKWSRKITNPSVEGLFLMEATGIYYEGIAYHLHKLGQSVSVILPNKVKHYAKSLNIKTKTDIVDARVIAQMGAERNLPNWQPPIAILKQLRGLTRLYTDLKHERTVYLNRLESENASVAALPFVINSNRSILKELEKQIRQCEKEIKKIIYAEEWLAEKVNKLLTIKGVGLITLAIIIAETQGFSLIKSRKQLASYAGYDIVQRESGTSVKGKTRISKKGNSRIRASLYFPALVASRHNTELKDDYQRINTGKASKMVGVTALQRKILLLIYTLWKNNETFNETKNRTSGNQEAKFLLRHRDEVPKKVGNPRELPTQDELPYNQSTEVLLRQLQST

SEQ ID NO: 145397 - protein, 324 aa, unidentified
MKDYSFLGVDVAKDTLVIFDGKKVYKLPNQRHLKAFQNKFFRKKDAKDKIVIIYEPTGPYSAFLEEFCAVNQIKVVALNPRKVPRLREVLGHRAKNDNCDAELLYEYHKLVSEKEIKLIEYDKDLEKLAVYISEYQLYQRAENIFSNFGEYLESNPADVDDSRENIQKELTHFRNRIKELKQKIEEIVKKREDINKVVNEMTEEKGIGILTAVTCYIFFRKRGVRNRGEAVALVGLDPETKESGNTKKAAQISKKGDKRLRGLLYMGALSAIASGKGVLREFYDRLVKKGKPKKVAVTACARKLLLFAFAKYKKAMEELQLQMA

SEQ ID NO: 145398 - protein, 343 aa, unidentified
MQTITTLGLDIAKSVFQIHGVDVQGRAIVRRQLKRRYVLAFFKKLPPCLVGIEACATSHHWSRELQALGHTVRLIPPAYVKPFVKRQKNDAADAEAICEAVQRPSMRFVPTKTPEQQGCLMLHRTRHLFIRHQTAVINAIRAHLAEFGIVAPVGRNGVEELLYAVADHKDERIPEVARECLEALGELLGKLKAQILEFDRQINAWHRSNETSRRLDELPGVGPALATALVASVADPKAFRSGRDFSAWIGLVPKQNSSGGKEKLGNITKQGDRYLRSLFTAGALSVIRYAKIHGTTHRPWLSKLLERRPTKVAAIALANKIARMAWAMMAKGERYREPVALAR

SEQ ID NO: 145399 - protein, 365 aa, unidentified
MSFAHANGRGPTETEVPARMKVLIGVDPHKASVAVAAVDEVGEFLERATFPQNCAGLRSLERWAKRFPEHRWAVENTGGLGRHLVGRLAAAGESVVDVPPKLSARVRVLSTGNARKNDELDALATALAASRNERLAAVDPEAASEVLRLLSERREDLVAERTRALNRLHGLLRDLVPGGVAGTLSAHRAARILRGIRPKGASARLRRQLASEVLRDIRTLDRKIADLNGRIEAEVEAFGTTLTEIFGVGPILAAKIIGTVGNVARFPTKAHYFASYSGTAPVEASSGEVVRHRLSLAGNRKLNNALHMVAICQARSDARGGAYYRKKIAEGKSRKEALRCLKRRISDAVFKSLMADSRAPSRSAA

SEQ ID NO: 145400 - protein, 347 aa, unidentified
MEQYAGIDVSLDSVSVCIVDAQGKILKEAKVACEPEALIAWFAAHGTPMARIGLEAGPLSQWLFAGLRAAGLPVELLETRHVRAAFKAMPVKTDRTDARGIAQLMRLGWFRPVHCKSLPAQEVRALLTTRKLLQAKRHDVEMSLRGVLRGFGLKVGPTTPKTFAMRVQELGAHHDTLRTIAEALLKARAVLAQEFKAIEKRLSALARTNAPTRQLMTTPGVGAIVALTFASAIDDPSRFRSSRRVGAHFGLTPRKHQSGETDVTGRISRIGDHGVRVALYEAANVILTRAVRGSDLKSWALRVAQRAGMKKAKVALARKLAVVLHRMLADGTTFMASKVAQSAAGAA

SEQ ID NO: 145401 - protein, 252 aa, unidentified
MNNKRVVGIDVSKALLDVCMVPSGEVLQFANEAGGIDELGKKLAPETVDLVVMEATGGYETAVATALMAKGLRLAVVNPRQIRDFAKATGRLAKTDRIDAEVIAAFGQAIELEISRLPDEDARELEALLVRRRQLVAMRVQEVNRLGLMQGAVRKNIKAHIDWLEKQIDRLDIDLTAGLRSSPAWRAKDELLRSFKGVGPMTSSTLLIALPELGQLDRRAIAALVGLAPFNRDSTYARCSTWQRPRRSAPIP

SEQ ID NO: 145402 - protein, 321 aa, unidentified
MQKDLLYCAIDVSKDKLDVDGAALALPAQLGNDHGSFRQLIKAAKKYPGPVQFVFEATGPYHLGLALALWEAQIPLSVLNPARVRYYAKAQGKAKTDPLDKQVIGDFARSFRPPPTPAPDPVRRELTELLQRRDGLISTRAAEQNRLAQCRHKIIKGQIRRLMAQLAEQIGQIDGLMKKLVNSSEELKAKVKALCQVKGVGHLTAVTLLITLPELGTLGRNRIVRLVGLAPLNDDSGTQKNKRYIQGGRARPRCALYMPALSASRHNPVLKEVYERLLKAGKLKKVALTALMRKLLICLNALLRKLADQHPSPQGLCLAKP

SEQ ID NO: 145403 - protein, 452 aa, unidentified
MVAVMQPQEIEDEEHEQVLQRVAAVDVAKASGMVCARVPHPDRAGRRRTRVWAVPATTGAVLELAGLLAGEGIEKVTLESTADYWRIWYYLLEAAGLNVQLVRAYDVKQVPGRPKTDKLDAVWLAKLTERGMLRPSFVPPAEIRNLRDYTRLRTDLVRERVRYWQRLEKLLEDALIKVSAVASKLTTVSARAMIEALIAGERDPQVLAGLARGRMKAKHDALAEALAGRFDDHHGELARMLLDQIDALTAQIARLTTRIEELIASMPAAQGVDPDGSTGPHAGLGQDAPALPAIDRLDEITGIGRDAAQEIIAEIGLDMSAFPTPGHLVSWAKLSPQTIQSGTKSRAGHTGKGNPYLKAALGEAAAAAARTDTFLGERYRRIARRRGKLKALVAVARSILVITWHLLANRAARFRDLGPGYYATRIDKHRKTRSHVRQLEALGYTVTLAPAA

SEQ ID NO: 145404 - protein, 441 aa, unidentified
MRVMYERCCGLDIHKASITVCALITEKGKTQEETRRFGTMTADLRELAGWLQQKGIRHVAMESTGVYWKPVWNILEPLGFELLLANAQEVKVVPGRKTDQKDSQWIADLHKHGLLRNSFVPPRAIRDLRDLTRGRAILTQEHTSVCNRIQKVLEDANIKLRSVASDVFGASGRAILRALMKEENDPEALANLSKGKLRNKITQLRRALEGQVTAHHRALITGHWNRMEFLERQIADLETQIAERMKPTPAEMAPTMQNPSEEAPVPLSPREEAIQLWMEIPGLSWTSACSMVAELGVNMDQFPSAAHAASWAALCPGNNESAGKRLSGKTRKGNIWLRRTMCEVAWAASHTNDSYFAAQFHRIASRRGRKRALMAVAHSILVTAYSMLKHKRHYKELGADFFDGINRDKVRDRLVQRLAKLGFNVTLESKGNVESVADVTE

SEQ ID NO: 145405 - protein, 355 aa, unidentified
MNEIKYIGMDVHQTSTSIAVLNASGRLLTSAVVETQGQTLVAFVLGQRGTLHLTFEEGTYSAWLYDLLAPHVSRLVVCDPRHNALLKAGSKNDPVDARKLADLLRLNALQPVYHGQNSLAPLKELSRSYTTLVQDSTRVMNRLKALYRSRGIPCQGRQVYSPSYRASWIDQFKQAGVHQRAELLYHQLDALSLLRRQARRALLAESRKHSVSRILRPVPGLGPVRIAVLLAMVQTPFRFRNKRLFWAYVGLGLVTRISAEFALVNGQLKRSGKAPAIRGLNPNHQRELKEIFKSAAIAAVHRPGPWQQLYQRRVAAGRKPELVRLTVARKLAAVTLHLWKKGERYDVNDVKSTAA

SEQ ID NO: 145406 - protein, 357 aa, unidentified
MMCRSGNTGPREEGPLDKQIGTIGLDIAKRVFQVHGADSRGAVLFRKRLRRGQVLSFFAGLPSCTVAMEACASAHYWGRQIGKLGHSVKLIAPAYVKPYVKRQKNDAADAEAICEATQRPTMRFVAVKTEEAQAAAILFRARDLLVRQRTQVINALRGHLAEFGMIVAQGPQHVPKLIAVVDDRTSELPTMARQILALLVDNLRGLDSRVTELDREIGRRAKEDVVACRLMTIPGIGAVTATALTALAPPAQTFRCGRDFAAWLGLTPLQRSTGGKQRLGRTSRMGERTLRRLLIIGASAVARWATRKGVPAGSWLERMLRRKPPMLVRVALANKMARTVWALLAHGGIYRAPVATA

SEQ ID NO: 145407 - protein, 335 aa, unidentified
MHYLYYVGLDVSKETFDASLVAFEDANEMAHRKFANSRKGICSCLHWVEKRHGIRLDDVIFCAEDMGSYISEMAVCASDRTLNFNFSLISPLVIKYSMGIARGKTDRVDARRIAEYAITHYRKIALYLPAEKELCQLRTWLILRAHLAKQRVAKLVLLEKLDYKEKFADVSIQRSMLQEEIAYAETHMKTIEREMQELITADSNICRNYKLLTSIKGVGPITAIVMLCSTLNFTKITDYRKFACYCGLAPFEHSSGTSVRGGCHTSSMANRDIKVQLNRSALIAIRCDPQLKAYYERKVAEGKHKFSVLNAVRAKIAARCFAVVRRGTPYVALQI

SEQ ID NO: 145408 - protein, 385 aa, unidentified
MQELNDLSQSRIVLKQDNTLIAVIEMSLSSWLVAGIVPGVERQPLKKLAVDESALLKLLHRWREEAEKTGRRIERIAVAFETGRDGFWLARWLRARGIEAHVIHASSVAVSREHRRAKTDRLDTELLKRVFLGWLRGERDHCKMVMIPTIEEEDAKRPNRERESLVREQTRIVNRMKAALIRLGIRGFNPKLKNAAERLADLRTPEDEPIPPNTLAELRRDMERRQLNRDQIRQIEDARLERIERAPSDGPHAMVRLLARVIGVGIETADMLVQEVLSRTLRDRRAVARYAGLTGAPDESGAKRREKGLARSGNVRVRRGMIQLAWRFLMFQKDSALAQWFRARTENARGTRKTMIVALARKLIIALWRLVTTGEVPAGVVLRAA

SEQ ID NO: 145409 - protein, 418 aa, unidentified
MKSNKTEKIKTINEKTLIVALDIGKNVHYGYFRTPKNKDIKPFPIYNTGRSFKKFWGKLCRFKEEHMLDEVVIGFESTGPYAEPIANYLRKKPVNLVQVNPMHTKRVKDLTGNSPNKTDKKDPRVIADVISLGHSLTVVIPEGAAAQLRRLTHARERSIERRTAMNNQLQQLVFVIFPELVSIIKPSTKTGMYLIKNFPDPERIASIGIESLSDIIRQVSRGRFGIDRAEALYNAAKQSVGITEGKESVILETSHLVFNIENENRYIKSLEEQIIEHLEQIPYSHSILSVKGIGHVTTAGLIGEVGDFNKFNTISEITKLAGLDLFEISSGKHTGQRRISKRGRPMMRKLLFFAAINMVKSNGIMHAKYKQMLDRGMLKMKALIAISRKVLGLIFAIVRNSTMYIENYTKQNHYKLAA

SEQ ID NO: 145410 - protein, 355 aa, unidentified
MDSKKYIGMDVHKESISIAVINGAGKIVMECVIETKASMILQFIDGLRGDLHVTFEEGTWAAWLYDLLKPHVTRIVVCDPRKNTSMKEGNKSDKIDARRLAELLRLNHLNPVYHGEHGLRSLKELVRSYLTITKDLGRVMSRVKAIYRSWGIACTGKQVYAPQHRAEWLAKITEPGVRRRAEFYYQQLDALRGLRQQVRRDLLAESKKHPAWKRLCQIPSIGPIRAAVLLGILQTPHRFRTKRPLWKYSGFAIETRSSADHRSVHGQLQRSSKQISVRGLNPDCNHDLKNLFKGAAIVASSKPGPFQEFYTALLAKGIRPEMARLTLARKIATIVLIVWKKGVCFDAQHLKPQTA

SEQ ID NO: 145411 - protein, 369 aa, unidentified
MLYLGIDQHANQLTIDLGNEMGDLVLHRQVKTRSDFLRPFLDEVTKLAAPHGGILACVEVCGFNHYLLKMLEKYGIRVIMVQPSGRRKNKTDRRDARALRETLWLNRNRLEEGKRPAEMRIVRPASETDAAERQLTTLQTRLTRHRTRTLNKIQTIVRKHNLQHERPTKGIQTKKARQWLESLSLPEMDRFELDILLQQWIQVDQHLDQVKRKVQERRNVNEKAALLASLPGMGAFNSLSVACRLGDIDDFPRGSSLANFLGLTPGSRNSGETYTCLRITKAGSGHVRYVLGQVTLHVLRQDAWMRQWYQKIKRRRGSKIARVAVMRRLATIIWAMLKHGMPYVKGGPEKFREALANHQQLSAATGGAQ

SEQ ID NO: 145412 - protein, 431 aa, unidentified
MTGLATHEFAAFIGLDWADAKHDICLQVADCDTREFTVLDHQPEVIDAWVTDLLQRFQGQPIAIALELNKGPIVEALRKYDGLVLFHINPMMLAKYRQAFTPSRAKDDPTDAELQLELLLRHRDKLKPLAPQSAEMRALGQLVEHRRRVVADRIRITNRLTNTLKHYFPQVLQWFPKKETRLFCDFLRQWPTLKAAQLARRSTLEQFFRQHHLRGEQRINERLEAIKRARPLTTDEGVLIPHTLMAQSLVEQLRVTLEAIERFDQAIAERAQNHRDFALFDALPGAGPALAPRLLVAFGEQRERYGSAAEVQTYVGIAPVMERSGKQSWVHWRYQCPKFLRQTFVEWASESIRFSFWARAYYQQQRDKGAVHQVAVRALAFKWIRIVFRCWQNRTPYDESVYLAALQRRGSSLISNLAKSSKKGEKEAKKP

SEQ ID NO: 145413 - protein, 478 aa, unidentified
MRADRRWRTRKEKKEWARRLQSNDPGLDVIHPQAAGIDIGNASHYVAVRPDRDPEPIGRFECFTADLHRLADWLNSCGVTTVAMQSTGVYWIPLYDILEERGFEVYLVNARHTKNLPGRKSDVQECQWLLKLHTYGLLNNSFQPTSQIRVLRTYWRQRAEHVRAAASCIQRMQKALSQMNVQLANVISDLSGLTGQLIVRAIVGGERDPQKLAELRDPRIQASPEEVAKSLEGDWRPELLFLLKQEVDTYDTYQKRIAECDQQLQQQLASFASVAPEVAAAPVTQVQGGDQPKQAQAKRKKPAKNAPHFNLEQELQRVAGVDLTRIDGIDVMVAQTILAEVGLDMGRWKTESHFASWLGLCPDNRITGDKVVGRGTRHVVNRAATALRMAANALLRSHTYLGAQYRRLRTKLGAPKAITAMAHRLARLVYRMLKYGQRYVDKGAEYYEQNYRNQQLQFLRKKAAQLGFQLTEAETQTA

SEQ ID NO: 145414 - protein, 445 aa, unidentified
MICAAVERCAGIDVGKKWLSVCVMIGPLEGEPRAEKRRFGTTVVELEQLRDWLQKEAVTHVVMESTGSYWKPVFNVLEDTVKVYLANSQEVKARKGHKTDDKDGWWLAHLLRHAMIHPSFIPPRSIRELRDLTRRRERLNGDGTSEKNRVQKILEDANVKLGNVLSDVFGVSGQLMLEALLKGEAKPEEIARFAQRRAKKKIPAIIAALEGHQMSEHHRKMIRYSLAHMRFLEEQLEELDRDIEEKIRAAGLDRQWELVQTVPGIQARSAAKILAETGGDMTQFPSERQISSWAGICPGNNRSAGKNRSSRTTGGNPWLRGALTECAWAAAAKKNSFLKEKFWRMVTKSGGKKPPALVAVAHTLLILVYEVLRTGEPYRERQPVALPDTQRERLIRHHVRRLGKLGVRVYSGQRPEPATGRSQDPKSPTHTKRTQQVLENNGPHI

SEQ ID NO: 145415 - protein, 373 aa, unidentified
MKRILKIAMDVHSTNYTLCAMEPTIGSEDRIYGEIQVAPDYKEVLRFINSLKMKLGLDNEYSIECGYEAGCLGYTLYHQLTEAGVKCVILAPTTMLTQQGKRVKTDRRDAHLIAQCLCYGGYHPVYIPTGEDDAVKEYLRMRDDHKLALKKLKQQINAFVLRHGHQYTGTKWTIKHVAWLHKLELAPMYRETLDEYMASYEEQEAKIERYDKRIEEIAAEARYQENAKKLSCFLGIRTHTALSLIVETGDFKRFAKGSTYAAFLGLAPGEHSSSTSVNRLGISKAGNTHLRCLLIEAAKGICKGAIGHKSKELRSRQNGQSAEIISYADKANTRLRSKYYRMIRHGKKKNVAVAAVARELACFVWGMMTGNIA

SEQ ID NO: 145416 - protein, 344 aa, unidentified
MEHFAGLDVSVKETSVCIVDDTGKIVREVKVASEPEALLAVLNNPAYHFKRVGLEAGPLSQWLFSALAEAGLPVICVETRHMRAVLKAQINKTDRNDARGMAQMMRVGLYRPVHVKTLRSQKLRMLLTHRKLLQSKAIAIDNDLRGTLRNFGLKVGMVGTVRFEARIRELVENLPDLAALVEPLLIVRRTLREQFCILHRRLLAIVRDDEVCRRLMTTPGVGPVVSLTYRATVDVPARFRKSKSVGAVFGLTCAKYQSGEVDWDGRISRCGDEMMRTMLYEAAQAMMRSKKWSWLKAWAMQIARRRGMKKAIVALARRLAVIMHRIWVDGTEFRWTRELAAAAA

SEQ ID NO: 145417 - protein, 313 aa, unidentified
MAKAVEPVLTGVDVSKAELVIARSDSSGVETISNAVGPTRRWLKSLPPGSKIALEATGIYHRQLARLAHEAGFELYLLDGYKLNHYRSGVGTRAKTDASDAKLILRYLTKEMDSLKPWIPAHDAFYRVQGLMRRRASLVHTRVALSQSLQDIPELKQAAKQLDAHIRRVELLIVQRLKQAMADVGWWLVAKRCKAIEGIGDLTAMALANTFHRGPFKTSDAFIAFLGMDVRVRDSGKQIGRRKLTKKGDPELRRLLYNAAMAARKTQAWKSLYETYIAQGLKPTQALVKLARKLARIAFALMQNQTTYQPKTA

SEQ ID NO: 145418 - protein, 340 aa, unidentified
MYYIGLDVHKKTISYCIKRVDGTVHAEGKFDSTRLALDAWLATLPQPWTAALEATIFTGWIYDYLKPHAHTLKVAHPAMLRAIAAAKKKNDEVDARMIADLLRCNLLPQCYMAPSEFRERRRTLRYRNLLVRQNVQMKNRTAGLLMETGVAYNKQKLHGQAYFARLRKSPEVPACIQPLLKIGRESIERIAKLDRALMKALKGDPLLADRVARLLTIPCVGEVTALTWVLEVGEVSRFSSVKDAVSYCGLCSAERSSAGVQKRMPISKQRNKHLQTVLVEAAKLSQHFNDDLTRVHEKALVKGNRNRATIAVARKIVAYLLAVDRREKPFLEGEESADAA

SEQ ID NO: 145419 - protein, 423 aa, unidentified
MTKHSTTPADAVLVAIDMAKNRQEVLIERPEGGRRRRMTVLATKTDYDRLAEQLAAIGRPIVVGFEATGNYHRTLAHRLLTAGFELRLISSVALARTREALHNGWDKNDPKDAQVILHMLRIGATQRYVDPLAAGINDLQELSKTHEVVSRMKTQTWHRILTHYLPLYFPEVARFAGNSRSDWFLAMIERFPTPASITALNKEAFSAEVWPLIGRKVSKARLINDVYETACSSVALPVPEDSAAIAMFRMVIAQGRSLIHQRDEIERLAHARLADHLDYKLLRKIPGIGPINALTILAEAGDLRRFSHHRQFLKFCGLDLATCQSGTFRGRTKLSKYGNARLRRTFWMAAQVAARQRDNSFRDKLGRYTAGHADDADRRRKAMTALTAKMARVAHAVIKTGTEYRPFLERSDARWKDPSLQVP

SEQ ID NO: 145420 - protein, 346 aa, unidentified
MTNVTIGMDLGDKNHEVCVLDQKGHLMDRFAVGNTRKQLQKVFQPYAGALVAMENGTHSPWISRDLEALGCKVLVGNARKLRMIWARSQKTDVKDAEMLARIARFDRQLLYPIRHRSQQAQIDLEQIKARDLLVSLRTDLINHVRSTVKAIGERLPACSADCFHKRAQTFMPDSLRTALMPLVAQIASLTQQIRGYKCKIEQLALTVYPETACLRQIQGVGLITSLAFILTLESPDRFDKSRAVGPHLGLTPRQDQSGSCNKQLHISKEGNVYLRRLLVSCAQYILGRYGQDSDLRRYGERLIARGGRGAKRKAVVAVARKLAVLLHRLWSTSEVYQPLYNARKVA

SEQ ID NO: 145421 - protein, 405 aa, unidentified
MASPDEVTVWIGLDVGKEEHFADVLDDDGESLFARSIRNDETSLDALIDDASEHGTAGLVIDQPGSIAQLAIAVAARRQIPVAYVPGLVMRRAADLYPGEAKTDRRDAFVIADTARSRRTKVHWLDTGSDELLEQLRVLNGFDIDLAADVTRLTNRLRDLLVSVSPALERAVGSRLHQAGVRALITKFPTPTALRTAGRARINRTIKARSPRLADKVTATVIEALDAQTIVMPAEAALGRVIAEVAAELDRLHTRRDTLAGEIEEVFLAHPFGQLLQTLPGIGPRTGARILAEIGDGTRFADASKLASYAGLAPVTRQSGTSIRGESMSRRGNHRLKNAMFLAAFASLRSPESKAFYDRKRAEGKKHNAALICLARRRTAVILAMLRDQQPYRPPTATPELTEAA

SEQ ID NO: 145422 - protein, 428 aa, unidentified
MASSIDPSAPMTWVAIDIAKGWNVALVEYADGRQQRFRFRHCADDYDGLVGLLRASPQPRRIAVEPTADYHRTLAYRLVSEGFDVVLVSSVAGARLREAVFNSWDKNDPKDATVILRLLKQGMTQRYCDPLLMKTHDLQELSKTYHHIARARTRLQHVLITHYLTLYWPEIERFWSTQRNEWFIRLLMRFPTPRSVSALTLREFAAAVWELVGRRVHKQAKIEEIYGLATRSIALPIDEDSPAVGTFRLQLERYLQLCQARHALELQAETLLASRPDYQRLRSLPGVGPIIALVILAEAGDLRRFTHHRQFLKFCGLDLAKSQSGGSRSREQLSKRGNARLRCALWMAAISAVRMRENSFRDKYQRYVSRAPDDPDLKRKARTAVTAKLARVVYALIKHDCAYRQRFELGFPSGSTPLIRAVEAFGTS

SEQ ID NO: 145423 - protein, 364 aa, unidentified
MLIIGCDYHSSGQQVFGIDTESGEVFADRWIAHTGVELEEFYGSLPTGAVVGIECSGNMLWFERRLAQYGHRLRLGDAAKIRSKETRKQKHERRDAELIARLLREDQFPDLPWVPTLAERDQRQLLMHRHKLVRMRAQVKNQLQHIALNPGQQKKRQLWTKAGRELLENLPLEPWTARRRDDLLRWLDLLNRDCASLEREVEQAAEARSDARLLMTHPGIGPVISLGFVLTIGSIERFQRSRELVSYLGLNPTEDSSGERRRLGRISKQGSSFMRLLLIQGAQTAVRGDEDLRRQYRRLAAKKHRAVAKVMVARKLAVRMFWMLKTHKTPAELVRMRGSSSHPGVGKTEALSERPASPRIQPQG

SEQ ID NO: 145424 - protein, 321 aa, unidentified
MLPTLGIDISKAIFHVELLVNEKLRQRRFNNRPEGFKELCAWLAKHKAERVHVCLEATGRYGDDLALYLYQQGHTVSIVNPARIKAFGESELLRNKDDRPDAGLIRRFCEKQQPPAWQPPAPELRELQALTRHLDNLLETRQQQLNRLDGVSTKTVAKSLRKLVAHLDTEIQRTEKQIQDHIDDHPDLHQSQQLLASIKGIGKLTAAKLLAELEDISHYQTARQVAAYAGLTPRNQRSGTLRGKTRLSKTGNSRVRKALFFPAIVAKRHNPIVRSFCQRLADNGKNKMQIIGAAMRKLVHIAFGVLKSGKPFDPNHELLLN

SEQ ID NO: 145425 - protein, 347 aa, unidentified
MAILADSVDIVIGVDPHKITHTAAIVAANTGKKLDSRTVNADPGGYAQLLETAKDHVGSRCWVIEGCGSWGRGLAAWLQANGETVREIESPRRPGRRMGRKTDDLDALRAAREALGRDNLPEPRSVGDRDAIAALLAARRSAVEMAADTERQLHALASTCPEQLAQRLRGLRTHRLVSTCARWRPTGEPAVVTIADTMRTLARRINNLRSEAATHEAKITQLVQAWRPDLLELVGVGPILAATTLVVWSHPGRIHSEAAFAMLAGVAPIPASSGLTTRHRLNRRGDRHLNSALHIIAIQRQQHDPRTRAYIDKRRAEGKTDREIRRCLKRYIARELYRILENGLDNQ

SEQ ID NO: 145426 - protein, 344 aa, unidentified
MKYVGVDLHKQIIVLCVVVVVAGRRQVAGRRRLCCRQVEQIRQFFGELGPFQLCVEATAAYEWFLELIEPMAERIVLVHPRKMRIIAESRRKTDKLDAQILAEFLAADELPEAWRPTPRVRAHRALVRQRDQHRRRITSVKCRLRNVLAHYNADVPYLFTADGHKHVSKTALSQADRFIVEQLWAALDFHRHQRHAVEWQLEQFAAEAALAEREARAVLATVPGVGPVTTEVILSELGDVRRFRSQNDVTQYAGLAPAVRESAGHRQTGGITKEGSPLLRHAMVELAWRLVDKTRRWGFLYEKLKARCGAKKAIVAVARRVLCVIVSLLKSGQRYSLAQEAIVS

SEQ ID NO: 145427 - protein, 327 aa, unidentified
MKNFSTFIGMDVHKETIAVATAGKHGSPRYYGEIANTAEALTKLVKKVVPSRSKAVFCYEAGPCGYGVHRQITDMGHRCDVVAPSLIPKKPGDRVKTDRRDAVTLVRLLRAEELTAVWIPDQQQEAMRDLSRIREDLKSMERCARQRLSGFLLRNKKVYAGQSNWTQAHFRWLERIIFDSPIQQIVFQEYVDVVKHLQGRVASVQQEMMKALAGWSLGVVVEALMALRGVNLVTAMTIVAEIGDMSRFESPRQLMAYLGLVPSEDSSGKQQKRGGITKTGNGHVRRVLVESSWSYRMPARKTAVENHVLLPLYERSKQPPILCLYHI

SEQ ID NO: 145428 - protein, 318 aa, unidentified
MTASPVVGVDVAKDRLDVAVRPSGEAWSEANDDAGVRALVARLRPLGPALIVCEATGGFERAAIAALAAAGFPVVVANPRQVRDFARATGQLAKTDQLDAAILALFAERVRPAPRPLPDAAAQLLDAVLTRRRQLLEMLVAEKNRLGFAPKPLHRGIQAHVRWLERQLDDVTKELAGLIEASPVWRAKDDLLQSVPGVGPIVSSTLLGELPELGTLSHKQIAALVGVAPLARDSGTLRGKRLVWGGRASVRPALFMAALCGRRWNPALKRFYDRLKAAGKPTKVALIACARKLLTILNAMVRDHKRWAMPAPSVQYSC

SEQ ID NO: 145429 - protein, 366 aa, unidentified
MKKTSTVRVNGNMIFKGHKLTIGLDLGDRWSFYCVLDEAGEVLLEQKLPTTPEAMKQKFERIPRSLIALETGTHSPWVSRLLRELGHEVLVAHAQKVQLISKSNRKDDRHDARTLARLARIDPELLGPVRHRSAKAQIHLTVIRARAELVSARTALVNAARGLAKSYGERLHKCGTQQVSRELAAELSVELREVLEPLLQEVESLNERIQEYDARIEKIARESYPQVALLKQVKGVGTQIALTYVLTLEDPHRFPKSRQVGCFLGLRPGRRDSGESQPQMHISKEGDRYLRTMLVQGAHYILGPFGEDSDLRRWGLKLATQGGKNAKKRAVVAVARKLAVLLHRLWVSGEVYEPLRNSHQAMRAAA

SEQ ID NO: 145430 - protein, 350 aa, unidentified
MLIIGCDYHPSFQQIAFVDTESGELGERRLFHPQEAEGFYGELRERKLAVRVGMESSGHSRWFERLLRTLEFELWIGDAAEIRTKRVRKQKTDRQDAQLLLRLMMEDRFPRIWVADAENRDLRQLLWHRHRLVQMRTRVMNQLHVVALNEGLQRKKALWRPAGRKELESLVLAPWAGRRRQDLLALLDQLTPQIQKLTQALEDEVEKRAVTRRLMTHPGVGPLTALAFELVIGTVERFHCGKQVASYVGLVPTEASSGDRRRLGHISKQGNALLRFLLVEAAQVTVRSQPEWRSRFFHLAMRRGRKIAKVAMARKLAVHLYWMWRQGCDYGQLQKLGSHAGEPGHRDGVE

SEQ ID NO: 145431 - protein, 336 aa, unidentified
MFQLGIDVSKKTLDLCLLREGVKGRVKTRKLQNDINAVSAVIAWLSKQHCKPEDVHIIMEATGVYHESLAYGLHKAGGRISLANPHRAREFARGMGMLTKNDRVDAYMLACYGALKAPEPWLPPPEEVRHLSALLRRRDALVADSTREKNRLEKYLATDTPSVIAESVEAMIGQLNAEIKRLDSLIRSHLNQHPELKKDFDLLTSIKSVGYQLGLNMLVILRSHDFTTAEQAAAFLGVVPVEKYSGTSVRGCPKLSKIGPPEIRAKLYLASLCGLRFNPLMKSMYERLCLRGKAKMCAIGALMRKLVHWCYGVLKTQKPFDVGYLSSDARSACKAA

SEQ ID NO: 145432 - protein, 345 aa, unidentified
MKREYIGVDLHSTQIIVHRIIINDDGTVERRAVCIEAGSGAHTLARILSARDARVFLVNPLQMAHIFLTAKKTDKVDARKLADALKRHLESNDPGDALPEVYVADAEAQRLRMLVAQYQRITADMTALKNNLYALFRQWLIPLEKGQVIDDLETCLAHPRVPPELTMIARGEKERYGRLESIKAEYRAAIEKLGVIRFREPVSLLIGISGVSVFGAACIMSDIITIDRFKTCKQLASYLRAAPRVDASNQTVHIGRLNKAGRKMAFEILLQSVNHLIDGNPHLLAFTQRTVGKSRNKIRATVVARTIRQIFYILKNREPNRYLRIDCLRTKQKRMGKILQTQDCA

SEQ ID NO: 145433 - protein, 408 aa, unidentified
MIARCAGLDVHKDTVVACVRGPAPAGQRQQLVQTFGTTTTELLALRDWLAAHGVTLVGMESTGVYWKPVYYILEDAFECWLLNARHLRNVPGRKTDVADAAWIAQLVEHGLVRPSFVPPKPIRELRNLTRYRKAQIEERTRESQRLEKVLQDAGIKLSSVASDVLGVSGRAMLQALVAGGHDPAALAELARGALRKKLPALREALRGHFGAHHSLLVGASLAKLEFLDGLISELSTEIDRVIAPFAAAVDLLDTIPGVDHRTAEGLIAEIGVEMPRFGAAARLASWAGLCPGNNASGGKHRAGTTRKGSKWLRLYLTEAAKAAGRTKHTYLAAQYARLRGRRGPARATIAVAHSILVAAYHILDRQQPYHDLGAEYFRARHSPHHHVRRLVRQIEALGYRVTIDQEAA

SEQ ID NO: 145434 - protein, 431 aa, unidentified
MQENLLGKIKTSKEKGKVMNQKIFVGIDLAKDSSRIAAVDEEANKAFSVFSITNTTDGMEKLLSKLKGYEKDKILCGMEASSNYWENMYSYLKEHGISCLLLNPYQVKKYRQALGLKIKTDSIDAESIAVLLKDRKYDSLYISDDSAIELKELVRMKFCFARRVKDLKKSVLSLLNLVFPEYTKIIFHPFSKVSMEILSKYPTSIHMKEKSSVSKLIKIFNKYQGCHFRADKAKELITAAKNSFYSGKACRARGISISMQIDEISSLSAKIEDIENEIMLILNPNDPNSSPSNFEILNSIKGVGIGTIAAFIGTVGNISRFSSSDKLVSYIGFYPKIFESGKYKKKNPEIQKAGPRELRYMLYLSSVAAIKHNICLKQYYHDLVSAGMPAKKALIKVAVKIVRMMYSMIKYRTFYDPSRLFMQNQLYSLAA

SEQ ID NO: 145435 - protein, 363 aa, unidentified
MKQRLSNKHKWLKNIHLTADDDLYIGIDAHKKSFHVALWLNDAPAVDFVTTAQTTKLIETLDKLRPAIKRIVYEAGPTGYPLARALQKAHLPVNVVAPSKTPRKPAPDSKTDSLDARKLAEYAAKGLLRNITIPTKQQEAQRQLTRLREQLVRKQSRIKLQIKSFLLQHGIQQPPALRYWSAAAVDQLRNIRLSAHLRYCLDVLLEEFIFIGAQLKDVKGKIKGAFAKTPLAKKVEILATHPGVGQVVATQFATELFKPKRFKHKTELAKYLGLAPSVHQSGQSLRNGPITKTGRPQLRSNLIQAAWIWITCDPYARKAFNRLVHNTGHPNKAITAIARKLAIHLWKMACLNEPYDPVIDKSA

SEQ ID NO: 145436 - protein, 341 aa, unidentified
MNAATHTLGIDIAKRNFEVNLRSLEPGPARHSSGFPNNPKGFGALQRWLIQHGITQAANLHACLESTSRYGDALAAWLRSQDYQVSMVNPRRTRHYADSQLSRTVTDRIDARLIADFCAEQRHKLVLWEPLSSDHRQLQDLTRTRTALVEHRDALANLLETATGLVRKAVQRQRANLQREIERFDKEIKKLLDQQPDSKLSTQVALADSVPGVGLLTAATVVAELPCIDKISRASQAIALFGLDPKSKTSGETVKTPARLSKMGSKRGRRALYMPALVALRHNPLIRALGQRLKAKGRSGNYIVVAAMRKLLRQIFGVLKSGQPFDPNWSKSHARQLQEVV

SEQ ID NO: 145437 - protein, 349 aa, unidentified
MIWIGVDAHKEVHLAVAIGGEGTVGERKIANTPEAWAALLEWARQWPERVWAVEGAWYLGRGLAQYLARSGERVHEVNGRWTAARRRGMRAPGKSDRLDARSVATLLREEAATLPRVYAEEDALAQVQLWSRAQAELTKDITRTMNRLHELLLQCDPEYKTALPVLTTKAAITTLQAYQAPGTSGLDREREALIRATAAQLALLDAQDRELRKKLEHASTARFFPLRQIEGVGPIIACAIVAEVGRPRPGFAEEQLAALGGLSPLEASSAGAIRHRLNRLGNRRLNMLFHQIVLTQARIYPPARTYLLRRQAEGRTAREARRALKRLIVRRVYRAWRDCFTARAERVAA

SEQ ID NO: 145438 - protein, 355 aa, unidentified
MDLTTSISHIIAGVDTHKDTHTAAALDSTGRALGNATFPASPSGYTALLDWLRSFGHVDRVGIEGTGSYGAGLARHLREQSVRVVEVNRPNRQARRRHGKSDPADAEAAARSTLARDDLGVPKSQDGTVEAIRILRLERRSAIRARTQAANQLHAVVSTAPEPLRGELRERSLTQLVELARKLRTTSPNDAVSATRSVLRGLAKRWTQLDREVTVLDEQLAVLAKSVASDLLALRGVGVEVACTLLVAAGDNPERLADEASFAALCGVSPIDASSGRQHRHRLNRGGNRDANRALWVIALVRLRRDPRTREYVARRTTQGLGKPEILRCLKRYIAREVFKILRRSPAPDRVAQAA

SEQ ID NO: 145439 - protein, 341 aa, unidentified
MQTTTIGLDIAKNVFQVHGIDAAEKVVVRKQLRRSKVIAFFEAVPPCLVGMEACASAHYWARELRKLGHEVRLMPAKDVKAYIKRNKNDAIDAEASCEAVRRPTMRFVTVKSAEQQGQLMQHRTRDLLMRQRTQVINALRAHLAELGIVAAQGREGLKDLLAIIADEKDERLPVDARASLIVLAAQLQAVQTLIGSIEKRIIAQHRATEASKRLQSIPGIGIIGASAIVSTVTDPTAFRSGRDLAAWIGLVPRQDSTGGKQKLGPISKQGDRYLRRILVVGAHSVLRRAKHNPEKYPWLTQLLARRPFKVVAIALANKMARIAWALLARGGTYRVPALAAA

SEQ ID NO: 145440 - protein, 407 aa, unidentified
MDVLHPKCAGLDVHQQTVVACARTGAGKAVTYDVRTFGTTTAELLALSDWLSAHGCTHVAMESSGVYWKPVWHVLEGHFELVLANAMHIRNIPGRKSDVNDATWIADLLAHGLIRGSFVPPEPIQELRDLTRTRKQLVREIAQHTLRIQKTLENANINLTAVLADVLGSSGRAILRALARGERDPERLAELASDRVKASRAELVAALHGRVPPHHRFMLTLHLTQIEALEAAVREVEARLGDALAPFRAALDRLITMPGVSETVARVIVAEIGFDMTRFPSAGHLVSWAGLCPRLHESAGKRLSNRTRSSNPWLKTTLVQAAWAAARKKDSYCRAQFLRIKSRRGPKKAVLAVAASMLTAAYYMLKHGVDYRDLGADHFDRRDKAKLAKRLIARLHDLGLTVEVRAA

SEQ ID NO: 145441 - protein, 351 aa, unidentified
MIVLGADMHKGSHTIAAVAAATGELLGDRTVDVGERGFAAVVEWARAFGAERVWALEDCRHVSGSFERFLLVHGERVVRVATRLMAGERRGGRDRGKSDLIDALAVARAALREGFDRLPVAELAGVELDIRLLVDHRERLVRMRTALNNDLLWHLHDLWPEQTLPGSALLSKKWTTRIARRLAQAEQTARVRIARDELRHMRELSRTIDTLETEIAGLVEQVAPQLLAEPGFGPLTAAKLIGEIAGVQRFSSDAKLARAGGIAPIPVSSGKTNRHRLDRGGNRQINTAIHRVAVTRARCHPETRIYIDRKRAEGKTHRDAIRCLKRHLARRIWHLLQPPTTRTPRLVPSTS

SEQ ID NO: 145442 - protein, 338 aa, unidentified
MAQNKIIGIDLAKSIFFLFEINHKGKNISRKKLPRSKLLNYIAQQNECTISMEACSSAHYWAREFSKLGHQVMLFPPQHVKSQRHKQKNDYNDAEAIAEITLYQRHHPVPHKSIEQQDIQSVIKMRKLLITERTRLINQVRGLLSEYGIIIPKGKTAFGKAIPSILEDAENQLSSMLRELIYHQHERYNYINEQVSWFDNKLNHTIQHFDNAKLLTSIPGFGPLTSQAVAVWMGSGQQFKTGRDASAAMGLVPKQNSTGGKTTLLGITKQGNTYIRSLLVHGARAALRRAKFKSDKLSLWAVDIEKRRGANRAAVALANKLMRIAWAVISKNEEYKPA

SEQ ID NO: 145443 - protein, 421 aa, unidentified
MKPQVSEAFAAFVGLDWADAKHAICLQAAGTVQRECLSLEHSPEAVNTWVQTLRTRFNGQPVAVCLELNKGPIVSALRNYDCLVLFPVNPLTVAKYREAFTPSRAKDDPTDAELLVDILLKHRDKLAPLNPQSPAMRALAQLVEHRRRLVGDKVRLTNRLTSALKNYFPQVLQWFSEKDTAIFCDFLSRWPTLKAAQLARRTTLEGFFRTHHVRSPDLIATRIEAIKNARALTTDDGVITPNVLLVHALVAQLRVTLQGIADFDRVIVQRAQGHPDFPLFDALPGAGAVFAPRLLVAFGEQRERFTSAEELQKYAGIAPVTERSGKKAWVHWRLQCPKFLRQTFVEWAAESTRHSFWAQIYYQQQRDKGKAHQAAVRALAFKWIRILYRCWQERTPYDEAIYLQALKRRNAPLLHNLANVS

SEQ ID NO: 145444 - protein, 400 aa, unidentified
MNAVGIDVSKGKSTVAVMRPFGEVVASPYDVGHTESELKELARFLKSLPGETRVLMEYTGHYYEPIAQYLHEAGVFVSVVNAILTHDYNGNSLRKVKTDKIDAVKLANMAIDRWLQLVEYVPEDEIRQTLKICNRQYNQYNKLKTMLKNNLIALLDQTFPDVNKLFTSPSRKSDGHEKWVDFALKFWHSECVCGISERQFKDKYERWCKRNGYNYRAYKAEDIYAKACGNVGLLPMCESTKVLITQAIIQLQSIEETLAAIKREMQKLASTLPEYDTVMALYGVGEVLGPQLIAEIGAVSRFKSKKSLIAFAGIDSPADQSGQVDNKSKAITKRGSASLRKTLFQVMTVILQNSPDNEPVYTYLDKKRSEGKPYRVYMIAAANKFLRIYYARAKECLVNT

SEQ ID NO: 145445 - protein, 326 aa, unidentified
MTLPTLGLDIAKDKFDAALLHNDQLKQHVFSNDAKGFRQLATWLTKAKATQVHACLEATGTYGEALAQFLYDAKHTVSVVNPVMVKGFAHSELLRTKTDKTDAALLARFCLKQNPRAWTPPSPEIRELQALLRRLESLNQMHQMEANRVSSGITSPTVQASVQTTLEFLEREIRQIKKQIHAHLEQHPELKRQRDLLISIPGIAEQTAAMLLAEFRDIPSFESAREMAAFAGLTPKHRQSGSSVHGKSRLDKMGAARIRKALYMPAIVALRYNAVIQTFGERLRTAGKHSLVIIAAAMRKLIHLAYGVLKSGQVFDPDWASRTIGA

SEQ ID NO: 145446 - protein, 342 aa, unidentified
MHRIKAGDAAALLRLLEGIRERRSTISGFPATVICCFEAGRDGFWLHRLLTAHDIPTHVVESTSILVSRRAKRAKTDRLDAEGLLRVLAAYLAGDTQICRMVRVPTPEEEDGKRVHREREYLVQERTRIENRILALLATQGIRRRPSLRTWAQDMAILKTGDGRMLPRHLAAELDRLRRRLVLTMELIRELDAERSDLLAATPNDALSNKIIALQRIRGIGENFSAVLVREVLYRPFANRKQLASYVGLAPMPHQSGNMDRDRRIGRAGNARARKTLVQMAWLWLRYQPESGLSIWFRERVGELQGRTRRIAIVAMARKLLIALWRFTETGEIPDDVTLGTA

SEQ ID NO: 145447 - protein, 405 aa, unidentified
MKVYIGIDWSSQKHDIVYLNEEGGIIAYQTIPHTPLGFEAFDDQRMKLGVGVEDCLVGIETEHNLLIDFLSSRQYRQIYVIPPTTIKGSRGRFGASKANTDRSDAHLIADMLRTDRARLHVWHADSLLTQQIAALASLEQFLTHMIIQTNNRLRNVLWRYYPNAAIVFSALDLQISLEFICAFPTPQAAAQLTFEQFKVFARSHHYPQPSKLPACFARLQKPQPEARQQTVLAFQSEAVRLARLSFHAVQDKAATIREIQELFVEHPDYPIFSSLPGAGKILAPALLAKFGDDRLRYPTPQVLQSVAGTCPVTRASGKHKVVSFRYACDHEFRSVVQQWAKCSIDASVWAYTYFQSIRPHCDSLSHAYRRLANRWLEIAWRLWQDRVPYDEERHLRQHALRVKPK

SEQ ID NO: 145448 - protein, 441 aa, unidentified
MAMRTREDDEVFPNAAGIDVGGSSHWVAVPRTADDQPVREFGTMTGDLHAMADWLLACGVDTVALESTGVYWIPVYEVLEQRGLTVWLVDARQLKYVPGRKSDVQDCQWLQKLMSLGLLRAAWRPEGEVCVVRAVVRQRELLLTEQGSWVQRMQKALVQMNLQLTEVLTDVMGATGQAIIRAIVAGERDPKVLARYRHSLVKASTEDVIRALTGNWRDEHLFVLAQALAMFDSLAERILECDAKTEALLVPLGRHDVELTGPDKKRNKNTPRFDARAALARWAGVDLTRINGLSVATVMTILSEIGPDLSRFASVKHFCSWLRLCPATKISGGKTLASGTRPSANRARQALKMAAMSLSRSDSALGAFYRRLCARMDKPRANTAVAHKLARMVYFMLTRGEAFVDQGQQRYEEQQKQRSIAALRRRASALGFQLQSNAPTP

SEQ ID NO: 145449 - protein, 389 aa, unidentified
MYLVGIDISKYKHDCFIATETGEVIKNSFSFDNNHQGFNTLLTVLKSLDQSQEIRIGLEATGHYGNNLKIFLYDNNFSFMEFNPILSERFRQVTTLRKTKTDKLDSHLISKMLLTYDYQTYSLKSYHILSLKSLTRLRFSMIKERTKYKVRLKNIMDLIFPEFFSFFSDSYGPTPMYILSKYKSPNKLASVDIKDLYDEIHEVSKGRLSYIKLVKLHDCAKKSIGKSNDILEFQLQSILNMLMFYIDEIDKIESKITSIMKMHEFYTPTINGIGLISAASIISEYGDFSLFDSPDKMLSFAGLEPAVYQSGNSITFGKIVKRGSPYLRYTIMNCASRVLMDNPRLYDYYNKKRNEGKPHRVALTHVAKKLIRIIYKIEKDKIPYNQDLI

SEQ ID NO: 145450 - protein, 337 aa, unidentified
MKSWSVTVLSETSVLKKFSQRPSPEALHGFLTRSYPGAEYRSVYEAGFCGFWIHERLTALGIDNIVVNPADVPTKSSEKLRKSDAVDSGKLARGLRANELKGIYTPDSVSLEMRSLIRLKNSITKDTTRQKNRIKSQLRYLGIGIPQEFLEPFSNWSKRFFAWLKEVETLTPSGRQALDIQIRHWEELRRQKLEMTRALRTLAKTDRFREPLRLIMSIPGFGQATGMAFLSEICDITRFRNAEQLAAYIGMIPMCHSSGEKDGTGDITLRKHAVMRCNLIEAAWVAVRQDPAMNLFFTEQCKRMPKSKAIVKVARKLVNRLYFVLKHQTEYVNSVVS

SEQ ID NO: 145451 - protein, 375 aa, unidentified
MSKIRFIGLDVHADTIAVAVAEPNGEVRPIGIIPNRLESIRKMVARLGPANQLKACYEAGPTGYVLYWQLTQIGVACEVIAPTLIPAKAGDRVKTDRRDAEKLARCYRNGDLTAVWVPDDAHEALRDLVRAREAAKQDQHRSRQRLGKFLLRHGVRPPDTIKKKWTAKYMTWLNTNVHFDQPALESTYLDYVHEVHHMGERIQRLEKAIDAAIEQAPEQIRSVVAALQALRGVAQMTAVTVVAEVGSLSRFQSPRQLMSYSGLVSGEHSSGNRIQRGGITKSGNSHLRRVIVEAAWAYQHKPWIGGLLLKRQQGLDQEIKDIAWKAQSRLCTRYKKLAANGKNKPQIVTAIGRELLGFIWAIGMKTEPQPQRQAA

SEQ ID NO: 145452 - protein, 344 aa, unidentified
MARTSSHYRLFVGIDVAATTCAVAWMQATSQPSRAISIDQTAAGFAALQHKLLSIEPDPQAILIVMEATGTYWMRLASSLIAAGFAVAVINPAQAHDFAKALLKRSKTDAIDAQTLTELGARLQPQCWTPPPQVFTELQQRLVHRDGLVAVRTQFRNQLHALVQQPIVIASVQTRLETLITTLDKEIATLEQEIAAALQQEDAWAAAAARLATVTGLGTLTIAWILTTTINFTLTITPEAAANYAGLAPQQRQSGSSVRGRPHVGHGGNARLRRALYMASLSAIQHNPVIKAFYTRLRAAGKPRKVAVCAAARKLLRIAWAVANKKEDFDPAYAMCSRQEVTVR

SEQ ID NO: 145453 - protein, 359 aa, unidentified
MLYLGIDQHRKQLTVCVRNEQGDVTLRRQVSTEWERVRGFFTEMSNEAGEPGFVAIVEVCGFNDWLVRLLHEYGCREVLVIQPENRSKKKTDRRDANALGEVLWVNRQRLLADKRVQGVRRIHLPTDGEAEDRQLTEFRKRLGQLRTRSINGVKHLLRKHNLEQECPTKGIDTIKAKKWLATLPLGRMDRLQMNLLLAQWKLWDEQIECLEAEISRRQAKNKTAVVIATVPGCRAYSSLALASRIGAIERFPRPSSLANYWGLTPGCRNSGEATDRLGSITKQGSATARFILGQLVLHVLRKDAWMRAWYARIKKRRGSKIARVAVMRRLATILWHMVKHNEPYMAGGPPRQKLRKKTA

SEQ ID NO: 145454 - protein, 391 aa, unidentified
MVYVGIDIAKDKHDCFIMGEGGEVLFDVFQISNNSDGFANLFSKIQATSQPFDKVKVGLEATGHYSYNLLDFLVNKGLPTFVINPLHTNLFRKSLSLRKTKTDKVDARTIAAMLASDVNLKSYSDTSYHNGELKSLVRYRFDKVRERAKLKQSVTRLVNILFPELEKLVPTLHMVSIYALLQEFPGAHQIAEAHLTRLKNLLYGVSKGHYGNDTAVLFRNEARQSIGSLMPAKSLELRHTIKLIAQLDLVIAEIEREIKAIMDDMCSPIVTIPGISFRMGAMILAEIGDISRFDSPDKILAYAGLSPSTYQSGQLTSSYSHMEKRGSRYLRYAIFNATKFVCHWEPSFAAYLSKKRAEGKHYNVAISHAAKKLVRLIFALEHSREPFSSVS

SEQ ID NO: 145455 - protein, 347 aa, unidentified
MIKPRFFVGIDIASATFTSAVGSMGEKWQIIGRPATFANQLDGFAQYLDWLQEHGVSPNNGVVCMEATGVYSEVLAHFLVAKHYSVAIEPPLKVKRAFKPAGHKSDPVDSAQIAEYAYRFGDQLTPWAPRQETLEQIKTLLSTREQLVTDKTGHHNTLRALKRKALRTPLAEKTHEKTIAELKGHIQELEAEIRRLIDQDPDFRNLVGLLLSIPGVGLLLAAQLLVIFQSASQLCSPKSLAAFIGICPYEHSSGTSIQHTPTSRHYGPAALRKLLFLAALSLRTHNLQFRTYFLRKIQEGKPKKLVINNIANKLLKIIVAVVRSKTTFAPDYRSVNSGLPKMALTKS

SEQ ID NO: 145456 - protein, 391 aa, unidentified
MSMYFIGIDISKYKHDCCIISASDQKVVSKVTIKNNKAGFDELLTIINSLSNPEGIRIGFESTAHYALNLELFLESSLLTFMEVNPVLISEFKKSKTLRRTKTDSVDCESIARWLMTVEYKPHSKGFYHAYSLKSLTRLRDKLIRQRSFYLVKITNVLDHTFPEFKPFFNERLSKTALYLLENYGSAEKMARMNSASYEKLRSLSRGKFSPQQFLRLKELADNTVGVNNSIFDVELNSLLSLYKSLVKEIDTIEKEINKLIEEVHPHYMSVPGIGPLSAAVIYSEYGDISNFTNSGQMLAFAGIEPGINESGTESHGGKMVKRGSSQLRYTLINCCLPLIRFDMTFAAYYAKKRGEGKPHRVAITHVAKKLIRVIYALERQDIDFNAQKLH

SEQ ID NO: 145457 - protein, 462 aa, unidentified
MKRSQKRRAADSSSTAAKAGGIDPHQNPHAAGIDIGARELVAAVPPSSTTGPAVRTFTSFTAEVEALRDWLLECGIKTVAMESTGNYWITAYDLLEAAGIEVCLVNARHVKGVPGRKTDVQDAAWLQQLHAAGLLRKSFRPAQDIVSLRYLMRYRQNLVNAASQQIQAMQKVMTEMNLKIQHVFSDVDGVSAQAIITAILAGERDPAKLAALRDRRCRSSLADIKSALVGHYREEYLFVLKQSQSTWQRLQGDLVACDEQLSLLTRRVHAEAPGPLPEPLTGHQHKASKNSPQIDLFEEAWRYYGVDLSAVPGVSTGLLSVLMSELGTGAQIVTAFRSGSAFASWLGLCPDNRISGGRILKAKTRQVSNRVANAMRMGAYGQHRSQTRMGEYTRRMKGRLGKAEGITAGAHKLARIVYALIATRKPYDEAEAFKITPRSLERQHAQLIKQAQSLGFQLVPAA

SEQ ID NO: 145458 - protein, 400 aa, unidentified
MISVGIDVSKGKSTVCILKPYGEIVSKPFNITHTQKDLSELSSMLFRLNDEVKIVMEATGIYHLPVLTYLQEKGFFVSVINPYLMKSYRNESLRKAKTDKIDSRIIANYGIDHWFKMKEFQTSGEIYEELKLLGQQYRHYMKLHLLSLAELTHLLDLTMPGIKNLLASWNETNRKDKRSDFVERFWHYDVITSMSEQEFTEEYILWAKEKKYVPSQEKAKVIYTLAQESIPTLPSETSSVKILVTEAVRVLKEVDATLGLILSRMQEIAKTLPEYPVVREMGGVGNTLAPKLIAEIGDVRRFRNGKALVAFAGIDPPPYESGQFVGCNRKISKRGSASLRKVGYETMRSLKMRSRPEDPVYRYVVKKESEGKSKKSAKIAGLNKFLRIYYARVTELYKNI

SEQ ID NO: 145459 - protein, 355 aa, unidentified
MSTPKAEDLSDLSVIGVDIGKDVFHLVGFDAEGTLVLRRRIKRLALNATFEALPRCVIGMEACLSAHFVSRTLRGLGFEPRIIPAIYVRPFIKGQKNDYNDAEAIAEAALRPNLKTVTEKSQDQLDLQALHRVRSRLVSRRTATINQIRAFLIEQGITVRKGLRALKSSFLAIIEERRDEMSPRMRTILSGLYGDWLWLDERIETVSKEIEGISRTDASCANAMTIPGIGPLISTAMVAAIGQGEAFDRGRDFAAWIGLIPRQYSTGGRTVLGRISKRGSRYLRMLFVQAANVVLMRPHHWPGFSFGDWLARASIRMHRNKLAIALANKLARIAWSVLRHGVPFDAQRDEIMVGV

SEQ ID NO: 145460 - protein, 420 aa, unidentified
MAKRKKRVTDNVEEVVYERCCGMDVHKEDVKACLNIKGKKEVKTFSTMTDDLLNMAKWLKDNKVEMVAMESTGSYWKPVFNILECEEVPAILVNPMHIKNLSDPKTDVRDAQWISSLLRHGLLRASFVPKKDMRELRELIKYRGSLSEDSTRTYNRIDKVLQGANIKLSNIISTTGTKTEMEIIEALSNGESDVEVLSQKAKGSLKNKIPEIKRALNGLMGEHQRLLLKSMYNHLKQIRSEIAAIEAEIDKRMEKDSEIIDRLDEIPGVGKLTAQVIIAEVGTDMEQFPNENHLAAWAGVCPSQNDSGGKRKSGKTKKGNSNLKKALVMAANSAAKTKDTYLSTQYKRIAARRGAKKAKVAVAHSILKICYFMIKNGTRYQDLGTDYFDKRDKQSIVLRSIKRIQALGFAVTVTPKDDIA

SEQ ID NO: 145461 - protein, 280 aa, unidentified
MENIALIGIDLGKNSFHIHCQDRRGKAVYRKKFTRPKLIEFLATCPATTIAMEACGGSHFMARKLEELGHSPKLISPQFVRPFVKSNKNDFVDAEAICEAASRPSMRFVQPRTESQQAMRALHRVRESLVQDKVKTTNQMHAFLLEFGISVPRGAAVISRLSTLLEDNSLPLYLSQLLLKLQQHYHYLVEQIKDLESQLKRKLDEDEVGQRLLSIPCVGTLTASTISTEIGDGKQYASSRDFAAATGLVPRQYSTGGRTTLLGISKRGKGFESQWNENVR

SEQ ID NO: 145462 - protein, 377 aa, unidentified
MKAPSTRPAAVLGLDVGKSSHWACLIDRDGEVLASAPVRNREAELDALFASAPAGTLVVVDQFRNIGSLAVRRARAAGLGVAHLPGLAASRAAGLFAGEAKTDERDAAVIARTALGVPDSLSGVPGRGEALEAARALSSQRDHVVACATRDKNRLRAVLLESCPALEAAVDLSDRRWLELLAGFGGAWGIARSGAGGPRAEAAGEAAAASTAPPPALVEAENRQVRFLAARISEALDEAGALEAETAALLEGDETYACLLTVPGIGPRTAAQLAVSVDIGRFPDHDHLASYCGIAPRVRSSGTSVRSVRASRRGDARLKSLLIFSCNSLVRSSGRYGEYYRACRARGMGHGRALKAVARKRLRAIYAVMRDRVPYRE

SEQ ID NO: 145463 - protein, 341 aa, unidentified
MNCSVISIDIAKNIFQVCGLDKEHKVLFNKKVKRDRLLIELAKHESSLVVMEACYSSNPWGRRINQLGHTAKCIPAFMVKPFLVGNKNDRNDALAIAEAALRPSVRLIDIKPVEQQDIQSLQRIRERLVKVRTGAINQLRGLLAEYGEVCPKKFAGIRKQLPQILEDAENELSAVARDFIYRLYQDILRLYNEIDEIELTINNLVKDRKDYQKLITIPGVGPIVASTILASVNDPKGFKNGRQFAAWVGVTPRQYASGDTTHMGSITKRGNQTLRKMLIHGARAVLNWCEQKDDKLSLWLQQLKHRMTGNRAVVALANKLARIIWAVLAFDTEFDMNKACA

SEQ ID NO: 145464 - protein, 356 aa, unidentified
MPVYIGVDFHARQQTISYLTTEDGEIQRLRLDHDLEDPRQQRVREFYLQFTGEVIVGFEAGGYSQWFETMLTEIGHQVWVGDAHEIRLLARRKQKNDKRDANHILDLMVGGRFPRLFRRSAHSQEILRQMGYRHKLVKMRTMAKNSLQAISLGAGLSLRSRLHSERGRARLKQLNLTPATACQADKLIALIDYLTTEADRVEKWLAEQAKTDERVTLLQTHPGIGLLTSLALVHTLEPVERFPNPRKVTAFIGMDPVEDSSADRKRIGAISKAGSRMVRFLLTEAAQVAIKRDEELRSLFNRVMKRRNTPKAIVAVSRKLLVRSFIMLRDRIDAEEFLRRGVEARSSRKAHGPSNA

SEQ ID NO: 145465 - protein, 342 aa, unidentified
METAVTIGLDLGKSVFQVHGVDAGGAVVIQRRLTRGKLLAFFAKQPACLVGMEACAAAHHWGRELSKLGHRVRLMPPSYVKPYVKRQKNDAADAEAICEAVTRPSMRFVEIKTCEQQGTLVLHRVRLMLMRQRVQLSNAIRGHMAEYGLVAPVGRNGLQRLIAILGNPDDERVPAVARASLAPLVCQFGLVNDQVLENDRRVRASARSTELGCRLMEVPGVGPVLASAMVATVPDPTAFKSGRTLAAWIGLVPRQNSSGGKEKLGGITKQGDRYLRQLLVAGALAVIRYAQRHGTKRPWLVHLLARRTPKIAAVALANKMARMIWAMMMTGERYRDPVVAAT

SEQ ID NO: 145466 - protein, 370 aa, unidentified
MTQSSTLYIGMDVHKDTIAVAYVAKAHDAEVVFLGTMGTRHCDLDQLIRKMQSKANQLIFVYEAGPCGSWLYRYLMKKGYDCWVVAPSLIPKKPGDRVKTDRRDAMQLARLARAGDLTVVYVPKVADEAIRDLTRAREDTLRDLTSAKFRLKAFLLRHDIRYTGRATWGPAHLRWLAEVVCPTPAQQIVFQEYVRAINEHTERLQRLDQELHDQVTSWRLQPVVEALQALRGVQFIAAVTMVAEIGDLPRFETPRELMKFLGLIPSEYSTGERRRQGSITKAGNTHARRALVEGAWAYRYPAKVSRHLQLRLETQPKVIQDISWKAQVRRCKRYRQLIARGKHANVVTVAIARELAGFMWAIATQVPVTP

SEQ ID NO: 145467 - protein, 399 aa, unidentified
MLAVGIDISKSKSVAAILNQDGSMHTSPFEFHHTQPELDAFIKYILNSKQSATILMENTGHYHYPVLKAFQEAGLPVCMVNAYQIKKFGDMDLRKAKTDKKDAVRIARYALEKSYSLVPYTSMEQKYEDLRFLTRQYNQRMLTLKTNKVFLLNLLDETMPGITNILPLTTRTPETSLSVLFINRFKSYDRIKKMGKSRFLDAFEKIARKSRNRQTKTYGLAIYEAALRNITTRGENEYTLAAQDQCLELVCESQKAADSIILKMKTLAETLPEYAVLRSMAGVGNRLGPLILAEIGDIRRFHSGKALNAYAGNDAPPYQSGTFESHNRHISKRGNAALRKYCFEVMQALKLTRPQNDPVYLFLLKKEQEGKPYNVAKMAGVNKFLRIYYARAMETLKQQ

SEQ ID NO: 145468 - protein, 330 aa, unidentified
MSEASIIGLDIAKHVFHVHGADRRGRKMFSKRISRGKLLDFFATQPSCTVALEACGGAHHWARQLAQLGHEVRLIPPAYVKPFVRRQKNDAIDAEAICEAAQRPSMRFVAVKSEEQQAAGLVFRTRDLLVRQRTQLINAIRGHLTEYGWVAPKGPSHVAMLAELIEEEEMVNSLPGAARAMFRVMLDLLTGLSSKIADLDKEIARRAREDEVSRRLMTVPGIGPISATAIAALAPPAETFAKGRDFAAWLGLTPLQRSTGGKQKLGATSKMGERTLRRLLIIGSSAVVKQASKRGAPRGSWLEQMLARKPRMLVTVALANKMARIVWRYL

SEQ ID NO: 145469 - protein, 323 aa, unidentified
MSQPNLQCMGIDVAKLSLDIATTDTIEPFTVGNDEDGFAVITDKLKHTKINLILMEATGGLEAAIACKLQSEGYDVVVINPRQARDFARSMGYLAKTDKLDAAMLAQLALVIDRHPDRSRYIRHLPDEARAVLAAMVVRRRQLNHMLVAERNRLYPSHRQSRKSIDNIIDALQNELDRINEQMKQHMTAFFQEQARLIGSVKGVGDITVASLIAELPEQGKLNRREISALTGVAPLNRDSGKMRGKRTTFGGRAGVRATLNMAALVATQFNPAIKLFYQRLLAAGKPKKLALVACMRKLITILNTMLRKGEEWNASFQSQVIS

SEQ ID NO: 145470 - protein, 460 aa, unidentified
MNDYFLGIDASKGYSDFVMLDGKKQTIIDNFQLDDTFDGHSRLYQLLRRFNQDFPQATIYAAVESTGGYENNWFQSLLNFQASLPIKTAHLNPLGVSHNSKADLKRNVTDKISAENVAEYMIAHPEKVSYQHQDSLASLRKQWGFITMLTKQSTQLLNQLESLVYNANPEILPYCKDDTPQWVLKLLIGYPTALRLSKAKVNSIARIPYVSTERAKMLIATAKKSVASASDNVTEQLIATTVKQILHLKKLINAQTDILANQCQMPEVELLKTFTGIGDYSAIGLMLQIQTVERFSTSKKMSSFFGIHPEYKKSGDGTYKYRMSKKGRKEGRRILFLVAMSAIQSNPLIRDMYQQAVDRGMKKMTAMGLCMHKILRVIYGMLKHNTAFDPQIDLKNRQKTTPPKRKVAPDKNRRYQDFDSKAPISRRQKMKRKERKQSQNALGVEHGIIEASVPNNQLAN

SEQ ID NO: 145471 - protein, 344 aa, unidentified
MSEQIVAVLGVDLGKNSISLAGLDAAGSVVVRKRTTRDGAIKFTARLPSCVVAMEACCGAHFMARIMARQGHTIRLMSPEYVKPYVKAQKTDDRDAEAIAEAATRPTMRFVTQKTEAQLDLQTLHRVRERMVTARTALTNQLRAILLERGLIFPKGRKTLMRRLDQQPAELNELGTRMQQLVADIRTESAELDKRIEALNDELAEVARRDESARRLATIPGVGVINATALVAAIGDGSAFAKGRDLSAWLGLVPRQHSTGGKTKMLGISKRGNQYLRRQLIHGARSVLLRLKETQTPIGHWLSSLLGRVHRNVAVVALASKLARIAWALLRHRTDFDRRAFAGA

SEQ ID NO: 145472 - protein, 422 aa, unidentified
MGKTQRRCIGLDVHRDFAQVAIWQGGQVRQAGTFATTPEGVREFAAGLGPADEVALEATGNTWAIAALLASHAGRVVVSNPVKTRAIAEAKVKTDKVDAAILAQLLAADYLPAVWQPDAETSALRRQVLRRAHVVRQRTRLKNQVHAILARNLVPRCPAADMFGIKGRAWLAAQDLPPDEQAAAAALLRQLDFHAQELALIDRDLGQAALSRPEVLRLMTIPGVDATVALSIVAAVGDFTRFRSPERLVSYLGLNPKVRQSGGQPASHGRITKAGPAHARGMLVEAAGSASTAPGPLRAFYQRVRTRRGMQVAAVATARKLTVLCWHLIIKGEDYAFALPSLIAHKQRKLELRAGAPPARGRKGQAARYSLAAVRAAERDLAAQGEAAYRTMVAAWQPARPARKKATGAAASTGTRLIKPAG

SEQ ID NO: 145473 - protein, 323 aa, unidentified
MNKDTIYFGIDISKDVFDVTNSKESYYQFENNHKGFRKFLKLLDNTSHCVMEATGYYHYQLAYYLQENLIKVSVENPLSVKRFIQMKLSKIKTDKSDSKLICQYAEKVDLKLWKGHSKYQIECLQITRLLSVYTKQSTMIKNKIHGESVLGNPSLFVVRSLKRSLKSIRKEMDTLENKLLKSVRETHQDLLTRIETIPGIGRKTAIMLVVLTDGFERFSSASELCSYSGLTPMIRQSGSSVKGRPRISKIGNKKLRNLLFMCSFNACKYNKACKELYERIVAKGKSKKLALIAVCNKLLKQAFAIAKSGLIYDQNYRSILVKN

SEQ ID NO: 145474 - protein, 342 aa, unidentified
MYYIGLDVHKKTISYCIKDVSGEIQRQGTITATRAELDSWMKTLPQPWTVAMEASIFTGWIYDHLLPHAAQVKVAHPLMLRAIAAAKKKNDRIDAGKIADCLRCDFLPECHMVSTEIRDRRRTLRYRHLLVRQMVQMKNRVSGLLLETGVSHNKQRLHKVKYFRELLENNKEIDESIRPLLRLSRETIVRLQKTDYALVSSLERDPLLAERLKNLRTVPGVGPITALTWALEIGDVSRFRSVKQAISYCGLCGDEKSSADKVLRTPLSKQRNKHIQRVLIEAAKLGPKLSHELASVYEKEKQKGHSNRATLAVARKMVTYLLAVDREHRAFVPAEDHNTAAA

SEQ ID NO: 145475 - protein, 360 aa, unidentified
MAQARTFAGLDVHVAKIEGFALDLSSGECHRRSLPGSGPETLRWLQSLPVPLRTTYEAGPTGFGLARALEREGIECVVAAPGSIPRSNEDRVKTDRRDAEKLCRLLAAGQLKAVDVPSTAHEGLRDLVRAREDVRRELMSARHRAGKILLRHGHRWGGPGSNWTVRHREWCDRIELDEPGSQAALADYLGAIDALVARREGLERRLGVLIPGSEWEAQIARLRCLRGIDTLTAAGLCAELGDLGRFGRAGQLMSFVGLVPGEHSSGEKVRRGSITKTGSTHARRLLVEAGWHYRRHPARGKALRDRQDGASAETIAISWRCQQRLHRSWRRLEGRGKRRTVVAVAVARELAGFCWAVARS

SEQ ID NO: 145476 - protein, 343 aa, unidentified
MQTVTTIGLDIAKSVFQVHGVDAAGQVVVRRQLKRRYVLAFFEKLPPCLIGVEACASSHHWSRELRALGHKVRLMPPAYVRPYVKRQKNDAADAEAICEAVTRANMRFVETKTPEQQSCLMLHRTRHLFIRQQTAVINAIRAHLAELGIVAPIGRNGVEELLGVVADASDKRLPEIARACLAALGAQLRMLKAQILEFDRLINAWHRSNETSKRLDEIPGVGPALATALVASVADPRAFRSGRDFSAWIGLVPKQHSSGGKDKLGGISKQGDRYLRSLFTAGALAVIRYAKIHGAKHRPWLTALLARRPTKVAAVALANKIARMAWAMMARGERYKEPVALAA

SEQ ID NO: 145477 - protein, 414 aa, unidentified
MFAVGVDVSNGKSTVAVMGSKRTVVVKSCEVPHTTDGFAKLAARLHALNGEVRIVMEHTGRYYESFAMSMYQAGFFVSTVNPLAIKDYRQGVDVRKVKTDKADALKIAQFAIDKWDILPHYTPMDTIRYDLKTLHRQFQLSSKTKTALNNNLIALLEQSYPGVNRYFDSPVRPDGSQKWVDFVDTFWHVDCVARVSRNAFVERYRKWCKRLGYNFSEAKAVEIHEDARQKFPLVPKSDTCKLLVREAVAQLNAVSRTVETYRAEMDRLASQLPEYETVMSMTGVGKSMGPQLMAEIGDLRCFAHQKSLVGFAGTDPIKNESGDKVSVSKPTSKRGSPYLRKTLFVIMTILLQLHPEDDPVYQFLDKKRSEGKPYHVYMTAGMTKFLRIYYGKVRDCLKEKGLWEQSNVEEVNPV

SEQ ID NO: 145478 - protein, 421 aa, unidentified
MQEQPSEFAAFIGIDWADRKHDICLQVPGVDACELSVIEHRPTVIDAWASNLRNRFEGRPIAVCLELSHGPIVSALLEHDFFVIFPVNPSTLAKYRRAFTPSGAKDDPTDAAVALEILRRHPDRLEPLRPESVDMRALRRLVESRRDLVQDRVRVTNRLIYALKAYYPQILDWFRDKETDVFAAFLERWPSLPEAQRARRETLIDFFHAHNVRRANTIEKRINAIKSEKSLTSDPAVIEPALLLVETLLPQLRALSAGIVRFDEQIARRCKALPDFKLFSDLPGAGKVFAPRLLVAFGEQRDRFATAAALQRLSGIAPVTERSGKTHWVHWRWACPKFLRQTFVEWVACSIPHSFWARSFYESHRAKGTSHNAAIRALAFKWIRVLFRCWVDRVPYDESRYLAALQKRHSPILQFAARVTP

SEQ ID NO: 145479 - protein, 407 aa, unidentified
MGRCIGLDIHRDFCEVAIWQDGTVRRAPRVAARPEPLEQFARQLGPEDRVALEATGNALLIARIIRPHVRQVVIVNTRRLAAISDAKQKTDRHDARTLAQLLAAGMLEGSWIPDETTRALRRRVSRRARLVVHRARCKNEILAVLHRNLKERPPMTDPFGVAGRQWLSEQTVPVDERETIDAALRQIDFLTGEITTIERHLATFVLHSADARRLMTVPGVGMITAAAFLAHVGDITRFRTPDRLVGYLGLDPKVRQSGNGPAHTGRISKEGSSIVRHVLVEAAHTTVRSPGPLRAFYERIRARRGQQIAIVAVARKMCVLFWHLLSTSQDYAYSLPTSTAKKMRTVELKAGAPRRPGRADGPRQPLNREQRRELERQSAEHAQTAYERTVTDWHHQERQRATTTAPT

SEQ ID NO: 145480 - protein, 343 aa, unidentified
MQATIAVDLAKNVFEIAVSRFAGKVAERHRLSRKKFLRFFAQREASRVLLEACGSAHFWARELSKLGHEVVLLPPHLVRAYRSRHKKTDRTDAKALLEADRNEEIEPVPVKTVEQQGVTALHRLRSAWMATRTARLNAVRGLLREHGHFIAQGAKNVVPRVHELIEDASNDLPDPMRLALAEACEEIRDLERRCAAVTQQLEALARTIPAVEHLLSVPGIGPLTATAMVAFVGEIHRFPSARHFASYLGLTPRVHATAKSRRLGHISKQGDEYLRWLLIHGARSCLLAAKRSQKRKPLYTWALQVQKRRGHNKAAVALANKIARIAWTVWREDRDFTIVRQAA

SEQ ID NO: 145481 - protein, 341 aa, unidentified
MHPYFVGLDVHKQIIAYCVKKVDGQLVTEGTIKATRTALAEWVKSLPQPWVGGMEATMFSHWIYVALQPHAAELYMGHAARMKAISAGKKKSDKLDSRTIADLLRCNVFPKCFVIAPELGRLRQQLRFRQLVVKQQVAFMNKTAGLLMETGIEYERRRLHGKRYFSELMATTHWVNQELKPLLKFSRQQIESLAGMDKRLIRMLEKHPQLRARVAALRTIEGVGPILALSWALETGTPERFPSIKDAQSYCGLTSAFWESAGQQKRRPLSKQRNQHLQTVLIEVANLAPLYNEKLKALYQKEKAAGADSNQATLEVARKLVAYLLAVDRAFWRSAQLKRAA

SEQ ID NO: 145482 - protein, 417 aa, unidentified
MSWTGEPVRLFVGDDWAEDHHDVEVMSEQGTVLGRARLPEGVAGMARLHEMTGQHRGEDADAEVMIGIETDRGPWVAALVAAGYTVFAVNPLQASRYRPRHGVSGAKSDAGDAHMLADMVRTDSHQLRAVAGDSAEAEGIKVLARTHKTLIWERARQVQRLRHQLREYFPAALEAFEDLDAADALELLGKAPEPARAARLTRAQVSAALKRARRRNIPDKATAILAALRGGQLGQPPALTAAYAVTARSLIAVIVTLNEQVKALQGQVEENFGRHPDAEIYRSQPGMGAILGARVLGESGDDPHRYADGKARRNYAATSPITRASGKKKVVAARFVHNDRLVDALNAQAFAALNASPGARAFYDDLRARGIEHNDALRRLANRLVGILHGCLKTRTLYDEATAWGHRENLPQSSVAA

SEQ ID NO: 145483 - protein, 421 aa, unidentified
MSKRRYQSKEFKSVDWSEVDRRIEGERVVLAVDVAKEDFVATVLESEQEALLTFKWRHPQETAEVVACVLGLGRGRCLEAVLEPSGTYGDALIWQLRQAGIALYRVSPKRVHDAAEVYDGVPSLHDAKAAYLIGRLHLEGVSQPWQEPSEERRELKAIQTRLSVCKAREQAACNRLEAHLSRHWPEILCLLPLGSASLSALISAYGDPVSVAADPSGAEALLRRSGRPGLSEEKIQAVLASAQSSLGVAPVGAERALLQWLGSEALAAHQEVRQVEREIEHRLAHDTLLAILAAVIGKVSAAVLLAAAGSPLDYPNAASYLKALGLNLKERSSGKHKGQLKITKRGPSLARFYLYFAALRLIVRDPVVKRWYQLKSNCPGAVKNKIVIALMRKLAKALWYSARGERFDTNKLFNLKALAGV

SEQ ID NO: 145484 - protein, 344 aa, unidentified
MDNHTQYLGFAGVDLAKKVMQIHFVTEDGEITDKSAKRAEFLDFFRNRGKCLIGMEACGSSQDWARKLEAMGHEVHLLPPKAVKPFVSGQKNDHNDAIGIYKAMFNGVRRVPVKSTEIRDLQTLRRIRSQVTKDKVKEINHVRGLLAEYGIVMGKSLNAFNKDISSALGILTERGDVSPLVAEELRTTVEAIKAKIERQKKLDQEIEQLARGCKNYENFLKTPGVGPFTAAMLCVLLCDPSIFANGRQFAAYIGLAPRSRGSGGKNYVTGIPSKFNCDSESRAVLVECAQAIARCKNKSLWVEEILRRKPKKVALIAIANKLARQVWAMANKGESFKQMVVLTA

SEQ ID NO: 145485 - protein, 387 aa, unidentified
MYYIGIDISKFKHDCAVIDNSGESTTPSWSFTNDSEGFSQLKVLLDSLDAETRIGLESTGHYGMNLKLFLEANNFSFMEFNPLLINRFVKSKSLRKTKSDSIDCMMIAHYLMTVEYKPYPSSFYHIEKLKSITRFRDSLIRQRSRQLVELTNILDKVFPEFKPFFGGKFSVTAIYILSNYSSPEKISNMNSKSYETLRKLSRGKFSTVDFANLKQLAKNTVGNTEDYLLQEMQIVLELYSQLDSKVDETEASIKECVSNINPPMLTVPGIGIESAAVILAEFGDFSKFKNASQMLSFAGLEPGYFQSGTSETTGKMVKHGSSYLRYALMNCAQTVVNYEPTFAVFYAKKRAEGKPHRVALSHVVKKLLRVIYTLQTKNLAYDSDAVR

SEQ ID NO: 145486 - protein, 397 aa, unidentified
MNRLLYIGMDVHKESFTLSTYHVTLDESELTQDFIGAPLKITDATASGVEKYVKNLKTMLNIKATDNVRIQCGYEAGCLGFDLYFQLKAKGIECVILAPSTIQKSANAKKKKNDPLDSKAIAMALANKTYKSVHVPDKDDLNVREYLRMRNAHRDAVKKVKQQILAFLLRQGIKYSNTNWTKAHITWLHGLKFDHALLKETLDEYITSLENYVAKLERLDKRIEEFAQGDKYQEKAAELGCLLGIKTQAAMTMMSEISDFSRFRTASEFASFLGLVPGENSSGEKTQRTSITKSGNSQCRKTLIEAAAGICRGKVGHKSKELMRRQALCNNPIAISYADRANERLRSKFYRLNLRNGKPANVAKTAVARELACFIWGIMTDTYNGKVPRNDEYALGK

SEQ ID NO: 145487 - protein, 366 aa, unidentified
MATNISKNKQEKNHNSSVKNSYVGKQVYVGIDVHKRTYSVVTVVEGIVVKKWRTVANPEKLAQQLTRYFPGASIETAYESGFSGFVLHRVLEQAGIHNIVVNPGSIEVAVHNRVKTDKRDALKIATLLEAGRLKGIRVPSQQQEQRRLLTRTRQQLIEDRSAIKNKIRMKCHQMGLIDPDDTREMSHQLVSELLSRSPCSEFTLVIEAYWQIWKSIETQTKKIEQQLNEQAKVDPNETIYRSAPGIGPLSSRILSNELGDLRQFANERQLFSYTGLTPSEHSSGDTIRKGHITRQGNRRVRYILNQAAWRAIKKDQDLKAFFERLYPRTGKKRAIVAVARKLIGRIRAAFRTETPYQMNPISQQLA

SEQ ID NO: 145488 - protein, 385 aa, unidentified
MVGLLTPTTKKGDQHMKKHDRFIGLDVHKDTIQIAVAEDGRTGELRQFGEISSDLHALERALTKLRADGATLHVAYEAGPTGFVIARHLQAMKTDCIVVAPSKMPVPGGKRQKTDRRDAELLARLLRAGDLTAINVPDEVDESIRDLARARSDAVEDLTRAKQRIKSFLLRLGYHYKGTANWSEAHLRYLRSLTIPLAAHKAVLQEYLLAMEQCINRVERLDALIAVQVPQWDMYPFVKALMTLRGFQLTAATVVVAEIGDIRRFKHPRDLMAFLGLVPREESSGQTHRLGSITKAGNAHARWMLIETVQCALNVPKVSAELSKRQESQPTDQRELSWKIQVRLHKRGRHLLARGKLKQKIVVALAREMAGFVWAMLHLVPAPAR

SEQ ID NO: 145489 - protein, 255 aa, unidentified
MKEQLVYLGVDIAKSYLDAAVGNEKRRFSNDAIGHRELIKWVKQLKAPVQVICESSGGYERALVQGLARARVKISLVQANRVRQFARAAGILAKTDRIDAELLCEFGKVMRPQTVTAAKLEQEHLRELESQRRHLTHLLVMELNRGARVSDASVQRLNRSLINQIKKQIEQLDLLIKGHIDQSHQLSAKAAKLTSISGVGARTAALLLAQLPELGELNRREIAALVGVAPFNRDSGRMRGKRAIYGGRKPVRHGL

SEQ ID NO: 145490 - protein, 459 aa, unidentified
MRQRGKRTKGIEEAHPFTGMSQVNEGAAGIDIGAEEIVACVEGAENTQIVKGFGNYTVDLQAIGKWLGEHHVKTVAMESTGVYWIPLFEVLENMGFKCLLISSRSLRRVPGRKSDIQDAQWIQTLHSYGLLESSFRPQADLVALRTLLRHRAQLLEHRAPHILHMQKSMLQMNVQLSQALSDITGETGIAIIRAIVAGERDPHKLAAFRDRNCKKSAEEIGRALTGTWRDEHLFVLKQSLEMYDFYTKEVEACDAEIDRVYALTRPDWEEGELKPPTQKKRNSHSKNAPQNQEEIRKHLKRISGVDISVVNGIGVSSAQTVIMESGTDMIQFPDDKHFSSWLGLAPKHEISGGKVLKNKTLKTKNRAGQAFRMAAQSVKRSDCVFGMMYRRFRARMDNRQATVATAHAIARVVYRMLKYKVEFEEIDVTEYEKQYEEQQIKYMKKKAAKLGFQLVPVPA

SEQ ID NO: 145491 - protein, 321 aa, unidentified
MNIQNLVGVDTHKDSLACYCNGKFKEFKTTKEGFIKAIKWAKSSKWAIEGAYCFGQAFSNFLIKNGCEVYEINPLLTKSWRTALKISSPKNDYGDAKVISIFANMDNMNKVSFETIKLKEKLTARKTLIKQKTQLTNHLKMLIYTRGEELPFKALDTKKALKWMLEQEDVIIQSTGKILESVLVGIKNLEEEIEKEIPEAAKALTKIEGISTITACTIYAETKGKLTNKAQFASYCGVAPIDCSSGKTTRKRNNKGGNRILNSIFYSLSIAQKRYNEKAKVYYEKKLSEGKSPRHARKCLARQLTNIVFRTLKNATEQGKP

SEQ ID NO: 145492 - protein, 401 aa, unidentified
MSVHELRVALDIGSRKHRVGIATDDGRIVEEFDITHDKAGFELFFKRVEARRNELPVVVAMEGLNGWARPLDRMIQKRDYELLNVNNVKLARFKEIFPGPAKTDKIDTRKTLELMHMRKVLPLAKTVLHRVGDTPVENEQLKRYTRRRRQLVDDKVRVLNRLQSDVQAVSPGLLEITGEAGNLWFLHLLTCREDLSKIAGMRRPSLLKIRGVGQTYATKIEAWQSTATFSDEVDWVGPMIIADAQRVLDLIRQVQAIEKQIVTIAATSTIASRIGTIPGFGPLSAATLAGEIGNLERFEAEASLALYSGMTRLDNSSGQFTGSKNTRQVNTHAKAALMVAVARHIDNVPESKVYYDKKKAEGKTHNQAVRALGRHLIRVIWSMLKNDRDYLPKSERLPKIA

SEQ ID NO: 145493 - protein, 411 aa, unidentified
MNNTLFVGIDISKRSNVATFMNCEGKVVGRLTFSNNGSGADRLVAKILSYYEKEDFEAIRIGMENTSVYSKNLVWFLYEHEALNEHKLSIIPLNAIMVANYKKSFLDMDKDDITDSFAIADFIRIRPGLLPFKLDDRQEALKIMTRSRYNYVQALSRMKSQFLTRLFLSFSEMEAGKPFYSIFSKTSLSLLEEEFTLDELAEKPIPELVEFLQEKGGGKFQNPEEIAKVLKKAASSSYRVPAMVRESLNRTMASDMEIMRILENEIHNCDKNIEKLMKSVLAILVSIPGIGPVLAAGIMSEIGDISRFQKQESLGKMAGFKWKRNQSGKKESEDKAAVLSGNKKLRYYLVEAANWVRIHDPVFEAYYRKKYAESKTHAHKRALILTARKLVRVIFYLLKENKLYKPDVGIS

SEQ ID NO: 145494 - protein, 385 aa, unidentified
MTFTTTVSSIIPGQFDIFAGLDVDKKSMATTFIDHGTLFKSLRLPYSSTQLLNYVDKHFPGKRIAFVYEAGPTGFGLHDDLVAQKRTCLVVASSMVASAPGNRVKTNRLDSKKLSVQLRGGELRGIHVPGRSYRELRHLVQLRDTQTRQLRATKCRIKALLLYEGIEFPDPQGNWNAAAIAQLRQLPCPSEVRFKLEHLIGTLYFHFNSAALVQKRIRQFCQNDAELRQSISLLSSLPGVGWITAAHAVARFGDWREIKNIRQLGGFLGLVSSEHSTGEKANRGPITRVGDSRLRNKIIQCAWVAIKKDPELRAFYRSVFARQPKKVAARKAIVAVARKLTMRMYVVLKEQRPYIIRPEITTAPLTAEETVSPRERLDASQNEQL

SEQ ID NO: 145495 - protein, 337 aa, unidentified
MNIVFLGIDLAKNFFQLCGLNQAGKPVYTKRTGRKELLQTLANIPACLIGIEASTGAFYWQREFEKLGHKVKVISPQYVKPFVRGQKNDGNDAQAIAVALMQPTMQFVPPKSPEQQDIQALHRARQRIVNHRTATVCQIRGLLLDRGIPIGSAVSRARRAIPLILEDAENGLSSRMRRTIAELYDLFNDPGRRIHFFDKEIETVFRQSEACQRIAKVKGIGPETATAVVAIGKGTEFKNGRHFAAWPGLVPRQHSSGDRQVLMNMTKKGDKHLRTLFIHGARAVVRVATNNNDGHMNQWVNRLKERRGFNKTTVAVANKNARIIWSMLRNDTGYQVV

SEQ ID NO: 145496 - protein, 412 aa, unidentified
MKDLLEISCGLDIHKEKIVACILTGPLGKPTHSEIREFTTLIPDMLALRDWIISENCHHIAMESTGIYWIPIYEILEDAFSGDITLLVVNARHMKNVPGKKTDMRDSEWISTLLRAGLLNASFIPEKRIREFRDLNRYRKSIIRDITSQKNRVEKFLQSSGFRLSSFISDIFGASGRNIILHLMEHGQIDKMSLDSYLKTKTRKRIDEILMSVNGTLSEHQKSFLKILMCHYDSMKEHLIEIETHLQEDMLPFALQIEQLNTIYGISTTASCAIIAEIGTDMKPFKTAEHICSWAGLCPGNNESAGKRKSTSITKGNPYIKSMLCEIAWVIAGKRNTYLSAWYWRIKQKKGAKKAIVALARKLLVIIYTMLKQGTNFDENCFEVRRKNCEQKQLSRYIRELEKHGYTVEAQV

SEQ ID NO: 145497 - protein, 355 aa, unidentified
MGTISLGVDLAKCIFSVCEMDGIGRVLRRREFRRDAFATYLAQLPAGTVVAMEACSGAHHWARRCREYGLVPRLIAAQFVRPFRKNPVAKNDPNDAEAIATAARQGNMRFVPVKDIDQQARLSWHRVREGYKAEHLAIGNRLRGLLAEFGIVVPNRDAALHRVLGDLDAHPELPGEFKELLRSLSEHWVQVHAAMAACDARIERHARQDSRCARLRAIVGVGPLTADAMVASIGNAREFKNGRQLAAWLGLVPTQHSSGGHARLGAISCRGDGYLRTLLIQGARSSLERAKRVGLDKATPEQVWIQSLACRMPFGKVIVAIANKHARQLWAMLAHDLDYDPTASLNRTMQQRTAA

SEQ ID NO: 145498 - protein, 451 aa, unidentified
MSKVKPLVIDDEEHERVHDRVAAVDVAKDAGVVCTRTPHRSRPGARQSAIWTVKARMGAIRALGRQLKNDGIEMVTLESTSDYWRIWFFVLEACGLAVQLVNASQAKSLPGRPKTDKLDAQWLARLTEMGLLRASFVPPKAIRDLRDYTRARARLVQERTRCWQRLEKLLESALVKLSSVASKLTTVSAQDMIKAMIAGQRDPKVLAALARTGMKAKHDELVEALDGMFDDHHGELAALLLDQIAVLDGKISQLNARIEQMVAAIPAAWGINADGTTGPGAGTGPDAAVLPVAARLAEIPGVSPMLARAIIAETGLDMARFPTAGHLVSWAGLCPSARQSGTRTRAGKKGQGNGYLRASLGQAAIGAARTATFLGERYHRIARRRGKAKAQVAVARSILVIIWHLLSNPEARYTDLGPGYYQARLDIGRKLRNHIRQIQALGFDVTIAKTD

SEQ ID NO: 145499 - protein, 341 aa, unidentified
MKKFIRIAVDLGKRYFQVHCLESEGGLSISRKLKRSKMLEFFSQIERCRIGMEACGSAHYWARELVAMGYEVVLIPPAYIKPYVKRGKNDAVDAAAICEAMSRPDMRFVPIKSADQQAVLMLHKTREMFVKQRTMSVNALRGHLAEFGIVVAKGIGRIDELLALAQSDAALPPVAKSAVAGLAQHLESLDQSIEAVEDEIARAHGQNPTSRLLDEVPGIGPLIASVIAASVPDPGVFKSGRDFAAWLGLTPRQNSSGGTEKLGAITKQGNRYIRKMLVTGSTSVLRVAGKRKGALADWINALRTRKPERVVAVALANKLARTCWAIMTTGESFRVDTYMKA

SEQ ID NO: 145500 - protein, 367 aa, unidentified
MKKVSTVAKKLSRNFSQPTRTIGLDLGDRNSWYCVLDEAGRIQLEQRVRTTAKALQEVFGAMPRSRVALEIGTHSPWISRLLKQWGHEVIVANARKVRLIGESRKKDDRLDAQTLARLARIDPGFLYPVKHRSAQAQADLMMIRARAGLVRARTGLVNTARGLAKSYGERLRGCNVRNMNPEKAEALSPELQRALEPLLASIEELSERILEYNDRIEALAETSYPQVALLKQIKGVGTLIALTFLLTLEDPHRFGKSRDVGGYLGLQPGRRNSGESEPQMHISKEGDPYLRTLLVQGAQHILGPFGIDCDLRRWGLKLAERGGRNAKKRAIVATARKLAVLLHHLWVSGEVYEPLHNSKPTTMAAAA

SEQ ID NO: 145501 - protein, 345 aa, unidentified
MELHTIGIDLGKTVFHLVGLNLRGEVVVRKKCSRKQLLQFTANLKVELIGMEACGGAHFLGRALREQGHEVRLIPAQYVKPYVKTNKSDYIDAEAIAEAVGRPRMRFVPIKTDDQLDLQSLHRVRERWVMRRTAVINQVRGLLLERGITLRKGRCHVDAALPGILEDADAKLSGALRVLLAQLKLELDHLEMRIDQADAVIKTTAGENEACQRLVAIPGIGPVTATAVIAAIGNGAAFHKGREFAAWLGVVPGEHTTGGKQKLLGISKRGNSYLRKLFVHGARAVLQQSAKQSSGLNAWLAQLTARTHRNVAAVALANKLARMAWAVLARNEPYRPPMLADAATT

SEQ ID NO: 145502 - protein, 426 aa, unidentified
MNEYNSIYKLKAVNKNCAGIDVHKEFVCVTTLCGSEDNILMDYHKFRTTKAELHKLKELLLNQNIKVVGIESTGKYWYPVYNALHEVINLNVYNARHIKNIPGKKTDKADSEWIARTTRFSELRPSFIPCERIRKTRSLSRIRKDFLQKRSGVRQLIHGYLEQSSIKIGSVLSDVFGVSGRNLLELLVRYKNIHPKAVAECLHGSLQNKLDEVLLAMDGYMDDDYRYAFKLLLGMEQRISEAIKDTEAKLKSMLITNESEQKTLARLTTIPGVSNLSAMLILAEVGFDLNSFPDEDHFSSWAGLAPGKHESAGKNKTGKIQVRKSHFRTLLVELALSASRTKGTYCSVKYRILRARSGPQKATISIAHHLAKAIYMIIKHSQEYKELGGDHFSKVNANSTKKRIEKMIDQVGVDVFKEYLTENHLI

SEQ ID NO: 145503 - protein, 343 aa, unidentified
MAQNMQTYVGLDTHKKFVFGCVKNKDGNILFEQKFKNEPHSIDTFLLNVDKDSKIALESSSCWQYIFDYLVDQGYNVFLSNPAKTRLIGESKKKTDVEDARKLADLLRMNMLPLSYAAPLHIRMQRQITRHRASLVSMRTQTKNKIHAILRRHGITTELNDCFTQKGLEYLESIDLPMCDRFELDQYIGILRHYSKKIQDTQERIEEIAADDPYAKIVMTHVGMSHYSSLMVVAEIADIRRFCSCKKLVSFAGLNPSVSQSGEKCYLGNISKQGSKHLRWILIQCANIAAQKDKKLKSYYMKKKLGKGHNKAIVAVARKMLINIYVMLKHNITYDHLRANKAS

SEQ ID NO: 145504 - protein, 397 aa, unidentified
MIAVGIDISKAKSTVAVIDSDGTVLASPFTMAHTQPEMEAFVSYLKGLGEPTTILMEYTGHYHYPVLKKLQDEGFPVCIVNPYQMKKYGDVEIHKAKTDKKDALRIAAYALEKSYKLVPYSSMEQKYEDLKFLSRQYSQRITYVAKLKVQLIALLDQTMPGITRILPLNSRNPEKCALLLFIKRFKSFDEIQRIGKARFLASYDVLAKKASERSASSKGLSIYELAVDSITTRGEDPYIWLSQNQCVDLLSTTQNAADEIISQMRNIAETIPEYKVLRAMHGVGDRLGPIILAEIGDVHRFHSGKALNSYAGTDAPPYQSGQFESRNRHISKRGSSALRKACYEVMQALKLIKPQDDPVYLFMLKKEQEGKPFNVAKMAGVNKFLRIYYARAMELYK

SEQ ID NO: 145505 - protein, 431 aa, unidentified
MQLKQRARKLALVRGEPTVVVGIDIAKRKHWAWVVDGRTEVPVGSPFHFQNSREGFDRLLGKIARAKEKAGATRVVVGMEPTGHYWKPLAWYLQQAGFTVVIVNPAHVKASKELDDNSPTKNDRKDAWLNAQLVLQGRFSVPYLPDGVYAELRILTQARQQHRRKLNAALNQLQALLDEYFPEYTEVFADPLGQASLYVLQYRPFPQDVLAVPVTQLAAELRAASNRRVGLRRAQDLQEAARRSIGVPYGLDAARLQLRQILQEVIFWKERLAETEAAMAEALEKTGLAQYLLSVPGVGVVTAAAFLGEVGDLRRYADWRQLRKLAGYNLTENTSGQRDRSRTPISKRGRPGLRHVLYQMAMTAAAKNREFRALYKHFRTRQQNPLKGKQALVALACKLLRVLFTLVRKQCSYDPARALGAWRAEQLGLAA

SEQ ID NO: 145506 - protein, 343 aa, unidentified
MGVFAALDVSQEETAICVVSQDGAILAEAKVATCPDAIAGWLGGWSNDLERVGMETGPLAVWLWNALSVFGLPIICLDARHANGVLKMMPNKTDRHDARGLAQIVRTGWFKPVRIKSHGAYVNRAMLTARETLVGMRVRLENEIRGLLKTFGVMFGKRVGGFKRRADEIIARDLAVAPELVPIFEALMQARRDILTRIAALDGRIRAIARQHATVRLLMTAPGVGAITALAVVATFDDATRFRRSSSAGAYLGLTPRRYESGEINRNGRVSKRGDRFTRKCLFEAANAIICRSLGGPRLRSWAKAIAERTGPRKAKVALARKLAVILHAMWRTNMPFEEAASA

SEQ ID NO: 145507 - protein, 343 aa, unidentified
MQTVSTIGLDIAKSVFQVHGVDANGLVVVRRQLKRRYVLAFFEKLAPCLVGIEACASSHYWSRQLQALGHSVRLMPPAYVKPYVKRQKNDMADAEAICEAVTRANMRFVPTKTPEQQSGLVLHRTRHLFIRQQTSLINAIRGHLAEFGVTAPVGRKGIEELLRVIADPSDKRVPDVVRACLAALGSQLLSLKKQILDFDRMIMAWHRSNQTSKRLNCIPGVGPLLATALVASVADPKAFRSGRNFSAWIGLVPKQHSSGGRARLGSISKQGDRYLRGLFVAGALAVIRYAKLHGTKYRPWVAALLARRPTKVAAIALANKLARMAWAMMARGERYNYPAALRV

SEQ ID NO: 145508 - protein, 314 aa, unidentified
MAMPASRPEIGIDVAKDDLVIHLQDLNQTVTIDNTPQAIRQWLATLPKGCDIAIEATSTYHMDITERAHAKGHRVYVVDGYRLSNYRKGVGGRAKTDRADAQLLARYLHNEKDELRPWSPPPKAYRVLQSLLRRRAALVKARTALRQSLSGEPELKAPLRALIAEMDRIDSLIQKRLKSAVSAAGLQTQVQRCDAIDGVGEITATALVMAFLRGDFKNSDAFVAFLGLDVRVRDSGKLTGKRKLTKQGDTEVRRLLHCAAMSASRHPVWRAFYQRYRDRGLHTTQALVILARKIARTAFALMKQQQEYCPAKLF

SEQ ID NO: 145509 - protein, 351 aa, unidentified
MLIIGCDYHPGVQQIAFMDTETGEFGERRLEHGGGEAEKFYRDLQRRGISVRVGMEATGHARWFERLLEELHFELWIGDPLEIRARRVRKQKTDRHDAQLLLKLLLEDRFPRIWVASWENRDLRQLLWHRHRLVQMRTRIMNQLQAVALNEGVRQKKRLWGQAGRTQLESFVLAPWASRRRHELLELLDRLNPSIRELNAAVEQEATRRPEVRRLMTHPGVGSLTALAFVLIVGTPQRFACGKQIASYVGLVPTEESSGGRRRLGHISKQGNSLLRFLLVEAAQATVRSDPDWRRKFMHLAMRRERGIAKVAMARKLAVRLYWMWRKEWDYEQVKRFGSHAGQPGNPLGVQ

SEQ ID NO: 145510 - protein, 408 aa, unidentified
MTVVGIDVSKGKSMVAAMKPGGELVAAPYEVRHSDIELSHLALDVLCMEPDTRVVMEATGRYHEPVAALLHSEGIFVSILNPLLIKQSGAGSLRKVKSDPKDALKIAKYGLDNWSTLREYTPMEAIRQQLKLCARQCDLYNKNIVMLTNNLISLSDKTFPRVNELFSSPEKADGHLKWVDFYRSFWHCDCINRMSPDAFEERYKKWCKRKGYHFSTDAADALYAASCGSYTTLPRDNNAKLLVTVAADQLIALRENQSKLEAEMLNLCKQLPEYETVMAMYGVGKSTGPHLMAELGDVRRFPHRSSIVAFAGVDPGVVGSGKMQLSSVTTSKRGSPQLRKALFQVVSTYVKCKPENEAVYQFYAKKRDEGKPFFVCTTAAANKFLRIYYARVKEYLNAAESATQVEEG

SEQ ID NO: 145511 - protein, 451 aa, unidentified
MAKRKEKQERRSVVLEPDAAGIDIGAEEIYVAVPPDRDEESTRRFSSFTCDLHALADWLGRCRIQSVAMESTGVYWIPLFQILEERGFKVYLVNAHYLKSVPGRKSDVSDCQWIQYLHSVGLLRASFRPPEAICALRTLWRHRGSLLEMAAEHILHMQKALSQMNLQLHHVLSDITGTSGQAILDAILSGQRDPVALAQLCHRRVQSPRDKVAQALVGDYRPEHLFTLKLSLEGYRYYQKLILELDQETARLMQALPSATEDPMPPRTKATAYHRQGNDPQFDLRRELYRIAGVDLTDIPGVSAATAQVILTEIGTDVSRFRHASAFASWLGLCPEKRISGGKVLSCKTRQVKHRAATALRMGANSLCRAKGYFGEFFRRMRARLGTAQAITATAHKIARILYHVLSTKEPYAESVFHRCDEQAQRRAEIRLRKQAARLGFQLLPIPATRQ

SEQ ID NO: 145512 - protein, 372 aa, unidentified
MEVAAKYYVGLDVHKDTIAIAYAEAGSREDPRFLGTTTHRVGSITKALSKLGEPEHFAVCHEAGPCGYGLVRELRKRGFSCVVIAPSRVARKPADRIKTDRRDALLLARLYRAGELTAIAIPEPDDEALRDLVRAREDAVHDQRQVRQRLRAFLLRQGRVYERKKAWGPAHELFLSRIMFENPAHHIVFSEYRMAVKTAAERVARAEEALRGQAESWRWTPVVRALMALRGVDFIAAITIVAEIGDLRRFPHPRELMGYLGLVPSEYSSGDSTQRGQLTKTGNTRVRRILVEAAWNYRFPARLGESITPRLEGLPQPIVDIGWKAQLRLCTRYRRLRARGLHQNKTCAAIARELAGFVWDIGRQVSPANALH

SEQ ID NO: 145513 - protein, 370 aa, unidentified
MKKRITFVGLDTHKNSIEVALADEGANSEVRLYGSIGGDLDSLDKMIRKLRIPGAELRFVYEAGPCGYEIYRHLRAQGLHCDVVAPSMVPRRSGDRIKNDRRDACNLARLYRAGELTAVYVPHEDDEAMRDLVRGRQDAINAQRKARQQLGGFLLRHGVRYPGKCLWSLAHGRWLAGIKMPHPAQQIMMQEYIHTVEECTQRVIRLNEQIQQLLPDWRMHPLVTALQALRGVAPVVAATVVVEIGPMGRFKNPRQLMAYLGLVPSERSSGGSVRRGAITKTGNGHARRALIEAAHSYRHPARISRTILKRQETLTEPVRQIAWKAQLRLCARFRRLIARGKSRNRVVAAVARELSGFMWAIAKQVPVPQG

SEQ ID NO: 145514 - protein, 330 aa, unidentified
MQNNHVIGIDVSKFTLDCVCHHNGAYLQIENSRKGYLLLLKWAKKQCGVLPEQILFCYEHTGIYSLVLSVFLTEQKLSFAVESALAIKRSLGLVRGKSDKADARQIARYAYLHREELKLYQLPSKNILKMKTLLALRDRMVQQRAGYLASKKEYETFFVKKENKELFSIHQSMIAALNKQILKLEEQLEQIILSDEKLSECYTLMKSIRGVGKIISCYMLVHTQAFTVFDNWRQFASYCGIAPYPNQSGLFKGKTSVNHLANKKMKSLFHLIAMGSIQSNPEMKEYYQRRITDGKSKMSSLNMVRNKILSRIFAVVKRRTPYKHLTLQAA

SEQ ID NO: 145515 - protein, 365 aa, unidentified
MKKISTVARKQSRNFSEQRLTIGLDLGDRSSWYCVLDEHGEVVLEQKLGTTPKALKAGFGGMPRSRIALETGMHSPWVSRLLSELGHEVIVAHARNVRLIGESRKKDDRLDAQTLARLARIDPQLLSPVKHRSARAQADLTVIRARAGLVRARTALVNTARGLAKSYGERLRGCNVRNMNPEKAQELSPELQRALEPLLAGIESLSERIREYNEGIEKLAQESYPQVARLKQVKGVGTLIALTFLLTLEDAHRFRKSRDVGCYLGLQPGRRNSGQSEPQMHISKVGDPYLRTLLVQGAHHILGPFGVDSDLRRWGLKLAERGGKSGKKRAIIAVARKLAVLLHRLWVSGEVYEPLRNPRAMPAAA

SEQ ID NO: 145516 - protein, 367 aa, unidentified
MKKVSTAAAKQSKNFSQQKLTIGLDLGDRNSWYCVVDEAGQIQLEQRVRTTAKALQEVFGTMPRSRIALEIGTHSPWISRLLSEMGHEVIVANARKVRLIGESRKKDDRLDAQTLARLARIDPELLYPVQHRSAQAQADLMMIRARAGLVRARTGLVNTARGLAKSYGERLRGCNVRNMNPEKAESLSPELQTTLEPLLNAIESLSERIVEYNERIENLAQESYPQVALLKQIKGVGTLIALTFLLTLEDPHRFRKSRDVGCYLGLQPGRRNSGQSQPQLHISKEGDPYLRTLLVQGAQHILGPFGIDCDLRRWGLKLAERGGRNGKKRAIVATARKLAVLLHHLWVSGEVYEPLHNSRRTTVAAAA

SEQ ID NO: 145517 - protein, 354 aa, unidentified
MKMVAQIGKGSYVGKQVFVGIDVHKESWHLTVRSSGEEIFNGRIPGQYQSLKRILDRYSGSRIKVAYEAGPFGFWLLDRLTQDGVETIVVPPSLIPVESGNKVKTDKRDSRKLATLLESNMLKHVHVLTPEEREHRDLLRTRRQIVEHRNDVARQIKSKLMFYGITSPFTSATRWSLQYVSWLKTITFETSCLKEAFELLIQLYEHLTRQIARINRTVVLLCRDKRYRGRINLLCTAPGIGRLTAIELLVELQDMTRFKSAEELASYIGLTPSEYSTGERTRQGRITRCGNKRVRTYLVESTWVLITKDAQLRAKYLRLKSRRGGKRAVIAIARTFLIRLRRMLLDNVPYRISA

SEQ ID NO: 145518 - protein, 418 aa, unidentified
MLKIVYPICCGIDVHKKFVVATVGITNKSGVTNYQTKRFLTFTENLNHLLEWLKSHSCINVCMESTGKYWIPVFNILENYCDVIVANPKYVRAIRGKKTDVKDSIWLCDLHKHGLVYGSFIPPAEIRQIRDLMRYRSKLISFKSSEKNRIQNSLTVSNIMLSNIVSDTFGASSMKIINHLLQDPDDKEFDVEPLLHKNMKTDPETVAKAINGNLTDPQAEKMRICFNHLDDIKTHISVLESVVLDLAQPYISEINLIMSMPGIKNIFTAIAIIGEIGTDMSAFHSSKHLCSWAGLTPQNNESAGKKKSVRISRAGVYIKPLLVQCANAVIKDKEFEYFKIRYQQIRKRRGHKKAIIAIAHMLLNCIYYMLERNETFNYELYRVDSRPKNSYIPQLNEEMAVRYLQTLGYQIPDVVSLT

SEQ ID NO: 145519 - protein, 348 aa, unidentified
MRTHFNPKEAEMRYCGIDLHSNNSVVVISDEQDRMLCERRLPNDLAQIVAVLAPYREELVGVVVESTYNGYFLVDGLMDAGYRVHLAHPSAIKKDEGLKYSGDFADAAYLAHLLRLGLLAEGYIYPREERAARDLARKRMQLVRCCTAQILSIENIVARQTGGRMKSLAIKQLTAKQVKALGFMPDVTLAVECNRAVSQVLQERIEMLERRLQERVKLRPEYRLLKTVPGIGEVLATTIMLETGTVARFARVGNFSSYCRCVNSLRESNNKKKGEGNAKNGNKYLSWAFVEAANFSLRYCPQAKSFYERKRRKTNRIVALKAVAHKLARACYHMLREQKPFEVERCFV

SEQ ID NO: 145520 - protein, 451 aa, unidentified
MTKSKRRHPERDFTPTHPHAAAIDIGSRMHVAAVPPDRDTEPVRAFGTCTGDLQQLADWFERCGVRTVAMESTGVYWIPAYELLEQRGFEVVLVNARDAKHVPGRKTDVSDAQWLRRLHEYGLLRASFRPKGELAALRAYLRQRERLLDYSASHIQHMQKALMQMNVQLHHVVTDVTGETGMRIVRAVVAGERDPAVLATHRDRRCHASEEEIAAALAGNWREEHVFALGQALELYDAYHTKVVECDLRIEIVLRRLRDAAAKPAGRLPPARHRDKTANAPAFDARAALHAVLGVDLTQIHGLGPSLALKLIGECGTDLSAWPNAKHFTSWLCLAPANKISGGKVLSTRTRRSGSRAAALLRLAAVTVGRTQTALGAFYRRLSARAGKAKAVTATARKIATLFYNTLRHGIDYADPGASYYEDRYRARVLANLRRRAKSLGYTLHEMPAPA

SEQ ID NO: 145521 - protein, 400 aa, unidentified
MISIGIDAAKGKSTICILKPYGEVVVPPRDISHTASELDSLIFLIKSLGEPVKAVMESTGTYHYPILHALVDSGIFAAVENPLVIKKYISSNIRKGKTDKLDAIKLAQYGLEKWLILKRYEPQEVTYSELKLLGRQYTNYIEMRVAALNQFSDLLDQTMPGIDRLLKSNSANKAKCKACDFAEAFWHFDLITKRSEKSFIATYNAWAKKKGYRPSESKAKEIYALAKDGTPTLSSSMPSTKMLILESIRLLNTANLTLRTILSQMHLLASELPEYSIVSAMKGVGSQLSVLLIAEIGDVRRFHNGSALVAYAGLDAPPFQSGTFDGTKRHISKRGSSQLRKLCFEVMMALKLKPPKEDAAVYDFMLKKEAEGKPKMVAKVAAMNKFLRIYYARVLESYSA

SEQ ID NO: 145522 - protein, 338 aa, unidentified
MKFYAGIDLHSNNNYIGAIDEKGRVVFQKKNPNDLETILKSLEPFKKHIKGTVVESTFNWYWLVDGLMEADYKVHLANTTAIQQYSGLKHSDDKSDALWLAEMLRLKILPEGYIYPKETRGIRDLLRRRMQLVQQRTAMLLSMKGMINNWTSIRVSRTNLKKLGREDISNIFSGSYEILSAQSLGEVIGVLNDQIKKIEKAVLQKVNLKKEFKRLLTVCGIGEILGTTIMLETGDIKRFPEVGDYSSYCRCVSSQKLTNSKKKGSGNKKNGNRYLAWAYVEAAHYMQRFSSKAKSWFQRKAAKRGKIVATKALSNKIARACYYIMKNRTVYNPKKMFG

SEQ ID NO: 145523 - protein, 474 aa, unidentified
MPVCFIHEAIRENMMKTNKQSKQIKNKRISKHLEQVNLFAAGIDIGSQSHYVSVPEELATESVREFSCFTGDLNRMADWLVEIGIQTVAMESTGIYWIPVYEILEERGLVVLLVNSRHIKNVPGRKTDVLDCQWIQQLHTYGLLEGAFRPEEETVALRTYMRQRETLTQQSSDQIRRMQKALRQMNLLLDNVVSDIDGVTGMKIIRAILEGEQDPVILAKYRDGRCKKDEKMIAASLEGHYREEHLFSLKQSVELYDIYQTKITDCDKAIQAQLDKMDNKGDKKDLPPSKKSKSKNTPKFDVRGDLYQMTGVDLTRIDGLNESSVLKILSETGSDISSWPTEKHFCSWLGLSPGNKVTGGKILSGKTKPSANRAAAAFRLAAFGLLNSKSALGAYCRRQRTRLGAPKAITATAHKLARTFYSMLKNGTEYVDKGQDYYEKQYQERIINNLKKRATEMGFELIAKDDSMLEISKA

SEQ ID NO: 145524 - protein, 354 aa, unidentified
MLIIGCDYHPAFQQIAFVDTATGDCGERRLEHREEAEKFYRGLAAQGMEVRVGMEASGQARWFERLLAELNVELWIGDATEIARKRERKQKTDRQDAQHILHLLRKDDFPQIWVPSWENRDLRQLLWHRHRMVQARTRMMNQLQAVALNEGLRCKKRLWRESGRKQLEAFRLAPWASRRREDLLKLLDGLNPTIAELTQAIEQEVEKCPAAQRLRTHPGVGPLTALAFVLIIGNADRFQCGKQIASYLGLVPLEDSSGNRRRLGHITKQGNALLRFLLVEAAQVTARSLPEWRSHYVHLTMRRGRKIAKVAMARKLAVRLYWMMRKEWDYEQLKKFGSHAGQPGHRDGVKSNIE

SEQ ID NO: 145525 - protein, 355 aa, unidentified
MDSTKYIGMDVHKESISIAVRNAAGKVVMECVIETKASMILEFVDGLRGDVHVTFEEGTWAAWLYDLLKSHVTRLVVCDPRRNALLQEGNQNDRVDARKLAELLQNNQLRPVYHGDHGLRTLKELVRSYLTITKDLSRTMTRVKAIYRSWAIPCTGKQVYTPRHRTEWLGKIQEPGVRRRAEFYYQQLDALRSLRQEVRRDLLAESKKQKAWKRLCEIPSIGPIRAAVLLGILQTPHRFRTKRQLWTYSGLGIETHSSADHQVFKGQLERKKKPVEVRGLNENGNHDLKNLFKGAAVIASTKPGPFEEFYAALVTKGMRPEMARLTLARKIATIVLLVWKKGVCFDAQHLKPQTA

SEQ ID NO: 145526 - protein, 351 aa, unidentified
MLLIGCDYHPSVQQIAFVDTETGECGEQRLSHSDGEAEKFYRDQKLKGGMVRVGMEATGHARWFERLLAELNFELWIGDPAQIRTQRVRKQKTDRQDAQLLRRLLTEERFPRVWVPSPENRDLRQLLWHRHRLVQMRTRIMNQLQAVAMNEGIRRKSGLWSKSGRTQLESLLLAPWATRRRQDLLELVDRLDASIKPLSSAIEQEAKQRPEALRLMTHPGVGPITALGFVLIIGSPERFRCGKQVGSYVGLIPCEDSSAGYQRLGHISKQGNALLRFLLVEAAQAAVRCNAEWRRQFLHLAMRRERRIAKVALARKLAVHLYWMWRKGWDYQKTVEFGSHAGQPVHGHGVK

SEQ ID NO: 145527 - protein, 313 aa, unidentified
MSQYTRFVGIDVSKDTLDVHMLPDGQSWQVGNDDEGVAALAQRVEPGALVVMEATNVYWRLVASTLASAGFAVAVVNPRQVRDFAKATGQLAKTDATDAQVIALFAQRIEPPVRALASEQCQVAAELLSRRAQLMGMYVAEKNRLGTARAKRVRADINTTIGFLQKRLDALDKELDQWLKSTPIDQTRFDLLKSFTGIGDKSAKSLLIALPELGRINNKQISALAGLAPFASDSGKKRGARHIRGGRSAARAALYMPAITAMRCNPVIRAMYERLISAGKNHYVAIKACMRKILIILNAMVRSNTPWRCPQTT

SEQ ID NO: 145528 - protein, 406 aa, unidentified
MIHPKMLYTYVGVDSHKDTHTAVFLDCFFEKLGELQFENLPSKFEEFFDEALKLEAEGTTLFFGLEDTSAYGRNLTAFILEKGYSVKHVNAFLVSRERKNRNITVKSDAVDAECAARVLLSKLDDLPDAKPDDLHWMLRTLVVRRDFLVKNNGALKNCLHNLLTQHYPNYRSFFENIDCNASLAFFLRFPSPAALEGTSLEELAAILAEPSGGKFGEEKAQTIMDSIQDTAADRQEIRDMTVRSTVRQLRFNLEELENMEEALAQILALFNCTLTSMKGLDTISAAQLLSCIGDVRKFPTPAKLARYAGIAPATFSSGKKETQYASKRGNRELNSIFYGLSVRLTMTAGSKKRVVNPFFFDYYHKKLADGKTKAQALKCVQRRLVNIVWSMLTNGEEYVNPPTYNV

SEQ ID NO: 145529 - protein, 340 aa, unidentified
MGTATAYQLFVGVDIAATSFAAVWTTDPACFPRALTFEQSASGFSEFHQRLAATGVAPDQTLIVCEATGSYWVTFAVSLHQAGYHVSVINPAQLLQFARSLPRRSKTDALDAQVATRFALERQPPCWTPPPQIYHELHQRLVTRDGLLAMRQHAFNQRHALKQWPVVVASVIEQLDAVLADLDRRIATLEQEIDQVLREGAWAESAILLQSIVGIGLITSGWLLVGTLNFTVAASAEQAAAYVGLAPLAHESGTSVRGRARIGHGGHARLRTALYMATLSAAQHNPIIHRFYHRLRAAGKVTKVARCAAARKLLHIAWAVVTKRQPFVSTYGQVAEQATV

SEQ ID NO: 145530 - protein, 404 aa, unidentified
MVFLGVDWAEEHHDAWLENEQGEMLGKARIANDVGGVRQLHELVAEHAHDPSQVVVGIETDRGLLVTALVGAGYQIYAINPLSVSRYRDRHGTAGAKSDRADAKLLADLVRTDRHNHRRLAGDSELSEAVKVLAREHQDLVWTRKRFINRLRSTLREFYPAALEAFGTDLGALDALAVLERAPTPWQGRQLSHAKIVSMLRKAGRQRNLEPKAGEIQRALRSEQLQAPAQLQAAMAIVVSSCVAMIKSLNFQLEQVATEMTASFEGHPDAEIYLSLPGLGVVLSARVLGEFGDDRARFADAKARKAYAGTAPVTQASGTKKIVLARFARNRRLADACYCWAFSSLTRSPGANRYYRTLRTRGKTHPQALRGLANRLVGILHACLAAGQTYSESLAWPQPYEIAA

SEQ ID NO: 145531 - protein, 342 aa, unidentified
MRLYTGIDLHSSNSYLAIIDETGKRVFKRKLPNDPEQILSALSPYKDAITGIVIESTYNWYWLVDALMAEGYKVHLANPSEIKQYTGLKYSDDQHDAFWLAEMLRLGILPEGYIYPKEDRPIRDLLRKRSHLVKLRTSLIISLQNIICRNNGFRLKTNDVKALNTDRVAPFLEQNEDLALAGKISKESIDFLTLKIKSVERVIEERMELREPYRNLLTLQGVGKTLGLTIMLETGPISRFAQVGNYCSYCRKVSTKWISNDKKKGKGNKKSGNKYLAWAFSEAAEIARRYYPEARAYYQRKMQKTNAMIAHQALAHKLARAAYYIMRDGVPFMPEKIFTQSS

SEQ ID NO: 145532 - protein, 400 aa, unidentified
MRFIGLDIGRDFAHVAVVEGSGTARRLPRLAMGDEFRSFAATLGPGDVVALEASTNTWALADLLGRHAGRVVVSNPLRTRAIASAKRKTDDIDAATLAELLAADYLPPVWQPDEATRRLRRLVSHRTGLVHDRTAVRNRVAAVLSRHLVRAPMTDVFGLRGRAWLAALELPPDERLTLDAAVRIDAVLCEQIAAAERAIAGAVVDDPRARRLLTIPGIGLVIAASILAVVGDIGRFERPAKLVSYLGLDPRVRQSGDRPAARGHISRAGQAHARGLLCEAAHSAVRSPGPLAGFHARLKARRGGGVAIVATARKLAVLVWHLLTKDEDCRFAPVERTAFKHRALDRLAGRARTRPSHRGATGSSHDQGRARLRGGHDPHDPALRQAIDRVHPDTTPPSGV

SEQ ID NO: 145533 - protein, 346 aa, unidentified
MTIVEARAITGGVDTHADMHVAAALDPIGGLLGVQEFPATAGGYARLLGWLGGFGTVALVGIEGTGSYGAGLARHITAAGIQVVEVDRSDRQDRRRQGKSDPLDAVSAARAAQSGRARGAPKGRDGAVEAIRALMVAKRSATGERTRTINQARALILTGPDDLRARFATHTAAALVTATASLRPRPGDTAGYATRVALRELGRRAVFLDGQLERLNELIAPLVTARAPGLLALYGIGPNTAALLLIAAGDHPGRLRSEAAWAHLCAAAPIPASSGKVTRHRLNPGGDRQANHALWRIVFTRMGSDAATRAYVERRTKEGKSKAEIIRCLKRYVARQVYPHLRPDAG

SEQ ID NO: 145534 - protein, 413 aa, unidentified
MSFKIFRKNCCGLDVHKTWIYACIGITDTNGRTEYKQARFSSFSNGLKELARWLAKYSCFEVCMESTGKYWIPVFNILEKTCFVTLAHPKYTKPQKGNKTDRKDAKWICDLFMCDMVKPSFIPSPEIRQLRDLIRYRTKLTNMLSGEKNRAQNCLTVSNLKLDDVFSDVFGKSSRSITNYMLDHPGETFDVAPFVDERCKTPIPEIQAAVDGAISPEQAVKLRRCLTHIDELEAHRREIEQEILLLAEPFSAVLDLLYTLPGLDKNPMTAIAILSEIGPDMSVFPSSKNLVSWAGCCPRNDQSNRKVKSTRISRAGSYLKPLLVQVANALIKSKKHPEFKERYHRIKSHRGHKKAIIAVCKMLLTAIWNMLSKLEPYNPQGFLEHRPVNGNKILTKSQALGLLKLRGYTITND

SEQ ID NO: 145535 - protein, 347 aa, unidentified
MRFYTKQHPFYCGIDLHARTMYVCILDQAGETLLHRNMPATPEALLKAIAPYREQIGLAAECMFTWYWLADCCAEHGISFVLGHALYMKAIHGGKAKNDRIDAHKIAVLLRGGMLPQAYVYPAEMRATRDLLRRRMHLARKRGELLAHVQNTNSQYNLPAIGKKIAYKANRDGIAERFADPAVQKSIEVDLALITYYDELLRDVELTIVKTAKHHDANTLYLLQTVPGIGTILSLVLLDEMQDIARFPRVQDFASYCRLVKCAKESAGKRSGTSGSKIGNAHLKWAFSEAAVLFLRDNPAGQTLLTRLEKKHSKGKALTILAHKLARAVYYMLKRQTAFDLDTFLRG

SEQ ID NO: 145536 - protein, 335 aa, unidentified
MDKFAVAGVEVSADVLVVALDNGQLRSSEFPNTAAGHQQLLRFVRKHSSQLRICLESTGLYGLDAALALHAQPGIEVMVANPRSVRHFAHAMMRRSKTDPLDAQLLAEYARRMPFQPWQPPSPAGRQLCALSRAIHQLTEINVMQKNQLHAAGATETTPPIVLRELERSLANHQRSIQRLTHEAFELIASDPQLQQHFQLLLSFPGIAETSALQLLGELVLLSPDFNVRQWVAYAGLDPRQYTSGKSVEKKVRISKVGNRRLRRALYMPVLVAVRHNPQFRAYYRHLLAQGKVKMVALVAAMRKLLHGIYGVFQSLQPFDADKLFALPITEKMAC

SEQ ID NO: 145537 - protein, 380 aa, unidentified
MLLLRTAPSLFECVGEGCLRPPQSREGPTALILDCGDLTKHPYFVGLDVHKQIIAYCVKKVDGQLVTEGTIKATRTALAEWVKSLPQPWVGGMEATMFSHWIYVALQPHAAELYMGHAARMKAISAGKKKSDKLDSRTIADLLRCNVFPKCFVIAPELGRLRQQLRFRQLVVKQQVAFMNKTAGLLMETGIEYERRRLHGKRYFSELMATTHWVNQELKPLLKFSRQQIESLAGMDKRLIRMLEKHPQLRARVAALRTIEGVGPILALSWALETGTPERFPSIKDAQSYCGLTSAFWESAGQQKRRPLSKQRNQHLQTVLIEVANLAPLYNEKLKALYQKEKAAGADSNQATLEVARKLVAYLLAVDRAFWRSAQLKRAA

SEQ ID NO: 145538 - protein, 343 aa, unidentified
MSEISTIGLDLAKNVFQVHAVDPLGGVVLRRQLRRGAVEKFFAQLAPCTVGMEACGSAHHWARVIGRYGHQVRLMPPAYVKPYVKRNKNDGRDAEAICEAVGRPTMRFVPVKSVEQQATLAVHGTRALLVRQRTMAANALRAALSEIGIVAAQGLKGLRELMATLEAPSGEIPEMMRGALLVLARHWQTLDADERALERQIAKAARADHEARRLMEVPGVGPIIASTVLAKVPDAKVFRSGRDFAAWIGLTGRDHGTGGKHRPGRISKQGDRILRALFISGASAHLRQQKARGVSDPWLRELLARRPYKVAMVAFAAKTARIIWAMLVKGEVYRDRASASAAA

SEQ ID NO: 145539 - protein, 399 aa, unidentified
MNRNRTVAGLDVHKDSIYLCIMGHDEAIIFEKTYGVLTPDLRQMCSDMIERGVTEAAMESTAVYWVPVWNELCNSMELKLVNPYFIKQLPGRKSDVKDAQWIAECLLKNLIKGSFVPEPIVQDMRKLNRRIFDLQEDTTYYSNKLDAALQRCGFRLSNYVAKITGMSYRKTVEAIASGVTDPNELIKCVHGRIINKHGRETMLAAMTGSFSATDITVIRQYWELLATYARQSEECQSQLTALCETHFPTEYRRLQTIPGVKERAATAIIAETGVDMKMFATAAALVGWCGLKPRNDVSNGRYKSRKITHGNKYLRQILIEIAWAASRTQNCFFSNFSYIQVTQKHKSKMKIQVAIARKILVAVWHMLSKEQDFIDLYLKRLEEQRLMEEKIRQLESKMA

SEQ ID NO: 145540 - protein, 339 aa, unidentified
MQATTVGLDLAKTIFHVHGVTEEGEVAFNRPLRRSQVLAFFDRLAPCLIGVEACASSHYWARELSKLGHTVRLMPPMYVKPYVKRGKSDAVDAEAICEAVTRPTMRFVEIKSEEQQALLSLHRARDFVVRQRTQLINMLRSLAAEFGIAIARGVARAVDFAKSVIEGGHAELPELAQDVLRVLSRQLIDLHNRLGWYEITMRIQARLSRQAQLLQTIPGVGPVTASAVAATIGSGRQFRSGREFAAWLGLTPRNHSSGGKERLGKITKMGDRYLRQLIVVGMTSRVRQVANHPDRADPWLADLLQRKPTRLATVAMANKTARIMWAVLTRNEPYRPHAV

SEQ ID NO: 145541 - protein, 418 aa, unidentified
MFRRDAYVYVGVDVHKSAHVGMMMDCFGDPMGKALKVANQITAFPEWLEAIHKRAQGKGVVFGLEDVHGLGRALATYLLGRGYIVKFANAYLTKKERDSVNKTDRNDALAVARITAKQYFTLPDADVDELQWALIQAVHYRRGLVEEQTRVKNRLHAFLTQAHPAYLTYFSEEFGKTALAFWERYPAASALAGVTVEELGQFLREVSHFALGYKQAEKILSACQGAEARGFQGERDYLIRSAVRELRHLEEQLSEGRKQLERLVNLTDYRLTDIPGIDVVMSAELIALVGEVTRFPKVDHFLAYAGIAPVVMGTGDHETRLRSQFGRRELMALFHRIASTQLVVHHKTGEPRNPEAKAYFDKCLGEQAKLPKEKQDRKVRKKALLSLMRAQARRFYTLMKRQKLAAEARRAQEGPGVA

SEQ ID NO: 145542 - protein, 438 aa, unidentified
MSNKVIFNLDELFISVGIDVGADFSWMSIALPNQQFVGKPYKILHNSIDSLTTAVSKIKEAEELYSLESRIFLESTGIYHYPLFCYLRDKGFNCSVINPIITKNSTNINIRKVHNDRFDSKKAALVGLKPDLKVSLMPSDLALNCRNLCREYYDLMDNRSAYVNKLQGELRIAFPQYLGIFSKVTINTSLTLLETYTSPSAFLKADKQEIIDIIKSTARFGLTYAQNKYNAIIQAATDANQFGYIIDSNIKRIRLYISFIRKYDEEINNILESLHELVDANEDADFVKQIHLIETFKGAGFLSAVSIMGEIGDFSAFSKPKQLFAYFGLDPAVKQSGKFEGTKVQMSKRGSAIARRVIHTLTLQSISISRNREAKNPVLREYYLKKCDSKPKLVAMGAVSHKVCNMIFAILRDNKPFKIIAPQEHIKQYNSAKCDIAA

SEQ ID NO: 145543 - protein, 342 aa, unidentified
MDRLSPVTRICKVGFTMENELHFIGIDVAKAKLDVDILRPDGRHRCKKFDNTLSGHEALVRWLRGHDVNRAHVCMESTSTYMEDAAAHLSDAGYTVSIINPALSKAFAQSEGLRSKTDKVDARMLAHFCREKRPPAWEAPHPTERALKALVLRHQALTEMQTQEKNRRETAPEVQLTSIDILLGCLSAELARIEKQIKDLTDNDPDMKRRRKLLNSIPGIGEKTAAVLLAYTGLKLKFGTGRQFAAYAGLTPVQHESGSSVMRASRMSKAGPVQLRKALYMPALSALYHTAWGKAFRKRLEGNGKRAKVIIGAMMRKLAQVAYGVLKSGKTFDASQHELLIA

SEQ ID NO: 145544 - protein, 415 aa, unidentified
MEDLGLRALYRRVAGIDVHRMLHVVTVLIEQADGSMQRQTREFGGFRRDCRALAAWLAELGVELVVLESTGIYWKSVHAHLENAGIAAWVVNAHMIKHVPGRKTDMADSEWLAVLARFGLVRASFIPPKDLRELRLVSRYRRKLGAMCASEINRLHKVLDDGGIKLGGVVSDINGVSARAMVSALIAGQPIEHMLGLAHGALKQKREDLGASLDGDLSARHLFVLGHIQAHIETLQRQIAQIDAYLLAAMQPYAWAHELLQTIPGIDALAAAMILIEIGDDMGRFGCAARLASWAALSPGNNESAGKRKSGRTRHGNSIIRFILCECANAARMTKSTLAAKYRSLMVRKSHKRAIVAVAHKMIRLIFLLLSRRQPYLDQNIDYAAMSAKKNAPRWIKQLKTIGRWPATKPAAAST

SEQ ID NO: 145545 - protein, 459 aa, unidentified
MKRGKRKEKSLPPQLAAVNLPAAGIDIGAPEHWVAVPPDSDTEPVRRFGACTADLEALADWLRQCGVTTVAMESTGVYWIPLFELLEARGFTVVLVDAREVQRAPGRPKSDVQDCQWRQRLHTYGLLAAAFRPPEQICVLRSYLRQRAMLVTYAGQHIQPMQKALTQMNRKLQHVVSDITSVTGRAILKALLSGARDPATLAQLRARNCQHSEAEIARALQGTWRAEHLFALQQAVELYECSHGQSAACDRQIEAHLQTFADHSGEKTLPPAPRTPKRRRNEPHFDARLPLCRVTGVGLSALAGINEPTALVLLSAIGTDLSRWPTEKHFAAWLGLCPQHKISGGKVLARKVRPGANRAATALRLAASCLHHSHSALGAFFRRLKARLGTPKAVVATAHKLARLVYRLLKHGEAYVAQGMAEYEEAYRERVVQNLVRKAKALGYQLLPTPHTTGSVTSA

SEQ ID NO: 145546 - protein, 364 aa, unidentified
MDNLTHMGLDVHKDTIAVAVLRPGTITCDERVIPNTPEAIRKLLSRHADPSLLRTCYEAGPTGYDTHRVITSLGIACDVIAPSLIPKRSGVRVKTDRADARNLARLHRAGELVAVRVPTPAEEAVRDLVRAREEIKADRRIARQRIRSFLLRYGKRYPKPTDRWSFRFEVWMRALRFEEPLSQATFEHLLGAYFVRDSQLAAIDRQIEELALLDPLAEPVARLRAFRGIDTLSAVTIASETCDFRRFGTAASYMAFTGLVPSEHSSGASTRHGGITKTGNQHIRRVLVEAAWAYRYAPAVRGKLKKRLEGQPPEVVAYSWAAQCRLSGTYRKLAAKKGANKAVVAVTRELSGFVWGAMTGNIGT

SEQ ID NO: 145547 - protein, 343 aa, unidentified
MQVTTVGLDLAKRIFQVHGVDAAGKVVIRRRLQRSEIAAFFADLPACLVGIEACATAHHWARLIGASGHQVRLIPPSYVKPYVRRSKTDAADAEAICEAVGRPSMRFVPVKSAYQQAALLHHRARDLLVRQRTMLINAIRGHLGEFGIIAPAGRRRVADLVNLLQGADDAEVPALAREALQSLFAELSALEIRIKVVEAVIMREHRSNAVSRRLTTIPGIGPITASALAGTIADPLAFKSGRELAAWIGLVPRQHSSGGKQKMGRVSKQGDRYLRRLLTVGATAVMRRLPGKTDGLSLWVRALLDRRPFRLVSLALANKMARIAWAIMVRPETYKASAMTAAA

SEQ ID NO: 145548 - protein, 338 aa, unidentified
MGQVVTIGLDLAKSVFQVHGVDAAGEVIVRRQIRRGQLLQFFAKQPQCLVGMEACASSHHWARQLLALGHEVKLMPAQYVKPYAKRGKNDAADAEAICEAVARPTMRFVAIKTPAQQSAMMLHRVRLVLNRQRTQLSNAIRAHLGEFGIVAPAGRLGLQHLLDVLADEAEERLPSEARTCLQMLASQLEVVKAQILDNDRRILADARSTELGRRLMTIPGVGPLLASALVATVADPSIFRCGRDLAAWIGLVPRQNSSGGKERLGSICKAGHRYLRQMLVVGAMAVIRYADPKRRPWLAQLLARRKAKVAAVALANKIARTAWAMMMTGERYREPLAA

SEQ ID NO: 145549 - protein, 421 aa, unidentified
MSKGRYRVQDCQAVDWTQLCERARGAQVVFAVDVAKEDFVAAVMLDSGELLERIKWRHPGQTRLVLDALVALQACAELAVVMESSGSYGDALRWQLHERGIAVYRVSSKHVHDSAEVYDGVPSVHDAKAADLIALLHVHGRSRRWVQLDEQRRVLNAQVQRLDQLKGRQQRQRNRLEALLSRHWPELSALIDLNSVTAAALIAAVGSPAYLCAFAHKGPAILRAASRGKLDAPRIEAILESARTTLGMPCLAEENAQLRALGNDLLAVHKELQQLINALQVQVAEDDTLQPMAAVIGAPSTAVLYAHLGAPSAYPSAQSYLKALGLNLKEHSSGKHQGRLTITKRGPPEVRYYLYFAALRLIAQEPLVARWFRAKSQRPGACKGKLIVELMRRLAKGLWHQGQGEVFAVDKLFAPPPSCGA

SEQ ID NO: 145550 - protein, 389 aa, unidentified
MKIYVGIDIAKLNHFAAAISSDGEIIIEPFKFTNDADGFQLLVSKLKSFDKNSIIIGLESTAHYGDNLVRYLVAEFYQVCVLNPIKTCQMRKNNIRKTKTDKVDTFVIAKTLMMQDDLRFVSFYDLDMMDLKALGRFRQKTIKQRTRLKIQLTTYVDQVFPEIQYFFKSGLHQNAVYALLKEAPSPKEIASMHMTHLANLLKVNSHGHFTKEQAKELRVLAQKSVGANDSAISIQITQTIQQIELLDSQLEKIEAEMTDIMKFNDSVIMTIPGIGYINGGMILGEIGDIHRFSNPNKLLAFAGLDPSVYQSGNFQAKTTRMSKRGSRVLRYALVNAAWNVVRNNATFKAYYDAKRAEGRSHYNALGHCAGKLVRVIWKMLTDEVEFNLE

SEQ ID NO: 145551 - protein, 424 aa, unidentified
MKNTIVAGIDVSKHFSDLCVLSANNSILKELHFTHDQSGLKQAADIMKEIEVQQKEKPVLIMESTSHCHRLPYYFFREQGFDVVVVNPLQSNAIKNISIRKVKTDKVDAYHIALLYQLQSYEATNQFIDILFDLRNLTRQYSDLVKTRTMYTNQLIACLDQAFPSFRKIFKDVTAVTALATLDMWPAPQAIISADRSKILEIIRQVSRSGASYAEKKTEGLFQAAAHDIEINIQADSNRVLIKSIVSIIRVFSENMKIVQDEVKCLIKSDSHASAQTNLLSSIPGISWFGAAILLSEIGDITRFKKPAQLVAYCGLDPSQRQSGMFKGSKNKISKRGCRYIRRLLNMSAVTAVSKNSIGVYNNPVLAEFYQSKCLSKPKKVALCAVMNKMVHIIFAVLRDQKPFELRYPESHAIWLREKNKFAC

SEQ ID NO: 145552 - protein, 332 aa, unidentified
MSAFIGIDISAKTFDLVARKQDKSSKSNCFDQTPEGHRKCLKMLIKLKPKLIVMEATGVYYLDLASTLYDAGLPVSVINPASFKRFAELMLTQSKTDSIDASLLAEFAQRIQPRLWVAPSTQCLALKDLGRQIQRLTVDKAKAKNRLHAFRSKQVTIDVLVQDVMESIENYERRIMRLTEAALEIIQKDEALSLQFRCMTSAKGIGQTSAIAILAEFSILPKEMKAKQVSRYAGLDIKLTQSGTSVNGVSRISKAGNVHLRSALFMPAMSAVQHDENAKAFRDVLVGRGKKKIQANVAVMRKYLTGLWSVYLSGETFDSSKLFSAEHKKACC

SEQ ID NO: 145553 - protein, 467 aa, unidentified
MAHKRKNVKSKERKRAPRSLKTIQPNAAGIDLGSREHWVAGPPLDDATPNVECFGTTTPELLRLADWLKEQGVETVAMESTGVYWIPLFEILDSRGFEVVLANARQISNVPGRKTDIIDCQWVQLLHACGLLRGSFRPSDYICRLRALIRERNTMVAQRSDWVRRMQKYLDQMNICVHHAVSDITGVTGMAIIRAIVDGERDPHALACLRDRRCRKSEAQIAEHLTGNWRVEHLFNLSQALKMYDQFCAVIADYDSEIRNYIATLQPADTRDESAPPPASKSKAKNLHARGQEPMRQGLYRLCGVDLTTIDGIGVDTAAVIVSELGMDFTVFPNEKHFVSYLRLAPNLSISAGKKVPKKFKASTCTRVSTALRMAALTLRNSKTALGGFYRRVAWRKGASVAVFATARKLAQLIYRLLRYGQAYVDTGLEAYEARFNQRRLKFYTKALNDMGYNVEPLKNEEIILAL

SEQ ID NO: 145554 - protein, 441 aa, unidentified
MYMKKRRDRVCGADVHKDLIVATITGDDVLPIQENFGTTKAELKRFRNWLVANKCEQVAFEATGVYWIPIYDALSQTIDTIVANPLQIKTIPNDKSDSKDSKRIATLCLNGQIKRSRVFTEEDRDLRMMTRARSGYVKTRTQFRNRVHKYLSSSGVKLSSCMDDIFCKSGRYILNGLAEEKPIEEILKGIPSGKIRKKRDLIKAALDGDLDATSRMLLRDNLDLLDYLEAKIEATSHEILKKINRRSKDLAIVMSIPGIGFISGAVILAEIGDYHDFKTPEQLAKWCGLNPGENESAGKKKKCGITKRGSKHIRLVLVQAAQTIANMGKTRLSRFFQRLIKKKERNVAIIAVARKLICLIYHLLINQELYQEDECRTRRPSKDKSCQAPSFQEEHLTDKVAAIVDAFYHLNAHGRKNALMREIGDISDIKVGQKRPSKGGG

SEQ ID NO: 145555 - protein, 369 aa, unidentified
MNTTTFVGLDVHARSIKAVALDAMTGEVRSATFGYDAAEVAGWVSSVDPSAKCVYESGVTGFDLQKRLASMGIDCVVGAVSKMIKPPADRKRKNDRNDAEFLARMLSVGNVVEVWVPDDGCEAARDLSRALDDAREDLKRCKQRLSKFLLRHGYAFSETTPTGRRKGSWTAAHWAWIKSISFPEKADDDVLAYYVDAVRQAMEDKKRLEKLVEAEASKPRWKRRVDSVRCLKGIDVTSAADLVFEAGEFSRFKNARSFAAWLGLTPSEHSSGESARQGGITKAGNKHLRRVLVEAAWHYISASPHPKDLAKGQAPDPAARRHAAKGIRRLVKRREEMLGRGVHKNKANVATARELACWCWAVGRMIENG

SEQ ID NO: 145556 - protein, 425 aa, unidentified
MRFIGMDVHRDWCEVAVAEAGELRSGERVKAEPEALELFAQSLAPDDQVVLEATFGAARIAEIIEPHVARVVVADPRRLAKADSRKTDRRDARKLAQLLASGFLDEVWTPDEATRSLRRLVARRASIVKARTRAKNEVHAALGRNLCPRPPMKDLFGRAGRRWLAEVELPEEEQITVDGCLRQIDFSGDELKEIDRILAKRALASPEARRLMTVPGVNVQTAIGFIASVGDVGRFQSPKKLVAYLGLDPRVRQSGESAARHGRISKAGRASARHVLSESAWSVAMTPGPMKAFFERLRARRGAQVAAVATARKLAVLFWHLLTREEDYAFARPSMTRQKLRALELATGAKPQRGRQHADGPLRNPKIRGAERRVSEQGEIAYHRLTANWQPKPKKKGAGATKERASRGPSSGQAARQGSAPEPAL

SEQ ID NO: 145557 - protein, 323 aa, unidentified
MKEKNVVCFGIDVSKDKLDIMSSDGEYLQVPNTKKGYKELLKVMSLSDYVVMEATGYYHYQLAYFMIENNRLVSVANPLSVKRFIQMTLSKIKTDKSDAKMICQYGLKVEQSWWSGHSKSQQECLQLLSLVETYQKQMTMIKNKIHGEKVLSKPSSKVFDCLNQTLKHFQKQINKLESKVESLVRLDYQKELTLLESIPGIGRKTSMFLLVITDGLNRFERGSQLCSFAGITPIIRTSGSSVKGKAKISKIGNSKLRNLLFLCSFNACKYNKACKALYERIVNKGKSKKLALLAVCNKLLRQAFSIVKSGLPYDENLVSIKPV

SEQ ID NO: 145558 - protein, 366 aa, unidentified
MKKISTVAKRGNEIFKEPKLTIGLDLGDRSSHYCILDEAGNVILEHSLPTTPKGIHQVFSRIPRSRIALETGTHSPWVSRQLTQLGHEVIVAHARNVRLIGESSRKDDQLDARTLARLARIDPELLGPVRHRSAKAQIHLTVIRARAALVSTRTALVNAARGLTKSYGERLRKCGTGQMNRAIAKGLSPELREALDPLLREIESLNERIAECDRRIEKIAKEAHPEVALLQQVKGVGTLIALTYVLTLDDPYRFRRSRDAGCFLGLRPGRRNSGMSEPQMHISKEGDRYLRTLIVQGAHYILGPFGEDSDLRRWGLKLAERGGKNAKKRAVIAVARKLAVLLHKLWVSGEVYEPLRNNHKVVSAVA

SEQ ID NO: 145559 - protein, 407 aa, unidentified
MDVIYRRCAGLDVHKQTVVACARVAGQGPLLQEVRTFATTTSGLLELVDWLESLHIEHVGMEATGGYWKPVWHILEGHFELVLANAAHVKNVPGRKTDVNDAVWLADLLAHGLIRASFVPPTPVQELRTLTRTRKQFVRERAAHVQRIEKVLEDANLKITSVISDILGHGGRAVLRAIIAGHSSPDFLAAQITTRVKASQAELREALRGRISPHHRFMLKLHLGHIEALDQAIAEIEQEVSQGLEPFRQAARLLSTIPGVSEVSANVLIAEIGIDMSRFASPAHLLSWACLCPRSDESAGKRRSTRLRRGGVWLKSTLVQSAWSAVRVNGGYLQAQFHRIRARRGVKKAIIAVAASMLTAVWHMLRDGTEWHDLGAAHFDQANTQKVANRLLKRLQSIGYNVQITPA

SEQ ID NO: 145560 - protein, 372 aa, unidentified
MHQSSTLYVGMDVHKESIAVAYIAKDHDAEVVSLGTFGTRQCDIDHLIRKLQSQAKHLVFVYEAGPCGYWLYRYLTQKDYVCWVVAPSLIPTRAGDRVKTDRRDALQLARLMRSGDLTPVYVPAVDDEAIRDLSRAREETLRDLQAAKLRLKAFLLRHDIRSTGRANWSPAHLRWLSEVLCPTPAQHIVFQEYVQTVTEQTERLGRLELELHEQVQTWRLHPVVEALQALRGVQFTVAVTTVAALGDLTRFDNPRQLMHYLGLTPSEYSSGARRQQGSMTKTGNTHARRALVEGAWAYRYPAKVSRHLQLRLEKLPAAIQAISWKAQVRLCKRYRHLMAKGKNANQVVVAIARELRAFMWAIAKQVAGSPKA

SEQ ID NO: 145561 - protein, 369 aa, unidentified
MEKGTTYVALDDSKRKIVAGILRPDEVNPELREIANDPRQIRRLFERLKREGPVAACYEAGVSGYDLHRQIVALGVACEVIAPALTPRRPGQRIKTDRRDAAKLVRLFRADELTAIHVPDEAEEAVRDLVRCRDDIRRDVLRWRHRVLKLLARHGRAYLAGKTWSQAHWRWIREQRFALPPLQRAFEATVFALEQALARQAELDKELEAVAATAPYREPVGWLRCFRGIDTLSAIILVAEVIDFQRFRRPRELMAYLGLVPSEYSSGESQRRGALTKAGNSHARRVLVEAAWHYRHRPTIGRALASRSQGQPDQIVGQAWRAQQRLHRRYRHLVGHGKRTPVAVAAIARELVGFIWAAMTRHESRRQAA

SEQ ID NO: 145562 - protein, 411 aa, unidentified
MDVIVERCAGLDVGKDEVVGCVRTPAASGRGRSSELRTFLTFTSGLEELADWLAANGSPRWMEATGQYWKPIWYVLEDRGFDLRLVNAKHVKMVPGRKTDLADAAWLAQLLEHGLLRGSFVPPPPIRELRDLTRYRKRLIQTHTAEGQRVQKVLEDAGIKLDSVASDVLGVSGRAMLNALIAGERDPDALAEMAKGKLRKKIPMLRHALRGRFGDHHSVMLGVIVDHVDYLDRAIAALDVEIDRVIAPFKAARDRLDAITGVGKRAAECIIAEIGADMSQFPTAAHLASWAGVCPGNNITGGKQRSGRTNHGNRWLGEILHECVGAARQSRNTYLAAQYWRLRRRMGHNKAAVAVGHSILVICWHLLTNDCDYADLGSDWFTRRTDTDKRRDHLIRQLHNLGYGVTLTKVA

SEQ ID NO: 145563 - protein, 364 aa, unidentified
MEKRSTVDYLEVAGLDLGDKYSHLCILNVEDGTVEEESRIPTTPKALKRRFSTCPKMKIAIEVGTHSPWVSRLLEECGHEVIVANPRKVALISRNKNKSDKIDALLLARMVRADPELLSPISHRGETAQIALGVLRSRGALMDARTALVNHVRGATKAVGSRITKCSTACFATKAIDQIPEALKPALQPVLGIIGSLTAQIREYDKRIEIMGKESFPDAARLRQVQGVGPLTSLAYVLVLEDPSRFDKSRSVGAYLGLVPAKSASSESDPQLRITKEGDPFLRKQLVNSSHHILGVFGKDSDLRTHGLKIAERGGKNAKKRAVVAVARKLSVLLHVLWRTGADYEPLLNQQRLAKRKDAPSDAG

SEQ ID NO: 145564 - protein, 336 aa, unidentified
MNNMEACGVEVSARELVVARKGKTGVQLTRFANTAAGHRQLLRTLTRGGQRVRVVLEATGLYALDLALLLSAHQQVQLMVANPRAVRHFAQAMMQRSKNDQLDAVVLLEFAERMPFTPWVRPPENTLALWAIARRLQALTKLCTAEKNRAHAMGLSQAIPATVRRDIDRSLRFHQRAMKKLRQQALQCIAADAQLQQRYQLLRSVPGLGEISAVQTLAELLLLPADRDVRQWVAYAGLDPREYSSGTSVRKHTRISKVGNAHLRRALYMPALVASRVEPHMRGFYEHLLARGKSKRQALVAVARKLLHAIYGMFRSQRPYDGTRVYLAAALAEKFS

SEQ ID NO: 145565 - protein, 324 aa, unidentified
MTDAILGIDVSKETLDASCARGQRRQSRTFSNSPEGWRLMLAWLKAMGSKQAHACMEATGRHSLGLALALHDAGHVVSVVNPAQIRDFGRTKLGRNKTDKVDAALIREYAELLKPGPWTPPSPAMRTLNELQTVRAGIVGSRTEWKNRIGSGLGDSTATKLAAATIEHFTIQLQAIDKAISETIDGDAELRGRCDLLLSVVGVGETLAALLLAEMPEPGVLRQSGELVAYAGLNPSHHRSGTSIDRPTRISKIGNAALRSSLYMPALSAMRYNPAIAALVARLKSAGRLKPKQIVVAAMRKLLVICFGVLKTGQRFDPAIAMPA

SEQ ID NO: 145566 - protein, 357 aa, unidentified
MHQPTTNIFPMTIGLDLGSKTTQCAIYGTNGKRIEERKVTTDREHLTTLLGRFPGSRVVMEASTASRWINNLAKELGCEVIIANPRSIPIITASVRKCDRNDARLLAELGQFKPDLLSPVQLRADRYQEVRALLFARMQLVKQRSALVTFIRSEVRVLGYSLPSCGTKVFAAKCRGLIPDSLRMALGPIFDSIQTMTEGIKTYDKSIDELGDRQFPETMVLRQVHGVGPLVGLAFVATIGDPHRFDKSRTIGAYLGLVPRIHQSGKSNPALGITKCGDGYMRSLLVSAATRILGPHGPDSDLRRFGERIAAQGGKRAKARARIAVARKLGVLLHCLLRTGEVYEPLRNQEQTCTEAA

SEQ ID NO: 145567 - protein, 348 aa, unidentified
MQVTTLGIDLAKNVFCLHGCDANGKPLLWKQLSRRQLLSFIANLPRCLVAMEACASAHYWAREIEKLGHQVRLIAPRFVRPFVKANKNDASDAEAICEAVSRPSMRFVAVKSTAQQDVQAVHRVRQQLIKTRTALVNQARGLLAEYGIVVAQGVGRLRRALPAMLEDRDNGLSGVMRELLAEIGERLRFIDDRLRKYDLTIHRLFRQDERCQRVAAVEGVGPLSATALVAAVGNATDFKSGRELAAYLGLVPRHRASGGRTVLLGISKRGDRYLRTLLVHGARSALYRIERHRGARAIWAARLKLRRGANVAAVALANKNARVLWALLSRGQSYRPAPFPARVPQAGG

SEQ ID NO: 145568 - protein, 439 aa, unidentified
MPTPSLPVLDSTAAAIDVGSEQLHVSIAGGPPKVFGTTTGELHALRDYLVAQGVRSVAMEATGIYWLCPYEVLEKAGLQVVVVNGKYVKNLPGRKTDMSDCQWQATLHAHGLLKPGFVPPEHIRRLQDYLRLRSDHIVMAGSHEQHMQKALERMNLKIHDVISDLTGMSGLKMVQAIVKGERNPVALLALCDPQIQKNKAGRLRAALEGSWKTEHLFALRQAHELWEFYQKKIAECDQAIEEVLKVLAGPEDPKNPAPPATKRGGVNSPQIAGLHGLLWRICGCKDPTQLPGIADYALLQLLSETGTDLSKNWRTEKHFTGWTGLAPGSRNSGKRRASQRRSRNRAGRLFCVIARSVGRSVDKALGGFYRRIKGRKGGLVANLALARKLAELYWRLMVHGIRYVEHGLKKYEEKVAQTEMSLLQKLARKHNMVLQTKVC

SEQ ID NO: 145569 - protein, 364 aa, unidentified
MDTIYIGVDFHARQQTICYLKTETGELVICELKHEDKEKVRAFYAQFQGRVIIGLEASGYSPWFERLLEELGCQVWLGHATEIRRRARWRQKNDRRDAELILDLMLHDEFPRLHRPALQSREVLRMLRYRQKLIKLRTMSKNSLQALALQSGLAKGSRLFTSAGQQELGAAVMSPVMQWQREHWLQLLQPLNQQLLETMVWFKAASKGDICITRLRTHPGIGLLTSLCILHTLQPVSRFRNSRKVAAYAGFDPVERSSAERKCFLGISKAGSRLLRYLLVEAAHTAIRKDEDLKRFYKRLAERRGRPKAKVAAARKLLIRAYIMLRDEIDYAEFRRRAVAARLARRGHRPNVPEVLIGQPASPE

SEQ ID NO: 145570 - protein, 427 aa, unidentified
MYRIAGIDVHKKKLAVVVTDVEVHGEYQFERSWFAANPEQLRLLSQWLAEQQVEEVVMESTALYWKPVWGALERYWQPICQKREGAGPTSGILHLAQAQSNRGPRGRKKDFRDAERLVKRLVADELKLSFVPDTEQRLWRTLTRRRYQLTRARVQLQNQLEALLEEAHLKLSSLVSDLLGVSARRMLQAIAQGETNPDALAGLADRRLRATPAQLCDALGACTELHPVYRRLIKMMLEELKVIEEHTAELNQELATLLRPHQDAVERLAEVPGLGVDSAQQILAEVGAKAATFASDKNLCSWVGVCPGDEESAGESSSHRSPQGNRQMRRLLNQAANAAVKTKGSIFEIVYRRLVPRLGHNQTIGAVAHRLCRLIWLILHKGVRYEERGPAVSQRSRQNRTGKMIRELRMLGYRVEFLNAVPSVSRP

SEQ ID NO: 145571 - protein, 311 aa, unidentified
MENYVGIDISKNTFDVHFTADQRDASFDNTDVQIEAFAELMTKIDPTLIVMEATGGYERPLAAKLHENKLPVAVENPRRIRNFAKAVGQLAKTDTLDARINARYAAVIKPAAQTAADVTSLKIKELNTRRQQLLDIRTAEKCRTEHAEDESVVRSINTVIAALEHEIEKIEKRISTLVSQNDKFKQKATIIRSVPGIGAKTVGMLIGALPELGFLNRRQIAALVGLAPINRDSGRLRGKRMTGGGRVNVRKQLYMPTLVAIQHNPVIRKYYNHLLKQGKVKMVAVVACMRKLLTILNSMVKKNESWKPKIA

SEQ ID NO: 145572 - protein, 370 aa, unidentified
MEEGIKFFVGLDVHKETIAVSVAEAGRAPARLVGNMGHDVSRLLKQLARYGAPEHIQVVYEAGPTGYGLQRALVRRGYQAQVIAPSLIPKRAGDRVKTDRRDSLRLAELARAGELRAVWIPDPADEAIRDLSRVREDAVNARTQARQQLKGFLLRHEVRYAGKTAWSKTYYRWLATLNFGAVGAQTAFTDYWQAVHAADERVARLTGALGPAIVGWRFEPVVAALQALRGIDQISAIGLVSEIGDIGRFAHPRQLMAFLGLVPAEASTGERVVRGGITKTGNAHARRLLTEAAWNYRFQPRIGSRAQRRAEELPQVIRDIAWKAQLRLNGRFRRLQARGVQVNKVCVAVARELAGFVWAIATTRTQMPQD

SEQ ID NO: 145573 - protein, 394 aa, unidentified
MLYLGIDIGKNSHAASLMDDAGKVVIKGFSFSNTTDGGESLLLMLSKYAPTVEEVEIGMEATGHYWLALFSFLYDKGYNIHVINPIQTDGWRKGTEIRKRKTDIIDSVLIADLIRHGSFVETSLMDEDLFSLRNLTRFRTYLVDSISDLKRKVICLLDQIFPEYQSIFSDVFGVTSKELLLTYSTPGELEGLCVDSLAELLAELSRKKIPFEKAEKLSSLAAKSFGVTFSKDAFSFQLKLLIQQMQFIELQVKDTEKEIKRILEKTESVITTITGIGEVTGSTILSEIGDINRFDSPMKLVAFAGIDASVSQSGEYESTHNVMSKRGSPYLRRALYQAATVAAFKDPSLSLFYQKKRLEGKHHKTCIGAVARKLCYIIYAVLKNNKPYEVRMPN

SEQ ID NO: 145574 - protein, 366 aa, unidentified
MFNVGLDVGDNCSSVEILDEHGKHFKHLEVKGRWPVLLEKIDKEVPKPFAICFEASCGYGHLHDRLSKLAQRVEVAHPGQLRLIFKSKKKHNRVDSQKLAKLLFLDEVPRAWVPPAEVRSWRAMIEHRQKLLRDRVCAKNQIRSLLKGLGIQAVKGLWTRNGMKWLKELELGEAEALRRDLMVGQVEGVNKMIRRVEKHLKKVSDKIPAVALLMTIPGVGIRTAETFVAYVHDIKRFAKIKRVGSYFGLVPCQDATGNINRLGHITKDGPATVRKMLTEAAWQGRRRSKTIRGFYEQVRREDPKRNKIALIATAHYLTRVMAAMLRSGECFREKEARVEEKTKAMTVPTEVGTDGGVAPLRKTPDA

SEQ ID NO: 145575 - protein, 337 aa, unidentified
MQVTTLGIDLAKTVFQLHGVDARGHAVLTRRVKRSQLVDAVASLSPCVIGMEACASAHHWGRVFEKLGHTVKLMSPKYVKPYVKTQKNDFRDAEAICEAVSRPTMRFVAIKTVDQVDLQAVHRSRTLLIKTRTALINQIRGLLGEYGLVIARSPEQVRPALVRLVDEEQTALTPFARETFSELYEQLVDLEQRIAKVTQRLERVFRGHPVCRKLAAVPGVGPLTATALLAAVSRPHVFQNGRHLAAWLGLVPAQHSSGGKDRPLGLSKRGDGYLRRQLIHGARALVWCTPGREVRLRSWIDGLRARRPFNAVVAAVANKLARILWAMLSRGEVYRTA

SEQ ID NO: 145576 - protein, 355 aa, unidentified
MKDQAIHYLGLDVHQATIVATSRNESGAIVLKATVPTEAKAIVGLVRGQGPRVHVAFEEGTQAQWLHDLLVPVAERVIVCNVRGKKELVNKNDDIDSGLLSERLRLGSLKGVYHGAASVLALKEMVRSYGNLVEDSTRVMQRIKAMFRARAIPTPGTGVYGTRQRADWMSKLKGSGVRLRAESLFAQLDALLPLRRKAKEAMIAEARRQPAWKILRSIPFLGPVRVAQIIAIVGTPFRFRGKRRFWPYIGLGVVTHSSADKEIVAGTIRRRRRAPLTRGLNRNHNPVLKDVFKGAATAAAHKDGPLKNFYKESLDRGVDADMALLTLARKISSVALRLWKKGELWDPAKLTTQAT

SEQ ID NO: 145577 - protein, 391 aa, unidentified
MTKPKTKTVNDFSRCLDPLDMDATLIAVIEMSQSSWLVAGIVPGVERQPLKKLAIDEHALLGLLNRWRAEAEKNGHRITRIAVAFEAGPDGFWLARWLAAQGIETHVIHASSVAVTREHRRAKTDRLDTELLKRGFLGWLRGERGHCKMVTVPTLAEEDAKRPSRERETLVGEASRIITRIKSAFVRLGIRGFNPKLKAAAARLETLRTPEGEPIPPNTLAALKRDLERHQIVKKQIRELEQTRLESLAQAPAKGPNVMVLLLARVIGIGVETADMLVREVLSRTMRDRRAVARYAGLTGSPDESGAKRRDKGLARSGNARVRHGMIQLAWRFLLFQKDSALAQWYRQRTANAPSTRKPLIVALARKLLIALWHFARDGVVPAGVRLRPAA

SEQ ID NO: 145578 - protein, 343 aa, unidentified
MECYVGLDVSLKQTSICVVSATGSVVREGVVDSDPDVIAAFVRSKAPGAIRVGLETGPTSTWLWTELKRLGLPVICIDARHAKAVLKMQINKSDRNDAAGIARIMQTGWFKEVRVKDLDSHSVRALLASRALLVKIKRDLENQIRGLLKNVGLVIGRAKFNVFALRAEELVESRPELVAAVGPLLEARKAVEQQVGDLDRKVLKLARRDVQIRKFMTAPGVGPITALCFKATIDDPTRFKRSRSVGAYVGLTTRRHASGEVDWSGRISKCGDAMLRTYLFEAANVLLTRVPKWSALKAWGMRLAKRNGLRKAKVAVARKLAVILHRMWVDGTEFNWSTKKAAA

SEQ ID NO: 145579 - protein, 338 aa, unidentified
MKITRIGIDLAKNVFQVHGVDQHGKTLVQKQLSRAKVMEFFARLEPCLIGMEACGGAHHWARELLKQGHDARLIAAQFVRPYRKNDKNDKNDAEAICEAVGRPAMRFVPIKSVEQQAVLTLHRVRQLRVAERTALVNQLRGLLAEYGIVVAQGIARLRRELPRILEDAENNLPDLARSIFAELRWRLIELDRQMADYDQHIDQLAAQSEPARRLMQIEGVGPLTATAIVANIQNGRCFKNGRQFAAWLGLTPRQHSTGGKARLGSISKRGDVYLRTLLIHGSRSALLRTAHRTDAKSRWVEALKTRSCNNVAAVALAAKHARIIWAMLARDQAYRLAA

SEQ ID NO: 145580 - protein, 493 aa, unidentified
MRIFGLDIHRTFAEVMVLEDGQVTSLGRVLLDRNHLIKFADTLTAEDDVVLEATGNTMAVVHILKPRVHRVVIANPLQVRAIAHAKVKTDKIDAAVLAQLHASGFLPEVWVPDAATESLRRTVANRQRLVRHRTRIKNTIHSILHANLIPQCPASDMFGHKGRTWLQEQPLPFDERASIQRYLRNLDHLNEDIKVLDTELATFALRNLDVQRLMSISGVNTVVAVSLVAAIGDVSRFARPEKLVSYFGLNPSVRQSGLTPAHHGHITKRGRSHARGMLVEAAWSAAKTPGPLRAFFCRIRGKRGAQIAAVATARKLAVIAWHILTKQEDYLWAREALKAIDTGDQDIPHTAILELCEYVQPELGAFILGQPQSQQFLVAFHVDAQGQINGLVDDLPVLPDFDDDAVQIHDGVNGIQGSRLPLDDLLDNRIGDFRNQGCRYVGVVHFLERGDNLPGSHALCVQEQDFVIHRGESALVLFDQLGLEAAGPVEGSI

SEQ ID NO: 145581 - protein, 344 aa, unidentified
MNITTVGVDLAKNVFQVHAINDAGEVIVRRSLRRRQMIPFFDKLEPCLIGVEACGTSHFWARELEALGHEVKLMPPQYVKPYVKRGKTDAADAEAICEAVERPTMRFVAIKSAEQQSVVALHRTRDLLVGQRTQLVNMIRSQLAEYGIVLAKGIHHALRLVDQLVEGVVPDIPSLGCKIVVALAEQIRELEARITMIEAEIKTWFRGNDLAKRLETIPGIGFLTASALAASVTDPHRFTSARQFAASLGLTPKANSSGGKERMGRISKMGDRYLRRLLVIGMTSQLQSARRKPEAYPWVAGLLAKKPNKLVAVAMANKAARMAWVVMTRGEVYRAHRPTTERTV

SEQ ID NO: 145582 - protein, 425 aa, unidentified
MSEKIVVGIDVSKAFSDICILSPNNDIIKRMKISNDVIGMQSLISVLEKVENEYEDRAVIIMEATAHYHQILANFFRKHNYEVIVINPIQSGALKNINIRKIKSDKTDAYNIALLYRIKNYNETITHSDTVNSIKKLCRQHKELTDEIVEHINRLIAFLDISFPDYKKVFPDLQGKTPLSLLEKYPTVQDVLSPENKQDMIQLIKENSHKSYSYAEAKYEKLLQVAEKSIEVCIVNLSSAVLIQTTVSVIFSLQEALKAINDEIKRLSLLDEKFHKEIVLLQSIPGVGEYTACVVLSELGDVSNFSKPKELVAFFGLDPGVSQSGTYNRKNNKISKRGSPHVRLILHMLAKSNVYPNRNREYLNPVMRAYFEKKIAEKPYKVVMCAIMRKMVQIIFAVLRNQKSFELRTPEEHQKLIRKNSKLAA

SEQ ID NO: 145583 - protein, 304 aa, unidentified
MNGIGIDVSKRQLDIGTTDGETLQVSNNRSGFSELDVWLKKRPTSQIVLEATGGYEQPVLDFLHKVGHPVARANALRARKLAQGLGQIAKTDRLDAYALAQMAALVKLPPYQPLQPWQQKMREFVRARRQAMDALTIARQQQEMVLDRELRRLLQGNITRLQTMVERLGKQIAEQVGQQPQLKTLKSMKGVGPALQAVLASYLPELGRITGKRIASLVGVAPMSHDSGTMRGKRSIHGGRAEIRQVLYMAAMSAMRHEPRLRDFYQSLRARGKEGKVAIVAVMRKMLVILNARVRDAESGLVPA

SEQ ID NO: 145584 - protein, 351 aa, unidentified
MQYVGIDWAYRRAAWCAKQADGTIFGEGFVSADEDGLARLVLELGPEVRACLEMMSGAVWVRDRLAGAGWQVEVADARKVKNVAPLACKTDRVDARVLAELCRRELVPALWIPSLEERAMRERLKRRLHLVRLRTSAKNRVFGLLTQWGLRISRDRLRQPDAMELLEARGVPEVWRRSVAEALAVIELLDERIAPLDDELAPLARADPRVCLLSTIPGIGPLLGLTIAAEIGDVARFPSARKLIGYSGLAPRVKQSGERSRSGELSKAGSRTLRFAAVEAAQGAWRETNPWHRLYSDVKARTGKANPAKSAVARKVLIACWHVLSLQEPFKPSRPRGTDLVPASSSRFLAA

SEQ ID NO: 145585 - protein, 343 aa, unidentified
MDHFAGLDVSVKETSVCIVDDTGKIVREVKVASEPEALLAVLNNPAYHFKRIGLEAGPLSQWLYGALAEAGLPVVCVETRHMQAVLKAQINKTDRNDARGIAQMMRVGLYRPVHVKTLRSQKLRMLLTHRKLLQSKAIAIENDLRGTLRNFGLKVGMVGKARLEARIKELVENLPDLAILIEPLLIVRRALREQIVILHRRLLAIVRDDAVCRRLMTTPGVGPVVALTYRATVDVPARFRKSKSVGAVFGLTCSKYQSGEIDRSGRISRCGDEMMRVMLYEAAQSMLRSKKWSWLKAWAMQIARRRGMKKAIVALARRLAVIMHRIWVDGTEFRWTREATAAA

SEQ ID NO: 145586 - protein, 340 aa, unidentified
MLYAGIDVANRASTVCVVDANAEVILERTVATEAGALMEAFSGLEATRVVIESTPLAEWVALVVEDAGHEAVVIDARSAKRLMDASKKTDRRDARTLARMAQAGWYTAVHRKSAEARLQRSRLQARQGLVEAYKGFAARVRGLLRAHGVRVGRVSKGEFAPRVRALCAEHVPGLAAYLEPLLAAYEHALGEARRLRREIEREAREHAVAERLASVPGVGPLVSQAYVATIDDPRRFASGDEVADYAGLTPRIYQSGELQVQGRISREGDKLLRWHLVEAAHSLLVRGRDCALRRWGLRLAERKGQAKAKVALARKLAVLLHRLWVSGERFKAWPERAVGA

SEQ ID NO: 145587 - protein, 434 aa, unidentified
MREALFGASREGLFFLYLEGEMSSELLLREVPGDRLVVAIDPGKVSNRVWLTTGERGLIGEPVSLPVLRDGVDELYRLIVGSGVVGEPVIGIEATGALHRAWAAEVERRWPGSLRLFAPSETQAARAQLGSRRFKTDDRDCAALVWLLRQGAGRPSAPMTVEALLGAVRHRRQLVDARRVAQQRLHDQLNALCPGLSAPVGHGRALKLEDASGGAVLACAVAFAGRAPSARSLLARSPGRLSDANARFWVARWKRLLAPPADAELRAQRLGRDVERWLGLREDIAALEAQLGELLAGTDGQILTSLPGVAVVRAAGFAAHTLPIERWPSAEQLYSATGLAPASYQSASVTRRGRISRQGLPEHRDALMGIAWGLAQHSPAFAERDREYRARGFRPIQARVALARHACRLAWRLMISQQPYDDRRYDQARHRRGR

SEQ ID NO: 145588 - protein, 376 aa, unidentified
MSNVRFIGLDVHAETIAVAVAESAGEVRSLGVIPNRIESLRKLVKTLGPVERLRVCYEAGPTGYVVYWQLTALGVPCEVVAPTLVPVKAGDRVKTDRRDALKLARSYRAGDLPPVWVPDAAHEALRDLVRAREAAKKDQLRARHRLSKFLLRHGRRPPTAMKAWTQAHLAWVKRAVHFDQAAQEATLLDYLQEVDHVAARIARLEAAIAAAVTTAPARMRAVIDALQALRGIAAVTAVTIVAEVGTLSRFATPRQLMGYSGAVPREDSSGARTRRGGITKTGNAHLRRVIVEAAWAARHRPAVGPALRKRQATLNAEVIEIAWKAQHRLHARYRALSGRGKCPQQVVTAIGRELLGFIWAIGVHAESQADGRSLAA

SEQ ID NO: 145589 - protein, 341 aa, unidentified
MSNANSYIGVDLHKKMCFVTVMDKEGKIKKQTEISTDADKVAKFFSKHTNAAVAVESTMNWIPFYENLEGLGCKVVLSNPLATKAIAAARIKNDKVDSKILADLLRTNLLPLSYVQPREIRDLKELVRQRMSYVEMRTQIKNKIHSVLFKNNLKHDFTCLYGKAGMIWLRQLELRDIYRQEMDRYLTTLDLLDKQIEELSATIMETAKTDYDCQLLMTIPGISYFTALVIKSEIGNIERFPSAKKLCSYAGLIPSTYASADKVRHGRITKRGSKWLRKALVDAITSGSRHPSKLSCLYRKLKKNKGAGKAKVATARKLCTIVFAILTDKQPFREFVSVKQR

SEQ ID NO: 145590 - protein, 307 aa, unidentified
MQLQDTLSIPKVFIGLDIHKKSWTVSIQTDLFFHKTYSMPSIAEDLYQYVERTFPNHDVALVYEAGCCGFSAARYFLNLGWNVLVVNPADVKTGDKERYQKTDALDSKNLSNQLKSGVLKGIYIPTEEHEQFMTLARHRTQVTKKLRQTKSHIKSMLLFHGIKVPEEFDNPNWSKAFIEWLEELKFSTSCGDLALQGKIRMFKFIKLEYLEIANQMRAYCRKTNKKDYNLLRSIPGIGGYLASVILAECGDLRRFNNEGQFSSYIGLVPGIYNSGGSEKCLGITPRSRSQLRSYLVEAAWIAIRKDT

SEQ ID NO: 145591 - protein, 354 aa, unidentified
MNNIKYIGIDVHQATSVFAVSNREGKVVAEAILETRATAILDFLKSQRGTLWVTLEEGTYATWLYDIIKPHVSKLVVCDPRKNKQDGSKTDKIDAKKLADLLRSNSLKAVYHGESGTRTLKELARSYINLQQDSTRVKNRIKAIFRGRGISCSGQAVYGAKQRQEWLQKLEDRGARRRAQRLLEELEPLGRLRVEAQKDMVQESRKHSGYKILRKIPGLGNVRAALILAFVMTPHRFRTKRQLWTYCGLAVVMRGSGEYKIVEGQLTRSKRKPLPRGLNRNYNRVLKEVFKGAALTAAGRGPFKKLYDERIEKGIPPNLALLTMARKISSITLALWKKGEPFDIKRHRLSEQTI

SEQ ID NO: 145592 - protein, 342 aa, unidentified
MQVTTIGLDIAKNVFQVHGIDAAEKVVVRKQLRRRQVLEFFKALPPCLVGMEACATAHYWARELTKLGHQVRLMPAKDVKAYVKRNKNDAADAEAICEAVRRPTMRFVQIKSTEQQGRLMLHRARDLLMRQRTQVINAMRAHLAELGIVAAQGRDGIKELLKIIASEEDARLPVDAHTSLVVLAAGLQAVQTLIGSIEKRIMVQHRSNESSQRLETIPGIGVIGATAIAATVPDPKVFGSGRDFAAWIGLVPREDSTGGKQKLGPISKRGDRYLRRILVVGACAVLRYARHKPEKYPWLTKLLARKPFKVVAVALANKMARIAWALLAKGDTYRVPALAAAA

SEQ ID NO: 145593 - protein, 353 aa, unidentified
MSEDKYIAFDVHQATTVVSVMNAAGREVKTAVLATQAQPLLGFLESLRGRLHLTLEEGTYAAWLYDLLQGRVAELVVCDPRHNALLKEGSKTDHQDAHKLADLLRTGMLRPVYHGNRSLRNLRELAHAYQALVQDTTRVMNRIKAYYRSYGIDCAGRGVYSRKQRESWLGRLPAGASRVRGELLHEQLEQLRSLRRRARRELLGESRKYLVAARLCGLPGFGPLRVALLIAGMQTPHRFRTRGKLWSYSGLGLVQKGSSEYRLVEGRAVRRPGALQLRGLNRSHRPGLKALFKSAALVAIRQPGPFQDYYQSRLQQGVDPAILRVTVARKLAALVLSLWKKGGRYRAEGVKQA

SEQ ID NO: 145594 - protein, 428 aa, unidentified
MADLLEGTLPLNLVAIDIARYSNAVLIELSDGKRQRFRMTNSAPDFDRLLSYLQALPGNCRVALEPTGDYHRSLAHRLLTAGHEVVSINSVAQARYREAMFNSWDKNDPKDAQVILEMLGRGTYQRYVDPQIAGHHDLQELAKTYYQVSRARTKVQHSLINHSLPLYFPEMHRYWCTTRNEWFVRFLLEFPTPTHVRALDRESFVAAAWDLVGRKVNKRAKLEEIWETAAHTAALPHAPDCLAVETFRITLRRYQELNVLRAAIEARAEAELHDKIDFAHLKTLPGIGSVIAMTILAEAGDLRRFGHHRQFLKYCGFDLAKIQSGTQRGREQLSKRSNARLRLAFWMAGMAAVRMKENSFRSKYERYVHADPDDADLKRKALTAVAAKMARVAYSMIKKHKPYRQLFELGLPSGSIPLSAAVGAQATP

SEQ ID NO: 145595 - protein, 387 aa, unidentified
MAKPDDLSRSLTPFEQSSTLVAVIEMSLSSWLVAGIVPGLDRHPLKKLGADEDALLRLLQRWRDKAVTAGCTITRIAVAFEAGRDGFWLARWLRAHDVETYVIHPTGVAVSREHRRAKTDRIDTALLKRAFLGWLRGEPDHCHMTAIPTPEQEDDKRPSRERETLIREHTRIINRMKACLVRWGIRNFKPTLRQAPERLEALRTPEGMPLPPNTLAEMRRDMARLHLIKDQIKAIAADRVRRLGQASADRPQAMSRMLARVIGVGIETADMLVHEILSRHLRDRRAVARYAGLTGAPDESGKRRREKGLARAGNARVRHGMIQLAWRFLRFQKASALTQWFHARTADGRGGTRKTMIVALARKLLIAFWRLVATGEVPQGVVLRPVP

SEQ ID NO: 145596 - protein, 351 aa, unidentified
MPHKSTVHAVTAIGIDMGKNTLHMVGLDSRGAIVLREKVSRGRITSRLANLQPCLIGIEAGMATHYVARELAALGHDVKQVPPTYAKPFRQGHKNDFRDAHAVAEAVQRPTTRFVPAKTNEQLDLQALHRVRSRLVSERTAVINQIRGFLLERGIIVRQGVRFLRQQLPDILAKRTDVLSPRMVRIVADLAGDWRQLDERIETVTDEIETLAKSDDNCRRVMTVPGIGPIISSAMVAAIGNGAAFGRGRDYSAWLGLVPKQMSTGDRTILGRISKRGNRYLRTLFMQAARVILLRPANWPKHGFGAWLIRAAQRLHPNVLAAALANKLARIAWTVLAQERSYEARVTKAAA

SEQ ID NO: 145597 - protein, 570 aa, unidentified
MKVAGHAPPRYEYATRSLDDRLKSFERGWALESTTYTQMLSFRRLHYKGYRRLQQACSPIFRKETKNMPSPIPDVVAWVGLDWADQEHQGRLQAVGSSQVESFVLPQRPEALQGWVSQLRTRFPFGRVAIAVEQSRGALVYALMTYDFLVLYPVPPKTSADYRKAFFSSGAKSDPEDADLLLELVRCHADRLRAWQPDDARTRQIQMLSEQRRKLVDDRTRLTNRLTTWLKASFPQALEWAGELGTARACEFLTRWPSLAALQQARRSQVRQFYLHHGGKVASLEYSLDKIHQARPLTSDPAVLQVSALMVRLLAQQLSALGSTLQELDQAIAPLFAQHPDQALWDSFPGAGPVLAPRLLAAFGADRQRYHEAREVQQFSGIAPVTAKSGKSCWVHWRWACPKFLRQSFHEFAAHSRRWSPWARAYYEQQIAKGAEHHTAVRALAFKWTRILYRCWKDRTPYDEQRYLQALRRRGSPLVKRLQAQAALCAGFCQKFYEREAPKDCESWAGGESKSWGLCPQTPRIYRFRARTDLGCGSEGRSLPISPGPWVGAQVASLRGPILRPGRPRV

SEQ ID NO: 145598 - protein, 434 aa, unidentified
MPNEVPIEQEIVAYVGLDWADQQHVICWQAADSAAVQSAVVQQRPEELQAWVAELRQRFPQGLVAIALEQSRGAVIAALMHFDFLRLYPINPKSLARYREAFASSGAKDDPDDAALLLELLVKHRDRLTPWVPDDALSRQLALRVEHRRQLVNLQTKLIQQLRSHLKVYFPQALDWVGELDSLQACDFLQRWPTLAAVQKARPSQLEKFYHQHHCRRPQLIQQRLEQIRQAQPLTQDSAIVPAYSQMVLALVAQLRVLIPTLQQWQQQISQLFAQHPDAALFASFPTAGPVFAPRLQAAFGSRRDRFGSASEVLQFSGVAPVTKRSGKSRQVQRRWARPKFLHQSFVEFTGLSIPHCCWARALYQQLRARGHRHWAAIRVVAYKWIRILFRCWQDRVPYDEQKYLKSLERRNPTLWAAIQQLPAQPSRKEVGRL

SEQ ID NO: 145599 - protein, 347 aa, unidentified
MTMVEDARVVTGGVDTHADMHVAAALDPVGGLLGVREFPATAAGYAELLGWLSSFGTVALAGVEGTGSYGAGLARYLAAAGVRVVEVDRPDRQDRARQGKSDPLDAVSAARAALSGRASGTPRGRDGAVEAIRALMVAKRSARQERTQAVNQARALIVTGPEELRTRFAGHSTAALAAAIAALRPRPGNVPGYATGVALRELGRRVRFLDGQLERLDELLGPLVTARAPGLLALHGVGPDTAAMLLVAAGDHPERLRSESSWAHLCGVAPVPASSGKTAGRYRLNRGGDRQANSALWRIVIVRMSSHPATRAYADRRGKEGLSKKEIIRCLKRYVAREVYRQLRDGA

SEQ ID NO: 145600 - protein, 334 aa, unidentified
MTTNISMLAIDLAKGSFQVCAIGPEGAVLYNRSMSRTRLASLLAEQPACIVAMEACATSHHWGRVAQLHGHEARLVPATYVKPFVKRQKNDRADAEAIAEAALRSTMRFVAVKSAETQARAVAFRTHQCLVRQRTQLINGLRGHLAEFGLVAPKGPASLNALDDEATDLPSPVREMGAIYLDQIARLTAVIEQLADELQAASKADAQLRRLCTIPGIGPVTAGAVSAFAPDLDTFDSGRNFAAWLGLVPRQRSTGGKTRLGSVSKMGQTDIRRLLIVGAMSVIRWVVRKGGSANRWLAALVARKPRMVAAVALANKMARIIWAMTTKKEDYRMP

SEQ ID NO: 145601 - protein, 352 aa, unidentified
MMVVGVDPHKQTHTAVAVDQLGRRQGCKTVRARREGHLQLLAWARSLAGAGLVFAVEDVRHVAGNLVRDLIAAGQVVVFVPPRLMAGERRGGRERGKSDPIDALAIARLAVREGPASLPAARLDERTRPVRLLTDHRDTLVRDRTRMVNRLRWHLHDLDPALAPAARALSRPAARARLAAALAAAPPGTVRQVAQAQLDRITSLSQEIDALQAEIGVLVTALAPALLAIPGVGVLTAAKIVGETGGITRFRSPAAFARHNGTAPIPVWSGNSGVQRLNRAGNRQLNAALHRIAVTQARCHQPARQLLARRAETTRDTTRASLRVLKRHLSDVVYHAMTADARHLDQPEPTAA

SEQ ID NO: 145602 - protein, 413 aa, unidentified
MNKHTYRAQKVNTINWLQVKEQVAGEALVLAVDVAKVQQYALLTNQDHTKSWMMQWSHLEQTPYLIEQIKALEVSIAVVMESTSTYGDSLRYQCRQAGFAIYQANAKKVHDAREIFDGVPSLHDAKSAWLIAKLHKDGITKPWCEPTIEERRMNALRLEYDLHQGQHLRNQNRLEAYLSRHWPEVLTLMPLDSVTLEQLIKHYGSPQNVLAESNQAALDMRNWGKCGLSAEKIAAVIVSAINTLGEPCIEAECQFLMALASELEHSRLQKQTAKQALEALVDNDEALREMGRVVGKVTTAVLVSLHLDPRRFATPKSYQKALGVNLTEKSSGQINGRLRLSKRGSAVARKFLYMAALRLLVNDPLINKWYKAKKDERAKLKTVIALMRKLPLALWHIARGERFDASKLLKVAI

SEQ ID NO: 145603 - protein, 349 aa, unidentified
MSAKFNSEIAVIGIDIGKNSFHVVGLDQRGAIVLRQKWSRGQVEVRFSNLPPCLIGMEACVGAHHLSRKLTSLGHDARLMPAKYVRPYSRGQKNDFRDAEAIAEAVQRPTMKFVATKTAEQLDLQALHRVRERLVSQRTGIINQIRAFLLERGVAVRQGLRFLRAELPRILARPCDALSPRMLRVIEDLAGDWRRLDERIEGLSSEIEVLARQDAGCERLMSVPGIGPIISSAIVAAIGGGDAFSKGRDFAAWLGLVPKQISTGDRTILGKISKRGNRYLRVLFVQAAWAVLIKPKSWARHGLKPWLEAAKKRLHHNVLAVALANKLARIAWSVLAHGRVFEATKIQAA

SEQ ID NO: 145604 - protein, 422 aa, unidentified
MLKETQDREEIIERVAALDIGKAELVACVRVPSADRAGRRAQEIATYSTMTRSLLGLADRLRVLGVTRVVMEATSDYWKPVFYLLEAHELEPWLVNAKDVKHLPGRPKTDKLDAVWLCKVAERQMLRPSFVPPVPIRRLRDLTRYRLDLVNTRTAEKNRVEKLLEDAQIKLSAVVSDIFGVSGRQMLAALIAGERDPKVLAQLARARMRAKIGVLEEAFVGHFTDHHAFLLRTMLARIDETSADIAAVEATIAELIAPFVQAVERLDEIPGVGVTAAHVMIAEIGLDMSRFPTAAHLCSWARLAPGIKESAGKKKGRGSTGHGNPYLARVLGEAAIAAAKTDTFLGDRFRRIARRRGKKKAIVAIGRSILVIVWHLLSDPQARFHDLGPDFYDTRLGPDRKKRSHVRQLEALGYKVTLELAA

SEQ ID NO: 145605 - protein, 425 aa, unidentified
MKSTQNEKISQIKFETLVVGIDIGKETHYARAFDYRGIELARLLKFSNTDQGFQLFDQWMRDICKQQEKTEIIAGFEPTGHYWFTLGDHLKSQGHKLAIVNPFHVKRTKELDDNSPTKNDRKDPKTIAMLVKDGRYREVYIPDDIYQELREAVSERERLQEQLTSIHNRVVRWLDIRFPEFTTVFKDWRRNAALITLRSFPTPEKVMEMGVDKIVETWRKQMKRASLKRAEALVKAASRSVGRTSGKVASEASLQNLLAEYDLYCQQYDKQEQLMQDLLMQVPNADKLLDIKGVGLITAATFVGEVGDISRFQDPRQIQKLAGLNLVENSSGKHKGKTTISRRGRRRLRHSLFFSMIAMLGKNQEFRLLHQRNLTRENNPLNKMQSIIALCGKLIRVFFAILTKGVDYSPEKMLGDMEQSIRVAA

SEQ ID NO: 145606 - protein, 411 aa, unidentified
MQVIYEQCCGLDVDKRTITACRLKWLGSEWPKEIRQFGTMTNDLLALSDWLVGEGCTHVAMESTGVYWKPVYNILEGQFELLVVNAQHLKAVPGRKTDVRDAEWIAELLAHGLLRGSFVPPPSVRELRELTRYRTSLVRDRSRTINRLQKVLEGANIKLASVVSDIDGVSARLMLEALVAGERDIEQLASLAKGRLKEKHAQLVQALSCRLQPHQSFLIAEHLAQIDYLEGAIERLSREIEERLRPFEQEIGWLDTIPGVNRRTAEVLWAETGGDMGRFASARHLASWAGMCPGNNESAGKHRTGRTRKGSPWLRHCLVEAAHGAAHTKNKYLSSQYHRIAARRGKKKAQVAVGHSILVIAYHLLTRKQAYSDLGANYFDQRDRQAVTKRCLNRLEKLGYKVTLDKLSMAA

SEQ ID NO: 145607 - protein, 389 aa, unidentified
MMIFVGIDIAKLNHFASAISSDGEILIEPFQFTNDGDGFQLLISKLDSFDKDSLIIGLESTAHYGDNLVRYLVASFYKVCVLNPIKTSSMRKNNIRKTKTDKVDTYIICKTLMMQDHLRFVTFYDLDLMDLKALGRFRQKTIKQRTRLKIQLTSYLDEVFPELQYFFKSGLHQKSVYALLKEAPTPETIASMHMTHLAHLLKSTSHGHFDKETAQQLRVLAEKSVGASDSALSIHVTHTISQIELLDSQLERVEAEMTEIMKFNDSVIMTIPGIGYINGGMILGEIGDIHRFSNPNKLLAFAGLDPSVYQSGNFQAKTTRMSKRGSRVLRYALVNAAWNVVRNNATFKAYYDAKRAEGRSHYNALGHCSGKLVRVIWKMLTDNVEFNLK

SEQ ID NO: 145608 - protein, 353 aa, unidentified
MKSDKYMGMDVHQAMTVVAVLDADGKVVMETMVPTEAAAIIRLVQSLSGPLRVTFEETTQAAWLYEVIRAYVTEVIVCDPRRNKLLEEGSKADKVDARKLADLLRTGMLRSVYHGHEATRQLKELVRAYETLSIDTVRTMARIKAIYRGRGIRTPGRGVYQPKQREQWLQTLTEPGIRQRAAWLYEQLDHLQPLRRKAKQTMLIESRAHRAVSLLRTIPQLGPIRAAFIVATVDTPHRFRTKRQFWSYVGLAVVTHMSSEYEMKAGRVVRCRKPISTRGLNQNCNRRLKEVFIGAATSASNRKAYGSFLNERQKKGMRPEMARLTLARKIAATALAVWKKGEAFDPKKLNVMT

SEQ ID NO: 145609 - protein, 337 aa, unidentified
MYYVGLDVHRDTSFCVIMDKAGDTIAERNLHNDVLEFANFFAQCDQPMEAAMEATTDAYFIQALLTELGISVRLAHPAKLRLIAESSSKTDRSDAHLIADMLRMGRLPEAYLAPAEVRQLRELTRGRQSLVRTRTGLKNRVSALLRTYGQKCPLKDKFGKAGRAWLESLQLPTMAAMMLDIYLAVVDVLSAYIAQCDSKLREISRRDERIRRLQEIPGIAEVFGPMIIAEIGEISRFWTKRRFVAYCGLAPIVRQSADKTYIGPLRRDCNHWLRYAFIEATHSCVKAPGRYRDYYQRKAQQHNKKVATVATARRLCRLVFALLWSDEHYQSDHAHAA

SEQ ID NO: 145610 - protein, 324 aa, unidentified
MSYYCGIDEEDNKLVDKRIDNDLNATIALLSPYKKELKAVAVESTFNWYWLVDGLIENGFKVELVNTTAVKQYDGLKYSGDHQDAFHLAHLMRLNILPTGYIYPPEYRQVRDLLRRRRQLVRHASTHALSIQNQIWRSLGYKQTCTAIRRKDFVLPFEKDGYLYHSANSNLVLMRTLDTQIKLVEQQVLEGVSLKNEYKLLTSVTGIGPILGLTIMLETGDIQRFDSPGNYASYCRCVNSIRESNGKKKGTGNRKAGNKYLSWAFSEAAHYMVRFNNQAKSFYERKRQKRNGIVAIRAVAHKLSRAVFHMLKNNEAFDIDRVFH

SEQ ID NO: 145611 - protein, 378 aa, unidentified
MPSETTIHVAIELSVSSWLVATRPPGAEKSRLHHIEGGDTTALLALIAELRTRASTKLGKPAEVVCCFEAGRDGFWLHRALTMHGVAAYVLEPTSILVNRRARRAKTDRLDAEGMLRVLAAWLAGDRQVCSMVRVPTPEEEDAKRPHREREHLVQERLRIENRIEALLFTQGIRKRPSLRSWERDLAELRTGDGRALPSLLRVELDRLRRRLVLALELIREVEAEHAEALAVTAEDEMTQKIAALQRIRGIGTNFAAVLVREVLYRSFANRRQLASYVGIAPIPYQSGGMDRDRSISRAGNPRARTTLIQLAWLWLRYQPGSALAAWFRERVGTLQGRTRRIAIVAMARKLLIALWRYVETGVMPDGVEFRAEADVTA

SEQ ID NO: 145612 - protein, 339 aa, unidentified
MEVTTIGLDLAKNVFQVHGINEHGEVAFNRALRRAQVLAFFARLDPCLIGIEACGTSHHWARELIKLGHNVKLIPPAYVKPYVKRGKSDAVDAAAICEAVTRPTMRFVEVKTPEQQAILAVHRTRDLIVRQRTQTINMLRAQLAEFGLILPQGVYHPLRFAKDCVDGEQPDLPNDAREVVADLCDQLLFLHTKILRLARQMTLIAKREKRVALLRTIPGVGPITASAIVATVGSGEQFNNGREFAAWLGLTPINKSSGGKERLGHISKMGDQYIRRLLVLGMTSRIRSIRSKPERFDPWFADILSRKPSRVAAVAMANKTARMIWAVLIRNEPYKVRAV

SEQ ID NO: 145613 - protein, 345 aa, unidentified
MEPMYYIGLDVHKRIVSYCVKDSSGKIYREGSIPATRIDLDRWMKTLPQRWSAAMEATMFSGWIYDHLKPHAAALKVAHPLMLRAIAAAKKKNDRIDANKICDCLRCDFLPECYLAPTAIRERRRTLRYRNLLVRQMVQMKNKIGMLLMETGVSYNKQRLHQAGYFRELLATNPDIDAGLASLLRQSRETVVRLGKTESALVRSLKHDPLLAERVERLMSIPAVGPITALTWALEVGEVQRFSSIKKVVSYCGLCGDEQSSANRVQRTPLSKQRNKHLQTTLIEAAKMAPRYSPTLALLYDREKQRGNANRATLAVARKLVAYLMAVDRRQRHFLVAETTNCVAA

SEQ ID NO: 145614 - protein, 363 aa, unidentified
MNYVGVDIHKKYSVLCALDESGRKLREGRVEGNSARGFAQFFAGLEGPSKAVVEACWNWGLIHDELEELEPVEEVVLAHPYKTRLIADAQIKTDRLDAHALGTLLRGNLVARAHVPGRETRARKNLLRQRLYWARLRTMLRNRIHALLDRQRELELPQCSDVFGVRGLGFLRRLELAQPDATLLREQLALHDLIAQQMKAQEKRIAAEFKTEAVHQHLLSVPGIGITLAAVIGCEIDQIERFNSAEKLCAYAGVVPTTHASGGKTSHGRLLPFCNKWLRWALVEASWVAIGCSPYFGSLYRQHRARGKKANTAILIVARRMCRIIWQLLEQKRDFEKLAPRPKLYSFPGCSALALTVNPALAS

SEQ ID NO: 145615 - protein, 412 aa, unidentified
MDVYCGIDWAEDHHDISLVDRDGQLLARRRIGDDAAGLGALLELLAGHGDSPGDLIPVAIETPRGLLVACLRATGRPVYPINPMAVARYRDRHSVAGKKSDHGDSFVLAGVLRTDMHAHRPLPADSELAQAIAVLARAQQDAVWDRTQAHNRLRSHLREYYPGFLAAFASLKGGIMRPEARAALAAAPTPADAARLSLTQLRGLLRKAGRSRGLDTEAARLREAFRLPQMRQLPLVEQAMGQQALALLSQLDAACAAAADLERAVTESFNLHPDAGIITSFPGLGALTGARVLAETGVDRSRFQDAKGLKAYAGAAPITRASGKTKSVTRRRIKNNRLNAAGYSWAFSALTASPGARAHYDRRKDAGDRHAAAQRNLLGRLLGCLHHCLITGQDYDEATAFPAAAKKISQAA

SEQ ID NO: 145616 - protein, 331 aa, unidentified
MNQIGIDISNDVFDATLQQGDLVVRRQFSNAPTGHRHFIKWALRQASSAQVCLEATGIYHLQLALALDQHGDIEVMMVNPCAARRFNQAHMVRAKTDAIDADGLLLYLQRMPFRLWSAPREAVLQLQSLTHRMSQLDKEITRERSRLHAVRRAGPHTRPVQQDIQAHIKQLQRRLTVMKARAGEVIGSDQQLAEDTRLIDSAPGFAELSATKLVAELSALPDDMLPTQWVAHAGLDPRPCESGSSQRPPRRISKQGNVRIRAALYMPALVAAHNNANVSAYYEKLLANGKPKMVALVAVMRRLLHALWGMLHHRQEWDGDKFYRLNQPETT

SEQ ID NO: 145617 - protein, 322 aa, unidentified
MNKYKEIFGVDISKDVFDIHGSKSGHDQFENNASGFKSFLKSLSKESLVVMEATGYYHYRLAQFLFKQNILVSVVNPLSVKRFIQMKLAKVKTDKSDAKAICEYGQINDVPLYNALTDVQSECLQLFRLMDSFLKKRRATKNKIHGEEVLGIPSKWVYRSLKRDKKHLDKELKGIEERLLSLVKKEQQVQLTLLTSIRGIGLKTALFMLIITDGFTKFESSKQLCSYVGITPTIRESGSSVRGRSSISKVGNRKLRNLLFLCSFNACKHNKACRDIYERIVNKGKSKKLALIAVSNKLIKQSFAIAKSGLTYDEKYVSVLSK

SEQ ID NO: 145618 - protein, 341 aa, unidentified
MNDVSIIGLDLAKNVFQLHGAGQDGRTVMRKKLNRSRLLEFFAKLPRCVVAMEACASAHYWGREIGKFGHDVRLIHPSYVKPFVKRQKNDAADAEAIAEAASRPTMRFVGVKSAEKQASSMAFKLRDLLVRQRTQAINALRGHLAEYGLIVAQGVRHIPRLDKLMATYPDLPDLARGLCQNLLKHVESLSEQIAELEKGLRVRARQDEVASRLMTIPGIGAICATAIEALSPSAATFSKGRDFAAWIGLTPKQNSSGGKDRLGKISRMGRRDLRRLLVLGATAVVRWARRYGSPAGSWLSRMLSKKPPKLIAVALANKMARIAWALMVRGGAYQAPASGAA

SEQ ID NO: 145619 - protein, 346 aa, unidentified
MKHSAGLDVSVKDTAICIVDEVGKVVRETKVVTEPEAIIALLTSAGLEYARVGLEAGPLSQWLVNGLAEAGLPVICVETRHMKAVLTAQQVNKSDRNDARGIAQMMRVGLYKPVHVKTLASQQERMLLTTRKLLRDKLQDMENELRGTLRNFGLKVGVVSPGRFEARIRELVAGRLRLEMIVAPLLAVRRVLREQLAKLHKMVLDQVRRDPLCRRLMTVPGVGPIVALTFRATVDQAQRFARSKTGGAHFGLAPRRFQSGEKDYDGRVSKCGDAMMRTALYEAAQVLLTRTQTWSWLKAWGMQVARRRGAKKAIVALARRLAVVMHRMWVDGTEFRWRKEADTAAT

SEQ ID NO: 145620 - protein, 341 aa, unidentified
MSIVGAFDVHRRQLTFEYLDTGSGELKRGRVIPADRQHLREWLARFAGQDDVHFALEGCTGWRYVAEELVAAGITPHLAEPADTAALRGRKRHAKTDKTDARHLRVHLLAGDLPECWIPPEHVLEARAVVRLYKDLLDERGAWHQRIAATLFHQGVPVIGSMATPGGRAAVEHVELSPGGRQAVETGLRQVDRLTAELDVLRRQLGMLARRQPGCAALRAAWFGIGPVTAVAIWAELGDVRRFGNSSDVVRHTGLDITVRSSDGKGPPGHLSRQGPQLLRWALYESAKCAARPAAPDHGYYTAARDKRTAALATLSVARKLARRSYHTLRELGEEALAPAA

SEQ ID NO: 145621 - protein, 387 aa, unidentified
MAVIIGMDPHKRSATIEVIDERAQVLAIGRFGTDKAGYADMLAAGRAHSERIWAIEGCNGIGKHIAHRLVHDGETVVDVPPKLSAQVRIFATGNGRKTDPVDAHSVALVALRTPHLVRVEVDPELVVLGMLVDRRDELGRARTQTINRLHRVLLELFPGGAKQFLSSHQARALLATIRPRDIVGKTRRRLAVELTGELEVIDKRIKAAEKDLKDLVTARGSTLMDLHGIGPSGAARLLVDVANVHRFADRNRFASWNGTAPLDASSGDHKRHRLSRAGNRRINRTLHIMAVVQLRNATEGRRYYDAKKSAGKTSMESMRALKRRLSNVVFARMVEDQKRCEAAGPGGHSGTTLQSSVTDLTPDIGSSNKPLPEPARTHPRTTLPAVS

SEQ ID NO: 145622 - protein, 422 aa, unidentified
MSKRRYRTTEVNEVNWHRIAECVDGRRVVFGVDVAKEKFVGALMTPDRRVIETLRWRHPEQTRALVEALLKHLEPGSLEVVMEPSGTYGDSVWGLFVSAGVAVFRVSPKRVHDAAEVYDGVPSLHDAKAAYLIGRFHLDGGSRRWEALPVSRRELKAVVNLMDLYRERYQSGINRLEGLLARHWPEADKIMEIDSVSLMSLLAHYGGAAEVAAHGDQAEQLLRRTGRSLLRAEKIRQLLDSARSSVGLTCSDCERIYLQTLARETLDSYRSLSEAKKQVEQRAVDDPTIAPLAAVVGKITSAVLVATQGTPLSYADAGSYLKSLGLNLKEKSSGKHQGQLKITKRGPGVARKYLYLAALRFIRNDPIARAWYQRKAQRDGGQKGKAIVAIMRKLAKSLWHVARGRAFDSEALFNIRNLSLGC

SEQ ID NO: 145623 - protein, 388 aa, unidentified
MQIVTDRSQAPTAIRTDLGAIFVSLELSRSTWLVTSLSPGGGEKMSKHMIRSGDVAGLWSRFSQLKDKALDRTGQVVPIIVIQEAGLDGFWIHRLLQSERIESHVVDPASIATSRRRRRAKTDKIDGEALVRALLAYKRGEPRVCTMVRAPTPQEEDRRRICRERKTLTAERVEHVNRIKGLLFAQGISDYEPLLRKRWERLEELRTGDGRPLPEHLKAQIRRELDRLELTLQQIKAVETERNAMLSPSDDGTPAPGAMLKNLKGIGPEFAGVLWSEGLFRSFSNRRQVAAYAGLAPTPWRSGSVAHEQGVSKAGNPRLRTTMIQLAWLWVRHQPRSILTLWFHQRTQLNGGRVRKVLIVALARKLLIAFWKYVTAGVVLEGAETTSA

SEQ ID NO: 145624 - protein, 339 aa, unidentified
MLIIGCDYHPSVQQIAWVDTETGECGERRLRHRAEAEEFYRELKGKQVRVGIEATGHSRWFERLMSELRFEIWIGDPAQIRAKQVRKQKTDRRDAEHILKLMMKDDFPRIWAVTPENRDLRQLVWHRHRLVGMRTRVMNQLQAVAMNEGIRRKKGLWTEKGRQQLESLSLMPWTTRRREELLELLDRLDPNIDKLSQAIEQEAEQMPEVKLLMTHPGVGPITALAFVLVIGTPERFRCGKQVASYLGLIPCENSSADHWRFGHITKQGNKLLRFLLGQSAHSVARGEEAWQRRYAHLAMRRNKPIAKVAMARKLAVRLFWMWRRGWDYQQLKKFGSHVG

SEQ ID NO: 145625 - protein, 320 aa, unidentified
MPETTVWAGVDVAKATLDLAVSDHVTTHANDEHGWTEIVTAVRQRGACVVLEATGQYELGLAAALEAHGVPFAIVNPRQVRAYAQACGVLAKTDRIDATVLARFGLACTPARTVLPDEERHAIQVWLARRTQLVEMRTMERQRLQQARLAALRTRIQAHLTWLATELRALDRDLHTRLREHPSWRTAFALLVSVPGVGWLTAGRLLARLPELGTTPTPRLAALVGVAPFPQDSGRRRGLRRIRAGRAGVRSALYMAALAATRATSRPNVLQTYHRTLRARGKAPKVALVATMRKLLTILNAILHQQRPWHAMAAADRLTA

SEQ ID NO: 145626 - protein, 343 aa, unidentified
MQVIIGVDPHKASHTAVAIDTSEAQLGHKKVRATRTQVEQLLGWAEPYPARVWAIEGANGMGYLLAQQLVAAGEHVVNVPATLASRTRLLGTGRTNKNDPNDALSIAISALRSDALHPVRPVGHSEVLRLLAKRNRDLGAHRTRQVCRMHALLLELDPGGMSKEMYASDVDRFLAELTPTGPVEQIRYDLAVELLADIRRLDEQLKASHKRIKTAVRASGTTLTDVFGIGPIVAAMLIGFSGDITRFANRDRYAAYNGTAPVEFSSGGRTVHRLSTRGNRNVNNALHIAAICQLRQPHSEGRAYFDRRVAEGKTKKEALRALKRQLSNTAYRHLVADAARARG

SEQ ID NO: 145627 - protein, 355 aa, unidentified
MSEKFNSEIAVIGIDIGKNSFHIVGQDRRGSIVLRQKWSRGQVEARLANLPPCLIGMEACTGAHHLSRKLQALGHDARLMPAKYVRPYSKSEKNDYRDAEAIAEAAQRPTMKFVATKSADQLDLQALHRVRERLVGQRTGIINQIRAFLLERSIAVRQGLHFLRAELPGILAKRTDVLSPRMLRVIEDLARDWRRLDERIDALSDEIMMLARQDKGCERLMTVPGIGPIISSAMVAAIGSGDTFSKGRDFGAWLGLVPKQMSTGDRTILGSISRRGNRYLRTLFVQAAWVVLVKIKPEGWERYGLKSWIETAKQRLHRNVLAIALANKLARIAWAVLHKGRAFECVTNATASRPA

SEQ ID NO: 145628 - protein, 342 aa, unidentified
MNKTIVGVDLAKKVIQVCIYTNRKVHSNTEMTPKAFTCWLVNSRPATIVFEACGTSNYWKQLASSHGHDARLISSRLVAVVRQNQKNDALAIVQASLLPDVNFIQGKTAEQQQLQSIVRLRELSIRQKTASKNQLIALLSELNIQVSNRNGGLRATIDETLEDPDNGFSPSFRQAISTAWDQYLSLVEAIDIYDNCLEESLNYHPECKKLLKIEGIGILNAVNLYIALGCTDIGAFSKGKAAAACIGLTPIQHSSGGRAKIGSIGRGFKNTLFRSQLITGAMSIVSKVANRPPKTKKEEWLKNLIERRGKKCAAVALANKNVRTAFAILTQGTEYKAEPLVS

SEQ ID NO: 145629 - protein, 295 aa, unidentified
MATLVGLSLREKGASAHGKYEYIGMDVHKDTVSVAVMNAAGKVVMESILETKAATLLQFIRGPRGTLLVTLEEGTWAAWLYELLKPHVTQVTVCNPRKNALLRWGNKGDRIDAQKLAELLRQGSLSSVYHGEKGLRTLRELSRSYLTIIKDLTRVMNRLKALYQSWGIGCSGTQVYAPRHRAEWLSRIKEAGVRSRAEFTYHQLDGLQALRQAVRRELLAESRKHRATKLLRQIPGIGPIRAALVVALLQTPDRFRTRRQLWAYSGLAIETHGSGEYCYVEGQLRRSQKRWRCVV

SEQ ID NO: 145630 - protein, 369 aa, unidentified
MLLPRQWRIWQGAPKTKEHARSQNLNSAVAVIGIDIGKNSFHVVGLDDRGAIVLRQKWSRGQIEARLANMPPCLIGMEACVGAHHLSRKLKTFGHDARLMPAKYVRPYSKGQKNDFRDAEAIAEAVQRPTMKFVATKTAEQLDLQALHRVRERLVSQRTGIINQIRAFLLERGVAVRQGLRFLRAELPRILATPPEVLSPRMVWVISDLAEDWRRLDERIDQLSNEIAVLARQDAGCERLMSVPGIGPIISSAMVAAIGTGDAFAKGRDFAAWLGLVPKQMSTGDRTILGKISKRGNRYLRVLFVQAAWVVLIKPMSWERHGLKHWIEVVRKRLHRNVLAIALANKLARIAWGVLAGSRAFEASKLQAA

SEQ ID NO: 145631 - protein, 337 aa, unidentified
MKRYLGVDLHRTQFVVCTRWENGEQEIRQWRIGELARFVEQLQPEDQIAVEAMGTTARFHDAVVGGVARVVVVNPHQFKVISESVKKTDRNDAAALALYLEKDLLPEVRMKPKQNRELMHLAETRDLLVKQRSALKGKINNLLAMQGMELKREALSSKIALERVLASPVSGMVQLELRVLVEQIRSLSKSIAELDERLEEEGQQLPGYENLTSIKGIGSLSATVLLTVIGKISDFADENKLASYLGLVPKIANSNESERSGRITKQGNKLARTALVQCGLVAKRYSPYLQRFYERIKQRRGGGKAKIALARKLVKIVYDTLKNQWVFEDFPSFTLAA

SEQ ID NO: 145632 - protein, 410 aa, unidentified
MEILYSHCAGLDVHKASVAACVLTPGEGAEPRKEIREFGTTTGELRELAAWLSECGGSHAAMEATGVYWKPVFNVLESDCELILVNARHIKQVPGRKTDKADCAWLASLLRHGLLQASFVPDKEVRQLRDLCRMRTTLVRERVQVGNRLRKVLEDANIKLDSVASDSLGVSGRLMIEALIGGERDPKKLAGLAKGRLKQKRGELERALEGQVTEHHRFLLRELKESVEHLDGKIQRFEAEIAQHMPPFEWAAEFLMTMPGVDRTAACALLAEIGADMSRFPSARHLASWAGLCPGNNESAGRRRSGKSHRGNRWIKGLMTEIAWAASRTKNTYCGAFYRRLVSHRGKKRALVALANQLLQVVWHMLTHQQSYQELGADYFDQLHQQQLTRSLVRRLERLGHKVNIEPVAA

SEQ ID NO: 145633 - protein, 454 aa, unidentified
MEALPVQHPHAAGIDIGSRSHWVCVGFATEAGSCLIQEFPAHTAGLKAIAAFLREHRVNTVAMESTGVYWIPLYELLAAEGFEVLLVDPSYSHQLRGRPKTDRRDCQWIYRLHSVGLLAAAFRPDEKTCQLRAYLRQRANLIRQASRHVQHLQKALEQMNLKLTEVLSDITGVTGQTILRAILRGTRAPEKLAKYRDKQCKASEAQIAQALTGSYREEHLFALKLAYEAWQFALGQVEKVDEQIARQLARMKGDRALPPLKPKARPKRRANSPRFDVRTALYYVVGLDLTEIEGVSDLTALTVISEIGPGVSRFASVKKFCSWLGLCPNWKKTGGRVKSSRTRRGVNRAAQALRLAAQSLHHSRGALGGFLRRMKGRLGAQAAVTATAHKLARIVYLALKHGMTYVRQNQEEYEAQIKEKQIKALRRKARQLGLEVVEKPSVSGAPAAAEPVKG

SEQ ID NO: 145634 - protein, 429 aa, unidentified
MNCTQNKKIEQVKETTMIVGIDVGSEKHYFRAFNWRGIELTRKPVLFSNSMEGFNSFYNTIVELMQENKLEEAMVGIEPTGHYWFDLGQFMGGKNIKFVMVNPHHVHKTKELDDNSPSKNDRKDPRIIAGLVKDGRYFYSYMPTGVYAELRNASNRRFVLVEEQTRTKNRLQKWIAVYFPEYKGIYTHIDAKGGLMVLKQAPTPEEITKLGEEGIIKIWKDAKLRGNGHKKAMKILNAAMRSIGLKAGLTEARMEMQDLIEDYELQTKRLERVNDLIKELCRQVRYADKLLEIKGIGITTVAGFIAEVGDITRFDSTKELQKLAGLELVADSSGKHNGRTKISKRGRKRLRYLLFEVAISVVGKNEEFKEIHRYYTTREKNPLKKMQSLIAVACKLIRVFHVILTKGVRYDASKMLEDIRHPKEQLKAA

SEQ ID NO: 145635 - protein, 313 aa, unidentified
MAQMVPNVGIDVSKERLDVAVLPAGPQFNVSNDTAGWRELCRRLKPLEVRAIGIEPSGGYERGVIGALLEAGLSVRSVNAWKLRQFAKAAGLLAKNDRLDAQVIALFVATLPCREVRRDPMREHLAELVGARRQMVDLRQVLENHLEQMSDRGLGQMRQRQIRQLNADIVRLDRRIAEAVAAVPAFAARYNLLCSMRGVGPVLAATLLAWLPELGSITRRQVGALVGIVPYDFDSGKMKGLRCIFGGRANVRHVLFMAAQAGTIHNPVLHAFKQHLLAKGKEAKVAVVAIMRKLLTILNAMVRDGQPWRAVEA

SEQ ID NO: 145636 - protein, 387 aa, unidentified
MQKPHDNSKASPAAFMQDNTLIAVIELSLSNWLVAGLIPGVSREPLKKLEPNPEDLLKLLHGWRDEAIKAGRPITRIAVAYETGRDSFWLARWLRERGIDAHVIHATSVAVSREHRRAKTDRLDTAMLKRGFLGWLRGERGHCTVAIVPTMEEEDAKRPHREREGLVHEQTRVVNRMKSALIQFGVRNFNPKLRKARVKLETVRTPEGKSLPPNTIAALRRDMERLKIIKEQIKAIEQARLQQFEQKPEALANRMVYLLVRIYGLGWETAGLLVHELLSRTLRDRKAVARYAGLTGSPDESGSKRREKGLSRSGNARVRKIMIQLAWRMVKFQPDSALVQWFKQRTENAKGSRKPLIVALARKLIIALWRYANDGVIPEGFRLHSAA

SEQ ID NO: 145637 - protein, 412 aa, unidentified
MKLFVGIDVSMKDFKARMFDAEGEEIAKRMRYKNDDPGAESFVKYLVEICGANEVDSLRIGMESTSVYGWHLQMRLAGEPLLASFHPQVYVFNPKVIANFRKQYVDIPKDDWFDCLVIADRLRFGRLPESCQVDFRYLPLQRLTRFRYHLIQTITREKNYFLTNLFLKFNTICQDKVLSDIFGATSEAILTEFLSPEEIAARPLDELIDFLMEKGKSHFSNPEATAKALKHAAACAYRLHGSLLEPVNLILATSLQTICTLEQQVKSIDRAIEKELSHFPNTLQSMPGMGPVCTAGIIAEIGDIHRFDNEKAVAKFAGLTWRKHQSGEFEADDTPLTKTGNVYLRYYFVMAADSVRKWDPRFAEFYARKFKESSTHHHRRALVLTARKLVRVVDALLRSNQLYVPQGQRKVV

SEQ ID NO: 145638 - protein, 412 aa, unidentified
MEGETVIAGVDTHKDVHVLCLLDGLGRKIWSGSFRADPEGYDRLAEAIGDPGSCAVVGVEGTASYGAGLTRRLVELGYNVVEVLRPKRDKARPGEGKSDPLDAERAARKAASGRGCSVPKSQDGWVEAVRQLYVARRLAVATSTSCVACAKSMLTTAPGALRERFRGRERPKDLMPLLARRRKAGDALEESVLASLRSVAAVWKEARSQVESCDERIRALLEANAPALLGVEGCGTTTAAALVVAAGDNPGRLKGEAAFSMLCGASPIPASSGKTERHRLNRGGNRQANRALYEIAIKRMAYDERTKRYVARRTSEGKSRREAIRCLKRYIAREVYRVLMDPNPDGAAPEGPELAKMRKAMRVTQRQAAEGLGLSAASLGHLEHGRRRSTKLERRYYELLCELKGALPQTAS

SEQ ID NO: 145639 - protein, 337 aa, unidentified
MSVYVGIDVHRKRSQVAVVTEDGTVQLNKNVVNGSQPMLRLIGELPSGTPVAFEAAFGWSWLAELLEDYGFEAHMVHPLRCKAIASARLKNDKVDAAILAQLLRADLLPEAWIAPAEVRQLRALLRHRISLVRLATQARNRIHAVAADHGCDRPASYWTGPGRGWLAELDLPAASREIITDCLAVIDHLAPLTGRIDGELHARAKADPRVKVLRTLPGVGEFTALVMVAEIGDITRFGSARKLASWAGLTPTVRGSDLHVRHGHISKQGSAWLRWVLNQAAQTAKRSPEFAAAYSGIARRRGKKIATIAIARKLLTRAWHLLSDLQAADASTPPRRP

SEQ ID NO: 145640 - protein, 415 aa, unidentified
MKKVYDNCCGIDVHKKLMVACFIHGKEQEVREFGATTRELLELADWLAKGGCQMVAMESTASYWKPLYNILESSGLNAMVVNARHMKAVPGRKTDVKDSEWIADLVQHGLLQASYIPDRDQRELRELISYRRSLVQDKTRELNRLQKMLEGANIKLSGTITDINGKSARSIINTILSGTVIDSAKYDEMYDRKVIAHNLKASKEQIMDDLNGFMSPLQRKMMKELLKHVDELDAHIEHLNQDIDNHMKPDEKQAVNAIKDVTGLGVKSAQAVISVIGTDMERFPTDAHISSWAGLCPGDNESAGKRRSGKTRKGNYLLRTTLIVCAHSAVKVKNSYFRAQFQRVSAHRGSKKAYVAVAHSMLVAIYHILKEGAACQDLGADYYNQFNKERKINAYLKKLKTLGWEMPVAMKAQPT

SEQ ID NO: 145641 - protein, 377 aa, unidentified
MKSIKFVGLDVHAETIAVAVAEQSGEVRSLGVIPNREESIRKLVKKLGPVEQLRFCYEAGPTGYVVYWQLTALGAKCEVIAPTLVPVKSGERVKTDRRDALKLARCYRAGELTAVWVPDAQHEALRDLVRAREAAKKDQLRAKHRLGKFLLRHGRRPPTGVKAWTLKYLTWVKQGVHFEQPAQEATLLDYLHEVEHAEARIARLDLAIEEAVKSTPPEMKAVIEGLQALRGIAQVAAVTIVAELGEISRFSRARQLMGYGGIVASEHSSGESNWRGGITKTGNAHLRRVVVEAAWAYRHRPNVGAALRQRQELVSEEVREIAWKAQHRLYTRYRKLMARGKDKGKVITAIGRELLGFIWAIGVKVEAAQKVTERRAA

SEQ ID NO: 145642 - protein, 319 aa, unidentified
MNTTNRIYIKSSHRNIGIDVGKDTLDIYVYELSLHWQEANSPEGIRRLMSRLKRFQLTRVLVEATGGYERLLIEAATEQSMPIIIVQPIQVRQFARAQGAFAKTDKIDARLIAQYGVLLQPEVRVLPGKKVRRVRDLLARKRQLNAMRTMELNRSHKTQKIIAASHRRLLKLLDKEIAEINEKLTREVSDIAEWRRTYDVISSVPGIGDGVAFTLLGELPELGRLTNRQIAALCGLAPFNRDSGKMRGKRRIRGGRAPIRTVLYMAMLSAIQHNPVIKQFYQHLVAQGKNKKVAITACMRKMMTILNTMVRNDQEWQMN

SEQ ID NO: 145643 - protein, 453 aa, unidentified
MCLEDRPVLEPNAAGIDVGAREMFVAVPPGRDENPVRVFATFTEDLERLTDWLEQCGVTTVALECTGVYWIPLFEILEQRGIRPCLVNARHMKNVPGRRTDWHECQWLQFLHSVGLLRAAFRPGQDVCAVRTILRHRNELVAAASQHVQHMHKALTQMNLQIHHVISDITGLTGRTIVDAILAGQRDGAELAKLRDPRIKADTETIRKSLEGNWRPEHLFTLGQSRDLYRIYQQQIVNCDLEIEKMLQGFAPRIDPGEKPLPPDRKRNRAGSKRRRKNGHPHPEFDLRTEAYKLFGVDVSQIPGLEENALPLFSEVGRDMSRWPSAAHFVSWLALCPDNDISGGKLLWRGARRVKNRAGHLFRMAAYALHRSLTPLGNYLRRMKAKLGPQAATMATAHKIAVIFYTMIKNQVEYDETIWDARDAQREKKLQAKLKRQAKQLGYELVPIEPQAA

SEQ ID NO: 145644 - protein, 400 aa, unidentified
MSLAVGIDVAKEIHWIVAVDTVTGTELLSHRFLNEPAEITSVLAEITELEVEHGPVTVGLDIVGGIAGLLTAMTTAAGVALVHVPGLMVNRSRRATVGGENKSDPRDARVIADQVRHRPELRPITITDEQITRLRVLTSRRHDLVVDQTRRIQRLREHLVAIFPALERMADPTNLSDLTLLSRYVTPAEIRRAGADTITDSLRDAGVRRGRAATLAKRAVVVARDQHIEEVIGESIIAEVIRELAEEALRVRRRLRELDAAINETLEKHADAELIASMPGMGPTLTAELLAATGGMTRFATGNELAAAAGLAPVLHQSGKVLFRRRATTGKRALKQIFYRSAFCALSSPDIASKAYYDRKRAEGKSHHQAVIALARRRINVLHAILRTRQPYRPVGVTAA

SEQ ID NO: 145645 - protein, 359 aa, unidentified
MARKIMPQPEPLYVVMGVDTHKDLHVARAKDQVGRLLGELTVPAETTGYRKLQAWAHRFGEVDSWGIEGTGSYGAGLSRYLREHGEEVIEVIRPNRKERRDNGKSDPADADAAAMAVLSGKAKARAKAGDGTVEMIRVLRVARASAIKARTQTANVLQALVVTAPAPLRESLHTVSTINLVSICARSRPGQMSDVTSATKSALRSLAVRYEHLDAEIAALERELNRLVPKAAPELIARFGVGPETAGQLLVTAGDNPDRLDSDASFSMLCGSSPLDASSGKQKHHRLNRGGDRHANSALYHIVICRMRHDPRTKQYVAKRTAEGKTTKEIIRCLKRYVAREIYGVLKNMQHAPAVTTAA

SEQ ID NO: 145646 - protein, 364 aa, unidentified
MNDTYYIGLDVHKKSISYCVKTASGEIVQEGRVVARRQELRAWATAQAQPWRGAMEATLFSAWIYDTLKPYAQQLDMAHPARMKAITAGKKKSDRLDARTIADLLRCNLLPACYVLSPEMRDLRRLLRYRQLVVGESVRMQNKMAGLLLETGTPFVKSKLHGKKYFNQLIQTLEEVPESVKDLLQMSRGAMEMFESTQKRLVQRLLLEPALAARVERLCTIPGVGPITALTWALEIADPQRFSSIGDAVSYCGLTAAFRTSAGKEQRGPISKQRNAWLQTALIEAAKLAPRWNPQLAAVHQHELTRGHRNRATLQVARKLVAYLMAVDKSGQPFQMRSSPQKLEYKTTGKKERKKMPDPALAPA

SEQ ID NO: 145647 - protein, 341 aa, unidentified
MTIKRIGLDLAKQLFQLHGVDQQDQVVLRKQLRRNQMLAYFSNLPPCLIGIEACSSAHYWARELQKLGHTVKLMAPQFVKPYVKSNKNDAKDAEAICEAVSRPTMRFVAIKTIEQQDIQALHRIRTELVHQRTAKVNQIRGFLAEYGMVVERSVEKLRKALPMLLEDGENGLSFYFRALLQGLQQDLITLNDRVSDLDKKIKLLASSNTSANRLQQIPGIGPVTATALVSAVGDGKQFKRGRDWSAWLGLTPRQHSSGGKECLLGISKRGDSYLRTLLIHGARAVLKVAGHKDDPRSRWLQNLCTRRNKNIAAVALANKNARIVWALLTQETDFIPEGKPA

SEQ ID NO: 145648 - protein, 405 aa, unidentified
MNAVGIDISRGKSMVAVLRPFGEIVMLPFEVRHSNTELKALAERLKSIEGETRVVMEHTGRYYEPVANALHNFGLFVSAVNPLLIKEYGGNSLRKVKTDKADAQKIARYTLDNWADLRDYSPMDTTRYDLKTLNRQFNLASKQKTATSNNLIALLEQTFPGIRKCFESPVRSDGTQKWVDFVITFWHADCVRKYSKEAFAKRYRKWCKRHGYSVRSDTINEVYTLAENAVVLVPKFQTAKVIIQEAAKQLTAISSSVELYRSEMNRLASTLPEYPVVMQMFGVGNTFGPQLMAEIGDVRRFARKQSLVAFAGIDPAPNDSGDKYGRNSGTTKRGSPYLRKTLFNIMKCYLQKSPENEPVYQFIDKKRAEGKPYYVYMTAAANKFLRRYYAKVNEYLVSSEVSSSE

SEQ ID NO: 145649 - protein, 414 aa, unidentified
MPSPLFVGIDVGSRDNVVCCLTREEANRPLSRFTIKNNRPGIMELKDRISKLIRKHGFEETLFGLEHTGCYSTHAAMYLQRHLDFGCPSTRVYMFNPSLIKEFKKSHYLDAPKNDRVDAWFIAAKLRAGHLPHPFTWSEPLMALQRLTRARFHLIKDLTRESNFLATNLFLKCSDYTLAFNNKLSATSLAVMEEFESAEAIAEMPLDQLIDFLVLHGKNRFDDPESVARTLKKAARSSYRLPESMADSVNLAMASSIRVIRTVQEQLKSLKKAIQDHLDTIPQTLHSVPGIGPIFASGILSEVDINQFQTHKELAKFGGLAWTENQSGKFTAKRTRLIRSGNRYLRYYLFEAANSVRVHDPVFAEYYAKKLAEPKEFAEKRALALTARKLTRLVFYLLKTNRLYEPKGVIRQNT

SEQ ID NO: 145650 - protein, 341 aa, unidentified
MAVAGGFDLHRGQLTFDYVDTGTGESRRGRISPADRESLRGWLRRFDGVPDVEFAVEGCTGWRYVIEELRRAGITAHLAEPAETAGLRGSKRRAKTDWADARHLRDLLLDGRIPESWIAPAHVLEARALVRLYKDLLEERTSWQQRVHATLFHQGIPVVPELGTADGQQRLAAAGLSTAGRQAVQAGLRQIQRLNQEMAPLRRELARLSCRQPGCRALRRAHYGIGGLLSVAVWAELGDCRRFSSSDDAVRHTGLDITIYDSDGRRARGHIARQGPPVLRWALYEAALYASRPASPDYAYFCHVRDRIDGQRALLSVARKLARRCYHTLRDLGEDALLPAA

SEQ ID NO: 145651 - protein, 370 aa, unidentified
MLDTTTFVGLDVHARSIKAVSLDVMTGEVRCATFGYDAGAVAAWVRSVDPGARCVYESGVTGFDLQKRLSGLGVDCVVGAVSKMIKPSADRRRKNDRNDAEFLARMLSVGNVVEVWVPDDECEAARDLTRALEDARDDLSRSKQRLSKFLLRHGLVFDERTPTGRRKGNWTRAHWSWIESIRFTEGADEEVLAYYVDAVRRAAEEKSRLEGLVGAEARKPRWRRRVDSLRCLKGVDTASAADLVFEAGEFSRFRNARSFAAWVGLTPSEHSSGESDRRGAITKAGNKHLRKTLVEAAWHYMTCSGRPKDLAKGQAPDRGARRHAAKGVRRLVDRREALLARGGHGNKANVATARELACWVWAVGLMAEEA

SEQ ID NO: 145652 - protein, 432 aa, unidentified
MTERRELCRILYMEGKTMEKVYDKCCGIDVHKKLIVACLLCGKKSEVREFGATTDELLELADWLISAECEMVAMESTASYWKPLYNILEYSGLDAMVVNAQHMKAVPGRKTDVKDAEWIADLLQHGLLKASYIPSKDQRELRELVRYRKSLIEDKGRELNRLQKMLEGANIKLSGTVSKIDGKSARKILDFIVKGEKFTEEKYDEMYAKKEISHNLKASKEQILADLKGFLSPIQRRMLKELLAHLDELNEHIKNPNDEIDNFMKKDELEASKVIQQIPGIGNSSAQAIISVIGTDMSRFPTDKHFSKWAGLCPGNNESARKRKSGKTSKGNKVLRTTMITCAHAAVKNKNSFFSAQYARISAHRGKKRAIVAVAHSMLIAIYHMLSEGTDFHDLGSGYYNQFNKERKANSLMKKLKELGFEVTVATPVPTA

SEQ ID NO: 145653 - protein, 375 aa, unidentified
MGAGKLLGSPALMYQLNNTELSSPEETRSQFNGCPGVIKLGIDAHQQFYTVVMQEDASNPKPPQRFQKQAFLHWAAKLKNQGNQVHAVYEACGFGFGLQRKLSALGIECEVVCPQKLDEQNRRVKTDGLDAKALCLKLDRFVQGNGDALALVRVPTEAEEQLRAIHRQREQLVKARKRLEAQGCSLMVNHGIEPIQQWWKRRAFAKLQVPIWMQELLAKSQPILLALEEKIRALTVQLQAAAVSNQPRGFGALTSVVIDREIGNWQRFSNRRQVGSYTGLCPGEYSSGNTRLQSCVTKHGNPRLRAALVEAAWRLVLFQPNYKPIIKWNEVLRRGALATGAARKKAIVAVARQLAVDLWRIRTGRIRPEQLGLSI

SEQ ID NO: 145654 - protein, 372 aa, unidentified
MFSESEDDEQIIERVAALDLGKAELVCCVRLPGKTGTRRVQEVSTHTTMTRSVTELANRLVDLRIERVVMEATSDYWKPVFYLLEAHGLQPWLVNARDVRHLPGRPKTDVLDAVWLCKVAERQMLRPSFVPPAEIRQLRDLTRYRMSLVATRGAEKNRVEKLLEDACIKLSVVASDIFGVSGRQMMAALVAGERDPGRLAEMARARMRAKIPQLREAFTGFFTDHHALLLAQMLSRIDGIEADIELLDERIEAHLVPFADAVERLDEIPGISATAAAVIIAEIGVDMSRFPTAGHLCSWAKFCPGIKSSAGKSKGRGSTGHGNRYLARILGEAAVTAGRSDTFLGERYRRIAKRRGKKRAQVAVERSILVII

SEQ ID NO: 145655 - protein, 317 aa, unidentified
MESMEGSRHRVVGGVDTHKDLHVAAVVDEHDRVLGSSCFATTRQGYRQMLAWMESFGEIQRVGIESSGSYGAGLLRFVQRAGIEVLEVTTPDKHDRRRRGKNDDLDAQNAAHAAFARKRTVTPRSRDGMVESLRVLKACRKTAVAARRVALQMIHNTIVCAPDGLRDALRTMTRMQLVRTLAAWRPDLTAYRDVESAYRIGLKSFARRYLELHDEIADLDAMIGAIVADLAPELIARNSIGNTGAAQLLLTAGDNPERLRSEASFAALCGVSPVPASSGKTIRHRLNRGGDRAANSALHIIAIGRLRTDPGAMAESG

SEQ ID NO: 145656 - protein, 338 aa, unidentified
MFFIGVDPHKTSHTAAVLDAHEHLVSEVRVGADRSQRARLMAFAAGFEPRCWAIEGATGTGALLAQQLVAAGETVLDVPPALSARVRLLDNARSDKTDAHDARSAAVVALRHSKLRTVGLEDHSVVLRLLAKRHHDLVAHRTRAVCRLHTVLCLLVAGGLPKGLSAARAASELRRIRPTDQVGIERRRLAGELLAEVRRADADLIELKARIAVAVTASSTTITDVVGVGPIMAAYLIGYSGDVRRFPTAGHYARYNATAPIEASSGPNPRHRLNPRGNRQLNHALHIVAVTQVRNDTPGRAYYLRKQAEGKTRKEAMRALKRRISDAVYRQLLTDTPR

SEQ ID NO: 145657 - protein, 408 aa, unidentified
MEIVHPRCCGIDVHQASLAVCVSIKEEGKTEKHRLRCGTTTADLLRFADWLHEYKVTHVGMEATGVYWKPVWHVLEGQFELLLANPTQVRALRGRKTDLKDGERIADFLQHGLLQSSFVPPRPIQELRDLTRSRTTLKQEQVRIGNRIRKVLEDANVKLSSVMSDVMGVSGREILRAIAGGEFQAAELAELARGRLRGKIPVLQQAVTGSLNQHHRFLIEQWLAHWDEVGIRIAKFEKRIEEQMRPFEPAVQSWTSLPGIDRITAWTIVAEMSADMAPFPTAAHAASWAGLCPGQEESAGKRQSGRTRQGNVWLRRALTQAAWGASMRKGSYFKAFYHRLAARKGKKRAIVAVAHALLITGYILLRAGKRFEDLGDDYFDRLDRERLTRRLVKRLQRLGHQVSLQPAA

SEQ ID NO: 145658 - protein, 341 aa, unidentified
MRLYTGIDLHSSNSYLAIIDETGKRVFKKKLPNDPEQILSALAPYKDSIVGIVIESTYNWYWLVDALMSDGYSVHLANPTKIQQYHGLKYSDDQHDAFWLAEMLRLGILPEGYIYPKEDRPVRDLLRKRSHLVKLRSSLIISLQNIICRNNGFRIKTSDIKALKADRVAPFLDQNEDLALAGKISKESIDFLTLKIKAVENIIEEKMELREPYKNLLTLQGVGKTLGLTIMLETGPISRFAQVGNYCSYCRKVSTKWISNDKKKGKGNKKSGNKYLAWAFSEAAEIARRYYPEARAFYQRKMQKTNAMIAHQALAHKLARAAYYIMRDGVPFMPEKIFKSS

SEQ ID NO: 145659 - protein, 329 aa, unidentified
MVFLGIDVAKGRLDCAVLAAEGGRPPGRRSFRNDAEGAERAATWTTQVSGAAAADTHVILEATAAYHEPAAHRLAALGMRVSIVNPAQVRSFAKGIGVLGKTDRIDAQLLARYGQLARPRAWFPPARALLDLQGLIARLDDIEADLRREGNRLEQARTRGCPEVVEQSLLASLAALKSSRETLRRAIAAHVAAHGELQADLERLLTIPAVGPKTAVRMLAMLRARGFDSARQAAAYLGLVPVERQSGKSVRGRPQLSRAGNPRLRAALYMAAVVGIRRNPDLKAQYERLLGRGKCKMAALSAAMRKLVHLCFGVLKGEGGYRAGAATPA

SEQ ID NO: 145660 - protein, 373 aa, unidentified
MFHFTTLFIGMDVHKESFSLCYYDMMTNQFKHSTKVGPNVSYIVNYVNELRRLYGQDAEVLCGYEAGCLGFTLYHQLQAHGLPCIVMAPTTVMKEGSKRVKTDKKDAAQLAKALAFRSYRPVHIPTVEDEQVKEYIRMRTDHKVALKKIKQQILAFCLRHDFRYTEGSSNWTQKHVRWLHSLNLDGLYAEILTEYLLTYEKLVDQIERYDARIEQLGQSDSYQEKVSQLSCFIGVKTLTALSIVTEIGDFNRFATAQHFASYLGLTPSENSSGDKERRGAITKAGNSHVRRLLIEAAQSLAKGTVGYKSKELKRRQSGNRVEVIAYADKANERLRRRYRTLVLGKNKKQNVAKAAIARELSGFIWGMMTGRIA

SEQ ID NO: 145661 - protein, 412 aa, unidentified
MLFVGDDWAEDHHDVEVQDEDGRRLARARLAEGVAGLSRLHELIAEHLTDEEVDARTGFVAHNVMVGIETDRGPWVSALVAAGYQVFALNPVQVARYRERHGASGAKSDRGDAHVLAEIVRLDRAHHRPIAGDSPRVEGLKLVARSHQAFIWDRTRHFQRLRSALREFFPAALEAFPDLMAAEALELLERAPDPARAARLSRSKITAALTRARRRDPQTRAEAIQAALRAPALRQDPAIEAAYAVIVASAVRLIAQLNTQIAELQAVVAEGFGRHPDAEIITSQPGLGPILGARVLAEFGDDRTRYTDAKARKNYAGTSPITRASGIRRVVLARYARNRHLADATHQWAFCALTASPGARAYYDAIRARGVGHHAALRQLGNRLVGILHGCLKTRTLYREDTAWPQLTASAA

SEQ ID NO: 145662 - protein, 337 aa, unidentified
MIVIGVDVPKYSLSAVAVDEVGRQLDCLETSDAAELVAWSKRVGRRRRWALEDCRHLTRGLERTLQGHRQRLVRVPPRLTGPERRRGRVRGKSDLIEALAIARAALREPVLDSPRLEEPRLRELKLLVDHRDDLVDERRRCQQRLRWHLHELDPTLQVPLGALDRVVWLERLSRQLARREQTTQVRIARELLGRCRSQTRSIGELDRELQAQTTAIAPQLLELPGCAAITAAKLLCEIGPIDRFRSDAQLARHAGVAPLDASSGKHQRHRLDRGGNRQLNCALHRIAVTQGRVHPPARAYLERKQSEGKSRREALRCLKRQLARTVYVALKSEPLLT

SEQ ID NO: 145663 - protein, 429 aa, unidentified
MMYLGFDIGKRHHDAALLDGDGTVVRQLRFPATRAGFTQLATWLEGVAPAAVQIGLEATGIYWLTLHAWLQQWAAAQGVAPAIRVLNPLQTRAFRNANMRGTKSDRADCVAIARLLRWEGDRLASHTVPDERRAAARAISRLRTEMTQLRTSQLTKLGTVLDALFPEFAPCFASLGSASALAVLARWATPAALAHARPSELTRVLYTASRGHLGADKARQLRGAAANSVGVVDPYGATATAVQTLVAHLAHLTTQIAQLAERLDALQADDAPTRALITTVPGFGIETVRTWLAELPPVTAYVQQARLESRTLPPGRKPKHGADKLVAAVGLDSQVKQSGRWIGQARMSKRGNRYVRRVVMLAAHSASRSDPQCQAIYAAQRARGKHHTVALSHVAHQLLHIAYSVLLHDRPYTLPERFTRTQEVALAGA

SEQ ID NO: 145664 - protein, 322 aa, unidentified
MSVSVLGIDIAKQKFDAALLVEGKTKHKTCKNSAEGFEVLRLWFEKQGVQEIHACMEATGNYGEDLAIYLHEAGHMVSVVNPARIKGFAQSELLRTKTDKLDAALIARFCLAMKPGAWIPPSPEIRSLRALVRRVDSLIDMRSQEKNRISTAHQSVSLLIKEHIAYLDQEIEKIRKQITELIGKDPNLNRKKDLLDSIPAIGKVTIPHILAELDDLEKFDHVSELVAFIGLAPKETLSGSSIKGKPRLCKIGHARLRKALYMPALVSIQCNPVMIAFYNRLKDKGKNGKVIVCAIMRKLVHVIFGVLKSGKKYDPNFKPVAA

SEQ ID NO: 145665 - protein, 479 aa, unidentified
MFWLVGSFGLYLYKPLGYVSAIWGNGCLPERNYSMQNKQVVELLNSSSYLSVGFDVGADFTWMSIALPNQTIFGKPLKIIHSDPQSRDLAVQKIKEAQEKWSLESRCFLESTGIYHIPLLCFLRDKGFDCNTINPIITKSSTNMNVRKLHNDRYDSKKIALVGLKADLKVSILPNDNVIDLRNLVRDYYYFKDLQSAIVLKLTAELKISFPEYIPVFSKITTKSALKILESYPLAKDILNAPKDDVVEIIHKTARFGEKYALKKYDCLISAANAALTFGRALSSNAVRIRTYVKIYREYQDHLDEIMSAIKDCVESMKSSDRIIYDRIQLLQSLRGVGFLSAVVLMAEMGSFDLFSSPKKLFAYFGADPGVNDSGKFKGDKVHMSKRGSNLARRILHMIAINNLIVKKGTKAPVNPVIYEYYTLKCQSKKKNVAIGAVMHKICNIIYAMLRDNRPYELITPEEHRKRYAVQNNRIRSAV

SEQ ID NO: 145666 - protein, 345 aa, unidentified
MNYFAGLDVSLKRTAICIVDRDGNIVREGVTDTEPEALISWLRNTRFALQRVGLEAGQCSSWLHKGLSEGGLPVICVETRHAKSVMQAQTVKTDRNDARALAQMMRTGWFKAVHIKSEDSQKLRALMGSRRCLLDKQRDLNNHIRAALRTFGFKVGLIGQSRFEERVRELIVADGDLQALVVPLLEARRMLGEQANVLTRLIGRLVRSDATCRRFMTVPGVGPLTALAFKTTIDDPGRFRKSRHVGVHLGLTPGKYASGEVDYNGRITRCGDAFAREHLFEAAHSLMVNTRRWCSLKAWGIRIAKRSSMKNALVAVARKISVILHRMWCDGSDFRWERSEATAAA

SEQ ID NO: 145667 - protein, 410 aa, unidentified
MDVIVSRGCGLDVHQATVVACLLTGEPGALPRKQVKTFSAMTGALLEMREWLKTADCTTVAMEATGVYWKPVYNLLEGHFDLVVANARHIKAVPGRKTDVKDAEWIADLLRHGLLRSSYVPPPELRELRALLRYRVKLVNARSGERNRVTKLLESCNIKLSSVASDVFGLSGRLMLDALKRGQASPEEMAELAKGRMRSKLPLLKLALEGRMEDHHRHLLSIQLDRLDRLDRDLKQMDAKLESKLKPYERQMELLDGIPGINWVTAATVFAEIGIKMSQWPTVGHLTSWAGLCPGQNESAGKRGKSNIRPGNPYLRSALVEAAIAATCAKDSYFREKYYRLKARRGHKRAVIAVAHKILIAIYYVLSSETPYQELGADYLERLEPERLKRNLVRRLERLGYQVNLEPNRA

SEQ ID NO: 145668 - protein, 340 aa, unidentified
MNELTRIAIDTSKSVFTLHGTDAVGRAVLRRNLRRQDMVRYFEKLAPVEVALEACGGSHYWGRTLQGLGHRVRLIPPQYVKPFVKRAKNDRNDAEAISEAASRPQMRAVPVKSAEAQAAAMLLSVRALLVRQRTQLINALRGHATEFGLVAAKGNKGLAALRTEIAADDGLPAAAAHALQQLGGEIDRIEGRLALIDKELAAQHRANAQSRRLAEIPGVGLMGALNFALRVDPSQFQSGRHFAAWLGLTPKEHSTGGKQRMGGISRAGDERLRQLLVLGATAVIRYAQKGRPGVSAWLLNLLERKPRKLAAVALANKMARIIWAMLTSGEAYRRPTPIAA

SEQ ID NO: 145669 - protein, 325 aa, unidentified
MLRFVGCDVHKRTAVFTILLEDGTFFATHTVPVTREALAVFAQRQLSSGDRLAMEATTNTWAVAGLLRPFVKEIVIGNPLRVKAIAEAKIKTDKVDSRVLAELLRVEYLPAVWQPDQDTQRLRRLTHRRAALVSDRTRLKNRLHSILHHCLIPMPECDLFSQKGRAWLKQLPLSIEEGLARDSDLRLLELTELEIAQLEEQLVREAWQGEKVRLVMSIPGIDYTVAQTCLAAIGEISRFPNAKKRSAYLGLNPSTRQSGAHCYHGPITKQGNAHARWLLVQAAQHLAQYRGPLGQTMRRIVKRKNRNVAVVACARKLAVLLWHVI

SEQ ID NO: 145670 - protein, 348 aa, unidentified
MEKLIRIGMDTSKSVFQLHGVDSVEQPILRRKLRRGQVLPFFSDLPPAQVAMEACGASHYWARELQALGHEVVLIPPQYVKPYVQRGKSDAADAEAICEAASRPKLRKNFVPIKSIEQQAAQMLTKLRAQFIGRRTQLANSIRGYAAEFGLTAPKGLSRLRELLADIRADATVPDLAMELVEALAGELTRVDDQIATLDKKLMQLHRGNEMSRRLAGIPGIGPVGATLLSIKVTDAHSFKSGRNFAAWLGLTPKNHSTAGKNRLGVITRAGDEMLRSVLVAGATAVIGDLRRGGNRIWPWLKALIARKPPKLAAIALANKMARIAWKLMISGERYRPIGGSAPMAMPT

SEQ ID NO: 145671 - protein, 434 aa, unidentified
MNPPCEQTAQDWLAHRAFGGLDWASQKHNVIVVDSRGKIVEEFEIAQSALGWKKFRERLAPYGAIPFAIETSQGSAVEQLLEAGMEVYPINSKSAKSYRERKAPSGVKDDRLDAWSFADACRIDGQGWRALRPEDPLVKELRLLCRDEVGLIQQRTSFICQLRHALGEYYSIALEAFEDWGSMSAWMFIQRFPTPQLLQEAGKRQWEKFLHARHLWRTESGPRRMELFAQATELCGTVPMANAKSQLALSLISMLFALEKQLGIYRQRIEELFSRHPDHDLFGSLPGAGPKLAPRLLSEIGDDRGRFEDGPQALQCLAGSAPVTRRTGKGKVRANPDHWPCHQRWACDRYLRHAMHLFAEQTLGQCVWAQIYYQHHRQKGSSHADALRRLAQRWLKIIYRMWIDRKPYDAILHHHNQLQHGSWVLELNPPANCK

SEQ ID NO: 145672 - protein, 425 aa, unidentified
MNYKQNEKINQVKESTLVVGIDIGSTTQYARAFDWRGIELGKVFTFSNSREGFESFKSWMQHLQDKYRKSDVIVGIEPTGHYWFDLGAYLEDEGILLVMVNPYAVKQTKELDDNSQSKNDRKDPKVIAKLVTEGRYSAPYTPDGVYADLRIMVANRKRLIREMTQIKNRFARWFAIYFPEYTDVFGDYEAQSSMLLLKKTCTPEAIVELGAEKINQIWRDAKLRAVGMKRATTLCETAKRSIGLKKGSSAAQYEMKLLLEDYEYKKAQLDAVMEEIEKLCRKIPESEQMLAIKGIGVITVAGFLAEVGDVRRFESPRQIQKLAGLSLRENSSGKHKGQTTISKRGRSKLRAVLFNAAIPLIAKNPEFKSLHEYYTTRANNPLKKKQSVIAISCKLIRVFYAILAKGVTYDAQKLISDIHRQPQVA

SEQ ID NO: 145673 - protein, 388 aa, unidentified
MNAVDPHVAEKTAIRTQLGAIFVSLELSRSTWVVTSLSPGGGEKMSKHSVQAGDVAGLLERFSSLTAKARTRTGESFPAIVVQEAGLDGFWLHRVMVGEGIESWVVDPASIATSRRRRRAKTDKIDGEALVRALLAFKRGEPRVCAMLRVPTPEEEDRRRIGRERKTLIAERVEHVNRIKGLLFSQGVLDYEPMRRDRRVRLDELRTGDGRLLPQYLKAQVSRELDRLELLIDQIKTVDGVRDTLVTQAEGSAPIPSQVTMLTGLKGIGPEFANVLYSEGLFRHFDNRRQVAAYSGLAPTPWQSGSIDREQGVSKAGNPRLRSTMVELAWLWTRHQPESALSQWFRERAKIDSRRKATIVALARKLLVALWKYVTAGVAIEGAVMKAI

SEQ ID NO: 145674 - protein, 360 aa, unidentified
MRYSTIVGIDTHSKKNAVCAIVPATGEMREAVLSEDPGQLLSWISGQGFPEPVGCVYESGPTGFGLARALEAGGVACTVAATSKLSYRVDRQKNDRADAKWLARQMLAGGVRAVRVPTPEEESLCHLSRLRGEVAADLRKAKQRVSSFLLLTGTEYTLTKKKWSKTFRKWAESHEFDQPADTFTFRCKMSAVLRLEERLAEVEAEILRTIASSPKLSERMSRFTCIHGIGKVSAFSLVCEVHDFDRFNNGASFASYLGLVPSESSSGKKVSRGAIAKQGNSHLRRILVEAASCYSKPFKAVRSEDAAVPEAVRAKAEKCAARLRKRRAALKMRGVSANKAKVAVARELAEWIYHIAVMPA

SEQ ID NO: 145675 - protein, 420 aa, unidentified
MKSFVPVAGVDASKRFSDLCVLSPDNNVLLRQKIYHDMGSMNLAEKKLHEIELECGARPVVVMESTSHYHLILFQFFTDAGFEVVVVNPIQSGALKNINVRKVKNDRVDAYRIAMLYRLKVLRPSQIPTSSLRGLRLLTRQRSELKGDVARFKNRLTAYLDQIFPGYGEVFSDVGGSASRAVLHMCPTPEKLLNADGSLLAKAICEAGNKGPKFGAEKAAKLREAAGSAQVIGVRSASNASLIKNVLDIIEGLLAAIQRIEGEIKELVTQDTRLDEDVKLLCSIPGIGFSSAVVIAAEMGNISLFRKPKQLAAYFGLDPGEKQSGTFKGRKNKLSKRGSPQVRAVLHMAAVSSVSQNRDGTYRNPVLAEYYERKCAEKPCKVARVAVMRKLSNIIYAVLRDRRPFELRTPQEHMALLAAA

SEQ ID NO: 145676 - protein, 328 aa, unidentified
MKKLLCVYIGVDVSKELLTVNAGDYYRGDVPNSAVDIRRLIKELKRKIGRDNVPQVCFESTGPYGSALFEECARAEVPASVLNPAKVRHFAKAMSESAKTDPIDARVIRLYSEAKQPVPTHAPGKAERLLRQLILAREALTKSVVQLSGTLESMTEPVARRFVAQSVEKLKERIKTVDKRVATALKEDARLDGLAGELSKIEGVGGLSAAKIIALVPELGTLGRRDSAALAGLAPFARDSGKFKGKTFVGGGRADVRRALFMPATVAIRYNPVLKTVYERLRKAGKPYKVALTAVMRKLFQYMDRVAARWYAEHGGTVDLAAPTHVSC

SEQ ID NO: 145677 - protein, 419 aa, unidentified
MQEKPGVFAGIDWASVEHQVCLMGGGPPVQRTFAHDALGIGALVDWLVGQADHPQDIAVAIETPHGPVVEALMDRGIAVFAINPKQLDRFRDRFSPAGAKDDRRDALVLASALRTDRHCFRRLVPLDPLVVELREWSRMAEELKEERTRLANRIRQQLWRYYPQALEITDDAAADWFLDLWALAPTPADVARLTKKKIARVLTTRRIRRIAAADALALLQQPALTVAPGTTTAAEAHIATAAERARLVNRQLKEVIRRLDVLVDQLAGPDVPETDPGQPSEQRDAAILRSLPGVGRIVAATLLAEAHQALQSRDYRALRTLTGVAPVTKRSGKSRRVEMRQACSQRLRTAVYHWARVATQHDPRSRARYATLRARGCSHGRALRGVADRLLAVACAMLKTKTTFDPLRAGAVAAAPESP

SEQ ID NO: 145678 - protein, 376 aa, unidentified
MKRKLYVGMDVHKETIRIAYLTSNSKEILKEQQIKHEEVQIKKFINRLKLEWDEIDCCYEAGVTGYPLYRYLKSLGVNCILVAPGKIPRQSSDKIKTDKRDAIKLARLMRSGELESIHVPSEEDEAVRDYLRSRDSLRLDLGRNRQRLMKFLLRKDIKYSTTKYWTVSHYKWLNNLHFNNEILQETFNDYYSRVRVQEENLKAMDKKIQEVAESESYREKVGILRCFRGVDYLTAMFLLCEVNDFKRFKTAGSFMSFLGLVPGEYSSGSKRKQTGITKTGSPRLRRILTEAAWQHRFPGTGSKTVTARRSGQHALVVALAEKASLRLHKKFRNLQLRGKNSSSDDNGSFKRVIRISLDSDESGCIELEVKAISKIS

SEQ ID NO: 145679 - protein, 451 aa, unidentified
MSLRKRVKAKCNSQLPTLHPHAAGIDLGATEIQVAVPCDADPDPVRTFATFTDDLLALRDWLKACGVKTVAMESTSVYWIPLFQMLEAAGLEVYLVNARHCKNLPGRKTDISDCQWLQYLHSVGLLRASFRPPEHICAVRSLLRHRANLTRYAGSHVQHLQKALTQMNLQLHHVISDLTGVTGLAILEAILAGERDPLKLAALKDHRIKASDATIARSLRGDWRTEHLFVLQQALDTWKHYQHLIAQCDQQIEQDLARLESQPAAHPLPPPATTHRQPQRNEPRFDARAELHRLCGVDLTQVPGLQINTTLVLFTELGPDFVTRFPTAKCFASWLGLCPDNRITGGRIISVKTRAVKSRTAMALRLAAQSLWRSKDYLGECFRRWKARLGTPKAITAMAHKLARILWHLLKYHQPYDPSVWAKAEAKLKQKKIKRLQQNAAALGFKLLTAS

SEQ ID NO: 145680 - protein, 338 aa, unidentified
MIAVGVDTHKHQHLAVAVDALGQLLAEVTITATLAGYRELLTWIAGLEGEVRVGIEGAGSFGAGLCEHLQDNGVEVFEVERPKRRERRTGKSDRLDALLAAKKVLAGDGLSTPRGHGKRVALQMLLVAYRSVISERSRLYNQLQALHVTAPVTLRERVGPARNGATLARRLTGMRTRPNASLQENTTLQVLRDIANRTRALDDQAAAYTRQIDALARELAPTLMDEPGVGPITAGKLIAFNPARFKSEAAFARANGTAPQPASSGKTVRHRLSRGGDRQINTAIYTIALSRSVHHPPSRTYIQRRINEGKTKREAMRSLKRYLSRDLYNKLSNTPLTT

SEQ ID NO: 145681 - protein, 343 aa, unidentified
MDHFAGLDVSVKETSICIVDDTGKIVREVKVPSEPEALLQVLMNPAYHFKRIGLEAGPLSQWLFSALAEAGLPVICVETRHMRAVLMAQINKTDRNDARGIAQMMRAGLYRPVHVKALRSQKLRMLLTNRKLLQAKAIAVENDLRATLRNFGLKVGMVGTAKFEARIKELVENLPDLAMLVEPLLIVRRVLREQIDILHRRLLAVVRNDDVCRRLMTIPGVGPVVALTYRVTVDVPARFKNSKAVGAVFGLTPTRYQSGESDRTGGISRCGDEMMRVMLYEAAQSMLVVSTKWSWLKAWAMKIAKNRGMKKAIVALARRLAVIMHRIWVDGTEFRWTKEVVAA

SEQ ID NO: 145682 - protein, 317 aa, unidentified
MNNSKIQISVNIGVDVGKANLDIALHPTGQFYSIPNSEAHIQRFVKILKGYAIERIVVEATGRYEHALVQACDQAGLPIIVVNPTSVRRYAQAIGVLAKTDRIDAQVIAKYAATLKPEFRPIPDKTSQKIKDLLTRRSQLLEMSTMEKNRLQILPKTLHRSITSLLKMLQSQVKTITQQIDQEVAKVDHWRIKAEILTSVPGVGKVLTYTLLSELPELGSLNRKEIAALVGVAPINRDSGKLNGKRRIRGGCHRVRTVMFMAMLSSIQCNPVFKRFYEHLKAQGKLPKVALIACMRKMIVVLNTMVKNQEPWRENMV

SEQ ID NO: 145683 - protein, 352 aa, unidentified
MKCDKYMGMDVHQAMTVIAVMDAEGKIVLETMVETQAASIIRLIQGLSGPLHVTFEEATQAEWLYEVVRHFVAEVVVCDPRRNKLLAEGSKADKMDARKLANLLRTGMVRGIYHGNGTRQLKELVRGYETLCRDSQRTMARIKAIYRARGIRTPGRSVYQPKMREQWLEQLNEPGVRQRVGWLYQQLDHLKPLRQQAKQAMLQESRKYRGVQLLRTIPQLGPIRAALIVATIDTPHRFRTRHQLWSYSGLAVITRMSAEYDFQQGRVVRSRKPIATRGLNRNCNRRLKDVFIGAATGGSQREPYRTYLQGLQDKGIRKEMARLTLSRKIAAVALSIWKKGETFDPKKLNWAT

SEQ ID NO: 145684 - protein, 341 aa, unidentified
METNIIIGVDLAKSVFQVHGADRTGAVLFRKKLSRPQFLKFMTAQPICLVAMEACSTSYYWARTLSDAGHDVRLIPPIYVKPFVKRHKNDAADAEAIVEAALRPNMSFVEPKSAEKQALSMLMRTRDQLIDHRTATVNALRGHMAEFGLIVPVGIKNIVRLKELVEADSTLPVLATEMAAIHFEQIVELTRQIDILTEKIKAYGASSPKLKRLRTMPGIGPIGAMIIETFAPDMATFKTGRDFAAWLGLIPLQNSTGGKSRLGKITKMGQKDIRRALVIGAMSRIAGYARQKTRAEPWLQDKLDRKPKMVAAIALANKMARQIWAMITKGETYKLQGVAAT

SEQ ID NO: 145685 - protein, 386 aa, unidentified
MHTPNDLNQSRIVLKQDSTLIAVIEMSLSSWLVAGVVPGVERQPLKKLAVDESALLKLLNRWREEAEKVGRKIERIAVAFEAGRDGFWLARWLRARGIEAHVIHASSVAVSREHRRAKTDRLDTELLKRAFLGWLRGERDHCKMVAIPTTKDEDAKRPNRERESLVGEQTRIVNRMKAALSRLGIRGFNPKLKKAAERLEDLRTPEGEPIPPNTLAELRRDMLRRRLVSDQIRQIEDARLERIEHAPNDGPHAMVRLLARVIGVGIETADMLVQEVLSRNMRDRRAVARYAGLTGSPDESGTRRREKGLARSGNARVRRGMIQLAWRFLMFQKDSALAQWFRARTENARGTRKTMIVALARKLLIALWRLVREGVVPDGVVLRPAQ

SEQ ID NO: 145686 - protein, 356 aa, unidentified
MIVGAFDVHRRQITFDWVDRATGEARRGQITPATREALRSWLGELPPGGGDVAVEGCTGWRFVAEELQAAGVTPHLAEPADTATLRGRKRRAKTDRADARHLRELLEQDRLPESWIPPAYLLDLRELVRLRKTLIDQRTQWKQRIHAVLFHHGLPTPPQAIGTQAGRVWLAGVGLPPPSRLLVDIGLAEIDTADARLEPISGWLRAYAARQPGCRALMRELYGVGPLCAPTILAELGDARRFAGGDAVVRYAGLDITVWSSDTKRSPGHLARQGPEVLRWALFEAAKSSARRTAPTHGYYAQVKDRLSANRATLSVARKLARHARHVLVELGEEALAPVGGDQLPPLVAVALPEAA

SEQ ID NO: 145687 - protein, 341 aa, unidentified
MELQLYGGIDLHSTSNHIGIIDARDRRVLKKKLPNDPRIIVATLEPFNRGLVGVVVESTFNWYWLVDLLMEEGYRVHLANPSGMKRYEGLKHCDDTHDAFWLAHLLRLGILPEGYIYPKEQRPLRDLLRKRGHLVRLRTSLILSLQNIISRNCGCKVNVNRIKRIRENEVTPLLLGHGELELSGRVSKEAIDFFTRKIREIETVVEKKLRVKEPFTFLKTICGIGKILTLTIMVETGSIARFPTVGDYVSYCRKVPTRWTSNDKTKGKGNKKNGNKYLAWAYSEAAECARRYDPFARSYYNRKAAKTNFMVAHSALAHKLARAAYYVMRDQVPFDHHKLFV

SEQ ID NO: 145688 - protein, 495 aa, unidentified
MAIELSGGPAVPSGRPGREVGYRKEKRGSLKWCGGVRTDSALKQEVIPVKKKKAYRAKEINEVSVAKVIESRKGQKATAGIDVGKDDLFVMLRWNDGDFAGPWHAKNTSEIREVVEFLATLALGCELIVALEPTGTYGEPLRYALTQAGLEVHRVQGKAAHDYAEVFDGVPSQHDRKDAAVVAELAALGKSAPWPYDAESQEDQERVYWVERLDVAQQQLQVWTGRLEGLTARHWPELTEFLKLSSVSLLKLLAHYGGPAQLAADEKAEERLAGWGRTLLPPEKIAAVLESARETMGVPQGKFERQWMQECANELLAARRAKQKAKRELKRLGEQNPAVSRLAAAIGFATASVLWVFLGNPQSYHCGEAYRKAMGLNLKERSSGKYKGQLRITKRGPGAVRRWMYLASMRLLQEAEVRRWFEAKKARDGGRGGKALIGVARKLAVALYRVTVDEVDFDASKLFPGKPLKQTSPSAQARQKGPPLRAFAVTSIPEG

SEQ ID NO: 145689 - protein, 392 aa, unidentified
MYIVGIDIGKNHHEASIVSPEGKQIGPSLRFATTHKGADSLMSFIFKNIGNSPCVFGMEATGHYWYPIYSFLKAKGYTIYVINPIQSDSLRKMYIRQTKNDSIDSFLIAEVIRFGQFGTTSMADENILAMRQLCRYRDSVISSRTEIKLRIGTIMEQIFPEYEKQFSSLWVSTSMGILEKYLTPEHIENAPIDELFEIIKDKSHNRLTKAKAISIKEAAADTFGIKIAQDAFSFQLKQLIDRMNFLDKQIEALDCQILEYYEKFDCYLHTIPGIGIIGAATILAEIGDISRFKNSSALVAFAGIDPTVRQSGEFNSTHNHMSKRGSPYLRHAIFLAATTCSFHNSPLNAYYKKKRDQGKHHLTATGAVARKLTTVIYAVLRDSKPYEPKSFC

SEQ ID NO: 145690 - protein, 315 aa, unidentified
MTPTLLFVGIDVAKAECVVAVRPTGTTWTVPQTEAGWAALATRLQALAPALVLCEATGGLELPLASVLVAAGLPLAIINPRQVRDFAKAKGLLAKTDALDAAMLAHFADAIRPVPRPVPDATTQTLAALVTRRRQLVEMATAEENRLGSAPPPLRARLQAHLRWLQRELAALETDLDQAIRTHPGWRVQEDLLRSAPGVGPILAVTLLGGLPELGTLSRGGIAALVGVAPWNRDSGRRRGPRRCWGGRADVRAVLYMATLAAVRCNPVLRGFYQRLLAAGKLKKVALVACMRKLLTILNAMVKTQTPWAPRIAGA

SEQ ID NO: 145691 - protein, 351 aa, unidentified
MIIIGVDYHPSDQYIAFVDTETGEYGERRLNHSDGEAEKFYRELAARGISVRVGLEATGYSRWFERLLAELGIEVWIGNAAEIKTKRVRKQKTDREDARLLLKLLRENNFPRIWVPSRENRDLRQLLWHRHRMVQMRTRIMNQLQALAMNEGLRRKKTLWSDQGRAQLEKLSLGTWTSRRRKDLLELLDRMNPSIEELTAAVEQEAKKWPEVLRLMTHPGVGPLTALAFVLIIGTPERFQCGKQIGSYVGLIPEEDSSANHQRLGHITKQGSSLLRFLLGEAAQAAARCDADWRRRYMHLAVRRQRNIAKVAMARRLAVRLYWMWRNGWEYAQWVAFGSHAGQLGTGHGVQ

SEQ ID NO: 145692 - protein, 402 aa, unidentified
MWYVGLDWADTHHDVDVLDEEGLRVGARRFAHSHEGLNELKQFLLSIAAQPENLACMVETNHGLLITVLLEAGIPVYPVNPKTANQLRKSAGAKTDHIDAHLLAKMGRLDLAELRRLEPDHPIVAELKTLTRDQDALIQTQTRLVNQLTACLKDYYPAALNLFAKVQQRSTLVYLQTYPTPQAAASASVEEITATLRSGKHTNPTQVAPKIVEELHRPQLVAGEVMVRAKSRLMVSLVKQLLVVIEDIASYDQAISTLFLTHNDHGIWCSLPRAGQRLAPRLLAEWGDDRTRYADGSSVQALAGTAPVPFQSSNYAKAHKRFACLKPLRNALHQFAWQSTLQEAWALAYYQRKRAEGKTHSMAVRALANVWVRIIYRLWESQTCYHTETFEAAQLAHAKRAA

SEQ ID NO: 145693 - protein, 322 aa, unidentified
MAMLSFGGIDVSKDRLDIMVLPDEQCSWVSNDAAGWAELIEQLRGSSITAIGVEASGGYERGVVRALLAAGMSVRQINPFKLRQFAKASGILAKNDRLDARMIASFVAIMPTRPAQRQAPMIEQLAAMLTVRRQLSDHKVATENASRLLEGAMLQRLSRRRIAGLTADIDLLDQRLVEIVTADPALAHRFRLLTSMPGVGAVLACTLIALLPELGQMSRKQVAALVGLAPYDFDSGKLKGRRCIWGGRARVRHVLYMAALSASNWNPGLKAFHDRLEATGKKPKVVIVAVMRKMITTLNAMLRDGTTWVDRYSGRRSASTAR

SEQ ID NO: 145694 - protein, 390 aa, unidentified
MPNVQMDSLFANSWMEGVSIIDVLYHRCAGLDIHAETIVVCALLGEEDHIQKEIETFPTFTKDLFRLLKWLEDRGVTHIAMESTGVYWKPVFNILEDYFDITLANAQRIKNVPGRKTDVSDAEWIAKLLRYGLIEKSFVPPENIRELRDITRLRKKWIGQLTAEKNRIQKVLECSNIKLSSVISDVFGASGRKLLERLMKRGYIEEQEIDACIHGRMKGKRQQIQDSLFGTLTEHQLFMIRQSWKHIESLERLLREIEDRIDQLLQVYKQEMELLMTIPGVKKETAAVIIAEIGVDMGQFPTSQHLASWAGVAPGNHESAGKSTRTTKGNPHIKSALCEVAWALSRCRNQWLAAKYWSLAARREKKKALVAMAQRVLTIIYCMLSQKEPF

SEQ ID NO: 145695 - protein, 437 aa, unidentified
MSDQKSVEIRVSVDVGYRRHSVAIGLPSGEVLEEFEVAHRPEGFAEFFSRIEKQQKIRGCEVAVAMEGFNGCARPLDAMVRRRGYRLYNINNLKLARFKEIFPGAAKSDRIDARKGLELFQLSDHLPLAKEVLQEVKGTPRENEVLKRLTRRRRRLVDERVRVISNLQTDLQAVCAGLLEITKNAGNQWFLNFLLSAPTLSQLARLRPATLRKIPAVGRKYAGLIEDWQKRAHFSEEVEWVSEMIQEDAKRCLELDEKIKALRAKIKEVAKDSKIAKTLLSIPGFGTICTAELAGEIGTIERFSKEGSLALYIGMSTLDNRSGKYQGSKQPKHVNTRAKAAMMVALDRHRKYVPESQRYYEKKRSEGKKHNQAIRALGRHLCRIIYKLLKEEREYEIRPEKGNTKTKVSARSLIKRQIRKPKISDKGKNNKIYHQGA

SEQ ID NO: 145696 - protein, 445 aa, unidentified
MFESFKTPSVWKVIPMKKRAYRSVSVQSVKAECFLDEFQRFGGSVGIDVGKESFLVSLRYGNDRFEQPWKVKSIQEMPVLVRVLQALHAIKPLLIGMESTGTYGDALRQALTAAGLDVRRVNNKASSDYAEVFDGVNSQHDGKDAAVIAELVSIGKSQPWRWEAPSQADEELCQSVEWLDIHQRQEMQWLGRIEAQLARHWPEATHWLALGSATLLRILAQYGGPAALAADPRATWQLKRWGGSRLSDETIAGLLASAEETVGVQMSSLASEQLKKYALEAQRNRGEQALTKKTLERLAAADPVLKAQAEVVGVNTACVMQAALGDVRDYNSGPAYRKAMGLNLKERSSGKYQGQLRITKRGPARVRRWLYLAALRECQKPGVKEWFEDKKQRENGRAGKALVAIMRKLALALYQVGARGAKYESHKLFPGKPAARLQPPRTANG

SEQ ID NO: 145697 - protein, 273 aa, unidentified
MNIIGLDISKDTIDATLHKTNGSIHYIKFKNNDDGLKQFRLWIKGNRIRKAYIGMEATGIYYEKAADMLSSYYTVYVINPLKIKDYGKSRFNRTKTDKADSNLIADYIKRHQDTLIPYQIPKNKALQKLINLKNQLQQQQKQIKNRLHSTEEDFIRNIHQDLIDTIQDKMEQVKIAISEQIKKQTDNNHYRNLQTIPSIGKDTASVLYAQLTEKHFKTANQFVSYAGLSPAIIQSGTSVRGRGRLSRYGNRRLKSTLYMPALCAYRFNAFPKL

SEQ ID NO: 145698 - protein, 383 aa, unidentified
MARKNQKRFEIIHHHCAGIDVGSREHWVAVNPEQYDPAVRQFSTFTDDLIALADWLQSLNISVVAMEATGVYWIPLFEVLDARGFEVYLVNSRATRQTSGRKSDVLDCQWIWQLMTHGLLSGAFRPSDEICSMRSLVRQRANKVCDQAKSINRMQKALSQMNIQLAQVISDITGVTGLKILRAIVQGERSPEKLSALRDGRIKADQETIARSLHGNWRAEHLHALGQELACHDFLEKQIAECDQAIAQALARLPVLQPETGLPCKPLRSAHRSADQQLALHQALIKVMGVDLTAIPTIGIDIALVLASELGPDLSRFPTSQHLSSWLGLAPPTRISGGKPLPGKAPKIINRAAQALKQAASNARQDKSFYWRQPPCPPDADGH

SEQ ID NO: 145699 - protein, 357 aa, unidentified
MKSQEIKYVVIDCGKKTLEVIRIGDNSLHQRQQFSTTEIGISKLINWLNPNDVVGLEAGSQSFRIAKSTLNKGIQVIVLNPGDLATIYQSLKKTDKEDSLKIARLIQRFPIEELPVVPIPNDEEEDNRRLCTEQENWTRQLTQSKNRLHSLFTQAGLTHITKKHLRTKANREISVALLPSRYQKEAERILKVLDLVEQNLKLIEEEIKEALKKNKAYAQTIMSMPGVGMITSLAIMSYMGNCKRFSSAKQAAYYVGLVPRVDISGDSAYYGRIVNRGCHSIRRVIVQAAWSLVRCQYGGKIKEFYQRLYPKKGAKKSIIATSRKMIEILYTMIKTGELFDSMPEKVLNRKLTQYGLM

SEQ ID NO: 145700 - protein, 445 aa, unidentified
MKNLFIGIDFAAKKFDVAVIYAEGLQEQAPAEYNQFENTDEGFKAFVSWVKKNSHKTKAQDWLFCGEDTGDYCRRLCNFLCRKEYDMWLENPKCIKDSGGLRRAKSDKMDARAIAEYAMRNYDRARLYKEPPKILSDLRELFQYRQWLVRDKVANTLRWKIKKENLEKSSATGFVVRKNQETIKHYEKQIKQVDDKIQKLIKSDEKLLATYKILKSVKGIGPVNICCLIVYTENFTKYDYDPRKIACQCGIAPFGQESGTSVHVSPHVHYMANKTIKALLTQAALAAVRFNPLISRYYNRLIDAGKIHPVALNNVKNKLIHIMTAMVKNGTEFDENYEAKRKTRTALNAESSTVSTNGKDIYTPAEQPTDAVSQLPELPIDEAFHEASQLPELPADGASQLPELPADGASQLPEDNNQDTQMHIDSPQESMATGHAHIPLKGSES

SEQ ID NO: 145701 - protein, 401 aa, unidentified
MRFYTAQHQYYCGIDLHARRMYICVLDAEGKVRVHRNGPATPEHFLNVMAPYRDDLVVAVECIFTWYWVADLCAREGIPFVLGHALYMKAIHGGKAKNDKIDARKIAVLLRGGMLPMAYAYPRAMRATRDLLRRRCQFMRKRAELLTHTQNTASQYLLPPFGKKIAYHGNRTDVAERFADPEVRKSIETNLTLLDHYDRLLTDLALPLTRTAKVDDVNAFYRLRSVPGIGKILALVLLYEIHDIRRVPSVQDFVSYCRLVKCGKESDGKHYGYSGAKIGNAHLKWAFSEAAVLCLHGNPGAQRYAARLATKHGKGKALTILAHKLARAVYYMLRRGHAFDPNRFFHDPSPGEASRGAAVDVEATPGPAARPAAQPRKAQRRPRHLAPTTTAEVEMAATLAN

SEQ ID NO: 145702 - protein, 279 aa, unidentified
MNTKTKQNVSVGVDTGKFQLDIYIRPLDIYFTVNNDEKGIKEAVKTIKKYSPERIVIEATGRLEMPFIMACASANLPFVIANPIHVKRFAGALGQRAKTDKLDAQLIAHYGEAIQPNLSQLKPEAMQAMSDLVARRNQLLVMQTMEKNRLQILPKELAMTIKPILTAFKNQIEKIESKIVKLIESCPDYQAKNDILQSMKGIGKIASASIISNLPELGYMTNKQASALVGVAPMNRESGRYKGLRKIQGGRHQVRTDLYMAMMSAIQSNPVFKATYQRP

SEQ ID NO: 145703 - protein, 359 aa, unidentified
MEQKRFVGIDLGKRTYEMKIIGINGKVTGTNGQTNPSGRKLLYRKLLATDRVAIEVCSLGMVMAKEIQKEVGCEVVLLNPSQLVLIYRSLKKNDKEDALKLARLVQKYKNEELPKVELPTEHEENLRQILTEIRQLKNDRTKEINRLHAIFVECGITEIKKKDLATIDNRIKCIKMLQGIALAQAERILKKLELVETQTEEVEELLDKEIDGDKNIEKLTEIPGVGKQLASAYVAFIGDGSRFPNASTIGAATGLVPRLDMSSTVCRMGHITKCGNKNLRTLLILAAWSHVRSRDGGALKDKFLYMTRFQSKGKKIAIVAIARKLAELMYILLKNDTSYEKRPSPTISQLVDEAMKFSS

SEQ ID NO: 145704 - protein, 358 aa, unidentified
MRATPQLKKGMALTIVENRAVTGGVDTHADVHVAAALDSIGGLLGVQEFSTTPAGYACLLEWLRSFGTVELVGIERTGSYGAGLARHLAHAGVQMVEVDRSDRQDRRRQGKSDPLDAVSAARAAQSGRARGAPKGRDGAVEAIRALMVAKRSARGERTQTINQARALIITGPDDLRARFATHTVAALVAEIASLRPRPGDIVDYSTRIALRELGRRAEFFDAQLERLDKLIVPLVRTHAPGLLALYGVGPDTGAMLLVAAGDHPERLRSEAAWAHLCASAPIPASSGRVTRHRLNPGGDRQANHALWRIVLTRMGSHPATHAYVERRTKEGKSKMEIMRCLKRYVAREVYPHLRPAAD

SEQ ID NO: 145705 - protein, 353 aa, unidentified
MAVKYVALDLHQASTSISIRDARGRVIRREVVPTSAAAILQAIDSAGGTIHVTLEEGTLSQWIYDQLISRVARVIVCDPRHNRLLAAGNKSDRIDADKLSDLLRLGALRPVYHERSAVAALRELVRSYNTLVEDTTRVMLRIKAIFRSRAIDCSGIAVYHPRNRSRFLAALSDGGARLRAEHFYAQLDALLQVRARARHQMLEEAKRHPAVRLVRSIPFIGPVRAAEIVAIMVTPHRFRTRRQLWPYAGLAVTTRSSADHRFDRGAAVRSAKPVSRGLNRNFNRMLKKVFKEAAASAVCAPGPLRSCYERLLARGMRPELARLTIARKIASIVLAIWKKGVPFDPKILNAQNA

SEQ ID NO: 145706 - protein, 337 aa, unidentified
MKHTKSLLQSFLKFIGMTKVNKIIGIDISKEKFDACFSFQPCGYSSRTYTYNEEGISSFLAEVPSDCICIMEATGVYHLRLAYALTKAAIYVSVVNPLSVKNFSRAVMCRTKTDKADARQLVDYARRMELVEWKPTSENYIRIQQIYRTIELFVTNITQLENQLEAISNSPVQDRMLCRILKRSITIQKRRIERLEKQIEELIAEDDKTVVKRLCSIPGIGKKTAVAVLTATKGMHGFNNYRQVNSYFGLCPRIYDSGKSVHGKAHICKMGMGWIRRLLYMCSISAAKHNEACKDLYLRLTERGKPIKVVFIAIANKLIKQIFAIVKNNSLYHKTFA

SEQ ID NO: 145707 - protein, 402 aa, unidentified
MNAVGIDVSKGKSTVTIFQPGEKVILKPRDFYHTQSDINALINIIHNLDGETKACVEHTGRYYEPMATWLSNAGVFVSAVNPILVKKFSSDSLHEPKTDKADAKKIARYTLDHWAKLKQYSVMDEIRNQLKTMNRQFGFYMDQKNAMKNNLISLLDQTYPGANTFFTSPARSDGSQKWVDFVYTYWHVDCVRGKSLEAFTDHYRKWCKRKGYNFNAAKAENIYRESADYIAVFPKNAVTKMLVQQAVAALNLISATVETLRLKMDQTAATLPEYPIVIAMNGVGPTLGPQLMAEIGDVMRFTKRSAITAFAGVDPLKDDSGTRIRNSMPTSKRGSPHLRKTLFQIMDGLIQRSPEGDPVYDFMDKKRSQGKPYYVYMTAGANKFLRIYYGRVKEYLESLEEN

SEQ ID NO: 145708 - protein, 365 aa, unidentified
MEVKTKTITRYVGIDLGKRTYELAIVGKGGKVVRSGGKTYPFARQNLYKKLRPGDKVAIEAGNMAFIMAKEIEAAVGCRVYVLNPSHLALIYRSMKKTDKEDALKLAHILEDCREERLPLVSVPSDKEINRRKILAGYKRVKQSRNREINQLHGLFVSQGITTKTRKDLCTSKNREDAVKELSGLERQEAEYLLKRLSLCEQRILELDAQIEEEAAGDEIIQCLQSIPGVGPKVSFAFVAHVAAERFENAGQVSHYLGLVPRVYISGDTIKYGRISKRGNSYVRALLVQASWALIRTKKGGKLKARYEYMTLEKSKSKKKAIVAIARRLAELMYTMMRDRTWYASRPFVLKKQEANRLAQVALSA

SEQ ID NO: 145709 - protein, 345 aa, unidentified
MGKDIVVGLDLAKNVFQVQVNDAQGKKLRSKKLKRSEVMEYFAQLPPSLVGMEACGGAHEWARRIGSCGHQIKMMAPQYVKPYVQRDKSDARDAGGIAEAVVRPAVPAVRIRTRAEQELQSLHRVRELWQKQRIATTNQLRGLLAEFGEVMSPGAKKLREQVRAWQGRATDGVLRQVVEDLLTHWSALETQLSAVEARIVVAHRANAESRRLDTIPGVGVLTATATVAAFGNASTFATSRRFACGLGLTPREHSSGGHAMKLGISKRGNSYVRRLLIHGARAVVKARLSNPRYANDWVVKLAQRRGHNIAVVALAAKNARRMWAVLRSGQAFDADYVKPVAGTAD

SEQ ID NO: 145710 - protein, 412 aa, unidentified
MQDILTCAMGLDVHRDIIVACLVKGAVDAEPEAETRTFSTLIPEMQKLRDWVIESECRNIAMESTGIYWQPIYEMLESCFDGEISILVVNARHMKNVPGRKTDMKDAQWIATLLRAGLLKGSFIPDKAFRELRHLTRYRKSVVHDITAQKNRIDKFLQSSGFRFTAFLSDTFGASGRNIVRHLIEHGSIDREALDKCLKTKTRNRIDEILVALNGSLSEHQRRFLNMVFRHLEDLEAHKHTVEDEITEEVLKHTDALNLLCSIPGIDVTAAAAIIAEIGTDMSSFLDSQHICSWAGLSPGNNESAGKRKSVHINKGNPYLKNMLCEVAWIMASHRKLYLSGWYWKVKQRKGAKRATIALARKILSIIYTMLKTGTPYNEECFEQRRLRCERKRANRLVNELQKLGYVVVAPD

SEQ ID NO: 145711 - protein, 338 aa, unidentified
MERQYVGIDLHRRRSVIVRIGEDGEELGTVRIENDPIALSLAVAEAGPNPEVALEACYGWYWAADVLQADGAVVHLVHPAGLNWDNRRVKNDKRDAMELANRLRRHDLPEAWIAPPKVRQLRELVRYRAKLVALRTGLKAQVHSVLAKQGLFPPVTYLWGPEGKKFLNDAPLDRGYLHRVESLRDLVAIFDKEVDLLEREIYRWLRDDHGYWAVQQLNGVGHTLAAIFVAEIGDVSRFPGPRELCSWAGMTPKHRESDLKVRRGRITKQGSVLVRWAAVEAISHVRGTEKIKQDYHRIAERRGKNIARVAAARQLLTLVYYGLRDGEIRCLASHREAG

SEQ ID NO: 145712 - protein, 330 aa, unidentified
MNSICLSTDQLTAALPVLGLDVAKKSVQAELRTNGKRVRFGFENNAKGFAQLARMLKEQGAPKVWAGLEATGPYSHALALWLHGQGHRVSLLNPRRVKQYARSAGNRNKTDLLDAAIIADFVCAHLPAAWQPPTLEVAQLQALVRRREELSLMLQAEKNRLEGVASHVRCSLERIIDTLSAEKTRLEKLITQQIRSHQQLSRDHQLLCTIKGIGSLTAAILLAEMARPGQVERARQAAAHAGLAPRREQSGTSVRRNRGLAKEGNRYLRKALYMPALVAIKYNAPLRHFASRLRTAGKPKMSIVCAVMRKLIHIAFGVLKHQKPFNPSLA

SEQ ID NO: 145713 - protein, 442 aa, unidentified
MEELREDHDDGTVARVAAIDIAKASGMVCLRVPHDTIEGRRVQKVWTVASTTNTILELGDRLVCQGVERVVMEATGSYWRPFFYLLEARGLDCWLVNARDVKNVPGRPKTDKLDAVWLAKLAERGMVRASFVPPKPVRQLRDYTRTRTVFVQERTRHKHRVDKGLQDAQIKLSDVVSDLFGMSGRAMLDALVAGERNPRTLADLAKGTLVKKKPALIEALTGQFEDHHARLLRVLLGTVDHLTAQIGELDRLIARTLEEITTPPDSSGTGSEPATTVSARALAEKLDAVPGIGPATAQIILAEIGADMSRFPTPEHLVSWAKLCPRTIQSGAKHTAGPAGQGNPWLKGALGEAANAAARTDTFLGARYRRIVKRRGHAKALVAVARSILVIAWHLINDPDASYQELGADWHRRHLDPARKTRDLVRQLQALGHQVAITPASA

SEQ ID NO: 145714 - protein, 421 aa, unidentified
MTKSSLAQEQIIVGVDTHKDVHVAVAIDDHGRLLGQCQVATTQRGCRTLHEWALGLAPQVRYGVEGTGSYGAGLARLLAAEGVSVTEIRGPNRKLHRDRGKSDTIDAEAAARAVLAGTSRVVPKAGNDWVEQLRMLRLARRSAVQARTQAINQMHAVVVGAPPELHDALVQLSRVELIRCACRFRIGRLDTTASTTRWTLRLLALRHEALTAEINGIDQVIVPLLAHHAPTLLELRGVGPEVAGALLVVAGDNPQRLRSEASFAALCGVTPLPASSGKTTRHRLNRGGDRRGNTALWRIAMTRLNCDPRTRDYVQRRTTEGLSNHLRGGPDRGGGWRPCGAGSPDPPIAGGERSRDRPPPVPRAVFRSPSSLRRRGGRRRSRWRHRRSAASRWRPRVGRPWQCRARWTGGRVRAAGRHTPT

SEQ ID NO: 145715 - protein, 450 aa, unidentified
MSKGSGVSRGDRRRNARLAELRLLVSRENAIAGIDLAEDNQALVVTDHDSKVLARRSPRCKAWQLGEVLDWAVGKAKARGFESVTVACEPTGSRWMHVQQACAERGLNFVCVQTLVTHNAREAEDYTRDKSDQKDAVLIARLAAELRCYRPEVIEEEWAVLRYLGQRRDALVTEALRCRQQITDRLALAWPAALGAAAAPLDSVTFLACLQVTADRCDGDPGKLRRYGLAEFTQIVRGVLPRWGGQRICHRIVACFHAALGDSRGAVAARRRGALKLAGHALADLRRARELQVRAEAEMIAQLDVLGVADVLASIEGLSLPVAACILAEIGDPARFGSSRALVKHAGVAPCDNSSGNSAGQARISRRGRPVLRKTAWRGTWAMIHGANPVLAAKYDHLTSRDTGKLAKGQAHIACVATLLRWIYSVITSGTAWDRRVAAGTLSHTAAMAA

SEQ ID NO: 145716 - protein, 427 aa, unidentified
MSYRIAGIDVHKKMLAVAVADVEVDGDFQFERQRVGTTPIDLRRLADWLVEHEVEEVVMESTAQYWRPVWEALEQHWRPRRRACNSAPRLAGTLHLAQAQSNRGPGGRKRDFPDAERLVKRLVAQELTLSFVPDAEQRLWRTVMRRKYQVTRNRVQLQNRLEALLEEAHIKVSSLVSDLLGISARRMLQALADGETDPAALATLATARLRATPEQLRDAFHACPTLHPVYRRLLKLTLEELRVIEDHLGQLDQQMADLLTAHHDAVQRLAEVPGLGVDSAQQIIAEVGATAATFPSPKHLASWMGACPGNEESAGVNYNHRCPKGNRQMRRVLNQAANAAVKAKGTIFAIVYRRLVPRLGHAQAIGAITHRLCRLIWKILHQAMRYEERGPAVSEEAKKVRARKMIRELRSLGYRVELLPAPSSSPA

SEQ ID NO: 145717 - protein, 343 aa, unidentified
MYYIGLDVHKKTISYCVKDVAGHVHREGKIGSTRRELDAWIKTLPQPRLIAMEATIFTGWIYDHLLPHAEKVKVAHPLMLRAIAAAKKKNDRIDASKIADCLRCDFLPECHMASTEIRDRRRVLRYRNLVVKQMVQMKNRVSGLLMETGVSYNKQRLHKVGYFGELMSTNKDISQAVRPLLSLSRGMIRRSGKLEYDLISSLERDPLLRERLRRLRTVPGVGSITALTWALEVGDYTRFSSNKQAISYCGLCADEKSSADKVMRMPLSKQRNKHIQRVLIEAAKLAPRESPELAMIRERELERGNPNRATLAVARKMVCYMMAVERRQQDFVPAGKLMPTAAA

SEQ ID NO: 145718 - protein, 410 aa, unidentified
MEVMFDRVAGLDVGKETVTVCLRTPGSKGRRHAETRTFKTMSGSLRVMRDWLVEAGVSIAAMESTSTYWKAPFYCLEEVMEVWLLNAAHMKAVPGRKSDVRDAEWIAQLLEHGLLAPSFVPPPEIRRLRMLTRYRVQLMGDRRRDIVRLELMLEDASIKLSSVASSLKTVSARAMLTAMINGEQDPLVLADLAKGRMRRKIPDLAQALTGHFDANHARLAGSMLRRLDLVDQAMAELDAVIVEACQPWAHQIELLHTIPGVGEKVAQVIIAETGGDMSRFPTAAHLAAWAGLAPAMNESAGKQSPAGKRHGNKWLTAMLVEAAGSVGRMHGKNYLAAQHARLMKRRGMGRAQVAVAHSMLVSAYWMLKRDEPYHDLGADWHRRRSDEAHAQRLITQLERLGHTVIIDPAA

SEQ ID NO: 145719 - protein, 412 aa, unidentified
MLVGIDWADAEHTYCLMDDTGATLATRTIDHTAEGLERFMTLVRARAQDPQDILVALETSQGPLVGALLDQQFTVYAINPKAVDRHRDRFRVAGAKSDLRDAWVLANLLRTDRMLYRPLLPDSEVAQELRALTRDRAELVQTRTMLSNQLTSCLKAYFPEFLTLFADPDRPVALALLQAFPTREALQAVSPTRLEAFLRRRHCPHSHDRAVEIHTQMQARGFHIAPPLVRAKARLAGTLVSQLQTLAEHLEAYDREIQRVLRLHPDGELYHSLPGAGDFLAARMVGELGDNRDRYRDASSAQCEAGTAPVTRKSATVRTVHVRRACSHPLRSTMWQFAFASKRHCEWAQAYYLRARKRGKKHAEAVRMLGNVWLRIIIAMRRNRRPYDEALFLSRSSHPSLALCPSMRVKVA

SEQ ID NO: 145720 - protein, 415 aa, unidentified
MEDVIYERCAGIDVHKKKITVALRIGRKAQVREFGTLTKELRDMAAWLKENDCQMAAMESTGSYWKPLYNIFEIEEIPVMVVNAQHMKTVPGRKTDIKDAEWIAKLLSQGLLKPSFIPDREQRELRELTRFRKSQIEERARNLNRLQKMLEGANVKLASFVSHIDGKSATGFLELVINKTNFTREDVEERRCGNLKASTEALFLSLEGIITPVQRELFKHVMQVIREQSVQIEHTDKMIADYMTAAYKDAAVAIDAIPGIAQISAQQIVAEIGCDMNRFPTAAHLCNWAGICPGNNESAGKRKSGKTNYANKTLKTTLVQCAQSAKKNKNSFFAAQYQRLVVRRGKNRATVAVAHSMLIAIYHVLKGAAFHDLGADYYTQFNKEKKINSHIKQLSKLGVNIPNDVLRAFILESAA

SEQ ID NO: 145721 - protein, 412 aa, unidentified
MRRVIGIDTHRTFGEVVIWEDGRLRHVGRVDMTRTALEGFGRKLEASDEVIIEATGNCMAVSRVLTPFVKRVVIANPLQVKAIAYAHIKTDKIDAGTLASLYAAGYLPEIWTPDAATERLRRLVARRYQVVRHRTRIKNEVHSILYAHLIPRCPHADLFGRLGRAWLTRQPLPDDERAAIERHLRELDRLSDDLRVLDQEIAENALDDAAIKRLLTITGINLTVAAGLVAAIGDIGRFSSPQKLVSYFGLNPRVRQSGLGPAHHGRISKVGRSHARAMLVEAAWATAKAPGPLHAFFVRIRARRGHQIAAVAVARKLAVLCWHLLTKQTEYHWARPALVANKQRAMELQAGRPQKKGNKRGPTYAYNVKALRDQEMRLAQQAERSYENLVTHWQPRPAKKRARGRLKPAGIE

SEQ ID NO: 145722 - protein, 327 aa, unidentified
MEAYDGPQIVGMDLHRRRSVLVRMTGDGRRLGTAKITNSPAELRREIARAGSCPKVLEATSGWYWAADVLQAAGAEVHLAHPLGVKAFSYRRVKNDEKDAADLADLLRMGWLAEAWIAPAEIRELRELTRYRIKVVRLRASCKDQVHAVLAKLGIPVTCTDIFGTAGSAWLDQLALPQPYAGKVASLRSLVAQLTGEIGLLDTVIASLLEHHDGYHALQSLPGIGPVLAAVITAEIGDIARFRHPARLCCWAGLTPRHRQSDVKVTRGHITKQGSPILRWALIEAIQRLPAGTPVRQARDRIIARRGSQARNIAKVAAARYLLTCVY

SEQ ID NO: 145723 - protein, 357 aa, unidentified
MRIIGCDLHTRQETMAMLDTETGEVVEKTLQHEGEKVREFYSALPRPVQVGIEATGSMLWFLNLMEELGIDSQVGHPAKIRAAEPRKQKHDRRDADLLLKLLMENRFPSIWMPSKELRDLRALLWHRHQWVRTRTRVQNALQAIALTNGLRRGKSLWSQEGQHAIASLPLGPHAAHRRTALQALYRELDADINALDKRVLEQALERPEARRLMTHPGVGPVTALATDVFLGDPVRFENAKALASYVGMIPSEYSSAGRQRLGGLSKQGNPLLRFLWCEAAIHAVRRDPLLQRFYRRKLVQKGMGKARVAVARKLGIRLYIMLRDQIDYEEFCRRGQMRQKNGAARAGIPEVGYGPSL

SEQ ID NO: 145724 - protein, 335 aa, unidentified
MVQDSSGKTLRCGRVKNDRQSLGGFLERYRENSHAVVEATRNWMVMYDWLDDICDDVVLAHPLKVKAIADAKIKTDKIDATVLAHLLRADLVPEAWAPGERARELRVALRERMFYVRLRTMTKNRIVTVFDRYPEQTAELRKLGDLFGKAGRVQLARVNVSPIDRIQIDRGLDFIGDIDVRIKQSESTIRAMTKANANVKLLKTIPGIGEFFARLIDAEIDDISRFRTPKKLAAYAGLVPSTYSSGGKTYHGKIIKQGNKWLRWAFVEAVTPAIVSDAQLRAQYDQLKVRGTNKARVAIARKLLTIAFQILRDQRAYEPRGTSQEEGASMISRLS

SEQ ID NO: 145725 - protein, 340 aa, unidentified
MKKEVRFYLGMDVSKLWVDITLMCVADHKKQPKVAERFDNDAAGLKALHKWLKKHQVSFDENSLLVIENTGVYHRLVWEYCSTHGLPLYIGNATHIKYSFGIARGKNDKIDSERLCSYACKNAEELKATPVLNPVFLRLKDMMTARSRLLAQKNNIKVYLGEMKWSNSKETQLLLEQAHEAALEGLKQSIKIVEDRIKQIIEQDEAIKKNYALLLSVPGIGHLTAVYIICCTNNFICKITGKQLASYAGVAPFGNTSGTSIKGRDKVHKMANKDLKKLLHMGAVSAITHYPEFRDYYERKVKEGKHKLSAINAVRSKIALRAVAVINNQTPYVDNYTKMA

SEQ ID NO: 145726 - protein, 392 aa, unidentified
MYIVGIDIGKNHHEASIVSPEGKQIGRSLRFATTHKGADSLMSFIFKNIGNSPCVFGMEATGHYWYPIYSFLKAKGYTIYVINPIQSDSLRKMYIRQTKNDSIDSFLIAEVIRFGQFGTTSMADENILAMRQLCRYRDSVISSRTDIKLRIGTIMEQIFPEYEKQFSSLWVSTSMGILEKYLTPENIENAPIDELFEIIKDKSHNRLTKAKAISIKEAAADTFGIRIAQDAFSFQLKQLIDRMNFLDKQIEALDIEIMKYYEQFDCYLHTIPGIGIIGAATILAEIGDISRFKNSSALVAFAGIDPTVRQSGEFNSTHNHMSKRGSPYLRHAIFLAATTCSFHNSPLNAYYKKKRDQGKHHLTATGAVARKLTTVIYAVLRDSKPYEPKKFC

SEQ ID NO: 145727 - protein, 338 aa, unidentified
MTTTISMLAIDLAKGSFQVCAIGLDGAVLYNRVLSRPRLTALLAEHSACVVAMEACATSHHWGRIAQSYGHEVRLVPAAYVKPFVKRQKNDKADAEAIAEAASRPTMRFVAVKSSETQGRAVAFRTHQCLVRQRTQLINALRGHLAEFGLVAPKGPASLKLLENALADESSDLPGQVREMGTIYLEQIARLTDVIDRLSGELEAATKTDAQLRRLCTIPGIGPVTAGAVAAFAPDLDTFDSGRNFAAWLGLVPRQRSTGGKTRLGSVSKMGQTDIRRLLIVGAMSVIRWVVRKGSSANRWLAGLVARKPKMVAAVALANKMARMIWAMTTREENYRMA

SEQ ID NO: 145728 - protein, 400 aa, unidentified
MISVGIDVSKGKSTVCILKPYGEIMCSPFEMLHGEKELNALDDLLNKLDGEIRIVLEATGIYHLPILTFFHEKGYFVSVINPFAMKKYAKDSSIRGAKTDKLDSIMIANYGIEKWFKLQRYKGDEEIYAELKLLGRRYRHYMELHVKALQELTHILDYVMPGIKKMFNSWNEANGKDKLSDFVEQFWHFDLITAMSLEKFTEEYLDWAKEKKYHRSRSKAEAVYELASNGISTLSSGTPSTKMLVQEAISVLRTVDSSLFLILTRMQELAKTLPEYSTVREMGGVGDVLAVKLIAEIGDIRRLHSAKALIAWAGIDPPPYESGQFIGSKRKITKRGSSTLRKVGYEVMRVLKSHPAPKDDAVYNYILKKESEGKSKKHAKIAGLNKFLRIYYARVMAIYQ

SEQ ID NO: 145729 - protein, 346 aa, unidentified
MTLTIVEEARPVTGGVDTHADTHMAAALDPIGGLLGVQEFPASSAGYGRLLDWLRGFGAVSLVGIEGTGSYGAGLARHLAAAGVRVVEVDRSDRQDRRRHGKSDPLDAVSAARAAQSGRARGASRGRDGQVEAIRALMVAKRTARAQRTQTINQARALILTGPDDIRTRFARHGPADLVAGLAWLRPRPGSMVRYHTLLSLRELGRRAQFLDAQLERLDGLIVPLVTARAPGLLRLHGIGPDTAAMLLIAAGDHPERLRSEAAWAHLCAVAPIPASSGRVTRHRLNRGGDRQANHALWRIVITRMSCHPPTRAYVDRRTKEGLSQKEIIRCLKRYLAREVYPHLRG

SEQ ID NO: 145730 - protein, 323 aa, unidentified
MDGTTVPRWDAFVGIDIAKDTYEAALGVEGAVVSFRYHAKGFEQLRRRLRALGRCLIVVEASGGLQRRLVADLLDQDFAVAVVNPRQVRDFAKGHGLLAKTDRLDAAILARFARDVQPRTVSKTPENQAELMQLLARRRQVLDLQTMESNRLPMATSAVTRRSVQRVLKLLGQQLEQLDQAIAELIQSDDNYRDKDQIIQAVPGLGPVTSSTLLGELPELGNLNRQEISALVGVAPFNRDTGTLTGRRCICGGRSTVRAVLYMATLAASRCNPIIRAFADRLTQRGKPFKVVMTACMRKLLIILNTMLKNHTPWQPKIHASTP

SEQ ID NO: 145731 - protein, 377 aa, unidentified
MGDYSEGFIGIDTSKLRNAVAIADAGRGGEVRFLGEIENTAAATAKLVRKLAAKYERLTFCYEAGPTGYGLHRQIKGLGFECTVVAPSLIPKRRGDRVKTNRRDALSLAKLLRADELTAVWVPDGRHEAMRDLTRARETAMLDLRTKRQHVSAFLLRLGRPYPESKKTWTRAHVSWIASQKLEHPQQRLVLEEMMLAIRQAQDRLARLEQAIAAAVPEWSLAPLVTALMAMRGMDTISATTLLAEIGDLSRFQTPTELMAYLGLVPSEDSTGDTVKRGPITKAGNRRARRMLVECSWSYQHPPRVGQAKQPKVDAAPPAVREIAWKAQCRLYRRYRMLIRKGKLKTVAIVAIARELAGFIWAVARAVSAMRVAAATI

SEQ ID NO: 145732 - protein, 341 aa, unidentified
MKKLFVGIDFSKEKVDVAIIFAEGLVETSVRVFNEFKNSVSGYKQLVKWVEKNANGIDSSLWLFCGENTGDYSKPLCNHLYGRGFDMWLENSKCIKDASGIRRLKSDRADAAMIAEYAMRNHDRAVGYEPLSESLVQLREYYLYRQMLVRHRCSFEVRRGEKRLMMEKSAAKTVIAQSGKHIVTELNKEIAKIDKKIASLIESSDELSEVYRIVTSVPGIGTQNAVCLMVYTDNFRRFNYDARSIACYYGIAPFGKDSGTSVHVDPHVHYMANRHIKAMLTQAALAAVRFNPIIAQYYQRLIARGKKMPVAMNNVKNKLLHVVTSMVKNKQVYNPKYRLSA

SEQ ID NO: 145733 - protein, 367 aa, unidentified
MIINKVARNVETIIAVDTAKNSFQVLVVNQKTGKKKNVKVQRSKFVEHILKQGPCLILMESCSASQYWARLFESHGFIVKLIAAQHVKAFLRNKRVKNDERDAEAIYICGIQPDTKFVRIKTEEEQTIALLHTLRKAAVSERVEISNRIRGILAEFGIITAKGKGNFNNDIQELFEKSEQIHNVNLKNSIAMLFEDYHRMEDREKELSEQINLLNKDNELVQLAMTCPGVGELTASALVAEVGDANQFESGREMAAWTGVVPSQHSTGGRSTLGSITKTGNKYLRALFSQCANAVIQTAAHRAEKGKDTHVDRFALRLKAQGKPAKKVMIAVANKILRILWSMLTERKPFENKVNQKKSVSEAMGLC

SEQ ID NO: 145734 - protein, 339 aa, unidentified
MKKDSIARLQVTKSQIRRMAAKQRLTVGLDLGDIWSRYCILDEAGEKASEDKLPTTKAGLSSIFEKMPACRIALEVGTHSPWVSRHLLAMGHEVIVANPRKVKLITQSVKKNDRMDAEQLARLARVDPKLLSPIHHRGPEAQADLAVIRARAGLVDARTELINMARGLAKPMGERLKKCDADYVKESLADGLSEATQNAIRPLLKCVEEMSREIGVYDQRIEGIAQRYPEMKLLKQVHGVGTLIALTYILTIEDAERFAHSREVGPYLGLTRKLRDSGESQPELGISKAGDELLRRLLVQGAHCILRQGGPDSDLREWGMGKLQNSDGKKASKARNGGA

SEQ ID NO: 145735 - protein, 348 aa, unidentified
MSGAYEGRQIVGMDLHRRRSVLVRMSETGEHLETVRISNDPEYLRQVMARAGEAPEVVLEAAYGWYWAADTLAELGASVHLAHPLGVKMFALRRVKNDQRDAADLADLLRMGRLPEAWIAPPATRELRGWVRHRAKLVGLRSCLKNQVHAVLAGAGVQVGVSDLFGPGGRQLLAVAPLAVESRSRIDSLLRVITALDFEIDLYAKLVAGRLRADPGYAAIQQIPGVGPLLGAVFVAEIGDITRFGRPDQLASWAGLTPKHHESDTTVHRGRITKQGSRLVRWAAVEAVQRVPGHTRLGQTRDRVGERRGRNIGVVAAARELITLVFYGLRDHHLRCLPTRTPATTGAA

SEQ ID NO: 145736 - protein, 372 aa, unidentified
MKQISKIGITKKVINNAKDNKEHFKGIKVYVGIDVHKKSWYVTIYVESTLFKSFTISPPSSKHLISYLKEHIPGGEFHLVYEAGFSGYCLYDDLKEAGMECFVVSPADIPISNKDKKFKTDRHDSKNLAQQLKSESLEGIHVPEPIIREYRALLRLRNTLVKDRTRTKNYTKSNLLFFSKEIHDEEGDSIKSWSKEFFRLLSKVDYTTEAGKKVMDQLIKITHFYDEQIKDIDKDIIELSKQPRFKEDVRILSSVPGISVLSAMIILVEIGDFGRFEDTHKLKSYVGLIPNEHSSGEKEIKTRITRRGNRLMKKIIIEASWVAIRKDKSLLSVYTKATKRMPGSKAIILVANSLLSRIRSIMRQRVLYKVAA

SEQ ID NO: 145737 - protein, 391 aa, unidentified
MFLLGIDIAKLNHVASCIDSSTNEVVFSNFKFKNDFKGFSSLLDKIRTFNAENLIIGMESTSHYGENLINFLFKQHFKVALINPLQTSHLRKANIRDAKNDNLDSLNIARALSFAKLNFISKKNIDCFSLKKLTRFRSNLIKQRSKAKIQLTSLLDLLFPELQYLFKSKIHSRAIYSLLKKYPSAEEIAALKDDEISNLLYASSKGHFKKEKSIELKSLAKTSVGIKDTSISLHVIQLIELIELYDKQIKDIVFKISDTVEKLDTKLLSVPGINIIACAIILGETNNLDNFSDSKKLLAFAGLDPKIRQSGNFYASSCRMSKKGSPYLRYALVFTAWNIVRHSEKFNRYYCLKRSQGKSHYNALGHVAHKLVRVIFTLIKKDIIYQEENLR

SEQ ID NO: 145738 - protein, 376 aa, unidentified
MEWSASLPKRLQMSHDVIFSENIKTEVRQTMKNNTAKGPITVLGIDLAKQSFQLHGVNAEGKVVLKKKLSRKQISAFVANLPVCLIGLEACGGSHHWVRIFTEMGHTVRMMAPQFVKPYVKSNKNDAVDAEAICEAVQRPNMRFVPAKSIEQQDIQSIHRIRSQLVARRTAQANQIRGLLMEYGIIIPQGIKCIRKNLPDILEDGENRLTDIFREHLSALYDEMVHLDERVETLEKSLKTICNQNEDCKRLLTIPGIGLMTATAMIAAIGDIGAFKSARELAAWLGLVPRQHSTGGKPTLLGISKRGDSYIRTLLIHGGRSVVRCAHKHQDKRSQWIGEVEQRRGKNITAVAVANKNARIAWALLTKKEDYQAKAA

SEQ ID NO: 145739 - protein, 407 aa, unidentified
MRLFVGDDWAEDHHDVELMDATGRVLARKRLPEGVAGMARLHELTGQQLGEDGEDAEVVTGIETDRGPWAAALVAAGYVVYAVNPLQASRYRERHGVSGAKSDRGDAHMLTDMVRTDSHQLRVVAGDSADAGAVKVVARAHKTLIWERTRQVQRLRHQLREYFPAALAAFADLAAPDALELLAKAPDPARAAKLTRAQISAALKRARRRDIHGKATAILTALRSDQLGQPPAVTAAYAVTARSLIAVITTLNEQVTALEGQVEADFGRHPDAEIYLSQPGLGPVLGARVPGEFGDDPDRYVSGKARKNYAATSPITRASGKRKVVTARFIRNDRLTDALMAQAMSALGASPGARALYDAERASGTEHNAALRKLANRLVGILHGCLKSRTLYDEATAWSHRENKLAA

SEQ ID NO: 145740 - protein, 400 aa, unidentified
MTAQAGFDIAKDFHWLAVTDDRGRPLFNHRVDNTPEAIANAVTELLAIQDEHGQVAVGLDILGGIASLLTAMLLAEGLRCVHVPGLTVNRARRGTRGGENKSDPRDAKTIAEQVMLRDDLRVVDLPDEQTVELRLLVSHRTTLVKEATARTSRLRDLLTGIHPGLERVVDPTLKSGLILLSRYVTPDEIRRAGTARITAYLRRHGVSKQTTAQALAEAAVTAARAQKPSLPGERRTAALVRELADELAAGKARLKALEAEIEELVTAHPDGALIRSLPGMGAVLTAEFIAAIGDIHRFPSADALAAASGVAPVLTQSGKVRYSRSATGGDKALKRVFYQASFCSIQRDPTSRAYYDRKRAEGKRHHQALIALARRKVNVLYAMLRDRQPFQHRPPLHLVA

SEQ ID NO: 145741 - protein, 339 aa, unidentified
MQVTTVGLDLAKNIFQVHGVTDGDEVAFNRALRRAQVLPFFERLEPCLVGIEACGTSHHWARELIKLGHTVKLIPPIYVKPYVKRGKSDAVDAEAICEAVTRPTMRFVEVKTPAQQAILALHRTRDLVVRQRTQTINMLRAQLAEFGIVFPQGVGHATQFAKRVLEGEQPDLSEVAGDVIAQLSEQLLFLHGKVAWYSLEMTRVSKREDRVALLQTIPGIGPITASAIVATVGTGRQFNNGRDFAAWLGLTPLNRSTGGKERLGRISKMGDRYIRRLLVIGMMSRMRQIMQNPERYDPWFADILARKPGKVAAVAMANKTARMVWAVLTRNEPYKVRTI

SEQ ID NO: 145742 - protein, 332 aa, unidentified
MSAVHAGIDVSAKSVELVLRQNDRRFGRETFAQTPEGHRQLERRLRTARPQHVVLEATGVYYVDLAVTLAHAGLPVSVINPRSFHHFAKLKLQGSKTDGIDAELLAEYGERMAPLPWTPPDPSRLALRDLGRQINRLTATRTQAKNRLHALRARRGSLELLIRDEVEAIATLDRRIERLTQAARDLLHQQPDLAEQAQHLEAAKGVAQASAIAVLAQLCVLPASLKTSQVARHAGLDVCLRQSGTSVNGVSRISKAGNAYLRAALYMPALSAVRHDPYVRAFYEALQRRGKRKIQALCAVMRKLLTGFWACLKTSQPFDSAKLFSDVHFAKT

SEQ ID NO: 145743 - protein, 351 aa, unidentified
MKTQTTAVPKLFIGMDVHKKNWTVHFKTDLFDNKTVTMPAEPLSLINYVAKNFPDHEVNCCYEAGCCGYWIARALKEKSWKVSVVNPADVPRNNKQDWQKTDKIDSRNLCKHLSDGNLKGIYIPEEEQEQLRSLFRRRIHLARNLRSIKNHIKSQLLYFGIKLPAEYDNPNWSREMKTWIGNLQWKFKSAAESMRSRLKQLEFVWYEELHISNELRAYCRKHYRKDYYLYKSVPGIGGITAAGILSELGDIRRFSRLDELAAIVGLVPGIYQSSENKIDLGLTKRSNHQLRSLLIEASWVAVRTDMALQQYYRKHAHKEPNKAIIKVAHKLLSRIRAVIISGIPYQPGLIK

SEQ ID NO: 145744 - protein, 353 aa, unidentified
MLSRLWLPRSLIVASSFIGPEWLPEQLGSSHKAGSRKMTKTITSAGIDTSKARLDIAIHGRGEHWQVDNSPPGWRQLARILDEARVSRIGIEASGGYERGVVEHLREVGLTVLVLQPMQVKAYARVRLRRAKNDKLDAALIAACAAMIEAPTIGPDQRLAQLARLLTFVEQIDSDIARLKTRLEHIDEPRLRRMVLGDITRLDARRSAELKRIIHALGMHEDLARRFDLVLSIPGIGERTAVTIVVRLPELGRLNREQIAALAGLAPFDDDSGTRQGQRRTVGGRGQLRRALYNAALPASHRWNQALMRLYASLRARGKLHKVALVACARKLLIYANTVVQRGTPWIARNAAT

SEQ ID NO: 145745 - protein, 458 aa, unidentified
MYRELQPFREDLSQELNASLFPAVAGLDPNKLLETYLDRLTLYTGVDVADHTFTALALDAGQEILGSLDGCANEPDGFERFLTWVRTLRDQHGLRIIAVAGETTGIYYWALWDCLGEQPDVARVLFNPRTTEHMGEVLSKKVRNELVDALLLAEQLRLGSTPEVLLPDDAQLLTARYYSRAARDLAQQINRRKNQLRALLRAYCWPLCQVFPGSQLHHPAVYALLQENLFPDEFVQAGAAALAATLTAHCQDAFGLAEAEQLIAASRQALARPIERDVIRHLVHAYIQDITTFQQRKTFYLKAGYALIRKRQATKLLRTVQGAGISNTLALVSEIGDVQRFASGEHLASFLGLTTSKHISGTTLFQARRITKQGSPNGRYAAVNVAQHLSRYVPRYRAMYQRIKGRKPPRRGHFVALVAIARDFITNVLYDMWRHQRPFFQEVDDYRVYRHQQQHAVT

SEQ ID NO: 145746 - protein, 351 aa, unidentified
MSRKTDTVVARTIGIDTGKNTLHLIGLDDKGAIVLREKLTRGRIAARLANVPQCLIGIEAGMATHCVARELIALGHDVKQVPPVYARPFRQGHKNDFRDAHAIAEAVQRPSTRCVPVKTDDQLDLQALHRVRSRLISERTAVINQIRGFLLEHGIPVRQGLRFLRQQLPDVLAKRTDVLSSRIIRIIEDLSGDWRRLDERIEHVTEEIEELARGTEGCRQLMTVPGIGPIIASAMVAAIGSGTAFARGRDFAAWLGLVPKQMSTGDRTILGRISKRGNRYLRTLFMQGARVILLRPANWAKHSFGPWLTAAAKRLHHNVLATALANKLARIAWTVLAQRRNYESRVIVDAA

SEQ ID NO: 145747 - protein, 482 aa, unidentified
MKAKQGEKTKKATDHPTQRHWQEMNRKQRREMTRKIQSEDISLEVIHPDAAGIDIGNESHYVAVPPSRDSQPVRRFGCTTAELKAMADWLKQCGIRTVAMQSTGVYWIAVYDILEQAGLEVYLVNARETKNLPGRKTDVQESQWLMKLHTYGLLRNSFRPSQEIRMMRTYWRQRDDLVQSAGRHIQRMQKAMTQMNIQLANVLSDVSGVTGQAIIKAILGGQRDAHKLAAFRDPRVKASEEQIAQSLEGNWQEDLLFVLQQEQDGYEFCQKQMAECDRQLNHYLEQREDRSQGAPLPEEKRKGRRKKKSGNKPQFDLRTGLFRMSGTDLTRIDSIDVLTATTIVSEAGYDMSKWETENHFVSWLRLCPDNRISGGKIIGKGRLPTNNRATVALKMAASTLRLSDTYLGAQFRRLRTKLGAPCAIKAMAAKLARLLYRMLRYGMKYLDRGAAFYDAEHRRLQIKHLKWKAANLGLRIVEAPAT

SEQ ID NO: 145748 - protein, 348 aa, unidentified
MLADQLEYVVGVDPHRDTHALAIVDVRTGGVVVEASVEASSIGYARALELARGQAPGRRSFAIEGAGSFSAGLSRFLSGQGERVLEVGRLRRERRSAGKNDALDAIRAARSVLAESRAAEPRAGGEREALRALMAAREGAVKARRAALCQLRALLITTPESLRSELRPLTRAQLLRRLGSARADRRRDVELRGTLRALRALARRVRQLTSEERELAGEIERLARALAPQLLDQAGVGPLTAAQLVISWSHQGRIRNEAAFARLAGCAPIPASSGQTIRYRLDRGGDRRLNRALHMILVTRGRAHPPTIAYIERRIREGKSRREATRCLKRYLARNLYRLLEQGAPLGA

SEQ ID NO: 145749 - protein, 362 aa, unidentified
MTTIAHHDVVVIGGVDTHKDIHVAAVLDNVGRLLGTESFPTTRHGYRRLLAWLQSHGQVEVVGVEGCGSWGAGLARYLTARGVRVVEVNRPNRQERRRRGKSDVLDAEAAARAVLAGQATATPKAGTGPVEALRQLRVARSGAMKARTAAANQIHSLCDTAPDEIRAQLTGLTMAKKIALAERWRPGPSMTPANAAKRSIASVARRWRALDDEARALQHHTKAILDEHAASLLAVHGVGYDTAAQLLITAGDNPHRLLHERSFAALCGATPVPDSSGRTNGRLRLNRGGDRHANSALWRIVIVRMATHPETKTYVERRTKEGMPTIEIIRCLKRYVARQLFPHILATAPHQTTELQPATPAA

SEQ ID NO: 145750 - protein, 337 aa, unidentified
MRQIKFFIGTDVSKEWLDMCIILEGEVIHRQQIKNKETAIRKWLKQTQKQYGYSMQDSLFTMEFTGIYNHHLLELLHQAGANIWLIPGLEINASRGLQRSKNDKDDARLIAEYAIKNLKKVRLWKKPRTVLKQLAALLMMREKLMTSKHQYQTTLKEYKSFSTKDQYLIIKDYSSAMLKTICQDLKTIEHQIKDIIEGDEQLKELNEYITSVDGVGIITSANTLVETNEFLDISEAKKFSNHSGVVPHKDESGKKIKKPKVSHKANKKMKKLLHLAAMSVIRKKGELRDYYERKIAEGKNKMSVLNAIRNKLVLRIFACVNNKRKYEKNYVFSLVNP

SEQ ID NO: 145751 - protein, 347 aa, unidentified
MDKHSANERIKVLGIDLGKNTFHLHGVGVHGKTVFRKTLTRKKLVEFMARLKPCLVGMEACGGSHHWARRFREFGHSVRLMAPQFVKPYVKSNKNDKVDAEAICEAVQRPSMRFVPLKGIAQQDLQSLHRVRSLAMAHRTAQINQIRGLLQEYGIVLPQGACHVRRLIPELLEDAENGLTFWMRELLSHLRDVLVLLDDRIAEYDASVKAISQEDEGCKLLMTIPGIGPLSATALLAAVGDVGVFKNGREMAAWLGLVPRQHSTGGKARLLGISKRGDAYLRTLLIHGARSTLRYAVGKNDRRSSWAVGLKNRRGQNIAAVALANKNVRTAWALLTRNENYRIEEAA

SEQ ID NO: 145752 - protein, 339 aa, unidentified
MKVTTLGIDLAKSIFRLHGVDGRGAVVLRRQVTRKQLLPFLAKLSPCLIGMEACAGAHYWAREVEKLGHTVRLMSPHFVAPYRKSQKNDGNDAAAIGEAVGRPSMRFVPVKSAAQQDVQALHRIRFQLIKWRTALANEIRGLLGEYGIVVARGIGPLRRQLSLILEDGENQLSGFFREMLGEMAERFKLVDQRIRQYDLKVDRVFGQDERCQRLAKVEGVGSLIATALVAAVGNAHDFKNGRELSAWLGLVPRQHSSGGRNVLLGISKRGDRYLRTLLIHGARAAVRVVERRRDHRSIAINRLKLKRGPNVAAVALANHNARVLWALLTRGEEYRPRCA

SEQ ID NO: 145753 - protein, 410 aa, unidentified
MDVIVSRGCGLDVHQATVVACLLTGEPGALPRKQVKTFSAMTGALLEMREWLKTADCTTVAMEATGVYWKPVYNLLEGHFDLVVANARHIKAVPGRKTDVKDAEWIADLLRHGLLRSSYVPPPELREIRALLRYRVKLVNARSGERNRVTKLLESCNIKLSSVASDVFGLSGRLMLDALKRGQASPEEMAELAKGRMRSKLPLLKLALEGRMEDHHRQLLSIQLDRLDRLDRDLKQMDAKIESKLKPYERQMELLDGIPGINWVTAATVIAEIGIKMSQWPTVGHLTSWAGLCPGQNESAGKRGKSNIRPGNPYLRSALVEAAIAATCAKDSYFREKYYRLKARRGHKRAVVAVAHKILIAIYYVLSNETPYQELGADYLERLEPERLKRNLVRRLERLGYQVNLEPNRA

SEQ ID NO: 145754 - protein, 334 aa, unidentified
MALNTLAIDIGKHSFHLFGIDDDGVIVSRKVSRLKLVATVDRLDPKIIAMEACGSAHHWGRMFQEAGRMVRLINPSFVRPFVRGSKNDATDAQAIFEAAGRPTMHFVPVKSLKCQDLQWLHRIRDRLVHNRTSLINHTRGLLAEYGIVLPQGAKRFTLQVRQAVVEAELSDLARELFEELLGQLGDLDRRIAHIDKHLIAICRDNAACRRLVGIPGIGPVVATALLAAAGDGRQFGSGRDLAAWIGLVPRQYTTGGKPRLGGMGRRANHYLRRQIVHGARAVMSQAGRRSDPRAEWMKAVAARRGFNRAVIAVANKIARAAWAILVRGEAYATA

SEQ ID NO: 145755 - protein, 341 aa, unidentified
MKLIRVGVDLAKNVFQVHGVDRSEKAVWRRKLVRADWIKALLAQIDPGCEIGMEACGGAHHWARLLQAQGYSVKLIAPQFVKPYVKSNKNDANDAEAICEAMSRPSMRFVTVKTVEQQDIQAVHRVRASLVDQRKAKANQIRGLTSEYGLIAPKELLYLRASIPRWLEDQDNGLSERFRRLLRGLWQDLLAIDERVEDLDREIEQIARQDPVAVRLQQLRGIGPVTATALLATVGDASQFANGRQMAASFGLTPKQNSSGGKERLLGISKRGDAYLRSLLVHGARAVIRTAQTKTDRLSLWVMRIATTRHPNIAAVALANKTARIAWAMISRGTNYHPESA

SEQ ID NO: 145756 - protein, 427 aa, unidentified
MSYRIAGIDVHKRMIVVVVADVDVAGDYEFERRQYGSTPAQLRLLAAWLVEQGVEEVVMESTAQYWKPVWASLERYWKPICEKWEGTSPMSGSLHLAQAQSNRGARGRKNDFADAERLVRRLVAEELTLSFVPDAEQRLWRTVMRTRYQLKCNQVQLQNRLEALLEEAHLKLSSLVSDLLGLSGRRMLQAMAEGETDPAVVAARADCRLRATQEQLCDALGACRELHPVYRRLLKAALEEWERIEAQIAQLGQEMASLIGPQQEQVQRLAEVPGLGVDSGQQILAEVGASAATFPSGRALASWVGACPGEEETAGVNRNRRSPKGNRHLRRILNQAAHAAVKLKGSIFALLYRRYVVRLGHNQTIAVIAHRLCRLIWKILHEGVRYDERGPAVSQRAQQRRTARMIRQLRSLGYSVELLHAAAGVPA

SEQ ID NO: 145757 - protein, 356 aa, unidentified
MSRDIQYIGMDVHKEAIVIAVLNGSGKLVMETILETKASSILQFIHGLRGELHVTWEEGTWAAWLYDLLQPQVHEILVCNPRRNALLKEGSKSDKVDARKLAELLRTGMLRPVYHGENGLRTLRELARSYQTISKDLTRVMNRLKAVYRGWGIPCAGTQVYAPRYREEWLSKIPQTGVRRRAELLYQQLDGLQALRRNLRPEFLAESRKHKAAMLLRQIPCIGPIRAAHLIALMQTPHRFRSKRQLWTYSGLGIETHDSAQFRFVRGQLQRSKKPQQLRGLNQNHNHEMKEIFKSTATRASCGRGPFHNFYAVLLAKGMKPEMARLTLARKIAAITLTLWKGGKRFDAEQLKTQAA

SEQ ID NO: 145758 - protein, 332 aa, unidentified
MYNFFVGCDMSKSFFDVSFYQDNNPVYLGQFSNDIPGFKKMVRQLKKVSNVLKTSWFVCFENTGVYSKALVEWLISQQIPCREENALTISKSLGIRRGKNDKADSKDICKYGFEKRSSIEPTVLSKPGIIKLKKLLSRRDLLVRQKQGLLVSIKEQKLTLDPKLLGFLESQNQELLAVYARQIKELEKQIQQTIDEDEEMKTNNELAQSVVGIGLVNSAYMIAYTDNFSSFETSRKFATFCGIAPFEHYQSGNKKGIFKVSHIANKKIKSLLSNAVNAAIMYDSELTEYYQRKLGEGKAKGVVLNALKNKLVHRVFAVVKRQTPYVKMMTYK

SEQ ID NO: 145759 - protein, 335 aa, unidentified
MWHVGIDLGRRTLFVTAVDDEGRVRDPVSIACTDCELILKTFEKLRPFRAVIEATGTYRWLFRLLRPHGTVVLAHTARMRAIINRRSKTDKLESQLLANLLRIDQIPLSYIPGDEYQYLREVTRHRARLSRLMSEAKNGLRAILGRNNLVAPYRIPFGPRGLSWFAQQDFVSADNAVRDELLDRIRHYKLQISSIDEKLKKLEESYPQVEALLDIRGIGVYLGLLIVAEIGDPERFRHAKQVGAYAGLTAKVNQSGDHAYYGHITKQGSTWLRWAFVQIAMTAARDDVALNNFYVRVRKRSSAKIARVALARKLAEICWKRLRRWHRTHPEYAID

SEQ ID NO: 145760 - protein, 387 aa, unidentified
MQASTVDTLTVEHCGTIFVAIELSQRSWLVTLHSPDKDKMSRHKLESGDHAGLLALIGRVRERAARTQGAVPAVVSCYEAGYDGFWLHRLLMAAGITNYVFDPASIAVDQRARRVKTDRIDGEKMLRTLMAYLRGEPQVVRIVRVPAPEQEDARRASRERGRLVKEQTAHTTRIKALLRLLGMAVGNPRRRDWLSWLSAQRDWQGQAVPRRMLSEIKHEHARLMLVREQLEALAQTSAEADPAPAAAQMAERNELLLRLKCLGPAFAMTLTHEVFYKDFRNRREVASYFGLTPSPWQSGGTDRDQGISKAGNPRARCAAIELAWLWLRHQPESALTRWFRSRTHNNASKRNKRIAIVALARKLMVALWRYLTTGLVPEGAVLKAVKA

SEQ ID NO: 145761 - protein, 311 aa, unidentified
MGGVNAAVEVGKHTLEIALGSEGALFSEPNQPRAIARLAKRLAASSCERVLIEGGSYQNLLVGALRAAELPVVIINPRRVREFAKSIGQLAKTDRIDARLLARYGEQIQPPVRALADEQNQALRGLWVRREQLIEMLVMEENRLEHAPKTLHRSLRAHIDYLRKQIKQSDSDLDSAVRNSALWDKYELMSSVPGVGRVLSVALLSDLPELGRLNRREIAALAGVAPFNCDSGTLRGQRRIQGGRKRLRRVLYSATLASVRCNPVLRPFYQRLRASGKPAKVALVAAMHKLLLILNAMLKAKIAWRPSCRVA

SEQ ID NO: 145762 - protein, 340 aa, unidentified
MNATTYGLDVAKRVFQLYWVDAHTGEIVNRRFGRDELIGFLAQRPTGRVALEACGSGHWWARKIQALGHKVVLLHAQFIRPFVQTNKTDAADARAIWTAVQQPEMRTVAAKTEDQQAMLALHRMRALLVKFRTMQVNQLRGLLYEFGVTFRAGRVAGLGEIRARMAELEEALPASLIGGLQDQLQRIDGLEQDIDQLEQRIGAWHKQEAACRAIAEVPGIGRLTATALVAMIGDARTFKSGREFASFLGLVPRQSGTGGRIRLGSISKRGDPYLRTLLIHGARSVMHHAKVPTPWQRELQARRPANVAAVAMAHKMARTAWAILAHGRPYQKDYVSVKPA

SEQ ID NO: 145763 - protein, 454 aa, unidentified
MTKKIIELDALEQINLDAAGIDIGAESIYVAVPPGRDAESVREFPTFTADLKRTAEWLKKCKITTVAMESTGVLWVPIYEILEHHGFEVFLVNTYHLKNVQGRKTDVLDCQWIQQLHTYGLLKASFRPPEEIVEIRGYVRHRDMLVRYRSAHIQHMQKALNLMNLKLVNVLSDITGVTGMKIIRAIIDGERDPYVLATFRNKQCKKDEEQIAKSLEGHYRPEQVFVLKQSVEQYDFYESQIREVDCQLENLYKKYDPPDDENCKNRKPKRHKPRKNQAHFDLGDSLYRMTGVDLTKIDGVDALIAQKVLCEIGTDMSKWPTVKHFTSWLKLCPNNKITGGKVIQTGTQKTKNRATAALRIAAFSLSHNNKSALGAFYRRMRARKGHCEAITATAHKIAKIIYFMLRDKTDYYDLGENYFQEKFQEHILKKLHKQAANFGFYLEPLQTLSSSLVS

SEQ ID NO: 145764 - protein, 466 aa, unidentified
MQPNRRRSLGKPRVSPTVFDRLNPHVAGIDCGSGEHFVAVPPDRDPHPVQSFPTFTSDLLRLADWLAACRVTSVAMEATGVYWIPIYEILDARGFEVLLVNARHFKNVPGRKSDVSDCEWIRELHSVGLLRGSFRPTDAIVALRAYMRHRQTLVESAGTDTQRMQKALVQMHLQLPLVVSDITGVTGLRILRDIVAGQRDPQHLAAHRDARVRASTADIVAALTGHYRPEHLFVLQQNLELFDACQAQLAACDRAIDAHVQTLTAQRPPPVTPLPDPRVTKKPHDHQPRFEIRTPLFQLTGGVDLTQIDGVAPYTALKLISEIGLDMTRWPTEKHFTSWLSLAPKNKISGGRLLSSRTPPSANRAAVVLRMAAMSLGRTQTALGAFYRRLAARIGKPQAITATARKLAALVSRALKGELVYRDPGADAYDIQQRARVLRRLRQRAATLGFSLVNRDTGEILAPAIP

SEQ ID NO: 145765 - protein, 420 aa, unidentified
MGLTCENEKAGRVTATSVWIGIDAGKSSHHAAAIDAAGKKLWSVKVGNGQRQIEELVERATATAAKTGARVRWAVDLVSPPAALLLATLLTSGQNVVYVPGRMVNGMAGIFRGEGKTDAKDARIIADTARMRGDLTELSATDELVVELTRLTSYRADVMADWVRGVNRLRDLLTSIFPALEAGFDFSTRSALILVSGYCTPEEIRQAGHEGLAAFLHEEGAWRKGIDGMATTALAAADQQTVALPGEATTASLVKKLARQLLGLDREIKDTDKLIAQRFRTHPQAHIIESLPGMGPLLGTQFVVATGGDVRAAFTHAGRLASYAGLAPVPRDSGRITGNNRRPKRFNRPLRQVFYMAALSSIRADGLSRAFYQRKRGENKLHTQALLALARRLVDVLWALLRDNRVFSPVPPQQVTALAA

SEQ ID NO: 145766 - protein, 391 aa, unidentified
MVCVGIDVAKDKHDCCILDSDGMVRADCFTIPNNMDGFKQLLQTIRNCTKKSDKIKVGLEATGHYSYNILGFLLDNGLPTYVINPLHTNLYRKSLSLRKTKTDRVDARTIATMLLSDVDLKSYTDIAYHNEELKSLTRYRFDKVQERAKLKQSVSRLATILFPELEGLVSSIHGTSIYALLSEYPGTKQISEVHLTKLTNLLTTASKGRYGKEKAIQIREAARASIGSVMPAKSLELKHTIKLIQELASEINEIEDSIQKIIDELNPPILSIPGMGVNSAAVILAEIGDFSNFSSPDKILAYAGCSPSTYQSGKLTNRYAHMEKRGSRYLRHALYNATKYVCYWNPVFAEYLAKKRAEGKHYNVALSHAMKKLVRLIYALQKSGKAYLAAA

SEQ ID NO: 145767 - protein, 390 aa, unidentified
MTQVDDLSRCLATLDENSTLVAVVEMSQSSWLTAGLVPGVDRRPLKKLAPDAPTLLHLLERWREEAKTAGRMITRIVLAYEAGRDGFWLARWLRARGIEAYVIHSTSVAVSREHKRAKTDRLDAAMLLRVFLGWLRGERDHCGMVAIPTIEQEDAKRPSRERESLVGERTRIINRMKSALARLGIRGFKPELRKAPERLEALGTPEGDSIPPNTLDELRRDLARIAVVRGQIEAIEQNRLARMEQMPAQGPHAMVRLLARVIGIGVETADMLVQEILSRNLRDRRAVARYAGLTGSPDESGSKRREKGLCKAGNARVRRGMIQLAWRFLIFQKESAFAQWYREQTVATKGARTDKRKKMIVALARKLLIALWRMATTGEIPEGVMLRPAA

SEQ ID NO: 145768 - protein, 359 aa, unidentified
MRERRNEISFKGQKIYVGIDVHLKNWSVTVLSETSVLKKFSQNPSPEALYGLLTRSYPGAEYHSVYEAGFCGFWIHERLTALGIDNIVVHAADVPTKSSEKLRKTDAVDSGKLARSLRANELKGIYTPDSVSLEMRSLIRLKNLITKDTTRQKNRIKSQLRYLGIEIPQEFLEPFSNWSKRFFAWLKEVQTLTPSGRQALDIQIRHLEELRRQKLEMTRALRSLAKTDRFREPLRLIMTVPGFGQATGMAFLSEICDISRFRNAEQLAAYIGMIPMCHSSGEKEGTGDITVRKHAVMRCNLVEAAWVAVRQDPAMNLFFTEQCKRMPKSKAIVKVARKLVNRLYFVLKHHTEYVNSVVS

SEQ ID NO: 145769 - protein, 607 aa, unidentified
MSTIASLDRIGVGIDTARYGHRVSFLRPDRKPAAKPLTVMENRAGYQALQDRLNQLHEQHPTAHFHVRIDAAGQYAVNLELFLRGLKLPMTISVGEPKRNKDYQKAHFPKRTTDDTESQAMARFAVIELPNATPAPSTPMILLREVAGRLQSKVKQTTQAINRLHNLLARVFPELATLTEDISVGWVLKLLDKYPTAERIAQAQIASLEKIPYLSVEQAHAVHQAAKQSVASLRGELAEALVRDLVNQLRLCQKAEQHLHQLLLEAFADLPASPHVQVLTITGIGEATAAALVAKIVDINRFATPNHLVSYFGVFPEESSSGVDKHGKPLPPGTLIMSPKGNDLVRFYLWNAARTAIQHNPAIRALYRRLRAKGKRGDVAFGHCMRKLLHLVYAVWKTDRPFDKEHFPWEGSSDTQPSATTPPSADAGTTPSANEEAVGHKRDLPAEEVVTTADSTLEPASPAVKPASQSAAPRPKVDFACVREHVTMEQVLQHLGYFASLRGRGRQRRGPCPVHSQPTAPERTFSVHLGKNAFQCFHAECAVKGNVLDLWAAIHRLPLYEAALDLAETFQVPRNREEEPVRGTSSPRTATAKTSAPAAATATDGAK

SEQ ID NO: 145770 - protein, 350 aa, unidentified
MVVVGADVHKQTHTFVAVDEAGRKLGEKTVKAITAGHAEAVMWARERFGAELVWAIEDCRHLSARLERDLMGFGQKVVRVPPKLMAQTRASARTRGKSDPIDALAVARGFLREPDLPVASHDEVSRELKLLVDRREVLVAQRTATINRLRWRVHELDPERAPKPLSLDLAKHRRLLGDWLDTVPGLVAELARDELADIIRLSEAIDALAKRIGERIRDVAPVLLALPGCGELTAAKLVGESAGVTRFKSEAAFARHAGVAPVPVWSGNTHGRVRMTRSGNRQLNAALHRIAVTQIRLQGLGQAYYRHRIAAGDSTPEALRCLKRRLARVVFNHLHTDHNNRNQPCQPAAA

SEQ ID NO: 145771 - protein, 368 aa, unidentified
MLNDTSTPVTASLSNDLSGATEIKNHILDLNHTYHFERIVIGMEATSLYSFHPAMFFHEDSQLKELHVEIMVEQPNKIKKYRDAFEENKNDTIDAFYIADYFRIERFSPSFLKEEKYMALQHLTRTRLQIIEQLTRTKQHFIENIYYKCNTLAYQFKKEELSTNLWSSTMMTLMTDEMTLDELANMPLQELADWLQQNSVNVILGLLAREIRNLEKMIKEIDKAIEDMVETIPEYQCLTSIPGVGKVYAAGIIAEIGQIERFKDHPQVAKFAGLNWREKQSGNSNSQHTSLVNRGNRYLRYYLVEAANSVRRYDDEYKDFYKKKYHEVPKHQHKRAIVLTARKFVRLVVVLLRNHQLYTPPRRLMEDK

SEQ ID NO: 145772 - protein, 467 aa, unidentified
MTPHKDFFLDSGPSVPTPMLPPSPGLSDALQVYHPHAAGIDIGEAEHWVAVPPGCDPQPVRRFGTFTADLDALADWLLDCGVTTVAMESTGVYWIPLFELLEARGLQVLLIDPRQAKRVPGRPKTDRLDCKWLQRLHTYGLLAGAFRPEAHVCVLRSYLRHRQMLLTYAAHHIQHMHKALEQMNLKLTQVVSEITGVTGLAILKAILAGERDPQRLAKLRNPHCHHDEEDIAKALQGTWRAEHLFALRQAVELYAFYHQQMTQCDQQIAAHLKTFGDKSAGQPLPPKAHRHKKTNEPRFDARTPLYRLAGVDLTTIEGIEEGTALVILSEIGTDMHRWPSVKHFCSWLGLCPQHTISGGKVLSRRVRPGAHRVTVALRLAARTLHHSQSALGAFFRRMKARLGTPKAITATAHKLARLVYSLLQHGSAYVQQGLDAYEAQYRERKVTVMAKQAKALGYTLVPLAAQG

SEQ ID NO: 145773 - protein, 346 aa, unidentified
METIVRIGLDTSKSVFQLHGVDETEQPILRRKLRRGQVLEFFSRLPPALVALEACGASHYWARELQSLGHEVAMIPPQYVKPYVQRGKFDAADAEAICEAASRPKLRKNFVPIKSPEQQGAQMLARVRNQFIGRRTQLANSIRGYAAEFGFTAPKGLSRLPQLLIDIKADATVPDLAKELVDALAAELARVDDQIATLDKKLMQLHRSNEMSRRLAAIPGVGPIGATLLSIKVVDARGFKSARNFAAWLGLTPKNHSTAGKNRLGVITRAGDGMLRTVLVAGATAVIADMRRRETRSWPWLKDIIARKPPKLVAIALANKLARIAWKLMVSGERYRPASSVMPMPT

SEQ ID NO: 145774 - protein, 428 aa, unidentified
MNDTSQIFPPDGLRDAIRGEVVGMDAHSRKLSLCHMRRENGRSVKVKCIATTLDALEGTCAKHFPADVPTVLEASTNSFHIAKRLAAIGRKAVVLASDVLAGAARKDRINDRIDAENLARVVLKRDDETLQVVSTPSERGAELREEHFACRDARKDATRAVNRIWSFCSRHGLDVDRKIGKKRCEDLLREGKVRGWSEATMMRAKGLVEEWRHAVEVCDGRERVLEKEVFGNPAMTRLQQVPGIRFIGAFALVAFVEEIRRFRTAKKLSSCIGLNPTVNRSGEEEGTGKLSKFGRRDLKAVFVEAAQSAMKTDSPLVRWAKHLLARGKPWNVAMAALARKLSVLCWHILMGHPVPDRERERATKRKLALLAGRVGQETVKAAGYGKKAEYVAAVAAKLYGHLPEATVCDSPEKSLKKRRKTPKARLGA

SEQ ID NO: 145775 - protein, 320 aa, unidentified
MSLTVAAGIDAGKAFLDLAIACGSDRQRNRSIRVENSAQGIEKILEVLSGNAAKRVILEAIGPYAAQLVRALLQAGYEVGLVNPKRIKAFREAEGKRAKTDRLDAQLIARFGLVMSDTLRPVPSEDQLAAKALAARRRQIVEMITMEKTRLKQASEPLVMASHRSAIKALSGERKAIEAELERRLTNDPEIALKRDCLMSMPGIAEQTSSTLLTEMPELGTLNRHAIAGLAGLAPHPDRSGLNPGRNAISGGRPCVRAALYMAALAAIRHNPRMKRDYQALRDQGKPAKVAIIAIARKLLVMANALVRDQQKYDPDKNTP

SEQ ID NO: 145776 - protein, 384 aa, unidentified
MQKPNDLNQSRIVLRQDSTLIAVIEMSLSSWLVAGIVPSVERQPLKKLAVDESALLKLLNRWREEAEKAGRRIERITVAFEAGRDGFWLARWLRARGIEAHVIHASSVAVSREHRRAKTDRLDTELLKRAFLGWLRGERDHCKMVAIPTTKDEDAKRPTRERQSLVGEQTRIVNRMKAALIRLGIRGFNPKLKKAAGRLEDLRTPEGEPIPPNTLAELHRDMERRRLVSDQIRQIEEARLERIEHAPGDGPHAMVRLIARVIGVGIETADMLVHEVLSRKLRDRRAVARYAGLTGAPDESGSKRREKGLAKAGNARVRGGMIQLAWRFLLFQKDSALAQWYRTRTEGGRNRKTIIVALARKLLIALWRLVTTGEVPAGVVLRAA

SEQ ID NO: 145777 - protein, 426 aa, unidentified
MDSVESGVEYAAFIGLDWGSQKHSVALRAAGSNAVETYQLEQKPEALHDWLIKLRDRFGGCPVAVAIEQTKGAVIHALLGYPFMHVFRINPFSAASYRQAFSPSGAKDDPTDAEYLLELVEFHRNRIKPWVPDDPQTRALQKLVEFRREVVNQRVALTNQLTQVLKDYFPQALDWAGDLDRVMACDFLSRWPTLEKVRKARPDTIRTFYRRHGSRSTEIIDARLKAMGTAVALTQDPAVVETSVLVVQTAIRALRPMIDSTDRVDQEIKNRFDFHPDVAIFDSFPGAGPVLAPRLLAAMGADRSRFESASEVQKYSGIAPVTDRSGKHVWVHRRFACPKFLRQTFHEFAGQSIKRCDWARAYYDMKRQAGKGHHAAVRSLAYKWIRIIFRCWKDHQPYDEQRYLQSLRAKGSKLLAFLPPATGETS

SEQ ID NO: 145778 - protein, 312 aa, unidentified
MDAMVIGIDVSKDWLDVAVRPTGESFAFKRTAAGIEDLVERLKDLSPALVAIEATGGFEAVVAAALAGAGLPVVVVNPAQVRAFAVALGKRAKTDPIDAAVIAHFAEATKPQLRQLPDEKTRLLADLIARRRQIVEMLAAESQRARRISDHRLTRSITRLRKALEEELAELERLIADQMRRSTVWVEKEKLLASVPGVGKTIARTLIAELPELGSLDRRQIAALVGLAPWTRQSGQWRGKSFIGGGRKTVRSALFVGAMVAARYNPQLKQFRDKLVAAGKPKLLALVAVARKLITILNAILRDRRPWQPLSA

SEQ ID NO: 145779 - protein, 394 aa, unidentified
MTEIEYFCGIDVSKHSFSVAIKNGKFIVKDKVFTMNKEGFNGLENMLKEFKENLLIGMESTGIYHNNLFNFLRENGYNSRIVNPYMVFQFFKFSRNKPTRTDKKDAQTIANFLEFNKKALIKENYLGEEEKERIRYLVREKERTTHLIAQTKTEIRRILSVVFPEMEKEPGIFSQEILDLLSEFSSSQKIRTLSKEEFLSKTKEFREKGKGNHSKLSFERIYELANNSIAFEYPYYEELLKLKIKRLKDLLKEKDYINKIIEENANKIFKREIEILTSIPGIGRESAIYLMAELINIKRFENYRKLIGFCGLDPVIKQSGKFKASFRISKRGNAHARRIVWIMAGCVKKSCPYFREYYLKKRNEGKSYKEAVIATSTKLLRVIYALLSENRTFK

SEQ ID NO: 145780 - protein, 336 aa, unidentified
MLYAGLDIHKNFSQAVVCRENGNVLKEGRVPTTKESISEFFSEFKEELKIAIEAGINSEYIFDFLEEQGHKVTLAHPLKTRMIAESRVKTDKIDANILAYLLRTNLLPTSYMPPKDIREIRQLVRQRIFLGRFSAKLKNRIHAELIRKGIRYERKGIIFTSDGKNWLHSLNMPFMESYLIMLGSIEDQIKKHNKKINQGGRKYEEVKLLTSIPGIGVYSALVIFSEIGNIERFNTEEKLFSYSGLIPSVNQSGNHRYYGRITKQGSKNLRWILTENVRVHLNWARANDVETKLLKYYLRLCKKGKPKNKAVIATARKLLQVIYWMLKNKTGYCVKG

SEQ ID NO: 145781 - protein, 430 aa, unidentified
MKSNTQNAKIEAITEKTLVLGIDVGSETHYARAFDYRGIEYSKKPFKFSNTEAGFVTFKEWILDIKERHEKDKVVLGMEPTGHYWFNLGKFLQDNEMKPVLVNPHHVKKSKELDDNNPTKNDRKDPKVIAGLVREGRYMIPYLPDGVYADLRTASNIRFQLQAELTRIQNRISRWFNIYFPEYKTVYGKPDAKSGMLILKAAPLPEDILTLGIDGVNQIWRDAKLRAVGKARAKTLIEAAEHSVGSKEGAVAARMEIRMLLEDYESRNTRLQEVMVLIEELVRKIPMAEKLLEIKGVGIRTVSGFLAEVGDISRFNNPKELQKLAGLALVENSSGKHKGETTISRRGRKRLRYLLFEVAMSLVAKNPEFRELHNYYTTRRLNPLKKMQSLMAIAAKLIRVFYAMLTKGVDYDPKKMISDIKRPTVYLQAA

SEQ ID NO: 145782 - protein, 342 aa, unidentified
MEHYAGIDVSLERSSVCVVDATGRIVREAKVASEPEALVGFFRQLGVAVTRIGLEAGPLSQWLHAGLTAAGFEAVLLETRHVKAALSAMVVKTDRKDARGIAQLLRMGWYRPVHRKSPAAQEVRALLVGRKLLQAKLRDVELSIRGILRGFGLKVGEVSKGRFAARIKELVAGHEMLETVIGAMLQAREGLQREFMRLHRRMLAIVRGDAVCRRLMTAPGVGALVAVTFKTAVDDPERFRTAKAVGAHFGLTPKRYQSGETDVSGGISKVGDGMVRTALYEAANAMLTRTVRVSALKRWALEVARRRGTKRAKVALARKLAGVLHRMWANGTDFRWGKEAAA

SEQ ID NO: 145783 - protein, 372 aa, unidentified
MTSIIYVGMDVHTTNYTLCCYSMEDDRFFAEVQVEPDAKNILKYLARIEKQQSRDCRIVCGYEAGCLGYSLYHQLHAHGIDCVILAPTTMMTKPGKRIKTERRDARLISKCLAFHTYSPVYIPTEVDDAVKEYIRMRDDANSALARVKQQIIAFCIRHGKIHDGKSYWTNKHLEWLSSLDLGNKILSEVLQEYLIRYYQLREQVDMYDMRINELAQAEPYRQKVEKLGCFRGIAAHTALSFCVEVGDFRRFATAQQFASYLGLVPGECSSGDKQQYTGITKAGNSHLRKLLVETAQVFGRSATKSGKSVALKERQAKCDSLTVAYADKANARLKKKYFKIAMRSKVNIAKTAVAREMACFIWGMMTDNISCA

SEQ ID NO: 145784 - protein, 374 aa, unidentified
MQAAVDRPEAPTTIRTDLGAIFISLELSRSTWLITSLVRGSDVAGLLERFAQLREKARARTGEVFPLIVIQEAGLDGFWIHRVLRAEGIESHVVDPASIATSRRRRRAKTDRIDGEALVRTLLAYKRGEPRVCAMVKAPTPEEEDRRRVCRERKVLIAERVQHVNRVKGLLFCQGITGYEPLRRDRRERLEELRTGDGRPLPNHLKAQVCREFDRIELLIEQIKAVEAERDALLVTEHAVTPAVMLLDIKGIGPEFAGILWAEGLFRHFDNRRQVAAYAGLAPTPWQSGSVDREQGVSKAGNPRLRTTLIQLAWLWVRHQPRSALTLWFEERVRRNGGRLKKTTIVALARKLLVALWKYVTAGVVIEGAVLKAV

SEQ ID NO: 145785 - protein, 342 aa, unidentified
MGGSRIYVGVDVHKNFSFVCAMKENGEVILEKKVRTEELEKFLEDIENKTIILEPTTTGINLARKLRKNNEVLLSHPYKTKLIAESKKKTDKVDARVLADLARTNFLPTAYLPPDEIMELREIIRERIRLKKLSTSIKNRIHSILAKNGIKYEGNLFNTEGREFLNSLNNECIRYLRILSSIENEIKEIDKEIRQKCMENEETMLLTTIPGIGFFSALLIYAEIGDIKRFPNSKKLCSYAGLVPSIRQSGNKVITGKITKEGNKLLRWVLVQCAFVAIRNDEKFRNFYERVKQRKGPQKAIVATARKLLTVVYAVLRDKKPYILHTPTDYYGEECTPVTNWA

SEQ ID NO: 145786 - protein, 337 aa, unidentified
MDVHKKSWTIHFKTDLFDNKTITIPTDPLVLINYVANHFEGHRVSCCYEAGCCGYWIARALLKHGWEVKVVNPADVPRNNKQDWQKTDRIDSRNLCKHLSDDNLKGIFIPGEEQEQLRSLFRRRIHLARQLRTIKNHIKSQLLYFGIKLPEQFDNPNWSRDMKTWIANLKWKYSSGTESIKSRLKQLEFMWYEELHISNELRAYCRKHYRKDYYLYKSIPGIGGITAAGILSELGDIRRFNRLDELAAIVGLVPGIYQSSDNRTNLGLTKRSNHQLRSLLVEASWVAVRNDMALQQYYRKHAHKEPNKAIIKVAHKLLSRMRAVINSGIPYQPGIVK

SEQ ID NO: 145787 - protein, 367 aa, unidentified
MSDAIVAYESFIGVDLHKNTVTLAAVRPDGTLSDRVKIPTKCRDRIASWLLTRPRPSHMAVEAVGFVEWFIDDYRGCVDRIDIADATELANRRGKRRHNDPNDARDIAQRLARDECPLGYIADDELMQLRKLGRHWHQLSRLLSRTKHSMRSMLLAANIAGPKLDGHAAQKWILAFGHLLKPVQQQAFANFLDIIQLVERQRARLHLQITFANRAKPFRKTVELLKSVPGIDEIWACIIAAEIGPFDRFPNADALEFWAGLTSDLKESAGRTQSGPITKAGSRSLRWALCKAAMTLCRSDKKQEAIRQRLIRRIGKPRANVAMGRRLLRTLYAMIRDDKSFVRGPGTQHNRTANRARMAHKQRKQVA

SEQ ID NO: 145788 - protein, 412 aa, unidentified
MLYSTSIGLDVHARSISAAAFVFETGEVVQRTFGYDPDAVAAWAATLPQPAGCLYESGPTGFDLQRRLVALGLPRHVGAVSKMVRPSGDRVKTDRRDALFLSRLLAVGEFVECAPPTPAMEAARDLSRAREDAREALMRARHQLSKFLPGKGHVWPRGRSTWTRAHREWLRSIELDDPCERLVLEEYVAQVRECEERRDRLDSAIAERSGADDLAGVTSRLRALRGVSTVTAFGIAVEIGDFSRFASPRALMSYVGLVPSESSSGETTSRGGITKTGNSHVRRLLVEAAWHHARPLSPASETDVASSAGLPAEAAGIAARANRRLHRRYLDLRARGKGANVANVAVARELVGFCWALALCGRAAEPRNHPPARAARPRRVGHPAIRLCAARPGLATRDPRPAELPSRSVGMR

SEQ ID NO: 145789 - protein, 338 aa, unidentified
MAIVCVGIDLAKNVFAVHGVNEAGKAALVKPSVVRGKLEELVAALPPCIIGMEACSGAHHWARRFQAYGHTVKLMAPKFVAPYRLSGKRGKNDAADAQASCEAVQRPNMRFVPIKSEQQQGQLMVHRARQGFVEQRTATINRVRGLLSELGIVLPLKASSVRSQAAAYLEELPGWANIVIGDLLSEIHRLDERIEAYDRHVAEMARQDHQAQQLMRLCGIGQTAATALVAMIGNGHDFKSGRQLSAWIGLVPGQYSSGGKTRLGKITKSGDAYLRSLLIMGARALLSAAKNKTDSLSRWAVALEQRAGYWKAVVAIAAKNARMAWAMLRQGEKFAMPA

SEQ ID NO: 145790 - protein, 475 aa, unidentified
MNVNGKRKKNQVVTANIFEQQELLKKAEVIRENLTAFTWRELETNGKFDKNEKLSFISDDMLILGCDVGSETHYLRAIDTRGRELSKSAFPFSNNSEGFQSAKEWAVTIATENNKNQIVLGLEPTGHYWFCLATWMISNGISVVQVNPYAVKQTKEVEDNSQLKDDTKDPKLIANLVKDGNFGMPYLPEKLYAELRRLSMFRDQLNEDRIRSINRMHREMKIYFPEYKDALGKVDGAFSLELLKQAPFPEDLTALGEDGIRQIWHDAKLRGRGYSRAGEILRYAKTSVGIKDGAAAGKTAVQWFVQKIMELDVELAVIEEQINQKCQKIPHAGNILEISGIGENTLSGILAEMGDISRFDDVKEIQKLSGLGLVACSSGKHKGETKISHRGRKRLRYWLFQAAKSAVAHAEEFKELHMYYTTRADNPLKKMQSLIVIACKLLRIIYTILKKGTVYDPKKMLRDIRRPEKKEAIAA

SEQ ID NO: 145791 - protein, 423 aa, unidentified
MEVMHKRVAGLDVHKETVVACVRLMVGRKSTRECRTFATTTEGLLALRDWLTASRVTHVAMEATGVYWTPVWKILSEGEFGLVVANAAHIKQVPGRKTDMNDAMWIADLQACGLIKASFVPEENVQELRSLTRTRKQLVREQTRHVQRIEKTLEEANIKLGAVISDLMGVSGRRMIEAMIAGECNPHRLAALAERTIKASPKALYDALHGRLREHHRFLLKVHLRQWDALDAAIREIDRQVAGQIERMDAEAADGQPPFRELIQRLSAIPGVARLSATAILAEIGRDMGRFPTAGHLVAWAGLCPGQNESAGKRKSARLRRGAPWLKTMLVQCAWAAKRAKDSYYMAQFHRLRGRRGPQKAICAVAASILTAIYHMLKSGAAHRDLGADYFDRRAPQAKAKRLVAQLAKLGFAAQLQPLVDAA

SEQ ID NO: 145792 - protein, 339 aa, unidentified
MQLYAGLDLHSTNTYIGILDQEFNRIFKKRVANNLELILQTLKPFGSQLKGLVVESTYNWYWLIDGLMDNGYQCLHLANPSAIKQYEGLKHADDQHDAFFLAHLLILGILPQGYIYPKKDRPVRDLARKRMFLVQHKTAHILSLQSLITRCCAKKISSNQMRHLTLDDLQHLLEEEHLVLSAQANLDNIRFLTQQIKRIEKIINKKIKLNKAFQNLLTVPGIGNILAMTIMLEVGDISRFAKVGNFASYCRCVPSQRLSAGKSKGHGNRKNGNRYLSWAFVEAAHLTRRHCQQFRRYYNRKVAQANTSLATKALSNKLARICYYIMRDNVPFREELSSQ

SEQ ID NO: 145793 - protein, 359 aa, unidentified
MQTQSKTIDFSGQNIYVGLDVHLRSWKVTIMTDELTHKTFSQPPEPEILHQYLRRNFPGGTYLSAYEAGFCGYWIHNRLLSLGIRSIVVNPADIPTTNKEKVQKNDKRDSQKIAKALRNGDLVPIYVPSSKTIEDRSLVRTRSLLVRDSTRTKNRIKSFLYFHGIKLPSPFENTKTHWSKRFLDWLESIEMKEDTAKQTLSVLISECKKLRATILTVTRSIRKLSQTEAYVEQEKLIRSVPGIGAITAMTMLTEIESISRFSNNDQFHSFVGIIPSTNSSGEEDKVGDISPRGHSILRSAIIESAWKAVGHDPALMKAFHDYCRRMEPNKAIIRIAKKLLDRISFVLKNKQPYTLCVVK

SEQ ID NO: 145794 - protein, 341 aa, unidentified
MKKFIRIGVDLAKNYFQIHALASEGDPAVTRKLKRSKMHEFFSQIEPCLIGMEACGSAHYWGRELKAMGHEVLLMPPAYTKPYVKRGKNDAVDADAICEAMSRPGMRFVPIKSPEQQATLMLHKTRELLVKQRTMSVNALRGHLSEFGIVAAKGIGRVDELLDLAESDATLPNAARASVKVLAQALEGLDKAIGDLEKEITGAHAQNEMSRLLDKVPGIGKLIASVIVASVPDPSVFKSGRDFAAFLGLTPRQNSSGGKQTLGAITKQGNRYIRKMLVLGATSLLNVVGKRKGALRDWIVGLLAKKPARLVTVALANKLARILWAMMKTGECFRTEMFAKA

SEQ ID NO: 145795 - protein, 445 aa, unidentified
MTTLAGVLVVPSVSCLPGTSDLRPSAFLLFEKVLAIMITGIDTFHDSVAGVDTHTDTHTIAAITATGQHLATETFPATRPGYIKLTEFLRNHGVGTVGVEGTNSYGAGLTRHLIDRGYLVMEVLRPTRSIRRRDGKSDPVDALAAARQVLTGEALSTPKDSTGPVESLRALQIARNQLVSTTAKLITTIKSLLVTAPENIRARYVTMTNHALVTALAQCRPSSDLRDPRNGVLISLKSLATTYRTLRAQCDDLETRIAALVSVINPHVSNIVGCGPIVAADLIISIGDNPERIHSEAALAHLCGVAPLPASSGRTNRHRLNRGGDRRANSALYRIAVVRMRCDQRTKDYVARRIAEGLSKKEIIRCLKRAIVREIYRVICTKRSTPQPRDLRRDELKELRIAKHLTQAVVADSLGCAPARISDIEKGKRPLTELASAYEKFLESA

SEQ ID NO: 145796 - protein, 338 aa, unidentified
METYAGIDLHSSNNYIGVIDSQARRLYTKRHDNQLDCILRALDPFKKTLAGVVVESTYNWYWVVDGLQDNGYTVHLANPAAIQQYEGLKFTDGKWDALWLANMLRLNILPEGYIYPKEDRAVRDLLRRRMMFVGQRTARILSLQSMITRNRGLNFSGAVVKNIMDFFVDKLFDSPHLRFTAKKNLAVIRFLDEAIKEIEAEVKSQARLKKEFEMLLTMIGVGDILGMTIMMEVGDISRFEAVGNYSSYCRCVESKRISNGKKKGKNNKKNGNKYLSWAYIEAANFSRRYCPMAKKFYQRKLAKSNKVLATKALANKLSKASYFIMRDQVPYDPEKLFK

SEQ ID NO: 145797 - protein, 358 aa, unidentified
MPGTVSHINSRTIQVIIGVDTHKDQHVAVAIDGLGVRLDEKYVPVAVCGYEELERWSRSLGQIHAFGIEGTGSYGAGLARFLTDRSHTVVEVNRPDRSVRYRKGKSDPTDAEMAARSVLAGVADATPKAGEGEVEMIRMLKSAKDSAIKARTQAVNQMKALVVTAPAELRETLEGLTTIALVTRCKNFRPGRLDGPKAAAKYTLRSLASRHRQLNEEVQELETELKRLTRAAAPALVNAFGIGPDTASSLLIATGSNPDRLRSEASFAALCGVNPIPASSGKTNRHRLNRGGDRQANAALYRIVLVRLRHDPRTQEYMQRRTAEGMSKIEIIRCLKRYVAREVYSIIRKPAQLIEKAA

SEQ ID NO: 145798 - protein, 412 aa, unidentified
MAVVMNQDSGFDIWCGLDVGKTGHHACALDAAGRKVFDKPLPQDQKRLEELFDKLQTHGRVLVIVDQPNTIGALPIAVARSMGIQVAYLPGLAMRRAADLYPGNAKTDARDAFVIADTARTMPHTLRRVDAGEETLAELKVLVGFDEDLAAEATRLSNRIRGLLTQIHPALERVVGPRLTTKQGLAVIEQLGGPQAMAAASKSKLLRVISKAYPRGAQEFADAITTALAEQTVIVAGTAAAEQVLPQLAASLRQTLDQRHALAAQIEQVVDAHPLAEVLTSMPGVGVRTAARILLDVGDASQFPTAGHLAAYAGLAPVTRRSGTSIRGEFPARSGNKHLKRALFLSAFAALRSDPTSKAYYDRKRAQGKKHNPALICLSRRRCDVLFAMLKNREPYRAPTPTREPSPLPLAA

SEQ ID NO: 145799 - protein, 326 aa, unidentified
MIKSTNYLGIDISKDVFDVMLADGKHYQFKNDLSGFKKLLILTNEYSHCVMESTGVYHLRLAYYLYEKGIAVSVENPLCIKRFIQMRLTRVKTDRSDSQMIYEYAVNSGNDLRLWQGQSKTQIACSQIISLTNLYTKQMTALKNKLQTEESMGSPCSKVIRSLKRSLKHFKNEIDKLEDSLLELVKQENQDLLTRVESIPGIGRKSGMLLIVLTGAFERFEKASELCSFAGLTPIIRQSGSSIRSRPRISKMGNRQLRKTLFMCSLSAKKHNKACKEIFDRIVAKGKSKKVALIAVCNKLLKQAFALAKSGLKYDRNYRSVLVNLN

SEQ ID NO: 145800 - protein, 345 aa, unidentified
MQSKTIAVDLAKSVFQVTFADENQRITERRRLSRPQFQRLITQSSPSRIVMEGCASAHHWGRLAIAHGHEPKLLHAKYVAAYVRRNKTDAADADALLRADGDDTLVPIAVKSVDQQALQSLHAIRAQWRGTLTAQINQAKALLAEFGLIVPRGSHTLGQRLHHAMLDLPDLLQPAFTELIFEINQLTQRIDKIDQQFKTITQTNAEAKRLTTIAGVGPLIATAMVARVPDIHGFRRGRSFASWLGITPREFSSGSKRRLGSISLQGDVYLRTLLIHGARAALLACRRNEKAGKPLTQLQRWALATQARVGHNKATVALANKMARIIWAVWTRKTTFNGDDALRFN

SEQ ID NO: 145801 - protein, 402 aa, unidentified
MNYFVGIDVSKDTFNIAVLHQQSFILSKHLPMSQEGFSQLLSILKQYPKPIVVMESTGRFFLPLYHFLLANDIQAFVINPKILHRFFQFLSANNPSKSDTKDAKLLALFAQTNPQFLNPLPPDHHLRNLSRLIQKLKKELSEAKTQIKYALSVLFPEVEKHLNIFSFSFLNILLKYPGASYLKKASTDDIASIINSTSKARKPSFSPQEIINLAKKSIGIHNPYLSQTFIFYIEKILFLEPRIQKLENMLLEEIDHDQNQQIKLISSIRGISPKLAVHFIAEVKDVNRFSNAKKLIKYAGTDPVIKQSGKFRINMSISKQGSPWLRNILFQMAVGVVTWNSYFREYFLRKKKEFKSYKKAMVAVMNKLIRVIYGLCKKGSYFNPVLSFNSKNFISICEGSHA

SEQ ID NO: 145802 - protein, 440 aa, unidentified
MQKVTVFETVYEQAAGIDIGAEKIFVSVDGKEVVSFNTFTSDYYRCVEYLQQKEIKHVAMEATGVYWVALYGMLESCGLKVCLVNPKETKQVKGRKTDVKDCQWIQKLFSSGILRRSFIPEAKYMEVRQLVRERMDIIEMSSAFVNKMQKCLELMNIKLKEVISQIHGASGMKMIKAILSGNRDKDYLLSLCDKRIVIKKGESVLKALEGNYNDTYLFMLEQNILMWEKHQEQVDLIDKRIAQLLEQLCTEKKTVEIKSKPKLIRHHAPKIKGLHEILIRLYGINLSSISGINDYTLLRLLGETGIDMDRFATVKNFVSWCGLSPKQHQSGKMNKRVKGSRCNKTGQIFKEIAQALINSKYIAIGSFIRKLRARKDSAIAIKAGARKLATAYYNALTKGTDYVEQGIRKYEEQIKQREKAALYRLAKKYDLELIEKQTAA

SEQ ID NO: 145803 - protein, 350 aa, unidentified
MKYVGLDWAYRSAQWCALASGGEIVGEGRIAADRDGLARLVLELGDEVKACLEMMSGALWVRDQLVTCGWQVQVADARKVKAVAPLAAKTDKVDARLLAELCRRELVPALWLPSLDERALRERLRRRMHLVRLRTSAKARISGLQTQWGVRVSLHRLRHADGIELLERAGVPAVWRHSVSECLTLIDFLDARIAPLDAELRPFAKADPRAVLLDTIPGVAELLALTIAVEVGEISRFAGPEKLVSYGRLAPRVHQSGDGRPRSGPLNKSGSRLLGWAAVEAAQQAWRESNPWHQLYLDVSRRSGNNNSAKAAVARKILTATWHMLSRNQPFNPAPRTTSVPASSRFALAA

SEQ ID NO: 145804 - protein, 464 aa, unidentified
MKKKKVSMNIVNPHCAGIDVGSRSHYVAIGQDSKDVKEFGVYAQDLQQLIQWLQANHIQSVAMESTGTYWQNLFVELINSGFTAILTSGRYTKNMNRKKTDVMDCQWIQKLHSLGLLPSSFLPDQSTERLRTLCRHRANMIDLKADASHKMQKFLKLLNFRLDVVVRDVTGLTGLKIIEEICKGELDPVKLSEHRHYNCRKSKEEISKALVSNERPDYLFGLQQEYERHLFYVSQIEKCDQQISQFFSKELAQTNLEALQDKPFKRDNKNSIKQVDLNKVSYQYFGGVDLYQIPGVSHSTILSIMSEIGPGGFKMFPTAKHFASWLRLAPNNKISGGKTLSNRIPKGSGRLKIALRNAANAVGNLKDSDLGKFFKKVAYRKGRQAAITATARKIAVILWNMITKKEQYAPKTAYVFLDEKRKQLALVRKKIAKFGFDPNELGIFSQERYRIKYEKKMIENQVIT

SEQ ID NO: 145805 - protein, 371 aa, unidentified
MRHVTSIGLDVHARSITAVALDSITGEVVTQRFGNSSAEVASWILKFESPKAVYESGVTGFHLVRELRNLGVDCIVGAVSKMQRPAADKRRKNDRNDAEFLARQLLAHNVVEVFVPDEETEAARSLSRVLEDIRDDLTRAKHRLTHLLIRWGHAWDERTPEGKRRGTWTRAHWEWIRGIELPESAAQESLDYYISEVRHIEAQKKAIEKRIAQYASRPRWSGRVEALRCMKGIETMTAFAITVEVGVFSRFDSARSFASWLGLVPSEHSSGEHVSRGGITKAGNSHLRKLLVEAAWHYTRATKERKRALNDPSVPFAISSHAAAGVGRLVERRRHFSCDLRKRPVVANVATARELACWVWVLGRMSEGTLS

SEQ ID NO: 145806 - protein, 386 aa, unidentified
MPQLNDLSRSRVILKRDATLIAVIEMGQSSWLVAGIVPGVERSPLKKLAVDESALLKLLNRWREEAEKAGHRIERIAIAFEAGRDGFWLARWLRARGIEAHVIHASSVAVSREHRRAKTDRLDTELLKRAFLGWLRGERDHCKMVAIPTLAQEDAKRPNRERESLVGEQSRIVNRMKAALARLGIRGLNPKLKKAVERLDGLRTPEGEPIPPNTLAELKHDMERRRLVRSQIRDIEGTRLERLKQAPGDGPHVMVRLLARVIGVGVETADMLVQEVLSRNLRDRRAVARYGGLTGSPDESGKKRREKGLARSGNARVRRGMIQLAWRFLMFQKDSALAHWFYARTKNAPQTRKTMIVALARKLLIALWRLAREGAIPEGIVLRPAL

SEQ ID NO: 145807 - protein, 316 aa, unidentified
MEQRSTFVGVDVAKAHCDVAVRPSGEQWTFAQDEGGWALAVERLRSLQPALVVLEATGGLERPLVRALVTAALPVIVVNPRQVRDFAKATGHLAKTDRLDARVLAQFAETVRPVVRPQPEPATEALAAVLARRRQVVEMLTAEKNRLHAAPQPTRQRIAAHIAWLKAELTRMDTELDDLIRQSPVWRAQEDLLRSVPGIGRVLSRTLLGELPELGRLSRKQIAALVGVAPLNRDSGTLRGPRRVWGGRAPVRAALYMATMVARTCNPVIRAFYQRLRTAGKAHKVALVACMRKLLTIVNAMMKHRTPWQQVAGPSA

SEQ ID NO: 145808 - protein, 330 aa, unidentified
MEKSDFKYFVGVDISKKSFDIAIIEGDDTASFVFDNSQKGTRAFIRLLKNRGIPLESTLVCLEHTGIYGRLVIARLLEKQVNFCVEMSLRITRSLGIQRGKNDRLDAIRIARYAAKNHNEMELYRPVPEILEKVNALLKVRDQLVRFRADLGKHPNELKTFDPELGKHQRHIRKTTKCLNDEIRRMEGEIEALVLSDERLNTTVRLATSVTGIGMFTALYFTIFTNFFTRYETPKQLACYCGVVPFEHTSGSSIQKRSRVHHMANKTMKKQLHMCALAAVRHDPELKAYYERKAEEGKNKMLVLNNVRNKLVLRVCAVVKRQRPYQKSVA

SEQ ID NO: 145809 - protein, 444 aa, unidentified
MGKPQVFDDQEQGRVFERVAAVDVAKASGVVCLRLPHPAQPAGRRSQVWEVPATMHAVTELARRLTAEGVQKVTLESTSDYWRIWFYVLEQAGLAVQLVNASQARNLPGRPKTDKLDAMWLARLTEMGLLRPSFVPPAEIRVLRGYARARTRLTHDRTRCFQRLEKLLEDALIKVSAVASKLTTRSVQDMIRAMIAGQRDPQVLAGLARTRMKAKHDALAEALAGLFTDHHAELAQLLLDQIAFLDTQIARLAMLIGEQLASLRAAGGTGADGATGPGPGATALPVIARLDEVPGVGAELAASIISETGLDMTRFPSPGHLASWAGLCGRTIQSGARTRTGKGQGNAWLRGYLGRAAIAAARTSTFLGERYRRLARRRGAARAQVAVARSILIIIWHLLNDPAARYHDLGPGHYQARTDKNRKARNHIRQLQALGYTVTITQAA

SEQ ID NO: 145810 - protein, 428 aa, unidentified
MRSIALDVHRAFCEVAIKEGTKLRSGGRIKTSVAELELFAQSLGANDQVALEASGPALAIKRIIEPHVGRVVVANTRRVRAIAEAKVKTDKVDAATLCELLHAGFLPSVFSPDEWTRSLRRRLQRRSKLVRTRTRAKNELHAVLARNLKGRPPVTDVFGKAGREWLRGLELAPDERETVDGALRQVDFLDEEVALIERELAAQALASEEIRRLMTVPGVSLISAATFVAVVGDITRFPIQKKLVSYLGLDPKVRQSGETPARHGRISKQGSPEARHMLCEAAWIVVRSPGPLRAFYERVRARRGGQIALVATARKLSVVFWHLLTREEDYAFGRPTLTRRKLRALELKVDKGWRQGKYSGPRVHETRKDREHEREFAEQAEIAYRRLVADWQPKKRKGAGVPVGRASSSHLLSEETAARQDTAPDPAL

SEQ ID NO: 145811 - protein, 432 aa, unidentified
MSDDSNSGHPKSFQDTFTLFMGFDWAQKKDHEAVAVDAAGKIVLDRSVSQTADGWSKLRDRLMARVGGDLAKVAVAVETSNGPAVEQLLAMGCQVYPMNPKAAQRYRDRKAPSGPKSDRLDAWSFADALRTDGHGWRVLRPDDPLTQELRLLCHDEVRLIQQRTAMISQLREALYQYYPAVLDAFDDWTCPGAWAFVERFPTPAKLERAGKRRWQKFLHTHKLYRPQTYERRMQIFSQAQDFCGTAAVTNAKSRLAGTLARQLRVLERQIQDYRKAIEELFAQHPDHDIFDSLPGAGPKLAPRLLTELGDDRERFEDAQALQCYSGTAPVTRSSGMSRRVKCRVACNKSLRHAVHLWADLSRKSCVWAETYYQQKKAKGMSHACALRCLGQRWLKILWKMWQTRTCYDEAFHTRNQVRHGSWIVTLRQGDPC

SEQ ID NO: 145812 - protein, 344 aa, unidentified
MDHFAGLDVSVKETSVCIVDDTGRIVKEVKVASEPQALLKVLGNPAYRFKRIGLEAGPLSQWLFSGLAEAALPVVCVETRHMQALLKAQINKTDRNDARGIAQMMRVGLYRSVHVKTLRSQKLRMLLTHRKLLQSKAIDIENDLRGTLRNFGLKVGMVGTVRFEARIRELVGDLPDLAALIEPLLIVRRTLREQVVILHRRLLAIVRDDEVCRRLMTIPGVGPVVSLTYRATVDVPARFRKSKAVGAVFGLTCARYQSGEVDWSGRISRCGDEMMRVMLYEAAQSMMRSKKWSWLKAWAMQIAKRRGMKKAIVALARRLAVIMHRIWVDGTEFRWTREQAPAAA

SEQ ID NO: 145813 - protein, 392 aa, unidentified
MNPICGIDISKEELVATILGDNFKETRKFGVHTDELYKLKQWLKENHTTQTIMESTGIYWIPIYASLEASDFKIVLANPRQVKGLPKRKTNIRDSEWLAHLLRSSLVKPSYVADADLRALRSLTRLRAILVQDQAGYKNKVHKVLQLSNIRLDSEITDIFGKSGRIIIEAIATGESLDKALERCPKCVQKNAQSIKDSIMGKLSQADLFALKLCMGMVDEFDVKVAEVDSQIVAYVDAEVIGLLCSVPGVGFVSAAVVAAELGDVSRFADEKAVCSFCGITPSIRQSGKRRWNGPITKFGSKWLRRNLVQCALAAIKVRGDSKFKAFYLRVRARRGHGVAIVALARKMLGVMYHLLVKKVAFFEEGWRLSGGGRLFWSGICRLGLRRLWICW

SEQ ID NO: 145814 - protein, 357 aa, unidentified
MAILFVGIDLAKNVFAIHGVNEHGKAVLVRPSVPRARLHQLVAALPPCTIGIEACSGAHHWARLFAQHGHTVRLMAPKFVAPYRMSGKRGKTDAADAQAICEAVQRPNMRFVPVKSQDEQARLCIHRVRQGFVEQRTATINRLRGLLSEFGIVLAQKAATVRREAAADLEDLPGWANTAVGDCLSEVHRLDERLAEYDRHISQMASEDERSARLMRLQGVGCTTASALVSTIGDARDFRNGRQLAAWLGLVPGQYSSGGKTRLGGITKAGDGYLRTLLVLGAKSVLAAARSKHDRLSRWALRSRCGAAARLLEGGHRHCCQERTHGLGSPRQGRGLQADRGLSTSTTDSRHRVTTRR

SEQ ID NO: 145815 - protein, 366 aa, unidentified
MFEGTTVIGLDVHKRSITVAVRQPGSVRVEEERLPHERDAVARWARRWKRRSGGKLVCAYEAGACGYALQRQLEALGIDCQVVAPSLVPRRPGERIKTDRRDACKLAEYLAGGHLTPVRPPTPAEEAARDLCRAREDAKQDRMRCRHRLSKFLLRRGMAFTAGRKLWTAAHRAWLQRQSFEDAWEQIVFDDYRLALVQIDARIEALDRQIEALAQAPAYRASVGALRCLRGIDTRTALGLVTELHGIERFGRPRALMAFVGLVPSEASSGERQRRGAITKAGNGHARKLLVEAAWHARHKPAIPAALRQRRHGQPPEVIAMADVAQQRLHRRYWRLVQRGKPTTVAATAVARELTGFVWAALRLVR

SEQ ID NO: 145816 - protein, 331 aa, unidentified
MKFNWFVGIDVSKNTLDITVLKSTDKVLFKQIENNVKALKVFLKELKSEGICISESLICMEHTGIYCTPVIEVAEKMSLNLWLENATQIKLSIGMQRGKNDKVDSERIAEYAYRNQDKAILRQPEREAMKKLKELNLARTRLMQISKSLQTISKEKDHYKSKNTFSANFKLTLKALKEDLKKVENEIKAIIQADPRLKELFSIVQSVKGIGPVVTLNMILTTNEFKDITDPKKYACYAGVAPFEHSSGTSVRKRTHVSRKANMRIKSILHMAALVAIQSNKEITEFYDRKIKQGKAKMNVINAIRNKLIHRVFACVRDNRKYEYIYTNALA

SEQ ID NO: 145817 - protein, 349 aa, unidentified
MRYLGIDVHSQTSTWCVLEPTGDIADRGRISTTEWELRELVQRLAPDRKLVVGQEVGSYAYFVHDVLTSEGIELLSFNANHLRMIASSRKKSDRRDAYWIAKSLQTGMMPHPVYIPQGECRELRQILSRREVIKRDRARWALRARGSLKPYGLSAPAGVCGVLSFIAAHDAKNNTLPDNVYESLKLCERQIKSLSAELKKTDQKIRDRSKDIEDTQRLMTIPGVGWLTATIICAWVGDIRRFPTARHLAAYAGLVPTVRQSGASNHLGHITKEGTPALRTALVQGAHSVMTSRISSAAPLREIFNRVRRTRGRYKIATVALARHLIRIAFYVLRDGTTYESSKLRKVGT

SEQ ID NO: 145818 - protein, 317 aa, unidentified
MNKKEHGVFIGIDVAKRTLDVAMCPNDLSRRFPNTEEGWILLHDFIQPLKPILVVLEATGGYEMGIVRVLADASFSVVVVNPRQVRDFAKAAGKLAKTDWIDAQIIARFAEALQPEVRPLMTKEAEKFHALMARRKQLIEMITAERNRLSSAPEWAKEDIQSHIAWLKESLKKVDKGLEDLIKKSPLWKEKYTVVTSMPGVGPVMASTLLSGLPELGTLNRKQIASLVGVAPFNRDSGLFKKQRTIWGGRTSVRSILYMSTLVAIRFNPVIKTFYTHLRKTEKLPKVAITACMRKLLVILNAMVKNNSLWRVATQSC

SEQ ID NO: 145819 - protein, 402 aa, unidentified
MTDQPKRYVGLDVHKNYVMVGAVNRLQEMVLPPRKVGLAEFEDWATKHLRSTDEVVLEATTNAWYLYDLLEPLVKRVVVCHPPQVKLIAAALVKTDKKDTMTLAKLLAVGMIPPVWVPPAHVRELRALVSHRQRLIAQQTRTKNRLRSLLQRHHLVPPDGDLFSQTQRDWWAKLDLSPSEKLRARQDLIILDQLAPLITEVDTEIGRLSLVEPWADQTPYLLQLPGIGLITAMTILGAIGEIERFPTAKKLVGYAGLGARIHASGQTHRTGGITKQGRKELRAVLIEAAWIAVRYDQHWREQFDPLADRIGRQKAIVAIARKLLVVIWHVLTAQVADRKAQPQQVARYFITWGRQLRVKSTLGLKASQFARQQLDRLKLGQDLERVAYGSVTYCLPPAKTTP

SEQ ID NO: 145820 - protein, 419 aa, unidentified
MKELLRVLLFIGDDWAEDHHDLELEDDTGRRLTKARLPEGLQGITRLHALVAQHAPAEWADLPSEEVAARVVVGIETDRGPWVTALRAAGYQVFAINPLSSARYRERYSTSGAKSDAGDAHVLAEIVRLDRHHHRQIAGDTDLVDAVKLVARAHQTAIWERTRQVLRLRSTLLEYFPAAVEAFEDLSAPDALILLGRAPSPVRVAKLTRSQVVSALRASRRHHVEAKTDSLLAVLRAPGLRQPLTTEAAYAAVVAGQVGIITALNVQIAQLDEVVDEHFGRHPAADIYLSQPGLGVVLAARVLGEFGDDAKRFQDVRARKNYSGQSPITRASGKKAIVMARYATNRRLGDALHQQAFSALSASPGARAYYDSMKARKIGHHAALRQLANRLVGVLHGCLKSGTKYDENVAWQHQTVAAA

SEQ ID NO: 145821 - protein, 360 aa, unidentified
MIGSDGHEGRVTVGVDLGDRTSQCCVLGENGQVREEFSVSTTQQGFRRRFSGQEHACIVLEAGLHSPWVSRLLGALGHEVIVANPRRLRLIYGNDSKNDRADATYLARVGKLDPSLLSPLTHRSAASQADGALIRSRQALVRTRATLINHTRGMVKSFGERLPRCSTRAFAKKVDEHLPEPLRPALGPVLSMISALTSEIRGLDQKIEALARDSYPETSLLSQVQGVGSLTALAYVLRVEDPARFPRARAVGSYFGLRPRQADSGKLKPQLRITKAGDQMLRCLLVGSAQYILGPFGPDTDLRRFGLALAARGGKSAKKRAAVAVARKLSVLLLRLWASGEVYEPLRNARLRGEMAPASA

SEQ ID NO: 145822 - protein, 318 aa, unidentified
MVIGIDVAKAELVSAVRSSGETWTSPNDEPGVRALVQRLERLAPELIVLEATGGYEVVCVAALAAATLPVVVVNPRQVRDLAKATGQLAKTDRIDAGILALFAERVQPAVRVIPDPAARELDALLTRRRQLLEMRQAEANRLGMVIGRHQYGVRKSLKKHLAFLDRELAMTDSDLDGMVRQSPVWRERDDLLQSVPGVGPVVARTLLAELPELGHLNRRAIAKLVGVAPLNRDSGLWRGQRSVHGGRKTVRAAIYMAALVASRHNHIIKAFYRRLLALGKPKKVALVACMRKLLTILNHMLRTGQRWTPDAQHAPIAS

SEQ ID NO: 145823 - protein, 337 aa, unidentified
MSDVHILAIDLAKRSFQVCATDRGGAVLFNRTISRAKLMQMLDAHEPCIVAMEACATSHYWGRVAQSGGHDVRLVPPIYVKPFVKRQKNDAADAAAIAEAVLRPNIHCVAVKSAEHQARAVIFRTHQCLVRQRTQLINALRGHLAEFGLIFPQGPTHLKQVATVLEDETTEVPGTVREMAQLYLDQIELLTSKIDDLTLRLKDATRENAEMRRLCTVPGVGPVTAGALMAFAPDLRTFSSGRNFAAWLGLVPRQRSTGGKTRLCGMSKMGQADIRKLLIVGAMSRIRWIIRKGVLPDNWLGQLVGRKPRMVAAVALANKMARIIWAIMTREQNYRMA

SEQ ID NO: 145824 - protein, 316 aa, unidentified
MNTSSPFVGIDVARDELVIALGPSRDLVAVPNDESGIRHVLEHLQAASPALIVLEATGGYETAAVAALAAAGLPVVVANPRQVRAFAKAMGILAKTDNIDAHVLALFAERVRPPIRPLPDEALRMLDALLTRRRQLIEMLVAERNRLAHALPPVEKSLKQHIRWLERRLADVDSDMDQAIQQSPVWRAKEDLLRSVPGVGPIVSRTLLADLPELGALNRKQIAALVGVAPLARDSGTLRGKRMVWGGRAPVRAALYMGALIASRHNPVIRDFYLRLVATGKPKKVALTACMRKLLVILNTMVRNNTRWGERYALSA

SEQ ID NO: 145825 - protein, 345 aa, unidentified
MEQISRIGMDTSKHIFQLHGVNTAEQPVLRKKLRRKEMFAFLETLAPTVIAIEACGASHHCARQLQSFGHSVKLIAPQLVKPYLKRGKNDAADAEALCEAMCRPTMRFVPVKTAEQQAALMLIGVRDRLIRNRTQLSNAIRGYASEFGLIAAKGKAHLNPLLERIRADESLPTLARELFAAQGVEYAQLQAQIDHVDARLIAWHRADECSRRLTKIPGVGPIGAVLLTMKTPEPELFLSGRQFAAWIGLTPKDHSTAGKAKLGGITRAGDEALRSVLVVGATTVIQHAQRGGRPSPWLTELLKRKPPKLAAVALANKMARIAWKLMVTGENYAAKTAPVTLPDAA

SEQ ID NO: 145826 - protein, 318 aa, unidentified
MQISGCVIGVDVGKFELQVAGHEKSIVSGVLPNNRSSIVGWLKRLPAGSVIGMEATGGYQELLARLAHERGFVVYVLNPTHVHHYAISLGNRGKTDRLDAEVIAQYIAQRYTKLHPYEPISPELQQVRALQALRSTVVRVSTSLRLSAQRHGCASVHQKKALAGLSSWAEQLERELIAKIKAQSEWAKIYGLLTGICGIGPINGVALTALFTRVHFTSSDAVVAFCGLDPRPKESGRKVGRRRLSKQGDKAARSLLYNAASSAVRTPHFKDYYAALRARGLASTAALVVIARKLLRIAYGVWRTGRAFDPDRLNLKTA

SEQ ID NO: 145827 - protein, 332 aa, unidentified
MNLVSTLGIDLAKSMFSVHGVNSNGEVVLRRSLSRAKLSELVAQLPTCLIGMEACSGAHEWARRFLASGHTVKLMAPKFVTPYRKSGKNDGNDAEAICEAVARPNMRFVPVKSLEQQSDLSLHRVRVGFVEERTATLNRLRGLLAEFGHVLPLRAVEVHRRVPLLLEKLPARVAACARDLLEHAARLAAKTQQYEHEIRAHVRSNALAARTQMRMGIGPITASALVATVGNGRDFKNGRQFAAWLGLVPRQYSTGGKTRLGHITKRGDAYLRTLLVMGARAVLQRAASLTDPFSLWAMALRERRGYHRACVAIAAKNARVAWALLSKEPTAT

SEQ ID NO: 145828 - protein, 359 aa, unidentified
MTVIEGKERRIVGGVDTHKDLHVAAVVDERDRVIGTRSFATTRQGYRQMLAWMCSLGDLQRVGVESTGSYGAGLLRFMQQAGIAVLEVTTPDRQDRRRRGKNDDLDAQNAAHAAFAGKRTVTPRSRDGMIESLRVLMTCRKTAVTARRVALQLIHNTVVCAPDGLRDQLRNMTRMQLIRTLASWRPDLTAYRDVEMAYRITLKSLARRYLELHDEIADLDAMIAAIVDELAPNLVARNSIGHAGAAQLLLTAGDNPERLRSEASFASLCGVSPVPASSGKTVRHRLNRGGDRAANSALHIIAIGRLRTDQRTKDYVARRIAEGHSKLDAIRALKRYIAREVFTLITQRRKEINATRIAA

SEQ ID NO: 145829 - protein, 359 aa, unidentified
MATKVKKNKINFKGKTVNIGIDMHKISWRITARVEGDTVLAITLARPTYDSFKKILSRFKGNHVRIVYEAGPGGFDLYDRLTDDGIECIVTPPSLIPTESGNKVKTDKKDSLKLARLLESDMLKAVWVLSPEERAHRQLVRTRRQILNHRSDIMRQIKSLLLFNSIEIPFKSTQHWTGVFMNWLLKLDLGYETLNRSLKAQIDLFNYLNAEKKILTKDVLQLAKDEKYAQRVDLLKTIPGIGPLSAIEILVEIQDITRFKTADELAAYLGLTPSQYSSGEHIRMGHITHAGNTRVRTTIVESSWTLVGKDPEMGRKYEKIKNKRGGKRAIVAVARNLSGRIRRILLDQVPYKLDFQKAA

SEQ ID NO: 145830 - protein, 484 aa, unidentified
MRGQRSAVRRFSPTDRRRLERALSVAREARLYRRIEAVLLVVEGQPISDAARRVRATRLSVGRWVERYLATRDAAALADRPRHGRPHSAPRLTPGRLAAALARDPRGIVFRWDGRPPTASVCQDTVVTTREREPPAMSISMIGLDTAKSVFHLHGIDAQGKVQLKRKLSRDKLIPFFEQQPRCTVVMEACGAAHHWARVLIGLGFEVKLIASEAVKPFVKRGKKNDPADAAAICAAASRPEAKFVAVKSLEQQGVLALHSVRSLLVKQQTMLANAMRGLATEFGLVVPKGMDKLKELMTLVEEDKSLPEQACKAFAELREHCHVTTERIEKLERQIVAHARHNDTARRLATVPGIGPITASLIAATVGDTIGNFPSARHFAAWLGLVPRQHTSGGKIRLGRITKTGNRQIRTLLVLGATSMVYRAEQWRGAAGAWVRGLLQRRPVRHVTVALANKMARIAWAVMARNEVYRAKEGVAPAAAATA

SEQ ID NO: 145831 - protein, 348 aa, unidentified
MDTIGLDLHKRETQLCVGHADGTITEQRIVTSRERFTAVLGTRSRARILVEASTESEWVACHLESLGHEVIVADPNYAPMYATRSRRVKTDRRDARTLMEACRAGTYRPAHRLSAARRHVRAQLAVRDAVVRTRTRYVAVAKALVRRDGLRVPSSAAERVGAHLAELAVSPALAAELAPLLTLLPPLNATIAAADQRLAELEHTDPTVALLMTAPGIGAVTASALVATIDDVQRFASAHQFEAYLGLVPGERSSGELRRIGPITKAGNRRARWLLVEAAWRILRSKDAAGAPLRGWARPIVARRGSRIAVVAVARRLAGILYAMWRDGAPYDAGKIRRPRSARQSPAA

SEQ ID NO: 145832 - protein, 383 aa, unidentified
MDHKQGTLDQEKSAPVPVLHVAFELANSTWKMACSDGSKLRHVTVTAGDLAQVQGTIIGAKRHFGMGDKVHTVSCYEAGRDGFWLHRYLQSCGIDNVVVDSASLEVNRRLRRAKTDRVDAGKLLSMLFRYYGGEKHLWRVVRVPSREDEDARHLHRELEALKSERTRHRNRIHGILIQQGLRVRNPSTKKFVQELDLMRTWDGRALPPEMKVRLVRVHERLRLVEEQISSLVKKKTQLLKVENARMAQVAQLLRLPGIGPVSSWTFVMEFFGWRRFQNRREVAALAGLTPTPYDSGSRLREQGISKAGNRRVRTLAIEIAWAWLRFQPRSKLSRWFLERFADGGSRMRRIGIVALARRLLIDLWRFLEYGVIPEGAQVRPLAI

SEQ ID NO: 145833 - protein, 345 aa, unidentified
MPSIVGGLDIHRKQITFDYADTVTGEVFCGQIAPADRAHLRGWLAGRFEHPEDAAFAVEACTGWRYVTEELTTAGIAVHLAEPADTATQRGKKKRAKTDRADARLQRILLAQGRLPECWIPPGHVLECRALLELYHDLRTEHTAWIQRAHAVLFHQGAPVFCDLSRAEAPAELAAVARGHLSPAGQLQVDACLRMLAVLEAELDAVRRRLLAAARHLRGARTLTESIYGVGPVTGLALTCWLGGAGRFSSARKAVRFAGLDITVYSSDSKRSPGHLSRQGPPVLRWAVYEAGKTHARPAAPDHGYYAAVKDRKDGKRAALSEARKITRRACHILSELGDDALAMI

SEQ ID NO: 145834 - protein, 423 aa, unidentified
MQNESAPGARGPVFCGVDTHADSHWLYVLDWRGRKVLSRQFPADAAGYEALAGAIAAAGEPACVAMEGTSSYGAGLTRHLASLGMPVREALSPARMQRRRPGQGKCDEADAERAARAAMSGSRLGTPKSQDGWVDGVRCMLAARSGAVKARTSAINTARSLLTTAPEGLRSRFRGMGGPRLMEELPSVRAEGALGAALGALADLWAAARDAALDMELAIEASLEENCPALLAMYGCGPVSAAKLAVAAGDNPGRLRSEASFAAICGACPIPASSGKTVRHRLNRGGDRQANSALHEIARQRVMRDPETAEYAERARGRGKSDREVMRCLKRYVAREAYRALMRPHEIRRPEDASELVAARRAAKVSQVRAASILGTSEKYISMLERGQRELKPIRRAYEAWVEAGLPLDWDRQALNCIPFLGL

SEQ ID NO: 145835 - protein, 364 aa, unidentified
MVISTIRNNDSGEGPEMKVKAIGIDLAKDVFGVHGIDARGKALVHRRVTRRQLLGLLAKLEPCLVGMEACGSAHHWAREIEQLGHSVKLMSPQFVKPYRKGNKNDPNDAEAICEAVTRPSMRFVPIKSAAQQDVQALHRVREQLLKSRTALVNQVRGLLGEHGIVAPRGIAHLRGLLIELLAEPESYGLSGLLGETLAEIAGRLRFFDERIGAYDLRIERVFADDERCQRLAKVEGVGPLVATALVSAVGNASEFKSGRELSAWLGLVPRQHSSGNRNLLLGISKRGDRYLRTLLIHGARSALCRAERRSDRRSLWASRLKLKRGFNVAAVALANKNARIIWALLTRGDNYRPASGTGPDNIAA

SEQ ID NO: 145836 - protein, 372 aa, unidentified
MPKSSTLFVGMDVHKETIDIALATNRLNGKVRHYGQIPNRIDTIDKLTAKLNREAGTLKFVYEAGPCGFGLYRHLTRKKHQCAVVAPSLIPKKPGDRVKTDRRDAMRLAQLYRAGDLAPIYVPNVDDEAIRDLSRAREDAMLDQKAARQRLKSFLLRHGIRYEGRANWNEAHLRWLTELILPTPAQQIVFQEYVNTITERTQRTERLERLLKEQVKDWHFAPLVGALQALRGIRFINAVTVIAELGDLTRFDNPRQLMCFLGLVPSQYSSGERTRFGPITKSGNRHARRNLIEAAWAYRYQAKVSREIQLRQENLPIRIREIAWKAQVRLCARYRKLVARGKNKNVVVVAIARELVAFIWDIAHHVHLKPIR

SEQ ID NO: 145837 - protein, 339 aa, unidentified
MMKVTTVGLDLAKLIFTIHGVDEHGKVVLQKTVRRAKLLELFAQLPACVVGMEACSGAQHWARELRKLGHDPRIMAAEFVEPYRHGGKNDANDAAAICEAVSRPQMRFVSVKSVEQQAVLAIHRLRQGLVEERTALANRLRGLLAEYGVVVGAGIDRLRRALPEILEDGANAIPGIAKEVFADAEQDLRQLDYRIASFDRRIAALAKASEPAQRLMKVEGVGAMTATAMVATAGDAKVFNNGRQFAAWIGLTPRQHSTGGKQRLGAMTKHGDVYFRTLLIHGARAVLRVSSKHHDAKSRWAEGLRRRRPDNVVAVALAAKNAPIIWALLARGTDYQRAT

SEQ ID NO: 145838 - protein, 350 aa, unidentified
MTNLARSVTGGVDTHLDVHVAAALDERGTLLGVESFATTENGYKKLLGWLIGFGPVELVGVEGTGSYGAGLTRHLQAEQVRVVEVDRPNRQRRRLKGKSDPQDAISAAHAAQSGNAAGEAKTRDGNVESMRVLRVARASARKGRTQALNQMRNLVSTAPDPIRAELRGLSVFNLLERASSYRPGAKRDIVSLTKYSLRMLARRALTLEEEIAEIDAILKPLVKETAPKLVATLGIGTDAASALLVAAGDNPERLRNEAAFAHLCGASPLDASSGKNQRHRLNRSGDRQANSALWHIVLTRIVYDPRTNEYIDRRRKEGLTKKEAVRCLKRYVAREVFSLLPHDKLGLDSP

SEQ ID NO: 145839 - protein, 322 aa, unidentified
MQFAADRLEAPTAIRTDLGAIFISLELSRSSWVVTSLSPGGGEKMSKHTVRGGDVAGLLKRFAQLREKAKGRTGKVFPLIVIQEAGLDGFWIDRVLQNEGIESHVVDPASIATSRRRRRAKTDGIDGEALVRALLAYKRGEPRVCSMVRLPTPEDEDRRRLCRERKVLIMERVQHVNRIKGLLFSQGVSGYEPVRCDRRERLDALQTGDGRPLPLHLKAQVRRELDRLELLLAQIKAVEAERDALLAVEQTKPPVAPAMLLGVKGIGPEFAAVLWSEGLSRPFENRRQIAAYAGLAPTPWQSGWSIASKASRNQAIRDYERR

SEQ ID NO: 145840 - protein, 351 aa, unidentified
MMIIGVDYHPSFQAMAFLVEETGECGEQELNHSDGQAEKFYRDLKQRGISVRVGMEATGYSRWFERLLAELGFELWIGDPAEIKARRVKKLKYDRYDARLLRRLMLENNFPQTWVPSPENRDLRQLLWHRHRLVQMRTRIMNQLQALAMNEGYRWKKKLFSEQGRAQLEKLALAPWASRRRQELLELLDRIHPTIEELTAAVEQETKKRPEVLRLMTHPGVGPLTALAYVLIIGTPERFHCGKQIGTYVGMIPSEDSSAGKQRLGHISKQGNSLLRFLLVEAAQAAARSNPEWRRRYMHLAMRRNKSIAKVAMGRKLGVRLYWMWRNGCAYSPSFEFGSYVGQLGTGHGVK

SEQ ID NO: 145841 - protein, 348 aa, unidentified
MIVLGADMHKGSHSIAAVAGETGELVDDKLVKVGERGFAAALDWARALGPERVWALEDCRHVSGAFERFLLVSGERVVRIATRLMAGERRGSRERGKSDLIDALAVARAALREGLERLPLAELAGVELDIRLLVDHRERLVRMRSALNNDLLWHLHDLWPEQTLPGSALLSRKWATRIGRRLQRHEQTARVRIARDELRQLRELSRTIDALEAEIAGLVAKVAPQLLEEPGFGPLTAGKLIGEIAGVERFASDAKLARAGGIAPIPVSSGKTSRHRLDRGGNRQINTAIHRVAVTRARCHPETRAYIERKRSEGKTNRDAIRCLKRHLARRVWLLLQPQDRRQSPSTA

SEQ ID NO: 145842 - protein, 355 aa, unidentified
MNQEKYIGMDVHTATISAAVMNAEGKLLMECVLETKAATILEFIQGLRGTLAVTFEEGTLAAWLHDLLKPHVSRLVVCDPRKNALMRDGNQNDRADARNLAELMRTNQVKAVYHGDHGTRTLKELGRSYLALTQDSTRVMNRIKSVYRGWAIPCAGTSVYSRRHRAEWLAKLVEPGVRIRAEHLYEQLDSLEPVRQAARRELLRESRKHAAVKLLRQIPTIGPIRSALLVALLQTPHRFRTKRQLWAYSGFAVQTYDSGEYRMVRGKRQRNRERITVRGLNRNHNHDLKNLLKGAAISAIERSGPLQDFYTALVQKGIRPSMARLTLTRKIAAIVLIIWKKGVSFDPKQLQRQAA

SEQ ID NO: 145843 - protein, 321 aa, unidentified
MSERSAVVVGVDVAKRHLDVAALGARLPQARFTNDAEGQAQLAALLAEAEPELVLMEASGGYEAALACELDAAGLPVVVVNPRQARDFARAMGRLAKTDRLDARLLAELAAVLVRRDDLSCFVRPPADPERLDLAALVARRRQLVAMLLAERQRLALARPTVRPSIEALIDALRAQLDVLDGEMREHVASHHRALDVLLQSAKGIGPTSSATIIAELPELGRLDRRQIAALVGVAPYARESGVWRGRRRISGGRSQLRRTLYMATLTATRFNPTIRAFYARLLAAGKLKKVALVACMRKLLSILNAMVRDSRSFDPWLNHA

SEQ ID NO: 145844 - protein, 424 aa, unidentified
MHNRKVNHMKDWKDLTHYAGFDWAKDHHTVVIVDAEGRIVADFEFAHSLEGWKSFEQKTSAWTNLAVAIETSQGAAVDQLLQRGLTVFPVHPVAAERYRERKAPSGTKTDHLDGWGLADALRVDGLGWKPLQPLDPMTQQLRLLCRDEVSLIEQRTALVNQLQQALAEYYPAALEAFEDWTEDFTWEFVLAFPTPQALVNAGKRRWEKFLHTHKLWRPETVEKRLKVFAQADQFKASEPIVRAKSQLAVSLCQLLCTLGQQLKLYRKQIEALFQDHPDHDLFGSLPGARNVLAPRLLGAVGNDPNRYGDHEVLQAIAGTAPVSYQSGRINKVRIRWSCDKFMRHTVHLWADCFRKASAWGQTYYQNKRDEGMSHACALRCLGQRLLKILFRMLKTKTPYDAELHGRNQQKHGSWVLKLMYAPAA

SEQ ID NO: 145845 - protein, 330 aa, unidentified
MMGSKSRMQGKVLPEPNAMTPIYVGVDVCKDRLDVYIHPIGLRLEFANSPEGIKRLKRSLTTHEVALVVMEATGKLHRAAHRSLHSGGLAVAVVNPLRSRLFAEAAGALAKTDRIDCRMLAVLGESLGPEATAPASEFMENLQELARCRDAALAARTALLNQLGVTTARSAAVEIKRQLRAANTAIENLGAEIERLIAADPLLARRMSILTSIPGVGTITAIALIVGLAEIGSLSAKEIAMLVGLAPIAWDSGQSSGARHIAGGRATVRSALYMAAVSAARFNPALKTFYNRLIARGKKAKVALTAVMRKLVILANTLVRESRPWEPRHA

SEQ ID NO: 145846 - protein, 312 aa, unidentified
MTPSIIGIDIAKDRLDVHRLPDGAAKRFTNDMAGHTALLDWLAQTRVARIVYEPTGAYHRALEQALAAKGLPLAKVNPRQARRFAEATGKLAKTDRADAAMLARMGLALAPDTRPLPSQILRDLKELHLARQALMKDWTAAKNREKSLRLPLLKRQNQKRQRQIETQIAAVEAEIASRIAANAELAERLAILESIPGIAKITACALLIEMPELGTLDGKQAASLAGLAPLARQSGRWTGRAFIRGGRASLRQALYMPALVATRFNPQLKAKYHQLITAGKPTKVALTAIMRKLIVLANALLRQRRNWAENPA

SEQ ID NO: 145847 - protein, 387 aa, unidentified
MTAVMIGVDPAKRSNTIEVIDSSETVLVTARFENTNEDYRKMRTLMKRWPDRVWAVEGATGVGLHLAQRLISDGERVVDVPSKLSTRVRAIDSGHGRKSDPTDAHAVAVVGLRTKGLREVVADDQTVALRLLSERRRDLVRSRTQAVNRLHQVLMELVPAGAQRHLTAAKAKDLVATVRPRDVAGKARRQLAVDLIDDVAVFDRKIKAVDARIEEAVAASGTHLTNIVGVGPVTAATILGEVGDIARFATADHFASYTGTAPLEASSGEVVRHRLSRAGNRRLNSALHVVALSNKRHESRGKAYYERKLAAGKGSKGSLRCLKRRLSDVVFRVLVEDRAAANPGGQMGASLTASAVDQIPKANTSDKPQPGSAPDVTPIKRLAEAVS

SEQ ID NO: 145848 - protein, 337 aa, unidentified
MNKSELNFVPCGIEVSSETLLVARGSKAPREFPNTAAGHQDLLRFLEQGGGRVRVCLEATGRYGLDLALALDAARLPVMVANPRAVRHFASALMERSKTDPLDARVLAEYAARMPFQSWQPPSPTVLKLVGVVRRLQALTEMRAAEKNRLHAASLSEALSGYVRLEIAHHLRTLEHSVQRLTRAAEQFIGDDWALAERYQLLQSIPGFGPTSALHVLAELSLLGADLDVRQWVAAAGLDPRHYSSGSSVHQKTRISKLGNARLRRGLYMPALVAIQHEPHLAAFYRKLLGRGKAKMQALVAVMRKLLHAIYGMFKHHQTYDGSKIHALTPLPEALCV

SEQ ID NO: 145849 - protein, 343 aa, unidentified
MNIASIGIDLGKTTFHLVALDDHGNIIIRKKFSRKQLLAYTANLPSSLVGIEACSGAHFIGARLRDQDHQVRLIPAQFVKPFVKSNKNDFIDAEAIAEAVSRQNMRFVPIKTDDQLDLQALHRVRDRLVHRRTAVINQIRGFLLERGITFAKGPANLRNRMPDIVEDADANLTPRMRTLLDRLWQEWKQLESGIETASDEIEQIASEDEACQRLRQIPGVGPLVSTATVAAIGNGAAFRKGREFAAWLGLVPRQYSTGGKTRLYGISKRGNTYLRRMFIHGARAVLMRVKYDTAGLGQWVHQLEARTTRNKVIVAAANKLARIAWAVLFKAEAYRHAAVCAQA

SEQ ID NO: 145850 - protein, 323 aa, unidentified
MNDKDGINNEPQCFVGLDVSKAWIDAHSLPDAQIRRFDNNEQGLEQCLAWVQTQPACLCVAEATGGFETAVASVLASAGIPIAVVNAKHVRDFARAFGILAKTDRVDARVLALFAQKRRPPLRPLPDETQRQFIHLVDRRRQLVAMRAQEQSRLGLAKGLSRESLKAHIEWLSSAIADLDRELTVTVRSSELWLVKSKLLASVPGVGKVTLCTLLARLPELGQLDRAAIAALAGVAPFNCDSGQHRGRRRIWGGRADVRCALYMAVITAIRCNPVIKAFYQRLLSAGKPKKLAITACMRKLLTILNCMLRTNTSWNPELLSNT

SEQ ID NO: 145851 - protein, 390 aa, unidentified
MEARTVNNLPPAASHDDDAVRCVLAVELSKKSWIVAVNTPLSDKISRLTLKPCDGKELLDLCERIRTRVARETKQRVEIVSCYEAGYDGFWLHRLLEAHGIRNYVIDPASLQVDRRARRAKTDRVDAERLLRSLMAYLRGEPKVWSVVRVPSVAEEDDRRLHRERGRLINERIQHVNRIKGLLAIHGIYDYQPLRRDRMQPLDRLRTADGRTLPPRLKAEILRELQRLELVIGMIKAIEAERDAIASAKAQTEHTSAKKIQGLAKIKCIGPEFASTLVGEVFYRSFDNRKQLASYVGLTPAHFQSGATCHDQGISKAGNAKARTVMIELAWLWLRHQPDSPLSVWFRGRVGKLKGRIRRITIVAVARKLLIALWRYLETGLVPDGAALKL

SEQ ID NO: 145852 - protein, 371 aa, unidentified
MADYREAFVGIDVAKLKNAIAVAESGREGEVRYFGEVDASYASMRRIIQRIAAKFDRVHFCYEAGPTGYGLHRLIQSLGHECMVVAPSLIPRKPGDRVKTNRRDALALARLLRAGELTAVWVPDEGHEAMRDLVRARAAAVETLRVHRQQISAFMLKHGRIYPRKKGWTMRYLCWLQEQQFDHPAHQIALQEMVEAVRVSKERVERLEKVIEEFVPNWSLAPVVRALQTLRGVDLIVAVTFATEVGDVSRFESPRQLMGYLGLVPGERSTGETVRRGAITKAGNGRVRHMLVESAWTYRHPPKVGARKLYRLEQAPPKVREIAWKAQSRLTARYRMLTGRGKRTTVVCTAIARELTGFMWAVAREAQAIRS

SEQ ID NO: 145853 - protein, 356 aa, unidentified
MSHDVKYIGMDVHKEAIVIAVQNESGKQVLESVIETRASSILEFLHGLRGELHVTWEEGTWAAWLYDLLQPQVQHIVVCNPRRNALLKEGSKSDKVDARKLADLLRTGMLRPVYHGENGVRTLRELGRSYQTIGKDLTRVMNRLKALYRGWGIPCAGTQVYAVRTREEWLDKLPQAGVQRRAELLYQQLDGLQALRREVRPELLAESRKHKAAKLLRQIPCIGPIRAARLIALMQTPHRFRSKRQLWTYSGLGIETHDSAQYRFVRGQLQLSKKPQQLRGLNRNHNHEMKEIFKSAATRASCGRGPFYDFYAALLAKGMKPEMARLTLARKIAAIALTLWKKEERFDAEQLKTQAA

SEQ ID NO: 145854 - protein, 366 aa, unidentified
MAIELSKASWVIGMVTPLSDKVSLRKIACGDVRRLLEIVDCTLDNAGRTMGRPLRMVSCYEAGYDGFWLHRVLEARGISNHVLDAASLLVTRKARRAKTDRLDAEKLLQTLMAYWRGEPRVCSVARPPSAAEEDAKRLHRERAFLMKERVQHIGRIKGLLATQGIYDFQPNRRYWQSRLDHLITGDGRPLGKRLKAELGRQCRRLAMVNMMLTEIDEERDAELDAAEAPAAVTGQIRRLVRLKGVGPQIARVLATEVFYRQFSNRRSLGSYLGLTPSPFQSGDTAREQGITKAGNPRARTTAIELAWLWLRYQPKSALARWFHERTSGHKGRIRRIIIVAVARKLVIALWRYLETGLIPSDAELKA

SEQ ID NO: 145855 - protein, 346 aa, unidentified
MEHIGIDVGKTSSQICILTEDGELIERRIKTTRDDFFKWLGNRAPACVLIEATTESEWVARYLEQMGHEVIVADPNFAPMYATRSRRVKTDKRDARTLCEACRLGSYRPVHRVSETQRQVKKMLTVRGTLVHTRAKYITTIKTLVRAEGLRIPASSAESFVERLLALTLPEHLAAVIEPLVTLLAQLNKQLKQADSQLQELVEQDPVVERLCTAPGIGPVTAVTFVATLDEVKRFETAKQVRGYLGLVPSEKSSGERQLRGRITKAGNGRLRALLVEAAWSLMRSKQASVKAIQQWTKSIALRRGKQVAAVALARKLAGILFAMWRDGTAFGCKGVMGEGASAFAA

SEQ ID NO: 145856 - protein, 340 aa, unidentified
MRIIGCDLHRSQQTLAMLDRDTGEEVRKTLAHDGDAVRDFYASLAAPIVVGIEATGSMGWFLQLMESLGITCHVGHPAAIRKAETRRQKHDRRDADLLLKLLVEGRFPTIWMPSTELRDLRALLLHRHQWVRMRTRVQNALQAIALSHGVRRGSSLWTRDGLAALTAVTLPPHASARRTALLSVYASLEEEVEQLDARVREVAAERGSASLLMTHPGVGPVTALATEVFLGDPTRFRDGKALASYVGLIPSEYSSGSRQRLGALSKQGNPFLRFLWCEATLHASRLDPALQRFYRRKLLQKGVAKARVATARKLGTRLWIMLRDQITYDEFCRRSARPAA

SEQ ID NO: 145857 - protein, 346 aa, unidentified
MIKSKKIVRIAFGIDISMEDFTVSNGVFFDNTDREVGKVMKFKNSVNGFNKLFAYYKKLQKKNNPEVNIAEWFVMESTGVYYENLAYFLYEKGLNVHVALPTKVKNFIRSLEKKSKTDELDAQSITLYGLEKQLSKWNPPNERTKLLKELCRELVSVKETSASIKNQLHSKKSAHKTNQETIKRINEQIKFYKKLIKKIEKNIISIVNEEPEYKTKIERITKIKGVGIQTVISVLSETNNFEGIENRRQLTSYAGLDVMEDTSGKKTGRRKISKKGNSNLRRYFYMPALSAIKYDRKLKNLYERVCERNGWKIKKSGIIAVMRKLLHLIYALWKNDTEYNPNYGIA

SEQ ID NO: 145858 - protein, 394 aa, unidentified
MYSLFVGVDISKDSFSVAALDEKAKVVFSMCPLMNEEGFAEFLRVLAAHHGDLETVVVALESTGPYHLNFYSFLIAKGIMTIVVNPLIIANFNKLSLRRTKTDKKDALTIARYLLLNREVLSKISTSQATTDLRDLARERESILKMIASTKNDIRRILQATFPELEQLVDVLSATMLHFLKVFPSARLINQATAQAVAEGFNQGDRRRRISVPYTSIIDLAKKSVGTPSPSKELILPGKIDTLFHLTQRADEVMKMLVKLCKSVRQEELSILMSIHGVASKTAAPFLAELGDHRNFKSYKKMIAFSGLDPTTHQSGKYEGMSMISRRGNRHLRKIIYNMTFCVVRYKGPFRDYFFRRKEEGLPFRKALLATAHKLMRTIFAMLNSRTPYRMEVT

SEQ ID NO: 145859 - protein, 346 aa, unidentified
MKPNSQMTLDKYFRQCVGIDISKDKFTACLYMYDIASDVGCHTESIDFANTKTGFNQMVKWSRREAQKGFPLTYLMEPTGSYYEPLAYHLNKIGLTVYVVLPNKARKFCEYEGIKTKTDAMDARCLALLGCANRKLRPWEPPKPIYRELRLLTRLRASLVKMQTQLRNHIEAVDHMESASKEVRKSYEKLLDTIDRQLEKNEQAIETKVAQDKELEARIKRIATAKGIRTGTVTCIVAETQGFYLINNRKQLTSFAGLDVVARQSGKDDPKHKISKKGNAYIRAALYMPALSAAYCNRQMNQTYMNICDRHPDTKMIGVTAIMRKMLLLVYSLWKSGEEYDETRDS

SEQ ID NO: 145860 - protein, 365 aa, unidentified
MLIHVPPEGTVLAMDVHKNTISTAVLEPGSTSPLVDKVSADDESVRRLIGRFVAPSQVWACYEAGPTGYELHRMLTGAGMRCEVIAPSLIPTRPGDRVKTDRRDARRLALLFRGGQLTSVRVPAAAEEAVRDLCRARADMIIDRTRARHRLGKFLLRHGRVWRGGENWTLKHHVWIRAQRFDDPALTATFNHYQATLTAREAAVDAIDADVTHYYTQPPFLDAVARLCAYRGITELGALTLASEVCDWRRFPTASTFMGFCGLVPCESSSGERTHRGGITHAGNTHLRTQLVESAWAYKSRPAAGPVITKRQAGLDPTVVARAWKAQLRLCGKFRRLDARKTNRKIVVTAIARELAGFVWAEMTT

SEQ ID NO: 145861 - protein, 414 aa, unidentified
MRIVYQNVAGLDVHKKFIVVALLVLDEAGQWRQEKRSFETMTVDLLALLDWLLAQGVTHVAMESTGDYWKPVFNILENNVEVILVNAQHLSRVPGRKTDQSDAEWLAELLQYGLLKASFIPPVGQRELRELTRARSTFVRERATLVNRLQKALESANIKLASVASDVMGVSGRAILAALIEGQSSPTTMAELAKGRLREKRAQLGKALEGRVKPHHRFVLSELLCQIDNLDESITRFNEQIETYCHPFEEETALLDTIPGVARQTAEVMVAEIGTDMSRFPSAHHLAAWAGVAPGNHESGGKHYSGKTRHGNKALCAALNQAAHGAAHTKDTYLAAQYHRLVVRRGKKKAIVAVMHSILVIAYHLIQRKEAYRDLGGNYFDQRRPELTAKRLLQRLTKLGYQVSIQQAPLPLAA

SEQ ID NO: 145862 - protein, 395 aa, unidentified
MSKVIHYIGLDVHKETIAVSIAPANSTEVRRYGIIGGTLDAVDKLIKKLSADNVELRWVYEAGPFGFVLCRHLLSKGFVCQVVAPSLIPKKASDRVKTDRRDADQLARLYRAGELTAIHVPDPEDEAIRDLVRARTSAMVEQRKARNRLKGFLLRLGYRYSGKTSWDDAHKRSLSRLVMPQPAQQIAFQEYLHAIDDATERLERLTQAVENALAGWKWEPVVRALMSLRGVQVLTGMILVAEVGDFSRFDDARSLMNFFGLTPSEHSSGDSRVQGGITKCGNTHCRRVLTEAAWHYRLRPKVSQAIQARQEGQSKEVRLIAWKAQQRLHHRFQQLSAKKKSVIAAAAVARELTGFVWAIACQVKPVKPPAAPEIIRPCRGRVYHLKANKTRTPAK

SEQ ID NO: 145863 - protein, 375 aa, unidentified
MSHFTTLFIGMDVHKESFSLCYYDMMANQFKHSTKVGPNVSYIVNYVNELRRLYGQDVEVLCGYEAGCLGFTLYHQLQAHGIPCIVMAPTTVMKEGSKRVKTDKKDAAQLTKALAFHSYRPVHISTVEDEQVKEYICMRTDHKVALKKIKQQILAFCLRHDFRYTEGSSNWTQKHVRWLCPLNIDGLYAEILTEYLLTYEKLVDQIERYDARIEQLGQSDSYQEKVSQLFCFIGIKTLTALSIVTEIGGFNRFATAQHFDFASYLGLTPSENSSGDRERRGAITKTGNSHVRRLLIEAAQSLAKGTIGYKSKELKRRQSGNRVEVIAYADKANERLRRRYRTLVLGKNKKQNVAKTAIARELSGFIWGMMTGRIA

SEQ ID NO: 145864 - protein, 317 aa, unidentified
MSMTDRAVFVGIDVSKAQLDVALRPEDRFAAPNDETGIARIVDRLRSAGPTLIVLEATGGLELPLAGALVAAGLPVVVVNPRQIRDFAKATGRLAKTDALDAAVLAHFAEAIRPTPRALPDEQTQALSALLTRRRQLLEMLAAEKNRLSQASSPVRKSVRAHIAWLQRALTQVDRDLAHAIQQSPVWQEKEALLRTVPGVGPVLATTVLAELPELGTLTHKQIAALVGVAPLNRDSGTLRGKRTVWGGRAPVRTALYMAALVATRFNPVIAVFYHRLRQAGKAKMVALVACMHKLLTILNAMLKHRTPWHPTPGASR

SEQ ID NO: 145865 - protein, 370 aa, unidentified
MLDTTTFVGLDVHARSIKAVSLDVMTGEVRAATFGYDAGAVAAWVRSVDPRARCVYESGVTGFDLQKRLSGLGVDCVVGAVSKMIKPSADRRRKNDRNDAEFLARMLSVGNVVEVWVPDDECEAARDLTRALEDARDDLSRSKQRLSKFLLRHGLVFDERTPTGRRKGNWTRAHWSWIESIRFAEGADNDALAYYVDAVRRAAEEKARLEGLVEAEARKPRWRKRVDSLRCLKGVDTASAADLVFEAGEFSRFRNARSFAAWVGLTPSEHSSGESDRRGAITKAGNKHLRKTLVEAAWHYLTCSGRPKDLAKGQAPDRGARRHAAKGVRRLVERRVALLARGVHGNKANVATARELACWVWAVGLMAEEA

SEQ ID NO: 145866 - protein, 428 aa, unidentified
MHCTQNEKIAQVSNESIVVGIDISSEKHCARAFTSRGIELTRKAFTFANTGEGFEEFGKWLKDQMDSSRLTKAIIGFEPTGHYWFNLADYLDEQNIRYVLVAPQHVKHTKELDDNTQRKDDWKDPRVIAKLVIDGRYFFAYRPQGKYAELREAFTRRCEIMEQLIETKNRLNRWFDINFPEYKTVYRKVDASTGMMILRKAPLPKDIVTLGVDGVNQIWRNAKQKGTGIKRAQTLVNAAQGSIGAKETSQATRISLWQLLDVYEIAEKQLHEIDELISSILAEMPDAQKMLGIKGVGQFTVAGFLSEVGDIRRFTDPRQIQKYAGLAIVADNDSGKHEGRTKLSQRGRKRLRWVLFRAALSLVKSNPQFYQLHQYFTGRQENPLKKIQSIVAVSTKLIRVVFGMIKNDRPYDPEKMMSDIHRPMKTVA

SEQ ID NO: 145867 - protein, 365 aa, unidentified
MHKQIAVDLAKSVYQVAESVRAGQVSQRKRLNREAFRRYIQAQAEPVEWLMEACGTAHYWGRFAQSLGHRVILLHARYVKPYRRRNKTDRNDCDAILEAARCAGTHPVPVKSHEQQQLQQLHGLREAWKKSRTQRINLLRGIFREMGIEAPAATAAFLRAAHERVERPEVAALRGQLQIVLAEINLYEQCRVECEQQLQRWHADDAIVRKLDEVSGIGVLTASALKTAVGQPERFASGRQLSAWLGMTPREFSSGDRRKLGHISRQGNTYVRTLLIHGARAALLAAQHCQAKTPQRLTRLQRWAVATAARIGHNKAAVALANKLVRICWAVWCHERRFSGEWQSSRPARRRARVIRRQFSRGCGE

SEQ ID NO: 145868 - protein, 391 aa, unidentified
MVCVGIDVAKDKHDCCILDSEGTPLVDCFTIPNNMDGFKSLLQTIQDCSQKSDKIKVGLEATGHYSYNILGFLLDNDLLVYVMNPLHTNLYRKSLSLRKTKTDRVDAKTIATMLLSDVDLKSYTDTAYHNEELKSLTRYRFDKVQERAKLKQSVSRLVTILFPELEQLVSSIHGTSIYALLSEYPGAKQISEAHLTRLANILVKTSRGHYRKDKATHIRDAARTSIGSVMPAKSLELKHTIKLIQELTSEINEIEDAIRKIMDELKPPILSIPGMGFHSAAMILAEVGDFSNFNSPDKVLAYAGCSPSTYQSGKLTNCYAHMEKRGSRYLRYALYTATKYVCYWNPVFTEYLTKKQAEGKHYNVALSHATKKLVRLIYALQKSGKAYLAVT

SEQ ID NO: 145869 - protein, 346 aa, unidentified
MEHYVGLDVSLKLTAICIVDGTGKIVREGAVASNPEAIAAFIMTHAPHVGRIGLETGATSTWLWTELNKMGLPVICIDARHAKAALKMQINKSDRNDAVGIARIMQCGWYKEVRVKDLDSHAIKALLVSRALLVKIKRDLENQIRGLLKNLGLVIGQAKMNVFAVRAAELIEDRPGLAAVVEPLLKTREAVERQIADLDRKVMRLARNDAQVRRLMTAPGVGAITALCFLATIDDPTRFKRSRSVGAYVGLTTRRYASGEVDWTGRISKCGDKMLRSYLYEAANVLLTRVAKWSTLKAWGIRLAKRSGLRKAKVAVARKLAVILHRMWVDGTEFNWSSKEVAAQSA

SEQ ID NO: 145870 - protein, 408 aa, unidentified
MNPLFVGIDVSSKNNVAYLMKPDGSKHSSFSVQNNLGGAKLLSERIVSALSSMRLSDVVIGLEATSIYGDNLVYALREDGGLGRFRRKIHVLNPKQVKKFKEAYPDLPKNDWVDAFVIADHLRFGRIAKEVYMDDYRYQALRTLTRARFDVIQNLTREKQRFANYLFLKCSGMAPDKGIQNTSATTIALMERFETVDNLANADLDDLTAFVAETGRGRFADPESTAKAVQAAARGSYRLPKTVNDTVNQAMAVSIASMRALKEQVKVLDKAIEQQFEIIPNTLTSIPGVGKVYSAGIIAEIGDIHRFASQASVAKFAGLVWTQHQSGEFEAEHSRMIKSGNRYLRYYLLEAANSVRRCDSEFRRYYDLKFKEVNKYQHKRALALTARKLVRLVFRLLKDNRLYIPPEG

SEQ ID NO: 145871 - protein, 400 aa, unidentified
MISVGIDVSKGKSTVCVLKPYGEIVCRPFEMQHVEKDLEAFHNLLQKLDGEIRIVMEATGIYHLPILIFFHNKGYFVSVINPFAMKKYAKDNSIRGAKTDKLDSIMIANYGIEKWFKLQRYEGDEEIYAELKLLGRRYRYYMELHVKALQELTHILDYVMPGIKKLFSSWNEANGKDKLSDFVERFWHFDLITSMSLETFTDEYLVWAKEKKYHRSRSKAETVYELASSGIPTLPSSTPSTKMLVQEAISVLRTVDSSLSLIVTRMQVLAKSLPEYSTVREMGGVGDVLAVKLIAEIGDVRRLHSAKALIAWAGIDPPPYESGQFIGSKRKITKRGSSMLRKIGYEVMRVLKSHPAPKDDAVYNYILKKEGEGKSKKHAKIAGLNKFLRIYYARVIAVYQ

SEQ ID NO: 145872 - protein, 422 aa, unidentified
MSYCPVAGIDVSKRFSDMCILSPDNKIFAQEKIYHDETSINRANALLQKAERLFFSKPVIVMESTSHYHLILFQFFSEHGYDVIVVNPLQSNSMKDFSIRKRKTDRVDAFKLAMMYRTKTLRPSQIPQTATRALRQLCRHRAELLNDVSSYKNRLTALLDQTFPGYDKVFSDVGGVTSCAVLVRFPTPTILLVEEESELVEVIAAASKSGYSFAKKKAGLLISAAQKAQTLGIHSCADETLIVCTIQMLRTLSESVLQIETAIDNLLAQIKEMRNNVSLLQSIPGIGSHSAALLLGEIGDISLFKKPKQLAAYWVLDPTERQSGSFRGTKNKLSKRGSSYARAALHMGIVNSICKRGKDSAANPVLLSYYEKKCKNKPAKVAQAASMHKLVFIIFAVLRDQKPFELKTPDQHAVEQGFVKAA

SEQ ID NO: 145873 - protein, 358 aa, unidentified
MVLGIDPHKKSHTVVALEAATGELVAELTVAADRRGHERLIAWARRLTPERRFAIEDCRHVSGHLERALIAAGERCVRVPPKLMAQTRRSARRRGKSDAIDAACVARAALREPGLPEARLAGPERALRLLVDHRSDLVGERTRIQSRLRWHLHDLDLDLEVPPKALGRACWLARLEEELAPLPGVQARIARELVARCRTLSAEISGLGREIAVLTEELAPELLALPGCGALSAASLLGETAGAERFASAARFAMHAGVAPLPVSSGQSNRHRLNRRGNRQLNAALHRIALTQLRMHAPAQAFVARKRAEGKSTREALRCLKRHLARIVWRELRNAEARRGLLPVGGDPPARPALLLAS

SEQ ID NO: 145874 - protein, 400 aa, unidentified
MAELWAGVDAGKRTHHCVLIDSEGAVALSCKVSNEEGDLLDLISSVLAIADGREVSWATDLSDGGAALLIALLDAHGQQVLYIPGRIVHHAAATYRGDGKTDAKDARIIADQARMRTDLLPVCTPDQVAIGLRLLTSHRLDVIHDRVRAINRLRATLMEYFPALERSFDYSKNKAALTLLSGYPTPQSLRRMGATRLTAWLKARGCRNSAGVALKALQAAKAQDTVLPSQPVASTLVAKLAERITAIDDDVTSIDARILEQLSLHPDAEILLSMPGFGPYLAATFLAQIGGNLTAFDSADKLASLAGLAPVPRDSGRISGNLHRPRRFNRRLLRTCYLAALSSLKNSPSSRTFYDRKRAEGKSHKQALIALARRRINVIWAMLRDHTPYVEPGRALPIAA

SEQ ID NO: 145875 - protein, 295 aa, unidentified
MKAPSTRPAAVLGLDVGKSSHWACLIDRDGEVLASAPVRNREAELDALFASAPAGTLVVVEQFRNIGSLAVRRARAAGLGVAYLPGLAASRAAGLFAGEAKTDERDAAVIARTALGVPDSLSGVPGRGEALEAARDHVVACATRDKNRLRAVLLESCPALEAETAALLEGDETYACLLTVPGIGPRTAAQLAVSVDIGRFPDHDHLASYCGIAPRVRSSGTSVRSVRASRRGDARLKSLLIFSCNSLVRSSGRYGEYYRACRARGMGHGRALKAVARKRLRAIYAVMRDRVPYRE

SEQ ID NO: 145876 - protein, 361 aa, unidentified
MAGMVTYVGLDVHARSTHAAAIDVSTGELLRARFGPGIEEPVAWLAGLPGPVRACYEAGPTGFGLYRAAVAAGVDLEVIAPGKTPRGPSDRVKTDRKDAELLARLLLAGSLTAVVVPPVEVEAARELMRAHDACRRDLMTARHRVSKMLLRHGRVYPESSTWTVAHRRWLSAQQFDEAVSALVFADLIASVDGLTARKAAIAERLSRLAEDEQWWATVARLRCFRGIDTLTAFALHLELGGDWQRFQRASALSAWLGLTPSLHQSGESSHQGSITKTGSALARRLLVESAWHYSRSPRIGVTLKNRQQGQPDHVLQIANRAQHRLHRVHHRMRGRGKAHNVTVVACARELACFLWAAATAD

SEQ ID NO: 145877 - protein, 430 aa, unidentified
MTNLKHTPSDSVLVAIDVSQRRNDVLIETPGVSRHRRLVVLNNRVEHDRFIDRLRDIGRPVIVGFEATGNYHRPLAYRLLQAGFELRLVSSVALARTREALHNGWDKNDPKDAQVILHMLKIGATQTYCDPICSGINDIQELSKTHEVISKAKTELWHRLLTHYLPLYFPEIARFAGNSRSDWFLAFLEQFPTPAGITVLAKEHFIDQAWDVVGRKVSKARLLGDIYETARSSIGLPVAIDSPAVTMFRLIIAEGRSLIRQRDAIEQQAHTALADNVDYRRLRQIPGIGPIIAMTILAEAGDLRRFRHHRQFLKFCGLDLATHQSGQFRGQTKLSKFGNARLRRAFWVAAQVAIRQRDNGFRAKYERYIARDNDNADLKRKALTAITAKMARTAHAVIRTGSDYRPFFEGPMPSGRTSLSRCREGATATL

SEQ ID NO: 145878 - protein, 411 aa, unidentified
MEVVHARCAGIDIAKKGAKVCVRVQGTRRRKTGYEVTDWGSMTDDILGLRQYLIDQQVTGVLMESTSDYWKPFYYLLEDAGFELILANARHVKNIPGRKSDVNDATWLSDLCAHRLVRSSFVPPAPIRALRDLTRSREVITHERTRKIARLEKQLEDAGIKLSSVASNLSGVSCHDMLTAMVAGQRDPIALSELARGSMRNKRPDLQRALTGRFTEHHAFLVRMSLERIAQDDAAIAALTQRIEAQIEPFRSFRDLICAIPGISTTVADVIIAETGADMSVFPTAGHLAAWAGVAPGQNESAGRTGSTTARPGDSHLKGALGIAAMSVSRTRNTRLGARYHRIAARRGKLKAIVAIERTLLSIVWAMGHTGQPYQEPGADYYTRLRPDRTKTRALKMLRDLGYTVTLTPAA

SEQ ID NO: 145879 - protein, 366 aa, unidentified
MENSITRQSPKRKRQCKPPMLTIGIDLGDKTSRYCVLDGDGEITAERTVSTTCKGMLEAFARTRRYRIAMEVGTHSPWVSRLLASQGHEVIVANARQLQLISASSRKCDRLDARTLAQMARVDPRLSRPIRHRGETAQLDLMKIRVRAQLVEMRTAAINSARGLAKSMGARLPSAEADRLTVEDLGALAEGLRQTLTPLLESVEALTGQIQELDEEIEQIARETYPHTKLLTQVHGVGTLIALTFVLTIDEQERFRKSRDVGCYLGLRPRRSDSGEREPQLPITKEGDVYLRKLLVQAAQCILRRRAPDSDLKRAGERIAGTGSKNAKKRAVVAVARKVAVLLHRLWATGEVYEPLYNHPHQRAAA

SEQ ID NO: 145880 - protein, 433 aa, unidentified
MQDIEDEPLFAERVAGIDIAKAGIEVTIRVPSDTRPGRRQQETRSFGTTRRQLLALADWLRSWGVIKTGMEATGDYWKPVYFVLESQGLDCELYHAAQVKALPGRPKTDRADSVWLARITERGSLPSSFVPPEPIRRLRTHTRYRRHLTQARTAEKQRAEKLLEDGHLKLSSVISDIHGVSGRAMLEAIIAGEHNPKVLAQLARGTMRGKIARLEEALDCSFLTEEHAAVLRMMLSLIDSYTAQIDELTAKIEVLTEPWLHQIEQLDAVHGTGRISAQDVIAEIGTDMTVFPTASHLVSWARWCPQAAQSGGKRKGANASGRGNPYLSAALGEISISAGRTQSFLGAKYRRLVKRMPKKKALVATGNSVLTIFHALLSDPAATYQDLGPGYYEQRMNTRRQARNHVRGLERLGYQVTIQAINPDTGELLTATA

SEQ ID NO: 145881 - protein, 347 aa, unidentified
MRFYTKQHPYDCGIDLHARTMYVCILDQAGETLLHRHMQATPEALLKAIAPYREQIVMAAECRFTWYWLADLCAEPGIPFVLGHALYRKAIHGGKAKNDKIDAHKIAVLLRGGMLPQASGYPAEMRATRDLLRRRMHLARTRGELLAHVQHTNSQYNLPAIGQKIAYKTNRDGVAKRFADPAVQKSIDVDLALIGSYDERLRDVELTLVNTAKHHDANTLYLLQTVPGIGKIRSLVLLYEIHQIDRFPRVQDVASYGRLVKCAKESAGKRSGTSGTKIGNAHLKWAFSEAAVLCLRDHPAGQKFLARLEQKHRQGKALTILAHKLARAVYDMLKHKTAFDMHTFLNG

SEQ ID NO: 145882 - protein, 354 aa, unidentified
MNKNHDQNEIILGVDTHLDVHVGAVVNAAGKLLGVLSISVNTQGYLDLLSWASSFGDLKRAGVEGTGTYGAGLCSLLTDNGITVFEVNRPDRVARRRRGKSDPIDAENAARSVLSGLSTAIPKQHSGACEAMRIASVARRSAVKARTQAINQVRAILVSAPQEIREKLWRVKASECVKACIKSRKFGDSPLMTTLQSTLKCLAKRWMMLSSELHELDKQLEKLTQNHAPKLRSRFGVGPNTAAILLSVAGDNPERLKSEAALASLCGVNPLPASSGKTVRHRLNRGGSRVANNALWTIAMVRMRSDARTRVYVERRTNEGFSTKEIQWCLKRYIVRELYLLILGDLQNTEKFLI

SEQ ID NO: 145883 - protein, 342 aa, unidentified
MSKTVAVLGIELDKNSCSLAGLDATGAVVVRRRMTREGLVKFVAGLPTCVVAMEACCGAHFLGRTFVARGHTVRLMSPEYVAPYVKAQKTDDRDAEAIAEAATRPTMRLVTLKSEAQLDLQVLHRARQRLVAERTRLTNQLRAVLLERGVILPKRRAPLGKRLDQLMANELAISPRALRLIEDLRDEWAELDRRIQTYDDDLATLAREDAMARRLATVPGIGVINATALLAAIGDGSAFARGRDLAAWLGLTPRQHSTRGKTKLLGISKRGNSYLRTQLIHGARAAMAHFAGKQTAVGAWVRQLMARAHPNVVAVAVAAKLARIAWAVLRHRRDYEHQVVAA

SEQ ID NO: 145884 - protein, 422 aa, unidentified
MFSPSLDDEQIIARVAALDVGKAEVVCCVRLPAPGGGKRRLQEVSTHSTMTRSLTQLAEHLVELGIERVVMESTSDYWRPAFYLFEAHGLDPWLVNSKDVKHLPGRPKTDVLDAVWLCKVAERQMLRPSFVPPVEIRVLRDLTRYRTDLVNARTAEKNRAEKLLEDACIKLSVVASDIFGVSGRAMMAALIGGERDPKVLADMARAALRRKLPALEEAFTGRFDDHHGFLLGRMLARVDAINADIAAVDVQIEAQLAPFADVVQRLDEIPGIAPVVAAAIIAEIGVDMTRFPTPAHLSSWAKFAPRVASSAGKSKGSGSTGHGNPYLARALGEVAVNAGRSPTFLGARYRRIAKRRGSRRAVVAVGRSVLVIIWHLLQHPDTHYRDLGRDHYDRQRDTEAVRRQHVRQLESLGYKVTLQPAA

SEQ ID NO: 145885 - protein, 311 aa, unidentified
MDYAGIDTGKHQLDAALHKRGEELQVKNGPEGYRTLSAWLRKHGVKRVGIEASGGYEMDVVAHLRREGFTVIVFQPAQVRAYAKFHLQLAKNDKIDARLIAACTAAKADIHAPPDPRLASFAAHLTWIDQIGEDIACCKTRLETCRDPRAQVYWKQEIARLGKLQKAEIALLEEAIRRHRDLAERLDLIASVDGIGLKTAVVILVRIPEIGRLSREQVAALVGLAPYDDDSGSRHGPRKICGGRKRVRWGVYAAALPASLLHNPQLMAMYQRLRAAGKEHKVALVACARKLVIFVNTVVARGTPWLPQGAF

SEQ ID NO: 145886 - protein, 346 aa, unidentified
MMIIGCDYHPSWQQVAWVETETGECGERKLVHATGEAKVFYQQLGSPALIGMEATGNSQWFIELVEDLGHAIWIGDAAQIRASYVRKQKTDKRDAAHILRLVVENRFPRLWTPDREQRDLRQLVLHRHKLVEMRSRVKNELQHLAMNKGMQKKATLWSQAGQQRLRELPLKPWAWCRREDLLGLLGMLNQQVGTLDQAVQKAAEEHAQARLLMTQPGVGPNTALAYVLTLGDVTRFQRGKQVASYLGLIPREESSGGRQKLGAISKQGNRLLRSLLVEAAQIAVRFDPGFRKQYLHRCHQKPKGVAKVAAARRLAVRLYWMLRTQVAYPEIVRIESSPRVPRVGAS

SEQ ID NO: 145887 - protein, 320 aa, unidentified
MSTKKAKSFIGVDVSKQLLEVAVHESDYQFRCANKTSGFAELIGELISLRPALIVLEATGGLEIPVTAALQAAGLPVVVINPRQVRDFAKATGQLAKTDRLDARVLAHFAAAIKPPLRPIKSADELELDALVGRRGQLVEILTAEKNRRGSAATETVRQEIDEHIDWLDQRIAALDEQLKGLLKTSARWQSNDAILQSVPGIGPVVSVSMLAELPELGTLNRQRISKLVGVAPLNRDSGPQRGSRHIYGGRKRVRSMLYMATLSATRFNPVIKAFYQRLLAMHKPFKVAITACMRKLLAIINVMIRDRTHWKTEVEPLSA

SEQ ID NO: 145888 - protein, 343 aa, unidentified
MKISRVGVDLAKNVFQIHGADAHGNTVWKRKLTREKWIEAICTRAPDGCEIGMEACAGAHHWARRLSEYGYQVKLIAPQFVTPYVKSNKNDANDAEAICEAMSRPNMRFVKAKTVEQQDIQAIHRVRSEIMSQRVAKMNQIRGLVAEYGLVAPKQVCALRKALPLWLEDAENGLTNRFRRLLSDLWCDVKYLEERLSNLDAEIKEIAETDPMAIRLQQLRGVGPLVATALIASVGNGEQFTKGRQMAAAIGLTPKQFSSGGKDRLLGISKRGDAYLRTILIHGARSTIGHAKHREDRLSIWVTDLAKRSHTNVAAVALANKTVRMAWAMMRNETDYDPERAAA

SEQ ID NO: 145889 - protein, 475 aa, unidentified
MNIKGSKKKNQVLSVNIFEQQGIIAKADAIKAGLKASTWHELETRGKFDKNDKLSFVSDDMLILGCDIGSETHYVRAIDIRGRELSKSAFGFSNTAEGFESMLDWSTKLAAANDKKQIVLGLEPTGHYWFCLTTWLVAKGISVVQVNPYAVKQTKEVEDNSQLKDDKKDPKLIANLVKDGNFGMPYLPEKLYADIRRLSMFRDQLNEDRIRNLNRLHREMKIYFPEYKDAFGKIDGAFSLELLKAAPFPDELAALGTEGMKQIWHEAKLRGRGYANASSILEYARKSVGIKDGADAGRQAVKWFVSRIIELDGQLSDIENKLNERCMEIPHAKNILAISGIGENILSGILAEMGDISRFDDVKEIQKLSGLGLVACSSGKHTGETKISHRGRKRLRYWLFQAAKSAVAHSGEFKELHVYYTTRKQNPLKKMQSLIVIACKILRVIFTILTKGTTYDPKKLLGDIIRPNQAIPQAA

SEQ ID NO: 145890 - protein, 465 aa, unidentified
MSGKRKSSTKQRTVKAMSLPAVRPKVAGIDVGSREHWVCGPASDDGEARVRAFGTTTSELEALVEWLLAQGVESAAMESTSVYWIPLYELLEARGIEPVLVNARQLRNVPGRKSDVRDCQWVQTLHSHGLLRGSFRPDEAIVRLRALQRQQANFVEQRTRCVQWMQKALDQMNVQVHHAVSDITGETGMAIVRAIVAGERDPHRLAAHRDKRCRKSQEEIAEHLRGNWREEHIFNLQSALRLYDAIQETIASYDQRLLKEIEALQPPERQDEPVPPHPNPVKEKAIRSRREQPLRTTLWRFSGADLCRIDGLSGGAARVILTEVGPNLAAFPTEDDFVSWLRLCPRTPITGGKPIKKRRQGLGANRIAGILRMAALSLQRSKSALGATFRRYARHKGGAVAVFATARKLAQLVYRTLRYGHVYTDIGEAAYELQFQTRRLAALKQTAKSLGYELVPTPQLDPAPG

SEQ ID NO: 145891 - protein, 390 aa, unidentified
MYIVGIDIAKRFHEAVIIDKAGKVIVKRIRFANSHAGFLQLMEAVRKLDAPAEFGMEATGHYWLPLYAHLRQAGQTVHVINPLQSDALRNMFIRQTKNDTQDALIVAEVIRFGRYCETQVAPENIVALRELCRQRFFVVDMASDFKRKIIALLDQTFPEYEKLFSDTFGKSSMELLANYSTPEEMLSVDAQTLADLLNKASRGRFGLDKANQIQQAAKNSFGIVLSSSSFSLIIRQYLEQLKSLESSIVAFDDEIARIMAIFDTKLETITGIGTTLAAVIFSEIGGNIKKFSSLPKLVAYAGLYPKSRQSGESKTDGHISKRGSPYLRRAVWLAATVATFKDPAISAFYQKKRSEGKDHLTAIGHVCHKMLAIIFAVLRDNKSYVPASAS

SEQ ID NO: 145892 - protein, 395 aa, unidentified
MKEQLQGSPVVFAIDVAKEKQYALLANADSSVSELLSWNHPEQTREVLTHLENLACPLTAVMESTGTYGDALRYQFRCSGFEVNQISAKRVSDARELYDGVPSLHDAKSATVIMRLHREGLSIPWRESDDAERELDALRREYDLHQSQYQRNKNRLEAYLSRHWPEVLPLLPLDSVTLESLLIEYGSPEQIAKNTEEAAKNMHLWSKNQLKNEKIAVVIQSAVNTLGQPCIDAERRYLQALTAEMRHSRQQQKEVKDILEATVKADTGLSKLASVIGLITTAVLLSCRLDPRNFRNARCFQKALGLNLKEKSSGRDVGRLKITKRGCSMARRYLYFAALRLINNDPVVKAWYQKKFDARAKNKTVIALMRKLAKALWHVARGERFDATKLLSVTA

SEQ ID NO: 145893 - protein, 364 aa, unidentified
MNTTTAGVDLAKVVFSICMLDHSGRVLLRREFRREAFAAWLAQLPPGTIVAMEACSGAHHWARRCRELGLQPRLIAAQFVTPFRKSRCSKNDRNDAEAIATAARQGNMRFVSIKTIDQQARLSWHRVREGYKAENLQVMNRIRGLLAEFGIVIPTSPIALRRALPQILEREDLPRAFVELLQDLRAHWQQIQSRLRGCDQRVEAHAHGDERCRRVRALTGIGALTADAFVASVGDGRDFKHGRQLAAWVGVVPRQDSSGGHQRLGHISCSGDAYLRTLLIQGARSSVSAAQRVPIEKATPEQIWIRQLATRLPLGKLLVAVANKHARQLWAMLARGEAYDPDAWLRHPMTQRNASRKNAMAAAA

SEQ ID NO: 145894 - protein, 413 aa, unidentified
METQKNIVCGADIHKKFIMATILSRDGNKIRGRFGMTLDEILRFKNWVISNNCEAVAIESTGVYWIPIYTVLEGSVEVILANAYKVKHTPGRKTDKRDSGWLAELCLNGMIEPSRIFPKEDRELRALTRAREKLVNNSTQMKNRIHKELESACIKISSVLSDIFGKSGMKIINGLLEGKNIDEILKMITSKRILKKEQELRSAVTNSLDPARILMIRTYLELIEKIESEIEILNKEIMNRMQKLREDLEIAMSMTGMGFTSASTILAEIGNYKDFETAEQLASWSGLTPKVSQSADKLVTGSITKQGSKHMRRMLVQVAHAISKSKNSKLKKFFLHILAKKGKKKAIVALARKVLCILHHLLVNREKYQDSEMSKTKKVKLNWASSPVQMTEQDMINVLVGAGYTVQKMKECV

SEQ ID NO: 145895 - protein, 404 aa, unidentified
MNSSKVAGIDVHKQVLMVVVQEVDAEAGPSKRFGTTREELQHLAAWWMAHSVDHVVMESTAQYWKPVWREFEPHFQLHLAQAQSNRAPRGRKHDFGDAQRLARRFLAGELILSYVPEPEQRRWRNVTRTRYQLVRDRVRLHCQMECLLEEAQIKLSSVVADVLGLSGRRILQALSAGETDPVQLAQLGDRRLRCSREELEQALNGRIEAVHQQLLRLYLERLALLDRQIEELEKLAADIMHAHADALARLVQIPGIGLESAHELLAELGPHAAAFASADRMSSWVGVCPGRQQSAEISRSTRSAKGSTHVRRVLVQAAHAAVKTKGSYLQTLFYRLLPKLGFTKAIWAIAHRLCRIIWKILHDGVPFIEFGVLSDPRTRKHLANKHVRALRRLGFHIEINDATV

SEQ ID NO: 145896 - protein, 338 aa, unidentified
MKKFIGIDLHSNNSVVVVSDEADRVMFRKRMANDLKLIEAALAPHRDETVGVVIESTYNWYWLVDGLMDAGYRVHLANASAIKKYEGLKYSGDVADAAYLAHLLRLGLLAEGYIYPREERGARDLARKRLQLVRYRTAQILSIEGILMRQTGARMKSESVKGLTPEQVEEFGFAPDVALAVEANRAVSQTLGQQIEALEKRLRERVSLRGEFKLLKTAPGIGETLATTIMLETGTIARFAQVGNFSSYCRCVDSLRESNGKKKGEGNAKNGNKYLAWAFVEAANFAVRYCPQAKSFYERKKRRTNRIVATKALAHKLARACYHMLRDHKPFDVNRCFA

SEQ ID NO: 145897 - protein, 308 aa, unidentified
MPLWIGIDVAKDTLAVHVLPLDQLLSFPNTAQGHQRLCDHLAGHCVGNALLEATGGYERAVMTALATAGIPVTRINPRRARAFATALGTTAKTDPLDAALLARMAQLVQAPAPVPDPLREQLRMLVQRREQLIQQRDDERRRLHQATLAMVRACLIEQIGDLRRRIQRMNQAIKQVRCQLDDALAHALGTVPGIGEVTTASLMAYLPELGTLDRRQIAALVGLAPYNVDSGQHCGKRRIRGGRATIRRVLYMACWSVVRTQASFKERYQQLRARGKPAKVAITACMRVLLIRLNAMARDRTPWREVIG

SEQ ID NO: 145898 - protein, 364 aa, unidentified
MKKITTKKTMTSKRLERQDEFSSYVGIDLGDKHSCVCVLDRWGRIVEELRGRTTVKELEGFFRKLPRSRVALEAGSQSRWVSELAKKYGHEVHVANPHKVQYISGGDDKNDPGDAYKLAELSYVRPSLLHGISHRQRQEQVHLEAIRARDLLVRSRADMINAVRGMSKAFAATLAQCSAESFTAKAAGKLPEDLRTATAPLLRVIDQLSEEITELDQWIEHVARQHYPAYVLLEKVNGVGTLTALTYMLTIGDAGRFQRSREVGAYLGMRPRQKDSGSSSPQLGITKTGDAYLRKLLVNCAHYILGKFGADSDLRRFGLRLAARGGKNAKKRAAVAVARKLSVLLHRLWVSGEAYEPLRNSQAA

SEQ ID NO: 145899 - protein, 396 aa, unidentified
MKDCNQLTFKLNNKKVTNMKTVLQSKDNVFNPVLYMAFELSAKKWKLVFGNGERTRMKTIAAGDWTALLAEIERAKSKLNCPADAPVVSCYEAGRDGFWIHRALQAEGIESHVVDSASIEVSRRKKQAKTDRIDAGALLRLLVRYCNGDKAALHPVRVPTVEEEDRRRLNREREYLLKERGAHSARIKSLLVAHGIRPARLSELPRLLPTAKAAVTGYALPADLKAELEREYERYVLVDQQVKALEQLQHARAASADSAAIQMVQQLRNLKGVGWQSSWGLSTEFFSWRQFKNAKQVGACAGLTPTPYDSGDSTREQGISKAGNKRIRKLMVELAWLWLRYQPHSALSQWFEQRFGSGGKRMRRIGIVALARKLLIALWRYLEHGVLPEGAVLKAV

SEQ ID NO: 145900 - protein, 355 aa, unidentified
MSNEKYIGLDVHQATISVAVMDCQGKVVMESILETKASTLLEFFAGLRGSLFVTFEEGTWAAWLYDLLKPRVAEVLVCNPRKIPLHKQGNKSDKIDARKLAERLRLHDLKPVYHGETGIRMLRELARSYLTIVKDHSRVMNRLKALYRGWAIPCAGRDVYYRRHRSQWLEKIPQAGTRRRAEQLYQQLDMLQPLRQQARRELLAESRKHAITAKLGKIPSLGPIRSALAVALIQTPHRFRSKRQLWTYSGLGLETRDSGEYHFVKGQPRRRKKQATIRGLNKDYNHDLKGLFKGAATRASAKPGPFQEFYQRSLAKGIKPTMARLTLARKIAAITLTLWKKGEDFDINKLNSQAA

SEQ ID NO: 145901 - protein, 344 aa, unidentified
MKITRVGVDLAKNVFQVHGVNAHGKCVWKRRLKRATWLRVFTETIEPGCTVGMEACGGAHHWARELRARGYEVKLIPPQFVKPYVKSQKDDAADAAAICEAMSRPDMRFVPVKTLEQHDIQAVHRIRSSVMGQRTAASNQIRGLVAEYGLVAPKQVGPLRAAIPCWLEDAENGLTDRFRALLQGLWHELLMLDERIKALDGEIEQLCNTHAVASRLKKQLRGVGPLVATGLIARIGDGRQFKRGRQASASLGVTPRHHGTGGKNRIYGISKVGDRYLRCILIHGARAVVAQAKHRDDPLSLWVTDIADRTHPNVAAVALANKTVRIAWAMIRNGTDYDPGFAVN

SEQ ID NO: 145902 - protein, 340 aa, unidentified
MGEITTIGLDVAKHVFQVHGVDAEGAAVLRKQLRRGQVLIFFSRLPRCVVGLEACATAHYWARELAALGHEVRLMPAQYVKAYVKRNKNDAADAEAICEAVVRPTMRFVATKTAEQQAALLLHRGRERLVRQRTALVNALRAHLAEFGVIAPQGLRNVGRLIAIVRDEGDARLPDLARQVLQVLAEQIEQLEAAVAALEKQLMTWHKSNPVSQRLATIPGIGPIIATAIAATVAEPSEFRSGREFAAWLGLVPRQNSTGGKHRLGGISKRGNQYLRRLLINGASANLLRSKATNADPWVIGLRRRRPSLVVAVALANKTARIAWAVMHRQEDYQRVAAAA

SEQ ID NO: 145903 - protein, 421 aa, unidentified
MQVLYERCAGIDVHKDQVTVAVRRPGRGPGGRDTRVRKFAAFYGVLREMARWLASQGVTHVAMEATGIYTMPVYHALLEPGCFDQVLVCNAAHVKNVPGRKTDAVDASWLAELLECGLLKGSFIPPAQIKAVRDVVRYRRKIVQERAAETQRLGGVLQDAGIKLDSVASSIDTVSGLAMIRALIDGERRGQVLAELARGVMRAKIGDLSQALEGRFGDHHALMCQLHLDHIAHLNEMIAKLDTQVEAMMVPFARQRDLLATIPGIGLQAAAAVISEIGTSPGEFFTTGAHLASWAGLCPGNHESAGKRKHGKPRKGSQHLQPLLVECAWSAVRTSGRLKARYHRLVLRFGGYRNPAAKKRAIVAIAHTLAVVIWHVLATGKPYTDLGPDFYANRADPAKETQRLIAKLEALGHKVILAPAA

SEQ ID NO: 145904 - protein, 343 aa, unidentified
MYYIGLDVHKKTISYCVKDAAGHVHQEGKVGSTRRDLDAWIKTLPQPRTIAMEATIFTGWIYDHLLPHAEKVKVAHPLMLRAIAAAKKKNDKIDARKIADCLRCDFLPECHMASTEIRDRRRVLRYRSLVIKQMVQMKNRVSGLLMETGVDYNKRRLHKVGYFEDLLSTNKEVNQSIRPLLKLSRETIDRSQRLDYALVTSLERDPLLAERLRRLRTVPGVGPITALTWALEIGDFTRFPSVKEAISYCGLCGDESSSADKVLRMPLSKQRNKHIQRTLIEAAKLAIRYNHELAEVYEKERERGNANRATLAVARKLVAYLLAVDRRKQDFVPAEVFKAAAVA

SEQ ID NO: 145905 - protein, 344 aa, unidentified
MEIVIVGIDLGKNSCSVAGLDASGRVVLRRRMRRSALETFVRGVRRCIVAMEACCGAHHLGRVFAAQGHEVRLMSPEYVRPYVKAQKNDDLDAEAIAEAASRPTMRFVEVKSEGQSDLQALHRARERLVSERTALINHLRALLLERGIVVAQGRRKLEEALSTFADGGDSAALSPRIRILIEDLRSEWRALDERIAAFDAEFIQMARNDESMRRLTSIPGIGTINATALAAAVGNARAFRRGRDMAAWLGLTPRQMTTGGKPRLLGISKRGNRYLRKNLIHGARAVLPSLVERETPLGRWVRGLLARAHKNIVVVALANKLARIAWAVLAHGTAYSAGSEAAAA

SEQ ID NO: 145906 - protein, 343 aa, unidentified
MKITAIGLDLAKNVFQVHGVDERGHALVKKTLKRAQLAAFFASVPACLVGMEACSGAHFWARKLQGFGHTVRLISPQFVRPYVKSNKTDAADAAAICEAVTRPDMRFVPIKSIESQGLLVLHRARQGFIRSRVAQTNQVRGFLAEFGIIIPQGAYHIQPRVAEILEDAENALPGTVRELLLQLVAHVRYAHEQEQLLEARIKRWHKDNEASSRLAQIPGIGPLTASALVASIGDVSAFRNGRQLAAWLGLVPRQHSTGGKAHLLGISRRGDSYLRTLLTHGARSVIICAKQKPGYEQSWLGRLLKRKHHNVVVCALANHNARVVWALLKHDRQYRADFSPQAA

SEQ ID NO: 145907 - protein, 393 aa, unidentified
MFYLGIDIAKNTHVASLIDEKGKTIFKGFSFSNTTEGGNSLLEIIKKYSEFTDVTIGMEATGHYWLSIYSFLYDYDFHCIHVINPIQTDGWRKGTEIRKRKNDTIDSVLIADLIRYGDFVETTLSNEDLYSLRNICRMRNYLIQSAGDLKRKVICVLDQVFPEYQTIFSNTFGTTSKQLLLEYSSPSDFEELSVETLTEILENHSRKKVGQSTAEKLINSAKNSFGITFSKESFTFQLKLLIEQIKFIDNQVKECETKIEELMDKINSPITTIPGIGPILGAVIISEFGDISRFDKPSKLVAFAGIDATVSQSGEFEGTHNVMSKRGSPYLRKALFQAALVASNTDPVLKDYYQKKRAEGKHHKTCIGAVARKLCNIIYSVLKNNTPYKVPKQ

SEQ ID NO: 145908 - protein, 343 aa, unidentified
MQTITTIGLDIAKSVFQVHGVDATGQVVVRRQLKRRSVLAFFQKLPPCLVGIEACASSHHWSRELQALGHTVRLMPPAYVKPYVKRQKNDMADAEAICEAVTRANMRFVPTKTPEQQSCLMLHRTRHLFIRQQTAVVNSIRAHLAEFGIVAPVGRKGVTELLHIVADPNDKRVSEVARACLAALGGQLLSLKQQIVEFDRMILAWHRSNQTSKRLHYIPGVGPMLATALVASVADPSTFRSGRNFSAWIGLVPKQHSSGGKDRLGSISKQGDRYLRSLFVAGALAVIRYAKIHGTGHRPWLTALLARKPTKVAAIALANKMARMAWAMMAKGERYKEPIALAR

SEQ ID NO: 145909 - protein, 346 aa, unidentified
MNQIIRIGMDTSKHFFQLHGVDAAERPVLRRKLRRNEVLAFFAKLPPTVIGMEACGAGHYWARELRKLGHEVKLMAPQHVKAYVKRNKNDGRDAEGLCEAMSRPTMQFVPVKTEEQQAALMLAGVRQQLITRRTQLSNAIRGYATEFGLIAAKGLDKIEPLLGRIAQDERLPELAREMFAMQGRDYARLQIELKAIETRLLAWHRANADSRRLAKIPGVGPIGATALVMKAPDPRLFPSGRHFAAWIGLTPKDHSTAGKTRIGKITRAGDEMLRSVLVAGATAVIQQARNGRGRPSPWLLALLARKSPKLAAVALANKIARIAWKLLTTGESYDGARMPGASALAA

SEQ ID NO: 145910 - protein, 320 aa, unidentified
MDAVLGIAIAKAKFQVALLRPEGQLRHKSCPNTRAGFAQLATWLERQHVTRVHACLEATGTYGEALATWLHDAGHVVSVLNPAIIHAYARTQLARSKTDRIDAALIAHFTATQHPPAWTPPAPEIRQLQALVRRLDALQGMRTQEANRLAAGVVVNEVRASIEAVLANLDAQIAHVQQLIRQHLDQHPRLRSQRDLLTTIPGIGEATAAVLIAELFDKRYASARQAAAFAGLVPRLVESGTRRGRSRLSKIGPSRLRKALYFPAVTALRWNPTIRAVRARLHAAGKPTMVIIGAAMRKLIHLAYGVLKSGRAYEPTGAHP

SEQ ID NO: 145911 - protein, 423 aa, unidentified
MDVLHERVAGLDVHKATIVACVRTMAAGKVERECRSFETTTAGLLALLDWLRESGCTHVAMEATGVYWKPVWNILSDGPFELILANAAHIKNVPGRKTDMNDAMWIADLVACGLLRASFVPDEWLQELRSLMRTRKQLVREQTRHVQRIEKTLEVANIKLGSVISEVMGASGRRMIEAMISGVRDPRKLTALAHRQIKASPKELYDALHGRLTDHHRFLLQLHIGQYDALSAAIDQIDRQVDTAIAKLDQEAVDGRATFRDLISLLCTMPGVSTLAATAILAEIGRDMSRFPSAGHLVAWAGLCPGQNESAGKRKRTRLRKGAPWLKTMLVQCAWAAKRKKDSYYRAQFNRLSSRRGPQKAICAVAASLLTAIYHMLNNGTEHHDLGADHFDHRSAAAKTKRLVAQLAKLGYAVHLQPLSEAA

SEQ ID NO: 145912 - protein, 282 aa, unidentified
MNFYPQQHKYYCGIDLHARAMYVCILDQSGTKLVHKNLPTTPGAFLRVIAPYREDVVVGVECMFTWYWVADLCAQEGIPFVLGHALYMKAIHGGKAKNDKIDAHKIAALLRGEMFPQASVYPAEMRATRDLLRRRCHLARKRAELLAHIPNTNSQYNLPEIGKRLANQANREDVADHFPDPSVRKAIEVDVSLIDHYDQLLGEVELYLTRSAKAPDVQTFARLQSVPGIGQILALVLLYEIQDITRFPRVQDFVSSCRLVKGAKESNGKRLGTSGKKIGNVH

SEQ ID NO: 145913 - protein, 346 aa, unidentified
MKKIFIGIDFSKEKFDVTLIKAEGVEERAERQHEVFDNKVSGFRRLLRWVKSATDEQDTDLWLFCGENTGGYSRALCNYLYGSGYDMWLENALSIRRSSALQRSKSDKADAGIIAEYAMRNYDQMRLYKPLDKNLERLREVFLYRHNLVKLKAGMTVRKGEKKLTQDKSDISRFMAMSSKHLISEFNKKIAECDMRIEKIISEDENLRRNFDIITSVPGVGTQNAVCLMVYTDNFCRFDFDSRKIACYYGVAPFGRQSGTSVNTPPHVSPFANKLIKALLTQAALASVHFCPQMAIYHHRLVEAGKKKPVALNNVKNKLLHVITAMVRKGEKYNPDHDYYAALNAA

SEQ ID NO: 145914 - protein, 429 aa, unidentified
MTRISVGVDVSKNRSTVCIIDQDGKVIMRPFLVWHSTEELDFLADTLKRLNGEVRVIMESTSIYQYPIALHLKEKGIFISIVNAYKVKKFANTDFRGGKTDKKDSRTIASYGISYWDKLVEWQIPKDTYFNLDLLNRTYMNAKKHRQIILQELQHYIDCAMPGMDKELHSLNLSTKKDFMLDFVEKFWHRDEIVNMTEAEFTEVFTAWAKKKGYRPVEGKAAKIYAIAKSCIPYYPANPTVKTILQCIVDKLSGVNRTLVTIVTQMIEEAKKLPEYQIVREMPGVGDPLAARSFGSAGDIRRFKNSKALVAYAGIDSPPDESGDFSSTHRHITKKGSKVFRDTGYEIMMALRAQKRTWEKVRKNPDVYDYMLRKEAEGKPRKVAKIAALNKFLRIVYARIKELYDNMALAERAKTKTRSKTRAKTKVTA

SEQ ID NO: 145915 - protein, 382 aa, unidentified
MKKATTGVRRFVGLDVHAQTIAAAMAEKQEAVRGLGTIPNREESVRKLVKKLNEGDAWTACYEAGPTGYALYWQLTKLGIPCVVIAPTLVPTKAGDRVKTDRRDAERLASSFRAGELTPVWVPDAAHEALRDLVRAREAAKQDQLRARHRLGKYLLRHGKRPAQQMRAWTQNYLDWIKGKVTFDQRSQQVTLEDYLNEVEHAGVRIARLEKAIDEAVEQAPESMRELIQALQALRGVAKVGAVTIVAEVGTLTRFEHPRQIMGYSGAVSSEHSSGGKIRRGGITKTGNAHLRRVIVEAAWSQRYKPVLSVLMRKRQEGLSAEVQEIASKARHRLHSRYMRLLGKGKTKQEVVTAVAREMLGFIWAIGVSVERAQAQRVKGAA

SEQ ID NO: 145916 - protein, 374 aa, unidentified
MKHTTLCIGADVHLDEIVLCAVDKADGHRVADRFRVTNNLPGAQAAATTIAELATRLGFTRVEIGWEATGMLWIPFHLYLSDCPQLQSFEPQLVCFNPQLVTKFKDGLVLRRPKNDKLSASAIAARLRFGELPLSYVPGDFWQGLRRLTRYRFHLSRNLSREKMRFQAYVFLKCSDWKRVKCFSDVFGATSVALLTEFTVAELTEMTHDQLVDLIRRRGRGHFADPTATARKVRQALRASYPIEPQMDEMVTAALATGWDHIRFINRLMKRLDKLIAQAIGPVPNPIITVKGLGAVITAGLLAEIVDVSRFAEHKHLAQYAGITWEKRSSGNFVSQNTRLTKVGNKYLRYYFTLGASTLRQFNLDPERQGFLLA

SEQ ID NO: 145917 - protein, 348 aa, unidentified
MRFYTSQHAFYCGVDLHARTMYLCVLDAAGEVRLHRNLPTRPDAFLRAIEPFRVDLVVGVECRFCWYWLADLCATESIPFVLGHALYMKAIHGGKSKNDRIDSYKIAALLRGGTFPMAYVYPREMRATRDLLRRRLYFVHKRAELLVHVQNTNTQYNLEPIPAQLDRPGARKGLLEHFADEDSVQMSIAGDLAMIDAYDHAIDELELFLVQAVVEHDRARFQLLRTVPGIGKILGLTLLYEIQDWKRFPGVGNFLSYSRLVRGDRESAGKKGKPGGAKMGNVHLKWAFSEAAALFLRANPPGKKLFSRLERKHGKGKAMGVLAARLGRAVYFMLKRHEPFDMKRFVAA

SEQ ID NO: 145918 - protein, 340 aa, unidentified
MNTIMIGLDLAKNVFQVHGIDADGAVTVQRKLRRAQVEPFFAALAPCMVGMEACGGAHHWARTLQRLGHEVRMMPAHYVKSYVKRNKTDSRDAEAICEAMGRPTMRFVSVKSEEAQAVLAMHRTRALLVRQRTMTANALRANLAEFGMVAAQGNKGLRLLMDQLAAQSCPIPAAAQVALSLLARQWESVDAAVRELDAGLARVAREQEAARRLMEIPGVGPIGATAILAKVPDVNVFGTARDFAAWLGLTPRQSGTGGQQRSGGISKQGDRTVRQLLIMGARARLNHARGREADPWLRDLLARRPTKVAIVALAAKMARIIWALLKTGQHYRAKEVPAAV

SEQ ID NO: 145919 - protein, 307 aa, unidentified
MGKHSEVFVAFDVAKKKYAVAVAETGRTGEVRFLGDVENSPLPIERTIKRLAERYARLHVCFEAGPTGYGLYRQVEALGHDCVVVAPALIPKRAGERVKTNRRDAVTLARLHRAGELTAVWTPDAAHEAVRDLVRAREAAADSLRRKRQQLLSFLLRHSRIYSGGGHWTLAHRRWLAGQKFEHAAQQIVFQEGIDAIEDALERLRRLEKQLALIVPAWSMAPVVEAYQAMRGASFLVAVIFAAEIGDVRRFESPRQLMAFLGLVPAESSTGDRIRRKGLTLSGNRRARRALVEAAWTYRYPARSARP

SEQ ID NO: 145920 - protein, 275 aa, unidentified
MPQSRTLDVGLDVHTEAIAVAYVAQEPHAEVVYLGPIGTRQCDIDALIRKLQSKSPHLVFVDEAGPCGSWRSRYLRTKGYLCWVVAPSLIPQKAGHRVQTDRRDAVPWARLMRSGDLTPVSVPTVEDEAIRDLSRAREDALRDLKTATCRLNAFLLRQEIRYTGRATWSPAHLRWLSEVVCPTPAQQIVFQAYVRAAHEHTERPQRLEQALHAQVQAWRRLPLVEAFHALRGGQFTVAVTVAAELGDLTRFDNPRPLMSDLGLTPSAYASGERRR

SEQ ID NO: 145921 - protein, 358 aa, unidentified
MAETAVTTQVVVLGVDTHQQTHHAAIVATDGRPLADREFPTTTAGYTQLWQWACGFGRVEDAAVESSASYGAGLTRMLTAEGVRVIEVNTPDLPRRYAHGKTDQLDAYAAAMAVITGRATAVAKDTRGAVESIRMLTVARASAVEEATRIGNQIRDLCTTAPAEYADQARQARTIAKRAAFIKDLPVPAEKADLSGPAAAFVRAARSLLDRHRLAQQQARSLARELTRLLTKLVPTLLSRPQIGPITAARLVITAGDNVERMGTEARFAKLVGAAPLPASSGKTSRHRLNRGGDRQANSALHMIAVGRMKSHAPTRAYVERRSAEHKTKKDILRCLKRYIAREVFRDLTTDLGALDKL

SEQ ID NO: 145922 - protein, 343 aa, unidentified
MQTTTTIGLDIAKSVFQVHGVDAAGQVVIRRQLKRRYVLSFFQKLPQCLVGIEACASSHHWSRELQALGHTVRLMPPAYVKPYVKRQKNDATDAEAICEAVTRANMRFVPTKTPEQQSGLVLHRTRHLFIRQQTSVINAIRAHLAEFGIVAPVGRRGVEELLTVVADPNDKRVPEIARACLSAFGAQLRSIKEQVLEFDRLITAWHRSNEMSMRLDEAPGVGPVLATAVVATVADPKVFRSGRNFSAWIGLVPKQHSSGGKDRLGSISKQGDRYLRGLFVAGALAVIRYAKIHGTKHRPWLTALLARRPTKIAAIALANKIARMVWAMMAKGERYKEPIAHAA

SEQ ID NO: 145923 - protein, 388 aa, unidentified
MEHPMQKLNDLSRSLTPLDPDGTLIAVIEMSQSSWLVAGIVPGVERQPLKKLAVDESALLKLLNRWREEAEKAGRRIERITVAFEAGRDGFWLARWLRARGIEAHVIHASSVAVSREHRRAKTDRLDTELLKRAFLGWLRGERDHCKMVAIPTTKDEDAKRPNRERQSLVGEQTRIVNRMKAALIRLGIRGFNPKLKKAAGRLEDLRTPEGEPIPPNTLAELRRDMERRRLVSDQIRQIEEARLERMEQAPGDGPHAMVRLIARVIGVGIETADMLVHEVLSRKLRDRRAVARYAGLTGAPDESGSKRREKGLAKAGNARVRGGMIQLAWRFLLFQKDSALAQWYRTRTEGGRNRKTIIVALARKLLIALWRLVTTGEVPAGVVLRAA

SEQ ID NO: 145924 - protein, 400 aa, unidentified
MLLFFEVITMIFVGIDVAKDTHYAAVSDDSGAVLVKPFAFQNNAEGFCLLLKKLSEFDRSKLLIGLESTGIYSENLICFLYESGFRLAVINPIQTATLRKTAIRKTKTDKVDTMLIIKSLMVNSYRLYSQRDADSLKLRTLCRFRQNLKKSKARLKIQLAGYVNLVFPEFGKFFKSGIHIAASYALLKKYSSPKEIAALRTSTLCTLLSNASHGRFGKDTAEALKSLALSSVGVKNPYISIQIAQTIAQIELLEQQIKDLNSAIEEAMESLNSVLMTVPGIGAVNAACILGEIGDIKRFSKPCKLLAYAGLDPTVRQSGQFTAKSTRMSKRGSALLRFALINSAWQLTLNDTTFKAYYDLKRSQGLNHYGALGHVAHKLTRVIFKLLTSDTPFNPAKLVA

SEQ ID NO: 145925 - protein, 341 aa, unidentified
MSVKTIGIDLAKEVFQIHGTDEHGKRLFNKQLKRAKMLSFFANIPPCLIGMEACASAHFWAGKLISMGHNVKLMAPQFVKPYVKTNKHDAADAEAICEAVTRPNMRFVPVKTPEQQAVLALHRSRQSFIKQRTAQANQIRGLLAEFGIVVSRGIQQLQLQLPEILEDANNSLPSLFRVQLSLLQHHMTYLFDVIATLDKQIEQCYRQNALCQRISKIPGIGPVTATALIATIGNASNFENSRQLAAWLGLVPRQHSSGGKQVLLGISKRGDVYLRTLLIHGARAVLQSVKRKQDAVSGWASRLLARRNNNIASVALANKNARIVWALLSKDQEYCAAVINV

SEQ ID NO: 145926 - protein, 421 aa, unidentified
MNATTDFAATIGLDWADQKHDLWLHPADGTKTEHVRLEQTPEAIHEWVAKLGDRFGHRRVAIGIETTRGPVLSALLAYDFIVFFPINPKALKDYRAAFAVSGAKDDRTDAMLLEEFVRLHGGKLHALAPDTQLTRQLGGLTENRRRLVDERTRLVNQMHGLLKTYYPLAETLLDGNLNTPMAADFLARWPDLADLQKAPVETVRAFFYQHNSRGAKKMEERLAAVAKARPLTEDPAIITPARHLATALAGMLKPLHRAIADLDQAIAEAFDQHPDAALFRSLPGAGPALAPRLLCAFGTQRDRFASAAEVAEFYGIAPVVKQSGKTKTTQMRYRCPKFGRQTFHENAGCACKREPWAKRYYEDQKGKAEGKHHKACRALAYKLIRIYYACWKQNVPYDGRRYLQALEKHGSPLHKKLQTPI

SEQ ID NO: 145927 - protein, 324 aa, unidentified
MTDAVLGIDVSKTTLDTSFLAGTKPRSRSFANSPDGWRQLIAWLAKEGVRQVHACLEATGRHSLGIALALHEAGHVVSLVNPAQIRDFARTKLGRNKTDPVDAAHIREYAELFKPRPWTPPSPALRRLCELQTIRAGMVASLTEWKNRSTSGMADDRALALAKATIQHFTSQLEAVDQAIAETIDNDRELCAKRTLLVSISGVGETLAGIVLAELPGPEVLGSSGAAAAYAGLNPRQHQSGTSINRPARISKIGNAVLRSALYMPALSAMRYNPAVAALVDRLKAQGRLTGKQIVVAAMRKLLVICFGVLKSGKEFDPAIAMAQ

SEQ ID NO: 145928 - protein, 326 aa, unidentified
MNLPAVVLGVDIAKLKFDVCLIKENQKVKHKVFANTKHGFDQLAAWLASHQVGSLHICLEATGSYGEALSLHLHEAGYRVSVVNPAAIKAFAASRLSRTKTDKVDAELIARFCLAQQPQAWTPPASEVRHLQALVRRLESLVEMRVAEENRLSSGIAVDVVRHSLEEHIIYLVEEIKQTEKMIRDHINNHPDLKEQSDLLDSIPGIGQTTAALLLAEIVNIKQYKSARQVAAYAGLVPRERRSGSSVRGRVQLSKIGNARLRKALYFPAMTALRCSNFFQQWASGMRERGKCKMAVIGAAMRKLIHLAFGVLKTGKPFDPNWAKTA

SEQ ID NO: 145929 - protein, 411 aa, unidentified
MEVVHARCCGLDVHKKSVIACVLITQPDGNTERYIRTFKTMTTDLVALSDWLSTLSVSHVALESTGVYWRPVYNVLEHEQRTLLLVNPQHMRAVPGKKTDVKDAEWLADLLRHGLLRASFIPPESIRILREMTRYRKTLVQQHADEANRLQKTLEGATIKLAAVATDVLGLSGRAMFAALLDGEQDPDVLANLARGRLRAKLPELRQALEGRVQPHHLVLIGQILAHIDALDEAIAQVQVEIERRLAPFEEVLALLQTIPGIKAIAAAAILAEIGPDMSRFPSAGHLASWAGLCPSNKESAGKRMKGPVNRGNVWLRAIMGEVAWASIRTKASYFSAQYHRLARRRGKEKAAIAVAHSLLVVIYHVLNTGQPYRELGADYFVQLDATRIQHHHVRRLEQLGYTVTLTPVAV

SEQ ID NO: 145930 - protein, 362 aa, unidentified
MFRPHTLYIRIRIVRKVSEPAFAMKDQDVTDVIRRKQQTAMRYIGIDVSKATFVVAYSSDKGGEIRTFNNTTTGIKQFIGALPKDGSIHCVMEATGNYSAMLLYLLNVAGIAVSMENPLKIKNFARAMLSTVKTDKIDARLIALYGEKMNPQPFKIQGEAILRLRQKRTVIRQLTKQITAMSNLRGSLACLPVPDKGATHTVDETIEFLEKRRDRLQSELTDLVEVEFSRQLALLTTIKGIGITLATALIITTGDFTYFQNAKQVSRYLGICPTYEQSGTSVNIRGHINRNGDAYTRGLLYVAAWTASRFNTKCGETYTRLRQNGKPGKLAMIAVANKLIRQAFAVVAHDKEYVDGFVSNRP

SEQ ID NO: 145931 - protein, 408 aa, unidentified
MNAVGIDVSKGKSMVAALRPMGEVAMLPQEFLHTEVGLEQMAYTIIALGEDTRVVMEATGRYHEPVAAALHECGIYVCVLNPLYIKQSGGGSIRKVKTDKADAMKIAKYGLDNWVDLREYTPMDTVRQQLKLCSRQYNLYMKTVVSLQNNLISLTDKTFPGVNELFSSPERADGHQKWVDFVMTFWHCDCVCRVSEKAFTERYQKWCKRKGYHFSAEKALDLYASSCGHFTTLPKNDNTKLLITTAAQQLLAGKMTLAALRAEMTRLAKQLPEYDTVLAMYGVGETTAAQLMAEIGDVRRFPRRSSIVGFAGVDPAVDQSGKHEAKSTPTTKRGSPHLRKTLYQIVCTYLRKAPAEEPVYQFLDKKRAEGKPYFVYMTAAQNKFLRIYYARVKECLEAFDAQQNSAQS

SEQ ID NO: 145932 - protein, 364 aa, unidentified
MFVERTSVGLDVHARSVAAAAIDTVTGELFRSRLTPSFEHVQSWLRALPGPVAVAYEAGPTGFGLFRQLTAAGIRCVVVAPSKLHRPAGDRVKTDAKDAVLLARLLRLGELVAVAVPTLEQEAARDLVRAREDCRGDLMRARHRLSKLLLRHGIVYCGGAAWTGAHDVWLRGEARGRLTTTATRLTFDFDYEAGVAVKARRDRLDTAIEAMAADSPFTPVMRRLGCLRGISTLTGFALAVEIGDWSRFTGASIASFVGLTPAEYSSGSSRTLGPITKTGNGHVRRLLVEAAWHHRARYRPGKALQQRWSLAPAAARVRGDQGNRRLHHRWITFIERRKRPTVATVAIARELAGWCWSLAVLDAD

SEQ ID NO: 145933 - protein, 328 aa, unidentified
MQKNKEYVGVDVSKESLDMAVYSTGEIRSFGNDDASIAKATTWLKQVNPAIIVMEATGGMEISLYVALQEANLPLAVINPRQIRDFAKSMGILAKTDKVDAKVLARYAATIQPEARPLPDEEARQLNTLVRRRCQLVEMIIAESNRATITRDKTMKQRINAHIDWLKQELAGIDKDISQMMKENPVWHAKDKLLQSVPGVGPVLSATFIAELSELGILNRKKIAALVGVAPFNRDSGKHRGERSIWGGRCRVRQPLYMAALSAVRFNPTIKIFYERLLANGKEKKVALTACMHKLLIMLNVMLKHNSYWSCNYAIFNNTCIPDAKTVA

SEQ ID NO: 145934 - protein, 412 aa, unidentified
MRVLYDRVAAIDVHKDMVKVAIRVPGAKRGTRKTEVLEFRTFYGVLQAMARELRRRGVTHVVMEASGVYTDPVYYALRELDFTEVMVINPAHAKALKGHKTDAKDAVRLLDLYECGLLSGSYMPDPDLREVRDLARYRMKTVQARTSEIQRLQKTLETAGIKLSSVVSDVTGGSGAVMAGLAQTRLRTAGKMADLSMALTGRFTDHHALMCRLHLDRIKIFDDAVKDLDNHIAPLVARYAREAELLKTLPGFGDVIVAGWLGAIGPAPHQHFATASRLASWATLCPGNYMSAKKSKGGRTGDGGAYIKPLLIQAAWAAVRVPGRLQARFRRLVRKFGGPRNKGAQKRAITAIAHTLLKIAYSVLKTGTPYADLGADFYTRRESPDARRDYLMRQLQKLNPGCVITITPAEAA

SEQ ID NO: 145935 - protein, 381 aa, unidentified
MKNVYTKRTGQAVRPSVIGGRDVARVVPSLLPKSSNSCLGYPSPHLTQGRATLEQIKITKEDYLLEVPLIFVGIDVCKAQLDVAIRPSEQTLSVTNDKAGIKTLVRHFKKLRPTLVVLESTGGLERQIMTALIGAEIPVVMANPRQVRDFAKSTGQLAKTDRIDAAVLAHYAEAIRPKPRPLPDELTLELRALTARRRQVIDMIVAEKNRLATASRAIKKRITAHIVYLEQELDDADQDLDRFIEKNPVWKENQEILCSTPSIGPVSSRTLIAELPELGTLGRKQISALVGLAPFPRDSGTLKGRRTIWGGRASVRSALFMATLAATRFNPVIRAFYKRLKATGKVPKVCLIACMHKLLIILNAMLKNKIRWSESFSHQTT

SEQ ID NO: 145936 - protein, 326 aa, unidentified
MHTHFLGIDIAKSKFDCALIRPDGKVRNKVLSNNALGFAQLLAWLDAHGVPSGELSQLHVCMEATGIYWEALAEFLCDQGIVVSVINPAQIKAYGASRLMRSKTDKIDANLIAHFAKERTPAPWVAAAPHERVLRSLVLRLEALQNMLTQECNRLQVANPAVQPQIKNHIDWLNAEIKALAKLIKDHIEKHPDLRQKRDLLDSIPGIGERTQAIMLAYFGSAEQFDNARKAVAFVGLDPRQHESGSSVKGKPRMSKVGHAFVRKALYMPAMAALYKTDWGKSFRQRLADAGKPPKLIIGAMMRKLVHVAVGVLKSNKPFNSALHCA

SEQ ID NO: 145937 - protein, 416 aa, unidentified
MTDAPKENYKRYLALDIHKHYLVVGGVDIHQKIILIPRRVDYDRWAGWMKANLKSSDAIVLEATTNAWQVYDQVVPYVGRAVVAHSGLVKLIASARVKTDKRDVLKLARLLAAGLVPEVWVPPQEVRDLRALLAHRMHMIKRRTMLRNRLQSVIHRYNLIPPVGDLYKSENQDWWEKVPVSTVEHLRIRQDLATLKHMEPQIIECNSELERRSALEPWRDQIIYLLQLPGIGLLIGMTILAAIGDVRRFPTSKQLVGYAGLGAGVHFSGETHHTGRITKQGRKDLRWALVEAAWVAVRWNPYWKAHFERIAKRRGKNKAVVAVARKLLTVIWHVLTKKVADHQADAEKVAYKLFRWTWKLDPSQRQGLQTRQFVRYQLLNLNIGHDLQTIHLGGKKRSLPSPDELRDLFPNLMASN

SEQ ID NO: 145938 - protein, 387 aa, unidentified
MSKQNDLSRCLVALEQDTTLIAVIEMGQASWLVAGIVPGLDRYPLKKLGPDRDALLQLLHRWRNEAAKAGHAIDRIAVAYEAGRDGFWLARWLRSQLIEAYVIHPSSVPVSREHRRAKTDRLDTELLKRAFLGWLRGEPKHCSIAAIPTLEDEDARRPGRERQILVEERTRILNRLKANLARLGIRGFRPNLARAPSQLEALRTPEGVAIPTNTLAEMRRDLDRLQFVKQQIKQIEMTRAERLANAPDERRHAAARLLTRVVGVGVETADMLVQEVFWREIRDRRALARYAGLTGAPDESGQRRRERGLAKAGNARVRRGMIELAWGHLVHQKGSPLSAWYRRRTADARRGVRKTMIVALARKLLIVLWRLATTGEAPEGLLLRPAA

SEQ ID NO: 145939 - protein, 320 aa, unidentified
MMTQDDLAVVGIDVAKDKVDVCIRALALWRTCPNTPQGRRKLVTWLRKHQVGKAVMEASGGYEREWRKVLHDAGIEVRIVDPKRVRSFAQSAGRLAKNDAIDAQMIAWFAETFSQTPSQAHDAAQEELAALVKARLALVELKIRLQSQSAHAAPGPVQKAQARVLKSLTAEIEKLELAIAAKVKATPHLAERAEIIESVPGFAETTSAVLVAGMPELGQVSDKIAAALVGIAPYDDDSGKRRGERHIKGGRRWVRNAIYMPCLGAATQNNPATKAFYRRLIAKGKQPKVALVACMRKLICILNVMIARRQKWDPARYTSA

SEQ ID NO: 145940 - protein, 349 aa, unidentified
MTVYVAVDFHAREQTISYCNSTDGEIHRRKLRHQHDAVRACYQQFTGEVIVAFEASGYSAWFEQMLAELGHTVWLGNAAEIRRKAPRRQKNDRRDADLMLDLLLKGDFPRVHGFSEESRTVLRQLRYRHKLVKVRTIAKNSLQAIGINAGLPLKRCLLTESGIAQLQALSLSPVLTQQRDEWLRLIGAMNAGIATVEAQLQQRAKDDAAVALLQTHPGIGLLTSLALRYTLLPTSRFSTTRQVTAYVGLDCMEDQSAERRRMGSISKAGSKLLRFLLNEAGHTAARHDPELKKFYRRLLRRRDKPKAKVAVARKLLVRSFIMLRDQIDYAEFVRRGVAARVAREAHSLP

SEQ ID NO: 145941 - protein, 338 aa, unidentified
MMYGAIDLHARYSQIRIVDEDGRVVREDRVLTSAERLVSVFAGHGPMRVLLETGTESEWVAQTLEGAGHTVIVADPNYAPMYGELRRRVKTDRRDAAALAEANRRGWYRPTHRVSAPQRALRQILCSRRQLVSMRSGTISVMRALLRQAGYRLAAGSAERVPTRLARLSLPEALAATLVPLRRIVEALSEEIATVDARLRAHVATDPIVPRLQSVPGVGPIVALTFRAFVDDVTRFASAGQVSAAIGLVPREDSSAERRHRGHITKVGPRELRSLLVQGAWACWRSRGSASLRAWVERLAARRGRRIAVVALARRLSRILYALWRDGSVFDAATLAAA

SEQ ID NO: 145942 - protein, 410 aa, unidentified
MELLHRRCCGLDVHKETVVACLRLVVDGKVTTEVRTFQTTTADLLRLSEWLAANACTHVAMEATGVYWKPVWHILDDGEFKLVLANAAHVKNVPGRKTDVNDAMWLAELLAHGLIRASFVPDTQTQEMRNLLRTRKQLVREQSSHVLRVQKTLEDANIKLDSVLSDLMGRSGRTMIEALIAGETNPAKLASLADRRVKASPEELREALRGCVRKHHRFLLRLHLNQIDALDAATATIDAQVEANLGPFRTAVDLIISIPGIKNLGAHVIVSEIGIDMSRFPSDAHLISWAGICPRNDESAGKRRSNRLRKGAPWLKTTLVQCAWAAVKKKNSYLQAQFHRIKARRGPKKAIMAVAASILTAIYHMLKDGTTYQDLGSNHFNRRSTDQQKNRLVKRLAELGYAVEITPITA

SEQ ID NO: 145943 - protein, 363 aa, unidentified
MMSSPVAGIDPHQDTYTIGIVDPNGVELAHAAFPNSAAGYLDGIELLNAHGVQLVGIEGSAGWGSHVAIALCAAGFDCREVPAQRTAAQRRARRLDKTDHVDAVAAARAVLAEPTLGPVQALEVYDPLVAKIEAVLERRRMLVAVRTLVLHHVHDQISKLPVEIRDQLSATGKIEGRLRRLEQVDTGIVTTLAGEYRLSWLLPLVDQDRIARHQIRELERDIDALLDEHGTTLREEPGIGPIAAATLLAEVGDPFRFARESKFARWCGTGAVALSSGEGDGQPVKHRLDFGGNRRINSTLYIASITQHRDLDEARTYIDRKLAEGKTRREARRAHKRHLANRVIRRMWKDESRRQDHPAQHPA

SEQ ID NO: 145944 - protein, 335 aa, unidentified
MENKQSYVGIDVSKDTLDYCLVSDGQQIFHLQTENSIKGIKAFIKELSKRGIKDLNAVVFCLEHTGIYSHHLISFLSKNNLKIWLESPIQIKKSLGVQRGKNDKIDAIRIAMYAYKNRDEVQLWQPQRKELQKLKHLTNVRKRILKTIKILTAMFVEKSFYDADIMKLAKHSTKTSVKALRADLKEVNKAINDIIKGDERLNHLFKLITSVHCIGEVTATQIIVSTNEFKNIKEGKKFACYCGVVPFEHRSGTSVRGKTRVSKMANMELKKNLHMAALVAVRYKGELQDFFLRKVAEGKNKMSVVNAIRNKLVLRVFACVRDNRPYDRTYDYKAA

SEQ ID NO: 145945 - protein, 460 aa, unidentified
MNQFYLGIDASKGYSDFVMLNAKKQPVIENFQLDDTFQGHSLLYERLGSFHQDHPEAIIYAAVESTGGYENNWFQALLKFQGCLSIKTAHLNPLGVNYNHKADLKRNVTDKISAQNVAEYMIAHPEKVSYQHQDSLASLRKQWGFITMLTKQSTQLLNQLESLVYNANPEILMYCKDGTPQWVLKLLTRYPTALRLSKAKAKSVARIPYVSKERAQQLVATAKKSVASADDEVTEQLIVATVKQILDLNNTIKAQTKILADKCAVPEVELLKTFIGISDYSAIGLMLEIQSVQRFLSSKKIASFFGIHPAYKKSGDGIWKYRMSKKGRKEPRRILFMVAMSAIKSNPLIRSIYQQAVKRGMKKKAAVGLCMHKILRIIYGMLKHNKAFDPEIDRKNRQKKPLRQRKVRQDKDRRYQDFDSKAPISRRQKMKRKERKQSQNVNNVEYGINEASVPVTELAN

SEQ ID NO: 145946 - protein, 417 aa, unidentified
MRPTKGERVRYYLGVDWADQTHAVWVVDERGTKVAMRTVPHTAEGLSEWGRELDEWRAHGTELWAAIERPEGRVVDFLLDHGVVVYPVNPKALDRARDRFRQSAAKSDPFDARVLADFLRTDHARLRALRPSSEAAQELKLLTDDYQRQIRQQTRLVNQLTMTLKAYYPRALEVAELPTALARDFLQAYPTPAALTALTERQWQRWARAHRMHEARTQELWAVLQRPQLPVPAHVVRAKARLMQSLVAQLTLVVEVVGTYREAIEDFFAQIPAAQWIRTLPIGDHGITAPTLWARLGDAPGRWESFRHLQAQAGTVPVTIRSGKQQVVRFRFACDKSLRYVIDHVAFLSLRWSEWARAYYAGQRARGHSYHQALRALSAKWLKIIFVMWKRQVPYDEQYHLATMTRQQLRLRQKQIA

SEQ ID NO: 145947 - protein, 321 aa, unidentified
MQTVPVTVYAGVDVAKASLQLHLQGRQAEFTNQPAGLAQLCQKLKTIPHVHVVCEATGGYERLLVQAMHQAQIPVSVTNPAQVRAAAQAQGKRAKTDRIDAALLTDYGQRYQPKPTPPTTSSQDQLVALTQWLTQLVQAQALAKTQAEHHQAAFVCGRHAKLMAHFRSQIAAVEKQIRALLAKDAQLQQRVDCLDEIKGVGHRTAWLVLAHMPELGQLNRQEVAALAGLAPWTRESGTMKGMRCIGGGRPEVRLALYMAALCAARCNPVLQPFYQRLRAKEKPAKVALTAVMRRLLVYMNYQIKALQAEQPAMQIDHAKIP

SEQ ID NO: 145948 - protein, 340 aa, unidentified
MGEITTVGIDLAKNVFSVHGVDAHGKTVLRKTVSRGALLELMAQLPRCLVGMEACSGAHQLARDLQPLGHLPRIMMPKFIIPYRRNQKNDGNDAEAICEAVARPNMRFVPIKSVEQQAVLVVHRVRKELVELRNGQINQARSLLAEFGVVIAVGRYRFGQQIGAALDDPRVPQLARQVLHEVNARIRALDEDILAYDRRISAQVRDSAAMQRIVAVCGVGPITASAVVASVGDAKLFRNGRQFAAWLGLVPRQFSTGGKPVLGRITKQGDVYLRTLLIHGARSALLTLTRRDDKLSRWASALIARRGFKKACVALAAKNARVIWALLVKGEAFQLDRAAA

SEQ ID NO: 145949 - protein, 412 aa, unidentified
MRLFVGDDWAEDHHDVEVMDGAGKALAKRRLPEGAAGMAQLHGLIGQFVPEDDLDSAEVVIGIETDRGPWVAALIAAGYTVFPVNPLQASRYRERHGVSGAKSDAGDAHMLADMVRTDSHQLRAAAGDSPEAAGIKVLARTHKTLIWERTRAVQRLRHQLREYFPAALEAFEDLDAADTLELLGKAPDPARARKLTRAQVSAALKRARRRNIADKATAILAALRSEQLGQPEALTAAYAATVRSLIAVLAVLNEQVTVLQGQVGEHFGRHPDAEVYLSQPGMGKVLGARVLGEFGDDPLRYRDGKARRNYAATSPLTRASGKKKVVAARFVHNDRLVDALSAQAFAALGASPGARAFYDELRARKIEHNDALRRLANRLVGILHGCLKTGTLYDEATAWGHRENLPQSSVAA

SEQ ID NO: 145950 - protein, 465 aa, unidentified
MRTDTKLWRNRKAKKELARRLQSENPGLEVVHPHAAGIDVGNSAHYVAVRPDRDPQPVRRFECFTADLHRLADWLEICGVKTVALQSTGVYWISLYDILEERGFEVYLVNARHTKNLPGRKSDVQESQWLLKLHTYGLLNNSFQPPSKIRTLRTYWRQRLQHVTGAATCVQRMQKALTQMNIQLANVISDLSGVTGQMIVRAIVAGERDPGKLAELSHPRIQASRGEIAKSLEGNWRQELIFVLQQEIEMYDTYQRRVAECDQQLQKHLTRFADTAPSRTKEELPPKKKGKQNKNNPHFHLAGELERITGVDLTRIDGVDVMVAQTLVSEVGLDMSRWKTEAHFASWLGLCPDNRISGDKVLARGTRHVLNRAATALRLGASTLLRSQTYLGAQYRRLRTRLGAPKAITAMAHRLARLVYRMLKYGQHYVDKGAEYYERRNRQQQLEFVRRKAAQLGLQVTPIRA

SEQ ID NO: 145951 - protein, 352 aa, unidentified
MDKYIAIDVHSASCTLAVVDANGKRAGLHIVGTNGQELVECVRAIPGQRHVCFEEGTQSAWLFELLEPHVLEVIVAGVNVSSHGPKDDRRDAFALAEDLRLGAIKTRVFKQGGPFRALRELARTYRMVVQDVVRTKLRIKSMYRARGVPVAGKAVYGSGREAAMEQLPAAYRKPVHTLYAELDALEEIRGEAERALVGEARSFPIAKVLATCPGLGAIRVAQLLPIVVSPHRFRTKRQFWSYCGLGIVMRSSSDWMRDKQGQWIRAQIQQTRGLNLTHNHHLKAIFKGAATTVISQLPDEPLHANYQHWLAEGTKPNLAAVSLARKIAAVVLTMWKTEEAYDPNKHHALISP

SEQ ID NO: 145952 - protein, 436 aa, unidentified
MTLINFVAANQKYYAFNLLSVFIMVFWSVQYLLQHLLVQTQVSHQLLQPLILILQLPQTPQFRHARPGKFFLPVNGMDYFLPLRLTVRNVLTRRITMNIVFLGIDLAKNVFQLCGLNQAGKPVYTKRTGRKELLQTLANIPACLIGIEASTGAFYWQREFEKLGHKVKVISPQYVRPFVRGQKNDGNDAQAIAVALMQPTMQFVPPKSPEQQDIQALHRARQRIVNHRTATVCQIRGLLLDRWIPIGSAVSRARRAIPLILEDAENGLSSRMRRTIAELYDLFNDLGRRIHFFDKEIETVFRQSEACPRIAKVKGIGPKTATAVVAAIGKGTEFKNGRHFAAWLGLVPRQHSSGDRQVLMNMTKKGDKHLRTLFIHGARAVVRVATNNNDGHMNQWVNQLKERRGFNKTTVAVANKNARIIWSMLRNDTGYQVVCN

SEQ ID NO: 145953 - protein, 379 aa, unidentified
MFSSETVPPCKSKVRSSGIVDGAVTDGSPQTPRSLQTVGETGAPSVSPSNPNSRLGRKVRSPIRQGRVAMDIIAVGIDVSKDRLDVAVDPDGEAFVVERNGTGLQQLVARLKQLAPTIVVLEATGGFETVAAAAVGGAGLPIAIVNPAQVRAFAKALGRRAKTDPIDAAVIARFAAATRPEPRPLPDEATQLLSDLVTRRRQIVEMIGAERQREKRAASRHLKKSIARLIKALEKELVSVDTDIDDAVRSSPAWRETEDLLASVPGVGPIIARTLMADLPELGRLNRKQIAALAGLAPYTRQSGQWRGKSFIAGGRQAIRTALFMGAMTARRHNPVLKAFFDRLVAAGKPKLVALIAVARKLLTILNAMLRTKTPWQPA

SEQ ID NO: 145954 - protein, 321 aa, unidentified
MVEATGTVTPADTYIGVDVAKATVEVYIDSTKRGCTLSDPARLVAEVKDCGSCRVILEATGGYERRWVAALLDAGIPVAMVNPKRVRDFAKALGHLAKTDAIDAKVLAEYGRVVHPRPLEKMPERQAELQALVHRRRQLLSLQTMESNRQAQAHTKATRKSIDTILGALARELERLNTAIAELVEADDEWQDKVKRLQEIPGIGQVTSVTLVAEVPELGKLNRQEIAALVGVAPFNRDSGEQRGHRSIMGGRAHVRNVLYMAAMTACRHNPLVRQFSERLEKAGKPGKVRLLACARKLLTLVNTIIHTNTPWDPKRCLQST

SEQ ID NO: 145955 - protein, 317 aa, unidentified
MSNKPSIVCAGIDTGKRKLDAAIDGRPDRLQVDNDPDGHRVLSAWLRRQRVKRVGIEASGGYEQAIVRQLRGDGFEVVVFQPAQVRAYATFHLQRAKNDKIDAALIAACTAAAKKIHAPPDPRLAPFAEPLTLIEQLSEDIAHLKTRRESCRDPQNRQFWAQEISRLNKLRSSAVKTLAAAIRQYPDLANRLDLIASVQGIGLQTAIIILVRVPEIGRLTREQVTALVGLAPYDDDSGDRLGARHIAGGRERVRTGLYRAALPAAFRWNPQLIALYQRLIAAGKLHKVALVACARKLLIYANTVVERGTPWVPQSAR

SEQ ID NO: 145956 - protein, 377 aa, unidentified
MKRIKFVGLDVHAETIAVAVAERDGEVRSLGIIPNREDSIRKLVRKLGPVEELRFCYEAGPTGYALYWQLTRMGAQCEVVAPTLVPVKAGDRVKTDRRDALKLARNYRAGELTPVWVPDAAHEALRDLVRAREAAKKDELRARHRLSKFLLRQGRRPPTGVKAWTMKYMEWVKGEVHFEQMAQEATLLDYLHEVEHAAARIARLDGAITEAVKCAPPQMRAVIEALQALRGIAHVAAVTVVAELGELSRFARAKQLMAYGGIVASEDSSGERRRRGSITKTGNAHLRRVVVEAAWTYRHRPGVGAALRKRQEKVSEEVKEIAWKAQQRLHERYRKLLAKGKNKGVVVTAVGRELLGFIWAIGIQVEIAQKESLRRAA

SEQ ID NO: 145957 - protein, 425 aa, unidentified
MFAESSDDEQIIERVAALDIGKAEIVCCIRLPAADGERRVQEVSTHSTMVPSLCELANRLVGLGVERVVMEATSDYWRPPFYLFEAHGLEPWLVNAKDVKHLPGRPKTDRLDAVWLCKVAERQMLRPSFVPPGDIRRLRDLTRYRADLVGVRNAEKNRVDKLLEDACLKLSVVASDIFGVSGRAMMASLIAGERDPKALAELARTRMRTKIGRLEEAFAGLRLGTFDDHHRFLLARMLARVDAVDLDIAAVDTQIGQHLAPFADAAARLDEIPGIGPTAAAIIIAEIGLDMTRFPTPAHLASWARFAPGINASAGKTKGNGSTGHGNRYLARILGEAVVCASRTNTFLGARYRRLTRRRGKKKAIVAVGRSMLVIIWHLLADPDTRFHELGADHHDRHVNTHAKRRNHVRQLEALGYHVTLEPAA

SEQ ID NO: 145958 - protein, 349 aa, unidentified
MIIGCDYHPSFQQIAFVDMDTGELQERRLGHREEAEKFYRDLGAQGVKVRVGMEASGQARWFERLLAELQFELWTGDAAAINAKRVRKQKTDRQDAQLILRLMLKDDFPQIWVPSWENRDLRQLLWHRHRMVQARTRIMNQLQAVALNEGLRCKKRLWRDTGREQLESFKLAPWASRRRRDLLELLDRLTPTIAGLSAAIEQEVKRCPAAQRLQTHPGVGALTALAFVLIIGRAERFECGKQIACYLGLVPLEKSSGNQRRLGHITKQGNSLLRFLLVEAAQVTVRSLPEWRSKYCHLALRRGRKIAKVAMARKLAVRLYWMMRKEWDYEQLRKFGSHAGKPGNRDGVK

SEQ ID NO: 145959 - protein, 342 aa, unidentified
MSEKRYIGVDLHRKVFTCCIRLENGRQFLSEWRLEQLPQFVKKLRATDEVAVEVTSNTRLFYEAVAPHVARVVVVDPHQFRVISQSVKKTDPNDARNLALYLAKGLLPEVRMKEKQQAQVASLTQTRDRLVKLRTALKNKVNNLLSARGIALEKEELSGEKGLTRVLAMEVEELTRFELQVLVEQIRSLNHSIAELEKVIDRQGKKLKGHGNLTSIKGIGSLGASILLSVIGDIRDFSDEGRLASYFGIVPRVHNSNETEHSGHITKRGSKLGRTALVQCALIAKRYSPYLANYYERIRSRRGTGRAIIALARKLLGIIYRTLKNNWVFEDFPNFVLREATA

SEQ ID NO: 145960 - protein, 370 aa, unidentified
MQATIRFIGLDVHKAFISVAIADEGRGDVTSYGDIANTPAAVSKLARKLSRQSLDLCFVYEAGCFGFVLYRHLTKMGHSCVVAAPSLIPRKPGDRIKTDTRDALKLARLLRSGDIECCHVPDESDEAMRDLVRAREDAVCACRISRQRLNGFLLRHGKVYDGKSRWSGAHMRWILETKLPHEAQQIVLEEYRRRVEHDADCVDALTMQIRRLNEFWRWAPVVSALQALRGVCLITAVTVVAEMGDLRRFAHPKQMMAALGLVPSEYSSGGKRHQGAITKTGNGHVRRILVESGWNYRFPARLTRQMEHRQRGLDKAVTDIAWQAQKRLCGRYHQLNMRGKNVKLITTAVARELCGFIWDIAQQVEPKTNI

SEQ ID NO: 145961 - protein, 394 aa, unidentified
MKLIGIDIEKNKHFFCVMDQQTGEIISQPVSFSNDKEGFDFLVQEIKSYPKDSILIGMEDTGHYHFALLKYLLDLQYTVALINPKTTDFNRKMQGGITKNDKLDTINICDVLDTPERKKQYRITKVNSFDLYEQKQLTRHHHNLKEEENVYKNRLQKCIDIVFPEFNKLFNSKYGTVYMNILKTFGSAENIANTDIKTIRKCFEIEGRGNRISLTPERLKECARSSIGISSSAEVIQIKHLTAQIELIEEQLTEIDKKIEEFSIQNNSPILSIPGISHFSSTSILAELGDISNYSKPSQIIRFARVAPLHYESSQFNAQHTAITKKGSKYLRKTLYQIILPVIRHNPVFNKYYQLKISQGKGHRCAQGHCVRKLLRIIHHLLKTNQQFDPQLLR

SEQ ID NO: 145962 - protein, 355 aa, unidentified
MAGKTVLARERRLSAGLDIDQRGVVIALLDQTSGELIFEGKLGHDAEAWRSFLDRLPGCRIQAFYEAGPMGFVLCRRLVALGVECRVVAPSQVPKASNLQQTKTDRRDAFTLAQLCFHPPRSFVRVPTEQEEVRRQIVRLREQLLEDKQRVMRRIKSLLLNYGIMPPADSGPSWSKTYRQWLREFEPGFEELRFTLDVMLDELEGLEQQLERINERIRELSRHPDYRAASQRLMKIPGVGPLLAMTFLLELFRPKDFTSAETLAAHVGLTPCEYSSGGKQRRGHITHWGSPALRRLLVEATWVWTYKDHRAQQRFHTIRAGKSPKIAVVGMARRLAVAMWAMTVRQQEFAYHWAV

SEQ ID NO: 145963 - protein, 335 aa, unidentified
MLYAAIDIHKHAFQASVFDPEGGEVVEARFSADRECLGRWAEEWRGRVGAVAIEATTGWRWVWRELVSYGFEVRLAEPVQARALLGRRRSAKTDRLDARWLARLLAKEMLPASWIPPEEIQQLRDRTRLRKALAEDRRRWGQRLHAFLLHEGWPCSKARLLTPEGLRWAVALKLPEHARLQVDSLLSVISALEVQLDTVDAELRRFARGDQRCQALQSIYGIGPILSCHLLAEIGEACRFRRAEQITRLAGLDPVVDESGETRRRGHLAKAGSPHLRWALVEAAVHANRQSAPDVAVYRATRERRDATVARLTVARKIGKRVYHALRELELEAAA

SEQ ID NO: 145964 - protein, 304 aa, unidentified
MNGIGIDVSKRQLDVGMTDGQILKVSNSVAGFAELDAWLRQRPTSQIVLEATGGYEQCVLDFLHKAGHPVVRANAFRARKLAQGLGHIAKTDRLDAYALAKMAALVKLPPYQPLEPWQQKMREFVRARRQAMHALTIARQQQEMVGDRELRRLLQANITRLQMLVERLGKQIAEQVAQQPQLAVLKSMKGVGPGLQAVLASYLPELGKISGKAIASLVGVAPLSHDSGTMRGKRSIHGGRAEIRQVLYMASMSAMRHEPRLRDFYQSLRARGKEGKVAIVAVMRKMLVILNARVRDAQGGSIPA

SEQ ID NO: 145965 - protein, 315 aa, unidentified
MVDVPCFMGIDVAKAQLDIAVRPSGERWAVPNNTDGVATLVEQVQALHPTLIVLEATGGLERAATAALATAGLPVVVVNPRQARDFARAIGQLAKTDALDARALAHFADVIRPTPRPLPDAQTQELRALLGRRQQLIVMRTAEQNRLAGTSGRLQTDIEAHITWLNERLATLDDDIETLLRASPLWRENDDLLQSAPGIGPVCARTLLLELPELGTLNRRQIAALVGVAPLNRDSGTLRGRRTIWGGRAHVRTVLYMGTLVATRYNPRIKAFYERLLAAGKVKKVALTACMHKFLTILNAMLKHRTPWQAQEVQG

SEQ ID NO: 145966 - protein, 403 aa, unidentified
MNNVVGIDVSKGKSMVSVLRPFGEVVAKPFSVGHTGSELKELADYLKSLDGETRVVMEHTGRYYEPVARFLHDEGVFVSAVNPKLIKDYGNNTLRKVKTDKADSRKIARYGIDNWAELRQHTPMDTIRMQLKTLNRQQSLYSKTKTMMKNNLIALLDQTYPGVNALFDSPVREDGSQKWVDFATTFWHVDCVRNMSLTAFAERYRKWCKRHGYNFSQSKAVEVHAGAQDLIAMLPRDALTKTMVRQAIDALNAISASLERLKAEMQALAAQLPEYPVVMAMHGVGDSLGPQLMAELGDVTRFTHRNAITAFAGVDPGADQSGTHEAKSTRVSKSGAPELRRALFLVMDCLLKTQPQDDPVYRFMDKKRAEGKPYLVYMTAGANKFLRIYYGRVKEYLASLEGN

SEQ ID NO: 145967 - protein, 365 aa, unidentified
MTTRQRSIPSSTDPPVRSEVVLGVDTHGEVHIAAVMSPLGKMLGTETFPATAAGYRRLLVWARRRGTVRRAGVEGTGTFGAALSRYLLAQQVEVYEVNRPDRSARRLLGKSDPLDAQAAARAVLSGRARARAKSGDGPVHSARILKLAKDSAVKARTQAINQLKAVLVIADPALRERLSRLGNRELFRTCRRLGPDDGEDGESAVAQATHMTLRMLAERIEQLTGQIDELNQRLTQLVEHHAPQLLVPVGIGPDSAVTLLITMGDNPERLNSEASFAALCGVSPIEYSSGRRITRRLNHGGDRQANAALHRIVFTRLRHDPRTQAYFERRTQEGKTRREIIRCLKRYAAREVFNLVRTVPGVPPL

SEQ ID NO: 145968 - protein, 415 aa, unidentified
MKKHSNSLKQSEAPAKRRKLVVERRPQEVMAELVAKLAEQLDVEIVPAIEGKKDGRDAVRPNLDRLTVGVDLGDQWSNYCILGLAGETLAEGQFRTRKQEVAEFFQALAKSRVVIEVGTHSAWVREIIAGFGHEVLVANPRLMEGSKRRRRKSDRIDAEKLARLGRMDPKSLHPIQHRSTEVREDLVVLRARDALVKSRTELINSVRGLVKSMGGRVTGCSSVAFSHKATAEIPEEIHETLQPLLRLMATLSEEIKTFDQRIEKLAAEKYMHTQLLRQVSGVGSVTALAYVLTLETPLRFARSRDVGPYLGLVPKQEDSGDIQPQLGISKAGDRMLRKLLVGSAQYILGPFGPDTDLRRFGMRLCERGGKNAKKRAAVAVARKLAVLLHRLWVSGEVYEPLGHGALMSPAQAAAA

SEQ ID NO: 145969 - protein, 414 aa, unidentified
MEVVHERCAGMDVSKRDVKVCVRSPGKRRGSYAKAVATFGSVTAEILRLREHLITAGVTLVVMEATGDYWKPFYYLLEDGPFEVMLVNPAHARNLPGRKTDVSDAQWLAELAAHGLVRGSFVPPPPIRILRDLTRARVILTQDRVREINRLDKVLEDAGIKLSSVASDIMGVSGKAMLHALVDGERDPKVLAGLARMSLRNKTDQLAAALTGRFTDHHAFMVGLHLRLIEQLTVGIADLTNRIETLIDPYRPVLKLLTSIPGVSDKAAIVIVAETGADMTRFPSAAHLASWAGVCPGHHESAGKKKSAAPRPGNSYLKGALGNAAMGASHTNGCYFQARYRRLAARTSPLKALVAVEHSILTAVWNMITNNQSYNDLGGDYYSRRDPTAAMRRITRQANSLGLTVRFEPIEQRG

SEQ ID NO: 145970 - protein, 367 aa, unidentified
MDAPCTGVECAKMEVLLTPQQGTPMSEITVIGLDLAKHVFQVHGADPDGRPVLRRRLRRGQVLEFFATLSPCLIGMEACAGSHYWGRELQALGHEVRLIPPQYVKPYVKTNKNDAIDAEAISEALTRPTMRFTTVKSAEQQSVLMLHRTRELLVRQRTMLVNALRGHCGEFGIVAAQGLSRASDLIKRIEDPADTALPDLARQALQCLTSQIRAIQEQIALIEKKLLAWHSSCEASRRLAEIPGVGLITATAVVASVGNATQFRSARQFAAWLGLVPQQHSSGGKQRLGHISKRGDGYIRRLLVHGARAHLSWSRRKKQIRSAWLTGLLARRPTNVVLLAMANKTARIAWAMLSRGERYREMIAAAA

SEQ ID NO: 145971 - protein, 413 aa, unidentified
MDVMHPRCAGIDCSKKDAKVCIRIQGYDRQATSAAVTTWGATTSQILRLREHLVAANVTCVVIESTSDYWKPFYYLLDDGLDVVLVNAASVRNLPGRKTDVSDAAWLADLGAHGLVKSSFVPPAPIRALRDLTRTRTVITRERTREVQRLEKLLEDAGIKLSAVASDITGVSGRAMLEALIAGQRDPAVLAELAQRRMRSKIPALTEALTGRFDDHHAFMARLFLDRIDAHTADIGRLDERIGEAMEPFRPARDLLMSIPGFSRIVAEVFIAETGGDMSVFPTAGHLASWAGVSPGSNESAGRVKSTKTRPGNRYLKGVLGIAALSAARSKDTYFAAKYKRIVTRRGPMRAIVAIEHAMIIAAHNMLTNGDFYRDPGADYYTSHQPARTKARAINQLESLGYRITLQPLTKSA

SEQ ID NO: 145972 - protein, 287 aa, unidentified
MSVECSEEGVSALGAFCKNHGVALVVMEATGGYEKLPFALLWGQGLPCAIVNPRSVRNFAKGMGFLEKTDRIDAGIIAWFAEAKRLVAQEPASDAQEHLRALVTRLRQLTELRTAQTNQRRLVTQAQVRGSIDELVALINRQIRSCEKAIVALLDSDPLWRVLDKTFRSVKGVAGRTVARLMAELPEIGTIPNKAITKLAGLAPIANDTGKRKGKRPVRGGRTHVRSILFTVAEVVRRYVPEFAALHRRLSQAGKLKKVVRVALARKLLVWLNAKARDARKEFACTT

SEQ ID NO: 145973 - protein, 340 aa, unidentified
MQQITTVGLDIAKNLFQVHGADAQGRPVLKRKLARGKVLEFFANLPACLVGLEACAAAHYWARELAKLGHEVRLMPPRYVRPYVKTNKHDAADAEAICEAVQRPGMRFVPVKGEDQQALLMLHRVREQLLKQRTATTNALRAHLAEFGVVAARGRRGLRELPAVVADPEDRRLPPLARELLQALAEHLRGLEERTAEIDRRLLEAARADAACARLAAVPGIGPVVATALVAAVGDARTFASGRHLAAWRGLVPRPHSSGGKERLLGISGRGDGYLRRQLVHGARALVKVSRGRDGKPWAWIDGLLTRRSFNVAAVAVANKLARVAWALLSRGEDYRTAAA

SEQ ID NO: 145974 - protein, 407 aa, unidentified
MLFVGWDWASETHDITVIDDTGEVVDRWALRHDAADLAAALDRLAGHGDREDLPVAIETTSGLVVDRLLAAGHPVVPIHPNAFNAARPRWSASRAKSDPGDSYKLADYLRTDGHRLRRLEPLDDATAEIQALSRMRDDHVEAKVAATNQLRALLERHWPGATTIFARLDSDIALAFLDDYPTPASAARLGEARMKMFCRRHSYSGRRDPAVLVERLRSAPEPTEAISPEILAELVSAQVRLLRTLLATIADLDRAMGASLLEHTKAQLLTPLPRIGEVNLAQIIGEIGPILARAVDVDHACAEVGATPVTKESGKGRAVTFRWAVNTRARKALFTFADNSRHASPWATKLYNDARARGKRHPHAIRILMRAWMRVIWACWHTNTTYDPTRHGAERELVNATDEGIAA

SEQ ID NO: 145975 - protein, 402 aa, unidentified
MNAVGIDVSKGKSMVAIMRPFGEIVSAPFEIKHTASDIHSLVELINSVEGESRIVMEHTGRYYEVLAHQLSKANLFVSAINPKLIKDFDNDSLRKVKSDKADAVKIARYALDKWQNLKQYNVMDELRNQLKTMNRQFGFYMKHKTAMKNNLIGILDQTYPGVNTYFDSPARSDGSQKWVDFASTYWHVDCVRKMSLNAFIDHYQNWCKRKKYNFSQSKAEEIYGKAKELVPVLPKDAITKLIIKQAVDQLNSASTTVESLRTLMNETASKLPEYPVVMAMKGVGTSLGPQLMAEIGNVSRFTHKSAITAFAGVDPGVNESGTYEQKSVPTSKRGSADLRKTLFQVMDVLIKTHPQDDPVYQFLDKKRAQGKPYYVYMTAGANKFLRIYYGRVKEYLSSLPES

SEQ ID NO: 145976 - protein, 341 aa, unidentified
MKQYVGLDVSQRETAVCVVSETGQLIFEGKAKSDPGALTNLLRKHAPLAERIGFETGAMASWLWHELRRVELPVVCIDARHAHAALSVRMNKSDQNDARGLAELVRVGWYREVKVKSEESQKIRAMLVARSRLVSMRRDIENQVRSLIKECGLLFPRAIGQQFRNQVIELLGEDHQLLSVIAPLLSIHEHICQQQGKFDDEVRRLAKSDETTRRLMTVPGVGVVTALTFRHTIDDPSRFRSASTVGAYLGLTPRRNQSGETDTNGKISRWGDRLLRTYLFEAATVLLYRSKKWSSLKAWGIKLAKRIGMKKAKVAIARKIAVILHCIWVDGTSFDWGQAPA

SEQ ID NO: 145977 - protein, 344 aa, unidentified
MKAQQQYVGLDVSLDATSVCVVDEAGAILWRGKCHSTPDSIDATLAKHAPDAVRVGIETGQLSTWLFHQLKARRYPIVCIDARHAKAALSLQINKTDANDAHGIAQIVRVGWYREVLVKRMDSHAVRAVLAARAQLVTQKTTLTNSIRGLLKTFGIVLGRGKGARFDAMVRERVAQEPMLVTIVEPLLAVLLTVRGQLAVFERLLRRRARADADARLLMTAPGVGAVVALAYATTVEDPRRFRRSSSVAAYIGLTPRRYQSGEMDRAGHISRCGDAMLRTYLYEAANVLLRRSTRPSPLSVWGRALAERIGGRKALVAVARKLAVVLYSMWRDRTEFRFASPAA

SEQ ID NO: 145978 - protein, 475 aa, unidentified
MKRHQKTRKTKPKPTASKPLHEPLPDAAGIDLGATEIWVAVGPDRCQMPVRRFGTFTQDLLTIVEWLLECGIRTVAMEATGIYWVPLHQHLSEAGIEVCLVNARHVKNVPGRKSDVRDCQWLQYLHSVGLLRASFRPAQAICNARTIYRFRQDLLGQSTQHLQHMQAALDQMNIKLHYVIDDLSGQTGQRIIEAILNGERDPLRLAKLRNRRVKASEETIAKSLEGDWRDEQLFVLRTAWENGKQIKEQILKCDQKLLEYTQQLEATTVVAQPMGSLQSRSLTATGPAVAPILSPLKTQPKTSKNEPAGPWRQELTRLFGVDLSLIPGISILTSITLLSELGNDLSAFRSAQHFSSWLCLCPDNETSSGRVLHRRTRRSQSRVRLALRMAASSLHHEKSFLGEKYRRLRTKLGAPKAITAMAHQLARIIWHLITHKVSFEMSIFAALEKAHQRRRLNRLHAAARQMGFQLTQIAA

SEQ ID NO: 145979 - protein, 408 aa, unidentified
MEVRYPRCAGLAVHKKTVVAAVRIAEGRQVRTEVRRFATTTTALLALGDWLAAEEVTHVAMEATGVSWKPVWHVLEDAVELVLANAAHIRQVPGRKSDVPDAQWIAELLAHGVIRGSFGPPAPVQELRDLTRTRKQLGRELTQHNLRIQRVLEDATIKLGSVISEVLGVSGRAILDALVAGETDPGRLAAAAKGRLKCAPEDLVEARRGRVTVPHRFRVGQPLQLGASLRARMAAFDAESERRREPFPPAVERLTTIPGVSEGAAQAIVAELGVDMTRFPTVSQLRSWAGLCPRLDESAGKRRSTRIRKGAPWLKAMLGQCAKAAARAQGTYRQAQYQRLKSRRGGKKAAVAVAASILTAVYYRLRDGVEYRDLGADPFTRRDKVKIAARLARRIRDLGYEVDIRQAA

SEQ ID NO: 145980 - protein, 369 aa, unidentified
MTKNILFIGMDVHKESIEIAIADGSNTEVRRYGKIGGTHDAMRKTLRKLVSLGKTLHFCYEAGPCGYELYRYLVSEGHDCWVVAPSLIPKKSGDKVKTDKRDAIQLARLYRAGELTPVYVPDREDEAIRDLSRAREDAMLIQKSARQRLKSFLLRHDIRYQGKSSWTEAHLRWLADEVRCPSPAQQIVFQEYVNTVTEAQQRLHRLNEQIEIFVKHWRLQPVVEALMSMRGVKMVVAVTVISELGDLSRFDNPKQLMSFLGLTPSEYSSGQRQSRGRITKTGNGHVRRILIEAAWCYRYPAKVSPEIQKRQENLPLPIRNIAWKAQLRLTQRYQYMQQKGKPHNVTVVALARELAGFMWAIANEVKYPR

SEQ ID NO: 145981 - protein, 412 aa, unidentified
MDIVVARCAGLDVHKRQVTVCVRTPDDKGGRRRVVRTFRTFLDDLERLREWLLAEGVTEVVMEATGSYWKPIWYVLEEADELELRLVNARHVKQVPGRKTDVKDAEWLAQLLECGLLAGSFVPPAVIRQLRDLTRYRKRLIQDRTRETQRVDKVLEDAAIKLGSVASQTLGKSGRAMIDALIAGERDPEVLANLARGRLREKIPDLIRALHGRFAEHHAVLLREHLDHIDYLDDAIARLDERVEQTIAPFAESVRLLVTIPGVASRTAEVVIAEIGADMSVFPDADHLASWAGLCPGNHESAGKNYSGRTRPGNTWLCEALIQAAWAAARTKDTYLSAQFWRLARRIGKQKAAVAVAHSILVIIYHVLDRGVPYQELGGDFFTRQVDPERRTRHLVAQLEALGHTVTLDQAA

SEQ ID NO: 145982 - protein, 413 aa, unidentified
MEDPFLFFVGIDWATENHRVCVVDRDGKIIAERQVAHSGPGLQQFLTWLQQQIPVPPERVAVAIEMPAGAIIETLVEHNYRAFSLNPKQLDRFRDRHTVAGAKDDSRDAFVLADSLRTDQHCFHPIYLDDPQIIRIRTLSRLEDSLVQDWSRLTSQLREQLHRYFPQLLQLSPAADDVWIWDVVEAAPLPSLVGQLKRQQVQKILSRRRIRRLSAEEVLQQLRTPPLPVAPGTAEAASEACLLLITRLRLLLQQKKEVERRIEEQLSRFCAEEERVEHRDVQLLLSIPGIGRVITATMLAEASQPLAQRDYHALRAYCGAAPVTHQSGKRKRQVIMRYSCNQRLRNAFYHWARISVQQDGRSRAHYHRLRSKGHSHGRALRGVLDRLLVMLISMLRHQTEFDPALRQSIPVAV

SEQ ID NO: 145983 - protein, 344 aa, unidentified
MDHFAGLDVSVKETSVCIVDDTGRITKEVKVASEPEALLKVLGNPAYRFKRIGLEAGPLSQWLFSALAEAELPVVCVETRHMQAVLKAQINKTDRNDARGIAQMIRVGLYRPVHVKTLRSQKLRMLLTHRKLLQSKAIAIENDLRGTLRNFGLKVGMVGKVRFEARIQELVENIPDLAALVEPLLIVRRVLREQIVILHRRLLAIVRDDEVCRRLMTTPGVGPVVALTYRATVDVPARFRKSKAVGAVFGLTCARYQSGEIDWSGRISRCGDEMMRVMLYEAAQSMMRSKKWSWLKAWAMQIARRRGMKKAIVALARRLAVIMHRIWVDGTEFRWTREQAAAAA

SEQ ID NO: 145984 - protein, 331 aa, unidentified
MNFTEFVGIDISKLKFDVRIHSNQKASVFENNGKGFLKFIKWIDKNDQCEKAEILIAMEHTGLYSLPLSVFLMENDYRFVLISGLEIKRSLGIQRGKDDVIDAKRIAEYAYQKKDKIKPTQLPVKNILQIRRLLSLRERLVKQRAGYLMDKGENEIFLNQDENKILFEVIEQSIEYLDIQMYKVEKELYNIIKSDELMKNQFELITSIKGVGKLTALFMIAFTHCFTSFDNWRQFASYAGTAPFPYRSGTSIKGKNKVSNLANKRLKTLLNMCARSAIVCNPEMKIYFQNRKAKGENGMSAINIIRNKLLSRIFAVIKRGTPYVNTLKYAA

SEQ ID NO: 145985 - protein, 349 aa, unidentified
MLTIGIDPHKQTHSGVAVDPLGVQIAQRTVAARRDGFGQLLEWGRKLDSARVWVLEDVRHVSGGLERFLIDRGETVVRLPPRLMADARQAVRERGKSDPIDALAIARAALREGVETLPTARLAGAELEIRLLALHRERLVDTRTRLINELRWQLHDLWPEWEIPKRVLIHPGWQTKIARRLSRAAATSVQVRIARDMIARVRELTRTITELYEQLAGLVKQVAPQLLAEKGLGVLIAAKLIGEIAGVDRFTSDAQLARISGCAPIPVSSGRTDRHRLDPGGNRQLNHAFHMLALTKILHDPRTAVYLAKQRSNGKTSKEAIRSLKRHLVRRVYHLLHDPNNVPITICLT

SEQ ID NO: 145986 - protein, 409 aa, unidentified
MQVVHEVCCGLDVHKKSVTACVLWGSGRRRQTRAFGTFTRELLELGDWLRACGVTHVAMESTGVYWKPVWNLLEGLFEVLLVNAQHIKAVPGRKTDQKDSEWIADLLQHGLLRASFVPPTPIRELRDLTRYRASLAQEINRIANRIQKVLEDANIKLASVATDTLGASGRAMLEAMIQGEQDSQRLAEMAQGKLRNKIPELQEALQGRVSRHHRFLLRELLDHLYFVESKMQRIEQEVAERLGPFQSEVARLCTIPGVDRVTAWGLLAEIGLSMKQFPDAQHLASWAGLCPGSHESAGKRKSGKIRKGSLWLRRCLCQGAWAVSTKKNNYLSALYRRLAARRGSKRATIAVAHKLLVIAYHILRDGTCYSDLGADYFDRLNPEGLRRRLTKRLEGLGFKVTLEPLAQVA

SEQ ID NO: 145987 - protein, 321 aa, unidentified
MQKDLLYCAINVSKDKLDLDAAALALPAQLGNDHAGFRQLIKAAKKYPGAVQFVFEATGPYHLGLALALWEAQIPLSILNPARVRHFAKAQGKAKTDPLDTQVIGDFARSFRPQPTPAPDPVRRELTELLQRRDGLISSRAAEQNRLSQCRHKIIKGQIGRMMAQLAEQIDQIDGLMKKLVNSSEELKAKVKALCQVKGVGHLTAVTLLITLPELGTLGRNRIVRLVGLAPLNDDSGTQKNKRYIQGGRARPRCALYMPALSASRHNPVLKEVYERLLKAGKLKKVALTALMRKLLICLNALLRKLADQHPSPQGLCLAKP

SEQ ID NO: 145988 - protein, 437 aa, unidentified
MKKHLPVLDEKAAFVDVGSEHMHVSVGGDEPMVFGTVTTQLHALRDWLLAQGVRSVAMEATGVYWLPLYGVLEAAGLDVRMVSGRQTRNAPGRKTDMQDAQWGSTLHMHGLLRAGFVPPADIRRLQDYLRLRADHVNQAASCVQLMQKALERMNIKLHDTISSLAGASGMAMLRAIIAGQRDPTALLALCDIQIRRAKAEPIKEALRGTWTEEHIFALDQAVQSWDHYQRLISDCDRRIECVLPPHDPTQSALPRSIKRGGANAPEIAKLREILVQMCDGRDLTQLPAHTPYGVLQIIGETGTDLSKWPTEKHFTAWAGLAPGSKDSGKRKGSVKRRRNRTGRLFCMMAAALVRSKNIALGAFYRRMAARRGGLLANKALARKLAAWFWRVMVKGDDYVEKGIADYEEQVRKGKERALRRLAKELGQQLVPSAQPLA

SEQ ID NO: 145989 - protein, 400 aa, unidentified
MKSVLSVDVAKGKSMIMLSTEYGEVLIEPKEIKHNFRDFNELKDKIESFNLEDLTIFMESTGIYHLPVERYFKENNFNTLVINSLTTKNNYDTLRKTKTDTKDCMRLAKLFFVNEVEYHDLSKKDLYANLKAMTRQYFYLTQLNVSCKNRYKRLINICFPEFEEIFKGSRIYEETALNFIKTFPHAYIVKEKRIDALYNNLYKTNSRHDYYYKRLANKIKDIAVNSYPGVDKDHSDVKNLSDMAAILQENIKTINELKEKMIKNAKESPYFDIINSFYGIGEVLTTELLGELGDITRFDNHRQLIAFCGLDPTIIQSGKSINVHGTISKRGNKYARWILFNISQIVVKLGHQCPGHPVYDYYLTKKAEGKHYYENLTACSTKILRMLYTMCKNNTTFKIN

SEQ ID NO: 145990 - protein, 371 aa, unidentified
MDSVNGSADTMKKDTVYSGLDVAKATFDAGLWLPLPEGRDRPVRDIPVRTFSRTREGVRDYLQWADHRIGPADGLSGGTLHAILEHTGRYSAELIAWLLEERPTLRWTMLQPQRAAHYARSLAASTKTDKTDARALTHYGVERRPAGDKPIDPQRAELREMSRYRTTLVEMRTAEGNRAQESCPSPWVRQLQNRRIAQLDRDIQRIEKRMKELIKKMPDLHRDAQYIESIAGVGFVTAVAIVAELGDLRRFARARQLTAFVGVAPRVADSGSSVHRPVHMSKAGDSRLRSLLYMCALSAITYNPHMAKVYQRLTADGKTKKCALGAVMRKLLVLMRALVISGQPYQPDYRPCGKPADKRGNNSTTTKENCA

SEQ ID NO: 145991 - protein, 371 aa, unidentified
MEYLSKTLYVGLDVHKESIAVAYAPEERGTEVVALGAIGTRQCDIDKLIRKLQSKGAPLVFVYEAGPCGYWLYRYLTRKGLSCHVVAPSLIPRKPGDRVKTDRRDAVMLARLMRSGDLTAIYVPTVEDEAIRDLSRGREDARRDLKATKYRLKAFLLRQDIRYEGRANWNAAHLRWLSAVVCPTPAQQIVFQEYVRAVTEQHERVQRLETELRDQVTRWRLYPVVEAIQALRGVELTGAVILVAELGDLTRFDTPRQLMSYLGLTPSEYSSGERRRQGGITKAGNTHARRALVEGAWAYRYPAKVSRHLQLRLEKLPAEVQAIGWKAQVRLCKRYRQLIARGKHANQVVVAIAREMAAFAWAIARIVPLAP

SEQ ID NO: 145992 - protein, 363 aa, unidentified
MHSINNTELSSLEETRCQFNGGKADIKLGIDVHQDFYVVVMQEGGSNPKPPQRFAKQAFLRWAAKLKDRGGEVYAVYEACGFGFSLQRNLSALSIKCYVVCPQKLDEQNRRVKTDGLDAKALCLKLDRFVQGNRDALALVRVPTEEEEQKRAIHRQREQLVKARKQLEAQGRSLMVNHGLEPVQNWWRPRTFGALDVPLWMKELLANSQPILVALQQKIAALTVQLQSAASSDSPRGLGKMTSVIIDREIGDWNRFNNRRQIASYTGLCPGEYSSGNTRLQSCVTKHGNPRLRAALVELAWRLVRFQPDYHPVRKWRQILAKGALSTGAARKKAIVAVARQLAVDLWRIKTGRLSAEMLGLIN

SEQ ID NO: 145993 - protein, 419 aa, unidentified
MSFKILKFNCCGLDVHKTWIYACIGITDSNNRTEYKQARFSSFTKGLNELCDWLAKYNCKDVCMESTGKYWIPVFNILEQHNLWVTLSHPKYTKPMKGNKTDRKDAKWICDLYMCGMVKPSFIPPADIRELRDLVRYRFKLTCMITGEKNRAQNCLTVSNLKLDDVFSDVFGKSSRSITEQILKHPGETFDVTPFVDGRCKTPIEEIQAAVDGAISKEQAVKLRQCLDHIDELNKHISEVEQEILRLSDKYEIALNLIRTVPGFNKNPLTAIQVLSEIGGDMSVFPTAKHLVSWAGCCTRNHQSNQKIKSTRISRAGSYFKPVLVQVANALIKSKKHLEFTNRYKRIKARRGHKKAIIAICRMILTAIWHILSDLKPYTPEGFLESRPVKEEKVLSISQALNLLKQRGYIIKDEPLSVS

SEQ ID NO: 145994 - protein, 372 aa, unidentified
MNYNTVYVGMDVHKESFTLCSCKYEDEKASHYQRTPASYKNVLRYLAFLRTIYGEDTRFVCGYEAGCLGYSLYHQLENFNVECVILAPTTMLEQRSKRRIKTDKRDAEIIARSLAQHNYSPVHIPTETDNQTKEFIRMRDDHKAELKKIKQQILSFCLRQGYQYDGSGNWTAKHVKWLRSLKPAGLYKEILDEYLLTYTILTDKLNRLDQRIEELASKEEYKESVSKLTCFLGIKIHTALSVIVEVGDFQRFVSARKFAGYLGLVPGQHSSGDDRNGLGITKAGNTHVRRLLVESAQSYTRGKIGYKSRVLRSRQAGNSPQIINYADRANERLRRRYYQMVLKDGKKYNIAKTAIARELACFIWGMMTDNIY

SEQ ID NO: 145995 - protein, 343 aa, unidentified
MDYYVGLDVSLKQTSICVVNQSGSIVHEGVAASDPEAIASFVRSKAPGTVRIGLETGPTTTWLWTELKRLGLPVICIDARHAKAVLKMQINKSDRNDAAGIARIMQTGWFKEVRVKDLDSHAVKALLASRALLVKIKRDLENQVRGLLKNLGLVIGRAKFNVFAVRAEALIENRPELVAAVKPLLAARKAIEQQVNDLDRKVHKLARHDVQVRRFMTAPGVGPITALCFKATIDDPTRFKRSRSVGAYIGLTTRRHASGEIDWSGRISKCGDAMLRMYLFEAAGVLLTRVPKWSALKAWGAKLTKRNGLRKAKVAVARKLAVILHRMWIDGTEFNWSTKDAVA

SEQ ID NO: 145996 - protein, 355 aa, unidentified
MSGIKYIGIDVHTATISVAVLDVAGKLIMESVIETKASTILQFVQGLRGDLHVTVEEGTWAAGLYDLVKLYVTKIVVCDPRRNALLKEGNKSDRIDARKLAELSRANLLRSVYHGEKGLRTVKELVRSYLTFGKDLTRVMNRVKAIFRSWGIPCGGKSVYNPRHRDEWLSKIAEVGVRRRAELYYEQLDALVSLRQQARRKLLAESQKHSAWKLLRSIPALGPIRVALLMGIVQTPHRFRSKRPLWKYSGFGVVTHTSADHRYVEGQLERSKKPVSVRGLDPNHNHHLKDLFKGAAIQAATREGPFREFYEALVAKGMRPEMARLTLARKIAAITLTVWRKGVAFDAKYLKPQTA

SEQ ID NO: 145997 - protein, 349 aa, unidentified
MNSTIVAVDLAKNVFEIAVAGADWKVTERHRLNRSRFARFFVQCPPCRIVMEACGSAHHWARELLKSGHQVELLPAQYVQQYVKRNKTDRADAAALIEAARCSDIRPVPIKSIEQQQIQALHRLRSQWLSTRHRYINMLRGILREFGIPIPLGANVAKAQIGLALAEAANAIPPALRPTLLEMLTDVRTLEAKIIAVERELAALTRSDTTVQQLQDIPGIGPLTSTALRATVGDIQRFPSARHFASWTGLTASERSSAERRRLGHISKKGDIYLRTLIVHGARSALLAARRAERAGRPLDHLRRWALDCERRSGHNKATVALANRLARIVWATWKHDRVFDGNWALKAH

SEQ ID NO: 145998 - protein, 428 aa, unidentified
MKYNTQNAKIESITEKTLIVGIDVGSETHFARAFDWRNYEFTKKPFEFSNSEAGFLTFKAWMEDLLEKNGKSVVIPGMEPTGHYWFALGKFLQDNGMRPVHVNPHHVKKSKELDDNNPNKNDRKDPKTIASLVNEGRFSYPYIPTGVYAEIRSLSNMRFQAQEELTRAKNRIARWFSIYFPEYKDVYRDLKAVSGRMVLQAAPLPEDIRKLGAEGVNRIWRDAKLRGAGMKRAKTLVSAAEHSVGSKEAPEAARLELRNLLNDMDVYASRVEKLLGMIEEKLKEIPYIDKLMGIKGVGLITVSGFVAEVGDIRRFDDPKQLQKLAGYAIVANESGKHKGESRISYRGRKRLRYVLYEAALSLIGRNAEFKEIHEYYRTRRNNPLKKMQSVVAIACKVIRIFYVILTKGVDYDPEKMMGDIRRPQIQAA

SEQ ID NO: 145999 - protein, 314 aa, unidentified
MSTAMYVGLDVAKAHIDGAVRPSGDVHRVPHDDAGLTTLVTEVRALAPTLVVLEATGGYETDVASVLALAGIPVAIVNPRQVRDFAKALGRLAKTDAIDARVLALFAERVRPAARPLPDAVQQALVALVARRRQLVDMLTAERNRLPLAHGAVRRDLREHIHWLERRLRDSDRDLAAMMRDSPLWRAQDNLLRSVPGIGPVTAAVLIAELPALGRLSRREVAALVGVAPLNRDSGTRRGPRTTWGGRATVRAPLYMATLVATRCNPVLRAFYRRLRTAGKPPRVALVAAMRKLLTILNAIVKTQRPWQPVALDL

SEQ ID NO: 146000 - protein, 462 aa, unidentified
MDNRTAKNTKKSPVNFKLSPLNPCVAGIDIGAASIFTCAGFCDGRQEVREHLTFTEDLKQMAKWLKECGIKSVAMESTGVYWIPVYDILSQEGFDVVLVNAYYLKTVPGKKTDVKDCQWIQQLHAYGLLHGSFRPDNEGVELRGYVRQRSRLVQLAAQQVSLIHKSLTQMNLQLNHVISDITGSTGMDIIRAIVLGERDPKVLAGYRNPRCKKSKEEIAKALDGNYREEHLLAIKQALESYDLFHRQVDECEKALENFLERWEDRNTLSHSTGGAGEDVIKKAAMKTECNKSPYGFEAEESLKRILGVNLLDVPGFDVNGVIKIIGEVGTDMTKWPTFKHFSSWLGLCPGNKVSGGKVLSSRTKPSANRAAGALRLAAFTLYRSKSALGAYYRKMRARLGAPKAITATAHKLARILYAMLREKKSFVEIGQEAYEQAYKERQVASLKRKAKELGFALSEVAC

SEQ ID NO: 146001 - protein, 357 aa, unidentified
MLSSNVKYIGLDVHKEAIVIAVLNKAGKLVMESIVETKASTMLDFLHGLRGELHVTLEEGTWAAWLYDVLKPHVREIVVCNPRRNALLKEGSKSDKVDARKLAELLRTGMLRAVYHGEHGLQTLRELSRCYVTVSKDQRRVMSRLKALYRSWGIPCAGSQVYAVRRREQWLSKIAHAGVRRRAELLYQQFDGLLVLRHTVRGELLAESRKHQAVKILRQVPAIGPLRAALLLALMQTPYRFRSKRQLWTYSGLGVETHDSAQHRYVDGQLQRSKKPQQIRGLNKNHNHEMKEIFKSTALSASRLAGPLQDFYAGLVAKGMKPDMARLTLARKIAAITLTLWKKGGSFDAKHLKSQAA

SEQ ID NO: 146002 - protein, 342 aa, unidentified
MQITTIGLDIAKNVFQVHGIDAAEKVVVRKQLRRGQVLKFFAALAPCLVGMEACASAHYWARELRKLGHEVRLMPAKDVKAYVKRNKNDAVDAEAGCEAVRRPTMRFVEVKSAEQQGRLMQHRTRDLLLRQRTQLINALRAHLAELGSVAAQGREGLKELLAVIADEKDDRLPIDARASLIVLAAQLQALQTMIGSIEKRIIAQHRASEESRRVATVPGIGTLGASAITATVTDPSAFGSGRDFAAWIGLVPRQDSTGGKQKLGPISKQGDRYLRRILVVGAHSVLRRAKQTPEKYPWLTQLLARRPFKVVAIALANKMARVAWALLAKGGTYRAPALAAAA

SEQ ID NO: 146003 - protein, 363 aa, unidentified
MAKVRSWAGLDVHARSVLAASMDSETGELRVRRLSGETSEVVEFCCSLPRPTRVAYEAGPTGYGLARALLAVGVDCVVAAPGKIERPAQDRVKTDQRDAERVLRLLMIDGLHAVRVPSSEEEALRDLVRAREALRGDLMRARQRMGKLLLRHDVRYEQNASTWTASHRAWLRKVDLGQRGAQATLFDYLGAVDALVIRRDALEATISELVIDSPWAQTTARLRCLRGIDTLSAVGLCAAEVGNFERFQRPGPLMSYLGLVPSEDTSGEKRRQGQITKSGSQHARRLLVEAAWHYRKVPRLGTTLERRQAAQPAQVIAIAWKAQQRLHRTWRRLDTERGKRKTIVAVAVARQLVGFVWAIATTD

SEQ ID NO: 146004 - protein, 407 aa, unidentified
MDVLYPRCAGLDVHKDTVVASVRCVSPPSHQEVRSFQTTTSDLFALVDWLASHGCTHVAMEATGVYWKPVWHMLEGRFELVLANAAHIRNVPGRKTDVNDAMWIADLLAHGLIRSSFVPPAAIQELRDLTRTRKQLVREISQHTLRIQKVLEDANIKVASVLSSILGTSGRAMLHAIMAGEDDPERLADLAVGTARKKKATLIEALRGRVTPHHRAMLKLHLDVIAALETALADVDSAVGKALAPIQARAETLTTMPGVSNIVAHVVVAEIGVDMSRFPTAGHLVSWAGLCPRNDESAGKRRSTRVRKSGTWLKTTLVTAAWAAVRTKDTYLRAQFLRIKSRRGAKKAIIAVAASMLTAAYYMLRDGVDYRDLGPHHFEHREKTKTINRLVRRLTDLGCEVEIKHAA

SEQ ID NO: 146005 - protein, 414 aa, unidentified
MEVVFAHCAGLDVHKKTVVACVFPQGEIQRLIKTFPTTLAGLEALAAWLSGLGVTHVAMESTGVYWKPVFNVLAPLFEVWIVNPRELKQVPGRKTDVKDAEWIAQLMRHGLLKRSFIPDMEQRDLRDLTRYRTRLIAERSSASNRLQKILEDANIKLSSVATDIQGVSARAMLAAMIDGETDVSQLADLARGRMRSKIPDLEAALAGSIRQHHRFMWREVLYHLDELNARLATLDAQIRQLTAPYESLIARLDAIPGIDRRTAEVILAEIGPNVTPFPTAQHLASWACLCPGNNISGNKRRSGKTRHGQNWLRTALVEAAWAASRTKDTYLSSQFHRLRARRGDKRAAVAVAHSILIVVYHLLAKPEAVFTELGGDYFLKRNAEQEERRAVRKLTALGFTVTLTPAPAAAPVPS

SEQ ID NO: 146006 - protein, 440 aa, unidentified
MSKQKNHSQKTAQTTLPKMRANAGGIDIGATQTFVAVPADRDSQTIRSFPTFTQDLYKLAAWLRQCGVDTVAMESTGVYWIPLFQILEEQGIEVFLVNAHHVRTVPGRKTDVSDCQWLQYLHSVGLLNASYRPAQQVCAVRSLLRHRVGLVQMAATHVNRMQKSMTQMNLQLHHVISDITGYSGLAIIDAILQGERDPNVLAQLCNNRIKASKSVIAKSLVGDYRREHLFTLKQSLQCYRQYQQLIHDCDAEIRALLAEFESKDCSIQGSKGSCENPLKTELHRLYGVDLTRIPGLGVETVQAIFGEVGRDFTKFRSASAFASWLTLCPNNKISGGRILSSHTKKTASRASSILRFAAQSLHHSKSALGNFYRRMRARLGAAKAITAAAHKIARIIFHLVTTHQEFDDTRFQTDQHNYQKHQEAKLRARAKALGFQLLPI

SEQ ID NO: 146007 - protein, 465 aa, unidentified
MTPHRRPFSTTRRTSPSLLKRINVNVAGIDCGSAEHYVAVPPDRDAAPVRAFKTFTSDLHRLADWLATCRVTSVAMESTGVYWIPLYEILEAHGFEVVLVNARHVKNVPGRKSDVADCEWLRELHSVGLLRGSFRPTAAITVLRAYLRHRETLVESAAAHVQRMQKALGQMNLQLHVVISDITGVTGLRILRDIVAGHTNPQDLAQYRDHRCHASEAEIAAALTGHYRPEHLFALKQNLELFDTYQRQLADCDAATEAHLQTLAAEAAAPTHPLPAARSTAKPRRNEPRFDIRSPLHQLTGVDLTQLDAIGPYSALRLLAEIGTDMSRWRTENHFTSWLTLAPKNNISGGRLLSSRTQPSANRAAAILRLAAMSLGRTETALGAFYRRLAYRVGKAKAITATARKLAILVYRTLKDGLVYQDPGAAAYDAHHRTRVLRRLRQRATALGFTLVNLETGEQLERVVS

SEQ ID NO: 146008 - protein, 334 aa, unidentified
MKKDHYIGVDISKKTIDVAIFVKDTHRSTSLPHDSFQNSEEGFKDMKRWLRKQNVALSKSLVCMEATGTYTYELCLFLERQSVSYSVQSPLHLKRSFGLTHGKNDKVDAARIAYYAYLHRDDIKLIKLAAESIRRLKSLIAERKSLVVEIARCKTQLKEAGEHAPSLGTIKRTESLQKFLEEQVGAIEEEMDQTIETDESMNTNYHLLLSVDGIGTVNAINTIIATHNFEMFDNAWQYASYIGVAPFEHTSGTSVRGRTHVEPGAKMLKADMTGAVRTCINHDKEIKHYYERKMAEGKAFGVVANAIKFKLLLRMFAVIKRQTPFVRKPDFIFN

SEQ ID NO: 146009 - protein, 478 aa, unidentified
MEHVPVIGIDLAVTAASELAVASGATIEASRKVASTPTVASGATIEASRKVASTPRGLTEGIRQAAKGRAVAIVVESTAMAWFVAAVAALRSGVEYRLYRVSGRKSAALRAFYRSHTKTDHIDARVLARMPAVDDSLLTYSLPAPSELAMKRLVVARHKLTTETTKLQNRVRSLLAWAAPGVVKAAGGTVSTGLVRVLGRWSDLTALAKARVATIALQGDWGTERAEAVRTAAAEAVAFYEGHVDFSAVGLELELSLAQLGFLASQVDRLEERIAALHTQLYPKDRLLTIPGIGPVVAGVVRAVVGDLSRFANQASFRAYTGLVPRENSSGEVRQRGRISKAGPSVLRWALYLAGDAARHCDPALAELYRRLMVERGRTHTQAVCAVASHLAGRIYAVAHQDRDYVWRDLEGNEITKEEARAIAQSLRVDSETRTRLRARREGGPRTPYARQPEVPQDVTQPSGDKLIEAALELATKA

SEQ ID NO: 146010 - protein, 413 aa, unidentified
MVEERIAWFAGVDWGSERHQACLLDVQGAIVGEREFPHSGKGLSELADWILSRTGISSAVAVAVEVPHGPVVDILLDRGFIVHAINPKQLDRLRDRFSVAGAKDDRRDAYVSADGLRTDRHLFRRLQIADPRLIELRTWSRLAEELQEERVRLSNRLHQQLWRYYPQMLELNDDLTATWFLELWLRAPTPARAVRLRVSAVERLLKHHRIRRVNAEGVLQTLRQPAIKVPDGVAEAASIHIHSLIVRIRVVNRELSDAEHKLDELCTAIGKTDVALGERAEHHDVAILRSLPGIGRINLATLLSEASGPLSRRDYQALRTLSGVAPVTKRSGKSHVVVMRYASHVRLRNTVYHWARVATQHDDKSRTRYAALRRRGHYGRAIRGVADRLLAVACVLLQRQTLFDPHFGQGTTS

SEQ ID NO: 146011 - protein, 410 aa, unidentified
MQVLYPCCCGLDIHKRFVVACVLTTNTEGHVQKESRTFSTMTHDLLALLDWLQAVGCTHVAMESTSSYWRPVYNLLEGQFTLLVGNAYHMKTVPGRKTDVKDAEWIADLLRHGLIRGSFIPTPAQRQLRDLTRYRTHLVEERARLTNRLQAVLEDANVKLASVVTDIRGTSARAILSALVAGETNPFVLSDMALGRMRSKREVLAQAVVGRFTPHHAFLITEHLSQLDYLEEVSERVSSEIAQRLAEEQTAVELLDTIPGVGRRAAEIMLAEVGTDLARFPTAKHLASWAGICPGHKESGGKRLSGKTRKGNIWLRHVLFEVAHAASKTKDTYLSAQYRRLAARRGKQRALIALGHSILVSAYHILTRRVPYRELGPLYFDVLDRQRVQQRLVQRLERLGYTVNLQPIAA

SEQ ID NO: 146012 - protein, 340 aa, unidentified
MLRVFVREKQSMKTAGVDVAHKTLAVAIRKAGKTGKVREFANDPVGHRAVLKALKSAGVERVCLEATGTYHLDLSVALDDGAVALMVVNPKTSKRFAEAMSKRTKNDAVDAAVLAEFAERMEFEPWQRPDDQALGIRACARRLAALSKTRTEAKNQLHALEQTQTTPRIILEDVKQSIAQSDIQIARLRTWALGVIDDEAVLKETFALLISIKGVAEASAIQLMGELLVLPEEMKAKQWVAMAGLDPRHNESGTSVNKKPRISKAGNRYLRMALYMPALSAARHDRHVHGYYRHLLEQRGLKKIQAICAVMRKLLHAIHGMLKHRQPFDGRRFYALQEAA

SEQ ID NO: 146013 - protein, 310 aa, unidentified
MESVIVGIDVSKDQLDVAVLPSKEIFSVPRDSEGLDNLVRRLVGLSPKLVVMEATGGFETIVAAALAAAGLPVAVVNPQRIRAFAKAMGRLAKTDRIDAETIALYGEAVKIEAQKIPDEASRLLGEMVARRRQIVETMTVERNRRHSLTSSRLLRGVDRILAALQKELSDLERDIDESVRATPAWRGKDELLQSFPGIGPKLSSLLIADLPELGTLTRRKIAALVGLAPMADDSGKHRGRRYIKGGRTHVRNGLYMAAMVAARFNPVIAAFHQRLIAAGKPPKQALIACARKILIILNAILRDNRPWQSA

SEQ ID NO: 146014 - protein, 375 aa, unidentified
MNKYITKYVGMDVHKETIAVAIAKEGREAPAYYGEIPNTAEAIRKLVKKVASTGEKVSFCYEAGPCGYDVYRQLIDLGQRCDVAAPSLIPKKAGDRVKTDRRDATTLSRLYRAGELTTVWVPEKEQEAIRDLTRAREDMKAMEGHAKQRLGAFLLRHGKRFSGRCKWTQAYFRWLEGITFEIPAQQIVLQEYVDTLKHMKGRVEALEEEMRQAMQGWSLAPVVTGLMALRGVELITAMTVVAELGDISRFTSARQIMAHLGLVPSEHSSGNRQKRGGITKTGNGHARRVLIEASWSYRSPARKTAKIQRRAEKTSETIQAIAWKAQKRLCRRYWYLINKGKRPVEACTAVARELSGFMWAIVCEVMGKNYVCATA

SEQ ID NO: 146015 - protein, 449 aa, unidentified
MGSYAGVDWAGEKHDVLVEDRGGEQLLAATFVHDEKGLRALCRTLLRLQVQLVAIERPDGLLVERLLDAGLRVLPMHPKQVAAARARFRAAGGKSDRFDAFVLCELARTDSHRFRVLEPDGDQTKALRALTRTREDLVHARVALSGQLRAELERFWPGPIGLFTKLDSPISLAFLERYPSPADARGLGERRLAAFLARQHYSGGQKPAELLAKLRRAPEGRVGEAELAARRAIVLALVAAITPLVEQIKQLTEQIATALREHPDGEIFTSLFRTPGSVVTAAELLAEIGDCRERYPTRDTLAADAGQAAVAVESGKHKAASFRWGCNKRLRGAFCTLADSTRHWHPWAQDRYADARARGHDHPRALRTLGRAWCRVVWRCWQDRTPYDPARHRGLQQHITVTIPTSSGPVPDLTATQRMLGDAVTKPAARRPEREALDGKPTSATTLGG

SEQ ID NO: 146016 - protein, 375 aa, unidentified
MFESNTHVGLDVHKKQITVALLRPGEQQPVEWQVVNEPRAIRRLARRIEREAVGEVTCVYEAGPCGYTLQRQLEGYGLSTQVIAPSLIPRKPGERVKTDRRDARKLAFHSRSGSLTEVRPPSVEDEAVRDLCRCRVAASADLTRARHRLGKLLLRHGLVYRVGRNWTQAHRRWLRGLAFEQAALKVIFDDYLLAVEHLEERQRGLDTELEAVSRQEPYREPVGWLRCFRGIDTTTALTIVAELHDFRRFKTARQLMAYLGLVPGESSSGERTQRGPITKAGNRYVRRVLVEAAWHYRHRPAVGRALRERRQGQPAAVIALADRAQQRLNRKFYRLVLSRGKPTQKAVVALARELVGFLWAALYLIPATRQEQRTA

SEQ ID NO: 146017 - protein, 398 aa, unidentified
MIYVGVDIGKDRHAAAAVSEAGESAMPPFYFTQDAGGFAALFGALEKLGGPGAVAVGMEATGHYWKVLRHALVKRGYRVDVINPLITSREASSDVRGRKSDKLDAIAIANVMRKGGYSPAPAAGATDALRTLARYRRTLVARRSDAKNRLAAALDVAFPEAAKTLGGLSGAAAMAAVRAFPSARLAAKADIRTVTSVFKKASGGRLGREDAKKFREAARHSLSLGMDTEGEEFVIPQTVDEIRALDSQIDRVERRMQEEPRPELAARLMSIKGAGRIQPLAIAAEIGDPARFAGADMAGKVLAYAGCDPRVRESGKWKGRTKMSKRGSPTLRNALYLMATTVRLHTPHFNEIYKKHADKGKHHNVALSHVIRKIVDVMCGMYKTNTDFVPPKTKVKPC

SEQ ID NO: 146018 - protein, 460 aa, unidentified
MRNQGRAESSSIPGHRSSEPLRIVHPDAAGIDIGSHKHYVAVSPERDTEPVRCFGCLTPDLQAMAQWLKACSVTTVAMESTGVYWIPVMQVLEEYGLEVYLVDARQAKNMPGRKTDVKDCQWLQQLHVHGMLTRAFRPADAICVLRSYWRHRKDLVEMASMQIQLMQKSLEQMNLQLHKVLSDITGVTGMKILRAILAGQRDPVVLAQMRHPLVKSSEDTIAKALTGDWRPEHLFTLRQAVELYDVYQQKIQACDREIESYMQSLEARGAPKDLEPRGRGTRRKNQVHFDLRGQLHRLTGVDLTSIDAIDAMTAQTVISECGTDMSRFATEKHYSSWLGLCPNHQITGGKVRRRRTRKVRNRAAQALRVAAQSLHKSKTALGAYYRRMRGRLGPAKAITATAHKLAILIYRMLKYGMKYVDQGQQAYEKQYQQRTLQMLVKRAKQMGYAMVDLRSGEVVS

SEQ ID NO: 146019 - protein, 350 aa, unidentified
MDIVGAFDLHRKQITFDYIEMDSGEVHRGRIQPADRENLRLWLERFTERFPAQHAAIAVEATTGWRFVVEELGRAGIEPHLAEPAETNSLRGRKKRAKTDRLDAGHLRDLLVIERLPESWIPPEHIQEIRTLMRMRHTMIEERSAHQQRIHAQLFHNGYPQQRNVLAADRRERLQKMELPRAARKVVDLSLAMIEHINEELEPIEAELRTYALSQAGCRALMEYYGIGELTSVAMLAELGDTRRFSSSKKAVRFAGLDVTVQSSDDKRAAGRLSRQGSPVLRWAAFEAAMVARRRGSPDHDYYVETKERIGTNRAALSIARKLIRRAHHTLRELGEEAMSEPAAVNNSSV

SEQ ID NO: 146020 - protein, 345 aa, unidentified
MKITTIGIDLAKAVFQVHGVDERSKAVLRKQLKRKDVVSFFANLEPCLIGMEACGSAHYWARKLTALGHTVRLMAPQFVKPYVKTNKSDRNDAEAICEAVARQNMRFVPVKTAEMQAVLALHRARQGFVKARTAQANQIRGLLAEFGIVIPKGIGHISKRLPEILEDGENALPGMMRQLFERLGENLKEMDKQVGEMERQIKLWHRENEQSRKLEAIAGIGPITASAFVATVGDAKSFKNARQVPAWLGMVPRQEGTGGKTTLGRISKRGDVYLRTMLIHGARSVIAQFERKPDQADGWLKKLLARRNKNVAAVALAAKNARVAWALLAHERSYQCDYVATRPAA

SEQ ID NO: 146021 - protein, 309 aa, unidentified
MEHFIGIDVSKDRLDVHLRPSGESFAVARGGEALVGLVERLRALAPALVVMEATGGYETVVASALGAAHLPLAVINPRQIRDFARATGRLAKTDRIDAAAIAHFAEAVRPPARPIADAEAQALGELVARRRQVIEMIVAETNRRRMAAQRRVIRAIERHLAVLQAELSELDGDIDGAIRNSPAWQADADLLVSVPGIGPATLRTLIAELPELGHLTRRKIAALVGVAPINHDSGTLRGRRTIAGGRSAVRAALFMAALVASRKNPVIAPYYAKLRTAGKTGKQALVACMRKLLVILNAILRDRKPWQPA

SEQ ID NO: 146022 - protein, 475 aa, unidentified
MNLKGKKTKNQVVTANIFEQQELLKKTEVIREKLTASTWHELETNGKFDKNAKLSFISDDMLILGCDVGSETHYLRAIDPRGRELSKSAYSFRNNCEGFQSAKEWAVELAAKNEKKQIVLGLEPTGHYWFCLATWMIANGISVVQVNPYAVKQTKEVEDNSQLKDDTKDPKLIANLVKDGNFGMPYLPEKVYAELRRLSMFREQLNEDRIRAINRMHREMKIYFPEYKEALGRVEGAFSLELLKQTPFPEEIQTLGEEGIRQIWHDAKLRGRGYSRVREIVGYAKTSVGMKDGAEASAMAVKWFVKEIRELDEKLAEIEKLMREKYQEIPYAKNILEISGIGENTLSGILAEMGDISRFDDVKEIQKLSGLGLVACSSGKHKGETKISHRGRKRLRYWLFQAAKSAVAHAEEFKELHVYYTTRADNPLKKMQSLIVIACKLLRIIYGILKNGTVYDPKKMLRDIRRPEKKEVIAA

SEQ ID NO: 146023 - protein, 363 aa, unidentified
MEGQERSPGRIVGGVDTHKDLHVAAVVDELDRVLASRCFATTRHGYKQMVAWMGAFGSLQRVGIEATGTYGAGLLRYMQKAGIEVLEVTTPDKHDRRKRGKNDDLDAQNAAHAAFAGKRTVTPKSRNGMIESLRVLKACRRTAVAARRVALQMIQNTIVCAPDELRELLRKMTRMQLIRTLAAWRPDLTDYRNVTSAYRITLKSLGRRYLELHDEIADLDTMIVSIVDELAPNLVARNSIGHESAAQLLLTAGDNVQRLRSEASFAALCGVSPVPASSGKTTRHRLSRGGDRAANSALHIIAIGRLRTDPRTQAYVAKRITEGHSKLEAIRCVKRYIAREVFSLIDHRKVIRPQPQLDPRRPV

SEQ ID NO: 146024 - protein, 344 aa, unidentified
MNMIKVVGIDLAKNVFQVCVWMEDGSVASNRKIPRQKFLDTIRTFPPETLIAMEACATSHYWGRTLQSMSYHVRIIPTQHVKAFSHHQKNDANDALAICETACRPGLHFVPIKTVEQQDIKALRSARQLMVEQRTALANQIRAFLAEQGIIVPVGIQKLQQHLPDILEEGDNTLSCVLRRLLHTLWEDLRDLNVSIHEMDNEITALSRQQPGYGHLLTIPGVGPLIAAAFVSDVNASQFANGRQLSAWCGLVPQQHSSGGKSRLSSLNKQGNRHLRTLIIHGARAMMQGVQKRDDPLGEWLRTLITRCGAMKAVVALANKLTRIIWRILTDKVDFNMKKAFAIH

SEQ ID NO: 146025 - protein, 342 aa, unidentified
MEQYAGIDVSLECSSVCVVDGTGKIVREAKVASEPQALIAWFGSLGSGLERIGLEAGPLSQWLFAAMKAAGLAVELLETRHVRKAFEAMPVKSDRNDARGIAQLMRLGWFRPVHCKSISAQETRSLLTARKLVQSKLRDVENSLRGILRGFGLKVGKTTGQKFAGRIEELVAGHPHLQMIAKALLTVRAVLRSEFAAFEKQTRRMVQSDKQARLLTSVPAVGPIVALTYASAVDDPARFKSSKQAGAHFGLTPKKYQSGETDYTGRISKIGDASVRTALYEAAHIMLTKPVKGCSQLKSWAMRIKRRAGMSKAKVALARRLAVIMHGMLADGTSFNAAAAAA

SEQ ID NO: 146026 - protein, 440 aa, unidentified
MTGNRGTRPRAPVSDRPAEVLPTEVSLPRNNKGASVFIGIDWAAQQHAVCVLDQAGKRVTAFEIAHTADGFGQLTARLGRLGDPAELPVAIERPDGRLVDRLPEAGHPVVPVSPNAIKAWRDAEVLSGAKTDTTDAQVIAEYLRLCHHRLRVLQPFSPETRALRAVVRARADLVDQRVAAANQLAACLDAFWPGALAIFADVESEIALAFLERYPTPASAAHLGEARMRAFCTKHGYCGRRPAAELVARLRQAPPGLGGGPEAEARRDAVVAMVGVLRALNTAIKDLDRSVAAHLGEHPDAEVFTSLPRSGRTNAAQVLAEWGDCRPAYDGPDAVAALAGAVPVTKQSGKHHAVHFRWACNKRFRQAITTFADNSRHASPWAAKVYADARARGCDHPHAIRILARAWIRVIWRCWIDQVPYDPAKHGAAQKLTEMTASAA

SEQ ID NO: 146027 - protein, 429 aa, unidentified
MNYNTQNAKIASITEKTLIVGIDVGSETHYARAFNWRNYEYSKKPLAFSNDEAGFSSFKDWMDDIAEKHGMKVVIPGMEPTGHYWLNLGAYLQEQGMKPVHVNPHHVKKSKELDDNNPSKNDRKDPKTIAGLVNEGRFSYPYIPTGIYAEIRNLSNLRIQTQEEITRIKNRIARWFSIYFPEIKDVYRNPDAVSGLMVIKQAPLPCDIKELGVDGVNKIWRDARLKGAGIKRATTLVTAAEHSIGNTEAPRSARKEIRNLLNDYEIYKNRMDELMEEIKETLSEIPYIDKLMEINGIGIKTVSCFIAEVGDIGRFDNPKQVQKLAGYAIVADSSGKHNGESRISHRGRKRLRYALYEAAISVIGKNKEFKEIHSYYRTREKNPLKKMQSVIAVACKLIRIFYTILTKGVDYDGQKMLTDIVRPEMQLAA

SEQ ID NO: 146028 - protein, 297 aa, unidentified
MAGIINKACGLDVHKKFLIATILSIFGEKKQLRFERTEKGILDLKNWVISEKCDVVACESTSDFWVPIYESLINYLTVIVGNARDMKAFTHKKTDNIDSEFIAQLALNNMIKPSRVFSKNQREFRSYIRLRHKLVQKRTDIKNVAHAILASEMFHLNDVLTDIFGKNGIIILSGISSGKNVDQIIESLSPNVRKKSDKIREVLDREMSLSAAIRIQTCLSLINNIDEQINILEAEIFRYVYTNHNREMKLLMSSPGVGEISAATIIAEVGDFNDFSSGAKLASWRGLVPRVYQSADK

SEQ ID NO: 146029 - protein, 316 aa, unidentified
MFYSGIDLHKDNCFVTTVDDKGEIVKQERLRNDTALILAYCASLEGPHKAVVECTAGWYWLNDLLEAHGIELILAHPKYLKAISYAKVKTDKVDSQTLATLLRLDSIPEAHKIRRDLRDLRDVMRARLRLVHKRTSCCVSIHNLGRKLNCDDRLVIEKQTTPANLPEAYRLHLRNLYQQIDLLGTQILDLEHFLQPVLIPNDDIQRLVWIPGIGKTTAFTIYLETDGIERFFSDKHFLSYCRLVPGAKNSNKGLRHKSGCKDGNKYLKIAFTDMAVHAIQYYPEYRRLYQKILRRANEPIARTVVAKSRFTGSRLL

SEQ ID NO: 146030 - protein, 342 aa, unidentified
MNDTIIGVDLAKRVFQLHGATVAGHVMFRKKLTREQFRLFMAEHPHCVVVLEACGSASSWAREMVKLGHDAKLIAPQYVKPFVKRQKNDAADAEAIVIAARQPEMRFVTPKTEDQQARAMLFRGRERLVHQRTELVNALRAVLYEYGHVFPVGIGHIKRIEVLVEDPNCDLPTLITTECRDLLAQIAEKTDRIDAKTKALKELATGTDTARRLQTMPGVGPLTALAVEAFAPDMVQFRCGRDFAAWLGLVPRQHSSGGKERLGRISKAGQADIRRLLIIGAMTRIMGRARHKIPLDSWIGRMLARKPKMLVAIALANKMARQIWAILTKNEDYRDPALATAA

SEQ ID NO: 146031 - protein, 411 aa, unidentified
MEIVHPRCCGIDVHKATVCACISIKDHNEVVKQKRRFHTTTAELRELAAWLREWKVTIVAMEATGVYWKPVWNILEEEFELLLVNPQHLKSIPGKKTDFKDGERITDLLQHGLLRGSFVPPRPIRELRDLTRARASFAQEHSRIINRIEKTLEDPNLKLGVVISDVSGVSGRAMLEAIIQGEQDPDKLAEMAKGTLRNKIPQLRLALQGQVTAHHRFMLRQWLDALDFTDQKIAALDQQIAEQARPFEPTVQTWMQVPGLRRVNAFSLLAEIGADMTQFPTAAHLASWAAVCPGNRESAGKQTSGKTCPGNPWLRRTLCEAAWAAARTKSSYFRALYQRKMRTRGKNRALIAVAHSLLTTVYSFTTAGQPYRDLGLDYFDQLNRENLERSLVKRLERLGNRVTIEPVRPAA

SEQ ID NO: 146032 - protein, 329 aa, unidentified
MYYVGIDISKRFIDVCLLVDGIKGKRKTKVLPNDLNSAQALAQWLILQKCDPSQAHIIMEATGVYHEHLIDGLHQSDILVSVINPHRVREFAKGMGILTKTDKVDAYVLACYGCLKQPENWLPPSQEIRKLKALLQHRDSLLNDKQRIENRLSTLKSTTAPEEILTSLESIEQNLKDELARIERLIAEHIDKHPRLKNDLKLLKSIDGVGEQIGWNMLAIIRGNNFRSAEQVAAYLGVIPIERRSGTSVCGRARLSKIGPPGIRAKLYMGAIAAISWNSHVRALYERLRLKGKAKMVAIGAAMRKLVHLCYGVLHTQQPYDKNHGVVAG

SEQ ID NO: 146033 - protein, 331 aa, unidentified
MSNIIGIDVSKASLDCAYLRDPDQKRAKRLSCKNEVSSFASLVSWAETKSDLSVKSLTFVIEPTHVYHEPLVQFLHNSGATVYLVNPGRVRKFAEGIGILSKNDLVDADLLARYGLLARNLIAYAPAAQEVNDLRSLLNRLDVLERNLRSELNRQEKVGKTMVFHRLEQQSIARAVKRLKAEVITFKRAIRECIKSTPSLQQPFNLLCTIPGVGAKTAWIMIVILASRPFMSAPEVASFLGLNPIEKRSGNSQYRRPRLSKSGSGHYRQKLYFPAMVATRKNPDIKALYERLLAADKTKMCALGAAMRKLVHICYGVMKNQTPYQAQTTPS

SEQ ID NO: 146034 - protein, 415 aa, unidentified
MEVMHPRCAGIDVSKRDAKVCIRIQGGGSRKTSSTVTTWGAMTNQILALRDHLAAQQVTVVVMEATGDYWRPFYYVLETDFEVLLVNAREVKNVPGRKSDVSDAAWLADLAAHGLVRASFVPPEPIRQLRDLTRTRTHITQGRTREIQRLEKLLESAGIKLSSVATDITGVSGRLMLQALIDSDGAADPAAMADLAKRRMRSKIPVLTEALNGRFTAHHAFMTQLFLDRIDGHTKDIAMLSERIDELMKPFLPARELLESIPGFSQIIAEIFIAETGGDMTQFRTPQQLASWAGVSPGSNESAGRVKSTKTRPGNRYLKGALGVAALNQAKSKKTYFSAKYRRLASTRGPMKAIVAVEHAMITAAWHMLTNAEFYRDPGADYYTRQDPAKTRARAVRQLEALGYQVSIHPIQQAG

SEQ ID NO: 146035 - protein, 414 aa, unidentified
MNTLVSNIGVSGTLIALDIAKKHHDAKIRHPDGRTSYLRIENTLEGFNRLLALTASPHEDIIAAFEPTADYHRNIAWWLHKQGVQCHLVSSVRCARAREMLFKTWDKNDRKDVSVIMYLLEQGLSSPFYDPLANGIIDIQEISNTYHQVTLARTRCLNSLVNHYLTLYFPEAEQFLHMSRAEWFCQFLLQFPTPSCITSLNRDVFVKQSWDVVGRKQYKQQFLEHLYDVAANSIALPLPDDSLAVATFRLQLHRYIELSAQRLQLEKQAEKYLQERSDYQHLRTIPGIGPVIALMVIAESGDLTRFAHYRQYLNFCGFNLSAIQSGQKHSGYRLSKRGNARLRYAFWLAATVAVRTRENSFRYKYERYLRENGDKPDQKRKAMTAVATKVARVAHAIVKQNIDYKGYYEISHGT

SEQ ID NO: 146036 - protein, 400 aa, unidentified
MITNHAEIDVFIGIDVGKHDHHAVALARDGTQILSKALPQNEGKLRGLLGKLRTHGTLLVVVDQPATIGALPVAVAQAAGITVGYLPGLAMRRIADLHPGEAKTDARDAAIIAEAARTMPHTLRGIRVSDENVAELSMLCGYDDDLAKLATATSNRIRGLLTQIHPGLEAVIGAHLDHPAMTALLVKYPTPKALRRAGKRRVETLLAKHAPRAWKRWATAIFTALEEQTVVVAGTDAAGIVLPQLATALAQTRSSRDEVFARIEELVESHPLFELLTSMPAVGVRTAARILTEVVGKDFATAGHLASYAGLAPVTWRSGTSIRGDHSSRRGNKVLKRALFLSAFAALKDPLSRTYYDRKRAQGKKHNQALIALGRRRCNVLFAMLCDGAYFHVPMEATAA

SEQ ID NO: 146037 - protein, 319 aa, unidentified
MQGKVSPERSACDRVDVCKEWLDVYLHPVGLSLRVANTPTGLKRLKRELARHAIACVAVEATGKFHRLTQRHLHAAGIPVAVVNPLRSRLFCEASGQLAKTDAIDARLLAVMAESLNLRVTPPTPEIVEDLQELVRARAAAVADRTALINQRAAARLGAVKAELGRRIRALEGSIARLEQEIEATIARDLALARRFEILLSIPGVGPVAAAGLLADLAEMGTRSGKEIASLSGLAPVACDSGEAKGQRHIRGGRAHVRTAIYFAALSAARYNPHLARVYRRLLAAGKKPKVALTAVMRKLVVLANALLRDNRIWQANPA

SEQ ID NO: 146038 - protein, 330 aa, unidentified
MRTWNVILGVDVSKLTLDICHAEQNLHIKIDNCSKGFEVFKKWCKTHGFDLKGTLMVMEFTGGYEYRFIQFCESLSIPYCRISGLEIKNSMGMTRGKSDKADAFRIGRYGEQKSKELVPNKPLNKSILLLKQYLSFRKRLVREKAGLESTVKEREHMYDLKKTDPILRISRANIKTCQKQISEMEEQIAQIIKRDPAMLQNYRIITSLKGIGKINAWMTIAYTENFTSFPDGRAYAVYVGVVPFEHTSGTSIKKRKRVSHLAHKELKQELNQAAKTAIVHDKEIAAYADRMLKNKDYVLVLNNVKFKLILRMFSLVKRGETFVENYKKAA

SEQ ID NO: 146039 - protein, 451 aa, unidentified
MARTKRSRPDRDISPTHPNAAAIDIGARMHVAAVSPDRDAEPVRSFGTFTGDLHRMADWLARCGVRTVAMESTGVYWIPVFEVLDQRGFDVVLVNARDAKHVPGRKTDVSDAQWLRQLHEYGLLRASFRPKGEIATLRAYLRQRERLLDYAASHIQHMQKALMQMNVQLHHVVSDITGATGMRIVRAIVAGERDPAARAAYRDRRCHASAEEIGAALAGNWREEHVFALGQALDLYDAYQAKLADCDARIEQVLERLRTVSERPAGQLPPARHRDNTANAPAFNARAMLHSVLGIDLTQIHGLGPSLVLKLIGECGTDLSAWPDAKHFTSWLCLAPSNKISGGKVLSARTRRSGSRAAALLRLAATTVGRTQTALGAFYRRLSARIGKAKAVTATARKIAVLFYNAVRHGMDYSDPGTSYYEERYRARVLVNLRRRAKSLGFVLQEEASPA

SEQ ID NO: 146040 - protein, 412 aa, unidentified
MEVLHPRCAGLDVHKETVVACVRIASGGEVSRAVRTFGTTTARLIELAEWLEASGCTHVAMEATGVYWKPVWQVLAGSGFELVLANAAHVKNVPGRKTDVNDATWLAELLAHGLIRASFVPGPEIQELRGLLRTRKQLVREKASHVQRLQKTLEEANIKLESVLSDVMGRSGRAMIQALIAGETDPAKLAALAHPKVRAPQARLREALRGRVKRHHRFLLDLHLQQIEALDAGIAAIDREVDAGLASFRDAVKQLSTIPGVSELSAQVILSEIGTDMSRFATAAHLRSWAGLCPRNDESAGKRRSTRLRTGAPWLKAMLVQCAWAAARTKATYLNAQFVRLRTRRGPKKAVCAVAASILTAAYHMLKDGTFYQDLGATHFDRRRPEAHARRLVKRLAELGFSVQLEPLAAVS

SEQ ID NO: 146041 - protein, 342 aa, unidentified
MEHDTASYQLYVGIDIAATTFTAAWMLPGASPTPPVTYPQRPEGFASLQRHLAATGSAPAATLVVLEATGSYWVALAVTLHTAGYAVSVINPLQAHHFAKAQLRRAKTDPLDAQNLAQLAAALRPAVWSPPPAVYHEVRQRLTARDALVAMRQQTRNQRHALLQWPVVVASVRNHLDDVIAMLDTRIADLEAEIATVLATSNWAESLACLTSAPGIGVLTAAWLLVSTMNFTLCATPEAATAYAGLAPMPHTSGTSVRGRTGIGHGGQSRLRTALYMATLAAVRHNPELHAFYTRLRAAGKPHKVARCAAARKLLHLAWALVTKQQRYQSNHRIVAPALAAA

SEQ ID NO: 146042 - protein, 438 aa, unidentified
MSNKVIFNLDDLFISVGIDVGADFSWMSIALPNQQFVGKPYKILHSSIDSLTTAVSKIKEAEELYSLESRIFLESTGIYHYPLFCYLRDKGFNCSVINPIITKNSTNINIRKVHNDRFDSKKAALVGLKPDLKVSLMPSDLALNCRNLCREYYDLMDNRSAYVNKLQGELRMAFPQYLGIFSKVTINTSLTLLETYTSPSAFLEADKQEIIDIIKSTARFGLTYAQNKYNAIIQAATDANQFGYIIESNIKRIRLYISFIRKYDEEINDILESLHKLVDSNEDTKFVKQVHLIETFKGAGFLSAATIMGEIGDFSAFSKPKQLFAYFGLDPAVKQSGKFEGTKVQMSKRGSSIARRVIHTLSLQSISISRNGKAKNPVLREYYLQKCDSKPKLVAMGAVSHKVCNMIFAILRDNKPFEIITPQEHIKQYNAAKCDIAA

SEQ ID NO: 146043 - protein, 411 aa, unidentified
MRRVIGMDIHRTFAEVVFWEEGRLRPAGRVSMTRSGLEGFGRGLGKEDEVVIEATGNAMAVVRTLSPYVARVIVANPLQVKAIAHAHVKTDKIDAGVLASLRAADFLPEVWLPDPDTERLRRLVARRNQVVRHRTRIKNEVHAILHAHLIPPCPHADLFGRLGRVWLAQQVMPDDECAAIERHLRELDRLGADLGVLDTQVAQAGSDDPAVKRLLTITGVNLIVAAGLVAAIGDVRRFTSPQKLVSYVGLNPRVRQSGLGLAQHGRISKRGRSHARAMLVEAAWAAAKAPGPLRAFFLRIRARRGHQIAAVAVARKLAVLCWHLLTKSADYQWARPALVASKLRAMELQAGQPVRKGNKRGTAYAYNVKALRDAEIELARHAEKAYERFVSQWQRRGTAKQRTGAAIEERR

SEQ ID NO: 146044 - protein, 374 aa, unidentified
MHRSSIKVKFKYANKLNLILRPMQTQGNELDFSGQNFYCGIDIHKKNWAVTIETDDMPLKTFSQDADPDLLVKYLNRNYPGGNYIAAYEAGYFGFTTQRRLSDQGVKCLVINPADIPTTHKEKDQKRDPIDSRKIARTLRARQIRSIWIPPVSISQDRQLLRTRKQLVKDRVRVKNQIKALLQLHGITYPERFIKAQTHWSKAFIKWLEGIRMEESSGTQSLQSLVSMLQHTRNELVILSKSIKALSEEKRYHDAYIRLKETPGIGGLTAMTILTEVGDINRFRNVEAFRSYIGLIPRSHSSGEKEYKGRITNRKSDNLRPLLVEAAWTAIRHDPTYLHIFSQYKKRMETNKAIVRTARKLANHIYFTLREISR

SEQ ID NO: 146045 - protein, 370 aa, unidentified
MQDRSTYVGLDVHKKMVVVAALFPERQEPVRWEVPNEASALRRLARKLRRDSGDRVLCCYEAGVCGYAVQRLLEAEGVRCPVVAPSLIPVKPGERIKTDPRDALKLAQLLRASLLTEVQAPTPLEEALRDLCRAREAVLGDLTRSRHRLIKMLLRKGIIYRDGRHWTLRHRRWLSRVTFEHETERLVFEDYRLAIDQMEARLQSLEAALEAQAQQEPYRRAVGWLCCLRGVKTLTAMTLLSELHGFRRFASARHLMGYLGLVTSVHASADTMHRGRITKAGNAHVRRILVETAWNYLRQPGVSPALRRRRQGQPAWAVALADKAQVRLHRRFVALTRRGKPYNKAVVAVARELVGFIWALLYREESAQPV

SEQ ID NO: 146046 - protein, 409 aa, unidentified
MMTIFVGDDWAEAHHDVHVMNQSGDELASRRLVEGLQGIGRLHELIAQHADDPTEVVIGIETDRGLWVDALVAAGYRVYAINPLAVSRYRDRHHISGAKSDRGDAKVLADLVRTDRHNHRPIAGDSDLAEGIKVLARAHQNLIWVRNRHTNRLRNALREYYPAALEAFVDLADRDTLAVLAKAPSPTEGARLSVSQIRSALKRGGRQRNLDTRAETIQAALRTGQLRAPADVVKAFAATTRAAVGIIGELNRQISALETELSDHFEEHPDADIIRSQPGLGDILGARVLGEFGDDPNRYADVKSRRNYAGTSPLTRASGTKRVVLARYIRNRRLYNTIDQWAFSSITTSPGCRDFYDHRRAKGDGHHQALRALGNRLVGILHGCLEHRTPYDEDTAWAHRQTTINKQAA

SEQ ID NO: 146047 - protein, 361 aa, unidentified
MKILAIDLGKYNSMCCFYETKTQKYRFQTVATTRDYLTAVFKNHEIDLVVMEACGPSGWICDLCQELGLKTLVCSTNDAAWEWKNVKRKTDKDDALKLARLAMMRQLTRVHVPQHEVRQHRSLIKYRKKLVGRINGIKNTIRGLFVCQGIEIAKGQPAWYSGRDRINSYRKPLAECSMKELWRGQLDLELTQLDALSKQIAAAEKRLEVIAEDHEDIQRLRTIPGVGPRTAEVIVTALDDVHRFKNARQVSSYIGLVPRQYQSGETDRNGRITKRGSRILRTILLECAWVSVRHNDWSRETYERIHGGQKTRKKKAAIALARKIAVVAWAMLKNKTDWDPEKAGLLIPTTVQECPSSTGPL

SEQ ID NO: 146048 - protein, 346 aa, unidentified
MEHYAGIDVSLELSSVCVVDAQGKIVKEAKVASEPEAVVAFFEALGFAVKRIGLEAGPLSQWLHAGLKEAGFETVLLETRHVKAALSAMTVKTDRKDARGLAQLLRMGWFQQVHAKSMASQEVRALLVGRKQLLGRLIDVELSIRGILRGFGLKVGAVTRKGFEARIRELVTGQATLERIAEAMLSARAALKAEYEKLHKAVLAIVREDAVCRRLMTVPSVGPLVAITYKSAMDDPSRIAKSKAAGALFGLTPKKYQSGEKDVTGGITRTGDEMVRTALYEAANVLLSRITRFSKLKRWGMDVAKRRGSKRAKVALARKIAVILHRMWIDGTTYRWAEAKPFAAQA

SEQ ID NO: 146049 - protein, 357 aa, unidentified
MAYAIDAGEVESLGKIGTTQTEIDRLCKRLQSKASHVRVVYEAGPCGYGLHRQLTQRGFESMVCAPSLIPRKPGERVKTDRRDAAKLVRSLRAGDLTAVYVPGVEDEAFRDLARAWAAVKEDLRQARQRLKSFLLAHGVGYTGRANWGESHRRWLSEYSFANAWQQLAFEEHRRTIEDRLVQCGRLELALRDAVVNWRFYPVVLALQAMRGVQFVTAVGMVSELGDLSRFTHPRQLMAWLGVTPSEHSSDGKRRQGSITKTGNSYARKLLVEAAWSYRHMARVAPEIQQRHEGLPKAIIDRAWDAQLRLCRRYRKLVARGKNANIAVVAVARELAGFIWDIARLAMALALPRSGQSI

SEQ ID NO: 146050 - protein, 332 aa, unidentified
MYYIGMDLHKQDLVMAVEDERGPVGRPRRIACRDVDAIRAAVGRWRPFRAVVEASASYRWLYDLVSRQGEMVLAHPLRLRAIATARAKTDKLDAALLARLLRANLIPAAYVPPARYQRLRDLTRTRARLSYGATLAKNQVHALLARANVHPPLKTLFGPRGRRYLAGLDLGLSGNLARDELMRRLEHYGREIAAFDAHLEAVASEFPEAEALQVLHGIGRYSALLVVAEIGEPERFRNARQVGAYAGLTARVHQSGGHEHRGGISKQGSRWLRWILVQAAIKLVRRDERLANFYQRVRRRAGRNVARVAVARKLAGICWVRLRRWQREQTAA

SEQ ID NO: 146051 - protein, 375 aa, unidentified
MGDYSEAFVGFDTSKLRNAVAIADAGRSGEVRFVGEIENTAAATAKLVRKLSAKYQRLTFCYEAGPTGYGLHRQIKDLGFECVVVAPSLIPKRPGDKVKTNRRDALSLAKLLRADELTPVWVPDGGHEAMRDLTRARETAMLDLRTKRQHVSAFLLRLGRPYPESRKTWTKPHVSWISSQNIEHPQQRLVLEEMMLAIRQAQERLARLEQAIAAAVPEWSLAPVVTALMAMRGIDLISATTLLAEIGDLSRFRTPTELMAYLGLVPSESSTGDTIKRGPITKAGNRRARRMLVECSWSYQHPPRVGQAKQPKVDAAPPAVREIAWKAQCRLYRRYRTLIRKGKLKTVAIVAIARELAGFIWAVARAVTTAPVVAV

SEQ ID NO: 146052 - protein, 310 aa, unidentified
MDSIIIGIDVSKDRLDVAVRPSGEVFTVERNAAGLEKLVARLQELSPRIVALEATGGFETVAAAALAGAALPVAIVNPAQIRAFAKAIGQRAKTDPIDAGVIAHFADATELEPRAVPDEATRLLGDLVARRRQIVEMIGAERQRETRVTVRRLKSSIARLLKALERELASVDADIDDAVRGSPAWREKEDLLASVPGIGPVISRTLIAELPELGQLDRKQIAALAGLAPFTRKSGKWRGKSFIGGGRSSVRAAVFMGAMVAKTHNPVLKVFFDRLVAGGKPRMQAIIAVARKLLTILNAILRDRRPWQPA

SEQ ID NO: 146053 - protein, 656 aa, unidentified
MSRSCQNRRRAPARTATSQDAGCTPHAAAAPTPVSVPDTTDPKASRSAAAPDDTPLAIGVGIDTSRYGHHATFLGADLQPAASDLKFGESAQGYQQLQERLAALRKKHGSVHFHFRLDVAGRYADNLLAFLHGLPEPRTISCGDPQRNKNYRAALFGHKKSDAVESTAAARYALTEKPKPLPLAPPAVHQLCQIASRLESQTRQGTRLINQLHNLLARAFPELALLVKDLSAGWVLALLDRYPTAAKLAAARAASLEKIPYLPQEHIAALLEQARTSVASLTGPVAEELVRDLVGQLQEAHVRHKALEKLLVSAYRQLPEPNHLDSIIGFGEVTAAILTAKMVSPSRFVEPGKLVGYFGIFPVEASSGIDREGQPRAPKRLVMSPRGNDLVRRYLYMAALSAIQHNPAVRPLYQRLRAKHPDKPGLALGHAMRKLLHLALAVWQTGKPFDPSHYDWDKPAHRQPKADLPAAKAPETHPEHTQESAQAAGHKNPVTTPVRSVVTAACATLSVTEAAPGGKDSVAAGRAAAASVDRSAQTNPHPRTADPAPWIDFAHLKSQLPLQRVLEHLNLLASLRGRSSQRKGPCPVHAPRGEGRTFSVNLDKNLFQCFDPPCGCKGDVIDLWAALHQLPLRDAAVDLIQTFNLEPAPRTEKRHG

SEQ ID NO: 146054 - protein, 380 aa, unidentified
MAKVVSWAGLDVHAAKVVACVVDAESGEMTVHRLPGDTAKVVAFCAALPGATRVAYEAGPTGFGLARALQAAGVECVIAAPGKIERPAQDRVKTDQRDAERLVRLLMINALHPVRVPGLAEEALRDLTRAREDLRGDLMRARNRLGKLLLRYDVRYEGTWDRWTDRHRAWLAKVELPERGAQATFLDYLGAITALEIRRETLEATICELAPQSRWATDIARLRCLRGIDTLTAVGLCAEVGDFARFERPAQLMSYLGLVPSERSTGEARRQGAITKSGSSLARWLLIETAWHYRHPPRVGAKLARRQQGQEPAVIALSWKTQQRLYQLWRGLGHKRGKRRQLVVVAIARHLAGFCWAIVNLDPAPNDTPANDEALTPVTV

SEQ ID NO: 146055 - protein, 355 aa, unidentified
MESVKYIGLDVHQSTISVAVLNSEGKLLMQLVIATKATAVLDLLQGLRGDLHVTFEEGTHSAWLYDVVVRRVARVVVCNPRKNALLKSGNKSDRIDACKLAELLRVGMLSPVYHGEQSTRTLQHLVASYSALTEDTGRAIRRIKALYRSQAIACAGKKCLGKRHRAEWMERLSDSGQRRRAEWLYEELDAVQGLRRQSRQAVMVECGKYQAAKLLRTMPFLGPLRAAMLIARVQTPHRFRTKRQFWTYCGLGLETRSSADYVAKDGQIVRRRKPVYIRGLNWNYSHELKNVFKRAATTASAMEGPFREFYETRVAQGMVPAMARLTLARKMAAIALILWKKGETFEAEHLKLQAA

SEQ ID NO: 146056 - protein, 396 aa, unidentified
MDTAVYLGVDIGKSGHYALAVDAAGKPIYQTAVPNDEAALHKLVKWAHQHQAGLVVDQPGGAAALLLRLCWQSEVRIGYLHGLAMARARDFYAGESKTDPKDAFVLADVARAHPNRIVWLESSSEALAHLELLCGYDADLRGDANRLTNRLRALLVTHWPALERAFGERLDSHGVLAVLQQYPSGPAVRDAGVEQLTAALKAQRVRRPEAFAKQLHQAALAQTVTITGSQTAARLISELAGQLTAILARRAELEKDIERGFFALPEAAILRSLPGIGPRLGARIAVEIGSICRFRTPGHLAAYAGLGPTPWKSGTSINANMPSRFGNHRLKNALFLAAFASLRHEPSRTYYDRKRAQGKRHNQAVLCLARRRVDVLHAMLSRGEPYRAPTPLPAAA

SEQ ID NO: 146057 - protein, 353 aa, unidentified
MELYVGLDVGLEETSICVIDKDGKNVRETKVATEPAAIRSALEGFADRLGRVGVEASSLGMWLHRELHPTGMPIIVVEARHMHVSLSTMRNKTDRNDARGIAQMMRLGWYRAVYVKNIDMQKMRTLLSNRKLLKRKLIDIENHIRGALRTYGLLVGKVSHSSYEARIRELTKHTDYVFTTMIETMLEVRKAVYDGYDKLHRVLLQVVRHDTVCRRLMTVPGVGPVTALSFKVGVDDPLRFSRSRTVGAHFGLTPKRHQSGTSIDFEGRITKQGDVNVREALCEAAASLLMRVKTWSALRAWGLRIAKRTSMMCAIVAVARKLAGVLHRMWIDETDFKVGFGAKITQRVKLKPA

SEQ ID NO: 146058 - protein, 304 aa, unidentified
MVTTIGIDPHKATHTAVAIDESETVLGEITVPADRYQTKKLIDWAAELDGDGRLWAVEAAGGLGYLLSQQLIAGGEQVVDVPAVLASRVRLLGSGRSDKNDPNDARSVAVAALRQPGLAVVRGEDHTQVIRMLAKRHLELTALRTQAACRLHAVLAQLKPGGMAPRLSAKQASRMLGGMRTLDAVGNQRRLMARTHLGDIRRYDRDLKANRTLIRQAVATTGTTVTDVYGVGPVVAALLIGYTGDIGRFASADHYAAYNGTAPVEVSSAGKKRHRLSMRGNRVLNHAIHMAAVTQIRHDTAGRI

SEQ ID NO: 146059 - protein, 331 aa, unidentified
MYFSQFIGVDISKDTLDAAVYPAKDKKMDFLHFDNTQKGLTLMMSWLKQRGIKATEMVICAEHTGVYTNPLIEFTDKKGLALSLNSPLDIKRSMGIARGKNDAVDAGRIAEYAHNHKDKLRLYEKPSDNIRKLQYLLTERRQYMRQRTALINLDCAMGKYGTNETRSRSESARHHCEKLVKKVEDQMLAIIYSDSDVKRNYDLISSVKGIGLINAINTIVYTNNFKAFETPRRYACYIGVAPFDHISGTSVKGRTQVSKICRTQQKAELSMAARSAIVSDPGLRKYYLRKMKEKGGGKDAHGVVLNAVKFKIILRMFAVVRSGEPYKVLNY

SEQ ID NO: 146060 - protein, 423 aa, unidentified
MYFIDNQRRIFMKQHVIEDVNIMPQLDRACGLDMHKDKIVGFISCKDGSNQEFREFGTYTCELKEIRDWLQENDIHHCLMESTGIYWMSLYAILTEACIEVIVANPVHIKQMPKRKTDRKDAKWLCTLLLHGLVRPSFMPDSTQRIIRDYCRNRLFYTWQLNRIRNRLLKILESNNIKLRSVISSIHTLSAMDMIRLLAKGVTDQEQLLNCARGRVKAKKEQLIKALDGTLQTYHHTQLQMLLEDYDHVQKQVDFLDKSITEIISEHYAQAFECLDSISGIGVKSAEIIISEAGKDMSRFPTADHFTAWCGIAPGNNESAGKRKNTAIKKGNSYLRVAIVGAAWAAVRMKDSYWHALFDKLRKRMKAQKAIVAVARRLLKVVYKTLETLTVYQEKGIAHFVDLQAKAALYYAAKLSWPQTDNI

SEQ ID NO: 146061 - protein, 408 aa, unidentified
MNAVGIDVSKGKSMVAALRPMGEVALLPQEFLHTEVGLEQMAYAILALGEDTRVVMEAIGRYHEPVAAALHEYSIYVCVLNPLFIKQSGGGSIRKVKTDKADAMKIAKYGLDNWVDLREYTPMDTIRQQLKLCSRQYNLYMKTVVSLQNNLISLTDKTFPGVNELFSSPERTDGHQKWVDFVMTFWHCDCICRVSEKAFTERYQKWCKRKGYHFSAEKALNLYASSCGHFTTLPKNDNTKLLITTAAQQLLSGKMTLAALRAEMTRIAKQLPEYDTVLAMYGVGETTAAQLMAEIGDVRRFPRRSSIVGFAGVDPGVDDSGKHSTKSVPTTKRGSPHLRKTLYQIICTYLKKSPEDEPVYQFLDKKRTEGKPYFVYMTAAQNKFLRIYYARVKERLEAFDAQQNSTHS

SEQ ID NO: 146062 - protein, 439 aa, unidentified
MNKRRDRVCGADVHKDLIVATITGDDVLPIQENFGTTKAELKRFRNWLVANKCEQVAFEATGVYWMPIYDALSKTIDTIVANPLQIKTIPNDKSDSKDSNRIATLCLNGQIKRSRVFTDEDRDLRMMTRARSGYVKTRTQFRNRIHKYLSSSGITLSSTMDDMFCKSGRYILDGLAKEKPLEEILKGIPSGKIRKKKDEIRAALENTLNDTNRMLLTDALEILDNLESKMEKLSLEVLKKVQQKSKDLAIVMSIPGIGFVSGSVILSEIGNYRDFQTPDQLAKWCGLNPGENESAGKKKKCGITKRGSKHIRVVLVQAAQTISNMNKTAMSRFFQRLIKKKEHNVAIVAVARKLICLIYHLLINQELYQEDDGRKKRSSQDKSCHAPSFKEEHLTDRVAAIVDAFYHLKEGSRKNALMREIADISGIKVGQKRPSKGGG

SEQ ID NO: 146063 - protein, 347 aa, unidentified
MKENTTVVAVDIAKAVFQLAISESPDQPIRDRRLRRSEFLAFFEKLPQATVAMEACGSAHHWAREIQALGHTVELIPPHLVRPYVPRTKTDRADARAILEARRNRDIHLVPIKSVSQQVLGAMHRFRSGWIGTRTAQVNTIRGLLRELGILIPVGVEHVVPQVRLLIEDADSQVPDLLRPVLAAACDEVELLDRRIKQTERQLETTSEVTPHIATLRSIPGVGLITSTALTAFVGDVDRFKSGRRFASYLGLTPNERSSGTKRRLGGISKRGDRYLRTLLIHGARSVICHAKRAKSHDHLRAWVLALQSRSRHNKAAVALANKIARIVWATWKNGRPYESREVATAA

SEQ ID NO: 146064 - protein, 334 aa, unidentified
MEEAPSSSSNLAFSLGMGARKEALEVALRGEEGAIARTTVANDSDGHDELLRWLSGRGAGPEETSVCMEASGDFEKVIAQRLYEEDYRVSVVNPRRIKGYASSQLQRTKTDSADAALIARFGWRETPRPWEPPTAAESRLQELTRARQALKKEKTRTQNRLDEAEDEAVRRAHRGLLEEIERQIEDLEEEIEEHVEENPKLERQCSLLETIPGVGLQTAAIVAGELGSPERFESARQAAAYAGLVPRHRKSGTSVRGSPQMSKVGNGRLRRAMYFPAMTALRFNSAVKAFGERLKKRGKKKMVVIGAAMRKLLHICYGVLKSGRPFDPSLHPGT

SEQ ID NO: 146065 - protein, 339 aa, unidentified
MKLTPVGIDIAKNVFQVHHIDEETGEIVNKPIKRAKFLEYFVNRAPCLIGMEACGGAHHWARQLTRMGHQVKLMPGEYVKAFNIRNKKDPADARAIRLAVQQPSKPVAIKTEMQQAMLALHRTREQLVKFRTMQINALRGLLTEYGEVMAKGRAALDRAMPDVLARVADRLPAALIDTLREQWNGLTGLDEQIATIERRMREWKKEDQEVKAISEIPGVGLLTATAAVATIGDAKAFRSGREFAACIGLVPKQTGSGGKVKLHGISKRGDTYLRTLLIHGARSVITNAKQPDPWIEQMKKRRPLNVVVVALANKMARTIWAVLAHDRSYQRGYVSTKPA

SEQ ID NO: 146066 - protein, 315 aa, unidentified
MTECFIGIDVAKAHLDVAIRPLGTSFQVANDEAGFSQLVSQVASMSPRLVVMEATAGYEREVVAALMTAALPVAVVNPRQVRDFAKGAGKLAKTDALDAAVLAHFAEAMKPEPRPRPTKETEAIKDLVTRRRQVVDMLTAEKNRLHTAPKGVRPLIKKHIRWLEDQCEELDGQLAEEIAQQANWQEKDVLLRSVKGVGPVVSLTLLTSLPELGTLDRKEIAALVGVAPLNRDSGLFRGQRRIWGGRAEVRAMLYLAALTASRYNPVIKDLYDRLIARGKLKKVALVACMHKLLVILNAMMAHSQSWDPARAGTGR

SEQ ID NO: 146067 - protein, 445 aa, unidentified
MVACLREVVVTVDIVHPRVAGIDVHKRVVWVAVRLPGPGLGERTVTVRGFKTFWRQLRQMAGWLAELGVSDVAMESTGVYWWPVYHALVAAGSIEVCVCNAAHMRNVPGRKTDIRDCQWIAELHEHGLLRPSFIPAAEVAALRQRTRYRKKLIEHRAAEGQRLSKVLEDAGVKIDSVASELLGVSGRQMIEALIAGERDPARLAGLAKGRLRAKLDALELACDGRFAASHAQMCRLHLDAYDRLTTQIVTLDVLVAEAAAPFEAVIAKLMTIPGIGRRIAEVIVAETGAQMTRFPSSAKLAAWAGLAPGSNESAGKRKKAAARNGNQHLRAAMVEAAWACSRTATRPGARFRRLAYRFGKLNIKKAAVAVAHTLLSIAWAVMKDDADYAEAGADYYDLRDRRNHEHLARHHQQALTRLGYQVTLTPPGDGPPPGTPPDQPQQPAA

SEQ ID NO: 146068 - protein, 329 aa, unidentified
MDSSRSLGIMVPARVYGGLEHNEWKESEMNATTVAVDLAKNVFELAVADEQWRVAERHRLTRTQFERWFNNREVKLVVMEACGSAHHWGRVLRARGIEVRLLPPQYVRAYVKRNKTDAADAAALLEAARAADIKPVAVKSVEQQALQALHRTRSGWMASRTGRINMLRGFCREFGLVVPEGAARGLAQIARFLADERSGLPGMLRGSMRLLLEEIRLMEARIQQLELDLVELAQQSPACQVLQSVPGIGLLTSTAMVAAVGDPRSFDSGRRYASFLGLTPGSSPPAGTATSGASPSAGTATSGCCSPTGHARCCAQLPWRAGAAGSSTA

SEQ ID NO: 146069 - protein, 345 aa, unidentified
MTIVETCPITGGVDTHLDVHVAAALDANGGVLGVESFPTTPDGFRALHNWLCCFGSLQRVGVEGTGAYGAGLARFLRVVGVAVVEVDRPSRQARRRHGKSDTIDAIEAARATLSGHARAVAKTADGDVEAIRVLLIAYRSGRDARIKCLNQLRHLGFTAPDELRERFREVTVTSLARDAAALRPNPNGDGVTYATKLAMHTLARRVLDIDADCAHLHGELTRLVRATAPSLLQLPGVGVHTAALLLAAAGDNAERITSEAAFAHLCGVAPIHASSGKTVRHRLNRGGNRQANHALWRIVFTRMGSDQRTRIYVERRLAEGRSKPEIMRILKRYVAREVYRHLPRR

SEQ ID NO: 146070 - protein, 377 aa, unidentified
MSIVMGLDQHRAQITAEWIDLATGEVSRGRVRPADRPGVRRFLARFAGQPLEVALEATTGWRFLVEELRAVGAVVHLAEPAETAALRGNKKRAKSDRADARHHRELLLAGRLPESWIPPDHILDLRARARLRHTLIEQHSHWQQRIQAVLYHHGCPHRRQLMVGDGRQWLDAQPLPAAARQQVTVAVAVIDALEREIAPVERELRGYARRQMGCQALIEAYYGMGELTAVTVVAELGDCRRFANSRDAVRYSGLDVTVYQSDRHRAPGHLSRQGPPALRWALYEAAQVARRGERSPDRQWYLAAREQIGGNRACLALARKLLRRCYHTLRDLGDEALAPPVEQAKSDRGSAAGRRASSGHRLTNAPATHEAAGALAA

SEQ ID NO: 146071 - protein, 304 aa, unidentified
MSKAKLDLAVHPDGRAWSEDNTARGIKAIVGEMKRLKPETIIVEATGGLERMLVAELGVADLPVAVVNPRQVRDFAKATGRLAKTDIIDARVLGQFGEAIRPEIRPLPDEQTRELADKLARRGQLVEMQTAEKNRHQNAPKSTKDGIQKHIDWLEKRIRDLDDDIHRMLRGSPLWRERDDLFQSVPGVGLITSTTLMADLPQLGTLNRKQIASLVGVAPHNCDSGQKRGRRMIWGGRARVRAVLYMAALCGTRFNPVLRSFYRRLVDSGKPKKVALTACMRKLLTILNTMARTGEAWNPAAATA

SEQ ID NO: 146072 - protein, 344 aa, unidentified
MDISVLGIDLGKNVCSVVGLDASGAVVMRRKVRRETLIALAEKLPPCVVGMEACCGAHHLGRVFAGHGHDVRLMSPEYVRPYIKAQKNDDRDAEGIAEAATRPTMRFVELKSQDQLDMQTLHRSRDRLVGERTALINQLRAILLERGMVAPQGKRKLEQFLAVLMDEQGGAGLSPRMIVLVADARTQWAEIDRRIAAFDAEFVRWVKENEEARRLMTIPGVGAIVASALVAAVGQAESFERGRDLAAWLGLVPRQFTTGGKPKLLGISKRGNKYLRRQLIHGARAALPYVAERDTPLGRWAKELMSRAHHNVAVVAFANKLARIAWAVLRRGERFAVTGMPVVA

SEQ ID NO: 146073 - protein, 340 aa, unidentified
MRIAKLSESFETSKSVKEYDYYIALDWSLASMAIGHMSRRDESPRVFERPSVLKDLKAYLVSLKGRKIMTFEESGTAHWLYLELIDCVDRILICDPFQNRLLCHGPKTDKIDAEKLCILLRGGLLKEVYHSDSTLYELRSLVSAYEDVVRAGVRTLNQKEALALGHRDTGKTAAFIKETLDENINLYRRTKRLYEHHFSEMARRNKLVNHQRAITGIGTIGAVKIVATVVDARRFLNIGKYYSYCGLVKHEKLSGGRNYGKRKPRYSRILKSVYKTAAIAALRGVNPIREYYDHLLARGVAEHNARHAVARYIARISYGMLKSGTRYEPNRWKERTAQLI

SEQ ID NO: 146074 - protein, 320 aa, unidentified
MTILTSPTVIGIDVAKAEIVAYREDEKTTEAINNDRETLGRWLKALPAQSSIALEATSIYHLDTVELAHEMGHRVYVVDAYRLSHYRESIGQRAKTDPCDARLLARYLSSEQERLRLWSPPPQAYKVLKSLLHRRAELINVRVGITLSWSSEPLLKDELARQLKSFKQAEQAIQKLLHKVSKEAGITENIKRCKAIEGIGELTAMGLATAFMRGHFANGDAFIAFLGMDLRAKDSGKKNGPRHLSKKGDTELRRLAHNAAMAACRSPIWKPFYESYLARGLAKTQALVILARKLCRVAFALMKNQSEYQPNLRLQGSPAT

SEQ ID NO: 146075 - protein, 370 aa, unidentified
MSKTIVAYRSFVGVDLHKCTVTLVAVDANGEEIARLKAPTKCIGKITAWLRSLPGPVWMAVEACPFVEWFIDRFQCCVFRMDIADATELANRRGKRRKTDPNDAEDVALRLARGECPLGFIADEELMQLRKLGRHWWQLSRLLSRTKHSMKSMLNAANIQGPSKFDAAGGQRWFLAHGHLLKPAQRDAFADFLDILGLVERQREQLRRKIILANRSESFTQITELLKTVPGIDEIWACIIAAEIGPFDRFPNADALQFWAGMTADLKESAGRTQSGNITKAGSRTLRWALCKAAVTLCRSDAKQEATRQRLIRRVGGVKAKANVAMGRRLLGILYAMVRDGKPYENAQPTAHNRAANQARAARKRRKEAA

SEQ ID NO: 146076 - protein, 342 aa, unidentified
MGQFIGLDVSVEYTSICVMDGSGTVLHESKVKSTPAAISRALHRHAPEAERIGIEAGASSSWLCRQLREAGHPVIHMESRHAHRGLSMRLNKTDKNDARGLADLMRVGWFKSVHSRALDSQYTRSMLLARKRLVDTKRQFENQLRNIMKVFGCMLGSTAGRGFVQRVETACKNDPVVHRLCEPILRLVRELRLQINAYERQLRSIARHDETTRRMMTVPGIGALTALAFKSSIDDPHRFRRSADVGAFLGLTPRRYQSGEIDWTGRISRLGDGLVRTYLFEAASVLTGKIERWSRLKAWGVRLARRVGTKKARVAVARKLAVVLHCIWVDGTEFEWGQAVPG

SEQ ID NO: 146077 - protein, 370 aa, unidentified
MGNASTLHVGLDVHKDSIAVAYAPADSGAAPVPFGTIGTRQCDIDALIRKLQSKGAGLVFVYEAGPCGYWLYRYLTKKALPCFVVAPSLIPRKPGDRVKTDKRDALTLARLARSGDLTPVYVPAVPDEAIRDLARAREDALQDLNAARFRLKALLLRNDIRYTGRANWSAEHLRWLARLILATPAQQIVFQEYVRTVTERTELLQRLEAELLEQAKTWRLAPVVAALQALRGVQFTVAITTIAELGDLTRFDTPRQLMSYLGLTPSEYSSGERRRLGGITKAGNGHARRVLIEAAKAYRHRAKVSEAIQARQQDLPAAIRDIAWRAQVRLCGRYRRLLARGKHPNTVAAAIARELAAFMWAIAKTQPLPA

SEQ ID NO: 146078 - protein, 334 aa, unidentified
MNFIGMDIHKKTTTAVAKDKQGTILNEARFDNTKQNFKNFLKDFSPEETKIVIESTCVWQYIYDMLEEYGYEVKLSNPTKTKAIACARIKTDSVDASTLADLLRGDLVAESYIPDKGMRKLRDVVRQRKTLVKGRTQIKNKIRAILNMQGIKIPFKTLCDQAIKMIIEEIKEVSIKTVIVSYINILEQYNYELKYIEERIKDIAERDKQAQLLITIPGISHIRAMEILTEIADISRFENSSKLCSYAGLVPSIKQSGSTLRFGRLIQQSSKTLKGVLIETSWTMIRMKEPNQLQFFYKKLCKKKSKQKAICATARKLCCVVYALLKKNEEFMIL

SEQ ID NO: 146079 - protein, 413 aa, unidentified
MEVLYARCAGLDVHKDTVVASARLATGRDVAVEVQTFATTTAGLLALSAWLAERGCTHVAMEATGVYWKPVWHILSDGDFTLVLANAAHVKNVPGRKTDVADATWLADLLAHGLVRASFVPDAPTQALRALLRTRKQLVRERASHVQRLQKTLEDANLKLASVLTDITGTSGRAILAALIAGETDPATLAALAHHSVKAAPEKMAEALRGRVTAHHRFLLRLHLRQIEALEAAVAEIDREVEADLEPFQAAVRLLSSIPGVSTLSAEVIVAEIGTDMGRFPTAGHLLSWAGLCPRNDESAGKRRSTRLRKGAPWLKTTLVQCAWAASRRKASYLQSQFQRLRARRGPKKAICAVAASILTAAYHMLRDGAFYQDLGPDHFHRRAGSNRTMRLVTQLTALGYTVQPPPREPVSC

SEQ ID NO: 146080 - protein, 308 aa, unidentified
MPLWIGIDVAKDTLAVHVLPLDQLLSFPNTAQGHQRLCDHLAGHCVGNALLEATGGYERAVMTALATAGIPVTRINPRRARAFATALGTTAKTDPLDAALLARMAQLVQAPAPVPDPLREQLRMLVQRREQLVQQRDDERRRLHQATLAMVRACLIEQIGDLRRRIQRMNQAIKQVRCQLDDALAHALGTVPGIGEVTTASLMAYLPELGTLDRRQIAALVGLAPYNVDSGQHCGKRRIRGGRATIRRVLYMACWSVVRTQASFKERYQQLRARGKPAKVAITACMRVLLIRLNAMARDRTPWREVIG

SEQ ID NO: 146081 - protein, 309 aa, unidentified
MTLHPNYIGCDISKHHLDFHDPSTRRSWRIDNSEVAIAALAGTLDDSSVFIVMEATGGYDRLLRYGLAERRVRFCRVNPTMARRFAQARGRRAKTDALDAAMLAELGRLFQPAAEPDPCETRDRLTALARRRDQLVAMRAVEKTRLQEAGDADIAACIRDLIAHLTTKVTQAEAAIATLIKEDNRLKGEWRLLTSAPGIGPVAATTLLALMPELGTASPKRIAALAGLAPYNHDSGMLKGKRCIAGGRRRVRKALYMAALSAIRTCSRMNDFYKRIAERAAAKKIAVIAVARKLLTCLNAMLRDRKSWA

SEQ ID NO: 146082 - protein, 411 aa, unidentified
MTKEDFIYVGIDLHKETHTAVMIDCYNNKLGEITFPNRPADFPKLVTKVKKCNTDAKEVVYGLENAYGYGRALAVWLIDKGYFVKDVNTAISHRQAKHRGAMYRKSDSDDAEAIALATLNMLDKLPDACPNDAYWSLGQLVHRRDNIMKQRTRLVNQLHEQLCIAYPSYKQFFNDISRPTALYFWEHYPSRKYLKGKSVEDLRAELVPVSHNKCSTKTCEKILDAVASDKVKNNAYQDARDMVTLSIVSDLQHYDSQLAEVDKMLEQMYKMLGCTLTTIPGVNVITAVKILAEIGDIKRFSNANKLAQFAGIAPLHLSSSGKGKDVATKQGNRRLQATIYFLAIQMVQLSSKGTPRNPVVRAYYEKRKAEGKTSQQALICISRRLISIIYGMLKNGTEYRMPVVENAGEKL

SEQ ID NO: 146083 - protein, 311 aa, unidentified
MNNTIGIDISKDTLDAHRLADGQHKQFLNGKTGHAQLVKWIGKQSDPLIIFEATGAYHRQLERVLGTHIIPFVKVNPKQARRFAQASGKLAKTDRVDCEILAKMGAALQLMPKPFTAENLYDLKELLSARRALIKDRTAAKARKATVINALIKQQLEKRLRQIKNDIAKIDALMLDVAREDQYMSERLDILFSIPGIGVITALMILVDMPEIGALNNKQVASLAGLAPISQSSGKWMGKARIQGGRPNLRNAIFMPALVAIRHNADLKTKYDQLVTAGKEKKVAITAVMRKLLVLANALLRDNRKWAEKAA

SEQ ID NO: 146084 - protein, 406 aa, unidentified
MTAVMIGVDPHKGSHTAVAVSTAEQPLGKLRVRASADQAGRLVEWAAKWPERTWAVEGAGGLGHLLAQQLVAAGELVLDVQPKLAARVRLLDAGDSNKNDPNDAASVAVAALRSRARRPVRADDHAEVLKVWSRRHRDLGRAKNQAACRLHAVLCELVPGGVPEEITAAQATRILGSAEPYGAAGQARLDLAAEILADMRRLNQQMLESKKKLASAVRASGTSLTEVFGVGPVVAATVIGDVADVSRFASRDHFAAYNGTAPIEVSSGNRKIYRLSRRGNRRINHAIHMAAITQIRHAHSDGRAYYEKKVAEGKTHKEALRSLKRRISDAIYARLRADARQAASSTNKGPGGQQGNDTESSAAGSHPKHRLFGQATPEPDPRLRPATPASPIMPPEPASKKLRRSP

SEQ ID NO: 146085 - protein, 430 aa, unidentified
MKSNTQNAKIEAITEKTLVLGIDVGSETHYARAFDYRGIEYSKKPFKFSNTEAGFATFKEWILDLKERHEKDKVVPGMEPTGHYWFNLGKFLQDNEMKPVLVNPHHVKKTKELDDNNPTKNDRKDPKVIAGLVREGRYMIPYLPDGVYADLRTASNIRFQLQAELTRIQNRISRWFNIYFPEYKTVYGKPDAKSGILILKAAPLPEDILTLGIDGVNQIWRDAKLRAVGKARAKTLIEAAEHSVGSKEGAVAARMEIRMLLEDYESRSIRLQEVMTLIEGLVKQIPMAEKLLEIKGVGIRTVSGFLAEVGDISRFNNPKELQKLAGLALVENSSGKHKGETTISRRGRKRLRYLLFEVAMSLVAKNPEFRELHNYYTTRRLNPLKKMQSLMAIAAKLIRVFYVMLTKGVNYDPKKMVNDIKRPAVYLQTA

SEQ ID NO: 146086 - protein, 330 aa, unidentified
MLINVGIDVGKESLDLCILLDKTTGKMKSKKFKNKKEGFDSAFEWITKTTCNAPGKTLITMEATGVYHEGVAYYLYAQGFQIFLSNPGKAKKFAQSLGLVHKTDKSDAAMLAKYGSIQLDNIAFWIPEDDDVRVIKTLIRRLNALEKDKLRESNRLEASTISDAAERVIQSTVYLISVLDGEITEIQHEIDRLISCNPEMNKNRELLLSVIGIGKVMARELVYLFSAKKFTSAKQVAAYVGLIPRLNESGVFKGRSSLSKSGPSRIRSKIFLAAVCAGTHNPDIKAQKIRLTHAGKTKMQALGAAMRKLIQICYGVIKNQTRYQPQIVLI

SEQ ID NO: 146087 - protein, 483 aa, unidentified
MEQALSDHADVRNGSVQGHQAESEELRECGAGIGCWGRRTQMNLFNTRRWLGQPRSRLGVSQSTVRRALRGSTVTIGLRPYVGEGSWGLVGPGPRSADSWIIPEVGSGCRHALEVLVFTERTAVGLDVHARSVRAAALDTVTGELVQARLAADTSVIVPWVLGVQERFGVAAAAYEAGPTGFGLARAIEQVGVRCVVAAPSKILRPAGDRIKTDAKDAILLARLLRMEELTAVRVPTPAEEAARDLARAREDARTDLMAARHRLSKLLLRHGLVYDKGAWTGVHDVWLRRVRREGLLGAGLGTLTAFDAAYDAAAAIQARKKRLEDAIEEMAADSQFTAVTTRLCCLRGISTLTGFALAVEIGDWDRFTGATIAAYLGLVPSEHSSGESRALGPITKTGNTHARRLLIEAAWHHKGSYRPGKTMKARWAKAPAPVAARGDAGNRRLHHRWQVLAAKNKKHTVANTAIARELAGWCWSLATMDT

SEQ ID NO: 146088 - protein, 371 aa, unidentified
MKKSSMFIGLDVHKDSIEIAFAEAGRDGEVRSYGGIDGTLDALDKVIRKLVSKGCNLHFVYEAGPCGYDVYRHLTAQGFDCVVVAPSKIPRQSGNRIKNDRRDAQMLARLHRAGELTAVYVPFVEDEAMRDLTRAREDAKAVERKAKQRILAFLLRHGHRYSGKSPWSRAHFRWISILKMPHPAQQIVLQESLDALAECTRRVDRLTEQIQTLSPQWRLFPVTQALQSMRGVSLIVATTTIAEIGDLTRFGRPAELMSYLGLVPSEHSSGRTTRRGSITKTGNGHVRRVLVEAAWAYRLPARVSRKLLIRQEGLSQEVCAISWKAQLRLCARYKRFTEKGKAHQLVVTAIARELCAFMWAIAHEVQDPVKM

SEQ ID NO: 146089 - protein, 343 aa, unidentified
MGEVSTIGLDIAKSVFQVHGVDVAGVVVIRKRVSRARVLEYFGKLSPCLVGIEACPSAHHWGRELQALGHTVRLIPPSYVKAYLKRSKNDANDAAAICEAVTRPSMRFVPIKTREQQSALMLHRTRQLLVRQRTMLSNALRGHLAELGIVSAKGRNGTAELLRIIADDRDSRVSAAVRGILNVLARQYGAIGAEIASIDKSIMALHRGCEASRRLAEIPGIGPVGATALVAEIGDWNTFSSGRSLAAWIGLVPKQHSTGGKERLGSITKRGDRYLRSLFTAGALAVIRYAKIHGTKHRPWLTALLARRPTKVAAIALANKIARMAWAMMAKGEHYREPAALAA

SEQ ID NO: 146090 - protein, 336 aa, unidentified
MNTTTIGVDLAKSVFQVSVANQAGRIVSRKRFSRSQFDRFLANHEPATLVMETCSSAHFWARKARAYGHTSRLIHAPYVRPYVRRNKTDSADADALVRVNQDPELKPVPVKNETQQALQGLHRIRRQYDKTRKQRISLVHGLLAEFGLTLHSTTLLASRLRQPTEQVPEMLRQALLPVLEEIADLERRLKQIERQLTEIGKRDPVVQRLMTIPGVGLIIATAMVASVPDIHLFVRGRQFSAWLGITPREFSSGHVRRLGSITKKGDPYLRTQLIHGARSALNAAARTNEDERSALQRRALEIKARDCHNIAAVALANKMARIIWCVWTRDEPYQCR

SEQ ID NO: 146091 - protein, 345 aa, unidentified
MQELFYVGLDLGSSRCYQSVIAADGTLCGSRPIPTSEQHLRSAFAKLNGAVQVHLEAGELSTWVASIIEPLVQPVIVSHPRSLAWIGKDSQKDDKIDAKKLAELLRLGRVHRVFYQTDNSRQTFKYLVTHYEQLSREQARFKSKIKARLRTLGIIRKDSRLFSSSGQTALLDKIEAVSIKQMLTQSFAVLNQMLASLEQAKTAMIESAAQFEEVKLLQSAPGVGIITACRFVAYLQTPHRFSNKRKLWRFCRLGVTRRESNGKRLAHPRLDSAGVGSLKDVSRKVFEAARRTKSANSFKQFYEMSLLNTKNAVHARLSTQRKILATLRAMWIGNQPFRNDLTEID

SEQ ID NO: 146092 - protein, 407 aa, unidentified
MELKPLYRRVVGLDVHQAQITACALLEDEAGNPRVERRQFGAFQRDRRALAAWVAALGPELVVMESTGIYWKSPYAALEAVGIRAQVVNARHVKHVPGRKTDVGDAQWLATLARAGLLRGSFIPPSRLRELRLIARQRQKLVGQLASEKNRLHKVLTDGGIRLGVVVSDVHGQSARAMIKALIDGQAPQAVLQHASRRLKASREALFDAVQGELTASHRFVLAELMAHIEEIEQRIGRFEQRLLDGLQDEANHLALLQTLPGVDRIGAALLLVEIGTEMTAFGSADRLASWIGICPGNHESAGKRHSGRMRKGNPYVRRLLCEFAHAASRTASVFKAKFQALVMRRGYKRAIVAIAHKLLRTMFVMLQRHQPYRDRTTDYEALAVQRNAPRWIKALTKFGYLTPAHA

SEQ ID NO: 146093 - protein, 410 aa, unidentified
MQVLYPHCAGLDVHKDSVVARIRCVSEPPHDAVRSFSTTTSALLELNEWLRTYGVTHVAMEATGVYWKPVWHLLEEDFELVLANAQHIRNVPGRKTDVNDATWIADLLAHGLIRSSFVPPPEIQELRDLTRTRKQLVREIAQHNLRIQKTLEDANLKVGSVLSDILGKSGRAILQAIIAGESDPEKLADLAYGNAKKRRGELVESLRGRIRVHHRELLRIHLNVIESLQQAMADIDARVGKALAPIQDSARLLTTMPGVNEVTAQVMVAEIGVDMTRFPSAAHLISWAGLCPKNDESAGKRRSTRVRQGAPWLKTTLVTVAWGAVRTRDSYLQAQFHRLRARRGAKKAIVAVAASMLTAAYHMLKNGVEYRDLGADHFTRRDRSKAIQRLVRRLADLGCHEILAAEQGAS

SEQ ID NO: 146094 - protein, 344 aa, unidentified
MTATNQFAAHVGLDWADKKHDVCVQFKNGERTFHVIEHTPEALDVWLTELHQKVKGRIAIAVELKKGPVVYALQKYPFITVFPVHALSLARYRQAFSPSGAKDDPQDAELALELMLRYPQKIKAIEPDNADIRLLQQLVEQRRQLVEDKRRFVNRLINSLKQYYPQPLEWFSHRGSLLLCELIIRWPSLQQLKRARRDTIRNFLNAKGGRAMALTEQRVVSIDNAIPLTTDPSVIEANALMATALATQIKVVSEIIKTYDERIETLFDTLPDAGLFKSLPGMGPCMGPRMLAALGDNRDRFNSAEEIQNYAGIAPVTERSGQKSWVHWRYHFEWGMVFQQRLPC

SEQ ID NO: 146095 - protein, 339 aa, unidentified
MTYRYFCGWDISKLTLNYCLQDQQSRVVKEGQIKNSSRAISALVKQLHTHFSIAKGAILHGAENTGQYAHPLCRASVELHFSLWLEDAFQLNRSMGRQREKSDQVDARGIAEYTRRFADKARLYELPTKFQLKMKHLAKVRQHILRNAQRSKTMFQEMQQFSLVQIDPRTVEIFQEHLRQMKHQLELIEQRIEACIAKADQAIRRKIAVARSVPGIGPKNSIAILVITGLFERIPSARKCASYAGISPHERQSGTTLRQRFRASRSASRSLKTAFHQGAMSLIQGDNLFNQLYRRLRANGRSHKQAINAVRNKIIKVLYACLEKDTMYCKKHHQNLQGL

SEQ ID NO: 146096 - protein, 353 aa, unidentified
MNATYYIGFDVHKKHVSFCAKTADGEIAEEGRLLAQRSTLRQWAAERQHPWQGAMEATLFSGWIYDTLKPYGQRLDMAHPAMMKAITAGKKKSDKIDARKIADLVRCNLLPICYVAPPEIRELRRLLRYRNLVVRESVRMQNKIAGLLMETGTPFQKEKLHGKKYFANLLKNLEEVPESVKDLLQLSRGSMEMFEATQKRLIRRLLANPELGQRVERLASIPGIGVITALTWALEIGDPQRFCSSANVMSYCGLTAALKSSADKQQRGPISKQRNKWLQTALIEAAKLAPRWNPQLAALHARELERGHRNRATLAVARKLAAYLLAVDKSGQPFQLRSLPAADETPPVLDKAG

SEQ ID NO: 146097 - protein, 346 aa, unidentified
MITIGGDSHKRTHTFVAVDDLGRQIAETTVAAPSDGHLAALDWARQWPDRRWALEDCRQVTRRLEGDLLRGGDSVLRVPTQLMAGARRSAREPGKSDPIDAMSVARAALREPGLPHARLDGRERHLKLLVDHREDLVGERTRIQSRLRWHLHELMPEHAVALRTLDRFHVLADVRARLDALDGPVAAIAVELVDRTRELTVRINELTREITAMVTDLAPTLLALQGCGPLSAAKLVAEAAGIDRFRSRSAFARWNGTAPIPVWTGNEKFRLSRGGNRQANAAIHRIAISQWRDHGPGHDYIARRIEGGDPKRSAIRALKRRISDEVFRRLRDDLDHRESAETASAA

SEQ ID NO: 146098 - protein, 316 aa, unidentified
MDGANPVSIGIDVAKATLDLHLLPSGQSHSLPNNAQGFQQLQKLLPDPTTCLIVLEATGGYERLLVADLLDAGCRVAVINPKRARDFARALGLVAKTDRIDARVLALFAEKVQPAPAEKTPEKQVEIQQLVARRRQLIDLRTQESNRLEIAAAKAARKSIQAVLKILERQIHGIEAAIQDLVQSDDDWRHKAQLVESVDGLGGVTATTMIANVPELGQLNRQQISSLVGLAPFNRDSGPHKGKRCISGGRKSVRSVLYMAALAAIRCNPLIKDFANRLTQHGKPFKVVITACMRKLLVILNAIVKSGRPWNPQFAS

SEQ ID NO: 146099 - protein, 394 aa, unidentified
MYSLFVGIDVSKDSFSVAALNEKAKTVFSMCPLMNAQGFAEFLKALSSHGDPATVVVALESTGPYHLNLYSFLMAKGIRTLVVNPLIIANFNKLSLRRTKTDKRDAVTIARYLFLNRDGLNTVPSSQITTDLRDLARERESLLKMVASTKNDIKRILQTTFPELEQLVDVLCGTMLHFLKVFPSARLINQAALEAVAEVFNQGDGRRRISVHYTKIVDLARISVATTSPSKELILPGKIETLFHLNERVNETTRMLVKLCKSIRQEEFSILTSIRGVAAKTAAPFIAELGDHRNFDSYRKMIAFSGLDPTTHQSGKYEGMSMISRRGNRHLRKVIYNMTFCVIRYAGQFKDYFLRRKREGLPFRKAILATAHKLVRTIFAMLNSGTYYKTAEVV

SEQ ID NO: 146100 - protein, 380 aa, unidentified
MEAAMEATAVPCRVLAGIDVHKKMLAVVVRRDQNGETSYQKRAFGTTRSEIEHLTAWLQHNFVTEVVMESTAQYWRPVWYGMEAHFTLHLSHPLQTRAPRGRKRDFRDAQRLADRLSAGDLEESFIPGAEQRAWRWLARTRVDLQRKITRVRNQVEGVLEEGGIKLAAVVTDLFGISGWCMLERMAAGETDTEALVELAQGKLLKKKAQLREALKGSLPSHCRLLLRQHMEQVTLLRRQVVELTAELGRALKQHAGIVERLCKLPGVDHCAAQALLAEIGPRAAAFATPEQFASWIGVCPGSQESAGVSYSTRSAKGNRYLRRVLCQIAWAAVHSKGTFFKQLFNRLKPKIEAKGAVWAVAHRIAKVIWLMLAHEPKSGS

SEQ ID NO: 146101 - protein, 509 aa, unidentified
MDVIVERCAGLDVHRDSVVAAVRVPGTGKSRRRRAQQTRTFGTTIAQLEQLADWLAGFAVSLVGMEATGVYWKPVFWVLERRFECWLINAEHLHNVPGRKSDVIDSRWLCELLELGLVRPSFVPPPEIRRLRDLTRLRSTQAEERTRAIQRLEKVLQDAGIKLTSVASKTYSVSARAMLEALLGGVSDPARLAELAKGRLRAKIPQLTEALANRFDTTHHGVLVAGLLAHIDALDQAVATLDARIASATDAELIDLLSTIPGVKRHIAEVLIAECGLDMSVFGSAQRLVSWAAICPDTNQSGHRRRPGKTRHGNPWLRTALTQAAHAAARSKNTYLASHYRQIRGRRGDAKATGATHHDILIAYYHIVSDRVPDRELGPDWLARRHSPEHRTRRLVKQLEALGHTVTLEAAAQSTDPGTTTTARRACGPTARAWSQPPPNPAGIHTTGDRRFESVTGFCKVPARRELAAFSFRPSCSASNVRWVWSRSWSFRVAAAVRDGLAGPAEPRL

SEQ ID NO: 146102 - protein, 393 aa, unidentified
MRKPKQQTKPLNDLSRSLTPFDPNQTLIAVLELSNESWLVAGIIPGVERQPLKKLEPNENELLKLLERWRTEAEKSGHKINRIAVAFETGRDGFWLARWLRARGIDAYVIHAASVAVSREHRRAKTDRLDTEGLKRAFLGWLRGERAHCKMVAIPTLAEEDAKRPHREREMLVGEQTKIINRLKATLARLGIRNFNPKLKKAPERLEHVRTPEGEPIPPNTLAELMRDLERKRLVHEQILNIEKARLEQLKRAPKVGPNLMVLLLMRVIGIGIDTADMLVKEVLSRNLRDRRAVARYAGLTGSPDESGKRRREKGLARSGNARVRRGMIQLAWRFLAFQKDSALVKWFRARTENAPRLRKKMIVALARKLLIALWQLVRDGVVPEGVVLRPAH

SEQ ID NO: 146103 - protein, 415 aa, unidentified
MEIIHTHCAGLDVHKKTVVASIIVPDGNEGLPKETRTFGTMMSDLLALSDWLMVFGVTYVAMESTGEYWKPVFNILENNFEVLLVNSQHVKAVPGHKTDVKDSEWLAELLRHGLLKASFVPPLGQRELRELTRFRSTFVRERATLVNRVQKVLESANIKLASVASDVMGVSGRAMLEAIIAGQASPTEMAELAQKRMRQKRDLLAKALEGRVKPHHRFVLTELLCQIDSLDETIERFNQQVEEYCHPFEEAVVWLDTIPGVGREVAEIIVSEIGTDMGRFPTEDHLASWAGVAPGNNESAGKRRSGKTTKGNKALSTALNQAAHAAAHTKDTYLSAQYRRLAARRGKKKAIVALEHTILVIAYHLIKRKETYRELGGDYFDKRRPEATVKRLVKRLEQLGYSVSLQQPATPYAAG

SEQ ID NO: 146104 - protein, 428 aa, unidentified
MNCNTQNAKIASITEKTLIVGIDVGSETHFARAFDWRNYEYSKKPFAFSNNEAGFVTFKAWMEDIAEKHGKDVVIPGMEPTGHYWFALGKFLQDNGMKPVHVNPHHVKKSKELDDNNPNKNDRKDPKTIASLVNEGRFSYPYIPTGIYAEIRSLSNLRFQTQEEITRIKNRIARWFSIYFPEYKDVYGDLEAVSGRMILKTASLPGDIKKLGIEGVNKIWREAKLRGTGLKRAKTLIAAAEHSVGSQEAPEAARMELKDLLNDYDIYKLRLEEQLQKIQEKLTEIPYIDKLLGIKGIGLITVSGFIAEVGDISRFDNPKQLQKLAGYAIVASSSGKHQGESHISYRGRKRLRYVLYEAAISVIGKNAEFKEIHNYYRTREVNPLKKMQSVIAVACKIIRVFYTILIKGVDYDGTKLMSDIQRPELKAV

SEQ ID NO: 146105 - protein, 341 aa, unidentified
MGEVSTIGLDLAKSVFQAHGADASGAVLFRKKLRRHQVLAFFSSQPPCTVAMEACASSHHWAREISRLGHAVRLIPPAYVKPFVKRQKNDAADAEAICEAAQRPTMRFVAPKSDGAQASALVFRARDLLVKQRTQIINALRGHLAEFGIVVAKGPAHVSKLAQAVENSDEPVPELARPILQMLIETLHRLDEQIARLDREVAQRAKEDETARRLMTIPGVGPVTAVALAALAPPAETFKRGRDFAAWVGLTPLQHSTGGKLKLGATSKMGERTLRRLLIIGANSVLLGAARNGVPAGSWLSRMLARKPPMLVRVALANKMARIVWALLARGEVYRAPAVGA

SEQ ID NO: 146106 - protein, 350 aa, unidentified
MLIIGCDYHPSFQQIALVDNETGEVQERRLMHREEAEQFYRSLATAGAKVRVGMEASGHAGWFERLLAELNFELWMGDAAKIAAKRVRKQKTDRLDAQHILKLMLKDDFPKIWVPSWENRDVRQLLWHRHRMVQTRTRIMNQLQAAALNEGLRYKRKLWREAGRQQLESLPLARWASRRRHDLLEVLDRINPTIAELTQAIEQEAKKCPEAQRLMTHPGVGALTALAFVLILGEAERFGCGKQIASYLGLVPEEDSSGERRRLGHISKQGNSRLHFLLVEAAQVTVRSDVRWRSRFFHLAQRRGRKIAKVAMARRLAVRLYWMWRRGWNYAQLESFGSHAGQPGNPHGVQ

SEQ ID NO: 146107 - protein, 410 aa, unidentified
MVKENFIYVGIDLHKETHTAVMIDCYNQKLGEITFPNRPADFPKLVTKVKKCNTDGKEVVYGLENAYGYGRALAVWLIDKGYLVKDVNTAISHRQAKHRGAMYRKSDSDDAKAIALATLNMLEKLPDACPNDAYWSLGQLVHRRDNIMKQRTRLVNQLHEQLCIAYPSYKQFFNDISRPTALYFWEHYPSKKYLRGKSVEDLRAELVPVSHNKCSTKTCEKILDAVASDKVKNNAYQDARDMVTLSIVSDLQHYDSQLAEVDKMLEQMYKMLGCTLTTIPGVNVITAVKILAEIGDIKHFSNTNKLAQFAGIAPLHLSSNGKGKDVATKQGNRRLQATIYFLAIQMVQVSSKGTPRNSVVRAYYEKRKAEGKTSQQALICISRRLISIIYGMLKHGTEYRMPVVESAGEK

SEQ ID NO: 146108 - protein, 408 aa, unidentified
MKTLHKRCAGVDVHKAEVVACLRLITNRKVEREVRRFPTTTHGLLELAEWLEKARCTHVAMEATGVYWKPVWHILDGRSALILANAAHVKTVPGRKSDVNDASWLADLLAHGLIRPSFVPPAAIQELRDLTRTRKQLTREVVQHSQRIQAVLEEANVKLCSVITDILGASGRRMLKAMIAGETDAHKLAALGSERLGCAPVALVEALTGRMREHHRFLLAQHLRTIEQLEETIRVFDTRIEAKLVPFRDIVERLKEVPGLGTTAAEVVLAEIGTDMSPFPSAGHLLSWAGFVPRLDESAGKRRSTRIRKGAPWLKPVLVQAAWGAARKKNSYFQAQFLRLKARHGAKKAAIAVAASILTTVYHMLRDGTCYRDLGPDYFARRNPAKIAARLANRIRNLGYHVEITAAA

SEQ ID NO: 146109 - protein, 415 aa, unidentified
MALKIVYKICCGIDVHKTFVVACIASTNDKGVTSYESHRFSTYTSGLKTLLQWLLDRNCKDVCMESTGKYWIPVYNILEKDCSIVLAHPKYVKAIRGKKTDKKDAKWIADLFKHDLVAGSFMPPAGIRQLRDLMRYRFKLTCFKSSEKNRLQNCLTVSNIQLGNVVSDTFGKSAQAILDKILENPADTSFDLEPLVFKSLKKKLPELRDSIDGYITPEQAGKLKVIKSHYENLEARKAELEELILALATPYQQELAILQTAPGISSDFTAIGIISEIGTNMEAFPSAKHLCSWAGLTPTNNESAGKKKSVRVSKAGCYIKPLLVQCANAVVKSNKHPEIRNRYLRIKKRRGHKKAIIAIARMLLTALYNMLKNKEPYNAELYRKSDVLPVNREITIEQAILMAQFQGYKIKSAAE

SEQ ID NO: 146110 - protein, 339 aa, unidentified
MELTVIAIDIAKKVFQLHWVERDTGSIERLKLKRAQLLPWFANRQPAMVMMEACGGAHEWARRLFKLGHDVRLLPPKTVRPFVQRNKTDAADAQAIWTAGQQPGAKFVAVKNEAQQVVLSLHRLRAQLMKMRIMQTNELRGLLYEFGLVLSDGHRALLKELPAVLLEAQSRLPAMLLESLQEQVRRISDLEADIGKIERRLSTQLRETPACKTLAEIPGVGLLTATAIVASMGSPTAFKDAREFAAWIGLVPKQTGTGGRVRQLGISKRGDAYLRTLLMHGARAVVRSNRATSWPWLAELLKRRPYSVAVAAVANKLARTIWAVLAKGQEWRPQAWQAV

SEQ ID NO: 146111 - protein, 405 aa, unidentified
MNAVGIDVSKGKSTVTIRKPGDVVLMSPCDIPHSQSAINDLIKQIKSLEGETKVCMEHTGRYYEPVATWLSDAGIFVSAVNPILIRDFGDDSLRTPKTDKADSKKIARYTLDRWAKLKQYGIMDKTRNQLKTMNRQFGFYMAQKTAMKNNLIALIDQTYPEANDFFDSPARNDGSQKWVDFIHTYWHVDCVRSKSLNAFAEHYQNWCKRKNYNFSAEKAAKIYQISSDLIAVFPKDDITKMLIWQAVALLNTASKTVESLRSKMNELASTLPEYPVVMDMNGVGATLGPQLIAEIGDVSRFTHREALTAFAGVDPGKNDSGKHIQNSVRTSKKGSPYLRKALFQIMDSLIKRSPVDDPVYAFMDKKRSEGKPYYVYMTAGANKFLRIYYGRVREYLSNLSNNETI

SEQ ID NO: 146112 - protein, 417 aa, unidentified
MAESNDTPEPISAFVGIDWADAKHDIYLHPADGSTASHEVIDAKPEALHDWILKMREHFSAAGKIYVCLEQSKGALIHQLMQYDFFVLYPINPKTLARFREAFRPSGAKDDRSDADLLCELVRLHTHRLRPWKPDDEQTRKLNAFCQNRRQAVGSAVRLLQQVREQLKLYYPLALELELNTVLACDFLQRWPTLEELRQAKPQTIRKFFYAHNFRRGDKIEQFVQKLQKQTPVTSDRAIIEPAAMQVRLLAAQLRVILNSIPEFDQTIAEIFHSHPDAAIFESFPSAGPQLAPRLLTAFGTDRDRLESAEQMSVISGVAPIKIASGKSFATHKRWACPKFIRQSFHEFAGCSIKFCAWAKAFYQAQRDKNKGHHTAVRALAFKWMRILFACWKNRKPYDDALYTGALKKRGSAFASP

SEQ ID NO: 146113 - protein, 350 aa, unidentified
MSVYVGIDVHRKRSQVAVIDAGGEVLANRNVPNGAEPILKVIGGLPPGTPAAFEACYGTSWLVQLLEDYGFDPHLVHPSRCKAIASARLKNDKVDAAILAQLLRADLLPEAWIAPPPVRQLRALLRHRVALVRLRTRLRNRIHAIVADYGHDRPGGGYWSGPGRAWLASLQLPAVSRELVGDDLGLIDALQDRIDRLDWEIRQHARPDPRVKVLTQLPGVGPFTALVILAEVGDVSRFGSARKLASWAGLTPTVRGSDRVAHYGHISKEGSVWLRWVLCEAAQTAKRHPDFAATFAAIAKRRGRKIATTAVARKLITRAWHLLTDAEHTEAEHPTVPPPANAAAARAGTW

SEQ ID NO: 146114 - protein, 267 aa, unidentified
MGSVIVGIDVSKDRLDVALRPSGEAFTVTRNAAGLEDLVLRLNAVAPHLVALEATGGFETVVAASLAAAKLPLVVVNPAQIRAFAKALGKRAKTDPIDAAVIAHFAEAVGPEPRPLPDEATRLLADLIARRRQIIAMMVAERQRESRATAKRLKKSIARLIRALEKELTSVDTDIDEAVRGSPAWREKEDLLASVPGIGPVIARTLIAELPELGQLTRKQIAALAGLAPWTRQSGKWQGKSFIGGGRPVVRTALFQAHWWPAGTIAS

SEQ ID NO: 146115 - protein, 349 aa, unidentified
MPVLIGVVPHKHSHTTAVLDQHGTLLDQQRFPATRDGHRALRRWAARWPQRHWAVEGAGGVGRILAQQLIAQGEQVTDVPAKLAARVRALSPGHGRKADAGDAISIAHAALHASGLHQVSAEDHPTVLRLLSDRRDDLVCARTQTLNRLHQLLAELHPAGAGRNLTAPTAAALLRRIRPRTDAARTRREVASELVQDVRLLDRRISAVEERIQTAVTASRTSLTTLHGIGPVLAAKLLGEVGDVRRFPTKAKFATYNGTALIEASSGQVVRHRLSRAGNRRLNHVLYLMAVVQLRHATPGQAYYRRKLAEGKSSREALRCLKRRLSDAVYRCLIADQEPPPNRPNRPAA

SEQ ID NO: 146116 - protein, 346 aa, unidentified
MEHYAGIDVSLEQSSVCVVDAQGKIVKEAKVASEPEALVVFFEALGFAVKQIGLEAGPLSQWLHAGLRRAGFETVLLETRHVKAALSAMTVKTDRKDARGLAQLMRMGWYRPVHAKSMKSQEVRALLVARKQLLGRLIDVELSIRGILRGFGLKVGPVTRKGFEARIRELVTGQATLERIAGAMLSARGALKTEYEKLHKTVLAIVRDDAVCRRLMTVPGVGALVAMTYKSAMDDPSRITKSKAAGALFGLTPKKYQSGEKDVTGGITRAGDEMVRTVLYEAANVLLARITRFSKLKRWGMDVAKRRGSKRAKVALARKIAVILHRMWVDGTTYRWTEAKPIAAAA

SEQ ID NO: 146117 - protein, 362 aa, unidentified
MEYFAGLDVSIEETAICVVGDDGKVVLETEVPTDPQQIADALERYAGRLRRVGHEAGSISPWLHAGMLALGLPAVCLETRHVRAALSAQRNKTDAADALGIAHIMRTGWFREAHIKTEDCYRIRLLLVQRRNLKRKFLDIENAIRHSLKVFGIRLGKVGRGSMEKAVREAVAGDAMTAGLMDCMLRARAALWEEYLILHKLVTQLAMRDELCRRFMAIPGVGPVTSLSFKSAIDDPARFRRSRNVAAYFGLTSRRWQSGSSIDVKGRISKAGDPDVRRALYEAASAMLTRFKGRDTIKSWGLKLAKTKCHAKARVAVARKLAIVMHAMWRDGTFYVGDPDRDAHEIDSVNASKLRRLSYARS

SEQ ID NO: 146118 - protein, 408 aa, unidentified
MNPLYVGIDVSSKTNVVYLMKPDGSKISNFSVANSLDGSKKLVKNILSALDKHSLGEVVIGLEATSVYGDNLVYFLREDGSLAAHQNRIHVLNPKQVKKFKEAYNDLPKNDFVDSFVIADCLRFGRINKAVYLDDYRYDALKTLTRARFYAVQNLVKEKQRLINIIFKKYSSLTQDKIFSDTYGATACAIYTEFESADTLVNMDLNELTEFIKKKGKNRFDDPDAVAKALQKAARSSYRLPKTVNDSVNQVLSISINSIRATEAQIKALEKAIAEQMALIPNTLQSIPGVGPVYAAGIIAEIGEINRFNSQAALAKYAGLAWKQKQSGDFESENTHLIHTGNRFLKYYLCEAAFSLVRCDTEYNRFYRLKYKEVNKYQHKRALALTARKFVRLVFRLLKDNRLYISKS

SEQ ID NO: 146119 - protein, 410 aa, unidentified
MDILIACCAGLDVHKDSVEVCVREMEVGSKLRHQIRRWATTTRELTAMAEWLKAEGATHVAMESTGVYWKPIFNVLDSDFEVLLVNARMIKHVPGRKTDVADCQWIAQLLQHGLLKGSFIPPRWQRELRDLTRQRAQITDESTRIRNRIQKLLEDANVKLGSVATNVVGVSGRLMLEAMVEGQDDPARLADLARAQLRKKIPQLQEALYGKLTGHLRWMLRLLLDQLDSTEQFIARLDERIAELTRPQQSAMEKLDAIPGINRRLAEVVMAEIGPDMTPFPSDAHLASWAGMCPGNHESAGKKKSGKTTKGSRWLRQAMVQAAWAASHKKDSYFYAHARNLMRRRGATRGLVAVAHSLLLVIYHVLKRDTEYHDLGPEFLDRLREKHLVRFHLKRLQQLGLSVTVQPLAA

SEQ ID NO: 146120 - protein, 321 aa, unidentified
MHKYNEIFGVDISKDVFDIMNSKGDYDQFSNDLNGFKKFTKKLTKQTLVVMEATGYYHYCLAQYLYQQGYLVSVVNPLSVKRFIQMKLSKIKTDKSDAKAICEYGSFHEVPLYTAKDESQAECLQLIRLIDIYLKQSTAIKNKLHGETTLGIPSKVVYSSLNRSLKSIKKEISLLEDRLNDLVKDYQQKQLTLLKSIPGMGTKTAIMLIVMTDGFNKFENSKQLCSYAGITPTIRHSGSSVRGKSRISKMGNQKMRNLLFLCSFSACKYNKGCRAIYERIVSKGKSKKLALIAVSNKLLKQAFAIAKSGLPYDDNFVSVLK

SEQ ID NO: 146121 - protein, 367 aa, unidentified
MKDSSTVVGLDVHKNSIQIVTAETDGAMEVRHFGRIGGTMDALDRAVRKLVSKGSPLRFVYEAGPCGYEIYRHLTGKGFSCKVVAPSKTPKKSGDRIKNDRRDAETLARLERAGELTAIYVPREEDEAMRDLTRAREDAGKALKTARHQLNAFLLRYGKVYPGKASWTPSHMRWLSDITLPHPSQQIVLQEYIMTVTVCTERETRLTDQIAKLLPEWRMYPVVKALQALRGVAAIVAATTLAEIGDMSRFQNPRQLMAYLGLVPSEDSSGDSTHRGSITKTGNGHVRRALVEAAHAYGFPARVSRHLLKRQEGLPQPVLDIAWKAQVRLCGKFRRLMARGKLRTKVVTAIARELSGFIWAIAREVNV

SEQ ID NO: 146122 - protein, 391 aa, unidentified
MVCVGIDVAKDKHDCCILDSDGMVRADCFTIPNNMDGFKQLLQTIRNCTRKSDKIKVGLEATGHYSYNILGFLLDNGLPTYVINPLHTNLYRKSLSLRKTKTDRVDARTIATMLLSDVDLKSYTDIAYHNEELKSLTRYRFDKVQERAKLKQSVSRLSTILFPELEQLVSSIHGTSIYALLSEYPGAKQISEVHLTKLTNLLTTASKGRYGKEKAIQIREAARASIGSVMPAKSLELKHTIKLIQELASEISEIEDSIQKIIDELNPPILSIPGMGVNSAAVILAEIGDFSNFSSPDKILAYAGCSPSTYQSGKLTNCYAHMEKRGSRYLRHALYNATKYVCYWNPVFAEYLAKKRAEGKHYNVALSHAMKKLVRLIYALQKSGKTYLTAA

SEQ ID NO: 146123 - protein, 396 aa, unidentified
MSTVGIDIGGRTHAVARCREGQARADREILRVSQDRAGFSALDTWLDCQPERVTLVTMESSGHYWMPLASHLRRRSVPVALVNPLAARYFAKSRLGRTKSDPADARSLAEMAMRDAPLVRDPFAGVELRQAARFAMTLVTEQARVCQRLHRLVELGFPELAEVFDDPTCRIAREVLRLAPTAELARRRRTGTLADANKGPGRRRLGETKAERLHDLTSDSIAVPELAAEVAFEVGLLLDQHDLLEQQIETAEAHVATLLDGELARRLQTIPGVGPATCAALIAEIGDIARFETFDALLAYAGVHPAERSSGRKGANPDTAWRMSKAGNAHLRAAAYRIAVVGTVHNPIIAAHYQRKREAGKSKMNALGHCMRKALSLVWGVWRNGADFDPAWGSGT

SEQ ID NO: 146124 - protein, 322 aa, unidentified
MSGSILGVDIAKKKFDVALLINGKLKHKVFTNDEEGFEELELWLKKQGANHVHVCLEASSTYGDELAAYMHDAGHSVSIVNPARIKGFAQSELMRTKNDKVDAGLIARFCLAMHPEPWTPAPPEMRQLQSLVRRVDALINMRTQELHRLGTAHKAIEHSIREHVAYLDTQIDVLKRQIADLIKNDPDLKAKKDLLKSIPGIGEATIAAILAELHMFERYDSVGKVVAFIGLAPRQFISGSSIKGKPRLSKIGHARLRKALYMPSLVSIQCNPIIQVFYHRLKENGKNGKVVVCAIMRKLVHLIFGILKSGRPFDPNYTTNQA

SEQ ID NO: 146125 - protein, 420 aa, unidentified
MAPLSNQQFKAFVGIDWADTKHDICLQQAGDDRREFDCIPHQVTRIDEWAKALHQRFGGPIAIALELARGPIVSVLQKHAFFTLFPINPLMLAKYREAFKPSRAKDDPTDAELALDLLLRHPERFSPLRPQSAGMRSLLSLIEQRRELVGDKTRFTNRLTNALKQYYPQALEWFDDIDTVLFCDFLTRWPTLPAVRRASRKTLETFFHAHNCRRAQLIEGRLESIRCAVSLTDDPGIVAPHRLLALMLVAQLRTALAAIDVFDKEIATVARTLPDFDLFDSLPGAGPHLTPRLLAAFGEQRDRFKGAEELQKYSGIAPVTERSGKKCWVHWRWQCPTFLRQTFVEWAGQTINKSFWAGAYYRQQRAKGSSYQAAVRALAFKWIRIPYRCWQTGTRYDESIYLNALRKRGSPLLRNLGLPE

SEQ ID NO: 146126 - protein, 332 aa, unidentified
MVAGTHGSLNKAGSTKMTQISTTAGIDTSRAKLDIAVHGGVEHWQVENTSVGWRRLAVGLSQAGVTRVGIEASGGYERGVVGYLRDKGLTVLVLQPIQVKAYARVHLRRAKNDKLDAVLIAACAATIDQPRIEPDERLAKLAQHLTFVEQIEEDIARFKVRLEHIDNPRLRRMVLADIARLKTRRSAELSRIVMALRAHEDLGRRLDLVLSIPGLGERTAIALIVRMPELGRVSREEAAALAGLAPYDDDSGKHKGQRHIAGGRGRLRRSLFAAALPAAFRWNKTLIELYTRLTARGKAHNAALIACARKLLIYANTVVHRGKPWVERPVTI

SEQ ID NO: 146127 - protein, 409 aa, unidentified
MEILYARCAGLDVHKESVAACVLTPGSGTEPNREIREFGTTTGELKLLREWLQQNGITHAAMESTGVYWKPVFNILESACQLIVVNARHIKQVPGRKTDKADCAWIASLLRHGLLEASFVPETEIRQLRDLCRTRTTLVRECVQVGNRLRKVLEDANIKLDSVASDALGVSGREMIQALVSGKTDPAELAALARGRLRAKLPELEKALEGQVTAHHRFLLRELMRQLAFLEGQVERFDKQIARQMRPFEWAAGLLITMPGVDRTAACGLIAEIGTDMSRFPTSRHLASWAGLCPGNNESAGKRRSGKSHRGNRWIRGLMTEIAWAASRTKESYSSAQYRRLTGHRGKKRALVAVANSLLQAAWHILSQRQGYIELGAQYLETLHRKEIERNLIRRLEKLGHKVILEPVA

SEQ ID NO: 146128 - protein, 397 aa, unidentified
MIAVGIDISKAKSTVAVIDSDGTVLASPFTMAHTQPEMEAFVTYLKGLGEPTTILMENTGHYHYPVLKKLQDEGFPVCIVNPYQMKKYGDVEIHKAKTDKKDALRIAAYALEKSYKLVPYSSMEQKYEDLKFLSRQYSQRITYVAKLKVQLIALLDQTMPGITRILPLNSRNPEKCALLLFIKRFKSFDEIQRIGKARFLASYDVLAKKASERSASSKGLSIYELAVDSITTRGEDPYIWLSQNQCVDLLSTTQNAADEIISQMRNIAETIPEYKVLRAMRGVGDRLGPIILAEIGDIRRFHSGKALNSYAGNDAPPYQSGQFESRNRHISKRGSSALRKACYEVMQALKLAKPQDDPVYLFMLKKEQEGKPFNVAKMAGVNKFLRIYYARAMELYK

SEQ ID NO: 146129 - protein, 371 aa, unidentified
MGRDSTTKFIGLDVHSKTISVAIADEGRKGEVRHYGTIGNTTEAIEKVLKSLTSTGAELRFIYEAGPCGFALYRYLTGNGFKCVVTSPAMIPKRKTVRIKNDRRDALTLARLYRAGELTGIYVPDPEDEAIRDLARARNDARIAERKAKQRVISFLLRHSFVYPGKKAWTKTYFVWLSKVSLEHPAQKIALQEYIDAVQECTGRVKRLSEQIGLAVEEWRMAPTVKALQSLRGVSLITAAITVAELGDISRFQHPKELMAYLGLVPSEHSSGESIKRGHITKTGNSHARRVLVESAWTYKHHARVTLPLIKRQQGLPKNICQISWKAQLRLCARYRRMMARKKPMQVVVIAIARELAAFMWAIAQEVETAA

SEQ ID NO: 146130 - protein, 350 aa, unidentified
MTMVGGFDVHRQQITFDYVDDDGLVHWGQLRPATRTTVRGWLAEHCPGGDAEFALEGCTGWRYVVEELAAAGLVAHLGDPAEIAAARGPKKRAKTDHADARLLRTLLLEGRFPQSWIPPTHMLELRTLGRLYCTLMDERRAWQQRIHAQLFHQGCPPVKSLLTEAGRATLATVELSPAGRCYVDTALRHIDQLTVEIEPLRAQLVDFARRQPGCRALQTHYGIGWLCAAIIWAEVGDARRFTSSDQLVRFAGLDVTVYSSDSKRSPGHLSRQGSPELRWATFEAAKSAARRSSPDYTYYHTLAAKHDGHNGKNPTLAVERKILRRCYHTLRQLGDTALAVPDTRSQQAAA

SEQ ID NO: 146131 - protein, 427 aa, unidentified
MSVTQNDKIRQVTDTTMVIGVDIASEFHWARAFDWRGLELGKAVKFENSAEGFNFFLRWVSELTVEQKKDSVMVGLEPTGHYWFTLAAHLQGGDFKLVLVNTYHVKRSKELDDGHPSKSDKKDPKTIAKLVLEGRYVYPYIPQGLYAELRVTMNCRWRIRKELASLQNQIQRWLKIYFPEHSKVFGRFTGAGSMALLHSAPFPSDLISLGVEGISGIWKQMKLRGIGRKRAQRIYEAAQTSVGCTTGMEAARMELQILLEDYDAKLQQYERVMQVVENLCSQIPAVAELLKIQGLGLVTVTGLFAEIGDIRRFESPRQIQKLAGLAITENSSGKHKGPTEISRRGRSRLRAILFRAAIPLLAKNREFQLLHRYYTTRQNNPLQKIQSVIAICCKLLRVFYALATKGCAYSPEKMLADIQRNQPLKAA

SEQ ID NO: 146132 - protein, 395 aa, unidentified
MSTTSITPERMVIAIDPHKASWTAAVVDASQQPVATIRVPVSRDGYRALRRFANRWPDPTWAIEGASGLGAPLTARLRTDGIDVVDVPAKLAARVRMLSTGHGRKNDDADAVSVAIAARSARTLNSAAVDGAVTALRAIVEHRDDLVKTRTQTVNRLHVVLTNLIPAGASRDLTAERAAELLRGIRPRDTAGRTLRSLATDLVAEIRQLDRRIAKAAADIQTAVTDSGTTLTELCGIGALTAGKILGRVGTIDRFRSAAAFATYTGTAPIDVSSGDVVRHRLSRAGDRQLNLCLHVMALTQIRQDTPGRAYYSRKRTQGKSHKEAMRCLKRRLSDVVYQQLRHDANWMEAGPEDTRGRLCRPARPAQTPHTDASDKSLPGPTTSHPTTDGHALLT

SEQ ID NO: 146133 - protein, 418 aa, unidentified
MSEEEKARPKQRHVALDIHKHYSVVAGVNRDGQVVLAPVRVEHEDLEGWLKKNLQSADRVVIESTTNAWHVYDLLEPLAERVVVANPIKVKQIALARVKTDIRDTLILARLLAANLVPAVWVPPVHVRQMRQLLSQRRQLVETHVQILNRMHSVAHRHHLKHERGKRFNEQNTGWQKDECLSRMEQFQLELEMENRRYIEKQIERLSVEVTKQCHEKAWAEEIAYVMSLPGFGAITAMTVLAAIGDIRRFETPKKLASYSGLTPGLEQSGTKNRGKGITKEGRRELRWALVEAALQAVKSDPLMKARFGELQKRMHRNQAIVAIAHRLLELVWYVLTRRQPYRGFSQERIAYKYLTWAWHVKEEARNGMTAQQFARYYLMKIGIGQDLTRIALDPKHPRRLASEAEVLALYPELQRTE

SEQ ID NO: 146134 - protein, 371 aa, unidentified
MKKHSSCTGSPKRRVKARCGSITIGMDLGDKASRYCELDGDGETIKEASVATTKKAVAQVFASRQRCRIALEVGTHSPWVSRLLKSFGHEVIVANARQVKLISQSSRKDDRLDAQTLARLARVDPQLLRPIQHRSEKAQGDLMRIRVRAALVDTRTGLVNTARGLAKAMGERLPVCDPDALNTERLEELPAGLRDALEPLVKMVEALTAQIKHSEAEIEQIARERYPETALLRQVRGVGTLIALTFVLTVEDPQRFRKSRDVGCYVGLRPKRSESGERQPQLRITKEGDRYLRKMLVQGAHYILGWRGPDTDLRRWGLRLAERGGKNAKKRALIAVARKLAVLLHRLWVTAEVYEPLRNSQAREAGRQAAA

SEQ ID NO: 146135 - protein, 343 aa, unidentified
MGTQITGGVDTHLDVHVAAALDEHGGLVGTASFATTVAGYRELLGWLASWGEVVVVGVEGTGSYGAGLTRHLHDAGIQVVEVDRPNRQRRRRAGKSDTHDAISAARAAFAGDALGAPKTRDGNVEAIRVLRLARGSARRDRTRALNQMRSLITTAPDELRAQLRGLSIPQLVRIAAGFRPAARTDVANANRLALKTLARRVLELDHEIELLDRSLAPLVAQTAPEMIARVGVGTDTAGALLVAAGENTSRIRNERSFARLCGAAPLDASSGKQQRHRLSRGGDRQANSALWRIVITRLSYDPATREYLQRRCAQGKTKTEAIRCLKRYVARELYACLPPETLA

SEQ ID NO: 146136 - protein, 424 aa, unidentified
MRFIGLDVHRDFCEVAIAEAGVVRLAGRVQTEPAALELFAQSLGGDDEVALEATGNALEIARIIEPHVGRVVLANPKAVKGITHAGAKTDKIDARTLAQLLAGGFLPAVWLPDEQTRILRRRISARAQLVRQRTRAKNQVHATLIRNLKGRPPVSDLFGARGRRWLAAQDLPADEQETVAACLRQIEFLDSEIALIDRALAEQVLASAEMRRLLTLPGVNFVTAAALMAAIGDIRRFPTARQLVSYLGLDPRVHQSGTEPARHGRISKQGRGETRHMLVEAAWHATRAPGPLRAFHQRVAVRRGGNIATVAVARKLAVIAWHMLSRDEDYAFARPSLTREKLRRLELMTGAKHQKGKRIGVFATKEQHRLDKELAAQAELAYRRLVQDWQPAINKGAGAAPGRASRRPSSGQAARQETAPPPAL

SEQ ID NO: 146137 - protein, 390 aa, unidentified
MKEFNEQALLEESKGLTHGAEMGTDPHAGYVGLDVHKETIAVAVALKGRNQPRYLGEISNTPKELSKLIERLSEDGEIYLFCYEAGPCGYGIYRQIIASGHDCEVVAPPESSRLKTDRRDALKLSRLLRTGDLRRVWVPGEEQEAMRDLSRCRGDFKIVQNKARQQLNAFVLRHGHHWPAGKSRWTKQHMAWLEDLKFVHPWQQLVLQEYINAVVAGTDRVTQITKTLMDSIPHWSLSVVVDSLVALRGVDKITAVTLLAELGDISRFDSPKQLMGFLGLVPNMHNSGSTRRLGSITLAGNSHARRVLVESAWCYRFPARQTKHLSRKAEQASTEAQAIAWRAQKRLCGRYRTLIQGGKIPKVVCVAVARELVGFIWDIVCHEMPKVKPA

SEQ ID NO: 146138 - protein, 322 aa, unidentified
MKLYLGIDMGKSGFTAALCSEDQTFQIVHPEVRNRIDGWKVIKDWVLKQSKENQAEVHLGVESTGGYEKPLVDWFRSNTEFVITVLNPVRIKRFAQSELSRTKNDLNDARLIARYLAIRKPEPTPVIVPEIEELKLMARHLGHLIRKQADEKTYLDSVTEITIRRQTQDIIQTYQKQIEKVQEQIRRHIDSHPNLRNQSDLLQSIPGIGEKTSAILLCECIPALTPKQQVAHAGLAPRHNQSGKMNGKTQLCKTGNKRLRTALYLPTLCAIRCNPVIREFYQRLIARGKLKMVAVGACMRKLIHIIVGVLKNQISFNPNYAL

SEQ ID NO: 146139 - protein, 403 aa, unidentified
MSNRFAGLDWASRTHAACVIDEHGSVHLQFEINHDAAGLAELCRRLRGAGVTAVAIERPSGLIVDALLEAGFSVVPIHPNVVKATRPRYRSHGGKSDASDAYLLADLLRTDGHRFKPLAPQSDDIRALRALVRGRDDLVATRVQLANQLRSLLQSFWPGAAEVFADVDSPIGLAFILRYPTPESAARLGPKRMAAFCAQHAYSGRRSAQELLDRLHQAPAVAVGELEMEAKGELALSLARTLDRLVDQIRLLTSRIEHHVSSIDDGRILMSFPRAGRICAAQILAELGSVRERFDSDEHLAAEAGVAPVTYASGKSKAVTFRWACNHRLRAALTCMADNSRHANAWAASVYAKARARGCDHPHAVRVLSRAWLRVIWRAWTDRKPYDPALHSGAQLVLKAARG

SEQ ID NO: 146140 - protein, 314 aa, unidentified
MAIVMGLDQHRAQITAEWFDTETGEVSRGRIVPADRSGVRKFLARFVGRELEVALEATTGWRFVVEELRRVGARVHLAEPAETSALRGNKQRAKNDRADARHLRELLMAGRVPESWVPPGHLLDLRARVRLRHTLVDQRGEWQQRIQAVLYHHGLPKRAGLLTCENRAWLEQLPLPAAGREQITVALGMIDAGEARVAPLDKELRSYARRQPGCHALQALYGIGELTSVVILAELGDARRFSSSREAVRYAGMDVTVHASDKRRAPGHLSRKDRPRCAGRCTKPRRPRDARRAPTTSTTSKPRSDLAVTAPCSA

SEQ ID NO: 146141 - protein, 359 aa, unidentified
MEAQRKALSFKGQNIYIGIDVHLKSWSVTLMSEATQLKRFSQSPDPDALYAHLVRNYPEAEYHSVYEAGFCGFWIHYRLVGLGIHNIVVNPADVPTTTSEKLRKTDAVGSAKLARSLRAGELKGIYVPGSESLETRSLIRLRDSITKDQTRLKNRIKSHLRYLGIEIPEEFSGPGRCWNRRFVVWLKGAETGTAYGRQTLDFLVRQYEALRGQRLEMLRAVMALSRTERFEKPLENLMTVPGIGQLTGMSLLSEIDDIRRFKSADQLAAFIGMIPMCHSSGEREGVGDITVRRSARLRSVLVEASWVAVRQDPALSMAYGNYCKRMAPGKAIIKIARKLVNRIYFVMKRNQPYVKRVVA

SEQ ID NO: 146142 - protein, 343 aa, unidentified
MQTITTIGFDIAKSVFQIHGVDAGGQVLIRRQLKRSQVLAFFQKLPSCLVGIEACASSHHWSRELQALGHTVRLMPPAYVKPYVKRHKNDMADAEAICEAVTRANMRFVPTKTPEQQSCLMLHRTRHLFIRQQTGVINSIRAHLAEFGIVAPVGRKGVTELLRVIADSNDKRVPEVARACLAALGAQLLVLKEQILEFDRMILAWHRSNQTSKRLHYIPGVGPMLATALVASVADPRTFRSGRNFSAWIGLVPKQHSSGGKERLGSISKQGDRYLRSLFVAGALAVIRYAKIHGTGHRPWLTALLARKPTKLAAIALANKIARMAWAMMARGERYKEPIALAR

SEQ ID NO: 146143 - protein, 358 aa, unidentified
MEVLHPHCAGLDVHKDSVVACVHHMVDGDVKREVRSFKTTTKELMALSEWLSVEGCTHIVMEATGVFWKPVWHILADGEFELVLANAAHVKNVPGRKTDVNDATWLAELLAHGLVRGSFVPDQQTQEMRNLLRSRKQFVRERTSHVQRLEKTLEDANIKLDSVISDILGLSARRMIEALIAGETGPDALATLAHRRIKASPAELEAALRGRVSDHHRFMLRLLLQHIDAIDAAITQIDQEVDAQVEPFRTAVQFLTTIPGISELSACVILAEIGRDMSRFPTAGHLISRAGLCPKNDESAGKRRSTRMRKGAPWLKTTLVQCAWAAARKKASYLQAQFHRLRARRGAKRRLVPSPLRS

SEQ ID NO: 146144 - protein, 349 aa, unidentified
MIWIGVDAHKQVHQAIALGTEGPVSERTIANTPQAWAALLEWAQQWPERIWAIEGAWYLGRGLAQYLAAQGERVHEVNGRWTANRRRGMRTAGKSDRLDARSVATLLREEAGTLPRVYADEDELAAVQLWSRMQAELTKDLTRLINRLHDLLLQCDPQYKDRLPDLTTKAAIAALRTYTAPGKGALAAEREAMIRATAEQLALLDEQDRQLRKKLERVSKTRFSPLRQIEGIGPLIACAIVAEVGRPRAGFGESQLAALGGLCPLEASSAGAVRHRLNRRGNRRLNMLFHQIVLTQWRIYAPARTYLLRRQGEGRTAREARRALKRLIVRRVYRAWRECFDINIERVAA

SEQ ID NO: 146145 - protein, 351 aa, unidentified
MAMVTEVVDAVIGGDTHKDTHTLEMLSPVGATIACLVIDNDEAGFETALAWIAEHAPGPRLVVGLEGTRSYGIGLARALTHAGFTVVEVEQPKRQQRRGRGKSDPIDAHLAALQVLRMDVERLPMPRADGDREALRILLVGRRELSDTQTRNKNQLKALLHAGDDVERTLASGHLSDARLSVIIRRRASATETRVQAIRRGEARRLAQAIRDAERELAVNNKQLRQIVEWLAPGLLARYGIGPVTAAQAIISWSHVGRCRTEAAFAALAGASPVPASSGKVVRHRLSRGGDRNLNSALHTIAMTRWRGCPRTADYIARRRADGKGDGEIRRLLKRYIARELFRALNAAAAA

SEQ ID NO: 146146 - protein, 339 aa, unidentified
MSELATVGIDLAKSVFQIHGVDESGQVLVRRQLRRGQLLAFFQKRPRCLIGMDACAGSHDWGRRLQEMGHDVRLMPPSYVKPYVKRQKNDGNDAEAICTAVRQPHIPLVPKKSVEQQDIQALHRARQRLVNHRTALVSQMRGLLLDRGIAFAKSITRVRRMIPEILARADSGLSTMARETIAELWDFFCDLERRIEHFDKKIEAVFKSSEPCQRVARIKGVGPKTATAIVAAVGDGSDFRNGRHMAAWLGLVPRQFSSGDKAVLMGISKRGSQHLRSLLVHGARAVVRTAPNKNDPISQWANQLRERRGFNRATVAIANKNARIIWAVLRTGDQYRAAA

SEQ ID NO: 146147 - protein, 452 aa, unidentified
MGACELESGDVALAAIPIRKMTIGIAQTLLLIIDWRIAMPKKTPGGRPELKAVNVGAAAIDIGSKMHMAAVNPACTDVPVRSFGTFTQDLHDLADWFKACGVTSVAMESTGVYWIPVYEILEQRGFDVILVNARYAKNVPGRKTDVSDAAWLRELHSFGLLRGSFRPDAEIATLRAYLRQRERLVEYAAAHIQHMQKALMEMNLQLHHVVSDITGATGMRIIRAIVAGERNPDVLATYRDVRCHSSIETIRAALVGNDRPEHVFALTQSLELYDVYQAKMLDCDRKLEVLIAALNNKSAKSVGKLSEPRIKTKQVNTPTFDVRTALYGLLGVDLTEIHGLGPSLALKLVGECGTDLRAWPSAKHFTSWLCLAPGNKISGGKVLSSRTRRSSSRAAALLRLAATNGAWRILPPAVLTCGQVESCDRDRSQDCGSILQHPPAWHELQGSGRRPL

SEQ ID NO: 146148 - protein, 433 aa, unidentified
MNPSSASVPSTPSTASPPAMPFEALDHFAGFDWACDHHDVAVVDRNGAIVLQLRFEQTLAGWTTLQQKLAALGKVGVAIETSCGPAVERLLAMGHGVYPMNPKAAQRYRDRKAPSGVKDDQLDAWSMADALRTDGHGWRPLIPEDQATQFLRLLCRDEIALIEQRTALVLQLRAALQEYYPAALEAFDDWTLPSPWEFIVQFPTPQELARAGKRRWQKFLHTQRLYNAETNERRLEVFARAHEFVSPSQVVTRAKSLLAVTIARQLRTLEAQLNEYRRQIEKAFDDHPDSHIFKSLPGTGDKLAPRLLAELGSQRAVFEDAQALQCYAGSAPVTIKSGRRCFQKIRRMCNKILRTTVHHWSNSSREKCAWAQAYYQQKRKEGKGHATALRNLGQRWLKILIRVWHDRTPYDESRHLQSMMRHGSWVLSQVPAK

SEQ ID NO: 146149 - protein, 324 aa, unidentified
MKNIIIGIDISSKTLDICVKEESINYFSIENSVSAIKRFFKSYSGENVIIAMENTGRYNWNLFESLEKFNFRVYVISALHIKKSIGLVRGKNDKIDALRICSFIEKNHQENREWKPSSCSIKKIKILLTERALRIKIKKQLMVQQHDYKLMKSIGLDKELKNLNAKLIKSIDQQIKVIENDIEKAILDDEKLSQQHKLIKSVPGVGQVLSWTLLSKTEGFTAITDPRKMACYSGVAPFDFQSGTSLKRRPGVSMLADKNLKTILHLAAMSAIRLDNDLRRYYIRKVGEGKNKMSVLNAVRNKIIHRVFAVIKNQTFYEKDLVLS

SEQ ID NO: 146150 - protein, 442 aa, unidentified
MVAVMIGIDPHKASHTAVAIDPAEVPLGQLQVRACAAQAERLLGWAQAWPQRTWAVEGAGGLGHLLAQQLLAAGERVLDVPPKLAARVRLLATGNINKNDPNDARSVAVAGLRSAGVREVCRDDHATVLKVWSKRYRDLGRARNQVACRLHQVLCELIPGGVPGEITAGQAERILASITPAEAVEAARWELAAGFTEELRGIDARIRQTRNKLAAAVRAAGTSLTGLFGVGPVIAAAVIGDVRHVARFPDRDHFAAYNGTAPIEVSSGGRKIWRLSRRGNRRLNHAIHMAAVTQIRYRHSPGHAYYQKKLAEGKTGKEALRALKRQVSDAIYACLQADARRAAAPVKSPGGQPGNGSDSSAAGSHPGHRLFGQATPGPAAYPTTPTASFPAPLPSQASGRPGQGPGAARPRQRRQQGVLDPAAREPIMPAAGRNATGPAGHR

SEQ ID NO: 146151 - protein, 357 aa, unidentified
MDGSKDQPKVTAGLDLGDNYSYLCLIDSESGEVIEEGRMRTTPETFRRRLASEGPMRIAIEAGTHSPWASRVLEECGHEVLVANARKLRLIYANKRKTDEIDAENLARLARLDPKLLYPLKHRSEDSQAHLAIIRSREALVSARTQLVNHIRGAVKSFGGRLPKCPAVSFHRRASEHIPEALLPALWPILETIGSLTERIRDYDRKLEAISKERYPETELLRQVEGIGALTALTFVLTLEDPYRFEKSRSVGAYLGLVPATDQSGDRDPQKRISKAGDQMLRKLLVGSAHYILGPFGSDSDLRRHGEKIASRGGKNAKKRAAVAVARKLSVVLHRLWVTAEVYDPLYNTRRRGGLAA

SEQ ID NO: 146152 - protein, 319 aa, unidentified
MIRTICGVDVASSSLEARIGPLGPSAGFANNPTGIAALAQFCRDHQVELVAMEATGGYEQQAVAHLSDQELAIAVLNPRSVRQFAQSMGRLEKTDAIDAGMIAWYAEVKQSKPITLAPHTQRHLRALVTRLRQLTELRTAQLNQQRLITDPLVQDSFAQLLGLLAEQIAMLAQSIAALIEQDPLWRELNLAMRSIKGVADRTVARLMADLPELGTLSNKTISKLAGVAPIAADSGKHQGKRAVRGGRSSVREILFIVASVVGRYEPDFIAFQQRLRASGKPPKVVRIALAHKLLVRLNAKAREVRTQIQAASPKRTVTP

SEQ ID NO: 146153 - protein, 355 aa, unidentified
MEKRLKQSLGIDVSKLNLSLSLGSLNEKLVKEFDYHPDITNDIEGYKVLLRWLRTSVNPEVELLVVMEATGVYDQGIAHYLYELGYRVCVMQSGRVKRYAQSLDQRSKTDALDSRMLSMLGLERNIRLWHPPSEELQELKGLSRERSSLLNDRTVETNRQGAIASSVHSNARALKRHKVRLKLLNTQITAVEQEMRSLIADNEELKRKLEYLTSIPGVSFISAATVVGETLGFESIVNGKQLASYAGYDVVLRESGYFKGKTRISKKGNSHIRAVLHMPSMTCVRCNPTLKQFYNRLKPNKAKPLVALVAVQRKLLMYTLWKNEENYDAEFEIKKQQKHEALAARDNNLINQSVS

SEQ ID NO: 146154 - protein, 342 aa, unidentified
MREASMSEISILAIDLAKGSFQVCGVKAVGAVVFNKSVSRPRLYQLLADHAHCVVAMEACATSHHWGRVAQSYGHEVRLIPAAYVKPFVKRQKKDRADAEAIAEAASRPSMRFVAVKSAEKQGRAVAFRTHQCFVRQRTQLINALRGHLAEFGLVAPKGPASLKLLERALAQPDVDLPSPVREMAALYLDQICRLTELIEQMADELDRASKTDEELRRLCTAPGIGPVTAGAIAAFAPDLSTFDSGRNFAAWLGLVPRQRSTGGKARLGAVSKMGQCDIRRLLIVGAMSGIRWVVRKGGSANRWLAGLVARKPRMVAAVALANKMARMIWVMTTKQENYRMA

SEQ ID NO: 146155 - protein, 403 aa, unidentified
MSGLNGKGSFSVFVGIDVSKEKFDACGIKEDGTRLFQCSLSMDREGFEKVKGHLASIPLSSILIGMESTASYHVNLFSYLVAEGYQVVIINPLLISNYVKMQLRKTKTDKKDAFVIAQFLCEKRDSLMLRATPPLISDLRDLARQRESLVNEMTAFKHDIKRILNITFPELEHMVGIFTKSILKMLQQYPSAFAVRDADLGQLSQMLISDSYGHKRETFAERLVSAARSSVGTNSPAKDMILKQKVTLLLHFEDALQEITGMLIELCRRTMDEDLTILKSIKGIGDKTAANFLIEMGGDINQFECSGKLIAMAGMDPAIYHSGKHEGRGRITKRGNRHLRRIIWLMATKVIQDCDVFKIYYLKRRKEGLHYKMAVLATAHKLIRVIYAMLMHRTTFCPQGANS

SEQ ID NO: 146156 - protein, 417 aa, unidentified
MNHPKMQYTYVGIDSHKDTHTAVFLDCFFEKSGEITFNNLPSEFPEFLNAAEKLKMQNTILLFGLEDTSCYGRLLTLFLKENNALVKHVNALLVARERKNRNITEKSDSVDAECAARVLLSKFGELPDANPEDTYWILRSLVIRRKLLVKTNTCVKNQLHAYIFQHYPNYHSFFSSIDCDTSLAFFARYPSPGTLENTTADVLSELLREHSGGKIGASKADEILDGLQDTIVPFQEIRDDVVRSAIRHIRFNSIEIERLEANLSQYLEIFGVTLTSMAGIDIVTASYMLSCIGDIRRFPTADKLARYSGVAPVTYASGKKDLQFANQRGNRELNSILYQLAIRVSNKVPGTNKAMNPFFYEYYREKQKEGKTKRQALKCVQRRLVSIIWTMLTNHEEYVNPPMLDLPKGAEEDANGK

SEQ ID NO: 146157 - protein, 351 aa, unidentified
MSKYMAFDSHKHYTLAECEDAATGRTRQCRVEHGPGAIRAYLSRYPTGLEVAVEATGNWYWIVTEIEQAGDVPRLVHPRKAKLMMGMINKTDKLDVHGLNRLQRNGTLPTVWIPPGELRDLREVTRVRMLLGCQRTRLKNRITSTLTKYALGVAEASDAYSAKVRLRLLEQIALLPPHTQWAATLMLKQLDFVQTQITQQEQRLKTLLTVTPAMELLMSLPGIGLILAAVLALEIGEITRFASAPRLASYAGTTPRVQASGDKVRYGRLRPDVNRYLRWAFVEAANSVALNHTRCPQRHVSQLYARLRARRGHSKAIGAVARHLAEATFWVLSRNEPYRDPALKTSRSREV

SEQ ID NO: 146158 - protein, 347 aa, unidentified
MDTIGLDLHKRESQLCIGQADGTITEQRIVTSRERFTAVLGHRPPARVLVEASTESEWVACHLESLGHEVIVADPNYAPMYATRSRRVKTDRRDARTLMEACRAGTYRPAHRLSAARRHVRAQLAVRDAVVRTRTRYVALAKALVRRDGLRVPSSAAERVGAHLAALAVSPPLAAELAPLLTLLPPLNATIAAADQRLAELEHTDPSVALLMTAPGIGAVTASALVATIDDVQRFASAHQVEAYLGLVPGERSSGELRRIGPITKAGNRRARWLLVEAAWRILRSKDAAGAPLRGWARPIVARRGARIAVVAVARRLAGILYAMWRDGAPYDAGKIRRPRARQSPAA

SEQ ID NO: 146159 - protein, 524 aa, unidentified
MRRIGIDIALKAAHKAAVFDNGERKGKPFPVAQTRAGFDDLVRRATAGTDEPCEFVMEPTGLAWLPLAAELSRRGHRTYLPKPQKTSALRKFLAAHTKTDANDACAAALVRHVDPTNTHELHVPTADETTLKLCVKQRARLVVDAAKAKGRIHSWLVLANPHLAKALGSDVTSDVATAFLRRQLDPFQVVARGKTELARFWRTHGSGQRSATQADAVWTACETTCELYAALRAGDRLPFEYASMQLLIRQALEQVEFLEGQIGELDTLIAARYATLDPTRLLERQVSGVGAVIAAAVEAFAGDVTRFSSVKRYAAFYGLVPRTKQTGGAEGKPRQRLTKGGHNLLKQYMFLAAETARRADPELAAVYDRAIARGKHHFSAVIIVAHKLVRRIYAVLRQRAEARAGAAETPRYRLQRPDGTELTPPEARAWVAEQFPSKRIKTERAKRTAGGVRQTRSVPQEGSSEDATRAVTLPPPSNLIPEPGAAVKSALDPAPPAAPSVANPDGESVLSTSIEQAHFSLASS

SEQ ID NO: 146160 - protein, 393 aa, unidentified
MQNCLAIDVAKGKSMVSLISSSGEVLIDPYEINHSINDFTNLLNRIMKLKLDNISVIMESTGIYHRPIERFFLESNFKVYTINALYSKMYKRNLRKTKTDKLDCISLAELFFTTDFKQYIKPNDLYLNMNALSRQYFALDELCSNLKNRYKNLVYLCFPEYELIFKKEAIYSEIALSFIEKYPHANIISNTRIDALQNFFKKNNFRYWKRKANIIKEYALKSYPSVNINDESVSNLSQLTRLINTYQKEIETIKYKLVFLAKKTKYFESINSIFGIGEFTTSILIAELGDINRFNNIKELTAFCGLDPTIKQSGRSINIHGPISKSGNKYLRKILFVSCLNIVRLSPKCHIENDIEIYYRKKRNEGKHHYAAIIACTTKLLRKILALCKQLDK

SEQ ID NO: 146161 - protein, 350 aa, unidentified
MVVVGADVHKRTHTFVAVDEVGRKLGEKVVKATTDGHRQAVQWVRSQFGVEVVWAIEDCRHLSARLERDLLTADQKVVRVPPKLMAYARASARTRGKSDPIDALAVARAYLREPDLPSASHDEVSRELKLLVDRREDLVGQRTSTINRLLWRVHELDPSRTPKPGSLDLAKHRTLLGDWLATVPGLVAELARDELADITRLTEQIDALAKRIGERVRVIAPVLLAMPGCGELTAGKIIGETAGVTRFKSEAAFARHSGVAPIPVWSGNTAGRVRMTRTGNRQLNAALHRIAVTQIRLPGLGQTYYRHRLAQGDSSTEALRCLKRRLARVVYSHLHTDHRNRTQPCQTAAA

SEQ ID NO: 146162 - protein, 453 aa, unidentified
MVKRTKTIEEVAVVHPNAAGLDIGASEIWGCVPADREGERIQVFGTFTPDLQHLADWLLANEVDTVAMESTGVYWIPVFELLEARGLTVYLVNARHIKHAPGRKSDYQDCQWLQKLHMLGMLSASFRPDGEMVRLRGYLRHRAQLIEHRAPHLLHMHQALQQMNIQLAQVLTDIGGATGFAILRAIVAGERDGLKLAQLRDPRCKSSEALIAKALSGDWKPEQLFVLQQSLELYDFYTQQLVTCDAQIEALFAVMRPRWEPATELPTVPPAKPDTRSKNHPPASTRAALIRLTGVDLVAIKGISTSLAQTILSEIGTDMSRWPTDKHFASWLGLAPHNDISGGKVLRSRTLPTANRAGQAFRQAAASVTRSRTAFGAFYRRKCAQLGPQQALVATAHKIARSVYHLLKYHVPFEEIGATGYELKQRERELTHLRKKAAQFGFSLTQTPTQAPA

SEQ ID NO: 146163 - protein, 432 aa, unidentified
MQRVRQAWAGIDAGKGHHHVVVIDGEGRRLLSRRVVNGEPDLSEVITAALDRADDVTWAIDLADGPAALVIALLIEHGQRLLYLPGVAVNRISGVYRGEGKTDAKDAAIIADQARMRRDLRELRLEPESIAELRMLTAHRADVAADRTRSINRLRVRLLGVFPSLERALDFTNKGPLVLISGFQTVQAVNDIGSEGLERWLRDRKVRDAAKLAQAATDAAASQQIRIRGEATAAALIARLALSVLELDRQLAELDKVIAERFRADRNADIIASMVGIGDLLGAEFLAATGGTLATFASADHLAGYAGLAPTPRDSGTRTGNLHRPRRYNRQLQRVFYTSALISIQRSPASKAFYDRKRAEGKRHSQAVLALARRRVKVIWAMLRDQQTYAEPGWKSALTGLMPLCFVGSVSLMVFPAVSVSRFRRPGTGRRR

SEQ ID NO: 146164 - protein, 377 aa, unidentified
MEQPTRFVGMDVHKATIVVAVTAAGEVGKAMHYGTIPNTSAALEKLVRRLRTAGSGALKFCYEAGPCGYGVHRTLTRLGEDCMVVAPSMIPRRSGDRQKNDKRDAAALAVLHRGGLLTAVWVPDTAHEAMRDLVRARQAAVRAVRAARQQLSAFLLRHERVFPNDGRPWTKAHRSWLADQRFDQPAQQIVLEESIEAVRLAEQRRDRVDGYLRAQIPTWSLSPLVRNLCALRGVDVIVGAGLAAAIGDPSRFATAPDFMAYLGLVPSEHSSGPRRRIGAITKAGDIHARTMLIEAAHSYRLPARVARRKLKAVDAVPDAVREIAWKAQTRLCQRYRQMMARDKLKQVVVTAVARELAGFVWAIACISSDPPAHRSIS

SEQ ID NO: 146165 - protein, 369 aa, unidentified
MFDYTKTVVGLDVHKESIVAAVLPPDADRVALTMKFENTPAALKTFVERLRARGPLKFIYEARPCGYQVHRDLTAQGQECVVIAPGLIPQMPGDKVKTDRRDAVKLAQLHRAGQLTAVNVPSCDDEADRDLVRGREDILTERLRARHRLSKFLLRHGLVWRETKAWGVKHRAWLRALCFEQGSLTVTFESYLRGLEEVEARLETLERHVLELAQKAAWRTVVANLRCLKGVDTLSALTLAVEVRDFRRFPSACEFMGYTGLVSREHSSGDSVRRYRITKVGNAHLRRVLVEAAWAYRQPDRTGPTLTKRRESGSPEAVATARRAQERLCGKFRKMVGRGKPAQKAVTAVARELAGFVWHIGRLSREVNG

SEQ ID NO: 146166 - protein, 311 aa, unidentified
MTDQVMGIDVGKAKLDVGVNDEKKVRGWTNDPVGRVALSDWVAEQAPQLVVVEASGGYEAALVSELVSRDIAVAVVNPTRVRAFARAEGVLAKTDKIDAQVIARFGATMKPEARARRDETQVALNELVTRRRQLVLIATAEKNRLSTASPTMQGHIGSHLAWLQAEIKRLEEQISQAISANPEWTETANRVDSVPGIGFITAATLVADLPELGQLNRQKIAALVGVAPFNHDSGKHRGKRRIFGGRTSVRSVLYMATLSAIRHNPVIKAFYQRLLDKGKLKKVALTACMRKLLVILNTMVKSGQDWCPAKP

SEQ ID NO: 146167 - protein, 345 aa, unidentified
MQLHTIGIDLGKTVFHLVGLNPRGEVVVRKKFSRKQLLLFTANLQVELIGMEACGGSHFLGRALREQGHEVRLMPAQYVKPYVKTNKSDYIDAEAIAEAVGRPKMRFVPIKSDDQLDLQSLHRVRERWVMRRTAVINQIRGLLLERGITVRKGRRHIDAALPGILEDASNQLSGALRVLLVQLKLELDHLQMRIDEVDATINKAAGENEVCRRLVAIPGIGPITATAIIAAIGNGAAFKKGRGFSAWLGIVPGEYTTGGKQKLLGISKRGNSYLRKLFVQGARAVLQQSAKQSSGLSAWLAQLTTRLHSNVAAVALANKLARMAWAVLAKNEPYRPPIVVGAATA

SEQ ID NO: 146168 - protein, 452 aa, unidentified
MKKTKGYIRCLERKQWVSGKIIIGIDPAKEKHQAVVLDEHRMQQGKSFSFDCTYEGYNIKLWEKLDTIVGSYSSDNLVFAVETACDLWKTIVDYLFRQGYTVLLVNPLTTYHSRPLMNNDYSKTDPKDALLVATNAHNGHYTEYKKHSASINSLHLLSIAYSKLLKDRQAVILRMMAFMDEVFPEYVKCMNVEIETSLYLLERFFLPEHFQKLDIDEHEWPIRRVSNGKHKAKTLQTIKEQAHSSIGRRLVGEEEIMRLILDGWIAEIRQLHKTIKSVKKAMIELAGQTEYFKILVSIPGISDLTAARFIAECRDMDLFSHYKQIEKMAGSNVRLCDSGKYAGIRRINGIGNKRLLNLIYVMTCSAARFNPEVRIKFLRRQLKRKGFRKNIFASSPILLRLIMTLIKEKRTYEIREESLRELEKLENKYNPEKKDKKKSRKKSKKKPLKKVA

SEQ ID NO: 146169 - protein, 317 aa, unidentified
MTTPTASFVGIDVSKHQLDVAVRPRGETWTVAHDEAGLSALVARLRALAPTLIVLEATGGLEVALAGALATATLPVAVVNPRQVRDFARSTGTLAKTDRLDAQLLAQFADTVRPEPRPLPDAQAQELTALLQRRRQLVEMLTAEKNRLALASRRIRPQLQAHIEWLYKQIAQFDDDLRQLVRASPLWREKDDLLRSAPGVGPVLATTLLAALPELGRLTRQQIAALVGVAPLNRDSGTLRGRRTVWGGRAHVRAVLYMSTVVAMRHNPVVAAFYHRLRAAGKAPKLALTACMRKLLTILNAMLKHHTHWAPVSAQHA

SEQ ID NO: 146170 - protein, 310 aa, unidentified
MDGIIVGIDVSKDRLDIAVRPSGLAFAVARNGAGLEQLVTRLRELSPSIVAIEATGGFETVAAAALAGAGLPVAVVNPAQIRAFAKAINQRAKTDAIDAAVIAHFAQATGLEPRAVPDEATRLLADLVARRRQIVEMIGAERQREKRVAIAHLRKSIARLLKALEKELASLDADIDDAVRGSPVWREKEDLLASVPGVGPVIARTLLAELPELGQLDRKQIAALAGLAPFTRQSGQWRGKSFIGGGRTVVRTVLFMGAMVAKQHNPILKAFFDRLVAAGKPKMVALIAVARKLLTILNAMVRDHQKWQHA

SEQ ID NO: 146171 - protein, 325 aa, unidentified
MILGIDVAKAKVDIALLDGQELIATGQFNNTPAGFKKLSKWLKHKTGEPVRACMEATGRYGDELAEYLHKQGHSVSVVNPVRIKKYAESQLRRNKTDKLDAQIIADFCRTQEPALWMPPSPQKRLLQEMVRRLNTLVQERTRERNRLKSDLKSDIVKASIVEALDFIAAQIEHLETQIQEHIDHYPDLKRDHELLTSINGIGDKTAFRILGELPDVDRFDNAGQAVAYSGLSPRQHTSGSSVHKRSRLTKIGNQNIKTAMYLPALSAIRFNPIVKALAERLESYGKEKMVIVGAAMRKLLQLAYGVLKSGVPFDPNYSANIQDVA

SEQ ID NO: 146172 - protein, 339 aa, unidentified
MRLYAAFDLHSSNSYLGIVEESGKRKFRRRLKNQPDLIRETLLPFKDDIVGIVVESTYNWYWLVDFLMEEGYRVHLANPSQIQQYSGIKHSDDKDDAFWLAEMLRLKILPEGYIYPKEQRPLRDLLRKRGHLVKLRTSLIVSLQNILARNVGSKMNTNALKALKEDKVTPLLAGKDDISLAGRVSKEAIDSLTRQIWAIEAAVEKKIDLRKPYDLLLSMPGVGRVLALTIMMETGPINRFKKAGNYVSYCRKVPSGRFSNDKKKGSGNRKNGNKYLSWAYAEAAGLARRIDSKARAYHDRKRRRTNTPIAYGALAHKLARAAFYIMRDEVPFMHEKAFA

SEQ ID NO: 146173 - protein, 354 aa, unidentified
MKKSSRMSVIHPHAAGVDIGAEFHVVAVPPDADAAPVRTFQRFTGDLHRMSDWLKTCHITTIAMESTGVYWLPAFEIPEAAGFNVILVNARDAKNVPGRKTDVNDAQWLQKLHSFGLLRASFRPEHDISVLRSYLRQRERLTEYRAAHIQHMQKALMQMNVQLHHAVSDITGVTGLSIVRAIVSGERDPSVLIQYRDVRCKKTPEVLQQALTGNWQPEHLFAPEQSVAFFDFYQEKIRECDDQIETSLLQLSTGTEEPEGVLPSARHRTKQPNQLSFDVRPLLWKITGADLTQIHGFGPYLALKFVAEYGTDMNRWPDASHFTSWLCLSPGNKISGGKYCPRKHGVHPVELLLH

SEQ ID NO: 146174 - protein, 406 aa, unidentified
MEGPIITVDASKGSCHYQPFIENGHPMRKPKQLSATIDGFQKLGQTIKDLEAKTEREDIPVIFEATGVYHRPLQKYLEDHKIRYYIISPLLSATYRKTDLHSNKTDALDCAHIAKAYYCEKELRQYQAQPQEYKRLYQLSRIYESELVHLRKRKVSLRSMLDIIYPRIDKTFKGNQNLYDPIPMEILKRYPHPSLLLSHREDTIVKTVGHRTGHLKGYTERIVHKIYEKAKECYSGCEINDIEVLKLPSLIENVQEQKKKCDSLLKEMIEIARTCPYFASVVSIVGIGENLAARIIAELGDVNRFDNRAAIVAYAGLNPKIQQSGDIDGLHLKISKKGNKHLRCLLYLGAQCNYRLRKEDPLYEFTKKKRQQTQCPLSSKAAYTASAHKLLVIIYSLCKNGTLYHS

SEQ ID NO: 146175 - protein, 315 aa, unidentified
MAMPVSVAKPIVGVDVAKDELVIYHAETDRLEAIPNTKAAIKKWLKELSAPVDVAIEATNIYHQEFADLAYAKGCVIYMIGGYELSHYRKGVKVRAKTDALDARLLARYLNNEGHQLHPWTPPSPLYCRLISLFRRRAALVQARVSLKQSWSNEPLLKRAFENQIKAMQRLEILLEKTIQTQLEAAGLGAQLKRCMKVEGIGLLNGARLLTSFQRGDFRNADAFIAFLGLDLRISDSGKKKGRRCLSKRGDPEARRLMHNAAMSARRTAAWKGFYEALRARGLSTTEALVALARKLARVVFALLKNQSEYLPKGI

SEQ ID NO: 146176 - protein, 387 aa, unidentified
MPQPNDLSRSLVALDQDSTIIAVVEMSQSSWLVAGMLPGIERQPRKKLEPSAERLLGLLHRWRDEAVKAGRKITRIALAFEAGRDGFWLARWLSARGVEAHVIHPSSVAVSREHRRAKTDRLDTELLKRAFLGWLRGERGHCSMARVPTMAEEDAKRPNRERGCLVGERTRIVNRMKATLARLGIRNFKPTLRKAAERLATLHTPEGIPLPPNGLAELQRDMARLGFVISQIKEIEEARQKRLEQEPESGPHAMVRHLARVVGVGVETADMLVHEVLSRPMRDRKAVARYAGLTGSPDESGAKRREQGLARAGNARVRRGMIQLAWRFLRFQKESALAQWYQARTADSRVGTRKTMIVALARKLLIALWRFVTTGETLEGVILRPAG

SEQ ID NO: 146177 - protein, 376 aa, unidentified
MLDHTHQNTKPTIYAAIELSKKSWVVAILRPNKDQPSIHRVKGGDVSELIAKLRGAAAHGERLLICYEAGYDGFWLARSLDRAGIDCRVLDPASLQVNRRARRVKTDRLDVLMLVRALVAVDRGDRHVCSIVRVPTIEEEDARRSHRERQRLIRERTAHINRIKGLFFGQGIRGIEPLRKRSRVNLSEIRTAEGLPLPARLRAEIEREFSRFDHVEEQLKAVEAERDTADAQDPAVNQKREMLIRLRGLGPASAAILSREVFGRSFANRKQLGSYLGLTPSAYDSGSSTRCQGISKSGNSHARHMMIEVAWLWLKYQPQSPLAKWYTQRAAGQSPRIRRIMLIALARKLIVSLWHYVEGGIVPEGAVSVVEGAATA

SEQ ID NO: 146178 - protein, 502 aa, unidentified
MSSQSKIPDRGNESVQERLQHLESHHADRVLAFRQRLAQVGYDRVLILLLDIGKNVHWATALTAAGQELVQPFKLPTTRTGLDRFLALADPLIGSSRFDLVLLGHEPTGVYHEPWARALMDHYAAHLAAQAAPQMDYIFFNPYQVKLARQQTHLRHRKNDPRDLAAMFDLMTRGLGNPAFLPTGVEMLIRNEVGFVRAQSRLLDRLERQLLQQFDRLWPGAVVNVAKFSRAHPGVDKPTPIIQTHPFQRQRIRVLLQHCPNPYHLRALSDQEILDLYRRHAGRAGPALLSMLRTWADNTVLLPEDVCAALAEQVQRLFAQYAYTETMIEDAHGRLESLVPLTPARHISAMPGLSDNDAARYLAILGSASRFLRAAEVWSLSGFDPLTDGSGDTPDRIGHISKRGDPASRNTLYQMGYRAALHYAPVSLTFLDAYDRGKSEIEATIHAAHRVNRICFHLVHDDEPFQSRSTPQMEAEKKRRWQAFKAAKKRRGNRRKRGKRRH

SEQ ID NO: 146179 - protein, 418 aa, unidentified
MKKHSKSCRRSEASSKRAKSRGPVQRDAKEVMAEVLGKLTGKLDAPTVSTSAQENRRGNTVGPNRDRLTVGVDLGDRWSQYCILGLEGETLAEGQLRTTQEDVGEFFRGLTTARVVVEVGTHSAWVQDVITELGHEVLVANPRLMEGSKRRKRKNDRIDANKLARLGRVDPQSLYPIRHRSREVRQDLVVLRARDALVSVRTELINTTRGLVKSMGTRLPRCSSPSFAEKVKDAIPAEVREALQPLVQLVETVNECIERYDERIEELGRKKYGHTTLLRQVKGVGPITSLAYVLTLEDPQRFASSREVGPYLGLVPKQEDSGDIQPQLGISKAGDRLLRRLLVGSSQYMMGAFGPDTDLRRYGLRLCERGGKNAKKRAVVAVARKLAVLLHHLWVTGDVYEPLHRTETGTGTAQAAAA

SEQ ID NO: 146180 - protein, 364 aa, unidentified
METVFYVGMDVHKDSIQVAVLKDGCARCEIEQHLPYDFKKVRKVFSSLQRKGTVLAAYEAGSMGFDLARLLSEMTIQCVVAAPGKIARKPADRVKTDRRDALMIARLLRSTELEAVHVPTREDEAVRDYLRARADLKLDYTRSKQRLSKFLLRHGYLYEGSFWTLRHMEWMRNIEFSLPMLADTFARYLETLLTQKERLRAMDTQIEALATGARYSEGVARLRCLKGIDYLTALSLICEVGDFRRFERAEQFMGFLGIVPGERSSGPKRRQGGITKAGNVHLRKLLVEASWHYRYHSCASKSLIERRAGQKPEVIAYAERARESLQNKFARLVHRKCKKSQVAVTAVARELAGFVWGLMVGKVA

SEQ ID NO: 146181 - protein, 385 aa, unidentified
MSQFSGFPQGAVDYNSTIIGALELSEKKWVLAVQLPGVDRHSRHVLDACGERLVSFVERLKARCASAGRKIARVILTHEAGRDGFWLARFLARRGIEVHVMQPSSLPVDRRARRAKTDMIDAEMLLRTLMAWLRGEPRVCSMVPIPSEADEEARRAHREREDLTRERRSIVNKIDGILATLGVKGYKALRRDRREQLNCARQPGGDPIPQKARARIERLLDRLDLVLKLIDQVELARDAVLNKDAPADEAERMIRSLTDLRSIGPDVATLLVREAFVRQFRNRRALAGYVGLGGTPFSSGGSEREQGIGKDGNRRARAAMVELAWMWLRWQPDSALSAWFRARVGAMGGRIRKIMIVALARKLLVALWRYVTDGVVPNGARLKAA

SEQ ID NO: 146182 - protein, 338 aa, unidentified
MEHQRQYVGIDLHRRRSVIVRITDDGEVLETVRVVNDPLQLALAMANAGQDPEVALETTYGWYWAADLLQAEGAHVHLVHPLGLHWDSRRVKNDVLDATELARRLSRGDLPEAWIAPPELRELRELVRYRAKLVVLRISAKAQVHAVMAKLGILPTLVDMFGPGGQKLLDEMAFEGAYAIRIASLRDLLELYGRELAMIERAVARRLRGHTGYRAVQAISGVGPVMASIFVAEIGDVSRFHSAGHLCSWAGLTPTHRESDIKVTRGHITKQGSNLVRWAAIEAVACYHGGAPIAPSYARVAARRGAMIARVAAARKLLCLVYYGLRDGEIRCLAEAAG

SEQ ID NO: 146183 - protein, 407 aa, unidentified
MDVIYPRCAGLDVHKQTVVACVRVAGATTALVQEVRTFGTTTTDLLALADWLESFGVQQVAMEATGVYWKPVWHILEESFELILANAAHVKNVPGRKTDVNDSMWLADLLAHGLIRASFVPPTAVQELRTLTRTRKQFVRERAAHVQRIEKLLEDANIKLSSVITDITGKSGRAVLKALIEGQTDPEQLLACIGRVKASRAELLEALRGRVSAHHRFMLKLHLGHIETLDQTIASIEKEVGQGLEPFRQAAKLLSTMPGISDVSANVVVAEIGIDMSRFPTPGHLLSWACLCPRNDESAGKRRSTRLRRGGVWLKTTLVQAAWAAIKVKGSYLQAQFQPLRARRGTKKAIVAVAASMLTAAWHMLRDGTEWQDLGAAHFDRADVTKTANRLIRRLQQIGYKVEAIPA

SEQ ID NO: 146184 - protein, 391 aa, unidentified
MGTTYKVVQMGLDSHRNFSKVTARDERGRVAWRQRLEHADRTRLREQLAAWPRGVPVVLEATFGWGWLADELAQAGVDPHLASSKKVAGWRKSRGIAKCNRTDADLLSELWSEREPWWQVWLAPPEVRDRREWLRYRMGLVQLQTLTKNRIHATLHRHGIVQSFSDLFGRKGQAFLAQLADAQDATLRESARRTLAGHLELLRQLRQQIAEVTRELRRQVSADAQAERWRSLPGVSWVLAYTIFAEVGEVSRFKDGRHLSSYALLAPRADESGDESESTPTGRHVGHAGRRTLKWAFIEAAHGAVRRSAHFKEVFDRRTDGGKKDRNRGYIAVAHALARVGFACCRNATNYREQPPARPGCKPAETSSGSEARASRPGPGQPEDPMAVAAF

SEQ ID NO: 146185 - protein, 288 aa, unidentified
MSQNLNNAVSVIGIDIGKNSFHVVGLDDRGAIALRQKWSRGQIEARLANMPPCLIGMEACVGAHHLSRKLKAFGHDARLMPAKYVRPYSKGQKNDFRDAEAIAEAVQRPTMKFVATKTADQLDLQALHRVRERLVSQRTGIINQIRAFLLERGVAVRQGLRFLRAELPRILAAPPDVLSPRMVRLIKNLAEDWRRLDERIDQLSNEIAALAQQDAGCERLMSVPGIGPIISSAMVAAIGTGDAFSKGRDFAAWLGLVPKQISTGDRTILGKISKRGNRYLRVLFVQAA

SEQ ID NO: 146186 - protein, 317 aa, unidentified
MGGVNAAIEVGKRQLVVRLGSEGEQFSEPNELPAIKRIAKRLLQAGCERVLIEGGSYQSALIAGLRAAQLPVVVVNPRRVREFARSIGQLAKTDDIDAGVLALYGERTQPSLRELPDEQSQTLRVLWVRRVQLIEMLVREENRLEHVPAKAKAVHRHLRSHIDYLRKEIKQADDDLDREVRNSALWDKYEMLSSVPGVGPVLSVALLSDLPELGRLNRREIAALAGVAPFNCDSGTLRGQRRIEGGRPRLRRVLYVATLAAVRCNPVLKPFYLRLRVAGKPAKVALVAAARKLLTILNAMLKTNTAWRVLPSLTTDS

SEQ ID NO: 146187 - protein, 309 aa, unidentified
MDPIAVGIDVSKERLDVHVHPAGTVLSLSRDGAGLEELIGSLASVAPQLVAVEATGGFETVVVAALAAAGLPVVVVNPARVRAFASALGQRAKTDPIDAQVIAQFAAATKPPVRALPDAATQALADLVARRRQIIQMIVAEGQREKRAAPRAKRSIARLLKTLRRELSEIDADIEETVRGSPVWCEKEDLLASVPGVGSVTARTMLAELPELGSLNRRQIAALAGLAPFTRQSGKWRGKSFIGGGRASVRAALFMAAMTAMRGNPVLRAFHQRLRAAGKPKMVALIAVARKLLTILNAILRDKVKWQTA

SEQ ID NO: 146188 - protein, 424 aa, unidentified
MKVTFQTCCGVDVHKSFLVATIIKTSNGIEPSYQKRRFSTFNNSILEFKKWLLENECLYVCMESTGKYWIPVFNLLEDEINVTIANPKWVKAVKGNKDDTKDSKWIGDLFRLGLVRGSYIPCKKIRILREFTRYRYKLVSCRSSEKNRYQNALTVCNVALDSVVSDIFGKSSTSIIDYLLGQSGTSIDHEVIASKLLKRLKAKEDAVIESIEGYQMTDSQKYRMHLVRAHMDYITAAINDVDSEIESLISSDPDYENAVGLLCTIPGVKYDSAITIISEIGIDMSQFCSSKRLCCWAGLTPGSNESAGKKKSVRITRAGVYLKPALVQCAHAAVKSDKSPYYKKKYESLVKRRGKKRAIIAIARMILTAIFQMLTTGETWNPCDLYKIDMPEALLEKQKQKAIKQAQKLLIREGLLPPTEPIAS

SEQ ID NO: 146189 - protein, 394 aa, unidentified
MDRALVGVDISKDSFSAAGLDGEGKECFSGFYSMDFDGFCKFLEILTTRCQDLQKVLVGMESTGCYHINLFSFLTSRGIQAVVINPLLIANFAKRSLRKTKTDKKDAKTIAKFLMENREEISQLSISEDLQDLRDLARERESISHLITATKVEIKRVLRTTFPELESVGDLFTRSMLRFLKEYPSARRVKMARLKDLAKVLNQPQVGNKLSFSVEDILRAAHSSIATVSPAKEVILQGKIATLVHLQGRLAELTKLLTDFCKATRVEDWKILRSIKGVGPKTAVPFLAEMGSIENFSSHKKLIAFAGMDPSVCQSGKYIGKSKLSKRGNRHLRRAIYLMASAVVSQNAFFKAYFLKRKREGLTPQRVLLATAHKLIRVIFAMLSQRTYFQAKMA

SEQ ID NO: 146190 - protein, 421 aa, unidentified
MGRLKIVYPICCGMDVHRDFLIACIASTNSQGVTEYESKRFSTFSGGLRALRDWLADRNCVDVCMESSGKYWFPVHNILESTCNVVVSHPKFVKAIKGKKTDKKDAMWIADLFKHDLVRGSFIPPEDIRQLRDLCRYWQKLVWCLNGEKNRAQNCLTVSNFKLDSVFSNVFGKSSSAIIDFMLEHPGEAFDVAPFVHHRCKSPIEEIQAAVDGAFNPFQAEKLKIIREHMDDLEKLKALLESLILTLAEPYMHQVELLLTVPGISEIMTAIRIIAEIGVDMSVFESSKHLCSWAGLTPQNNESAGKKKTTRIGKAGQYIKPLLIQCALAACNPRSVKQPEILRKYQQLKKRRGTKKARVAIARRLLTAIFQMLLKDESYSPFVAPAKESIPEKRILSREQGLAMLRRKGFIFDDDIDAVTA

SEQ ID NO: 146191 - protein, 403 aa, unidentified
MEGPLISLDVSKGKSNYRFFENGTDRKGKKGVIRHDIQGFDSIRDEAEKMEERLRIKPSVIFESTGVYSDVVEKYFTDKGFDVYVISPLLSASMRKEGVRPAKNDSLDTLSIAKVFYSKDDLRKCSENDKKAERLREMSYELDMMNRRIRPMKCQFLRLLDKVWPCLDEVSDYSSRFMLDFIIAFGHPENIKTVKGVLSVIRKSEMGTAGRKDKIAQDLFDYCHTHLSAVSKDSSYVELLKRMAIELKAMAKKKSELIDRMAEEARNKDEFVRLLTIPAVAKTTALKIMARVGDISRFRNAEALVAYCGLDPRVYQSGKMTGEHRTITKKGDCILRSTLFLAVKLMVMLYPDTKVARFVATKAKNGLSYKQAVVAGSAKLARIIYSMLTHHENYVEFNADIVA

SEQ ID NO: 146192 - protein, 355 aa, unidentified
MNDAKYIGLDVHQATISVAVRDSSGKLVMEAILETKAETILQFLRGLRGSLHVTFEEGTWAAWLYDLLKPHVTRVVACDPRKTGLGKVRNRNDRNDARELAELLYRNKLDPVYHGEQGLRTLKELARSYLAITRDLTRVMTRVKAIYRSWGIPCAGQQVYAFRHRTEWLAKLSEVGVHRRAEFYYQQFDALAALRQEARRELLVESRKHSAVKLLRQIPSIGPIRAALLVALLQTPHRFRTKRQLWAYIGLALKTYTSGEYRFEGGQLKRSKKTLAIRGLNRNHNHDLKNIFKGAATWAASNSGPFRNFYEACVGRGMKPHMARLTLARKIAAITLLVWKKGARFNAEYLKVQAA

SEQ ID NO: 146193 - protein, 326 aa, unidentified
MLYAGMDVHKKFCQVIVCTKEGEVIKEGKIRTNEEEIKKFFYGLKDLKVAIEASTNYSYIVDALAKEGYEVLMAHPLKTRAIAEAKIKTDKIDAKMLANLARGNLLPTSWIPPKEIRDLRDLVRQRIFLVRQRTKIKNKIKAELIKRGIDYKRNIFSKAGKEWLHSLKIPAIETYLSIMDKLEDEIKKMDKKLKKEEEKFNEIELLKSIPGISTFSALVIIAEIGDVNRFPDEKKIFSYAGLVPSVHKSGEKIYYGRITRQGSKYLRWILVECARIHVRKCDSKITEFYRKLKKKGKHENVAIIGAARKLLQTIYYMLKKGESFNG

SEQ ID NO: 146194 - protein, 353 aa, unidentified
MKKIAIGIDFSKKTFDATIIRRDADTYMELAYSKFNNDVKGFKALEKFVKATLKGSPEAKDKSSWIFCGEHTGTCSIPLCDYLAKKQYFMWLESALVIHRKCGIVREKNDKVDSKRIAEYALRNFSTDVKPYELDSKDFKKLKSLYAAHDMLTKDKVAKINQLKSGTLDASPAAKHEIDRQLTSIRKSLKEIDDEIKCLLAESEEFSHNYTILDTFKGVGFLTIACLIIKTRNFKDMKDARELGCYIGVVPHRQQSGTSIDRPSRTSKYRDKNANALLSTCVQSALRNGNPIIGPYYDRLVKRGVNHYKALNNCKFKIINVLLAMLRNDTRVSMDIHGKSQTQWGADRISVAS

SEQ ID NO: 146195 - protein, 291 aa, unidentified
MRGAVHMQITTIGLDIAKNVFQVHGIDAAEKVIVRKQLRRGQIIAFFEALAPCLVGMEACATSHHWARELTKLGHEVRLMPAKDVKAYVKRNKNDAADAEAICEAVRRPTMRFVRIKSAEQQGQLMLHRARDLLMRQRTQLINALRAHLAEVGITAAQGREGIKELLAIIAQDEGSRLPVDAHASLTVLAAQLQAVQTTIGSIEKRIVAQHRSNEASKRLETIPGIGVVGATTITAVVTDPKAFRSGRDFAAWIGIVPRQDSTGGKQKLGPISKQGDQYLRRMGALRSRAV

SEQ ID NO: 146196 - protein, 319 aa, unidentified
MAKIVLGIDVSKNTLDVALIFDNRTLCKQFKNSLEGFKLLAAWLESLQITRVHACLEATGTYSEAVALFLHEQGHRVSVVNPLRIKGYASANMQRNKTDRLDARLIATFCLTQEPDEWQPPSAEVKHLQLLVRRVEVLEEMLQAEENRLTNAAPQIKSSIERIITLIKEEIGELERQIKQHISQNSNLKEQSELLQTIPGIGARTANLLLSEIEFEHYSSARSIAAQAGVTPRKRQSGTSLKQTSLSKLGNARLRKALYFPAIVARQHNEIVKEFAERLKKNGKTPMQIVCAAMRKLLHIAFGVLKHKRAFDASLAFSA

SEQ ID NO: 146197 - protein, 418 aa, unidentified
MKKHSKSCRRSEVSSKRAKSRGPVQRDAKEVMAEVLGKLTGKLDAPTVSTSAQENRRGNTVGPNRDRLTVGVDLGDRWSQYCILGLEGETLAEGQLRTTQEDVGEFFRGLTTARVVLEVGTHSAWVQDVITELGHEVLVANPRLMEGSKRRKRKNDRIDANKLARLGRVDPQSLYPIRHRSREVRQDLVVLRARDALVSVRTELINTTRGLVKSMGTRLPRCSSPSFAEKVKDAIPAEVREALQPLVQLVETVNECIERYDERIEELGRKKYGHTTLLRQVKGVGPITSLAYVLTLEDPQRFASSREVGPYLGLVPKQEDSGDIPPQLGISKAGDRMLRRLRVGSSQYMLGAFGPDTDLRRYGLRLCERGGKNAKKRAVVAVARKLAVLLHHLWVTGDVYEPLHRTETGTGTAQAAAA

SEQ ID NO: 146198 - protein, 351 aa, unidentified
MDATTVAVDLAKDVFEVAVANRAGRIIERTRLRRRQFERFIDTLPAGTEVIMEGCGTAHYWGRRCQARDLRVRLLPVQYVRPYVRRNKTDRTDTEALLEANRCGGIQAVPVKTIEQQSLQALHRVRTQWQAARTARINVMRGLLREHGVPIGVGARTALTRIPALLEDSTVPLPALVCATVALLLEEVRALEARIATIDRQLAQVAREHPTARRLQQVPGVGVLTSTALVGAVGHIHAFRRGRQFASWLGLTPRESSTGSRRYLGRISKRGDVYLRCLLTHGARAVLLTAQRTVRSTPDRATTFQHWAVALAARRGHNKAAIAVANKLARMIWAVWHHDVEFHESRATVAA

SEQ ID NO: 146199 - protein, 342 aa, unidentified
MNVTTIGLDIAKSVFHVVGAEARGKPVLKKRLRRSKVLAYFGNLSPCVIGIEACGGAQYWARELRRLGHDARLINPKYVKRFLCGNKNDYNDAAALCEAVAHPKTRLVAVKTPQQQDVQALHRVRRGVRKERNAWVNRARGLLGEHGIVMPQGIGAFRRRVPELLEDAENGLSELFRELLAQLYEQVRALDERLAGYDKRLAQLARTDEACHRLDELPGFGAVISTAMVASVGDGQAYRNGRHLSASLGVVPRQHATGGKTRLLGISKRGDKYLRALVIHGARSVVRHAKNKDDALSRWINRIRAESGTNVAAVALANKLIRIAWVILRRGERYCPQLAARA

SEQ ID NO: 146200 - protein, 368 aa, unidentified
MEKIGVVEGRRQEGLPMPKRPPEGTAVWMAIDISRSKAVYCLRWDGSEQRRLSTPLGIEHVRAVVEHYRGCQLHVAYEACGFGYELAWWLQEYGVAASVIAPSRVERAPGLQVKTDRVDVGKLARKLEKGDLKAIYIPTRTVHEHRQIGRTYAQSLKERKRAQVRIRSLLQEQGRLGPLPVAGWKAYCTWLDAQALPEPVRLCVQVHQQLRAVAALQAKRLNAELYTLAQSAAYRPLVRALSAQSGIGWHSAIRFVLELGDINRFPTTDALPHYLGLTPSQYSSGELDHRGHVLKCGPGFLRALLLQCAWSAVRQGRDLDLKTRFEMLAPRIGRKRAIVAVARKLAIKLRGRWRQHLLASRPADAVAV

SEQ ID NO: 146201 - protein, 343 aa, unidentified
MDYFAGLDVSVKETSVCIVDETGKIAREVRVASEPEALLAVLRNPTYRFKRIGLEAGPLSQWLFSALAEADLPVICVETRHMRAVLKAQINKTDRNDARGIAQMMRVGLYRPVHVKTLRSQKLRMLLTHRKLLQSKAIAIENDLRGTLRNFGLKVGMVGTTKFEARIKELVENLPDLFLLVEPLLVVRRVLREQIGVLHRRLLAAVRDDEVCRRLMTVPGVGPVVALTYRATVDVPARFHKSKSVGAVLGLTCSRDQSGERDRPGAISRCGDEMMRAMLYEAAQAMLLRSAKWSWLKAWAMQIARRRGMKRAIVALARRLAVILHRIWVDGTEFRWTREVAAA

SEQ ID NO: 146202 - protein, 413 aa, unidentified
MDHATPLSVPDPTGISGDCATLFVSLELSRSTWVATSLALGSRKMSKHTLVGGDARKLLDLLGRLKSRAEQRMAAPVKIVAIQEVGLDGFWIHRLLEANGVESHVVDPASIAVPRRHRRAKTDAIDGETLLRTLMAWQRGEPRVCAMTVPPSPSEEDRRRVSRERAMLLRERIRHTNRIRGLLFGQGISNYNPLHKNRREDLEELRTGDDRPVPAHLKAEILREIDRLELVLRQITEVEAERDKILRSAPANSPAELLMQLKGIGPEFAGVLYLEGLFRHFENRWQLAVYAGLAPSPWKSGSVDHEQGISKAAYHNDRTCLDVGEMPARQCSQLLVPPARWLRARADPPHLDRSTRPQAAHCPLEIYQPWRDPGGCYREASLRHPGRRKHYRVPRGLISPVGSGRADRHRQWL

SEQ ID NO: 146203 - protein, 334 aa, unidentified
MFVGLDVHKRETQVFLLPAAAKTVGEEKRVRTTAASLKRVLKGVKGPVTLEAVGFYRPVARWLLEQGHDVHLANPRLIPKAKVKTDKKDAKHLAKLLRADLLPESWIPPEEVQQLRDLVRHRRFLGEETGRLKSKIKHDLLKHGHFFDKNPVETINGRAHARRLKIPEVTSSINILETLENETKQADAKIKLEANKRPEAKILMTTPGVAEFTALGILAEVGDFKRFPDPEKLASYAGLSIVEEQSGDNDRKGRITKQGNTLLLTLLVEAAHNHIMRCPESQITKKYERKKTRSGAKRAQIAAARSLIHAFYAMVRDQTEFQVNPKTPDERPAA

SEQ ID NO: 146204 - protein, 453 aa, unidentified
MKKIRAYRATQVKKVCLVRVTKNREGQRVYVGLDIGKEEVFVMLRWGESDFERPWKVKNPLEVSDLVEQLSKLAQGRETIIALEPTGTYGDPLRQGCSDAGLTVHRVSPKASHDYAEIFDGVPSKHDGKDAAIVAELAALGKSSPWPFEVRAWDRELAYWVDWMNVQRRSLTMWYGRLEGLLARHWPEATRTLPLTSGVLLQCLATYGSPANLATDGAALGCLRRWGRGHLSAEKGEQLQAGARCSVGVRQSEMDVCRIKQYASEALTCRREIASSKKQLKLLAKDHEVISSQAIAVGVVTACVLWVHLGDPRSYGSGAAYRKAMGLNLKEHSSGKWVGRLKISKRGHSEVRRWMYFAALRLIRQPGVKEWYEAKKAKRADDRTEVMRALIGVMRKLALALHRVGTSGEEFDESLLFPGSVQSLNSKTRESSTKIAIERRCEGEGKAAYETTV

SEQ ID NO: 146205 - protein, 362 aa, unidentified
MQKHILVGIDLGDKNSVARIAADRENSERFNFFNTRAGRARLFREVKNRAEKAAKAKIVMAYEASSCGYILRDEALAQAIDCWVLAPTKMEKSVEQKKQKNDDRDAQDVFEKLRGHILAGNRLPTVWVPDHNTRQDRELVRSRLEIGEKVTEVKTQIRMLLKRQGIEKPPEVRGSWTKGYREWLQALSEDPHWGPGTRASLGSLQRQLEAIEIEMKRLDKQIQHLSREDRHKPIIDSLMKEQGVGLLTALVYRTEIGYAGRFRRGRHVGKYVGLNPKSHESGQQTDRKGHITRQGSPRLRKALCQAGWVHVRHDPYAREFHQRLIAKNPKKKKIALVAVMRKLAVRLWHRMRDAEAEMAATR

SEQ ID NO: 146206 - protein, 388 aa, unidentified
MIYVGIDIAKLNHFASAISSEGEILIEPFKFTNDADGFHLLASKLESFDKASTIIGLESTAHYGDNLVRYLVTGLYKVCVLNPIKTSQMRKNNIRKTKTDKVDTYVIAKTLMMQDTLRFISFYDLDLMELKALGRFRQKAIKQRTRLKIQLKTYVDQVFPELQYFFKSGLHQKAVYAVLKEAPSPNRIASMHMTHLATLLKTTSHGHFTKEQAKELRVLAQKSVGSNDSTLSIQITQSIEQIELLDSQLKKIEEEMTDIMKFNDSVIMTIPGIGYINGGMILGEIGDIHRFSNPNKLLAFAGLDPSVYQSGNFQARRTRMSKRGSRVLRYALVNAAWNVIRNNFTFKSYYETKMDEGRTHYNALGHCSGKLVRIIWKMLTDKVEFNLK

SEQ ID NO: 146207 - protein, 346 aa, unidentified
MMIIGCDYHPSWQQICWMDTVTGETGEKKLEHASGEAEKFYRGLPAPALIGMESTGNCQWFVEMATTAGHDVWTGDAAKIRACDVRAQKHDRRDAALILKLLLEGRFPRIWTPSGEEKDLRQLLIHRYKLVRIRAQVKNELQHLAMNQGITKKRRLWSKAGEKVLRELPLAPWASRRREDLIKVREMLSAQIDLLDQAVVEVAEKNEKARLLMTQPGVGPITSMAFVLTMGDVNRFQRGKQVASYLGLIPREYSSGGHQRFGSISKQGNRFMRMLLVEAAQVAVRCDPGMRSEYLHRCHRKAKGVAKVAAARKLAIRLYWMLRTNTGYPGVVRVEGSPRVPLVSAS

SEQ ID NO: 146208 - protein, 311 aa, unidentified
MTETNIGIDISKDHLDVHRLPGDERRRFDNSKAGHKALIHWIGETPARVVYEPTGYYHRALERALAAAGMPIAKVNPRQARRFAEATGNLAKTDALDAAMLTRMGAVLSLQARPVPSGIISDLRDLRTARNALIKDQVAAQTRAKAITLPLLKRQNAARLKQIEAQREAVDAEINALIQGDPDLAQRFAILCSIPGIAEVSAAMLLIEMPELGSLDEKQVAALAGLAPIARQSGNWKGKSFIRGGRQQVRQGLYMPALVAIRFNADLKAKYEQLIKAGKAPKQAITAVMRKLIILANALLKKGRKWQTRVA

SEQ ID NO: 146209 - protein, 337 aa, unidentified
MEALRPTYFVGLDWASAAHAVCVLDPDGRPVVQDVIPHTAAGLTDLVRRLTRLAVPAEIAIAIERPSGLLVDTLVAAGFRLVPIHPNALKATRPRYAAAPGKSDPGDAYILADLLRTDGHRFRPLRPPADSTRALRAAALLARLRAAPRGYAGELESETKGQLVRSLVAVLRPLVEQLRELEALIAAQLAQHADGPLLQSFPRTGTVNAAQLLAELGEDRGRFPTAAQLAAEAGVAPVTRSSGKHCSVACRFACNKRLRQAATTWADNSRHANPWAAAVYRQARARGCDHPHAVRILARAWLRVLWRCWQARTPYNPAQHGRALPFLVSRPPTSRVA

SEQ ID NO: 146210 - protein, 367 aa, unidentified
MKKVSTVAAKPGKKISQQKLTVGLDLGDRNSWYCVLDESGQLQLEQRVRTNAKGLREVFGELPRSRIALEIGTHSPWISRLLSELGHEVMVANARKVRLIGESRKKDDRLDARTLARLARIDPQLLCPVKHRSAQAQADLTVIRARAGLVRARTALVNTARGLAKSYGERLRGCNVRNLNPEKAEALSPELQRALEPLLAGIEAVSEQIREYNEGIEKLAQESYPQVALMKQIKGVGTLIALTFLLTLEDPHRFGKSRDVGCYLGLQPGRRNSGQSEPQLHISKEGDPYLRTLLVQGAQHILGPFGPDCDLRRWGLKLAERGGRNGKKRAIVATARKLAVLLHHLWVSGEVYEPLHNSQRTTVAAAA

SEQ ID NO: 146211 - protein, 306 aa, unidentified
MVYIGIDISKSSFVAAYPSENGYRTKTFPNTTAGVRKFTATLSVAEHHCVLEATGNYGFLLLYLLHQSGIAVSLVNPKQIKHFARMMMTVTKTDEKDACMIAMYGEKMNPPIYKMPSQAILLLKQKKTVIRQLRKQLVASKNLRESLVVLPYQDKTCVRTLNKTIDFLTKQIEQLEAELADIASSEFDKQLKALTSIKGIGITLATALILTTGGFTYFDNAKQLSRFIGICPTYQQSGTSVNIKGHINRNGDENLRSLLYVASWTALRYNTACKECYVRLKANGKPSKVALIAVANKLVRTSFWQS

SEQ ID NO: 146212 - protein, 411 aa, unidentified
MDTLYPRCAGIDVHKNNVVVAIRCQEGAGKSREEVRTFATMTADLLALSDWLAEHAVSHVAMESTGVYWKPVFNILEGRFGVILVNAEHIKQVPGRKTDVKDCQWIAQLLQHGLLKASFVPPEPIRELRDLTRQRAQLIGEKASAINRIQKVLEDANIKLASVATDVLGASGRDMLEALIAGETDAEKLADLARVRLREKIPVLRRALQGRVTDHHRFLLRMHLDHIAHLEELIGRLGVRIEEKMAPFAEAAQRLQTIPGISQRVTEVIVAEMGTKMEQFATADHLASWAGMCPGNNESAGKRRSGRTTKGDRWLRTALVQAAWAASHTKGTYVSAFYRRLARRRGRKKALIALGHTLLVIVYHVLKRGTTYAELGGDFLDRLEPERLTRQLVKRLESLGHKVTLEAGYAA

SEQ ID NO: 146213 - protein, 340 aa, unidentified
MEPIIGIDLAKRVFQLHIATLQGQIKANKLIIREKLMVFIVQQPPSRIVMEACGSANYWARQFRKYGHDVKQISPQHVAPFRMGNKNDKNDAIAIVEADSRPGMRYVPEKNLEQQDMQCLHRVRQSLMKNRTALINQIRGLGLEYGITIPEGPHKIALCLPDYLEDAKNELTAMSRQLFHELLQELREYQQRLKERDKRLEHIGSLNEDTTRLQSLPGIGVLGASALTVALGDSSDFKNDRHFASYQGLVPKEHSSGGKVKPLGITKRGDAYLRGLLIHGARSVVYRTGNLPDERCNDLQRWLKGIIARSGVNKAVVALANKNTRMAWALVNQQTIYVSK

SEQ ID NO: 146214 - protein, 343 aa, unidentified
MEYYVGLDVSLAETSICVVDDDGKIVCEGTVISQPSAIAEFIETKAKAALRIGLETGPTATWLWHELHALGLAVICIDARHAKAALSMQINKSDRNDAYGLARIMQAGWYKEVQVKRLGCHEVRAVLNSRALLVKIKRDLGNQIRGLLKNLGLIIGKAKGNIFSCRVEELVAENLHLQQAVRPLLAVREKVALEIADLDRKLLALARDDVESRRLMTVPGVGPMTALAFRAAIDEPARFKRSRSVGAYFGLTPRRYASGEMDWSGRISKCGDGLVRSYLFEAAGVLLTRVPHWCKLKAWGLRLVKRIGFKKAKVAVARKLAVILHRMWRDGTDFQWSDEEATA

SEQ ID NO: 146215 - protein, 431 aa, unidentified
MECPMSLPNDLSRSPVPFEQESTLVAASGEETALLPRSNAMECPMSLPNDLSRSLVPFEQESTLVAVVELSQASWLIAGVVPGVERQPLKKMAPDEDALLRLLHRWRDEAIRNGHPITRITVALEAGRDGFWLARWLTKHGIEAHVIHSSSVAVSREHRRAKTDRLDTAMLNRVFLGWLRGERGHCTMVAVPSLEEEDAKRPSRERENLVGERTRVINRLKAALARLGIRGFNPKLRKAPQRLDSLRTPEGFPIPPNTLDEMRRDLARLAILREQIKAIEQARLERLQQAPQTGPNAMVRMLASIPGVGLETADMLVQEVLSRNLRDRRAVGRFVGLTGAPDESGAKRREKGLAKTGNARVRRGMIQLAWRFVRFHKDSALAIWFRSRTEGPSAARKTKMIVALARKLIIALWRMVNTGEVPHGVVLRQPA

SEQ ID NO: 146216 - protein, 319 aa, unidentified
MNLSNIIAGIDVSKNKLDIHIHPLGHYKVFENNVQAIDQILDFLHLHNVIKVGLEATGGYEKLCAYTLLSHGFEVYVIQPRWVRDYAKSLGIATKTDKIDCSIISRYINNTDMRVTPLKVSNVDFLRQKLSRRNQLVEMAKIQKTQAHQVTDISIIKQMEELLVILQNQIQVLEDEMIELIEQSQELKKKYISITSIPGVSKITAITIICYLPELGTLQRKQISSIAGVAPFNRDSGFNKGKRCIQGGRSQIRTVLYMCILSARKWNSFIKTFFDRLHNQYKKPYKVASTAAMRKLLLLANSLVRDDRVFTEEYSPKSA

SEQ ID NO: 146217 - protein, 426 aa, unidentified
MRVLYDRVAAIDVHKDMVKVAIRVPGAKRGTRKTDVLEFRTFYGVLQAMARELRGRGVTHVVMEASGVYTDPVYYALRELDFTEVMVINPAHAKALKGHKTDAKDAIRLLDLYECGLLSGSYMPSEDLREVRDLARYRMKTVQARTSEIQRLQKTLETAGIKLSSVLSDVTGASAAAMIEALISGERRGSVMAGLAQTRLRTAGKMADLSMALAGRFTDHHALMCRLHRDRITIFDDAVKDLDAKIAPLVARYAREAELLKTLPGFGDVIVAGWLGAIGPAPYQHFATASRLASWATICPGNYMSARKSKGGRTGDGGAYIKPLLIQAAWAAVRVPGRLQARFGRLVRKSGGPRNKGARKRAITAIAHTLLKIAYSVLKTGKPYADLGADFYTRRESPDARQDYLMRQLQKLNPGCVITITPAEAA

SEQ ID NO: 146218 - protein, 408 aa, unidentified
MQNEFQHFVGIDWGSEKHRVCLMDRAGKLIEERWVEHNGHSLAELVDWLRRQTLESPTVLAAAIEIPRGAIVETLLEHGFAVFSINPKQLDRFRDRYSPAGAKDDRRDAFVLADSLRTDMHCFHAVRLDEPAMIRLRELSRLEDEISQELNRATNRLREQLHRFFPQLLQLSESADEPWLWTLFEQAPFPAQAAKLSEAKITRILDEHRIRRIRAAEVRATLKTKPLTLAPGAGEAAAEHALMLLPRLRLLHRQRTDLARRISTLLEELTAPAEGQSEHRDAAILLSLPGLGRKVAATMLSEASQAIAERDYHALRCYSGTAPITHQSGKKKVVIMRQGCNERLRNALYHWARVSVVCDPRSKKVYASMRARGHSHGCALRGMADRWLQVLISMLRNRTLYDVQRRAA

SEQ ID NO: 146219 - protein, 363 aa, unidentified
MNATAALPVVGVDLAKSVFQLAVADGSWRVVESHRLTRTQFERWFVNRAVGLVVMEACGSAHHWARWLNGLGIAVRLLPAAYIRAYVKRNKTDAADACALLEAARCAEITPVRVKSIEQQALQGLHRTRSLWMATRTSRINALRGFCREFGIVIAQGSRLGVEQIGRVLADPHAAVPMLIRGTMTLLVEEIRLLEVRIAQLERELTALARQSPACTTLLSIPGVGLLTATAMVAATSGNVSHFHDARHFASWFGLTPKEHSSGNTRHLGRISKRGDRYLRMLLTHGARSVLRAASVAVHAGKTVDGLRQWALGVQQRSNHNKATCALANKLARICYATLRDGEPFGTARLNKKVTRTAFALPA

SEQ ID NO: 146220 - protein, 326 aa, unidentified
MKNFIIGIDVSKDTLDFCMLEKDSRRKLQQGVIANKEKEILTWLKNIDKENVVVALEHTGHYGALLSWLLEEQLFTYYLINPLDLQRSLGLQRGKSDIVDAYRIADYIITSHHKLSPFKLPCESLRKLKALMTARERYVKMSVQIQNSLKAEMILSEKVPLKQLIKIEQKQLKSIKNTIQDLEKQMMEIVKSSQDLSTTYTKISSVIGVGTITSIKCIIETDNFTRFTDARKFNCHCGLAPFPYQSGSSIKGRTKTHFLRDKTLKSILFKAAGSAIQHDPQLKKYYEQKLEKGKHKLTALNAVANKIVLRIFAVAKRNEPFVKLIA

SEQ ID NO: 146221 - protein, 454 aa, unidentified
MSKKRRKRQRKVVELDALEQINENAAGIDVGAEEIFVAVPKGRDEESVRSFLTFTIDLRRLADWLEACGIETVAMESTGVYWIPLYEILEEQGFDVNLVNARHVKNVSGRKSDVMDCQWIQQLHTYGLLQPSFRPPEQICTLRSLVRHRDMLIKYRSAHIQHMQKALHLMNIQLTNVLSDIRGVTGMKIIRAIVAGERDPDVLARYRDKRCAKSRAEISKSLDGHYKREHLFALKQALELYDFYDRQLQACDAELQALYDEFEPPDQPGTEPPAPRARKRRKNQPHFDLSRSLYRMTGVDLTQVDGLDALTVQDILSETGIDMSPWPTSKHFTSWLRLAPNNKVTGGKVKSRRTLPTQNRASLALRLAAQSLARSDSALGAFYRRMRAKHGAPKAVTATAHKLARIIYFMLKHRQPYRDPGATYYDEQYRERAIRSLRRRAAKLGMTIAPAAAI

SEQ ID NO: 146222 - protein, 428 aa, unidentified
MKYHYYIGIDRSDQTIDFCQFSSTGETLVERKINSAPETLLPWVEELRKQLPDGATIALCIEQPCQNLVNFFSQFTEFAIYLVNPAVIKKYRESLSASRAKDDRRDAAAIAQFIFERHTRLEPYVNNDPQCHQIATLVEKRRQLVGTRTSLTNKLTQALKEYYPQALELVGKYIYSPLSCAFLSKWSSLQALKKARPSTITQFYHIKRSRSSKLLQERLEIIDKSVPMCTDEDLLEVYQLHVESLVKSIQGIQLAIKHFDDLIEEKTSQHQDIELFASLPGAGPCYAARLLAFFGSDRSRYEDASSIQKDSGVAPVTKQSGKMHFVHRRYACKKFDRQTFVEWAGQTISKSLWAKAYYEQQKSRGHRHQSILRSLAYKWQRILFRCWKNNELYDETTYLKALKKASSPLVKFIDIIRTTHPKLCEKLS

SEQ ID NO: 146223 - protein, 343 aa, unidentified
MRLFIGLDVSLAKTAICVISEHGQIVKEAQVASEPDALVTWVGELDGSIAAIGLEAGPLSQWLHHGLTNTGLDVVLMETRQVKGALKAMPIKTDRRDAEGIARLLHLGWFRPVHCKSISAQEVRAVLGARRAVQQSMIALELSLRGLLRNFGLKVGTISRGRFELRIRELAVGNPMLEAAVEPMLRARSSLRHELAGLERRVRQLAQDDPVCRRLMSMPGIGAVVALTFRSAIDDPARFTSSKKVGPWVGLTPSRNQSGERDVSGGITKAGDVTLRRALCQAATVMMHRGRSTWLRTWAAQIARRRGGKRAMVALARRIGVILHRMWVDDTDFRSEINAPNAA

SEQ ID NO: 146224 - protein, 401 aa, unidentified
MDAIEHYDTVDVFIGVDVGKGEHHAVALSRAGKRLFDKAMPNDETRLRALISSLKEHGKLLLVVDQPTTIGALPVTVARAEGILVAYLPGLAMRRIADLHAGEAKTDARDAAIIAEAARSMPHALRSLRLDDEQLAELTMLCGFDDDLADQITQTSNRIRGLLTQIHPALERVLGPRLDHPAVLDLLQRHPSPASLAATSEKSLANKLSKLAPRMGKGLAHEVFLALSEQTVIVPGTNAATIVLPRLAHQLAALRRQRDEVAQEVERLVQVHPLYSVLTSMPGVGVRTAARLLTEVAAKAFASAAHLAAYAGLAPVTRRSGSSIRGEHPSRRGNKVLKRALFLSAFAALRDPVSRAYYARKISQGKRHNQALIALARRRCDVMYAMMRDGTLYCPAPLATA

SEQ ID NO: 146225 - protein, 320 aa, unidentified
MSRKRAKLFIGIDVSKQLLEVAAHQHDYQFRCANKASAFGELIAELITLRPALIVLEATGGLERTVAAALRSASLPVAIVNPRQVRDFARALGQLAKTDRLDACVLAAFGAAIKPPLRPLKASDELELDALTGRREQLTGMLADEKNRRASAASDSVRDEIQEHIDWLTERIAELDQQLKKLLQASAHWQIKDQILQSTPGIGPVVSYSLLAQLPELGNLNRQQISKLVGVAPLNRDSGQQRGRRHIYGGRAQVRRVLYMAALTASRCNPVIKVFYERLRARQKPFKVAITACMRKLLTIINFMVRDGSQWKSAPSNISA

SEQ ID NO: 146226 - protein, 414 aa, unidentified
MDIVHSHCAGLDVHKKTVVSTIIVPDPSGGLHKETRTFGTMTPDLLALSDWLMEQGVSEVAMESTGEYWKPVFNILENNFEVLLVNAQHIKAVPGRKTDVKDSEWIAELLRHGLLKASFVPALGQRELRELTRYRSTFVKERATLVNRVQKVLESANIKLASVATDVTGVSGRAILQALLEGKSTPEEMAGLAKGRMREKREQLTKALEGRVKAHHRFVLTELLCQVDSLDEAIGRFDEQIVEYCRPFEEAVTLLDTIPGIARQTAEIIVAEIGTDMSRFPSADHLASWAGVAPGNNESAGKRRSGKTTKGNHALGVALNQAANAASHTKNTYLSAQYHRIAARRGKKKAIVAVEHSILIIAYHVILRREPYRELGSDYFDKRRPEATAKRLVKRLEHLGFQVSLQQIQAPLAV

SEQ ID NO: 146227 - protein, 344 aa, unidentified
MEHFAGLDVSVNETSVCIVDETGRIVREVKVASEPDALLQVLKNNTYRFRRIGLEAGPLSQWLYSALGEANLPVVCVETRHMRAVLKAQINKTDRNDARGIAQMMRAGLYRPVHVKTLRSQKLRMLLTHRKLLQSKAIAIENDLRGTLRNFGLKVGVAGAVKFEARIKELVADIPDLAGMVEPLLIVRRVLREQIAVLHRRLLAIVKDDEVCRRLMTISGVGPVVALTYRATIDVPARFRNSRAVGAVLGLTPCKYQSGESDYTGAISKCGDEMMRVMLYEAAQILLMRSTQWSWLKAWAMQIARRRGMKKAIVALARRLAVIMHRIWSDGTEFRWTRQEVAAA

SEQ ID NO: 146228 - protein, 320 aa, unidentified
MPSVCGIDVSKNRLDIMVLPEQQYFSVRNDAAGWAELIERLRGLSISAIGLEASGGYERGAMRALLAAGMPARQVNPFKLRQFARASGVLAKNDPLDARMIASFVAIMPTQPAQPRAPAIERLAEMLAVRRQLCAEKVAAENASRLLEDTMLQRLSRRRIRTLAADVDTLDRHLAEIVGTDAALAYRYRLLTSMPGVGLVLACTLIALLPELGRMSRKQVAALVGVAPYSFESGKFKGRRCIWGGRAPVRNVLYMAAMSASNWNPVFKTFHDRLKTAGKLPKVVIVAIMRKMITALNAMVRDDVVWADHLSGRHSVPTAR

SEQ ID NO: 146229 - protein, 424 aa, unidentified
MNLTQNDRLKQVTSDTLIVGVDVGSKTHFCRAFDWRGFELSRRVFKFSNTGMGFLAFLRWTEELMNKTEMKKVIVGCEPTGCYWLTFQKFLQDHGVQLVTVNPFTVNRSKELDDNSPEKSDLKDPKTIALLVKDGRYSTSYLPSGVYAEIREASVCRDQIMKQHVRLSNQIQGWLQKFFPEYFECYADWDSTSGLMLLKEAPLPRDILKIGAGGINQIWRDAKVRAAGIKRAQTLVEAAQNSVGLEAGEAARLEIWVLVNDYILKGEQLKRLDEYLEKKVREIANVEKLLAIKGVGMSTVIGFIAEVGDIGRFTDPKQIQKLAGLEIVKKSSGKKRGQPRISKRGRKKLRRTMYESARALMQWNPAFQDVFLYYRNRKKNPLGGMQAKIAVACKAIRVFYVVLQTGCDFDEEKFRRDIIRPETA

SEQ ID NO: 146230 - protein, 379 aa, unidentified
MTETTRPLECIAARTLYMALELSAKTWRLALTTDRGERPRHYTVESGDLRAVQDRLARARTQWGLPASTPVVSCYEAGRDGFWIDRALTALGVRNVVVDATSIERDRRAKPVKTDRVDAERLLELLVAWAAGRKRLRIVRVPSVADEDARQADRELATLKGVRTTITNRITALLVTQGIGLRITPAKTLDVPTLRGWDGAPLGPGLCGRLTREVAELAAVRARIAGLERARRAGIEAAATPAAQQMARLVQLRGIGANGASRLVVEFFAWRAFRNGREVGALAGLAPTPYQSGASMREQGISKAGNGRVRTMAIELAWCWLRFQPQSALARWFEARFGSGSKRHRRIGIVALARKLLIGLWRYLDAGLVPDGAIVTPTA

SEQ ID NO: 146231 - protein, 412 aa, unidentified
MEVLYPCCCGLDVHKKSITACVLWAGGKGAVRKEKRRFGTFTPELLSLADWLRACGVTHVAMESTGVYWKPVWNILEGQFEIVLVNAQHIKAVPGRKTDQKDSEWIADLLQHGLLRGSFVPPRETRELRDLTRYRVSLTEECNRIANRIQKVLEDANIKLASVATDALGASGRAMIQAIIDGEQNPGLLADMAKGLLRNKISELQSALAGRITAHHRFMLAQLMDDLRHAEAKMERVEEEIKRHTFPFGDDVARLCTIPGIDRVTAWGLVAELGLNMDQFPSAGHAASWAGLCPGNFESAGKRLSGKTRKGNAFLRRCLANADWAVSTKKSSYLSALFRRIAARRGNKRAILAVAHAMLVIAYCLLKRKEEYKELGVNYFDQLNAEGLRRSLVRRLERLGHQVTLQPRPVTG

SEQ ID NO: 146232 - protein, 338 aa, unidentified
MAIVGGIDVHRRQLTFDYCDRATGELCRGRIAPADRQGFRSWLSQLPPGGDFALEGCTGWRYIVEELAAAGFVAHLAEPADTAALRGNKQRAKTDRADARHLRELLISGTLPESWIPPAHVLEARTTVRLYKDLSDERGAWTQRIHAALFHQGVETFSGTLASDLGRVFLDKADLSPAARRAVETGLAHIETLNKTLTPIKRDLSKFSLAQPGCSALREYFGIGGLLSVAIWAEMGDTRRFSSSSDAVRHTGLDITVYSSDTKRAKGHLARQGPSVLRWALYEAAKSAAKPAAPDHEYYVSVRERLGAQRATLSVARKIARWVHHRLRELGDEAFAPV

SEQ ID NO: 146233 - protein, 343 aa, unidentified
MQTVTTIGLDIAKSVFQVHGIDAAGQVVIRRQLKRRYVLAFFQKLPPCLIGIEACASSHHWSRELQALGHTVRLMPPAYVKPYVKRQKNDATDAEAICEAVTRANMRFVVTKTPEQQSGLVLHRARHLFIRQQTAVINAIRAHLAEFGIIAPVGRHGVEELLNVVADPNDKRVPEIARACLLAFGAQLRRLKEQILEFDRMIRAWHRSSETSRRLDDCPGVGPALATALVATVADPKSFRSGRNFSAWIGLVPKQHSSGGKNRLGSISKQGDCYLRGLFVAGALAVIRYAKIHGTKHRPWLTALLARRPTKVAAIALANKIARMAWAMMAKGERYKEPIALAA

SEQ ID NO: 146234 - protein, 390 aa, unidentified
MSCTDRFSPVAIRVDLGAIFVSLELSRKRWLVTSLSPGAGEKMSRHQLAGGDLAALLKLLEQLQRKAHERTGRWFGVVCIQEAGLDGFWIHRALEARGVDSKVVDPASVAVNRRKRRAKSDRIDGEALLRTLMAWQRGEPRVCSMARPPSPETEDRRQPHRERQRLMSERTQHNNRIKGLLYAQGVSGYEPLLKSRRKALNGLTTGDSRPLAEQLRRQIERELDRLELVLEQLKAVEAERDALLAPLGQADASAKAPGSSLMQLKGIAEERAAVIGGELLWRSFENRRQVAAYAGLVGSPFQSGDTDQEQGLSKAGNKRLRHTMIELAWGWLHHQPQSQLSLWFHQRLGPQLDRKRKKTLIAALARKLLIALWRFETQGVIPEGAVLKAR

SEQ ID NO: 146235 - protein, 345 aa, unidentified
MMIIGIDAHKRSHTAVTIDGNGRQQETKTVGTTTQDHLKLLKWATALGGERLWAIEDCRHMTRRLERDLIAAGESVVRVSPKLMADVRDSARTYGKSDPIDALAVARAALREPDLPVARLDGVERELRLLIDHREDLVAERTRIISRLRWHLHELDPGWLPPASIDRTSAFTAITAHLETCWEDGLVLRLSRRLVQYLQVLTLEINALTAEITERVTVVAPSLLAIVGCGPLTAAKILGETAQVRRFRSKDAFARLNGTAPIPVWSSNKQRHRLSRIGNRQLNAALHRIAMTQARMHPPARELLARRKAGGDGGMEALRVLKRRLSDVVYRAMLSDETQSAPAAA

SEQ ID NO: 146236 - protein, 339 aa, unidentified
MKYTPVGVDIAKHLIQVHFIDENTGEVVDKQLRGRDFLEYFSNREPCLIGMEACGGSQHWARELTKLGHKVRLLQARFVKAFVMGNKNDVMDARAIWMAVQQPGKEIAVKTEEQQSVLVLHRTRMQLVKFRTAQINALHGTLLEFGETIHKGRAAMEREFPEALERMKERLPPYLITVLENQYKRLNELDSLIGDIEKQLASVAKQNETCKRLLDIPGVGPLIATAAVATMGEASAFKSGREFAAYVGLVPKQTGSGGKIRLLGISKRGDTYLRTLFIHGARAAALLTKEPGPWITELKKRRPASVAIVAMANKLARTVWAIAAHDRKYDRNHVSIRPY

SEQ ID NO: 146237 - protein, 358 aa, unidentified
MVCATHFGGEVMDFYLTRHQYYCGVDLHARMLYVCILDASGKTLRHRKIPADPQRFLAFVGPYREDLVVGAECVFCWYWLADLCEDNGIPFVLGHALYMKAIHGGKAKNDRIDSRKIAHLLLGCMFPLAYVYPRGMRAARDLLRRRMYFVRHRAEMMAHIKNTASQYNLPEVGGRLDRPGRWEEVSEHFPEGPVRESVQANLATIEHLSGVIAHLEWYIEKATRDIRYRDLSLLRSIHGVGLVLALTIVHEIDTIDRFPRVQEFLSYSRLVACAHESAGKKKGTGGRKIGNAHLKAAFSQAACLLLRDKPQAKRLVARLEKKHGKGKAMSILARRIATAVYFMLKRREPFDEARFFAA

SEQ ID NO: 146238 - protein, 343 aa, unidentified
MNEVEVNGNDVLYIGADVHERETQLAIFEPGGTLLQEKRIPTKDLQSFVHALPAKEKHLALESLGFIYPLYDKLKQVPGCDVAVANPKRIRQTSDSKQKHDRADAKLLGNLLRTNYLKRSHMADAETREKRFLINDRVKYGLRRSELRGSIRWLLKRRGIEIEQDPFSREGRRILREEVRLQEIDIRLQELELIESIVEKLDRQIYYAVSLDEKAKLLDTLPAIAPYTALFLSSAFDNVDRFPDSKHACAYLGLVPSLHQSGDVSFTGHITRDGNKFLRRNLVECARAAVRKDPHLREFYQKLKRKRGERKALIAVARKMTSYAYWMLKRNQTYEELTPWDGS

SEQ ID NO: 146239 - protein, 350 aa, unidentified
MNENKNIILTVDYHLKNIEVRRLNCATGEERTFRFSTERKAIVALLDRSCKEAVACGGQVVWIMESTTGWARIQELIQDRGAFVLCNVLQMPLPPKAHRRKTDKIDTARMQREYLNGEMPLAYQPPRWLRELRRVVAIREDLVERRTQVRNWITSYFSHETWEETKGLWTKAGRIRLELLAKAAGVLDGFCLAMRIAEHDHVEELIRQVEGKMMELYKQCPQAIALDKVRGIGPISALCIWARIGPAKRFNNAEQLIAYTGLAPGVRTSDDTRRNGRIGGGGTDVLLRRMVVEASIWARQIPRYVPTYQRVLAKRGKKVARLVVSRLLLRGIYKVLRDGLEFNPVGTAAA

SEQ ID NO: 146240 - protein, 432 aa, unidentified
MRRTRRHTVAACVRTRGPSGERVQEIHTFGTTTVELLALRDWLTAHRVSLVGMESTGIYWRCVYYVLEDALQCWLLNARHLRNVPGRKTDVKDAEWICQLVEHGLVRPSFVPPKPIRELRNLTRYRKAQIEERTREAQRLEKILQDAGVKLSSVATDILGVSGRAMLTALVQGTRDPDVVSDLARGQLRTKIPQLKHALAGRFGAHHALLVGMILSHLEFLDEAIEHLSTEIEEVIAPFEAEVKLLTTIPGVARRTAESIVAEIGVDMSRFGSSARLASWAGMCPGNNESAGKHRSGKTRKGSKWVRTALIESARAASRSKGTYLSAQYHRLRGRRGSSRATVAVGHSILVAAFHILDRVQPYSDLGADYFVHRHDPQRHANKLVRQLRALGYGRHPPTREGGVAGRGHFHQRCTLQVSCWTGGHGSSAGKP

SEQ ID NO: 146241 - protein, 365 aa, unidentified
MQKISIMRTNGKTIFKGQLTIGLDLGDRSSCYCVLDENGEIILEQKVATTPEAMQQAFGKMARSRIAMETGTHSPWVSRLLTALGHEVIVAHARNVQLITESRRKDDRIDARTLARLARIDPQLLSPVKHRSAKAQIHLTEIRARAELVSARTALVNSARGLAKSYGERLRKCGTRQVGRELAMGLSAEMRAALEPLLRAIESLNEQIPEYDRRIAKIAKEAYPETALLKQVKGVGDLIAVAYVLTLEDPQRFRKSREAGCFLGLRPGRRNSGQSEPQMHISKEGDRYLRTLMVQGAHYILGPFGEDSDLRRWGQKLAERGGKNAKRRAVVAVARKLAVLLHRLWVSGEAYEPLRNSQKTTSAVA

SEQ ID NO: 146242 - protein, 415 aa, unidentified
MEVLVDRAAGLDVHKDTVTACVRIPKPAGGRDQQVREFRTFTHDLRRLRLWLSEQRVTHVAMEATGVYWRPVWHILEDLPGVELLLVNAHHVKNVPGRKTDVSDAAWLAQLLECGLLRGSFVPPPVIARLRDLTRYRKKLVEARASETQRIQKLLEDAGIKLDSVVSDVLGKSAREMLDALIAGVRDPAKLAGMARTRMRPKIPELRLALEGRFSEHHALMLEMHLAHVDHLTASIGRIDDQVDEVMSPFGDEAQRLQTIPGVGKRTAEVIVAEIGVDMSRFPTAGHLASWAGMCPGNHQSAGKRRSGKARKGDQALRAALCEAAWAAARTKDTYLSAQFRHLRRLFGKKGDNKAVFAVGHSILVIAWHLLANECDYHDLGGDYFAQRNDADARKRYLIRQLEAMGQRVTVGSAA

SEQ ID NO: 146243 - protein, 266 aa, unidentified
MGGATKEVIMAEVHVSAIDLAKRSFQVCGIARGGVVLFVRTVSRSKLEQLLPGQTPRIVAMEACDTSHYWGRVAQGLGHELRLIPPIYVKPFVKRQKNDAADAAAIAEAALRPNMHCVAVKSAEYQARAVALRTHQFLQTANAIDKFAARAPGGVRDRRDAPSMHGSRRRSHHDGRGPRFALDLRAFFSGRNFAAWLGLVPRQHSAGGKTRLGSVSKMLQHNIRKLLIVGTMSRIRWIVRKGVLPDHWLGRILGARAAHGGGRRIG

SEQ ID NO: 146244 - protein, 325 aa, unidentified
MCIIDQAGETRVHKEISADPDKLAKLLEPYLGQVVVGVECMHCWYWVADFCEDIGVDFILGHALYMKAIHGGKAKNDRIDSYKIAKLIKGGNFPVAYVYPKEMRATRDLLRRRMKIVRHGADLKAHVANTTSQYNLPPNKVNLKNKVAREHIRSAFPDPVVQRNMDLNMALLECYAKELSKLEWFLEQQARQHNPIHLHLLRSVTGIGRILALTIIYEIGNIERFESVQTFASYSRLVKCKAESAGKSYGTQGNKIGNAHLKWAFSEAAVLYLRGNEKAQKYLQRLQRRMSKAKALSALAHKLGRCVYFMLKNETVFDENKFLTG

SEQ ID NO: 146245 - protein, 387 aa, unidentified
MNYVGIDIAKQTHFASIMNSEGEILVEPFPFSNDHSGFLKLLKHLSAFSQEDVLIGMESTAHYAENLTSFLFTRGFNVCIINPIQTSSLRKSNIRKTKTDSVDTYLIIKALSLNHYRLFTERDYDSLQLKNLCRFRQKLMKARTKVKIQLVTYVDLLFPELQYFFKSGIHGKACYELLKTQPNPDRIAKMHLTRLTNLLSKSSKGHFKQSHAVQLKELASHSVGIKNNTLSLQILQSIQQIEMYNKQLAEVEASIHEIMDKMDSVIKTIPGIGYLNGAMIIGEIGDISRFEKPCQLLAYAGLDPSVYQSGNFNAARTRMSKRGSKLLRYALINAAWQTTLVNKTFKDYYNLKVSQGRRHYNALGHVAHKLVRVIHKMMTDNVEFNLA

SEQ ID NO: 146246 - protein, 355 aa, unidentified
MSKLKYIGLDVHQASISVAILDENGKLVMQSVIATRAAALLELLDGVRGTVQVTFEEGTYSAWLYDLLVRRVSKVVVCNPRKNALLKKGNKSDRIDAWKLAELLRGGMLSPVYHGENSTRTLQELTRSYMTLTQDTTRVMSRIKAIYRSQAIVYGGKKLYTGRHRGEWLSQLKQPGLLCRAERLYEELDLLQQLRRKAKQGLLVESQKHPVCARLRSIPYLGPIRAAVLAARVQTPHRFRSKRQFWAYCGLGLETRSSADYLQVEGQIKRSRKKVLIRGLNLDHNHDLKNIFKGVAMSASIFSGPLQGFYQERVAAGIKPEMAQLTLARKIAAIALTIWKKGESFDPAKLKAQAA

SEQ ID NO: 146247 - protein, 467 aa, unidentified
MKKQRASRKKSAKRTSTRNMRVVYANAAGIDIGSESHFVAVPSDTDERPVREFRAFTADLHKLADWLDECGITHVAMESTGIYWIPLFEILEARGFEVRLVDPRQLKTVPGRKSDVLDSQWIQQLHSFGLLAGAFRPDDSVCVLRSYMRQRAMLIESAATHIQRMQKALSQMNVKLEKVLSDITGTTGMMIIDAILAGEHNAHKLAALRDARCKRSEAEIALALEGNWRPEHLFSLKQAVELFRTYQRQITECDREIEGCLASQDELGSPDDLPPDLRKGKSAKRNDPRFDARAHLHRMTGVDLTQIRGINAHTALKVVSEIGTDMSRWPTAKHFTSWLALAPGTKKSGGKLMSSRTKATKNRAAHALRLAANALQRADTALGAFFRRLKARHGSPKAITATARKLAVAIYNMLKYGQEYVESGAAYYESEYQTRVIQSLTRRAADFGFQLIPAKPVKANLNDENEM

SEQ ID NO: 146248 - protein, 306 aa, unidentified
MKHRVFTNDVKGFQSMLNWVTKQTKGVSVFYCFENTGNYSLKLASYLSYKGIAYVEESPIKIKRSSGLVREKTDKIDSEIIARYAWIHREELVSSELKSVVYQELGRLIGLRDQLVRNRAGLLGTLKEIEQLLSSPSTDTSCIVLRRSIENLSKQIKSIESRMDSLLKEDESLSSNYKLLLSIRGIGFVVACQLLYHTENFKRFSSWRKFSSYCGLAPYEYSSGTSIHRRKKCHYLGDRKMKSLLSMASISAIQHDPELRLYYKRKVKEGKPKMIALNNVRNKLLARVFSVVKRGTPYVALNQYAA

SEQ ID NO: 146249 - protein, 367 aa, unidentified
MPADRFVTLARKATLAMVILGIDAHKRTHTVVAVDPLGRQLGVKTTTSTTTDAHLDLVRWADQFGPDRIWAVEDCRRLSRRLEADLLRHGERIVRVPPKLMTHARDSARSYGKSDPIDALAVARAALREPDLPTARLDGPERELRQLVDHREDLLAERTRHINRLRWHLHEIDPSWDPPERSLRQRTHLEAVAARLAGVDTLTGRIARDLVERISDLTRAEHALEAEITARVTPLAPTLLAICGVGAVTAAKILGEVADVHRFRSKDAFARHNGTAPIPVHSANRGRYRLSRIGNRQINAAIHRIAITQIRCHPDARAYRDRQVAAGKTKTEARRALKRRLSDVVYRALLADAHLTAAEPTPTVIAA

SEQ ID NO: 146250 - protein, 442 aa, unidentified
MDVLYTHCAGMDVHKKTIVVCCMTPDPAGGKQIETRTFGTMTQDLLALSDWLSGKQITHVAMESTGELWKPVYNILEGSFTVLLVNAQHIKTVPQRKTDVQDAEWIADLLRHGLLRGSYVPPLPQRDLRDLTRQRTLLVRERADVVNRLHKVLEWANIKLTSVATDVTGASGRAMLQAIVAGQADPTLLAELAKGRLRNKLQELVRALDGRIREHHRFMIGQHLIHIEFLDEQIALFDTTIAQQVAVDSDQADQGPPPAASGDPNGQANSGPGSPSWQKAVILLDTIPGVGPKTAEKLVAEIGTDMSRFPTEAHLASWAKLCPGNNESAGKRHSGRTGKGNVWLRSALTEAAWAAVKVKDCYLAAVYHRLVGRRGAKKAIIAVAHRILIAAYHILRRQEPYQDHGPLRLDQQRKDRLANRLRYRLEQLGYAVKLEPVAVAAS

SEQ ID NO: 146251 - protein, 418 aa, unidentified
MIRKDDSKIIEVVHSVCCGLDIHKESISACLIFFDDQGRERIEVKAFGTLTDDIMQLRDWLLDHKCPVVAMESTGIYWRPVHNVLEGFIQVILVNARDVKNVPGRKTDICDSKWIAGLLRHGLLKGSFIPPKEVRQWRDLTRLRRRYVQTAADYRRRTQKLFESANIKIDSVISDLFGVSGRNLMNLLVSGKEIALSDVRGCMKGKLKASEAEIYRSIQGFFNDHHRFQLSLLLGTIQHLSEEIGIIDSRIRDLMMPQQDILERMKKVPGISEIASRDILAEVGPTLEAFATDAALSSWSGLCPGNNESAGKRRSGRSPVFKHHLKTIMIEVAWAAIRTKGSYYKDKYYRLKSRIGAKKAIVAIAHRIMKAIYRIIKDGAVFKDLGEEYLMLRNKSKKIHHLKKQAQLLGFTLVPQTA

SEQ ID NO: 146252 - protein, 344 aa, unidentified
MKYYAGLDVSVKETSVCILDETGEVFREVKVPSHPEDLARALSELDRPFERVGLEAGPLSQWLFSGLAEKGLPVICIETRHTKAFLKAQINKSDRNDARGIAQMMRVNLFRPVHVKSEKSQQRRALLTARKLLQEKAIAIENDIRGLLRNFGLKVGAVGGSAFEARIRELVEGRPELQNIMVPLLAARRALRDRFADLHRRLLAVVKEDKVCRRLMTIPGVGPVVSLAFTATIDIPARFRNARSVGPALGLTPTLHQSGESSRIGRVSLCGDAMMRGLLYEAAQVLLTRVTKWSWLKAWAMQVAKRRGQRRAIVALARRMAVIMHRMWSDGTDFRWTRQAKPAA

SEQ ID NO: 146253 - protein, 358 aa, unidentified
MQTESKAICFKGQNIYIGIDAHLKNWTVTILTENTFFKTFSQDPCAMTLKNYLHRNFPQGTYYSAYEAGFCGFSVHRELVKCGIQNIVVNPADIPTTDKEKKQKEDRRDSKKIAKSLKSGNLTAIYVPDKSVEELRGLVRYRKVLVKEIGRNKNRIKSFLYFNGIAVPVELDSASKYWSGRFTQWLKTIKMDTEYGNFVLQETVENTEYSRGKLLKIDRKFRELRKSSSYSKTLSLLQSIPGIGPIVSITLLTELGDLKRFNNLDKLCSFVGLIPTTNSSGENEKTGSITPRAKKPLRNALVESAWVAIKHDPALNLVFNELCKRMKSNEAIIRIAKKLLVRMRYVIKNETEYVHSIV

SEQ ID NO: 146254 - protein, 410 aa, unidentified
MQVVHERCCGLDVHKKSVTACVLTPGAGGEPAAEVRTFGTMTEDLERLADWLAARGVAEVAMEATGSYWKPVWNVLEERRFALTLANAQHVRHVPGRKTDVKDAQWLAELLRHGLIRGSYVPDRAQRELRELTRYRTSLGEERTAAVNRLQKVLEGANIKLAAVASDVTGVSARAMLAELVAGSTDAEALAELAVGKLREKIPALQRALRGRVGEHQRFLLAQQLSHIDFLDGQLAQLDAEVAERTRPFEEAVARLDTIPGVGQRTAEVLAAEIGTVLDRFPTPGHLASWAGMCPGSDQSAGKRRSGRTRKGSPALRRVLVQAAHAAARSKTTYLGAQYRRLAARRGAKRAAVAVGHSILVIAYHLLTRATAYEDLGPTYYDQRDREAVLRRLVTRLEKLGYEVTTKPAA

SEQ ID NO: 146255 - protein, 314 aa, unidentified
MQAAVVVGIDVSKRTLEVALSSGGGFSVANDEDGISELLARLQQSGAALVVLEASGGYESPAYLALWEAGVPTALINPRDAYHFAQANRQLAKTDQLDARGLCEFGLRMQPEPLPPPEAADEELKALAVRRRQVVKMLAAERTRVQQAPRSVRSSVKRIVRVLERELGAVDHQIEQRLRDNPRLAQRCAQLEQVPGLGPVTCAILVSRLPELGLLGPKQVAALVGVAPYDHQSGEWRGRSSIFGGRAEVRSALYMATLSAIRCNPVLRSFYRRLRSAGKPAKVAIIAAMRKLLVILNAMLKTNSPWRPPCAVVA

SEQ ID NO: 146256 - protein, 358 aa, unidentified
MIEEDGIRHVVGGVDTHKDLHVAAVVDERDLVLGTRCFATTHQGYRQMLGWMRSFGELRRVGIESTGSYGAGLLRFAQQAGIEVLEVTTPDNQDRRRRGKNDDLDAQNAAHAAFAGKRTVTPRSRDGMVESLRVLAACRKTAVAARRVALQMIQNTIVCAPDGLRDTLRAMTRMQLIRTLAAWRPDLSAYRDVEAAYRISLKSLARRYLELHDEIADLDAMIGAIVDELAPDLIARNSIGHTGAAQLLLTAGDNPGRLRSEASFAALCGVSPIPASSGKTVRHRLNRGGDRHANSALHIIAIGRLRTDPKTKAYVAKRVAEGHSKLDAIRALKRYIAREVFGLIARRQKEINQTRIAA

SEQ ID NO: 146257 - protein, 370 aa, unidentified
MSEAIMCGVDVHDNSLVCRVAIGKSEPETKRYSNTVRGRQLLFGHLQGLGRSKGAERVIVGYEASTQGFCLYDDCRDRDVECFILAPTKMRKSRKDRKNKDDDRDAQLILEVLRGYVLAGNELPSIWIPDDETRADRQTVRARLDLGHKLTATKTQVQTLLKAGRVCKPKEVGKGWTKPYRRWLKSLCMGEATWPALATLVRQIEALESEIALLDKAVKRLSETKRYAEPARALVEQIKGVGLLTAMVFLTEMGDLSRFANRRKVGAFLGLVPTSNESGESDDRKGHITREGSGRVRRVLCQASWARVRLDPAESEVYGRIVKRNPKHKKIAVVASMRRLGIRMWHVGLKAQTEAGVFPASESEGVGKAA

SEQ ID NO: 146258 - protein, 429 aa, unidentified
MNYTQNKKIMQVKVSTLVVGVDIAKDKHAARFFDFRGIEYDKAIFFENNEAGFKKLLHWIKKVSEKENKNDVIVGMEPTGHYWLSLEEYLRRKTDFLRVVVNPAHVKKSKSLDDNSPTKTDRKDAKVIAKLVIDGRYSIPHMPEKEYADLRVAMTHRERLVKDIINLSNKIQQLIDKYFPEYQTVFKKWNGKASIAILKELFLPELILEKTEEEIVEIFRKGANRAVGIKRARKLKKAALNSIGIKEGGEFTRFELTNLLEQYELLNSQKELLEEKVEDLLKSMEEAEYMESVKGVGLITVAGFIAEIGDINDYDHPKQIQKLAGLNLKEHSSGKHLGQTRITKRGRPKLRALLYRVMLPILANNQEFKHLHEYYTTRRNNPLKPKQSMIALACKLIRIFFALGQKNVNYDGQKLMNDIERNLSLQEIA

SEQ ID NO: 146259 - protein, 387 aa, unidentified
MYFVGIDISKFKHDCAIVDEFGDVITPSWSFQNDREGFSLLKELLDALDGKKKIGLEATGHYGQNLKLFLENNDFSFMEFNPLLINRFVHSKSLRKTKTDSIDALMIAQYLMTVEYKPYPPSFYTFEKLKSLTRFRDSLIRQRSRQLVELTNILDKVFPEFKPFFKGRFSATALYILSHYASPEKISNMNSKSYEPLRHLSRGRFSMVDFVELKTLVRNTVGSTCDYLLQEMEITIDIYNQLQSKAEEIELQIHDCVLDLAPPMLTIPGIGAASAAVILSEFGDLSKFNNPSKLLSFAGMEPGYFQSGTSESTGKMVKHGSSHLRYAMMNCAQTVINNEPTFAAYYAKKRAEGKEHRVALTHVAKKLLRVIYTLQTKELSYNPDLVR

SEQ ID NO: 146260 - protein, 341 aa, unidentified
MNGIYYVGLDIHKKTITYCIKRFDGVLVKQGTIAAERKALLKWLSEIPGCWIGGMEATMFTGWVYDFLKPHAAELKVAHPEMLKAITAAKNKNDRADAEKITDLLRVDLFPECYMAPVELRELRRVLRYRNMTVLTATRMKNKISGLLMEVGTTYDKNRLHGKRYFYTLLDRVENVPESVKELLKLSRGSLEMFEAVQKNLIKALQQNKLIRERVQRLMSIPGIGEVTALTWVLETGEPSRFSSSRKAISYCGLCSAQRESAGRERRGPISKKRNKHLQTMLIEAAKLAPRWNVQLTVLHERELARGNRNRATLAVARKLVKYLLAVDRRGSDFETLKQAV

SEQ ID NO: 146261 - protein, 412 aa, unidentified
MEAYYVAGIDVHKAILALVVGAVQPGEWELERRRFGTTRSQLRELAKWLIELGVQEVVMESTARYWRPVWVALEETGVRKHLAHAHSNGARHGHKSDFRDAERLVHRLVAGELVLSYVPEDEQQGWRWLTRTRYQLVCERGRVQSQIEGLLEDAQIKLSSVITDLLGASGRRILEALAQQQGQHDPAKLAELGHAKLRASREELTDALDGRWLDRHRFLLGLHLDRIQQLDSQIEQIQQQTAMAMQSCQEAVARLIQVPGIRTEGAIQMLAEIGPTAEAFPSPEQLASWVGVCPGQQESAGESSSQRSAKGNWQMRRLLSQAAHAASHAKGSFFESLYRRLVVKIGPQKAVWAVAHRLCRLIWKILHQGVQYQEQGHPSSTPQTIRRRQRRITAEFRKLGFQVQFTAITPNA

SEQ ID NO: 146262 - protein, 448 aa, unidentified
MSNEIAVTAAAPEPEWAAFVALDWADQKHHWRLAVAGAQKQKQEQGELENTPEAVAAWAADLNVRFAGRPIAVCLEQKRGALVYMLLKFPQLVLFPVNPQTAACFREAFYPSGSKGDPGDTALLLDILLHHRHRLRQLKPDTVQTRLLQRLVEQRRRMVNEKTRQSNRLTACLKQYFPQILNWFDDVTSPLVGALLERWPDLEQLQRAHDGTLRDFFHKQNCRSKERNQERIEAIRQAVPATTDAAVLEGEAMVAHCLLKLIATLRDNIAELDERIAKAFAAHPEKVLFDGLPGAAAVLAPRLLVAFGTDRQRYASAQEMECYSGIAPVTEASGQSQWVHFRWACPKFLRQTFHEFAGHSIAKSAWARAFYDLQIGKGKEHHAAVRALAFKWIRVLFACWKNRTPYDEQIYLQSLRKRNSPLKALLPGGGALGWKDVAGFQKLSDDPS

SEQ ID NO: 146263 - protein, 369 aa, unidentified
MDEGITAYVGLDAHAEWTAIAVAEAADKTAARFVGTVGAGFGALAKVLGRLGKAGALQIVYEAGPCGFALARQLRHAGYPCEVVAPWKVPRRAGDRVKTDRRDALMLAGLARAAQLTYILVPDERDEAMRDLSRARIDAVRARLKARQQLKALLLRHDRRYSGKSSWTAAHERYLAKLSFPHRAQELAYAEYRRAVSEAQARVELLTQALVSELEHWRMHALVRALMTLRGVDSVGAITLVAELGELKRFAHPRELMGYLGLVPSEHSSGSKRSLGAITKTGNTHARRILIEAAWNYRFPARISAPLQKRQQGEPAAIRDIAWRAQLRLTHRYRRLSARGLQHNKICVAIARELAGFIWSIGQQVSVSG

SEQ ID NO: 146264 - protein, 315 aa, unidentified
MAMPVSVTKPIVGVDVAKNELVIYHAELDALEAIPNDKAAIKRWLKALPGPVAVAIESTNIYHLEFADLAYEAGCVIYMVGGYELHHYREGVKIRAKTDALDAKLLARYLKNEGHELHPWTPPSPLYRQLLSLFRRRAALVQARVALVQSWANEPLLKTAFAEQISAMQRLETLIEKTIKDHLKDAGLLGQLNRCLKVEGIGFLTGARLLTAFQRGDFRNADAFIAFLGMDLRVLKSGQKDGRRSLTKRGDPEVRRLLHNAAMSASRTSAWKGFYEKQRARGFTTTQALVMLARKLARIVFALLKGQSEYQPKAA

SEQ ID NO: 146265 - protein, 358 aa, unidentified
MKYIGCDFHPSFQVIAMLDKETGELVERRLLHTEEARVFYEGLQGPVLVGIEASGNTHWFESLLVRCQHELWIGDAAAIARQEGRKQKHDRRAAALILKLMLENRFPKIWVPSVAERDLRQLLIHRQHLVWMRTRIKNQLQHIALNQGWQKKRKLWSEAGLKLLRSLALEPWTGQRRDTLLEMLQELQEKIRPLDQAVEKEAYACTAARRFATHPGVGPVISLATVLTMGDVKRFADSRSWVSYLGLNPSEESSGQRRRLGAISKQGNPFLRYLLVEGAASAVRGDKSLARMYARLKAKKHHGVAKVAVARKLAVRLYWMARTEKSYPEVVRTQGSQSHPVAAVVAVQLNRPPASHQK

SEQ ID NO: 146266 - protein, 380 aa, unidentified
MVEITRALIARVGVDLAKNVIQVHAVDGAGRRVVARAFKRDAFLAWCAQLPAGCLVAMEACSGAHHFARRLRAMGLDARLIAASFVSPYRMEGKSGKNDMTDAAAICEAASRPAMRFVPIKSTEQQGVMSVHRLREGYKEERTACINRIRGVLAEAGLVFGKSPKVLRAVLDEVIEDASNELSTTARLVLQRAFEHWRELDEHMRWCDRQVGQHVRSSAQAQRAAKVTGIGELGASAVTASVGDFGQFKSGAQFGAWLGIVPKQNSSGGKASLGRITKRGDDYLRTLLIQGAKSAVMSAGKRDDATSRWLVGLVARVGWQKACVAMANKNARILWAVMTRDKPFDAAHVSDKPPAKCSSKSVGAQRPVPPRPAAQPLCPA

SEQ ID NO: 146267 - protein, 385 aa, unidentified
MRPFGEIVSAPFEIKHTASDIHSLVELINSVEGESRIVMEHTGRYYEVLAHQLSEANLFVSAINPKLIKDFDNDSLRKVKSDKADAVKIARYALDKWQNLKQYSVMDELRNQLKTMNRQFGFYMKHKTAMKNNLIGILDQTYPGVNTYFDSPARSDGSQKWVDFASTYWHVDCVRKMSLNAFIDHYQNWCKRKKYNFSQSKAEEIYGKAKELVPVLPKDDITKLIIKQAVNQLNSASTTIESLRTLMNETASQLPEYPVVMAMKGVGTSLGPQLMAEIGDVSRFTHKGAITAFAGVDPGVNESGSYEQKSVPTSKRGSSDLRKTLFQVMDVLIKTHPQDDPVYQFIDKKRAQGKPYYVYMTAGANKFLRIYYGRVKEYLSSLPES

SEQ ID NO: 146268 - protein, 342 aa, unidentified
MKFYCGIDLSARDCHVCVIDQQLKIVVQQKLGNELPKICRLLEPYQANLKIVVESTFNWYWLIDGLQAEGFEVVLAHTLGLYLITGAKVKTDRRDAYSLAKLLLVGAVPAAYIYPPETRPVRDLLRRRLHLVQMRAGEYGSLRRLLLRQGILSSKQQEIKTATEAELEQWLEHPLVRLHASQELQRIELYSQQIGELEKSILQIAVTNQSYELLRQLPGVGQTIALTILYEVGELSRFANVKVFSSYCRVIPGIAQSGQVTRRGRGSKQGNHYLKAAFSQAAVHAVRCYPQVRRYYERQLKRHQGPGRKLVCYNIIAHKLAQAAFHILKEQTEYRAELLFGP

SEQ ID NO: 146269 - protein, 351 aa, unidentified
MNSTRIAVDLAKSVFQVAVSSVPGRIDEQHRLSRERFGRFFAAQASTEVLMEACGTAHHWGRELQALGHRVRLLPPSDVARYRDGNKTDRADTIAILEAARNEAIDAVPVKTLEQQALTSLHRLRSAYVADRTARINTVRGILREFGHAIPQGARAFVAHARVALTDEQLPEALRPELEMALDEIDAFKEKIRQITSRIEDIGQRMPEVEHLRSVPGIGILTATALVAFVGEPLRFRSGRCFASYLGLTPRESSSGLKRRLGRISKRGNTYLRMLLTHGARSALLAARRAQEPDPLQVWALRVELRSGHNKATIALANRIARIAWRVWRDQRAYEPSPSAGRFGPGGRHTH

SEQ ID NO: 146270 - protein, 386 aa, unidentified
MQASHVSTPIKSNVSTIFVAIELSQRSWLVTMHCPDRDKISHHRLEGGDHAGLLALVDRMGERATRALGVTPAVVSCYEAGYDGFWLHRLLMAAGITNHVFDPASIAVDQRARRVKTDRIDGEKMLRTLMAYLRGEPRVVRIVRVPTPEQEDARRASRDRGRLTKEQTAHTNRIKALLRLLGMAIGNPRRRDWLSWLATQKDWQGQAVPPQIMAEIKREHARLMLVREQLEALARPLAAADLTPAAAQMAQRSELLLRLKSLGPAFATTLTHEVFYKDFRNRREVASYFGLTPSPWQSGGTDRDQGISKAGNPRARCAAIEMAWLWVRHQPDSKLTQDYRRRTLNASKRIKRIAIVALARKLIVALWRYLTTGLVPEGAMLKAVEM

SEQ ID NO: 146271 - protein, 344 aa, unidentified
MFYMGVDLGKKRSQVVVLDEKGDVYTEGRLTNRRETIERFIKKIDGQLAMVCEAGNKSFWITDIMREAGVEAHVANAYKVKLIGEARTKTDKIDARILAELLRVQFIPEVYIPEQDIRIWREVFRGRGHIVRMRTQLYNRIHSILDRHGIEYKALQVRTQGVLSWIETLELPDAIKESLEQYVHVIEELTKQVKIFEKRLKEKIRLDQKVRHIIELLQSIPGIGWLSALALYLEIVDIGRFKSPKKLYSYTGLIPGVHQSGEVQRGRRLTKQGNSLLRWLMVEDGWRAVAKDRYYDALYERHKGTLGKTRAILPVARALLYAVYQVWSQDKRYEEIFTANRKVR

SEQ ID NO: 146272 - protein, 338 aa, unidentified
MQYCGLDLGKKSSHFCIVDKNRKVKKQGQVRNRLADITRCFRQLPPMRIALEASTKSFWLADRLEEMGHAVIVVDPGQTKAIGAAGIKHDKLDAKVLADLCAANLLARVDRPTEKQRLERMIVVTRDGLVKSRTRLVNMVRSILDSEGFELNRCATDAFVDQVSRAWFDLPEAMCNAIEPVITTIHMLCEQIDDCDARLKETMVNDPSVKLLMSTPGVGVVVASCFLMAIRDPNRFKTGRQAGAYLGLVPALYQSGKTFRRGRITKHGNRQARWALCVAANALLRARKATALSEWGRGLVVRLGRKKAIVAIARKLASVMWAMLKNNTPFEPRLSKAA

SEQ ID NO: 146273 - protein, 313 aa, unidentified
MSLNNPPIVYAGLDVAKLSLQLHLAGRFHSLTNDRPGHTKLLKLLRTHPGAHLVCEATGGYEQPVVRALQAADLPVSIVEAGRVRYFARAQGQRAKTDPIDAAVLTHYGATFKPAATPAISAQLQRLADLSQRRRQLIHTRTMETNRADHYTDPICVRQHRQLLKILEKQIDQCDQTILAIIAETPDLAQKAQRLQTIAGVGPVVAATVLAEMPELGKLNPKTTAALAGLAPYNRDSGNLTGQRHISGGRRPVRCALYMATLSAVRHDRILKEFYTSLRATGKKPLVALTACMRKLAVLMNHLLKNDKFQLAN

SEQ ID NO: 146274 - protein, 446 aa, unidentified
MNYNSHPKMKNLYIGIDCHKYKHVATLKNCFNEDLTTITFNNDKNGYDYLLKTVDKYKDNLIPIYGLEDTKHLGYGLASYLLSKDKIVKCVSSTLTYLERKRQPTIFKNDEYDSKCIAKVLLDYLDTLPYAKSDEIYWTLKQMVKMRKSIITNNIEVKNKLHAQLMHHYPNYNQIFNHVYCKTALNLWETYPSPNMILEEDFETLVSNLKSWSNGVIGKTKAAKILEVINKYPLSDMIYQNERNSIIKMLVKQIKSNNKRLEEIEKEIIDIYDKIGCKLHTYPCLDKITGACLLSEIGNINRFSNSGKLARYAGIAPIEKSSGNSEKHLKNEFGNRELNSMFYSLACRSICTGRTGNTPTNPIFKEYYYKKIKEGKTKHQAIVCIMRRTCNIVYGILKNDTEYIPPKQLMEQCQNSFRERKKLEEEKRKKKEERKKRDIANINSNC

SEQ ID NO: 146275 - protein, 416 aa, unidentified
MDSGCNSQLGGIQINSVGIDISKGRSTIAVMRPFGEVVILTFKVRHTDSELSELARQLKSLNGETRVVMEATGNYHAPVAKLLHDAGLYVSVVNAKLVHVYGNNDLRRVKTDKKDSVKLANYDLDRWLTLPRDVPEEDTRLLLKNCYRQYRQYSKVQTVLKNNLISLLDTVFSNVNRLFSSLIRGDGSEKWVDFVAEFWHCRCVSEKSEKAFTNKYQLWCRKHGYNFSEAKAHLIHAEASGHIGVMPKSETTKLLVEQAVAQLRATSAALTALKHEMLALAAQLPEYPVVMGMFGVGPTLDPQLIAKIGDVRRFYSKKALVAHASLDAPPNDSGDVTGKHKSMSKIGASSLRRTLFLVMSVYLRSAPLDEPVYQFMDRKRTEGKLYHVYMMASANKFLRIYYATVKAYLESLEHTA

SEQ ID NO: 146276 - protein, 366 aa, unidentified
MIFPPKEATQMSHDVKYIGMDVHKEAIVIAVLNESGKQVIESVIETKASSILQFLHSLRGELHVTWEEGTWAAWLYDLLQPQVQHIVVCNPRRNALLKEGSKSDKVDARKLADLLRTGMLRPVYHGENGLRTLRELGRSYQTISKDLTRVMNRLKALYRGWGIPCAGTQVYAARTREEWLSKLPQAGVRRRAELLYQQLDGLQALRREVRPEFLTESRKHKAAKLLRQIPCIGPIRAARLIGLMQTPHRFRSKRQLWTYSGLGIETHDSAQYRCVGGQVQRSKKPQQIRGLNQNHNHEMKEIFKSAATRASCGRGPFYDFYAALLAKGMKPEMARLTLARKIAAITLTLWKKEERFDAEQLKTQAA

SEQ ID NO: 146277 - protein, 430 aa, unidentified
MKSNTQNAKIEAITEKTLVLGIDVGSETHYARAFDYRGIEYSKKPFKFSNTEAGFVTFKEWILDLKERHEKDKVIPGMEPTGHYWFNLGKFLQDNEMKPVLVNPHHVKKSKELDDNNPTKNDRKDPKVIAGLVREGRYMIPYLPDGVYADLRTASNIRFQLQAELTRIQNRISRWFNIYFPEYKTVYGKPDAKSGMLILKAAPLPEDILTLGIDGVNQIWRDAKLRAVGKARAKTLIEAAEHSVGSKEGAVSARMEIRMLLEDYESRNTRLQEVMVLIEELVRKIPMAEKLLEIKGVGIRTVSGFLAEVGDISRFNNPKELQKLAGLALVENSSGKHKGETTISRRGRKRLRYLLFEVAMSLVSKNQEFRELHNYYTTRRLNPLKKMQSLMAIAAKLIRVFYAMLTKGVDYDPKKMVSDIKRPAVYLQAA

SEQ ID NO: 146278 - protein, 460 aa, unidentified
MSRAKKQKRQRSQAKSELPVLNPNAAGIDIGATEIYVAVRPDCDSEPVRSFPTFTEDLHRLADWLKACGVETVAMEATGVYWIPLFQILETCGFGVCLVNARYYQNVPGRRTDFSDCQWLRYLHSVGLLRPSFRPADQVCVLRSLMRHRDSLIQTGSTHVLRMQKALDQMNLQLHHVISDITGLTGLRIIDAILAGERDPKRLANLRDGRVKASEETIMKALIGDYRREHLFTLKQSLAAWRNYQKLIAECDREIEQHLSTFNDRIDSRAKPLAALKVRRKKLFGNEPSFDLRGHLYRIFGVDLTEVPGMNVLTAHTLLAEVGPDLSRFRSASAFASWLGLCPDNDISGGKKLSVKTRHVNNRAAWALRMAANALHKSHSWLGDFYRRMRAKLGSPKAITAAAHKLARIVFHMLTTHQPYEETVFAKLEQQARTRAEAKLKAQAKALGFQLVPTPAKEQA

SEQ ID NO: 146279 - protein, 338 aa, unidentified
MYYTGIDLHKKTSFITTIDARGKIVTRANLQNVEEDILAYFAHLGGETKIVIESMASWYWLYDLLTGEGFEVVISNPAKTKAIASAKIKNDKVDSHMLAQLLRADLIATVHVSSLETRKLKELLRHRSRLVRDATRMKNRIHMLLMKNNFRSPFSDLFGVKGLRYLEEIDLPDYHRQQVETYLLLYQKLREQIEPLTQRVRALAKGNHTAQLLMTIPGIGPITAMFIMAEVDDISRFRSYRNLASYAGLVPSLDASAGKEKRGRITKQGSRYLRTALVEAAQAAVRMKNCRVSIFFRRRIVKGGYQKAIVATAHKILQYAFYVWKNQTPYKETYPVCA

SEQ ID NO: 146280 - protein, 317 aa, unidentified
MAVHRSFVGVDISKDRLDIWLESAKRFERVTNDAAGWTALIALLRAQGPQSGTVVAFEATGGYERGVRGALLEAGFEVRRLNPFRVRLYARSLGRNAKNDRIDARVIARYAAAAETHPEILDAVREDLAELVSHRQRLVSERVAVSNHARTLRAKALVAQDRKRLALLEQQIAEADELILKALGDAPDLKAKAALLKTLKGVKDVTATTLVALLPELGRLNRRQIAALVGLAPFDHDSGKYAGTRSIAGGRAAVRTALYMAARAAALSKSPLATHYKRLIAAGKTPKVATVALMRKMIVTLNAMLRDGRPWSHADAH

SEQ ID NO: 146281 - protein, 312 aa, unidentified
MAESKVSVGIDVSKNTLEIAIHETGEIWSCNHDNESCAVLTSKLKQLKATSIVLEATGGWETLITASLSAVGLPIIVVNPRQARDFAKATGQLAKTDRIDCRVLAHFAAAINPPVRPIKSDDTRHLEALLARRRQIVEMLVAEKNRLANNPDRAVVKDLNAHISWLERRLKSSDDELQRVLKSSPAWRERDDLLRSVPGVGPVLSLTLMAQLPELGQLNRRQIAKLVGIAPFNWDSGQWRGSRHIWGGRASVRSPLFMATLCAVRINPTIQSFYRRLIVAGKAPKVAIIACMRKLLTILNTMVKTQTSWRSA

SEQ ID NO: 146282 - protein, 393 aa, unidentified
MPRKRILVKSIDTSISYQVIGIDLAKHLVSACLITGAGEIFGIDRLTYDDLLKSAERMSPTLFCMEPCPEVHYLAEKLQGYGHHTKVIDGAAVKEYIKTHFGGQKTDLNDAQAIAFLSLDTNLPEITPKNTSNSVLSSIQAVREQFRKEYIQSFVSLKGICQRWGLPISKGVMNKNKVEELVSESKKIPQEVKDWLLELLQSCRELQKRLNKISKYLKEYADNDEICQKIMSVPGIGPITATRLKATIGDIQRFEKPKSIVAYYGLVPKSKATGHNEKKGGITRRGDRVARSLLIEGAGVVLNLAAKGFLRSKPLNKWIEKKEKTQNAWGKLCCALAAKMLRIVRAILIQGTSFNAKIAGVARCSLPKESRNNVMGNNKLSEIPSPNGSVYIH

SEQ ID NO: 146283 - protein, 413 aa, unidentified
MLFAGDDWAEDHHDVEIQDETGRKLAARRLPEGAAGIAALHELIAGYLGQNGDPGQVVVAIETDRGLWVQALAAAGYQVYGLNPKQVARFKERYNLSGAKSDAADAHALADMVRTERHQLRPVAADTPEAEAIKVAARAHQTLIWERTRHTLRLRSALREFFPAALAAYAGLGLTGADTLELLVKAPDPASAARLSAAQITAALKRARRHNAAVKAEAVKDALRVQHLIQPAPITAAYAAAIRATASVLITLNEQISELEGQVEAHFRQHPDAAIYLSQPGIGTTNGARVLAEFGDADGRYASARARKNYAGSSPITRASGRSKIVLARFVRNNRLADALQSQALSALTGSPGARAYYDKQRKRGLGHNAALRQVSNRLVGILHGCLKTGTLYDEATAWPDHHATRHTSRLAA

SEQ ID NO: 146284 - protein, 353 aa, unidentified
MKRKLSHNELILGVDTHLDVHVGVVIDQVGRLLGTRSVSANAAGYRELFSWASSFGFVGRAGVEGTGTYGAGLCKLLTDNGVKVFEVNRPDRASRRLQGKSDPTDAENAARSVLSGKSTAIPKQHSGACEAMRITSVARRSAVKAKTQAINQLRALLVSAPQDIREKLWKTKARACVSACSRIRNLGDTVLLQTLTVTLRSLARRWLMLSVELKQLDWQLEKLTQKYAGELRGRFGVGPQTAAILLSVAGDNPERLKSEAALASLCGVNPLPASSGKTTRHRLNRGGSRSANNALWTIAMVRMRSDPRTQAYVKRRTAEGLTNKEIHRCLKRYIVRELFPVILRDLGNVRVTA

SEQ ID NO: 146285 - protein, 270 aa, unidentified
MIIIGCDYHPGFQQIAFVDTDTGELNERRLGHREEAEQFYRQLKVSGKQVRIGMEASGHARWFERLLSELQFELWIGDAAAIRAKRVRKQKTDRQDAQLLLTLLLEDRFPTIWIPNPGNRNLRQLLWHRHRLVQMRTRVMNQLHVVALNEGVRLKKALWRPAGRAQLESLELACWSGRRRQDLLDLLDQLTAKIQELTRALEAEVEKRPVARRLMTHPGVGPLTALAFELVIGTPERFGCGKQIASYVGLVPSEESSGDRRRTGGAIFST

SEQ ID NO: 146286 - protein, 360 aa, unidentified
MQTKVNDNLFAGQSIYVGIDYHKKSWKVTILGDQYEHKTMSQNPSPEILASYLKRNFPGASYQAVYEAGFSGFKSCRALRDLGVNCMVTHAADVPTNEKERLQKTDKADSRKLARSLRNGELKAVHVPEPWLEADRALLRQRFRIMKDVSRTKNRIKSLLFQFGIEVPIQFTEAQTRHWSKRYTMWLRNLNVQHPSLKQVIENYLRIGEILRKELLVANRQIRQLSSSERYSSNYQLLITVPGVGLLVAMTILVQFGDITRFNTLDELCNYIGLVPRMYGSGDRIEVGKLIHRGRKEIKIMLIEASWIAIRHDPALTAKFNALSKSMHKNKAIIRIARKLLSRIRYVLAHQKEYEAGVVK

SEQ ID NO: 146287 - protein, 373 aa, unidentified
MNYSTVYVGMDVHKETFFLCCYTNEKERAEYPQKVDGHYSKVINYIEAMRFHYGENALFICGYEAGCLGFTLYHQLTNHNVKCVILAPTTMLQQKSKKRVKTDKRDAALIARCLAHHDYSPVHVPTEQDEQIKEYIRMRDDHKLALKKVKQQILSFCLRHNFRFDGTASHWTQAHLKWLRSLKPEGMYAEILQEYLLTYDNLTNKLERLDKRIEELSANESYQENVQRLSCFIGVKTVTALAVLTEVGDFNRFASAQHFASYIGLTPGEDSSGNDQHRLGITKAGNRHVRSLLVEAAQSYSRGQVGFKSKALKARQEGNPSEVIAYADRANERLRRKYYCMVLKNGKSTNVAKTAVARELACFMWGIITGEVI

SEQ ID NO: 146288 - protein, 378 aa, unidentified
MKNDIRYVGLDVHAETIAVAVVEPDGEMRFLGTIPNRPEAVRRLVKRLGSTTQLKACYEAGPTGYVLYWQMIELGVQCAVVAPTLVPQKPGDRVKTDRRDAEKLAVLYRGGHLTPVWVPDQAHEALRDLVRAREAAKSDQLRARHRLQKFLLRHGRRPPQGIKAWTQKHLDWVRREVHFEAPAQEAVLVDHLAEVEHARERVRRLEGAIDTAVEAAPACLRGVIEALQGLRGIAKVSAATIVSEVGSLSRFRKPRQLMGYSGGVPREDSSGERVRRGSITKTGNAHLRRIVGEAAWSYRHRPTVRGELLKRQAGLSEEVKAISWKAQHRLYSRYRRLIGKGKAKQQVITAVARELLGFIWAIGVHVEQQHGTATRRAA

SEQ ID NO: 146289 - protein, 399 aa, unidentified
MDNFPVFVGIDVSKDKFNVCAISNPSSIIFESSFDMSKQGFSSFANKLSAFPKQSIIIAMESTGCYHLNLLAFLSSNDFACAVFNPLTVKNFASLRKTKTDKIDARIIATALFYLQHQIPSSAFVNSELRDIVRARENIIHRIAKVKGNIEKLLNVLFPELERVTNIYSDTILNLLSHFPSAKAIQKARNLDVFFSKDRGRSTKLNAQKLKELANNSIAQYWPMKEKILVQNIKELQFLQQQLEEYDKMMKEYCECSAINLDIEILTSIPGIGENSAMHFLAEVGDISRFSTYKKLIAYCGLDPSIAQSGKSKVEGHISKRGNAHLRRILWLMAVSVVIHNEYFRTYYERKRQQGIPYKKAIMSVVHKLLRTLYAMLRKKEKFNIDYAISHSKQKFNFA

SEQ ID NO: 146290 - protein, 482 aa, unidentified
MKPKQQEKTKEATCGPTQGHWQQMNRKQRREMTRKIQSEDISLEVIHPNAAGIDIGNESHYVAVPPARDSEPVRRFGCTTAELKAMANWLQQCGVRTVAMQSTGVYWIAVYDILEQAGLEVYLVNARDTKNLPGRKSDVQESQWLMKLHTYGLLRNSFRPSQEIRTMRTYWRQRNDLVQSAGRHIQRIQKALTQMNIQLANVLSDVSGMTGQAIIKAILAGERDPHKLAAFRDHRVKASGEEIARSLEGNWEEDLLFVMQQEQDGFEFCQKQMSECDRQLEQYLQQMEDRSAGTNLPEEKRKERLKKKKGNKPRFDLRTGLFRMTGTDLTRIDGIDVMTAMTILSEAGWDMSKWETEDHFVSWLRLCPDNRISGDKIIGKGRLPTNNRVSIALKMAANTLRTSKTYLGAQFRRLRSRLDTPVAIKAMAAKLARLVYRMLRYGMKYVDQGAAFYEAQHRQLQIKHLKSKAAKLGFQLIQVPAA

SEQ ID NO: 146291 - protein, 343 aa, unidentified
MQAITTIGLDIAKSVFQVHGIDAEGNVILRRQLKRRYVLVFFQKLPPCLVGIEACASSHHWSRELQALGHTVSLMPPAYVKPYVKRHKNDSTDAEAICEAVTRPNMRFVATKTPEQQSCLTLHRTRHLFIRQQTSVINAIRAHLAEFGIVAPIGRLGVEQLLGVVSDASDKRLPDVARACVAALGAHLQRLKVQILEFDRMIRAWHRSNEVSRRLDDIPGVGPALATALVASVADPMMFRSGRDFSAWIGLVPKQNSSGGKDRLGNISKRGDRYLRSLFTTGALAVIRYAKIHGTKHRPWLTALLTRRPTKVAAIALANKIARMAWAIMASGERYKEPAALAA

SEQ ID NO: 146292 - protein, 401 aa, unidentified
MNAVGIDVSKGKSMVAIIRPLGEVVAAPFEVGHTATELNELAKFILKISGETRVVMEYTGVYFEPIATALYDAGLCVCVVHAQLIHNYGNNTIRKVKTDKADAIKIANYALDNWDKLKPYTPIDEVRRQLKAYSRQYRKFNKLKTMLKNNFIALTDSTFPGVNELFSSPPRKSDGHEKWLDFAIKFWHAECVCSLSQKAFTERYRKWCNKAGYYFLESKAEDIYAAACGHIGLLPKDENTKQLVQQTIIQLTSICSSLSVIEYKMTELAGLLPEYPVVMDFHGVGRILGPQIMAEVGDVLRFEKKESLVCFAGLEAPPYESGKFESHNRTISKKGSPHLRAALFQVMDCLLKTQPANDPVFQFIDRKRSEGKHYYSYMCAGSAKFLRIYYARVKEYLTALE

SEQ ID NO: 146293 - protein, 347 aa, unidentified
MKRIAVDLAKSVYQVAESVRAGEVIQRKRLSRVAFARYVQEQVGPVEWVMEACGTAHYWGRVAQARGHRVILLHPRYVRPYRRRNKTDRNDCDAILEAARCAGLHPVPVKSLEQQQLQQLHALRESWKKSRTQRINLLRGIFRELGIEVPTSTEAFLRAAGEHLERPEVRALRGVLQVVLAEISFYEQSMHECEAQLARWHADDEVVHLLDAVSGIGLLTASALKTAVGTPERFANGRQLSAWLGMTPREHSSGERRHLGQISRQGNTYVRTLLIHGARSALLAAQRCAARTPEKMTALQRWATSTAARIGPNKAAVALANKLVRICWAVWCHKRRFSGNWQSMPPA

SEQ ID NO: 146294 - protein, 452 aa, unidentified
MAKSTAHTRKQNQPATQVRPEPCPDAAGIDLGATVHYVAVPPERDKQPVRSFGTQTGDLQALADWLIACKIKTVAMEATGVYWIPLFQILEDRGLEVCLVNARHVKNVPGRKTDVQDCQWLQYLHSVGLLHASFRPPAVVCAVRALVRHRESLVRSGCEHLLRVQKALDQMNVQVHRAVTDITGETGQSILEAIIKGERRPEVLARHRDHRCKKSEAEIAAALRGDWRPEHLFTLRQSFEAWQYHRKLIVECETELHKQMDGLADQTKEAAPPKMRSDKRCDEPTRQHLFEKFGVDLTAVDGVNTQTVYVFLSEVGPDLRKFESAEHFASWLGLCPDNRKTGGRPIGVSTRAVANRLSTALRMAAQSLSRVESPLGDWFRRMKAKLGAPGAITAAAHKLARVLYAMVKFRQPFDPARLGNPALRRARKENALRRAARELGYVLQPIQAEAVS

SEQ ID NO: 146295 - protein, 340 aa, unidentified
MNYTGLDCHNQYIHSQQMSADGYLMKHDCIPTTDTALSIFLNSLDEPTHVTLEAGRNWWWITQLLLDHPQVSEVSVVDARRSRRIAEELSVRSGYGRAKTDRIDAEMLAEQTRHHLAPAIYIPSLEQLQRRSIVRYRFNLVHQHTSLVSILQSFFALQGLRLSIKRLIESWDSQLIYLEVLSEPFLFLVRQQIKQIEQLRGHIKECNDYIEQLIPDTEPRLKLLSTLPGIGPVLSRQIDTEIMTIDRFDSDRHLTSYSGLAPIEQESAGRKGVIKLNAHCNYYLKNAFLMAAHCARHHPKYRVKYQRDLKRRGKKIAKINLARKLVKSVYWMLTRQQPFK

SEQ ID NO: 146296 - protein, 348 aa, unidentified
MKFYTKQHQYTCGIDLHARSLYVCILDESGKPVVHKQIKASPEALLKVISPYRSDLAIGVECMFSWYWVADFCADNDIDFVLGHALYMKAIHGGKAKNDKIDAEKIARLLKGGMFPMAYVYPRQWRGTRDLMRRRMRLMRQRAELIAHIHNTLSQYNLPPNTDNLRYARHRENLRERFPDPSVQKSIDLDLNRIDFYDEQLGQLEWYLKQTAKTVDKHAIIRLKSIPGLGDILSLVILYEIHSIDRFERVQDFVSYCRLVKCKRESAGKTYGTGGAKIGNAHLRWAFGEAAVLFLRGNPAAQQWLAKKAQKHNKAKALTILAHKLGRAVFYMLKRQTLFDQDKFLATS

SEQ ID NO: 146297 - protein, 368 aa, unidentified
MNKPITSFVGLDVHKDSIAIAAAEAGREAPRFVGTVGSDLAQLLKALRSIGKSETMLVVYEAGPSGYDLARQLRSRGYRCEVIAASKIARRPSERIKTDRRDALTLARLARSGDLVSVRVPDDRDEALRDLSRTREDAVRARLKARQQLKALLLRHGHRYGGKSSWTLAHERYLATVSFAHPAQDIAFAEYRQAVREAHECVERLTEALRSQSEHWRMKPVVEALMSLRGIDFVAAVTLVAEIGDFTRFAQPRELMGFLGLVPSEYSTGDTRRQGAITKTGNGHARRVLVEAAWNYRFPARVSRVLQVRQERQPKAVREIAWRAQLRLAHRYRRLSSRQLHANKICVAVARELVGFVWDIARQVKVAV

SEQ ID NO: 146298 - protein, 319 aa, unidentified
MSPTQNPIRHAGIDVSKERLDVCFLPGGEAFAVANDPEGIDALVERLLEAPPELLVLEATGRYERPAATAIAAAGIAVAVVNPRQARDFAKATGRLAKTDKIDAQILARFAAAVEPSPSILPDEEAQHLQAILTRRRQLLLMRTAEKNRLLMAPEAVAERIRAHIRWLEKELEHTDRELDVAIRESEVWRRNEELLRGVPGVGPILARTLLAELPELGTITHKRLSALVGVAPFNRDSGKIRGKREVWGGRAPVRAALYMGALVATRHNPVIKEFYERLLKAGKPKKVALVACMRKLLSILNAMMRDRAIWRCPHVLTP

SEQ ID NO: 146299 - protein, 406 aa, unidentified
MVNVGIDLHKTQFTTCVRNREGDVFGKYPTTEDGYGAFLEEAGKWQGRGEEVRVGVESTGNTRYFKSRMEAAGVGVTVINTLKMKVVNESVKKTDKHDAATIAEFLEKDMLPESRLCSRTSEQLRRLLKARGMLVKASVGIKNQIHALLTAEGLADVKGSLQSKKGRKRILDALKQWEDGLVAQPLFETIERLEENIKGIEKKLRELAQGDRVVELLETIPGCGEIGAWTIRAWTDDINRFSSAKKYCAYAGLVPWVQNSNETVHHGKITKRGPKELRTALVQVVMGLRRMKTKTLAWRLMQRYEILKQGKGSGKAIIATARKLAVIIWHMLTKEAAFELEQMVDRKLAKKAEGMQRTMGSAQAASVERVEKPEAARAGNKGVKKSALPVKRKKSLLEGYSMVDFL

SEQ ID NO: 146300 - protein, 472 aa, unidentified
MSKGSGSGMTRGDRRRNARRERLRALLPRDGAVAGIDLAEDKQALAVIDHDVRVLARKTVRVKAFGLGEALDWAVGQARVKGFDRVTVACEPTGPRWMQVQRLCAERGLPLVCIQPLISHIAREQQDYTTHKTDESDCVMIARLAVELHCYIPEELDETWAHLRHLGRRRQQLITAQTASGQRIMDFLSVAWPAVTETCAGPVESRTWLAALEVVTARCGADPGTLAAMGREGFTALTRGAVAGWGITRAHGPICARVFAALTDTEGAVTWSRRGLLRRVADELGDLKRTRVQLRQVEADMVAVLDELGLSRLADIPGLTAVGAAAILAETGNPRRYDSSSSLVKHAGMSPSDNASGAFSGQAHISRRGRPGLRLTVWRAVWPMLQYNPVMAAKYQAMTRAADAAAAGAGPRQGTAAQAAARARRAKARVACAASLLRWIYCMVVHDTSWDPAVASGAASRHDTARTQAEAA

SEQ ID NO: 146301 - protein, 318 aa, unidentified
MPQETRIVGLDVAKSKIDACIHSMGLRLSVPSTPEGEAKLVAWLRANRVGRAVMEASGGYERSWAEALRAAGLKVRIVDPKRIRHFAKAAGRLAKNDPIDADTIARFAEAFPDDSIQPHDPAREELARLVQAREALKDVQERIKQQREHQPPAIVVEALAAVAKTLRAEMRRLEASIASRIKANPAFAHRAELIDSVPGLAGHTVAGVIAWLPELGRIPDEAASALVGAAPYDDDSGQRKGVRRIKGGRRKLRNLLYMAVVGAATQHNPVLKAYYQRLLARGKEPKAAIIACMRKLIVILNTMIARDDPWNPPAQAVA

SEQ ID NO: 146302 - protein, 351 aa, unidentified
MTLVGCDLHSRNQQVAVLDTETGEMQERRLAHDDQAVEQFYGSLPRPVTIGVESTGYAQWFHALIQRQGHTLLVGDAARIRAMVVRKTKTDRRDAAHLLQLLSQDRFPVIWVPDPRVRDLRVLVTHRMRLVRMRTMVKNGLHAIALNQRLAAGSALFTRRGRAQLQALALPPHTTQRRDESLALLTWLDEHIDPLNAQIAEAANADDQARRLMTHPGVGPLTALATVLVLGPVARFPTSKHVVSYIGLAPSVDASADKYRLGHVTKQGNALLRYVLGQAGQVASRTDPDLRRLYSTVMHRHGRAKAKVATARKLLVRLYIMVRDQIDYDEFRRRGRPRLLTPPPAESAVRT

SEQ ID NO: 146303 - protein, 309 aa, unidentified
MLAGIDVGKLNLDVSIGGDKTVVFSNTAEGIDALTMALHEAGVTRIVCEPTGGYEREMVRALRTSRLQVQIAHPNKVRAFAQACGILAKTDRIDAQVLYRYGETFDDQASIPLGDKPLKLRDILRRRQQLMSTRTQELNRLEKHPGAVARASCERHLVWLEAEIAELDQALKTQLGEPELKHQAGLYSSVKGVGLITAATLIAELPELGRFDGKSLTALAGLAPWSRDSGKQRGYRAIRGGRASVRKALYMAAISAIRTNGAMRSFYLRLRHRGKAGKVALVAVMRKMLLLLNAIAHRGTPWVENPVRA

SEQ ID NO: 146304 - protein, 353 aa, unidentified
MDRYIGLDVHSQTCTLAAVGPTGRKLALQVLETTGTALIQAVRAIPGPKHLCIEEGTQSAWIYELLETEADEFVVTMPERHAGCKDDARDALQLAEALRTGGIKRRVYKPCGPYSELRAAVRCYGLLRDDVSRAKNRLKALYRSRGLLTGDDVFHADKHLRWEKKLPAPQRESAALLYAQIESLTKLWAVAAERLQAASKPHQIVKILSTAPAIGPIRAAQIVATVVTPHRFRTSRQFWAYCGLAIVMRSSSDWVRGPQGDWLRSKVRQTRGLNRNRQPVLKSVFKGAALQVATRMTSHPLHADYQRLLDAGTKPNLARLTIARRIAGAVLAMWKHEEVYDPTKQRSHIIAQA

SEQ ID NO: 146305 - protein, 311 aa, unidentified
MTQEAAFVGIDVSKARLDVAVLPSGEAFEVANEEAGWRELIRRLRPLEAAAVGLEASGGYERGVLRALIEAGLAARLVNPLRVRQFARACGTMAKNDRLDALAIARFVQLVPQRKAVRNRATDALAELVTARRQVTDEITRLKNQAAHATQALLKRLAKTRAAHLERDRTVLDKAIAAAIAADPDLAAKHRLLRSVPGVGPVYAAALLAFMPELGNLTSKQAAALLGVAPFDCDSGGYKGQRRICGGRRNLRDIAYMAALVAGKHNPVFKAAKDRLLAAGKPPKVALVALMRKMIVTLNAILRTNQPWAHA

SEQ ID NO: 146306 - protein, 415 aa, unidentified
MRVIRKRCLGLDLHKKQITAHLRVHRSSSEEPEGQDVRFGTMPDELEQMREWVREQQITDVVMESTGVYWMHVYELLEGVTSPAVVNASHVKKVPGRKTDMTDAQWLAELHAHGLLRLSFIPPKEIRELRAVTRYRTKLVAIRTGAKNRTIKLIEMAGVKLSSVVSSSFGKTGRGILDALCSEGRPDAAKIATLAKGTLRAKVAELERAVRHPLSEQQRELLKMHLQAYDAVDAQVASTELKLAQLAQPYREVIELLDQIPGINPLSAITVLAETGIDMSVYRDASHLSALAGLAPGNAISADKRRRVSVRAGNRYLKRILVQIAWAASRKKDSFQRMRFLRLQTRIGRNKAIVAVARQILIVVYHVLSTSKPYEDHGMDFYDRRNKDKMIARYTKRLAQLGFTVQLTKKDELTQ

SEQ ID NO: 146307 - protein, 308 aa, unidentified
MLCVGIDVSKDRLDVHVWPHGTAFVVARDGKGLADLVERLRPLAPDLVAVEATGGFETVVAAALAGAGLPLVVVNPAQVRHFAQAISQRAKTDPIDAAMIARFVEATRPALRPLADDAARLLSDLVARRRQIIEMIVAERNRERRTTVRRIKKSIARLVAALEKELAEIDLEIDAGVRGSPAWRDKEDLLASVPGVGPVVARTLIAELPELGTLDNKKIASLAGLAPYTRQSGQWKGKSMIGGGRKSVRSALFLAALVASRHNPVLKAFRDRLVQAGKPKMVAAIAVARKLLTTLNAILRDQKPWQPA

SEQ ID NO: 146308 - protein, 344 aa, unidentified
MENYAGIDVSLELSSVCVVDAHGKILKEAKVASEPEALVAFFRTLGFAVKRIGLEAGPLSQWLHAGLKRAGFETVLLETRHVKAALSAMTVKTDRKDARGIAQLIRMGWFRPVHAKSIGAQEIRALLVARKQLLVRLIDVELSIRGILRGFGLKVGPVTRKNFEARIRELVAGQATLERIAIAMLSARLALKAEYGRLHKAVLAIVRDDAVCRRLMTVPGVGPLVAITYKSAIDDPHRIVKSKAAGALFGLTPKKYQSGEKDVTGGITLAGDEIVRTALYEAANVLLSRITRFSKLKRWGMDVAKRRGSKRAKVALARKLAVILHRIWVDGTTYRWAEAGSIAA

SEQ ID NO: 146309 - protein, 385 aa, unidentified
MGLIVPTTIHPEREDQPLPYEWFVGIDWGSQQHQVCILDRDRRLVGERTVDHDGASLAQRAAWLWTVSAGHPQRVAVAIEVPRGAIVEGLVERGFHVFAINPKQLDRFRDRHSVAGAKDDRRDAFVLADSVRTDRPSFRRLQLDAPHLLLLRELSRVEETLLEEFRRSANRLREQLHRFYPQMLQLCSAADEPWLWDLLHLAPTPAHAMLLSEEQVQRVLKAHRLRRLKAPAVLACLQAPGEGESPSDVAIVLSLPGVGRKITAWLFAEAAQPLAERDYQVLRTHGGVAPVTKQSGKRRQVVMRHGCNPRLRHALYHMARVAMQRDAHFSSVYAALRAKGQRHGQALRNIGDRLLRILMAMLRHRTCYDASRIRCAPVAQMGQKM

SEQ ID NO: 146310 - protein, 353 aa, unidentified
MRIVVALDVHRRQITYKTLDRESGEVRRGRIAPATRVAVRDWLEQFAGCEAEFALEGTTGWRFVVEEIERAGHRARLADPAETAVKRGRKRRAKTDNADCDLQLRLLLAGELPESWIPPAHILELRIRVRTRKLLIDQRTAWQQRLQAQLLHQGVAAGLKPRTRAGREALARAELSPAGRELVALALRTIEAIDRELAPLDRALRSFARRQPACRALIANLYGVGPISATAILAELGDCRRFASSDDAVRHSGLDVTVHQSDNKRSAGHLSHQGPELLRWALFEAAHQSARRGSPDHDYYLQVAGRIDHNRACLSVARKLCRRSHHILRELGDAALAPVERERQTDEAIQAAA

SEQ ID NO: 146311 - protein, 361 aa, unidentified
MNATTVAVDLAKSVFQLAVADEHWRVVETQRLTRTQFERWFLNREVSLVIMEACGSAHHWGRWLDGLGIEVRLLPAQYIRAYVKRNKTGAADAAALLEAARASDMRPVRVKSVEQQALQGMHRIRSLWMGTRTSRINALRGFCHEFGIAIPVGARNGIEAISRVLADPNTTVPDLIRGTAKLLIEEIRLLEGRISQLERELAALARLSPACTTLLSIPGIGLLTATAMVAATSGDVSHFKDARHFSSWFGLTPKEYSSGNSRYLGRISKKGDRYLRMLLTHGARSVLRASKVAQDAGREVCGVRRWALDVQARSNHNKAACALANKLARICYATLRDKEPFGEQTVRLGKKINRQSFVMPA

SEQ ID NO: 146312 - protein, 447 aa, unidentified
MRAQKQTKRRKMKLPQHLQHINPCAAGIDVGCRSHFVAVPEGSCEQPVREFSSFTDDLHRMADWLLSCGVSTVAMESTGIYWIPVFEVLESRGLEVRLVNARHVKNVPGRKSDVLDCQWLQRLHSYGLLEGAFRPTEQVCTLRAYVRQRMNLVRYAAAHIQHMQKALSQMNLQLANVVSDITGVTGMRIIKAILAGERNPLVLARLRDPRCKNDESTIARSLQGNFRPEHLFSLKQAMDLYKFYQGQIAECDRQILDQLTSFDAADGSGNGPPASLEEALQRMSGVDLTRIDGIDTNSALKIIAEIGTDMNRWKSPKHFASWLGLCPGTKVSGGKVLSAKSKPVANRAAATLRMAAFTLLKSKSALGAYLRRQRSRLGAPKAITATAHKLARLVYSMLKHGTAYVDVGQKQYEERYRTRVVQNLKRKAHELGYSLVEVGKQPQPLAS

SEQ ID NO: 146313 - protein, 370 aa, unidentified
MIYVGIDVAKDKHDCFICNGDGEVLANVFTIENSKTGFEHLLKVINTCTGIDGKKKVGLEATGHYSYNLLGFLLDNGLPTYVINPLHTNLYRKSLSLRKTKTDKVDARMIASMLMSDVSLKPYSQTLYHNEDLKSLSRYRFDKVKERSKLKTSVSRLINILFPELDKLVCSVHMVSVYALLSEFPSAKDISSAHLTRLTNLLYSVSKGRYNRDTAIKFRDAARDSIGCYMPAKALELKHTIKLIRELNTEIKEIDNEIKRIMDKINSPILSIPGISYSLGAMIISEIGDFSNFSTPDKVLAFAGLSPSTYQSGKLDNAYAHMEKRGSKYLRYALFNAAKFVCNWDKSFSDYLAKKRNEGTMLLFLTLLKN

SEQ ID NO: 146314 - protein, 343 aa, unidentified
MKEDRTIGMDVGDKSHALCVLNAQGAVEVRERIANTKAALQKFLSGYTRCVVALEAGTHSPWISREITRLGHRALVAQPRQVHLISGDEQKCDERDAEHLARLARVDPQLLHPIHHRGEQAQADLAILRARDGLVRARRLAINLARSLVKGVGARLPACSAEAFAKKATEAVPALLKPAVDPLLATVAQLTQQIQVYDRNVQALVTRYPEAARMEVIPGVGPLTTMGYLLTVEDPQRFRKSRQVGPFLGLVPRRDQSGDTDKHLRIHKRGDGFVRRLLVSCAHYILGPFGPDSDLRRFGLRLAEHGGRFGKRRAVVAVARKLAVLMHHLWSTGAPYVPLRQAA

SEQ ID NO: 146315 - protein, 347 aa, unidentified
MSEYIGIDLHKAKSFVTRLDAQGRVLEQVNLPHASGELERYLTRLPADTRIAVEATGNWMWLYELSEARHPDLVLAHPLKTKAIASARIKTDKIDATTLAHLLRADLVPAAYIPPRTVRDTREILRYRSSLVRLRVQVKNKIAAILSKNGITTPTKTAFGVKSRQFLATVPVRACYRLALDGYLRQLTHLTEEIDAVAQTIEAQAEKDPDAQLLCTMPGIGAYSALLILSEIGDVHRFPDSRHLCSYAGLVPSVHASGGQTRLGRLTKQGSKWLRWILIELSLHAINGAPQFRRLYYRVAKKHGGNTGRVAVARAMLKTIYAMLKHQEAFRPLQKGMAGQRQGVMAD

SEQ ID NO: 146316 - protein, 397 aa, unidentified
MYIVGIDIAKRKHEAAVIDGEGTVIIKPFSFTNNYSGYNRLLAMLTKAKLPLDEVSFAMEATGHYWLALFTRLQKEGFRVQVINPVQTNSIRSFYIRQAKTDPRDALLIAEVIRFGHFSESTLHPENIYELRELCRGRHAIVSMQADVKRKVVALLDQVFPEYETAFTNMFSDTSMAILQTCPTPKELSEMPLEELCHLIEVSSRKRFRMAKARELQELARNSFGFAMAGDVFSTMIRLYAKHLDFLKQQVREMDRKIAEIMDTLDTPITTITGIGPTLGAYILSEIGDISRFSSAAKLAAYAGIDPTMRQSGEYNGVRNRMSKRGSPYLRHAIWLAASSAVLHDPALKFYFQKKRDEGKPYMASVGHACRKMVSIIYAVMRDNKAYTPCIPNEISA

SEQ ID NO: 146317 - protein, 336 aa, unidentified
MNMNAVGIDVSKGKSMVAILRSYGEIISKPFEVKHTVSGIRSLIEQIQSIDGESRIVMEHTGRYYEPLVRELSKADLFVSAINPKLIKDFGDNSLRKVKSDKADAVKIARYTLDSWTELRQYSLMDEIRNQLKTMNRQFDFYMKHKTAMKNNLISILDQTYPGANTYFDSPAREDGSQKWVDFSATYWHVDCVRKLSLNAFIDHYQKWCKRRKYNFSRSKAVEIYEASKELVSILPKDDLTKLIIKQAVEQLNTASQTVEQLRTMMNEAASKLPEYPVVMAMKGVGKSLGPQLMAEIGDVSRFTHKGAITAFAGVDPGVNESGSYEQKSVPASKRG

SEQ ID NO: 146318 - protein, 370 aa, unidentified
MTYITSIGLDVHARSVSACAFDPFTGEVAQRRFGADAGEIAEWIPGFESPKAVYESGPTGFALCRELRAPGVDCVVGAVSKMQKPSAEKRRKNDRRDAAFLARLLATRNITEVWVPPVEAEAARDLSRALDDAREDLRRARRRLSKFPLRRGPVFDETDALGRRRGAWTRAFWRWAESCRPSDPAAAAAFDRYVACVRCAESDKRALEKRVLAEARADRWRGAVEALSCIKGIDAVTAFCLATEAGCFSRFPTAGAYASWLGLAPSEHSGGEKEAKGGITKTGNSASRRALVEAAWHFKSCSPKPKAPPAGSAVPAAVKRRCDDATARLRRRHESLGAAGKRPCVANVAVARELACRVREVGRRAEGTLA

SEQ ID NO: 146319 - protein, 353 aa, unidentified
MTVYVAVDFHAREQTISWCDTADGEVHRTKLRHQHDDVRKFYEQFSGEVIVAFEASGYSAWFEQMLAEVGHTVWLGNAAEIRRKAPRKQKNDRRDADLMLDLMMKSDFPRVHTFSAESRTVLRQLRYRHKLVKVRTIAKNSVHAIGINAGLPLRGRLLTQTGMEQLQALPLSPVLSQQRDEWLALIRLLNKQIGAVEESLAQRAQDDEAVELLRTHPGIGLLTALALRYTLDPISRFTSTRCVVGYAGLDCVEDQSSERRRMGSISKQGSRLLRFLLNEAGQTAARKDPQLKQFYKRLLRRRDKPKAKVAVARKLLVRSFIMLRDQIDYAEFVRRGVAARVARETHSPKVTDL

SEQ ID NO: 146320 - protein, 308 aa, unidentified
MTTIYAGLDIAKLNLQLHLAGRFYDLPNTASGHRRLIKLLAAQPAVQVICEATGGYEREIVETLHQSDVALSVLNPARVRHFARAQGQRAKTDRIDAAVLTAYGQALQPKATTPRTQPEQQLTELVRRRVQILELLVSQRQQAERLSLPTLRRQAKSLVRRLESDLDQIEAQLQELRQTTRSLNERVEKLEAITGVGAITALGVLAELPELGTLNRRQAAALAGLAPHPRESGQWHGRRSIGGGRAAVRRALYMAALVAARSNRHLKEFYQRLRQAGKPAKVALTAVMRKLIVLMNHTLKYPTFVPQN

SEQ ID NO: 146321 - protein, 384 aa, unidentified
MGNDLRYPSGTEEVVLAASLELGVSKWKVALHDGRRERPAVHTVAQPQATARLQAVLALIDAHRDRWSLPADVRVVVCYEAGPDAFWIWRALQARGIECYVLDPASIPVERHKRRAKTDRLDAIRLVISLRAWLRGERDRMHVVHVPSAQDEASRHLMRDRGQLQKEVLQHLDRMRKLLATLGCWDKVDHRDFAGRLARDEVRCHDGTPLPPELRERLLRECERLALATQQLATLEKTRQASVPAPARARSDALARLKGIGEVSASRLALELYWRDFHNRRQVGACVGLVPQPYDSGESQTDQGISKQGNGRVRGLLVEMAWTCLRYQPGSALTQWFNRRTQGTGPNRRARRIAIIAVARRLAIALWRYLKDGVIPDGAQLKSS

SEQ ID NO: 146322 - protein, 331 aa, unidentified
MNEVKRFVGIDVAKAALEVFIGSAGAAFSVANDEGGIRELLRQLKPADFVILEATGGLEVPVASALAAAGLAVAIVNPRQVRDFARATGRLAKTDRLDAEVLARFGEAVRPEARPLADEQAQALEALVTRRRQLVEMLTAEKNRRTNAPKVLHRSIDEHIRWLEKRLAGFDDELAALIRETPLWRERDELLRSVPGVGKVLSSTLLAHLPELGMLNRKQIAALAGLAPFNRDSGSLRGGRCIWGGRAQVRRVLYMAVVAAVRSNPVIKNFYTQLRARGKYPKSALTACMRKLLVILNAMLHNKTHWHTPALTASTSPVSPLLGAVSEHGCC

SEQ ID NO: 146323 - protein, 344 aa, unidentified
MVTIGIDAHKRSHTVVAVDERGRRLAETTTGSCSDDHLRLVRWAAKLDEKRLWAVEDCRHLSRRLERDLLAAGERVVRVPPKLMANVRAGARSFGKSDPIDALAVARAALREPDLPVAKLDGAEREVRLLVDHREDLVGERTRMISRLRWHLHELDPGSEPALRTLTHLRNLDRLAQRLAGLEGPVARIARELVARCRALTSEINQLEEEISTLVTQLAPALLAICGCGALTAAKILGETAGIERFKSPDAYARHNGTAPLPVWSSNRARHRLSRNGNRQLNAALHRIALTQARLHPDAQALIARRRANGDGGLEALRVLKRRLSDVVYRALRADTKIELRLVA

SEQ ID NO: 146324 - protein, 345 aa, unidentified
MHFIGVDHHKQTSTMTVLDSQGGEVRTAKLLNLRVDIEAFIREVAPEGFLAVVEAGRASYGMADLLRELGGQVKMANPLQVKAIAHARIKTDKRDSKMLAQLLRADLIPEVYQREAGNREAQRVLRLRAYWISLRVQARNKIRALLAQQPEEVRIAVEQRSEQLFSPKGQEFLGGLELRGRDREILGALLRGYQTFQAFQAESDQLVADLYRELPAAQLIDTAPGFATTFSVLVAVEIAEVRRFPRVEALHSYAGLIPSTHSSGERTYHGPIVKGNVWLRWALVEAVYPAIRKDAGLSILYHRLARKKGPNVAKVATARRLLTILYRMLTENRPYVPYRMNPTAA

SEQ ID NO: 146325 - protein, 370 aa, unidentified
MNPIYIGVDFHSREQTICYLKTETGELVIKELKHQDKEQLRAFYQQFLGQVIVGLEASGYSPWFEALLEELGCEVWLGDPVEIRRRARWRQKSDRRDAELIWDLMVHHEFPRLYQPPLASREVLRMLRYRQKLIKMRTMAKNSLQAIAMQAGLAKGSRLFSTAGQEEFGKATMSPVLQWQRDHWFSLLKPLNEQLLETMVWFKAQSKDDNQIKRLRTHPGIGLLTSLCLRHTLQPVSRFRNQRKVVAYAGFDPMIRTSAERAIYLGISKAGSRMLRYLLVEAVHTAVRYDEDLKRFYKRVAERRGRAKAKVATARKLLIRAYIMMRDEIDYAEFRRRAVAVRLARRSQVTPPTSGGLPGVLIGQSTSPGV

SEQ ID NO: 146326 - protein, 423 aa, unidentified
MEVGRVEVAQDEQEIIARVAALDIGKAEVVCCVRVPGKGGSRLQEVRTFSTMTRSLLVLSDWLSGLGVTRVVMEATSDYWRPPFYLLENRFQTWLVNAKDVKHLPGRPKTDRLDAVWLCKVAERQMLRASFVPPAPFRELRDLTRYRVDLITARTAEKQRVEKLLEDAMIKVSVVVSDVFGVSGRDMMAALVAGERDPKVLAQLARGSMRGKTDRLEEAFTGRFTEHHAFLLQTMLARVDSINTDIDTVQARIDEQIAPFAKAVTRLDEIPGIGVTAAQTIIAEIGLDMSRFPTPAHLASWARFAPGVAESAGRRKGNSGTGHGNRYLARALGEAAVSVGRTNTFLGERYRRIARRRGKKRAIVAVGRSILMIVWHLLNDPEKRFVDLGPGYYESRINRNRSTRNHVRELQALGYNVILEPAA

SEQ ID NO: 146327 - protein, 411 aa, unidentified
MRLFVGDDWAEDHHDVELMDEAGRVLARKRLPEGVAGIARLHALIGQQLGDDADDAEVVTGTGTDRGPWVAALVAAGYTVYSVNPLQASRYRERHGVSGAKSDTGDAHMLTDMVRTDSHQLRAVAGDSPDAGAVKVVARTHKTLIWERTRQVQRLRHQLREYFPAALAAFEDLDAPDALELLGKAPDPARAARLTRAQVSAALKRARRRDIPGKAAAILAALRSEQLGQPPAVTAAYAVTARSLIAVITTLNEQVKVLEEQVRAHFGRHPDAEIYLSQPGIGPVLGARVLGEFGDDPGRYASGKARKNYAATSPITRASGKKKVVAARFIRNDRLTDALMAQALSAISASPGARALYDAERDRGAEHNPALRKLANRLVGILHGCLKTRTPYDEATAWPQRENLPQSDLAA

SEQ ID NO: 146328 - protein, 491 aa, unidentified
MARSDMANRKQSTFERLSSGHLNRQQRRELARKLTAEHPGLEIVNRNVGGIDVGNESHYVAIAPGCDQQPVREFGSWTADLERMAEWLKSCGIEMVVMQSTGVYWMAVYDILEARGFKVCLTNARHTKNLPGRKSDVQESQWLLKLHTYGLLRDSFHPPEEIRALRSLWRLRDRHVKEAGRAILHMQKTMTVMNVQLSNAISDISGATGQAIIRAILGGERDPWKLATLRDRRIKATEEEIARSLEGNWRADMLFELKQAVDAYDFIQNQIVECDQRLQTLLAELPQREVRKTEIQTDIPIRESVKRKQKRTKSRADGNAPRFDLQAELKRVCGVNLTSIDGIDVMTAQTIVAELGTDFSRWKNESHFTSWLGLTPSRDISGGKIVKQESRKIKSPVAMMLRMAASSLIRSESYLGARYRALRTRLGAGKAIKAMARYLACLVYRMFTHGQDWVDRGTRDFESKRSQRELSSLQRKAAALGYQIVAQPASA

SEQ ID NO: 146329 - protein, 318 aa, unidentified
MGNNDMPDLHFIGIDVSKDHLDVAVRPSGERMQFANQDDGIDQLIQRIRSFSSTLIVLEATGSYHRVLLSRLIAAALPAIAINPRQARDFARAIGRLAKTDAIDADVLAEFGEKIRPELRSVADEATQQLEAACTRRRQLVGMLAAEKNRLQSSPSSVRPQIKKHIQWLEKHIQQLEKDLDHQIRSTPAWREKDDLLRSCKGIGPTTSHTMLACLPELGRLTRHQIAALVGVAPFNQDSGRHRGRRHVQGGRTDVRSTLYMATLAAIRHNTVIRHFHQRLIAAGKLKKVAITACMRKLLTILNAMLRSHKPWNANFAS

SEQ ID NO: 146330 - protein, 434 aa, unidentified
MEEVTDEPLYRDRVCGIDIGKAGMVATIRVPSDKDPSRRARETRSFGTTKREVLALADWLRSWQVPAVVMEATSDWKGPFYRLEAEGFDCVLADAKQVKNLPGRPKRDPSDSRWLAACFERGAVTPCFVATPEFRIIRLHTRYRRELTEERTREKRRAEKLLESAAIKLSSVVSDLHGVTGRDIMDHLIAGQRDPKTLAQLARARARRKIAELEEALEGAEFFTAEHAALLKVMLERIDRVAEEIARLTSVIEQLLAPYEEQLEQAESMPGWGRRAAQDTVAETGVDMTRFRTGGHLSSWAGKTPLDNQSGNRTGRAKSKKGNRYLAAITGETAAAVSKTQTREGARYRRLARRRGKAKALVATGNTQLKVYQKLLSNPGMRYQDLGADYYERQRDIRRQISHHVGKLGALGFEVTLCRLPEPDPDETGTTQAA

SEQ ID NO: 146331 - protein, 350 aa, unidentified
MIIIGADYHPGFQQIAFVDTDTGELQERRLEHREEAETFYRGLAQPGRTVRVGMEASGHARWFERLLAELQFELWIGDAAEIRTKRVRKQKTDRQDAQLILQLLLEERFPRVWVPSGENRDLRQLLWHRHRMVQARTRIMNQLQAVALNEGLRCKKRLWRDSGREQLKSFLLAPWASRRRHDLLELLDRLSPTIAELTQAIEQEVEKCPEAQRLRTHPGVGALTALAFVLIIGRTDRFRCGKQIACYLGLVPVEESSGERRRLGHITKQGNSLLRFLLVEAAQVTVRSDQEWRSKFFHLALRRGRKIAKVAMARRLAVRLYWMWRKGWDYEQLKKFGSHAGQPGHRHGVH

SEQ ID NO: 146332 - protein, 407 aa, unidentified
MDLLKTVFGIDVSSRKSNVCIMVNGQKVNDYAISNDMVGFNQLLGDLKQVTKPQIIFEATGVYSRRLQAFLDMHELRYVMMNPLEAKRKTKDDLHQNKTDKLDALYLAKLQSEHPQRLAYVQNKEYQELMANNRIYEQASHDLITNKNRLHKAVQLTFPEIEHLMVNPRGKNYWSIVLRFPHPDILLETKEADIIDFLKGLSGIGKKRANDITQSLIRLAKVACPAVKKNSAHIRGLKMAINNILNAEEECQTALQEMAKLAPKRDLEILTSIPGIGENTALRIISELGDIRRFNNPSQLNAFVGVDPQVYESGNLTAHLSISKRGTAIGRKVLYLAINQIQSAKKAGNPCHIADYYEKRKRSSETASHKKAAIASIHKLLRTIFALIKNDQLYSYDVAKHNQRLLS

SEQ ID NO: 146333 - protein, 343 aa, unidentified
MEHYAGIDVSLESASVCVVDATGRIVREAKVASEPEVLTVWFRGLGISLSRIGLEAGPLSQWLYAGMQEAGLPVELLETRHVRDAFKAMPVKTDRKDARGIAQLIRLGWFRPVHCKSLPAQETRALLTARKLVQSKRHDLEMSVRGILRGFGLKVGATTPRTFEGRIRELVRGHPTLLTVMEALLTARAALGEQLQRLEKRVRSLARDDQRARLLMSAPGVGAIVALTYVAAIDDPGRFRSSKNVGAHFGLTPKKYQSGETDVTGRISKIGDAGVRTALYEAANVILTRPVRGSSLKSWAARLAVRAGMRRAKVALARKLAVVLHRMLADGTSFLATRAAAMA

SEQ ID NO: 146334 - protein, 336 aa, unidentified
MKHILGIDIASETFVGSIVTNESVPKNTSEATTFANTTTGFSTCVDWTHTLGLVPTETRIVVEATGVYWEALALFFHQHHFTVSVVNPAQVKYFAQSVLQRGKTDELDANLIARFGATMHPRTWEPPSALSEELQVLMRQRDAYLAMLTQERNRLHSYQRSGFPPQRAIVVSQKTIAFLEQQIKELETNFKNTINTDEHWKRMVELLQTIPSIGLVTAGILLTETQALVSFHSSKQLTAFAGIAPAPHTSGKSVHKRSRISKIGNPRIRKAFYMAAISAIRFNPAMKTFYDRLVARGKSKKLCIVAVARKLLIVCFAICKSQLPFDKHYSLHPVLA

SEQ ID NO: 146335 - protein, 412 aa, unidentified
MTETNQFAAHVGLDWADKKHDVCVQFKNGERTFHVIEHTPEALDVWLTELHQKVKGRIAIAVELKKGPVVYALQKYPFITVFPVHALSLARYRQAFSPSGAKDDPQDAELALELMLRYPQKIKAIEPDNADIRLLQQLVEQRRQLVEDKRRFVNRLINTLKQYYPQPLEWFSHRGSLLLCELIMRWPSLQQLKRARHDTIRNFLNAKGGRAMALTEQRVVSIDNAIPLTTDPSVIEANALMATALVTQIKVVSEIIKTYDERIETLFDTLPDSGLFKSLPGMGPCMGPRMLAALGDNRDRFNSAEEIQNYAGIAPVTERSGQKSWVHWRWQCAKFVRQTFVEWAAKTVNSSYWARLYYQGLREKGKSHQSAIRALAFKWIRIIYRCWKARTQYDEAKYLLALEARHSPLLKP

SEQ ID NO: 146336 - protein, 312 aa, unidentified
MIAHPVHLGADIAKLTIELGCPQLAVPASIPNTPAGFKALLKIVARSPSPVHVVCEATGYHHKAFADALHRARVPVSVVNPRLPRDFARSRGRLAKTDKIDALILADFGRTMQPSPTPKPDATMTLLDDLVTRRAQLVDDRAREKVRLEQTSCAEALNSLRLHVRHLDSQIEKLLARIAEVVEATPALRAKVARLVEVQGVGTLTASALLAALPELGTLSKNEVTALAGLAPFNRDSGAFRGTRSIRGGRLEVRHALYMAALSASRCNPILKAVYQRLRAAGKAHKVALTAVMRKLLVYLNSLLKSLPSSPA

SEQ ID NO: 146337 - protein, 407 aa, unidentified
MDPMHHAPAFAGIDWGGHEHQLCVVDSAGHKELELRVTHDVTGLGELVRQLAKHGDRVPVAVERAEGLLVEHLQAHDYPVFPVSPRIAARARERYRVAPVKDDRFDAFVLADTLRHEHGHWRPLAVPSPLLAELRALTRDRDRLLETQQATEAQLRAILEAYHPAPARLFSSLDRQIALAFIADYPTPAVASRVRTTRMAGFLRRNGYTGRVPAQTLAERMRANLLSGSSGTVAGRAHSAKTFAHLLGAMNEALAEFDDAIASVVAEHPDAAIFASFPGVGPILTAVLLAEIGEDRRRYPTAQALLAESGLAPVTRSSGRSRSVRFRYAANRRLREAAMWWAFNSLKTSPWAAAAFRQARDERGHRYHRALRGLAARWMRVAWRCWQNNATYDPALHTGAAIAERSA

SEQ ID NO: 146338 - protein, 430 aa, unidentified
MYRIAGIDVHKRKLAVVVADVEVHDEYQFERCWFAANPEQLRLLSQWLAERQVEEVVMESTALYWKPVWGALERHWQPICQKREGAGPTSGILHLAQAQSNRGPRGRKKDFRDAERLLKRLVADELRLSFVPDTEQRLWRTLTRRRYQLTRARVQLQNQLEALLEEAHLKLSSLVSDLLGVSAQRMLQAIANGETNPDALASLADRRLRATPAQLCDALGACTELHPVYRRLIKMMLEEFKVIEEHTAELNQELATLLRPHQDAVERLAEVPGLGVDSAQQILAEVGAKAATFASDKNLCSWVGICPGDEESAGESSSHRSPKGNRQMRRLLNQAANAAVKTKGSIFEIVYRRLVPRLGHNQTIGAIAHRLCRLIWLILHKGVRYEERGPTVSHRSRQNRTSKMIKELRKLGYRVELLKAVPSVPIAPIA

SEQ ID NO: 146339 - protein, 339 aa, unidentified
MKYTPVGVDIAKHLIQVHFIDEHTGEVIDKQLRRQDFLMFFCNRDPCLIGMEACRGSQHWGRELTKLGHKVRLLQAHFVKAFVMGNKNDVMDARAIWMAVQQPGKDIAVKTEEQQSVLVLHRSRRQLVKFRTMQINSLHGTLLEFGKTIHKGRAAMERELPEALERMKERLPPYLITVLENQYNRLNELDSLIEDIEKKLTSVARQNETCKRLLDIPGVGPLIATAAVATMREASAFKSGREFAAYVGLVPKQTGSGGKIRLLEISKRGNTYLRALFIHSARAAALLPKEPGPWITELKKRRPTSVAIVAMANKLARTVWAIAAHGSKYDKNHVSIRSY

SEQ ID NO: 146340 - protein, 375 aa, unidentified
MKEKVRFLGLDVHAETIAVAIAEPDGEVRSLGTIANRTESIRKLVKKLGPAESLRACYEAGPTGYVLYWQLAALGVACEVIAPTLAPMKAGDRVKTDRRDAERLARSFRSGDLTAVWVPDEGSESLRDLVRAREAAKQDQLRARHRLSKFLLRTSQRPALGVKAWTQSYLAWVKQIHFTQAARESTLLDYLHEVEHMAGRVIRLEQAITEAVKQASPQMQQVVRGLQAMRGIAQISAVTIVAELGELSRFESARQLMGYSGAVPSEESSGKRTRRGSITKTGNAHLRRIAVEAAWNYRLRPSVGPALRKRQEGVSEEIKEIAWKAQHRLHKRYMRLSAAGKDQRKIITAVGRELLGFIWAIGIKAEAASKLQMAA

SEQ ID NO: 146341 - protein, 339 aa, unidentified
MELYAGLDLHSRNTYIGIMDKAFNRVFKKRVSNHLEQILQTLDPFRDQIKGFVVESTYNWYWLVDGLMDAGYSSAHLANPSAIKQYEGLKHSDDQHDAFFLAQLLILGILPQGYIYPKKDRPVRDLARKRMFLVQHKTTHILSLQSLLQRCCAKKVRANDMRHLTVKELEAWLEEEYLVLSAQANLDSINFLKQKIQGIEKTIRKKVKLKKAFHNLKTVPGIGDILALTIMLEVGDINRFSKVGNFTSYCRCVPSRRLSDGKTKGYGNRKNGNRYLSWGFTEAAQLGRRHNERFRRYYNRKVAQANTSLATKALGNKLARICYYIMRDQIPFQEDLFCQ

SEQ ID NO: 146342 - protein, 343 aa, unidentified
MQSISTIGLDIAKSVFQVHGVDAASQVVVRRQLRRRHVLAFFQKLRPCLVGIEACASSHHWSRELQALGHTVRLMPPAYVKPYVKRQKNDSTDAEAICEAVTRPNMRFVPTKTVEQQSCLMLHRARHLFIRQQTAVINSIRAYLAEFGIVAPVGRRGVEQLLEVVADKADCRLPEVARACLAALGSQLRTLKAQILEFDRRILAWHRSSAMSKRLDAIPGVGPALATALVASIADPKAFRSGRDFSAWVGLVPKQNSSGGKDKLGSISKQGDRYLRSLFTAGALAVIRYAKIHGTDHRPWLTRLLARHPTKVAAIALANKLARMAWAMMARNERYNEPAALAA

SEQ ID NO: 146343 - protein, 358 aa, unidentified
MKKIVIGIDISKEKIDATAIDVRDSQLGVVKLDYQVYENRPMGYRRMLVWARHLIKGIGLEDVLFCCETTGGYDRCLCDYVYAKGLDIWREGALQIKRSMGVRKGKDDKADSLMIAEYAMRHIDKAVIYETPDENVRELKALFLYRHKLVQERTEKKVRAAELKATAAKSDAMRFIMRDAMKSIRAIDKSIRDCEKQILAIIDGDKDLKRNYGHIDSIPGVSIVNATAFIAYSNNFRSITTANKIASYWGCASFRERSGTSVDKKAYVKCYSSSLLKATLTQAAECTIKDHGIYRDYYLRLKAEGKPYGVIVNNVRNKLIHLVFSLVTNDTDYEKNHEFLRKKRKSEQGMSAQLEIIN

SEQ ID NO: 146344 - protein, 341 aa, unidentified
MQITTIGLDLAKNVFQVHGIDAAEKVVVRKQLRRAQVMKFFAALPPCLVGMEACATAHYWARELTRLGHQVRLMPAKDVKAYVKRNKNDAADAEAICEAVRRPTIRFVGAKSAEQQGRLMQHRTRDLLIRQRTQTINALRAHMAELGIVAAQGREGLKQLLAIIADEKDARLPIDARASLIVLAAQLQALQTMIGSIERRLLVQHRANEASKRLESIPGIGTIGASAIAATVTDPNAFRSGRDFAAWIGLVPRQDSTGGKQKLGPISKQGDRYLRRILVVGAHSVLWLAKKNPEKYPWLTQLLARRPFKVVAIALANKMARVAWALLARGGTYRVPTLAAA

SEQ ID NO: 146345 - protein, 348 aa, unidentified
MKNKSFVGIDISKNVIDVSIFREDTNIKMFPHEVFNNTRKGFGDMCSWLKKSRVVLSQALFGMEFTGCYSLDLEKFLTSKNYSFCMLSTRIVKHHPMGTIDKRDKNDSAKIADFLYRYDGTECAKPYKLPSKAMQQLKQLVNERKFLVEQRTNFMNRMQMFETKENSAMYESYIKKLNHDIEKIDQEECELMSKEEDVFDTFQNLLTIPGIGFVNATNIIAITRNFTAFDTARQYARYVGVAPCSHTSGTSVKWRARPSAHCNGQVKADLSMAALRAVEYDVEMQMFYNRKLGGRKDSDTKRKALNAVKFKLIRRMFAIGKQKRKWEVLNTSDDRKNLHIEKSKASEL

SEQ ID NO: 146346 - protein, 412 aa, unidentified
MDVLVERCAGLDVHKDTVMACVRFPGPDGRRAQEIHELATTTAKLLALRDWLSAYGVTVVGMESTGVYWKPPFYVLEDAFRCHHLTARHLKNFPGRKTDVKDAEWIAQLVEHGLVRPSFVPPKPIRELRNLTRYRKAQIQERTREAQRLDKILQDAGVKLSSVATNILGVSAKAMLKAMVEGTTDPEVLAELPRGRLRVKIPALKEALVGRFGPHHALIVGTILSKLEFLLVVISHLSDEIEEAIAPFGHQVELLETIPGVDRRSAESIIAEIGVDMARFGSSARLASWAGMCPGNNESAGKHRSGKTRKGSKWLRVTLTESAKAAARSKGTYLSAQHARLRGRRGPGRATIAVGHSILVTIYHLLDRDEPFHDLGADFFVGRHDPQLHANKLVRQLKALGFEVNLHPVEAA

SEQ ID NO: 146347 - protein, 343 aa, unidentified
MQTVTTIGLDIAKSVFQVHGVDAAGQVVIRRQLKRRQVLAFFQRLPACLVGIEACASSHHWARELQLVGHTVRLMPPAYVKPYVKRHKNDATDAEAICEAVARANMRFVTIKTPEQQGCLILHRTRHLLIRQQTSVINAIRAHLAEFGIVAAVGRNGVEQLLGVVADANDKRLPEVARACLATLGVQLRVLKAQILEFDRMINAWHRSNETSRRLDKAPGIGPVLATALVATVADPKTFRSGRNFSAWIGLVPQQHSSGGKDRLGHISKQGDRYLRNLFVAGALAVIRYAKIHGTQHRPWLAALLARRPTKVAAIALANKIARMAWAMMVKGEHYKEPVALAR

SEQ ID NO: 146348 - protein, 480 aa, unidentified
MNIKAKKAKVQALSKKSVINVLSQDEIKKKVQVIEQELKASTWRELETKGKFEKNDKLSFISEEMLIVGCDIGSETHYIRAIDTRGRELSKGAFEFSNSSEGFASAKAWVLKLAAKNDKKQIVLGLEPTGHYWFAIAACMVSNGISVVQVNPYAVKQSKEIEDNSQLKDDRKDPKIIANFVKDGNYGMPYLPEDIYADMRRLSMFRDQLTEDRIRNINRLHREMKIYFPEYMDAFGKIDGAFTLEILKVAPIPSDIVELDEEGLKSLWHEAKLRGRGYSRARVIVDYAKKSVGLTGGTDAGRESIKWFVEQIIQLDEQLAEIENVLHQKCMEIPHAENILEINGVGENILAGILAEMGDISRFDDVKEIQKLSGMGLVACSSGKHKGQTKISHRGRKRLRYWLFQAAKSAVAHAVEFKQLHAYYTTRSMNPLKKMQSLVVIACKILRVIYTILNTGMKYDPERMLRDIRYPQGNTVQAAA

SEQ ID NO: 146349 - protein, 403 aa, unidentified
MTMRRRAWVGIDVGKTSHHACAIDETGKVVWNQKLSNEQRAIEQLVTRACKGAEQVQWAIDLTSPMALMLITVLLCAEQSVVYVPGRTVNTMTHAFRGEGKTDAKDARVIAETARLRNDLSNVVLPDELVVELTQLTGYRADLMADWVRGINRLRALLGSIFPGLEAAFDYSTRTPLILVSGLCTPAEIRAAGIDGMTAFLVDNHAWPTGIVKSAATAAALANEQPLALPGEAGTAALVKRLACRLLELDREIKDIDKTITARFRDHPYARIIESLPGFGPGLGAEFLVVTRGDLASFATAGRLASYAGLVPVPKDSGRITGNLRRPKRYNRRLRRVFYLAALSSLRADGPSRRFYDRKRAERLIHTQALLALARRLIDVLWALLRDDREFTPEKPITATAAA

SEQ ID NO: 146350 - protein, 325 aa, unidentified
MNKFKHYYGIDISKDVFDVIDDQGTYHQYENTLKGFGSFKKVLLKDACCVMEATGVYHVQLADYLYEQGIFVSVVNPLVIKRFIQMNLRRIKTDKADAEMICRYAKMNDQQAYRPPHIYIRECRILKENIDLLLKNRTMLKNRLHALSYKQYKHRLIIINPLKKAIKELSVQIQKLEDEMRQLIMTHEQELFSRLLSIPGIGKSTAMFMIILSEGFTKFESAKQFTCFIGLSPVEKSSGSSIRGRGGISKQGNGKLRNLLFLCSFNACKSNKACKDQFERIIAKGKSKKLALVAVSNKLLKQSFAIAKSGLVYDEGFKSRKPVIQ

SEQ ID NO: 146351 - protein, 413 aa, unidentified
MVLGINVGSETHYARAFDYRGIEYSKKPFKFSNTEAGFVTLKEWILDLKERHEKDKVVPGMEPTGHYWFNLGKFLQDNEMKPVLVNPHHVKKSKELDDNNPTKNDRKDPKVIAGLVREGRYMIPYLPDGVYADLRTASNIRFQLQAELTRIQNRISRWFNIYFPEYKTVYGKPDAKSGMLILKAAPLPEDILTLGIDGVNQIWRDAKLRAVGKARAKILIEAAEHSVGSKEGAVSARMEIRMLLEDYESRNIRLQEVMTLIEGLVKQIPMAEKLLEIKGVGIRTVSGFLAEVGDISRFNNPKELQKLAGLALVENSSGKHKGETTISRRGRKRLRYLLFEAAMSLVAKNPEFRELHNYYTTRRRNPLKKMQSLMAVATKLIRVFYAMLTKGVDYDPKKMVSDIKRPAVYLQAA

SEQ ID NO: 146352 - protein, 392 aa, unidentified
MLFVGIDVAKSKHDCCIIDSDGVIYTDSLRIPNSKDGFDILHSTIVSALSGADFSNVKIGLESTGHYSTNITNFLCSKGFNIIVFNPLVTNAFRKAGTLRKTKTDKCDAKVIATMLFSDESKSYSPSSYQIQELKSLTRHRYRMIGYRSKLRLSVTRLIDIIFPELLDFIWSIHQISSYKLLLELPSPNAIKECHLTHLTSLISKSSRGKYGREKAIQLRELASNSIGSSNRSLTFELQQTIRLIQSVQDEINELDSQIKMVVDELDTPLMTVPGIGYTIAAIIYAEIGDINNFSSPSKLLAFAGMEPSTYQSGKYNASNTPMVKRGSSYLRWAIMQAARLVPMRDLTFAAYMNKKRSEGKHYNVARSHVGKKLIRVIYYLLKHNTAFESQM

SEQ ID NO: 146353 - protein, 351 aa, unidentified
MRYYGCDAHKRYCVFSYMDKDGDHGPSLRVSNEREHFINFLETLPPGSCIAIETVGNYYWMVDEMEKAGHDPKLTNAGKAKLMMGQLNKTDKLDAEGLALLLRNGTLPEVWIPPGELRDQRELPRMRMTFVGVRTKLKNRIHSYLSKYAIEIKEVRDIFGSKGRKILGKRIEELPQQTKRSVQAHLELLDQVGAQIKSCEEQIKAVVKETAEINLLKTIPGVGDVLAIVIAMEVGDVSRFPRAQNLASYAGTVPRVKDSGGRRYYGRVRPDVNRYLKWAFIEAANVVVLNQKRWSHQHVTRLYMRIKQRRGHGKAVVAVARHMAEATYWMLKKNEPYKDPQKKEPVSSTRK

SEQ ID NO: 146354 - protein, 368 aa, unidentified
MEHTRFVGLDIHKERISVAVAESGRSGAVEYHGEIANDPGAISKLCDRLRRSGKPLAFCYEAGPCGYGVHRQLTSLGHRCDVVAPSLIPMKSGDRVKTDRRDATMLARLHRAGELTPVWVPDADHEAMRDLIRLRGVVRQIVTRARQHLQGFLLRHGRKHGGGTAWRMAYRRWLSTLAFEHPAQQIAFQDYVDAVTDAERRLKRVEEQIAGLLPEWNLRPVVDALQAMRGIALINAVVLVTEVGDFTRFSNPRQLMAYFGLVPGERSSGETVRRGGITKTGNTHARRALVEGAWAYRMKARIGRHKVDRIEALPKVVRDIGWKAQVRLCARYRRLSARGKTANVVNVAIAREMVGFIWSIACATQSTP

SEQ ID NO: 146355 - protein, 397 aa, unidentified
MLYAGIDIAKRRHMACITDALGNKIAGPFAFDNTRQGFALFTKRMEEACGEEEVVVGMEATGHYWMALFSHLQQAGICACLINPVKTDAWRRFLGSSKVKTDAIDCAIIADAMRIGAFDPSMLACEEIGELKALTRMRQDLSESTSALKCRIIAALDRVFPEYAKLFSDAFSASSKAILKRCPTPKECSKMKASSLERILAKASRGKCGYEKAQKIKAAARESCGAAFADRAISFEIKSLVAQLEFIERQIDEADLMIRELLDGIEPLVLTIPGISYAIGAQIVAEIGDINRFDNSDALVSFAGLNPSKNESGEFSSTENRITKQGSPYLRRALYLAAQAQLVQGNAFRAFYDRLRGRGKRHRVALVAVAAKIARVVFAVLSKQEPYREEAVGVATS

SEQ ID NO: 146356 - protein, 339 aa, unidentified
MSKPIEPIQAMVFCGVDVSATTLSVAVRQEDQRFEERVFDNTANGHKALIAWLRKRKARARVSLEATGIYSLDLALALDRAKGIEVAVLNPKLVHRFAQTLRRSKTDSADAQALAEYSRRMPFAPWCPPGLSGLQLRTISRHIQGLVVEHTRQNNRLHAANKSTSTPRCVVNDLKRSIASLKQRILHLRSEAQALVRSDEAMQKRFELLIRIPGIAAISALQLLGELAPLSPEMSVRQWVAHSGLDPAHQISGTSVHKPSRISRAGNRHLRHALYMPALVAVRRDPHLKAFYETLLSRHKAKLQALIAVARKLLHAIYGILRTQTPYDGSKLFPQLGIV

SEQ ID NO: 146357 - protein, 380 aa, unidentified
MDVHSTNYTLCAMEPTIGAEDRVYGEVQVAPDYKEVICFIESLKMKLSLDNEYSIECGYEAGCLGYTLYHQLVNAGIKCVILAPTTMLSPQGQRIKTDKRDAYLIAQCLCYGGYHPVYIPTGEDDAVKEYLRMRDDHKLAQKKLKQQINAFILRHGYQYVGTKWTNRHVIWLKNLQLEPMYRETLDEYMASYYEQTAKIERMDKRIEEIAAEARYQENAKKLGCLLGIRTHTALSLLVETGDFKRFAKGNIYAAFLGLAPGEHYSSTSVNRLGLSKAGNTHLRCLLVEAARSICKGAVGHKSKRLRARQIGQSAEVIAYADKANTRLRSKYYRMIRHGKAKNVAVAAVARELACFIWGMMSGNISTVSGADTSVPAVSQG

SEQ ID NO: 146358 - protein, 377 aa, unidentified
MPKVRYLGLDVHAEAITVAVAEPSGEVRWLGEIPNRLESVRRLVKRLGPSEQLRACYEAGPTGYVLYWQLTHLGVQCDVVAPTLVPVKPGDRVKTNRRDAEKLARSYRAGDLTPVWVPDGAHEALRDLVRAREAAKQDQLRARHRLAKFLLRQGRRPPPGVKAWTGKYLTWVQREVRFEQVAQEAVLLDYLHEVEHAAGRLERLERAIEQAVEAAPTAMGAVIEALQALRGIAQLSAVTIVAEVGELSRFATPRQLMGYSGAVASEHSTGGRVRQGGITKTGNAHLRRIVVEAAWAYRHRPALGYSLKQRQQRVSPAVREIAWKAQHRLHQRYRRLLGRGKLKQQVVTAVARELLGFVWAIGIQVESERRAAGQRAA

SEQ ID NO: 146359 - protein, 383 aa, unidentified
MSALPQKSDITDFMMGWTPRRRHRCAKVEVLSTTLREASVSEVSIIGLDIAKHVFHAHGADERGRVIFSKRIGRGKLLDFFAAQPSCTVALEACGGAHHWARQLTQLGHDVRLIPPAYVKAFVKRQKNDAIDAEAICEAAQRPSMRFVAVKSEEQQAAGLVFRTRDLLVRQRTQLINAIRGHLTEYGWIAPKGPSHVAMLADLIEEDEMANALPEAAHAMFRLMLDLLAGLNGKIADLDKEIARRAREDEVSRRLMTVPGIGPISATAIAALAPPVETFAKGRDFAAWLGLTPLQRSTGGKQKLGATSKMGERTLRRLLIIGSSAVVQQASKRGAPKGSWLEQMLARKPRMLVTVALANKMARIVWALLVKQENYRAPVAAKT

SEQ ID NO: 146360 - protein, 368 aa, unidentified
MNTVKFIGMDVHKKTITVAIIDEGRQKQPRIYGTIVNQREALDKFCRKMVSTAARLHFVYEAGPCGYGIYRHLTEKGFDCMVAAPSMIPKKSGDRIKNDRRDATMLARLHRAGELTAVCVPDAQDEAMRDLTRAREDAVMATRKSKQRLNAFLLRNGLTFAGRTKWSKAFFNWLCDIAMPYAAQQVALQEYIDTVHENLNRVNRLTDQIRQLVAGWRLAPMVSALQAARGVSLIVAVTVLAELGDLSRFDKPSQLMAHLGLVPSEHSSGESIKRGAITKTGNGHVRKVLVEAAWAYRMQARVSRLLLKRQQGVPERVCQIACKAQLRLCARFRRLTARGKTKQKVVTAIARELSAFLWAMAKQLQPVV

SEQ ID NO: 146361 - protein, 347 aa, unidentified
MLHAGLDLSRRKVDVCLLNDRGEQLDQLAVAPDLDSLRTLARRVDDVHAQPVCAVVESMTGARLVHDTLEQEGWDVEIADAQKVKGLAPLACKTDKIDSMVLAVLSHRDLVPAIWLPDPRVREERELARFRMHLVKHKSALKNRVHSTMINFGRPCPVTDLFGAEGRRLLARLDVPEPWRGNVTASVELIDDLERQIAEINRRLREGHADHPYVPLLLSVPGVGRVLAFTIAAEIGEIERFSSPEKLTGYTGLCPRVNQSGDKDRRGPLTKHGPTYLRWALLEATMHALRHPAYAERYERTKKRLGKQRGAKVAQVDIARRLAHAIWHMLTRNQEFAPRGAAFRLAA

SEQ ID NO: 146362 - protein, 357 aa, unidentified
MNKSKQLDFKGQDIFIGLDTHLKNWMVSIMVNESPFKTFSQDPRPGTLRNYLAKNFPNANYHSAYEASFCGFKIHRDLLDLGIKNIVVNPADIPTTDKERKQKEDSRDSRKIAKQLSQKDLTAIYVPEIEIEGDRSLVRYRKTLTKEIARTKHRIKSQLHYFGIEIPTKFSEKSYWSKNFTSWLQEIDLPTESARMTLNGHLEMAEMLRKKQLSTNKEIKKLSEKKIYKENYNLLISVPGIGGLTAMIILTEIGDITRFKNLDKLCSFIGLVPMTKSTGDNEKTGDITVRKNKILRKALVESSWIAIRNDPALILAYQKLIKRMEPQKAIIRIAKKLVNRILYVLKNKKAYVQAIVK

SEQ ID NO: 146363 - protein, 500 aa, unidentified
MVRHCPPVSVVPGHVGDSGESERSDIPFERVSEDDVPAPARHSLFIMEATMTKRKSGLELAFPNAAGIDIGSASHFVAVPPDRDEEPVREFRSFTENLRELADWLSACGVDTVAMESTGVYWIPLYELLDAQGFTVHLVNARHVKNVAGRKSDVLDCQWLQQLMSYGLLAGAYRPTDDVCALRAISRQREMLISYQGRHVQHMQKALVQMNIQLGNVITDVVGETGQKILRAILAGERDGNVLARFRNNHIRASEDEIAKSLVGNWREEHLFTLKQAMDLYDAYGERLRECDARLETMLKRLGGHDGEPDKPRRRSHGKNAPRFDVRTDLFKMCGVDLTRIDSIDATTALKVIAEVGTDLSRFPTAKHFTSWLGLCPGTKISGGKRLSGKSKRTANRATQALKAATANLRTNQSSLGAYYRRMCARLDKSKAITAAAHKLARLIYAMLTKGAEYVDRGQAYFEERYRERVLHHLKRRAADLGFSLHPITDHENKPVQSAT

SEQ ID NO: 146364 - protein, 366 aa, unidentified
MLYSGVDLHRRLIVICTVDESGTVLGRKSMKTLPELITNYFRQWPDDHRAVVECTTGWYWFCDLLHSIGVSVVLAHAKYLKAISYAKVKTDAVDALTLAQLLRMGYVPEAHQLPPEYRAMRDLLRQRMVMEHKRTNIIQRIHSILAQFNITSFPVAPYQSGFADFLKDCAIPEEYRMTLLMYHLQCVQATEHRKQLEKYFTARLRPTPAVQLLMSLPGIGDITGSIIAMETGDIHRFADAKHYCSYCRLVPGAKDSGGKRSHRSGSKDGNHYLKYAFTEAAIKAMMFYPEIKHFAARLERRATKAIARTVVAKELAKITYYVLSRQQEFTTFKGIKIDKLRDWPRARPAVRDAVQRHKPVRLTGGA

SEQ ID NO: 146365 - protein, 394 aa, unidentified
MIYVGIDVAKDKHDCIILNSDGKVVFDVFTIQNNIDGFEDLLFKIKTTEKCPDKVKVGLEATGHYSCNILGFLKNKGLSTIVINPLYTSLSRKSISLRKTKTDKVDARTIACMIMSDVNLKPYSDTLYLNEDLKSLTRYRFNKVAQRAKLKQSVSRLVNILFPELEKLVSTLHGKAVYELLSEFPSAQHIASANLKHLTNLLHTASKGRFQRASADEIRQAARKSIGSYLPAKSLELKHTIKLIRELNSEITEIEAEIKKIMDVIDSPIISIPGIGQNLGAVILAEIGDFSRFESPDKILAFAGCSPSTYQSGQLYSSHAKMEKRGSRYLRWALLNAAAYVCKWEPTFATYLAKKLAEGKHYYVALSHAAKKLVRVLYHLETTGKTYQPTSILS

SEQ ID NO: 146366 - protein, 348 aa, unidentified
MRFYTKQHQYYCGIDLHARSMYLCILNQQGEILLHKNMDASPEAFLRAIAPYRQDVVVAIECIFTWYWLADLCAREQIAFVLGHALYMKAIHGGKAKNDKIDAHKIAVLLRCGMIPMAYVYPPELRATRDLLRRRMHLVRKRAELIAHIQNTNSQYNLPAFGKKIAYKANRQGLAECFVEPSVQKSIEVDLLLIDHYDRLVRDLELHIVRHAKQHDVQTYYRLRSVPGIGEILALVILYEVHDIGRFEQVGDFVSYCRLVKCAKESAGKHYGFSGKKIGNAHLKWAFSEAAVLFLRKNPEGQKSFSRLERKHGKGKALTVLAHKIARAVYYMLKRHTAFEMKRFLSAA

SEQ ID NO: 146367 - protein, 343 aa, unidentified
MDVDILGIDLGKNSCSVVGLDSTGRVVLRRRMRRESIVPLAAKLSGCVVAMEACCGAHHIGRLLAAQGHEVRLMSPEYVRPYVKAQKNDERDAEAIAEAATRPTMRFVALKTEAQLDVQVLHRVRDRLVGQRTALTNQVRSILLERGIVVPQGRRRLLDALQALSDQPDGSGVGPRVRLLLDDMLDQWRGLDRRIAALDDEFAAMARNDPAARRLATIPGVGVLNATALVAAIGDGRTFSRARDLSAWLGLVPRQASTGGKAKLLGITKRGSKYLRKLIIQGARAALPSLSRTATPLGSWLRGLLSRAHGNTVVVALASKLVRIAWALLRKETAFAAGGLAAA

SEQ ID NO: 146368 - protein, 364 aa, unidentified
MQTLVERGCGLDVHQATVVACLLMVRRDGKVQKQMRTFGTTTRELVSLREWLLSEGCTHVALESTGVYWKPIYAILEGALEIVVANAQHIKKVPGRKTDVKDAEWIADLLCHGLLRSSFVPPKPIRELRDLMRYRRKLVESQAAERNRLLKVLETANIKLANVATDVFGMSGRLMLRALITGKATPQEMADLAKRQKLEPYAAQLALLDEIPGVDWTLAAVIIAELGVDMSVFGSVSQLASWAGVCPGNNESAGKRKSSRIPSGNVYLKSGLVEAANAAARAKGTYLRDKFFRLKARRGYKRAVVAIAHKILVAIYHMLSQKVSYNDLGDLYLDKLNKNHLTRNLVHRLERLGYQVTLTQQKAA

SEQ ID NO: 146369 - protein, 441 aa, unidentified
MKNEPTQNNNSIPAADPIAAWVGLDWADKKHSLFVRPTDGAATTACELEHKPQALDQFFLQLHQKHPQGRIAVCLEQSRGPVLYALMKYDFVVIYPVNPRCLADFRRAFKVSGAKADPTDADLLSELGCKHHQRLRALVPEDLATRQLRFLVEARRDFVNKRTALANELTATLKSYYPLALEVVGENLEGPMGLEFLRRWPNLAKLQGAKPSVVRAFFYAHNSRSEEKIAARLEAINTAVPLTEDPAIVGSLQLQAAGLARQLAAVQKTVAEYDQQIRVVFEGHSEKWLFEKLPGAGPVLAPRVAAAFGTIQTNLGAALDLLCLSGVAPVKRQSGQQETVHFRFARPKFLHQSLVEFAKCSIGQCDWARLLYEKQIKQGKSAYAAIRVVAFKWVRILWRCWKDGRAYDEVKYLHSLKKRGIKLYESLYNALPAETGPVNNS

SEQ ID NO: 146370 - protein, 339 aa, unidentified
MQVYAGFDLHANNNYLGVVDEQGKKILKKKLPNEPGTILNALDPLRQELVGIVVESTFNWYWLVDLLMDEGYEVHLANPTAMQKYRGLKYSDDIHDAFWLAEMLRLGILPTGYIYPKDERPVRDLLRKRGHFVQIRTSLILSLQNIIARNCGKQMKSNDIKRLREDMIAPVLEYNEDLAMAGDASKEMIDHLSRKIREIELFIEKKVKKKETYRYLRTLPGAGIVLGLTISLETGDIGRFPKVGDYSSYCRKVPSEWLSNGKKKGKGNKKNGNKYLSWAFSEVSECARRDNDRAQSYYNRKLNSTNRMVAHTALAHKLARASYYIMRDQVPFDPEKLFA

SEQ ID NO: 146371 - protein, 326 aa, unidentified
MMILGIDMAQEKFDLALYQGKELVASGQFANNAAGFKKLSQWLNHKAAGQVKACLEATGRYGDALALYLYQAGHQVSLVNPARIKKYGESQLQRNKTDKLDARVMADFCRTQEPGLWRPPAPEKRELQERVRRLSALIKEQTREQNRLTAGLQSQVVKESITANLEFLEAHIAKLEQQIQQHIEHHPGLKRDKELLTSIKGIGAKTAAIILGELPEVDNFDHVGQAVAYGGLNPEQHDSGSSVHKRSKLTQTGNQNLKTALYFPALSAIRHNPIVKALARRLEEKGKEKMVIIGAAMPKLLQLAYGVLKSGQPFDPDYATKIQAAI

SEQ ID NO: 146372 - protein, 308 aa, unidentified
MTYVGIDVSKDRLDVHVSPAGEAWTVGRDAEGLEALVARLGVSAPLCIGLEATGGYETVVAAALGAAGLPVAVINPAQIRHFARALGKRAKTDPIDAAVIARFVEATRPPPRALADTETRALADLVARRRQIIAMMVSERQRLRRATLLPLRKSIERLLAALQKELSDLERTIDEAVRGSPLWRDQEALLTSIPGVGPTTARTLLAELPELGQLGRRQISALAGVAPWTRQSGQWRGKAMIGGGRPTVRSALFMAALVASRYNPVLQALYQRLVASGKPKKVALIALARRLLTFANAILRSKSPWLAA

SEQ ID NO: 146373 - protein, 344 aa, unidentified
MSNLDTCGIEVSAKELVVRLRRGEDLEPLRNFTNTPEGHLIILGYLRRAGRVVRVCMESTGLYGLDLALALSGQEGIEVMVANPRAVRHFAHALMKRSKNDQIDAGVLEQFAVPMPFKPWPRPSVARLALHALARRLRELVEMQTAEKNRQHAAGLSQATPAVVRRDLARSLGAQERAIERLTRQARQLIAQDPQRTERFELLDSVPGIGETSAVQLLGELGVLAPDLEARQWVAYAGLDPRPYTSGTSLHKKPRIRKAGKKHLRHALFMPALVAVQHDPHLRAFYQHLLAKGKCKMQALVAVMRKLLHPLHAMFKTQQPYDGSKLFRLKSTPAQEVTHALVAS

SEQ ID NO: 146374 - protein, 420 aa, unidentified
MSFKIFKFNCCGLDVHKTWIYACIGITDSNNRTEYKQARFSSFTKGLNELCDWLAKYNCKDVCMESTGKYWIPVFNILEQHSFWVTLSHPKYTKPMKGNKTDRKDAKWICDLYMCGMVKPSFIPPADIRELRDLVRYRFKLTCMITGEKNRAQNCLTVSNLKLDDEFSDVFGKSSRSITEHILQHPGEKFDIAPFVDSRCKTPITEIQAAVDGAISKEQVVKLRQCLDHIDELNKHISEVEQEILRLSDKYEAALNLIRTVPGFNKNPLTAIQVLSEIGGDMSVFPTAKHLVSWAGCCPRNDQSNQKIKSTRISRAGSYFKPVLVQVANALIKSKKHSEFTSRYKRIKARRGHKKAIIAICRMILTAIWHILSDLKPYTAEGFRESRPVNESKVLTTSQALNLLKQRGYIIKDDLTPAMN

SEQ ID NO: 146375 - protein, 344 aa, unidentified
MLFVGIDIAKRNHEASVIAQDGHVVRKAMRFANSQAGYNKFMDMVRSLSEPVVFGMEATGHYWLTLYTHLRNDGFTVHVINPTQSDALRGMYIRKTKTDSVDSVIIADVIRFGRYCETSVDPGDLQAMRELCRQRFYIIDMASDLKRKVIALLDQVFPEYEKLFSDSFGLSSMELLSQYTTPEEMLSVSSQQLAEVLKKASRGRLGAEKAVEIQDAAKNCFGIVMASSSFSLIIRQYIEQIRSLESSVDIFDTEIARLLSGFDTQLTTITGIGSTLAAVILSEIGGDIRRFSSPAKLAAYAGVDPTVKQSGDFSGTRIKMSKRGSPYLRRQSGLLLQLLPSKTR

SEQ ID NO: 146376 - protein, 352 aa, unidentified
MNVTSLGEGQVAGGVDTHQDLHVAAVVDHTGKVLGTKSFPTTRHGYLSLITWMRSLGDVARVGVECTGSYGAGLTRYLGAANIPTLEVTRPDKSLRRAQGKSDDYDAIAAALAALYGQRVQVAKDRSGQVEALRVLRTTRKTAIKCRRATLQELHNTIVAASDKIREQYRGETRMHLLRKLATSRPTRESFRDPDIATQIALKSLAKRVLELNDEIADLDELIEKLVKELAGPLLELPGMGVDSAGEFLVAAGDNPERLGSEASFAMMCGACPIPASSGKTNRHRLNRGGNRQANSALHIVVLSRIRMDERTQAYVTRRLAEGLSKREVMRCLKRYVAREVYHVLVNHKVAA

SEQ ID NO: 146377 - protein, 416 aa, unidentified
MSHHVSWFAGIDLGDHKHHVHLTDAAGAVLGRTSFSHGGRGIAQLLSWLVDKTGADPGSIGVALEVPHGAVVDGLLEQGFATFAINPKQADRGRELLVLSGAKDDPRDAEGLSLLLRVVPQVFRHLQPKHPVLVLLRDRSRLRADLVKRRTQLSQKIRAQLLRYFPAMWQLAGSLSGLWGALFLTLWERAPTPERARRLHRGTVAKVLARCKIRKRTAEEVVGVLRQSSLKVAPGVTNGAVETIQMLVDQLRLVNEQVKTMDRGIAELLEELPAALGEADDDADSLTLLLSIKGAGPVVAAGLFGEAGDLLVGGTFQQTRAYLGAAPVTKKSGGTERRYKRRAVNRHGQNALYHLAMAAIAADPGFQRQKDVLKARGLNHARILRTLGDRILRIFFAMQRDRTLYDPERTLSKTAA

SEQ ID NO: 146378 - protein, 313 aa, unidentified
MSKVLFVGLDVHAETIAVAVAEQGGEVRSLGSIPNRLESIRKMVHKLGAVQHLRVCYEAGPTGYVLYWQLTQLGVACEVIAPSLVPTKAGDRVKTDRRDAEKLARCHRAGELTAVGVPSAEQEALRDLVRAREAAKRDQLKARHRLGKFLLRHGRQRPDGVKAWTKKHREWIKSHVRFEEAALEATLADYVEEVDHVGGRIVKLEKAIDEAIQQAPPQIRAVIEALQALRGVAQTTAASIVSEVGSLSRFPTAPQLMGYSGLVASEHTTGNRVQRGSITKTGNGHLRRVLVEAAWAYQHRPNVIGHLLRRQRA

SEQ ID NO: 146379 - protein, 454 aa, unidentified
MAQRKKRRKKFQVTDLPPHLQHVNLNAAGIDIGSDQHWVAVPEGRDKVSVRKFAAFTTDLLALVDWLAQCGITTVAMEATGVYWIPLFELLESRGFEVKLVDARRVKNVPGRKSDVLDCQWLQQLHTYGLLAGAFRPTDQLCILRGYMRQREMLVQASSMHIQHMQKALQQMNLLLHNVVSDITGVTGMKILKAIIAGERDPKALAKHRDAHCRHSAATIAKSLVGNYREEHLFALTQAVSLYETYQAKIADCEAAVARHLSSQPQHTDDEPPASQKRSQAKDFMRAEVDMRAQLFKLTGVDLFSIAGLGADTLLTLAGEVGFDMTPWKSEKHFTSWLAVCPGTKKSGGKILTSKTRRSSNRAAAAFRIAASTLLRSKTALGAFYRRLRARIGAPAAITATARKIAVLYYSLLKNGTAYVETGQAAYEHKYQQRRFKGMQKQALAMGYQLVPIN

SEQ ID NO: 146380 - protein, 356 aa, unidentified
MAIAIGIDVHKKTSTFFAYGEDGEPLEEFNKRFKRVASNRDGYTEVLVWLGNTDCDFLMENSTKTHDVYWILQGLGYKNLYVAHSVDLKRITKSSKKTDQFDAEKLATYMRVKQQNIDQFRTCYICTPEDMRIRRLCRIAKQELFDMGRIRRRIRSHLLLTGREWMGGLNTKWECEALMNEDDPGLRHLGRQLNECRLRRDAAEEAVVEAIKGNEKMFPIYEKLKEIPNFGDITAAYLAAVIVDIDRFENPKKLAAYLGIVPRMRDSGETENHCGLTRSGDPAARWLLIQATFRLVNSSAPDSQLKAFFAEKNGGSIEERKEADTSGLLKRPALVATANKLIHIMFALLTHPDRHW

SEQ ID NO: 146381 - protein, 449 aa, unidentified
MEPQEIEDEEHEQILERVAAVDVAKASGMVCTRVPDPARPGRRRTRVWQVDATTNAVLELADHLVAERIEKITLESTSDYWRIWFYLFEAAGLDVQLVRASDLRAAPGRPKTDKLDCVWQAKCTERGLLRPSFVPPAEIRVLRDYTRMRTDLTRERTRYYSRLEKLLEDALIKVSAVASKITAVSVRHMVEALIAGERDPQVLAGLARGRMKAKHDKLTEALTGRFDAHHGELAKMLLDQIDGLTQQIDTLTTRIEELIAQMPAAWGVDPDGTTGPGGGLAPGSPVLPAVSRLDEITGIGREAAQVLIAEIGLDMTQFPTPGHLVSWAKISPRTLQSGARSRSGRTGKGNPYAKGILGEAAAAAARTDTFLGQRYRRLVRRIGKLKALVAIARSILVIVWHLLADRSARYHDLGSDFYDARIDKPRKTRSHIRQLEALGYTVTLTPVAA

SEQ ID NO: 146382 - protein, 350 aa, unidentified
MYFAGLDAHLKYVTVAVLDRLGTLVLETTVPTREPERLLAVLAPFRPLEVVVETCPFWPWLYDLLVPAGIGFHLAHAKRLRAIATAPQKNDRVDARLLARMLLSGLIPEAYPRPGDQRELLRLLRHRTTLVRFRTRLAGRIHSQLHQQRLLLPREQLLRQATRTWLRETAWPRLTPEQQAIVTTHLALIDQLTPLIQALERRIDTAAGANPTAALLATIPGIASYRSLLLAAELSPLSRFPRVEHLASYAGLAPVTRSSGGHTRHGSIPQGANRWVRGALVSAIPSHVRWAPTSPVTRAYAQLTARLGWRVARVAAARKLLRIVYIMLRRGEAWRSEPVAGADVRDEVHV

SEQ ID NO: 146383 - protein, 357 aa, unidentified
MGTITIGVDLAKQVFSVCEVDATGRILRRLTLKRDAFSSWLAQRPAATVVAMEACSGAHHWARRCLEYGLVPRLMAAQFVRPFRKNPLAKNDPNDAEAIATAARQGNMRFVPVKDIDQQARLSWHRVREGYKVEGRAIANRLRGLLAEFGVVVAQGEGALRRTLADLDAYPELSAEFKELLRALTGHWAQVVAALAVCERRIEAHARQDARCVRVREPVGVGALTADAMVASVGNAKEFKNGRQLAAWLGLVPSQHSSGGRARLGMISCRGDAYLRTLLIQGARSSLERAKRVSLDKASPEQLWIRSLACRMPFGKIIVAIANKHARQIWAMLAHDVDYDPHAYRQHPPQLHRKAAV

SEQ ID NO: 146384 - protein, 353 aa, unidentified
MKRTTKYVALDVHQATTVAAVREPGGRVIARSILPTEAATLVEFIRGMRGSIHVAFEEGTQAQWLHDLLAPVVDRVIVCDRRGEHRGNKADQADADKLSQRLLNGDLRAVYHGSSDRLTLQELTRTYMNLVEDSTRAMLRLKSLFRARAVRAPGKRIYGTKDRTLWLARLPDRGARFRAETLYAELDVLRELRPRAKTLMIDEARRDPAWEVLRSIPFLGPVRVSLLLATMKTPWRFRTKRNLWAYAGLAVVTQSSADHEFIAGRPVRRRRKPLTRGLNKNHNRVLKDVFKSAAAASIGRPGPFQDLYRGMVARGMREDMARLTLARKFAALTLRLWKTGEAYDPAKLTVQAT

SEQ ID NO: 146385 - protein, 335 aa, unidentified
MEQYVGLDVSLKMAAICIVDRTGKIHREGMVAADPAAIAAFVRLHAPHVARIGLETGATSTWLWTELNKMGLPVICIDARHAKAALKMQINKSDRNDAVGIARIMQCGWYKEVRVKGLDSHAIKALLVSRALLVKIKRDLENQIRGLLKNLGLVIGRAKMNVFVVRAAELIQDRPELAAAVEPLLKAREAVEKQIASLDRKVMRLAGNDVQVRRFTTAPGIGPITAFCYLATIDDPTRFKRSRSVGAYVGLTSRRYASGEVDWTGRISRCGDPMLRSYLYEAAGVLLTRVAKWSVLKAWGMRIAKRSGLRKAKVAVARKLAVILHRMWVDGTEFK

SEQ ID NO: 146386 - protein, 353 aa, unidentified
MNIIAMDLGKFNSMFCFYDSTTQEYSTAKAPTDRGYFESVLKSRQPDLVVVEACGPSGWVSDLCEALGIAIIVCSTHEDAWLFKNVKRKTDKDDAIKLARLGAIDQLKATHVPAKAMRELRRLIKYRKALVGRVNKCKNTIRSIFANQGIRISDGAKTWHTGRVKLEAERKPLIECEPDELWRGELDLELIQLAAVETHLKQVDKKLEEIAQSNARIQRVMQIDGVGRVTAEAIVAYIDDPHRFKNKNQVSAYVGLVPRQYQSGNTDRHGRITKRGPRLLRTLLVECAWCSLKYNQWSRETYERIHRGTQARKKKAAVALARKILVVAWAMMREESDYDPERNMLLGEPGSLE

SEQ ID NO: 146387 - protein, 340 aa, unidentified
MGEITTIGLDLAKQVFQVHGIDADGTTVLRKQLRRSQVLSFFSRLAPCLVGMEACATAHYWGRELAALGHEVRLMPAQYVKAYIKRNKNDAADAEAICEAVVRPTMRFVPAKTAEQQAALLLHRGRERLVRQRTGLVNALRGHLAEFGVIAPQGLRNVGKLIAVVRDAGDARLPDLARQVLEVLATQIEQLEGAVAAVEKQLMAWHKSNPVSQRLATIPGIGPIIASAIAASVAEPGGFRSSREFAAWLGLVPRQISTGGKHRLGGISKRGNQYLRRLLINGASANLLRSKATKADPWVIGLRRRRPSLVVAVALANKTARIAWAVMQRNENYQRMAAAA

SEQ ID NO: 146388 - protein, 416 aa, unidentified
MEQIFMIKENYIYVGIDLHKETHTAVMIDCYNQKLGEITFPNRPAAFLKLVTKVKKCNTDGKEVVYGLENAYGYGRALAVWLIDKGYLVKDVNTAISHRQAKHRGAMYRKSDSDDAKAIALATLNMLDKLPDACPNDAYWSLGQLVHRRDNIMKQRTRLVNQLHEQLCIAYPSYKQFFNDISRPTALYFWEHYPSRKYLKGKSVEDLRAELVPVSHNKCSTKTCEKILDAVASDKVKNIDYQDARDMVTLSIVSDLQHYDSQLAEVDKMLEQMYKMLGCTLTTIPGVNVITAVKILAEIGDIKRFSNANKLAQFAGIAPLHLSSSGKGKDVATKQGNRRLQATIYFLAIQMVQVSSKGTPRNSVVRAYYEKRKAEGKTSQQALICISRRLISIIYGMLKNGTEYRMPVVENAGETV

SEQ ID NO: 146389 - protein, 340 aa, unidentified
MEDVTLVGIDLGKHTFHLHGQNKKGKGLFRKKLNRKQMIEFFATFHACTVVMEACAGAHHLARKLASFGHQVKLISPQFVRPFVKSNKNDFVDAEAICEAASRPAMRFVVPKTEARQVLSALHRVRESLVRDRTKVVNQLHGFLLEFGVSLPVGKATMTRLPAILTEHSLPPTLVVILERLHTHYKYLNEQVVDNDKEIARHLATDELGQRLLTIPGVGPITASVLTAEMGDGTQYQNSRDFAASVGLVPRQYSTGGRANLLGISRRGDKNIRRLLVSCARSYMMRLDKQTGVLADWVRTMLTRRHSNVVACALANKFARTAWAMATHHTVFRSEGTAAV

SEQ ID NO: 146390 - protein, 349 aa, unidentified
MDHIGIDVHKRESQIYVVAEGGEVIERRIRTEPERFAAVLRGRPRARIVIEASTDSEWVARCLEALGHEVIVADPNFAPMYATRSRKVKTDRRDARTLAEACRLGAYRPAHRLSDPQRHVRGRLLVRDAVVRTRTRYISLIRALLRQHGYRVPSGSAESFVHRVQGLPLPGRLLSLIAPLLALMRPLNGQLAYSDATIEHLAVQDPRVPRLRSVPCIGPVTAAAFLAAIDDAQRFRHAHQLEAYLGLVPREYSSGETQRRGPITKAGHSRTRWLLIQAAVSILRRRPPQAEALWTWALRLAARRGKPVAVVALARRLAGILYALLRDDSVFEPQRVRHPRPTAAALANM

SEQ ID NO: 146391 - protein, 475 aa, unidentified
MPAGQQVEVDEHEEIVGRVAAIDVAKASGMVCTRVPHATKAGRRVTTVWQVPSTTNQILELAEQLAGEGIERVVVESTSDYWRPFVYVLEARGLVVWLVNARDVKHLPGRPKTDKLDAVWLCKLNERGMLRPSFVPPAQIRRLRDYTRLRADLTADRTRHKQRLEKLLEDALIKLGTVATDIFGVSGRAMLEALIAGQRDPKVLAELARGRLRVKHAALVQALTGRFDDHHAELARMLLDQIDTLGGQIDQLTVRIEQTITAIPAAQPPAPATGPGGDAAATLHAGMESAESVPDHPNSDGVDPETGELLAAPLPVVDRLDEVAGIGHHAAQVIIAEVGLDMGQFPTPAHLVSWARLSPRTIQSGTRHRAGATGKGNPYLKSVLGEAATAAAKTDTFLGERYRRLVRRIGKRKALVAVARSILVIVWHLLADPTARFHDLGADYHASRIDRDRKTRNLVHQLQALGHKVTLQPAA

SEQ ID NO: 146392 - protein, 352 aa, unidentified
MTVTIVETRAEIRAITGGVDTHADVHVAAALDPIGGLLGVREFPATAAGYGRLMSWLGGFGTVALVGIEGTGSYGAGLARHITTAGVRVVEVDRSDRQDRRRQGKSDPLDAVSAARAAQSGRARGASKGRDGAVEAIRALMVAKRSAAADRTQTINQARALVLTGPDDLRARFTGHTAAALVAELASLRPRPGSTVGYATRIALRELGRRAEFLDGQLERLDELIGPLVAARAPGLLALYGIGPHTAALLLIAAGDHPGRLRSEAAWAHLCGAAPIPASSGKTVRRRLNPGGDRQANHALWRIVFTRLGSDPATRAYAERRTAEGKSKKEIIRCLKRYVAREVYPHLRTTAG

SEQ ID NO: 146393 - protein, 351 aa, unidentified
MRTSQKITGIVTTIGIDIGKNTFHLVGFDQRGAIILLQKVSRSQLERRVANIPRCLIGMEACSGSHHIGRQLAEIGHDVRLIPAQYVKPFLKGHKNDYRDAEAIAEAVQRPTMHFVTIKTPEQMDLLALHRVRSRLVGRRTGVINQIRGFLIERGITVRQGPMPLRKALSEILSSDTGALSPRMVGLIADLAQDWRRLDERIAAVSAEIEALAQQDHSCQRLMTVPGVGPIISSAVVAAIGNGTGFKQGRDFGAWLGLVPKQESTGDRTILGKISKRGNKYLRTLFVQAAHVVLARRPSAAMRGLWPWVEQASKRLHRNMLAIALANKLARIAWAVLSRGGTYQPRITHAA

SEQ ID NO: 146394 - protein, 343 aa, unidentified
MSYKLYFGVDVSKLWLDIAYYDGVDVDWKHGHIRVDNDEKGFAQLGRWLDRLGVGKGTCIFCMEYTGLYSQEFRQWLERMKIVYGMVSPRKMHRFEPDLGEDERSLDRIKTDEMDSFRIAIYCKEHSMKIRRKPSHLPSDAYFKLKRLLAERRQYVKQSTLYKQQLHDIGKYDTEASRHRKEAELASLTENALQTSKEMEAIIREDADIRKNYGLLCSIKGIGLIVAAETIVLTENFTSITNPRRYACYVGIAPGRKESGVSIQGGDHVGRKGFTQAKADLSMVALQGIRCDKGIRAYWLRRKAEGKHSGVVLNAVKFKIVLRMFAVIRRQKPYVEMEEYGKK

SEQ ID NO: 146395 - protein, 340 aa, unidentified
MNIKRIGLDLAKNIFQIHAVDHHEHVVLRKTLRRDRMTAFFSQLSPCLIGIEACGAAHYWARELTRMGHTVRIIPPQRVKSYLKGQKNDANDAEAICEAISRPGMRFVAMKTERQQTLQAEHRVRARLVRARTALSNEMRGLLGEFGLVLPVGIRQLRKALPEILSQQELWDDRFIRLLSELAEELQMLDERVARHDRRLEQSARDDIRIKRLLAIEGMGPVVASALVAAVGDGRQFKSGREMAAYLGLVPRQHSSGGKARLGSISKRGDSYLRTLIIHGARAVLNACQNKTDRRSQWLKALSERRNRNIATVALANTNARIAWALLSREEDYHGFQAAG

SEQ ID NO: 146396 - protein, 342 aa, unidentified
MQITTIGLDIAKNVFQVHGINASEKVVVRKQVRRSQVLEFFKALPPCLVGMEACATAHYWARELTKLGHQVRLMPAKDVKAYVKRNKNDAADAEAICEAVRRPTMRFVQVKSAEQQGQLMLHRTRDLLMRQRTQVINALRAHMAELGIVSAQGREGIKELLKIIASEQDARLPVDAHTSLVVLAAGLQAVQTMIGSIEKRIMAQHRASEASQRLESIPGIGVIGATAIAATVPDPKVFRSGRDLAAWIGIVPRQDSTGGKQKLGPISKQGDRYLRRILVVGAHAVLKQARRQPEKYPRLTLLLARKPFKVVAVALANKMARIAWALLAKGGIYRAPALAAAA

SEQ ID NO: 146397 - protein, 367 aa, unidentified
MNDIIYCGVDFHARQQTICCLKTETGELAFHELKHDDKDELRKFYSQFRGPVIIGLEASGYSPWFEQLLEELGHEVWLGDATEIRRRARRRQKNDRRDAELILELLLHDEFPRLHRPTPESREILRMLRYRQKLVKVRTIMKNSLQSLSLQAGLSLQARLFTRAGEQQLLATAMSPVMTEQRKQWLALLQQLNQRISETEWWLKQQALKDPRISLLRTHPGVGLLSSLGIVHTLIPVSRFPNTRKVAAYGGFDPMERSSADKKRYLGISKAGSRLLRFLLIEATQTAVKGDADLKRFYRRLEQRRGRPKAKVAVARKLLIRSYIMLRDEINYAEFQQRAVAARLARENARVNIPGPLIGQPASSAKG

SEQ ID NO: 146398 - protein, 346 aa, unidentified
MTIVEDTRAITGGVDTHADMHVAAALDPIGGLLGAGEFPATTAGYARLLGWLGGFGTVALAGIEGTGSYGAGLARHVTTAGIRVVEVDRSDRQDRRRQGKSDPLDAVSAARAAQSGRARGAPKGRDGAVEAIRALMADGRSARSERTQTISQARALVLTGPDDLRARFARHTAAGLVTELASLRPRPGDTVGYATRIALRELGRRAEFPGGQLGRLDELIVPLVTARAPGLLALYGVGPDTAALLLVAAGDHPHRLRSEAAWAHLCAAAPIPASSGKRTRHRLNPGGDRQANHALWRIVITRMSSHAPTRAYVERRTAEGMPEKEIIRCLKRYVAREVYRHLRAAG

SEQ ID NO: 146399 - protein, 309 aa, unidentified
MMESFVGIDVAKENLEIFAMPDNAHMSFPNDDEGRIALARLLADMKPGLVVMEASGGYEIPLVEALVLRHVNVVVINPRQVRDFAKATGKLAKTDVIDAEMIARFAEAIKPEVRPLKDMDAQRLQALIARRRQLVQMLVQERNRLQISPSCTRPDIEAHIEWLTGCIDKVGKDIASFIKKTPLWREKENLLKTFKGIGSVSACTLLARLPELGQLNRQKIAALAGLAPINRDSGKYRGKRTIFGGRADVRSALYMAALSAIRYNPAIKTFYDRLLHAGKLPKVALTACMHKILTILNAMIKTNTPWCAR

SEQ ID NO: 146400 - protein, 415 aa, unidentified
MERLYDTCCGIDVHKRTVVACLIRPDGRGQRTKETRTFGTTTEELLVLRDWLHAAGCTHVAVESTGVYWKPVFNILDGVCTVFVVNAQHIKAVPGRKTAVSDAAWIADLLQHGLLRPSFIPDRAQRELRDLTRTRTTLVDERAAAINRIQKVLEDANIKVAGVATDIMGKSGRDILAALIGGETDAAAMADLARGKMRRKRDELEKALSGRMGDHHRMLIALHLEQIDLLDEQIAHLSRHIAEQLRPYKEQLALLDTIPGVGPYIAEILAAEMGLTMDQFPSAGHLASWAGMCPGNYESAGKHKKGPMRKGNKALRRALNEAAQAAARTKKKDQTYLRGRYRRLVVRCGKKKAAVAIGHTILRIAYRLLKEHEPYHEGILVQLDERRQARVQQRAIDQLTALGYDVTITPKQPAA

SEQ ID NO: 146401 - protein, 410 aa, unidentified
METIVKRAAGLDVHKAQVTACVRVPARGRARAQEVAEFQTTVRGLLALRDWLKAHRVTQVAMEATGVYWKPVWAILEDEFDCLLVNARHVKQVPGRKTDVSDASWLCQLLEAGLLRRSFVPPKPIRALRNLTRYRKAQIGERQREANRLHKILEDSGIKLDCVASDILGASGRAMLDALVAGTTDPEVLAELAKGKLRAKIPALKEALVGRFDRQHALIVSAILAHLDFLDEQIQLLSDEIAEQLAPFAKAVELLCTIPGVQQRTAEVIVAEIGVDMSRFPTERHLASWAGQCPGNDRSAGKRRSGKTRHGSKWLDSALTEAAMAATRTNDVYLAAQYQRLRPRRGHGRALGAVKHSIITGCWHMLSTGELYREAGGDYFSRRDPERATRRLVAQLERLGHRVTLETAAA

SEQ ID NO: 146402 - protein, 344 aa, unidentified
MGEVITIGLDIAKSVFQAHGVDEAGAVVIRKRVSRAKLLEFFASLQPCLVGIEACPAAHHWGRELQALGHTVKLMPPSYVKAYLKRSKNDANDAAAICEAVTRPSMRFVPIKTKEQQAALMLHRARQLLVRQRTMLSNAIRGHLSELGIVSAKGRKGTGALLEIIADAEDGRVPPAARGILDVLARQYSAIGAEIGSIDRSIVAWHRSCEASRRLEEIPGVGPIVATALVAEIGDWKAFGSGRNLAAWIGLVPRQQSTGGKDKLGSITKQGNRYLRWLLVAGAMAVIRYAQKHGTLKRPWLGRLMERRPTKLAAVALANKMARMAWAIIVHGDRYREPKPLLAA

SEQ ID NO: 146403 - protein, 334 aa, unidentified
MEKITTVGIDLAKSVFSLHGVDEAGRVVLRRTVRRDQLLGVVASLSPCLIGMEACSGAHEWGRRFQELGHTVRLMAPKFVAPYRKSGKNDGNDAEAICEAVARPNMRFVPVKSVEQQALLALHRVRQGFVVERTATINRLRGLLCEFGVVLPLRSVTVRRQAAQAAENLPDLARRAIGDLLDELRSLDERIGGYDREIEAQAKLCEPAQRLMKIRGIGPTTALAIVATVGNAREFKNGRQFAAWIGLTPSQHSTGGKPRLGHISKRGDAYLRNLLVQGARSVLNSAGRHQDRMSRWILELQPRRGYYRTLVAIANKNARIAWALLAKNESMRSV

SEQ ID NO: 146404 - protein, 315 aa, unidentified
MSENQVEVFVGIDVSKSRLDVRIEPPGEAFQVANDDAGITGLCTRLSELAPTLIVMEATGGLETHAAGELAARGLCLAVVNPRQVRDFAKASGQLAKTDRIDTQVLCGFARAIRPAARPMKEALIQELDDLVSRRRQLVDMRVQESLRLQGASKVPAKSVKAHIVWLDKRIKSIESDLGTRLRSCDAWRVKDDLLLSIPGVGEITSRSMLSRCPEIGRLSRREIAKLVGIAPLNNDSGKYRGQRHIWGGRADVRSVLYMATVSAIRCNRVIKAFAERLKRTGKAPKVVIVACMRKLLTIMNAMIKSNTPWTPKIA

SEQ ID NO: 146405 - protein, 359 aa, unidentified
MDVMEGSRHRVVGGVDTHKDLHVAAVVDEQDRVRGSRCFATTRQGYRHMLAWMRSFGDVQRIGIESTGSYGAGLLRFMQGSGIEVLEVTTPDKHDRRRRGKNDDLDAQNAAHAAFAGKRTVTPRSRDGMVESLRVLTVCRKTAVAARRVALQIIQTTIVCAPDGLRDTLRAMTRMQLVRTLAAWRPDLTAYRDVEAAYRISLKSLARRYLELHDEIADLDAMIGSIVDDLAPELVAHNSIGHTGAAQLLLTAGDNPERLRSEASFAALCGVSPVPASSGKTVRHRLNRGGDRAANSALHIIAIGRLRTDPATKAYVAKRIAGGHSKLDAIRSLKRYIAREVFHIITRRHREINQTRIAA

SEQ ID NO: 146406 - protein, 350 aa, unidentified
MIIIGCDYHPGFQQIACVNTETGELGERRLSHREEAEQFYGDLKGRGLTVRVGMEASGHGRWFERLLGDLQFELWIGDAAEIRTKRVRKQKTDRQDAQLLLKLLMEDRFPRIWVPDAENRDLRQLLWHRHRLVQMRTRIMNQLHVVALNEGVRRKKALWRPAGRSELESLVLAPWASRRRQDLLDLLDQLTPKIQELSRALEEEVEKREVARRLMTHPGVGPLTALAFELVIGTAARFHCGKQIASYVGLVPAEDSSGDRRRLGHISKQGNSLVRFLLVEAAQVTVRTQPQWRSKFFHLAMRRGRKIAKVAMARKLAVHLYWMWRQGWDYEQLQKLGSHAGELGNRRGVQ

SEQ ID NO: 146407 - protein, 315 aa, unidentified
MQAQAATVYVGIDISKASFDVDSYPVAQPACFTNDEPGRAAAASYLRGLQPSLIVVEATGGLEAPLVGQLATAGLSVAVVNPRQARDFAKAIGVLAKTDRVDAQMLARFGQAVKPAVRPLKPEETLALEAMLTRRRQIIEMITAEGNRLSSAAPRIAKQIRQHIAWLEKRLDEADQDLDGMLRQSPVWQHKAQLMTSIPGVGRVTAVTLLAELPELGAIPRREISALVGVCPYSRDSGKYRGRRAIWGGRATVRATLYMAAIVASRHNPVIRAFYQKLVTAGKLKKVALVACMRKLLVILNAMLKHDTPWHHPAA

SEQ ID NO: 146408 - protein, 412 aa, unidentified
MLKIVYPICCGIDVHKGFIVACIASTNGQGVTTYQSKRFSTFTNDLRRCAVWLAKNNCKDVCMESTGKYWIPVYNILEASCTIVLAHPKYVKAIRGKKTDKKDAKWIADIFKHDLVSGSFIPPADIRQLRDLMRYHWKLTNFTTGEKNRAQNCLTVSNIKLDDVFSDIFGKAASAITARLLENNEPFDVTPYLTKNIKAPVEKIQAAVDGEMCVQQAEKLRIIRSHMDALELCKLNLQSLILTTAEKYLPQINIVATAPGIQAFSAIAIISEIGVDMSVFPTSKHLCSWAGLTPQNNESAGKKKTTRISRAGAYIKPLLVQCALNAARAKQFPEVRRRYLALKKRRGHKKAIIAIARMLLTAIYNMLKKNEPYNPDLYRIADRPPTHHEVSVEEAIYILQRQGYLVAAPSLP

SEQ ID NO: 146409 - protein, 337 aa, unidentified
MNNIEGCGVEVSARELVVARKGKAGVQLRRFANTAAGHRQLLRALTRGGQRVRVVLEATGLYALDLALLLSAQEQVQLMVANPRAVRHFAQAMMQRSKNDQLDAVVLLEFAERMPFTPWVRPAENTLALWAIARRLQALTKLCTAEKNRAHAMGLSEAIPAMVRRDIARSLQFHQRAMKKLRQQALQCIAADAQLQQRYQLLRSVPGLGEISAVQTLAELLLLPADRDVRQWVAYAGLDPREYSSGTSVRKYTRISKVGNAHLRRALYMPALVASRVEPHLRGFYEHLLARGKSKRQALVAVARKLLHAIYGMFRSQRPYDGTRVYLAAAAQAEKFS

SEQ ID NO: 146410 - protein, 354 aa, unidentified
MRLYIGLDLGSKSQSEAVAVDESGRIVGEPVRFTPERSSMDEMVATLCGGALPEEVMFISEPTGTIWHSVGSYLSSRGYGFFLVSPQKTHDLRRFYKRHAKTDTIDAYTLAKMAVVHPEGLFRPSTMEPLWHNLRRGAKKEAKIASLIGDYKRTIQAKAEIALPGISSVVDDVDSPLAKRLYTKYLDPRKAVKLGKARLERSLGKVAGFSEKLFSEIWRCIETAADIETDCDYDDLRVDIEEDFEVLECLKAQWESVKKRNLRTYCRLDPGRLLCTVYGVGDTLAPAILAGIGDGERFKSIKHFLSYTGFTPRVEESGQREAKGTRMTKAGPPWLRRALYLAADVARRWDPQLA

SEQ ID NO: 146411 - protein, 398 aa, unidentified
MTRKNTLKSLPTDTEFRVVGLDLAKSDVSVAAIPVDDNTPSLVDRMTYADLLDWAGKISPTLFAMEPCNGYSLLCLQLENLGHEIKVISGSTVSMWINTHLSGQKTDLNDAIALARPAASDAELTPIRHKSITEIRIQTVQAVRQQLMSQRSKSIVSFKALAQQWGIPCAAGHRNLKKLRESIEAKVDLITRPVANAMLFLLDAVKSLDRQIGQLNQTLQELVMSDERGRLLQSVLGVGTQISARVITVVGNIERFNSPRSLVAYVGVAPRNFITGHKNLTKKKHGNCPDLSHKGQGKISRRGDKLLRSLFIQGAACLYMQFCKDQLPECQLKRWILKQLARQKPYGKLIVSLAAKLIRIVWAVLTYREKFNIQKASMTRSMWSEMALETPLNKEVPA

SEQ ID NO: 146412 - protein, 347 aa, unidentified
MLADRLDYVIGVDPHRDRHALAVVEVRSGGVLFETTVEADSGGYQAALLLADAHAPGRRSFAVEGAGSYGAGLTRFLSDHGETVFEVGRLPRERRSGGKTDALDAVRAARSVLAKSRPALPRAKGEREALRALMAARDGAVTAKTAALSQLRDLLVTAPESLRAELRPLTRARLLAHLTASRPDRRQDPELRGTQLALKAVARRIRQLASEERELAREIEQLTLRLAPQLLAEPGIGALSAAQVVLSWSHPGRIHSEAAFARLAGSAPIPASSGQTIRYRLDRSGDRQLNRTLHQIIVTRRRMHPPTIAYIERRTREGKTRREATRCLKRYLARNLYRLLEHPPTTT

SEQ ID NO: 146413 - protein, 318 aa, unidentified
MTNITYQFNIGVDIAKQKLDVSFSDQRVVSFENNLAGFKRLLKEITDKSQTRVVMEATGGYEKPLAHFLQGQGVAVSIVNAKRVRDYAKALGLLAKNDVIDAKVIRLFADAVNPKLLSAASDTQQALDAQVHRREQLVKQRAMEKQHLETVGNKDAVRSIKRTIAFLDKEIERIEKAIKALIRADSILTEKVERLSAIKGVGDITALTLIADLPELGQLSNKEISALVGVAPFCHDSGTQKGKRTTWGGRKQVRSILYMAVLSAVQYNPPLKAFYNRLLMKGKTKKVALVACMRKLLTVANSMLRNNTEWNPNHGKLA

SEQ ID NO: 146414 - protein, 338 aa, unidentified
MSLYAAIDLHSTNSVLAVMDQAGKPLLQCRRANDLRIVLADLAPFQEELAGVAVESTYNWYWLVDGLMDEGYRVHLVNTAAIPQYAGLKHGNDHTDALHLAQLMRLGLLPEGYIYPREQRATRDLLRRRFALVRQAVRLVLSIQSSVSRATGRVLSGNALKQITGAQLEALFPDPTTRFGVLVQFKLWLTLQDQIGGLERWIQRDLARPDLLLRLQSVPGIGPILGTTILLETGDIGRFASVGDYASYCRMVESVRLSNGKLKGHGNRKCGNRYLCWAYIEAANFATRHNTAIKRWYERKRAKKHRVVALKAVAHKLARACYHMLHEGTSFDPLRAFG

SEQ ID NO: 146415 - protein, 364 aa, unidentified
MDVHTTNFTFCCYTADSDRGFAVAQTEPDYRQVIKYMERVQKQRGEECKFVCGYEAGCLGYSLYHQLTRCGVDCVILAPSTMHQEKGKRIKTDRRDAENIARCLAFSLYSPVYVPTTEDDAVKEYIRMRDDIKADLKRVKQQIIAFTTRHGFAFDGKSYWTQKHLKWLETLVFEHPLYKETLQEYLILYYMLDEKVAVYDTRIEEMSHLEHYEENVQKLCCFRGVAAHTALSLLVEVGDFQRFRSAKHFAAYLGLVPGEHSSSDKQIRTSITKAGNTHLRRLLVEAAQSYNRGAIGKKSAALKARQGGNPAEVIAYADKANERMQRKYYRIAFKSRHNIAKTAIARELAWFVWGMMTGNISNAA

SEQ ID NO: 146416 - protein, 335 aa, unidentified
MKFKVFIGVDVSKETLDYAVFYQGDILFHLQGENSAKGIKSFMKLLSNTIVADQSELLFCMEHTGIYCNHLLAFVEKNQIALWFESPAEIRAFYGLLRGKNDKLDAKRIAEYAYSKRDKIKLYEPPRQIVKQLKYLLKIRERLVNTRKRLKTPIREADGFVDQLLVKTEKKLFNPILVQIELKIKEVEKQINQLIKEDPELGRLYAIVSSVMGVGFVISTHMIVSTNEFKTISDPNKMACHCGVAPFEYQSGKSIKGKSKVSHRADKGLKWLMHMAAMSAIKADKELGNYYNRKVEEGKNKMLILNAVRNKIIHRVFSCVSQNRKYEKNYIRMLG

SEQ ID NO: 146417 - protein, 411 aa, unidentified
MRVHNQVCCGIDVHKKSVTACLMWGPADREPHLEVRRFGTMTAELKQLATWLTEAGCEIAAMESTGSYWKPVWNVLEGAVPLLLANAKHVRALPGEKTDQKDGKRLASLLRHGLIRASFVPPRALRELRDLTRYRGKLIGNGAAERNRIQKILEDANIKLGSVLSDVFGASGQRMLHALVTERQMDIDQVARLAHWKLEPKMALIKRALDGHLTDHHCFVIQVSLDHMAYLEQQIVRLDAHIGQYLAQYQQAYDLLQTIPGLKEHSAAAVLAEIGPDMAHFEDPDHLASWTGICPGNNETAGKHFSGKTRKGNKFLRATLVDSAWGATRKKHSQFRATYYRIKARRGSKRAIVAVAHQLVTIAYVVLKTGQPYQEPCLLPLSAHHRQHKAKQLARKLQQLGYDVTITPKAA

SEQ ID NO: 146418 - protein, 346 aa, unidentified
MKINRVGVDLAKNVFQLHGVDRNGKALWKRRLSRGKWLTVLCDTVEPGTEIGMEACAGAHHWARQLMQRGYPVKVIPPQFVKPFVKSNKNDANDAAAICEAMGRPDMYPVKVKTVEQQDLQAMHRIRDEIKGHRIAKANQIRGLVTEYGLVAPQQLSALRSAIPDWLEDADNGLTFLFRQLLQGLWGDLYALDQRMTELDKQVVVVAQEDPTAKRLQQLRGVGPLIATALVATIGDGKQYRKGRDMAAALGLTPRQHSSGGKDRLLGISKRGDAYLRCLLVHGARSAMRTAKDKDDRLSRWIINLQARRHANVVAVAMANKMARMAWVIMTKDVDYDPDLAAASVK

SEQ ID NO: 146419 - protein, 352 aa, unidentified
MYSQTINAKYFCGIDLHKDNMFICLVDIMNKIHVHKRIPATYQDLRQEISPFFPDVAVGVESTFNYYWLQDACENDNIQFCLGHALYMRVGVHKKKDDKLDSYHIAQLMRNGTFPFAYAFPPQLRGLRDLFRERLKAARLRGSLYTRFYIKLLQHFGWSPAIAINPAHNSSLREEYIRSASDPALKLVFQQLHDDILFMESSINKLENTSLEIIRLNMSSQLKLVTSIPGIGFVLGMTILCETGDIKRFKSIQNYSSYCRVVHTQRSSSGKTVDGKNQKSGNTFLKWAYSQGACLAIRHSPQISAYYKKLTKKKGAPVARATLAHKLAVAVFQMLKNKTPFDIISFTRSVRF

SEQ ID NO: 146420 - protein, 403 aa, unidentified
MNNVAGIDVSKGKSMVSVLRPFGEVVAKPFSVGHTGSELKELADYLKSLDGETRVVMEHTGRYYEPVARFLHDEGVFVSAVNPKLIKDYGNNTLRKVKTDKADSRKIARYGIDNWAELRQHTPMDTIRMQLKTLNRQQSLYSKTKTMMKNNLIALLDQTYPGVNALFDSPVREDGSQKWVDFATAFWHVDCVRNMSLTAFAERYRKWCKRHGYNFSQSKAVEVHAGAQDLIAMLPRDALTKTMVRQAIDALNAISASLERLKAEMQALAAQLPEYPVVMTMHGVGDSLGPQLMAELGDVTRFTHRNAITAFAGVDPGADQSGTHEAKSTRVSKSGPPELRRALFLVMDCLLKTQPQDDPVYRFMDKKRAEGKPYLVYMTAGANKFLRIYYGRVKEYLAQLENS

SEQ ID NO: 146421 - protein, 387 aa, unidentified
MPQLNDLSRSLAALDQNSTIIAVVELSQSSWLVGGVVPGIERQPRKKLEPSPERLLALLHRWRDEAVRAGSTITRIALAFEAGRDGFWLARWLEARGVEAHVIHASSLAVSREHRRAKTDRLDTELLQRGFLGWLRGERGHCSMARVPTIAEEDAKRPNRERDCLVGERTRIVNRIKSTLARLGIHTFKPTLRKAADRLATVHTPEGVPLPPNTLAELQRDMARLGCVVSQIKEIEDVRQKRLEQQHETGPHAMVRLLARIVGVGVETADMLVHEVLSRPMRDRRAVARYAGLTGSPDESGAQRREQGLARAGNARVRRGMIQLAWRFLMFQKESALALWYRARTADSRKGTRKTMIVALARKLIIALWRFVTTGEPLEGVVLRPAT

SEQ ID NO: 146422 - protein, 353 aa, unidentified
MKRDKYMGMDVHQATTVVAVIDVEGKTVLETIVPTAAGSIRRLIEGISGPLHVTLEETTQAEWLHDLLQGFVAEVVVCDPRRNKLLAEGSKGDKADARKLAELLRTGMVRSVWHGRKTTRGLKEVVRAYETFAVDTRRTMMRIKALYRGRGIATTGSAVYQKKEREGWLKQLTEAGMQQRAAWLYEQLDHVRELRKRAKAAVLSEGQEHQAVQLLRTIPQVGPIRAAQIVATAGTPHRFRTKRQFWSYSGLAVVTHTSAEYEMREGRVVRRNKPVATRGLNANCNRRLKSVFISAATAGGSSHPWQPYLDHLKEKGMRPDMARLTLARKIAALVLAIWKKGESFDPKKLNWTN

SEQ ID NO: 146423 - protein, 328 aa, unidentified
MNIIGIDVSKNKLDCALIDNLNNDKFKFKVISNSEAGFVALIDWLSKQVKSTGSDYHFVMEATGVYHERCAAWLFNIGSKVSVVNPAHIKYYGQSLGVRSKNDKKDSVVLARYGLTQKPMYWEPEVAEIRRLKALASRLDAIEKDILREENRYEKSSINPCSESVLKSIKMMLTILKKEKVNLERLIGIHINQYEYLKHNYALLQTIPGVGPVVSRYMLIVIGSRTFKSASQCAAYIGLIPIQNESGSSLRGRSRLSKAGNPVIRAKLYMAAISALQHNPDIKIQNQRLLKNGKSKMSALCAAMRKLVQICFGVIKHQKPYQVQANLT

SEQ ID NO: 146424 - protein, 402 aa, unidentified
MNAVGIDISKGKSMVAIMRPYGEIVSAPFEVKHTSSAINSLVALINSVEGESRIVMEHTGRYYEALAHQLSQANLFVSAINPKLIKDFDNDSLRKVKSDKADAVKIARYALDKWQNLKQYSVMDELRNQLKTMNRQFGFYMKHRTAMKNNLIGILDQTYPGVNTYFDSPARSDGRQKWVDFASTYWHVDCVRKMSRNAFIGHYQNWCKRKKYNFSQLKAEEIYGKAKELVPVLPKDDITKIIIKQAVDQLNSASTTVESLRTLMNEIAAKLPEYSIVMAMKGVGTSLGPQLMAEIGDVSRFTHKGAITAFAGVDPGVNESGTYVQKSVSTSKRGSSSLRKTLFQVMDVLIKTHPQDDPVYQFLDKKRAQGKPYYVYMTAGANKFLRIYYGRVKEYFASLPES

SEQ ID NO: 146425 - protein, 422 aa, unidentified
MLEETQETEEIIQRVAALDVGKAELTCCVRVPGQGSSGRRAQEVRTYKTMTRSLLVMVDRLAELGVTRVVMEATSDYWRGAFYLLEAHGFETWLVNARDVKHLPGRPKTDTLDAVWLCKVAERQMLRPSFVPPRPTRQLRQVTRYRADLVAARTAEKQRVEKLLEDAQIKLSVVASDIFGVSGRAMLTALIAGERDPKRLAQLARARLRAKLSLLEEAFSGFFTDQHAFLLAKMLARVDQLDADLAELDAKLQELIAPFVAAVERLDEIPGVGQLAAHLLIAEIGTDMTRFPTAGHLVSWAKFAPGVKESAGKRKGSGSTGHGNPYLARVLGEAAVAASKTDTFLGERYRRIARRRGAKKAIVAVGRSILVIAWHLLSDPEAHFHDLGAGFYDTRIGPERAKRNHIRQLEALGYKVTLQPAA

SEQ ID NO: 146426 - protein, 365 aa, unidentified
MVNHIFVGIDLGDKNSVARVAVNREKTERLGFVNNRRGRARLFEELKRRAEKVKDARILMAYEASSCGFILRDEAEALGIRCWVLAPTKMEKSVEQRRHKNDDRDADDVLEKLRGHVLAGNRLPTIWIPDPQVRDDRELIRTRVELMEKQSRLKTQIQMLVKRYGLEKPSGSGAGWTIRYRRWLEALTESETLGGGARTALKSLLRQLSFIEDEVQRMEKPIQQLAEEPRHKPIIDELTREPGVGLMTAMVYRTEIGSAGRFGRGRHVGKFVGLTPTSHESGEQQDRKGHISRQGPPRLRKMLCQASWVHVRHDPEAKRFYQQLVLRNPRKKKIAIVAVMRRLAVRLWHRMRQAELRLSNLVPVN

SEQ ID NO: 146427 - protein, 317 aa, unidentified
MSEACFVGMDVSQDTVDVAVHPGTMFQVENNERGIGQAVERLQALHPTLIVLEATGGLEVPLAGALAAAGLPVVVINPRQVRDFARATGQLAKTDRLDAQILARFADAIRPPVRPVPDEQTQALAALVARRRQLIEMLTAEKNRLRLTARVLQKRVQAHITWLEDELERLTTDLTTLMKQSPMWREKEEVLRSVPGVGPVLTTTLLANLPELGSLTRKEVAALAGVAPFPRDSGTLKGRRVIWGGRAHVRAALYMAALVATRRNPVIRAFYQRLCQAGKAKKLALTACMRKLLTILNAMVKSKTPWRHAAELVAAEA

SEQ ID NO: 146428 - protein, 332 aa, unidentified
MQTVQQIFLGLDVSKDELVSAHPDKSAGSGWSKAKIINEVALIKKWLTEIGVADKHFVLEHTGNYSQRLIHCLDELGASFSVVNPAQSRAMAKVLMKTSKTDDQDAQTLSRLGQSLLTQPYQMPPKAQRMRKEAFNALCAMQKQERQIQNQLHALKYLVDPNGVVVEGYHSVLTVVRTQIKRLQAQLRPEVDQVQEKQLVERISSIKGVGKATAEAFVALFGDFSAFDSAKAFTKFIGLAPSEFSSGKSVRGRSSITKKGSAKIRALLFNCARSAMNYNTFCKALYQRIIAKGKNGKVALTAVMHKLARQIFGVVKSGVDFDPKFTIQKKCV

SEQ ID NO: 146429 - protein, 407 aa, unidentified
MEVVYRCCCGIDVHKKVIVACLVNGGEQELREFGTTTSEIKTLANWLTESGCEMIAMESTGVFWKPLYNLFELMDLDAMIVNAAHMKALPGRKTDVKDAEWIADLLRHGLLKASYIPNREQRELREITRYRKSLTEERCREVNRLQKILEGANIKLDSVVKDITGKSARKLLQRIIDDDIPDSDEVSKLVHGRMRPKLEQIVASIEGITTPLQRKLLAQIIDHIDDLNRRIGELDKLVQEYMAEYEAAIEAIDEIPGIARRSAEVILAEIGLDMGRFPSAAHLCSWAGVCPGNYQSAGRRKHGKTTKGNTALKTILTQCAKSAKTVKSSYFFAQYQRISARRGKNRATLAVAHSMLIAIYHILKNKTAFHDLGSDYYDSFNRDRKINSYLKRLKALGWEPDAISSSA

SEQ ID NO: 146430 - protein, 424 aa, unidentified
MSDRSCGHFGSQQGRQYVMTPKFVASWIYLYTMNWKHINGNRDYRIQIGGHYMNYNTVYVGMDVHKESFTLCSCKYEDEKASHYQRTQASYKNVLRYLEFLRTIYGDDTRFVCGYEAGCLGYSLYRQLESFNVECVILAPTTMLEQRSKRRIKTDKRDAEIIARSLAQHNYSPVHIPTETDNQTKEFIRMRDDHKAELKKIKQQILSFCLRQGYQYDGSGNWTEKHVKWLRSLKPVGLYKEILDEYLLTYTTLTDKLNRLDHRIEELASKEEYKESVSKLTCFLGIRTHTALSVIVEVGDFQRFASARKFAGYLGLVPGQHSSGDDRNGLGITKAGNTHVRRLLTESAQSYTRGKIGYKSRVLRLRQAGNSPQVINYADRANERLRRRYYKMVLKDGKKYNIAKTAVARELACFIWGMMTDNIY

SEQ ID NO: 146431 - protein, 337 aa, unidentified
MNYSGIDLHSNNSVVSVIDETDRVVAEKRLPNDLTRILAFLAPWQAELTGVVVESTYNWYWLVDGLQAAGFVVHLANTTAIKKYDGLKHSGDETDARYLAHLLRLGILPTGTILPAKHREVRDLARKRMQLVRSRTTHILAVENITARQCGTRITSNQVKQLDETAVDQLHLPDDVALAVRANVAVITTLSAQIAIVEKRLQEKVAPLADYALLTTVPGIGQTLATVIVLETGTIERFASAGNFASYARCVDSQRMSNGKKKGEGNTRNGNPYLCWAFIEAANFAMHFSAEARQFYERKKARTNPVIARKALAHKLARACFHMLKERKPFDVTRCFA

SEQ ID NO: 146432 - protein, 357 aa, unidentified
MAALSIADVPANVTVGVDTHKHSHIARAKDGLGRHLGQLEIETDPRGYARLLAWAQGFGPVVTFGIEGTSSYGAGLTRFLRAQGQAVIEVLRPVRRDRRFGGKSDPIDADAAAGAVLSGRATAVPKAGDAGVEMVRALKIAKQTAIKARTQAVNAVKGLYVMAPDPIREQLRNLKTPALVRTCSAYRVDGASDPTSAIKLSLRSMCRRYVVLDQEVRSLEKELDALTVRLVPQLRQLFGVGQDVAATLVLAAGDSGDRLRSEASFSMLCGASPIPASSGMVQRHRLNRGGDRQANAALHHIVIVRLRHDEATQAYFAKRKAEGKSKKEIFRCLKRYVAREVYRTLVGPREEVIHSAA

SEQ ID NO: 146433 - protein, 359 aa, unidentified
MFKIFRNNCCGLDVHKTWIYSCIGITDPNGRTEYKQARFSSFSKGLRELAAWLAKYSCTEVCMESTGKYWIPVFNILEKSCFVTLAHPKYTKPQKGNKTDRKDAKWICDLFMCDMIKPSFIPSPEIRQLRDLMRYRFKLTNMLTGEKNRAQNCLTVSNLKLDDVFSDVFGKSSRSITNYILDHPGKTFDVSPFVDPRCKTPVSEIQAAVDGAISPEQAVKLRQCLDHIDELEAHRKEIESEILRIAEPFSAVLDLLYTLPGLNKNPMTAIAILSEIGPDMSVFPSSKHLISWAGCCPRNDQSNQKVKSRRISRAGSYLKPLLVQVANALIKSKKHPEFKARYHRIKSRRGHKKLSLIHI

SEQ ID NO: 146434 - protein, 476 aa, unidentified
MKNQNIYRNNNYALKETLSNYKPEQLLYIPIEVGKFNHKASIVNFFGDIVVKLFEFPNKKHGLDFFVKKLNFATTSSNAQKIFLGCESCGHYHLNLVHHLKQLNFPIEIINPRDTRKENPNKNSKTDNIDLGAIARVLISNKGGRQIVPEGVYYNLQRAARTRRKFVQRKTSSKNIITGLLDRIFPGLWDKDAPIFSDRWGKASMLLLERYPHPHRIIRLGEQRLARFLRKNNTKLGDETAHKIIDAAKDSLTKPLSELHMDIFALKSHIKCLNLYNETIAQLEQEIACLLVQTPGIYLLSIDGISVIFAGEFTAEVGDINRFAYANQIISFAGSCSKVFESAEYQAQGLHISGRGSKFLRSTLNQVALALNAWCEPFHLYYTNKALQKPDKPGIARIATGNKFVKLAFALMKYEQLYKPRGLLLDEKNYYSNLWSKIIRKLSGFNLTNISQENNYLLKIKKYLEEKYALTLPTKL

SEQ ID NO: 146435 - protein, 330 aa, unidentified
MTATRVRHSTTPGRILYLALELGWNGWKLGFSTSPAQPVRQRSLRARDLAGLLKEIAAAKQRFGLPPETPVRSCYEAGRDGFWLHRYLTDRGIDNVVVDSASIEVNRRARRAKSDGLDAEKLVKMLMRYHGGDQKIWSVVRVPSVADEERRHLHRDLQEMKAERTRHNNRIKGLLAGVGLDVEVAADFPERLKELRTWDGAEAPGQLQQRLLREFERWRFVHLQILALDTERARRIRQGTGEQVQKVRDLLRLRAIGPSSAWLFVMEFFGWRRIRNRRELAALAGLTPTPYQSGNSDRQQGISKAGNRRVRTMAIEIAWFAGCVFSPKVT

SEQ ID NO: 146436 - protein, 403 aa, unidentified
MNRNAVGIDVSKGKSMAAILRPYGEIVSSPFEIKHTSGNIQSLIQQIKSIEGESRIVMEHTGHYYEPLARELSLAGLFVTAINPKLIKDFGDNSLRKVKSDKADAVKIARYTLDSWTELKQYSLMDEIRNQLKTMNRQFGFYMKHKTAMKNNLIGILDQTYPGVNTYFDSPAREDGSQKWVDFSTTYWHVDCVRKMSLNAFVDHYQKWCKRRKYNFSKDKAEEIYGAARELVPVLPKDDLTKLIVKQAVEQLNTASKTVEELRTLMNETAAKLPEYPVVMGMKGVGPSLGPQLTAEIGDVTRFTHKGAITAFAGVDPGVNESGTYEQKSVPTSKRGSSSLRKTLFQVMDCLIKTKPQDDPVYAFIDKKHAQGKPYYVYMTAGANKFLRIYSGRVKEYLMSLPE

SEQ ID NO: 146437 - protein, 535 aa, unidentified
MLSLRLFNANYFAGTVAADISLAVIHKRAKRPGTARRSELVNNCAAGENFAGERPAPARSQSQSPHPKRVIGRLLAEPEALAPTSHRKTPPEGRYISKMDGRAKRRKNHKEQKQTMNDSQQWQQHRAFGALDWASEKHSVVLVNQTGKVIEDFEIEHSALGWKKFREKLQPYGSIPFAIETSQGVAVEQLLEAGMLVYPLNPKSAQAYRERKAPSGVKDDRLDAWSFADALRMDGQNWKALRPEEPLIKELRLLCRDEVTLIEQRTAFVNQLRHALAEYYPAALEAFEDWTSLSAWMFLQRFATPESLAQAGKRQWQKFLHSRRLWGSDQGPRRMEIFAHATEFTGTPPTVKAKSLLAQSLVQMLFAIEKQLAVYRQRIEELFARHPDHDLFGSLPGAGPKIAPRLLSEIGDDRQRFGGDPQNLQCLAGSAPVTKRSGKQRKYWPVHQRWACDKHLRHALHLFSEQSLSRCAWAEIYYQHHRQKNQSHANALRRLSHRWLKIIYKMWIDRTPYNAELHHRNQLQHGSWIFQLQKS

SEQ ID NO: 146438 - protein, 322 aa, unidentified
MSVSVLGIDIAKQKFDAALIVDGKTKHKTCKNSAEGFETLMLWLEKQGIQKVHVCLEATGSYGEDLAIYLHEAGHIVSIVNPARIKGFAQSELIRTKTDKIDAALIARFCLAMKPGAWIPPSPEIRSLRALVRRVDSLIDMRSQEKNRLSTAHESVISLIKEHIAYLDQEIEKIRRQIADLIEQNPHLKRRKELLDSIPGIGKATIPHILAELDDLEKFTHVRQMVVFIGLAPKETLSGSSIKGKPRLCKIGHARLRKALYMPALVSIQCNPVMIAFYNRLKEKGKNGKVIVCAIMRKLVHVIFGVLKSGKKYDPNYKPASA

SEQ ID NO: 146439 - protein, 349 aa, unidentified
MMNLKYSIGIDVSKKDFHCCLSVIDSSQKVTVKSSRKLSNNPSGFKDFLSWIKQHQKEELPLRIVMEATGVYHEQLAWLLHSKGLVLSILLPNKAKKYLQADGSNSKNDSIDAKGLAKIGAEKNLEPWVPGSEKLYELRHYTRQHQNLRETINVMANQLEALKPAQFQSKEVIKQLNKTIKLLEQQVAEMEMAMEKLVKTDKVLNLHYENITAIKGINLLSFCVIVAETNGFTLFKNSASLVKYSGYDVIENQSGKHIGKTKISKKGNSRIRRILFMPAFCAVRDDQPQFKSLYERVFERTGFKMKGYVAVQKKLLVMMYHLWKNEQRYNPQFNYSEKNNSSRKIQSYT

SEQ ID NO: 146440 - protein, 385 aa, unidentified
MAQQVFKYSVGCDISKDTFNVCILEVFQDMTSRVRASHKFKNDTKGFNEFDLWVNRHKKHEVPISFTMEATGVYYENLAWYLYEQVSVVYVLLPYKTKHYLKSLGIKSKNDKIDAQGLSHMGAQQNHKPWRPYSKSIYTLRSLTRQHESVTKLKTRLENQLHANAHAAFKSALVKNQLKATLRLLEKQLDELEIEISKLIDKDEKLNKKYSDIDTVKGISKLSWATLIAETNGFETFENQRQLVSYSGYDVVENQSGKHVGKTKISKKGNSRIRRILFMPSLVSVRFKEPVLFNLYQRVYERTGIKMKGYVAVQKKLLVLIYHIWKNDKPFQRDYLKTFGEEESKSLFPVGFGETIKESSPNKRATQDEHSYELSPEVLFPVLQI

SEQ ID NO: 146441 - protein, 356 aa, unidentified
MSSNVKYIGLDVHKEAISIAVLNGAGKLVMESIIETKAVTLVQFLQGLRGELHVTLEEGAWAAWLYDVLKPRVHEVVVCNPRRNALLKEGSKSDRVDARKLAELLRAGLLRPVYHGEHGLRTLRELARSYQTISKDLRRVMNRLKALYRGWGIPCTGTQVYAPRYRERWLNKIAEAGVRRRAELFYQHLDGLQVLRRQVRAELLVESRKHKAVKLSRQIPCIGPIRAAQLLALMQTPHRFRSKRQLWTYSGLGVETHDSAQHCYVDGRLQRSKKPQQIRGLNQNHNHEMKEIFKSTAMSASRRAGPFGDVYAGLLAKGIKPEMARLTLARKIAAITLTLWKKGANFDAEYVKPQAA

SEQ ID NO: 146442 - protein, 419 aa, unidentified
MSFKIIRKNCCGLDVHKTWIYACIGIADSHDRVEYKQARFSSFTKGLNELCDWLAKYNCTDICMESTGKYWIPVFNILEKHNLWVTLSHPKYTKPQTGNKTDRKDAKWICDLYMCGMVKPSFIPPADIRQLRDLVRYRFKLTCMITGEKNRAHNCLTVSNLKLDDVFSDIFGKSSRSITEQILQHPGEFFDVTPFVDDRCKTPIEEIQAAVDGAISPEQAVKLRQCLEHIDELEKHKSEIEREIFRLSDKYEVALNLIRTVPGFDKNPLTAIQVLSEIGSDMSVFPTAKNLVSWAGCCPRNDKSDRKIKSTRISRAGTYFKPVLVQIANALIKSKKHPEFTNRYRRIKARRGHKKAIIAICRMILTAIWHILTDLKPYTPEGFLDSRPVNKEKVLTTSQALNLLKQRGYFIKDDPLSVS

SEQ ID NO: 146443 - protein, 384 aa, unidentified
MSKDSIIFIGLDTHKSFIQVAVLQEHRGANPQHLGRIKSNKSALIKLARQLQSKYPKATLHFVYEAGPCGYWTYRLITSLGHCCYVVAPSLIPKKPGDKVKTDKRDAAKLAKLLKAEELTPIYVPEAEDEAIRDLSRARETAMKDLKDAKFQLKGFLLRNNIQATVNDNWSKKHLRWLTDLILPHHSQQIVLQEMIITINERIQRLQRLDNELLHQVKNWRYYPVVKAIQAMRGVRLLVALGTIAELGDLRRFDHPRKLMAYLGLVPTENSSGGKTRRGSLTKCGNSRARRLLVEGAHTYKHKANISVELQLRQEGLPKEIVDIAWQAQQRLCRRYQRLLQKGKHRNVVVVAIAREMIAYIWAIAREVVISDVDPRTRIARLPA

SEQ ID NO: 146444 - protein, 301 aa, unidentified
MNSLKETSPVVHTGLDIAKATLQLDLLGRAHTLPNTAAGHRQLVKLLRAVPGAHVVCEATGGYERAVVTALQAGQIPVSVLNPALVRHFALAQGQRAKNDPLDAGVLTAYGAALRRVGQGRGLVQWRGQLQEQRNALRNHAEHATLDFVQKRLGKLEAHLEKQMEAVETEMAAALERAPQWQEPVAQLEALDGVGRLTALSVLSQMPELGQLNRGEAAALAGLAPWTRQSGPWEGQRHIGGGRAAVRRALYMSAVALARMKQSTLGKFYARLRAAGKPAKVALTAVMRKLLVQMNHELKLA

SEQ ID NO: 146445 - protein, 322 aa, unidentified
MSLPGPLCVGIDVSKATLDIAASSAIESFSVTNDTDGFDSIIAELRKYSVALVLMEATGGLEAAVACALQAEGFELTVVNPRQARDFARAMGYLAKTDRIDARVLAQMAEVINRHPERSRFIRALPDAERQVLNAMVVRRRQLIAMLVAERNRLYLAPPQSRKSINTIIKALEDELARIDDDMNNHIRSHFKELSERLSSIKGVGTMTVAALLAEVPELGRLSRREISALVGVAPVNRDSGTMRGRRTIFGGRAGVRTALYMAALVATRYNPVIKAFYTRLVAAGKPKKVALVACMRKLLTILNAMLRKNEEWNESYHHVAP

SEQ ID NO: 146446 - protein, 370 aa, unidentified
MKEPTTSYIGLDIHKESIAMAIADADRAAPRFIGTINPVPAELCKAMRRVCTKETTLVVYEAGPCGYGWVRYLRKQGWACDVIAPSRITRQPAEKRIKTDRRDAQLLARESRSGNLTSIVVPDERDEAIRDLVRAREDARIARQRVRLQMQAMMLRHGRHYQGKRSWSQAHDRHLSTIRFEHPAQTLAFSEYRLASKEACERVERITQALRVQCEDWRMNPVVKALMCLKGLDFVAAAAFVAEMGDLTRFAHPRALMAYLGLVPSQFSSGPNRRQGEITKSGNKHARRILVEAAWNNRFKAQVTRGLEVRQEGQPKVIRDISWKAQLRLSKRWRSLSMGRKLAQNKICVAIARELSGFIWDVARHVKVSP

SEQ ID NO: 146447 - protein, 329 aa, unidentified
MQSEVHVGIDVSKFTLDVFILEVGSHRRFKNDSNDFPTILQWIEKCTKRQSAFICFEHTGVYSMALAAFLESQHIVFAMVSPLEIKRSMGIVRGKNDVVDSKRIAEYASRFRDKIVVTKLPAKDITRLHFLLTLRDKTARTLSGYIMAVNEVQRGIGHEELPELFASYDAIITALKSEIKKIEAAIKHIINTNPDLKTSFKLVTSLKGVSLIVGTYMIVYTCNFTKFANWRKFACYCGIAPFGHQSGISVKGPAQVSPIANKQLKRLLHLAAVSAASHDPELREYYIRRQSEGKSKMSTLNIIRNKIVARAFAIVKRGTPYVNIRQYAA

SEQ ID NO: 146448 - protein, 418 aa, unidentified
MQTELSQFTAIIGIDWADRKHDVCIQAAASGQRQIYQVPHKVDKLDEWARSLYRQYGGPIAVALELSKGPVVSALQKYDFFVIFPIDPTTLANHRKTFTLSGAKDDPTDAEYALELLLKHTEHFKALNPQSVEMRTLMTLVEQRRRLMNDRVRLTNRLRNALKQYYPQALEWFDRIDTLLFCDFIKRWPSLAQARRARKATLEKFFHEHNMNRKALLERRLTAIKSAVPLTTDEAVIVPYRLQALTLVAQLEVALAAIRRYDDEIAALAPQHPDYGLFSELPGAGPSLAPRLLVAFGEQRDRFANAAELQKYAGIAPVTERSGQKHWIHWRWQCPTFLRQTFVEWAAQTINKSYWAGLYYYQQRAKGCSYQAAVRALAFKWIRILYRCWVTRTPYDEARYLKTLQERGSPLLKIAEAA

SEQ ID NO: 146449 - protein, 319 aa, unidentified
MLVGIDVAKAELVVGTRPTAERWTVANDERGVRTLVERLLRDQPELIVLEATGGYELLLVAALAAAALPVVVVNPRQVRDFARATGQLAKTDRIDADVLALFAERVRPEVRPLKDETAHELDALLARRRQLLDMLQAERNRLGQVFGKGHQRVKKSLKAHITYLERELRIADNDVAAMIRESPVWREQDALLQSVPGVGPVMSRTLLADLPELGRLSRREIAKLVGIAPLSRDSGTLGGRRFIQGGRASVRAVLYMAALVATKRNVVIRAFYQRLVAAGKPKKLALVACMRNLLTILNMMVRTQQPWRIQASTAALQLA

SEQ ID NO: 146450 - protein, 344 aa, unidentified
MRYFAGLDVSLDETAICVVDEDGIVVTEGKAASEPDDLVRWLVATGLTITRVGLEAGPLSPWLHTELRAAGLPAICIETRRMKGATAAMAVKTDRNDARAIAHAMRVGWFTVVHVKTAESQELRLLLNNRRTLLEKRVAIDNEIRGTLKAFGLKLGPVTVASFEARVLELLASRSRLLGMVKPMLSARTALRQQCDVLHRMVLKTVRANAVCRRLLSVPGVGPIVALTYATGVDDPARFAHARDLGPHFGLTPRKYASGEIDRNGCITKAGDGAVREALVQAALTLLTRVQRWSVLKAWGMAIAKRRGLRRAIVAVARKLAIVMHRIWVDGTTFTWSRETAASA

SEQ ID NO: 146451 - protein, 356 aa, unidentified
MVMVLGVDVHKDTHTVVAVDDVGRAHGERTIRATDDGHRQLLEWTRRQFPHDRVWAVEDCRHVSTRLERALLAAGETVVRVPPKLMAGARSSARTRGKSDPIDALAIARAALREPDLPMARHDDPSRTVKLLTDHRDDLVIEHTKMANRLRWHLHELNPELDIPARGLNRLNLLDRLTTWLSEQTWTEQISQVLARLAAELLTDIRAATVRVNALEREITTLARAAAPRLMDLQGAGGLTTAKIVGETANVTRFRSEACFAMHAGVAPIPASSGRTQRHRLARGGNRQLNAALHRIAITQVRITGSPGQLYYQRRRARGDTAMEALRALKRRLARVVFNLLQPTATSTANDLSAAA

SEQ ID NO: 146452 - protein, 346 aa, unidentified
MERYVGLDVSLKSTAICVVDAKGKIVREGAVITDPEEIAAFIALHAPDAVRIGLESGATSTWLWTELKQLGLPVICIDARHAKAALKMQINKSDRNDAIGIARIMQAGWYKEVRVKSLDSHAVKALLTSRALLVKIKRDIENQIRGLLKNFGLVIGRAKQNTFTLRAGDLLDGRPELTAAIEPLLQAREAVGRQIVDLDRKMRRLAKASDPVRRLMTAPGVGPITALCFLATIDDPTRFARSRSVGAYLGLTTRRYASGEIDWTGRISKCGDAMLRSYLYEAANVLLTRIAKWSALKAWGMRLAKRSSLRKAKVAVARKLAVILHRMWADGTDFTWSSREAAQQVV

SEQ ID NO: 146453 - protein, 343 aa, unidentified
MKLTRIGVDIAKQVFQLHGTDRSERTVWRRRLPRDRWLQALREVAEPGCEIGMEACGGAHHWARQLQALGYRVKLIAPQFVKPYVKSNKNDANDAEAICEAMSRPSMRFVAVKSVAQQDLQAIHRVRASLVEQRTAKGNQIRGLVAEYGLVAPKEMASLRHILPTWLEDADNGLSFCFRQLLDGLWRDLCVLDARIGEVDREITRIAHADPDAQRLQQLRGVGPMVATALLAAVGDARQFANGRQMAASLGLTPRQHSSGSKDRLLGISKRGDAYVRTLLVHGARSALRTAPAKDDRLSQWVVRLAQRAHPNVACVALANKTARLAWALLRHQCDYQPALAAA

SEQ ID NO: 146454 - protein, 297 aa, unidentified
MAIVGGFDVHRAQITFDYVDTDSGQVTAGQIRPATRPALRNWLQRFASRADVALAVEGCTGWRFVVEELVRAKVEPHLAEPADTATLRGRKKRAKTDRADARLLRELLAQQRLPESWAPPGHVLEVRTLGRLYVTLMDERRAWQQRIHAQLFHQGVPAVRALLTSDGRVALANAELSPAGVQMLQTALATVESLTLQIGPLRAQLQTIGCTQPAVEALTQQYGIGLLSGTIIWAELGDCRRFSNSDQAVRFAGLDVTVWSSDTKRSAGRLARQGSPELRWALFEAAKCAARHTSPDH

SEQ ID NO: 146455 - protein, 431 aa, unidentified
MKYKQAHKQNQRIQQITELTLVVGADIAKKTHVARAVDFRGIELGKDCVFGNDHSGLTKLVSWMKELQRQHAKTEIILGIEPTGHYWFPLAEFLHRENIKVVIVNPHHVNKSKELEDNSPTKNDYKDAKVIAGLVRNGKYSEPKLPTSVYADLRILMNLREKVMVNFGQVQRRIQNWLDRFFPEYNHAFKDWEGKASLITLSEFPTPQEIVSLGASAIVRRWKEDVKRAIGSKRAAQLLQAATNSIGLTEGLTAAKIELRTLLEQYELFSRQLEEIMVQVEALLAQISGTKEMLTVPGIGVVTLAGFLAEVGDLTGYDHGQQIIRLAGFNLKENSSGKKKGKSTISKRGRSRLRALLFRAVMPMVAKNAEFKALHQYLTKRSHNPLKKKQSIVALCGKLIRVLHTLGTKCIPYNASDVLGPVRQSQIQMAA

SEQ ID NO: 146456 - protein, 374 aa, unidentified
MSFHSNTILVALELSNSLWLVGIRLPGEEKSRMHRIKAGDAAALLRLLEGIRERRSTISGFPATVICCFEAGRDGFWLHRLLTAHDIPTHVVESTSILVSRRAKRAKTDRLDAEGLLRVLAAYLAGDTQICRMVRVPTPEEEDGKRVHREREYLVQERTRIENRILALLATQGIRRRPSLRTWAQDMAILKTGDGRMLPRHLAAELDRLRRRLVLTMELIRELDAERSDLLAATPNDALSNKIIALQRIRGIGENFSAVLVREVLYRPFANRKQLASYVGLAPMPHQSGNMDRDRRIGRAGNARARKTLVQMAWLWLRYQPESGLSIWFRERVGELQGRTRRIAIVAMARKLLIALWRFTETGEIPDDVTLGTA

SEQ ID NO: 146457 - protein, 412 aa, unidentified
MQVVYAGCAGLDVHKKTVSACISVCEAEGAKQQQMRVFGTFTNDLLALADWLQEHGVTHVAMEATGVYWRPVWAVLEGHFQQMLVNPQHIKVVPGRKTDTKDCEWIADLLQHGLLKGSFVPPTPIQDLRDLTRYRAELRQSQNRVANRIQKLLEQANLKLSSVASNALGVSGRHILEAIIAGQQNALQLAQMARGKLKTKIPQLEQALAGRVRNHHRFLLAEYLDEWEALGERIRRIEAEIGEQIRPFESAVTLWQTIPGVDRVTACNLVAEIGVDMNQFPTAQQLASWAALCPGNHESAGKRKSGQTRDGNKWLRRSLCQAAWAVTRKKNCYLSAQFKRLAARRGVKRAVMAVAHTMLIIGYHMLKTGQAYYELGGNYLEQINKDQLQRYFLKRLERLGLKVTIEPATAAV

SEQ ID NO: 146458 - protein, 388 aa, unidentified
MLHDHPCDGAVAIRTHFGAIFVSLELSRSNWLVTSLSPGQGEKLSKRSVMAGAIAELLQLFAELGRKAQTRTGQSYRIVTIHEAGLDGFWVHRVLQQEGIESHVVDPASIATPRRRRRAKTDRLDGETLLRALLAYKRGEPRVCAMVVAPSPEEEDRRRLCRERRTLIAERTTHVNRIKGLLFAQGICDYAPLRRDRRARLEALVTGDGRALPVHLKAQISRELDRLELLLDQIKAVEAEQDALLAAARQNAAEPAADPVTMLLALKGIGANFAAVLWSEAFYRQFTNRRQLAAYAGLAPTPWRSGSIEREQGVSKAGNPRLRTTMIQLAWLWLRHQDQSALARWFKAHNHRGRKSAIVALARKLLVALWKYVCAGVVIEGAKMKSAV

SEQ ID NO: 146459 - protein, 354 aa, unidentified
MKHTTKYVALDVHQEATAATVRDHKGRVIARSVLPTEEGTLLEFFRGMRGSIHVTFEEGTQAQWLHDLLTPVVDRVVVCDRRGERQQGNKSDRVDADQLSDLLRRGGLRAVYHGSPHRADLKELTRTYQNLVEDSMRVMQRLKALFRARAIRTPGKRVYDPAKRAEWLATLPHGGVRFRAEILYAELDVLRDLRPKAKVAMMAEARRDPAYTVLQTIPFFGPVRVALLLATLRTPLRFRSKRNLWGYAGLAVVTHTSSEFVVVGGRPVRRKRQPLTRGLNRNHNPIVKEVFKGAAVAASAKPGPLQDFYHGMLERGMDEALARVTLARKLAAVTLRLWKRGEHFDPQRLTVQAR

SEQ ID NO: 146460 - protein, 334 aa, unidentified
MGYETLIRRAHVMTRKNTLKSLPTDTDFRVVGLDLAKSDVSVAAIPVDDNTPSLVDRMTYADLLDWAGKISPTLFAMEPCNGYSLLCLQLENLGHEIKVISGWTVSMWINTHLSGQKTDLNDAIALARLAVSDAELTPIRHKSITEIRIQTVQAVRQQLMSQRSKSIVSFKALAQQWGIPCAAGHRNLKKLRESIKAKVDLITRPVANAMLFLLDAVKSLDRQIGQLNQTLQELVMSDERGRLLQSVLGVSTQISARVITVVGNVERFNSPRSLVAYVGVAPRNFITGHKNLTKKKHGNCPDLSHKGQGKISRRGDKLLRSLFIQGAACLFLLY

SEQ ID NO: 146461 - protein, 342 aa, unidentified
MKLFIGLDVSLAKTAVCVVSEHGRIVKEAETESDPEALAHWLDELDGSIAAIGLEAGPLSQWLHRGLTEAGLEAVLMETRQVKGALKAMPIKTDRRDAEGIARLLHLGWFRPVHCKSVSAQETRAVLGARKAIQQNMIALEMSLRGLLRNFGLKVGAISRGRFETRIRELADGNPMLETATAPMLRARATLRQELAALEKQVRQLAQDDPVCHRLMTMPGIGAVVALTFRAAVDDPTRFRSSKRVGPWVGLTPSRNQSGERDLSGGITKAGDVNLRRALCQAATVMMNRGRSTWLRTWGAQLAQRRGRKIAMVALARRIAVILHRIWVDGTTFQSDAAPNPA

SEQ ID NO: 146462 - protein, 346 aa, unidentified
MTIVEGSRRVTGGVDTHLDVHVAAALDDIGGLLGVEPFAASPAGYGQLLEWMNSFGIPARVGVEGTGAYGAGLARYLRAAGVEVIEVDRPNRQARRHHGKSDPADAVEAARAAQSGRVQAVAKSRDGNVEAIRTLVVAKRSARQARIKALNQIRHLSFTGPDELRARLAGLATARLAEEAAALRPRPGAGVVAYATKVALRTLGRRVLALDEELAALDGLLGGLVAAAAPQLLAVHGVGVDTAAALLVTAGDNPERLRSEAAWAHLCGVAPLQASSGKVTRHRLDRGGDRQANQALWRIVMVRMSTDDRTRAYVERRTKDGRSKREIIRVLKRYVAREVYRLLSRP

SEQ ID NO: 146463 - protein, 312 aa, unidentified
MDEAGVTVGIDVSKDRLDVCVLPQGEAFAVPRDGEGLLALTERLAGLRPKLVAVEATGGFEQTVAAAIAGAGLPLVIVNPAQVRAFAQAIGRRAKTDRVDAEVIARFVEAVRPEVRPLPSAAEQLLADLITRRRQIVQMIGAEKQRQKRQAQPRLQRSIARLVAALQKELTEIDRQIDDEIRGSPAWRATEDLLRSMPGVGPIVSRTLLAELPELGRLDRRQIAALAGLAPWTRQSGKWKGKSFIGGGRASVRTALFMAALVASRHNPQLKAFHQRLIAAGKPKLVALTATARKLLTILNTMVKTQTPWRTA

SEQ ID NO: 146464 - protein, 344 aa, unidentified
MNIHVVGIDLGKTVFHLVGMDAEGNITLRKRMSRSQVLAYLVNVPACTVAMEASCGAHFLGRQLRGYGHQVRLIPAQFVRTFVKSQKNDYVDAEAIAEAAQRPTMRFVPIKTEDQLDLQALHRQRDRLIERRTALINQLRAFLLERGITIRTGRLQLRRELASMQAVLDERLSPRMGRMFKRTMEEWKALEKDIEEVDAEIQAIAQADEGCRRLLTVPGIGPIVATAMVAAIGNGSAFQKGREFATWMGLVPQQWSTGGKPKLLGISKRGNEYLRRLFIHGARSVVSRVKRERLPFGSWITSLQARSHHNVLCVAVANKLARIAWTVLNRQTEFAPAVVTGTPA

SEQ ID NO: 146465 - protein, 339 aa, unidentified
MGQIIRVGLDTSKQVFQVHGVEADEAVVMRRRLRRRDVVEFFRRLPPALIGIEACGGSHHWARVLGSLGHEVRLIPPQYVKPYVKRGKNDMADAAAICEAVSRPHMRFVPMKTPEEQAVQMLVMVREQLVRGRTRLSNAIRGYAAEFGLVSPKGARHVEPLLARVAADETLPALARELFAVLAKECAALGERIREVDARLQAWHRQDERSRRLTGIPGVGPVGAVLLSSKTPNPHLFRSGRQFAAWLGLTPRDHSTAGRTRLGVITRAGDERLRSTLVLGATAVIRQVRQGKAKPSPWLRDLLQRKTPKQAAVALANKTARVAWKLMVSGETYRPGAAA

SEQ ID NO: 146466 - protein, 347 aa, unidentified
MRFYTKQHRYYCGIDLHARSMYVCILDPQGEILLHKNMPCTPELFLKAIAPYREDIAVAVECIFTWYWLADLCSKENIPFVLGHALYMKAIHGGKAKNDKIDAHKIAVLLRGGMLPMAYVYPPEMRATRDLLRRRMHLMRKRSELLAHIQNTNSQYCLPQFGKKIAYKTNRQGVAEQFSDLSVRKSIEMDLSLIDHYDKLLTEVELYITQTAKVNDVNVFYRLRSVHGIGKILALVILYEIHDIERFPTVQDFVSYARLVKCAKESAGKRHGTSGKKIGNVHLKWAFSEASVLFLRGNPAGQKYVDKLTAKHGKAKALSILAHKLGRAVYYMLKREKAFDMNQFFSS

SEQ ID NO: 146467 - protein, 339 aa, unidentified
MFYSGIDQHKRDSFITTYDDSGPIVNQERVPNTPLRVQRYFAQFPGPHKAVVESTGSWYWLADLLRDLNVELSLAHATRLKAISAAKVKTDKVDSDILALLLRADLIPEAHMICPAQRAPRDLMRTRLRLVEKGASCKNSIARLLEKFNVRSVYELDDLYRLQAHCHEAQIVLVHEQIHTLESTLHHYLIPNPHVQRMLWIPGIGKVNAFSIYTEIDGIDRFPTAKQFFSYCRLVPGAANSAGRTKHRSGSKAGNRYLKIAFSHAAIRAVQYYPEIRAFFKAKARRKPIKIARTLVALEIARIVYQVLKTGNNFNQRFKNKPLSRTKQSQWPRLASPPA

SEQ ID NO: 146468 - protein, 440 aa, unidentified
MPVRKREDEVFPNAAGIDVGASSHWVAVPAHLTDDAVREFGPMTTDLNALADWLLACGVDTVALESTGVYWIPVYEVLEQRGLKVWLVDARQMKYVPGRKSDVQDCQWLQKLMSLGLLRAAWRPDTEVCVVRAVARQREVLLTSQASWVQRMQKVLVQMNIQLTEVLSDVMGMTGQAIIRAIVAGERNPSALARHRNCRVKASQEDLIKALTGNWREEHLFVLAQALAMYDDIGRLLAECDAKLQALLAQRSRASVDLGKTPKAGSKTRSAFDVRKALADWAGVDLTRINGLEVTSVMKILAELGPDLSRFANVKHFCSWLGLCPATKISGGKVLSGNTKRSANRVRQALKMAAMSLSRSQSALGAFYRRLCARMDKPRANTATAHKLARMVYFMLTRGEAFVDQGQQRYAEQQRQRSIAALKRRATALGFQINPLGATA

SEQ ID NO: 146469 - protein, 408 aa, unidentified
MSVNGLPGECFDGGLIVAIDPGKAMHRVWVTDRAGMVGEPVSLPNSRIGIERLEALVGEASATFAVEATGALHRAWAAELERRRPGALRLFAPSQTHAARAQLGTRRFKTDDRDCAALVWLARQGAGRPARSSGVEAMLAAVSHRRQLVLALTPLRQRLHDQLNALAPGLSAPAGHGRALLLSTPTGHAVLACAAAFAGRPPSPQSLQARANGRLTAATAALWAGRWRQCLAPPPDAELRAARLARDLDRFQALRADIAFVDGQLEHLLAASAGQILTTLPGVATARAAALTAYTLPIERFPTPEHLYSATGLAPASYESASVRRRSAIARTGLPEHRDALMGIAWGLGQFAPAFQRRRRELNQRGKTGIQARVALARHACRLCWRMLDTQQPYDDRRYDRARRDRGR

SEQ ID NO: 146470 - protein, 457 aa, unidentified
MMETKRRREQRSMLPVHPDAAAIDIGATVHVAAVGPARDPEPVRSFGTFTGDLHRLADWFAQCGIKTVVMESTGVYWIPIYEILEQRGFEVRVVNARDAKHVPGRKTDVSDAAWLQRLHEFGLLRGSFRPQGAIAALRAYLRQRERLLDYAAAHIQHMQKALTQMNLQIHHVISDITGATGMRIIRAIVAGERDPDTLASYRDIRCHSSAETVRQALIGNYREEHLFALAQAVELYEVYQAKVATCDEKIEGVLERLKQPGRAPAKPLRAARHKTRQPNAPAFDARGALYAVLGVDLTQIHGLGPYLALKLISECGTDLSAWPSAKHFTSWLSLAPGNKISGGKILSSRTRPSGNRAAALLRLAATTVGRTETALGAFYRRLSARIGKAKAVTATARKIAVLFYNAVRHGMDYADPGASYYEERYRQRVLTNLQRRAKALGYVLQPTEIKVVSMAVS

SEQ ID NO: 146471 - protein, 338 aa, unidentified
MQVTTIGLDIAKSVFQVHGVDDRGRVALARRLARGKVLAFFANLPRCRIGLEACGGAHHWARELRALGHDARLMPPQYVRAYVKTNKHDAADAEACCEAVQRPGMRFVPVKSEEQQATLMLHRVRDQLIGQRTATINALRGHLAELGIVAARRQVGLRELLAALGEVEDHRIPPLAREVLQTLVAHLRELADRVAELDRRLVAMTRSDPICRALCEAPGVGPVIATAVIATVPDATTFRSGRHLAAWLGLVPRQHSTGGKPRQLGLSKRGDGYLRRQLIHGARALVKVSPGRTGQLWSWINGLRQRRPFNVVVAAVANKLARIIWAMLSRGEAYRPAA

SEQ ID NO: 146472 - protein, 343 aa, unidentified
MNLSRVGVDLAKNVYQLHGVDRHGKTIWKRRLRRAQWLQALLDNTDPGCEIGMEACTGAHHWARELQSRGYTVRLIAPQFVKPYVKSNKNDANDAEAICEAMSRPHMRFVTVKSVDQQDIQATHRVRTELKDHRNAKANQIRGLVAEYGLVAPQTLLALRRAIPEWLEDADNDLTDYFRSLLHGLWNDLLTLEDRLKELDKTIETLARNNEVTKRLQQLRGVGPIVATALVATVGTGEQFKNGRQMAASLGLTPRQSSSGDKRRLLGISKRGDVYMRTQLIHGARAVVSQAKNRDDPLSRWATDIAKRRHPNVAAVALANKTARMAWAMLQNETDYDPNLAVG

SEQ ID NO: 146473 - protein, 484 aa, unidentified
MAEHSMAYVAFDTSKLHNAVAIAESGRAGEVRYLGEFENAPAATAKLVRKLAAKHGALSCCYEAGPTGYGLYRQIKQLGHDCIVVAPSLVPRKPGKRVKTNRLDALSLAQQLRAGELTAVWVPDERHEAVRELTRARGASVVDWRAKCQQVSSMLLRLGRHYPGKTTWGKAHMAWLAGQKLEHLEQRIALEERLVAVRQAKERIERLERAIREAVPAWSLAPLVTALMALRGVDFIAATTLLAEIGDLSRFRTPRELMAWLGLVPSEHSTGEDTRRGPITKAGNRRARQILIECAWSYRHPPRIGAAKLSKVEAAPAAVRDIAWKAQTRLTGRYRSLCRAGKPDVVAITAVARELAGFIWAIARALDAGTAVADAKATVADNGSGGTRSASSRSAISSRNAIQGKPAHGTQATGRARTERRRTPGTLPDTAEPAVAGDTADAPPPADTATPRQPGAALARGGRRDRRLAGGVRRVAASPAGGNP

SEQ ID NO: 146474 - protein, 453 aa, unidentified
MARKIRKLKMKKIQPLHTLQPNAAGIDVGATEIFVSVPQDRDVEHVRCFTTFTDDLHKAARWLKKCEIKSVAMESTGVYWIPVFQILDAHGFDVMLVNAHHVKNVPGRKTDVEDCQWIQYLHSVGLLRGSFRPGQDICSVRSLLRHRGNLIKIASTHVQHMQKSLTQMNVQIHNVISDITGVTGLTIMDAIVDGQRNLNKLANLKDPRIKASKDTIKKSLKGDYRPEHIFTLKQALQSYRHYRQMIYECDIEIEKHLKDLESRIEPDQPARPPGDIKPRGNAPNFDLKHHMHRLLGTDLTLVDGIDVGTAHTIFTEVGPDLSCFPTPAHFCSWLGLCPNNKISGGKILSSKTKPGSNRVAQVLRMASISLLRSRSYLGEFYRRMRAKSGAPKAITATAHKLARIVYHLIKYQKAFDQSVFNKEQEMHKIRMEKNLRKQAKYLGYQVVPAETMS

SEQ ID NO: 146475 - protein, 333 aa, unidentified
MVDGTEGSHNKEGSTKMSKHSTICAGIDTGKRRLDVALDGSGEQLQVDNTPEGHAALSDWLRQHRTKRVGIEASGGYEWAVVAALRRQGFVVIVFQPAQVRAYAMFHLQRAKNDKIDAALIAACTAATKKIHSPPDPRLAAFAEPLTMIEQITDDTTRLKNRCESCRDPRIRQLWKEEIARLKKLHRVELKTLVAAIRQHRDLAERLALIHSVDGIGLPTAVAILVRMPEIGRITREQAAALAGLAPYDQDSGDYVGVRHIAGGRERLRGALYAAALPAAFRWNPQLIALYRRLTAAGKLHKVALVACARKLLVFANTVVARGTPWVPQPAAV

SEQ ID NO: 146476 - protein, 421 aa, unidentified
MYNTRVKHQKRSFVNDKALISTVDIAKDELMVYIRCPFGEEVKPFNVTNNYQGLKEYWAMIMLYQKRYHLPDIIVGFESTGIYSEPLKNFMMDKAVKLVQINPMHTKKMKDITDNSPGQTDRKDTRVIADIIQLGHYLSLIVPEGAAAQLRELAHARENQMVHQTRLINQLEALIFKIFPEFVQIIKNLSTKTAQYLMSKYPTPQRLKGVSLEQLTSEIKMVSRGQLGKDLAQRIYQASRESLGTKEAQESILLEVNYLLGQLIQTAQFIKVLEKKMATALDQIPYAGNLLSIKGIGVVLLGGVIGEVGDFRRYRRQSDLVKLAGLDLYEMSSGKYHGLRRISKRGRWFLRKLLFYGALNTVRTGGILRDYYQGLIGRGMKKIKALIAVSRKLLRIMFALVRDNTHYHQKEEQINSIKVPA

SEQ ID NO: 146477 - protein, 403 aa, unidentified
MISVGIDVSKGKSTVIIMKPCGKNLTKAFEVRHIKKDLEQLSSMISELKGEVKIVLEATGIYHLPILQYLNEKGFFVAVINPLEMKKYKSQRLRPIKTDKQDAKTIANYGLDNWYHLKNYVIGEDIYKELKLLGRQYAHYMRLHISNVQELTHLLDYTMPGLKKLLKGWDKESGKNKLADFVEKYWHFANITKLSEEKFVEQYNKWAKEKGYHQSQEKARIIYNLAKEGIPTISRNQASIKMLIMEAIRVMREVDHTLYKILTQMKELAKSLPEYEVVRAMGGVGDNLATKLIAEIGDVRRFHAGKALIAYAGIDAPPYQSGQFTGNKRKISKKGSSLLRKIGYEVMQSLKSHKVPKDDCVYNYILKKESEGKAKKSAKIAGLNKFLRIYYARVQEVYSTLTA

SEQ ID NO: 146478 - protein, 535 aa, unidentified
MLSLRLFNANYFAGTVAADISLAVIHKRAKRPGTARRSELVNNCAAGENFAGERPAPARSQSQSPHPKRVIGRLLAEPEALAPTSHRKRPQEGHYISSMDGRAKRRKSQKQQQKTMNDSKQWQQHRAFGALDWASEKHSVIVVDQTGKVIEDFEIEHSALGWKKFREKLQPYGSIPFAIETSQGVAVEQLLEAGMLVYPLNPKSAQAYRERKAPSGVKDDWLDAWSFADALRVDGQDWKALRPEEPLIKELRLLCRDEVSLIEQRTAFVNQLRHALAEYYPAALEAFEDWTSVSAWMFLQRFPTPELLAHGGKRQWQKFLHSRRLWGSDQGPRRMEIFAHATEFAGTAPTVKAKSLLALSLVQMLFAIEKQLALYRQRIEELFARHPDHDLFGSLPGAGPKIAPRLLSEIGDDRQRFGGDPQNLQCLAGSAPVTKRSGKQRKYWHVHHRWACDKHLRHAIHLFAEQSLSRCVWAEIYYQHHRQKNQSHANALRRLAHRWLKIIYKMWTDRTPYNAELHHRNQLQHGSWIFQLQKS

SEQ ID NO: 146479 - protein, 376 aa, unidentified
MEHDSTVYVGLDVHKESITVAYAVGMGEAELLGKIGTTKTDIDHLCKRLQSKARHVHVVYEAGPSGYGLYRDLTHEGFECMVCAPSLIPKKPGERVKTDRRDALKLVRSLRAGDLSAVHVPDVEDEAFRDLARAWAAAKADLRQAHQRLKSFLLAHGVRYTGNANWGPAHRRWVSTFAFPNHWQQLAFDECRRTIEDRLAQCDRLEAILHEAVVDWRFYPAVLALQAMRGVQFITAVGMLSELGDLSRFEHPRQLMAWLGVTPSEHSSGDRRRQGSITKTGNSYARKLLVEAAWSYRYPARVSPDIQRRHEGIPKPIIDRAWDAQLRLCRRYRKLAARGKNVNIVVVAVSRELAGFIWDISRLAMSLAIPRHAQAA

SEQ ID NO: 146480 - protein, 483 aa, unidentified
MAKKSAKRKQKKLLNQVCHPNAGGIDIGSREIMAAVGADKSDDPVRAFSTHNQGLREAVAWLKECGIETVAFEATGNYWVCLYDFLQTAGIAPWLVNARHVKGVPGRKTDVQDAQWLQQLHTAGLVRRSFVPDQEVLSLRYLQRHRDDLVRGGGREIQHMQKVFNEMNVQLHHVISDIDGWSGQRIIKAIIEGERDPETLADLRHSSCKTPRGEVILALDGNYRDEYILVLKQCYHRWQQAHQQITEVDRQIGQMLSQFERDEPCDSEKQDDESEKLGRIYIVKPASEAEDKSEAALPIMATRNQSKKREPVYDIQSEAARIYGTDLTLIPGVSSGVLSALLTEIGGRNAFIKKFKSGHHLASWLGLCPDNRISGNKNLGSKTRKVKSRLAYQLRMGAMTLWRSESELGQYSRRMKSKLGKPEGITATAHKMIRIIYKLIATATTYEDKIAGNMSESRKQRRIKGLQKAAERLGFQLIEAQPV

SEQ ID NO: 146481 - protein, 373 aa, unidentified
MKTTITHVAMDTHKKQHQVAWVHPVTGEIQEFGVPNTVRDIERMVKKIRKQATGEIHICYEAGLCGFVLQRRLEKLGCVAQVIAPSLVWRKPGDRVKTDRRDAKKLLTQFLAGQLTEVWVPDPEQEADRELTRCRESSQRDLKQARQRLNSLVVRHGYIYQEGNLWTDRHHRWLKSLTIEPARLRTVFDEYRSEIEHCVQRLESLDQQVQSLAQSERYRSAVGVLRCLRGIDTLTAITLLTEIFEFGRFDSPRALMAYLGVTPSEDSSGERRRPGAITKTGNRRVRRILTEAAWHYRHPYAVGKALKLRRKDQPAWAVDLADRAAKRLYRRYRHLTERGKAAPVAIIAVVRELAGFVWAMLRPLQQQTQSSSP

SEQ ID NO: 146482 - protein, 431 aa, unidentified
MTNRNPIPDDAVLVAIDIAKHKNAVLVERPGSPRRRILTVINSRAEHDRLIDELTGYGCKIVCGFEATGNYHRPLGWRWSEAGFDVRLVSSLALARTREALHGGWDKNDPKDAQVILHMLKIGAAQAFHDPLRAGINDIQELSKTHEAISRAKTEIQHRILTHYLPLYFPEVDRFKGNSRSEWFFAFLDRFPTPGAIVALSKEQFIDAAWDVVGRKVSKERLLSDVYETARTSIGLPLPLDSSAITMFRMVLTEARSLIQQRDKIEAMAHTLLKDNADYKALRTIPGIGPIIALTIIAEAGDLRRFRHHRQFLKFCGLDLATQQSGLYRGMTRLSKFGNARLRRSFWQAAQVAIVQRENGFRDKFERYVAKDHHNADLRRKAMTAITAKMARVAHAVIKSGSDYRPFFGGRVPGGRTSSGTGREGIPKMTL

SEQ ID NO: 146483 - protein, 353 aa, unidentified
MENMHFVGLDVHKKIIAFCVKQVDGKIISQGTIDANRRALGRWVKTLTFPWEGALEATIFTGWIYDFLKDHALAIKVAHPPMLEAITVAKKKNDISDAEKLADLLRCNLLPECYIQPKEVRELRRVLRYRTLIMRQIIRMKNKISGLLMEEGIEYEGRKLHTKRYFFNLLEQIEISEELSQILKMSRECLEFLKSIEKELVAGLKVHPEIQERLKRLRTIPGVGQITALTWILEIGDVHRFPNIKKAVSYCGLCSGQKESGGKQYRGPISKKRNKHLQTVLIEAAKFAPLWNKQLAEVYEREKKKGHKNRATLAVARKLVAYLLAVDKSGRPFEMKNTGKCSASVEIGQTGYL

SEQ ID NO: 146484 - protein, 340 aa, unidentified
MTQSNTITIDLAKTVFQVAFFNKFGVLKSNEKMTELKMLSFIVNHPEALICMEACSSAHYYGRKFEGQGHKVKLLPPHIVAKYRAGNKNDANDALAIYEALKRPNIYSVAVKSISQQDLASLLKLRKGYIKQRTQVSNRARGLGAEYGVKLPEGITSLKKRLPDILEDDGNQLTPASRFILADLLEEVHRLDSKIKHATAQLVELAKSTSECELLTSLPGVQWITASALYARLGNGSEYKYGRNASASVGLVPSHSGSGGKNKLHGITKRGDKYLRSLITHGARAVVSNIRDKQDKLSCWIRALSSKHHFNKITIAVANKLVRMALAMLKSATPYRADLA

SEQ ID NO: 146485 - protein, 416 aa, unidentified
MIAVGIDISKAKSTVAVIDSDGTVLASPFTMAHTQPEMEAFVTYLKGLGEPTTILMEYTGHYHYPVLKKLQDEGFPVCIVNPYQMKKYGDVEIHKAKTDKKDALRIAAYALEKSYKLVPYSSMEQKYEDLKFLSRQYSQRITYVAKLKVQLIALLDQTMPGITRILPLNSRNPEKCALLLFIKRFKSFDEIQRIGKARFLASYDVLAKKASERSASSKGLSIYELAVDSITTRGEDPYIWLSQNQCVDLLSATQNAADEIISQMRNIAETIPEYKVLRAMHGVGDRLGPIILAEIGDVRRFHSGKALNSYAGNDAPPYQSGQFESRNRHISKRGSSALRKACYEVMQALKLIKPQDDPVYLFMLKKRARREAFQRSQDGWREQVSPDLLRQSNGALQVNRFDSTSFFQSPQSGGFV

SEQ ID NO: 146486 - protein, 406 aa, unidentified
MADQKHVWSLQEANSSTRLRGELDHMPEAVETWVAQMSQRFAGRPIAVAVEQSRGALVFLLSKYEQLHMFPVPPAMTANLRKAFYSSGAKNDPSDADLLLDLLQRHREKMRRLSPDTEATRRIQNLVEERRKLVDEKTAQSNRLEAHLKIYYPQIPRWFGDVDSPLVCALLERWPTLEALQKARPDTLRSFFRKQHSRKEELIENRIKAIGEAMPALKDRAVVEAKVAVVKVSVQLIQVLHEGIEGLNRQIQEAAEAHPDFFIFDSLPGAGAVMAPRLLAAFGSQRERYQDAAEVQILSGIAPVSESSGKSSWVHFRFACSKFLRQSFHEWAALSIPPSQWARAYYELQCRRGKKHHAAVRALAFKWIRIIYRCWKEQVAYNENVYLAALAKHNSPLVAATKAVAL

SEQ ID NO: 146487 - protein, 351 aa, unidentified
MAAVMIGIDPHKGSHTAVAIGAAEEPLGEVRVRSSAAQAGRLVAWAAPWPERTWAVEGAGGLGYLLAQQLVAAGERVLDVQPKLGARVRLLATGATNKNDPNDARSVAIAALRSPARREVTAENHAAVRKVWSKRHRDLGRTRTRVACRLHALLCDLVPGGISTEITAAQATIFLKQIEPSEAVALARCELAAEFPGDLRRIDAQMRDTKKRIAVAVRASGTTVTEIFGFGPVIAATMIGYVAGVSRFPSRDRFAAYNGTAPIEVSSGDRKIYRLPRRGNRRLNHAIHMAAVTQIRHRHSQGRAYYDRKIAEGKTPKEALRCLIGGLSVVRPARVVVPRSCRGMATLPCRL

SEQ ID NO: 146488 - protein, 342 aa, unidentified
MSEIITVGLDLAKNVFQAHGADTTGKAVLRKKLRRHQVLEFFGRLPSCVVAMEACGGAHFWGREIGKLGHDVRLIPPAYVKPFVKRQKNDAADAEAICEAALRPTMRFVPVKSEETQGAAMVFRVRELLIRQRTQAINALRGHLNEFGQIVPQGAANAAKLIAIVEDPECDLPADAIPTLKVLVATLAQLEAEIGKLDTEIARRAKENDVARRLMTVPGIGPLIATAIATLAPPPETFRKARDFAAWLGLVPRQHSTGGKQRLGATTKMGERSLRRLLIIGANSVIIKRHVHASARPGTWLGGMLSRKPPMLVRVALANKMARIVWALMARGGVYQSPATAA

SEQ ID NO: 146489 - protein, 359 aa, unidentified
METQINKLDFTGQNIYAGFDVHLKSWRVTIMTDYLTHKTFTQPPSPDVLHQYMKKNFPGGTYHSAYEAGFCGYWIHNKLKSLGINSMVVNPADIPTTDKERDRKDDTRDSRKIARSLRNNELTPIYVPSLKTLEDRTLVRTRSMLVGDVTRYKSRIKSFLYFHGIDIPECFANKKSCWSKCFIDWLENIEMEEKSGKEALNQHIVTLKNLRVSLLQTTRTIRELSKTEFYKEKMDLLISVPGVGFITAITILTELEDINRFGNIDSLCGFIGLVPSKHSTGEKDRTGDITKRGHNILRHALIESAWVAARLDPALMKSYISYCNRMEPNKAIIRIAKKLLSRISYVLKNKQQYECAIVK

SEQ ID NO: 146490 - protein, 443 aa, unidentified
MNEKLRFLGLDVHAETIAVAVAEPNGEVRSLGMIANREDSIRKFIRKLGSPEHLRACYEAGPTGFVLYWQLTQLGVKCDVVAPSLVPKKPGDRVKTDRRDALKLARSHRSDDLTAVWVPDEGSEALRDLVRAREAAKQDQLRAKHRLTKFLLRTGQRPPLGVKAWTEKYVEWVQQVRYTHPAQEATLLDCLNEVQHMEERVKRLEQSIVEVIQLAPAPMQEVVRGLQALRGIAHISAVTIAVELGNITSRFESARDLMGYSGAFPSEDSTGKRIRRGGITKSGNAHLRRIVVESAWSYRHRPAIGARLRRRQEGLPAEMPSGSRPKRPASNKWRHEGNRKNKSKDFPNKEKAKTNQPMNNVIQIEDRVSRSRSKHEGESSASLCDRLSRTREISQRQLPTDHDYAVPTREYQLDQSSPLPATAVADPVLEKTNTKTTPTIRRC

SEQ ID NO: 146491 - protein, 334 aa, unidentified
MLYAGIDIHKAVFQAAVFDPDSGELRECRFEPSRERLNDWAIEWRGKLAAVAIEATTGWRWVARELQAHGFEVRLVDPGRASALRGRRRQPKTDRLDARWLALLLARELLSECEAWLPPAEIQRLRDRTRLRKALAGERTGWAQRLHALLAHEGWPCSRGRLLTGEGQRWVAALELDPHVRGQVDVIVAVMAALEQQLEVVESELRRFARADRRCQALQTIFGVGPILACHLLAEIGDVTRFQRPRQLVRASGLDPSVIESADSKRRGRLAKQGSRHLRWALVEAANHSHRSTSPDHELYRNTVRRCGRGRARLTVARKIARRSYHVLLAAEAA

SEQ ID NO: 146492 - protein, 416 aa, unidentified
MNDEPISSPIERYIAIDAHKQYVMVGGMNARQEMVLPTRRVEMENYPKWARANLRPGDAVVIEATTNTWALYDVTLPYVSKVVVAHPLEVKQIANARVKTDKHDVNCLARLLVADLVPEVWVPPMEVRQLRTLIAHRQRLVKMRTMTHNRLHSVVHRNNLVPPEGGFFADKNRSWWESLSLLPVEKLQTCQNLAMLDCLESLIAEVNQELARLSTTEPWSEYAPYLLQLPGFGLINAMTVLSAIGDINRFPTSKKLVGYAGLGGSVHDSGQLHYTGPITKQGRKELRWALVEAAWVAVEHHPFWKQEFHKLNHRMKTNKAIVVIAHRLLVAIWHIMSERVADRKADPEMVAFKLMKWSWQLNDWQRGGLSTRQFVRYQLMHLKLGENLSRIKRAHQISIAPVEEILALKPELRPIE

SEQ ID NO: 146493 - protein, 407 aa, unidentified
MELVALYKRVIGLDVHQAQITACALIEEVDGSVHVEQRQFGAFKRDRRELATWAASLRADEVVMESTGIYWKSPYAALEAVGIRAKVVNARHVKNVPGRKTDVGDAHWLATLARAGLLRGSFVPPAKLRELRLIARQRQKLVGQLASEKNRLHKVLTDSGVRLGVVVSDLHGQSARAMVKAIIADKPPHEVLQLASRRLKASREELFDALQGDVTASHRFVLDELMRHIEEIEARIARFDSRLLGELQTERNTLALLQTLPGVDLIGAAMLLVEIGTDMDVFGSADRLASWVGICPGNNESAGKRKSGRVRKGNLYVRRLLCEFAHAASRTQSVFKSKFQSLIVRRGHKRSIVAIGHKILRTIFFMLKRREHYRDSATDYEALSVQRNAPRWIKALTKFGFIPSAAT

SEQ ID NO: 146494 - protein, 410 aa, unidentified
MRLFAGDDWAQDHHDVELVDAAGRVLVKQRLPEGVAGMARLHELIGLQLGEDADAEVVIGIESDHGPWAGALVAAGYTVFAVNPLQASRYRERHGVSGAKSDAGDAHMLADMVRTDFRQLRAVAGDSADAEGIKVLARTHKTLIWERTRQTQRLRHQLLEYFPAALEAFDDLDAPDTLELLGKAPDPARAAKLTRAQVSAALKRARRRNIPDKATAVLAALRTRQLGQPPAVTAAYAVTVRSLIALITVLNEQVKTLQSQVEADFGRHPDAEIYRSQPGMGAILGARVLGEFGDDPHRYADGKSRRNYAATSPVTRASGKKKVVAARFVHNDRLVDALNAQAFASLNASPGARALYDELRARGIEHNDALRRLANRLVGILHGCLKTRTLYDEATAWSHRQNLPQSSVAA

SEQ ID NO: 146495 - protein, 385 aa, unidentified
MSLMFFLGVDVSKKTLSVVLTDHKDKTLWSNKSIPNDEVGFKKLVETVIKNTSKKAGKEEYSIAAGMESTGVYGERLAYYLNGNSHNGRIVTYVLNPAAVRAFGTSVMAPNKNDSADAQLIASYLSMAVTKEQISPWKAPSPEGRALRELSRRREELTELHASECNRLEKLECMQEPPEAIVRNVRELISYLEDSIHNLEKEIEEHIDDDPGMREDIELLRSIPGIGDVTSVTLQGESDGLINFASVKGLVSFVGIAPSEHTSGTSVFKKSKISRRGNSRIRHHLYMATLVAARVNPVIKEFYERLLNRGKCKKLALVACMRKMLHIIWGVMKNRKRFVKCPPMSRHEFAYDPNSSFHYAACVFCCWQKALGVSPPNDAWGRIML

SEQ ID NO: 146496 - protein, 358 aa, unidentified
MAVASMAHDQIHVTFGVDTHKYAHTVHAKDQLGRDLGHLEIPAHSKGYAELLAWANHLGSVVAFGIEGTSSYGAGLTRYLRSQGCTVIEVIRPSRQDRHFRGKSDVIDAEAAAAAVLSGKARSVPKAGDEKVEMLRALRVARRTATKARTQAINAMKALIVMAPDPLRQSLEGMPVGRLMTVCARFHSCGVSSPTAATKFALKSLACRHQTLQAELRVLEQQIDQLTAEAAPELRRRFGVGPDSAAALLLATGTNSDRLRSEASFSMLCGSSPIPASSGQTKRHRLNRGGDRQANSALHRIVMSRLRWHQPTKAYMAKRRLEGKSKADIIRCLKRYVAREIYAVLRAAERLRSDSAVA

SEQ ID NO: 146497 - protein, 319 aa, unidentified
MAQNGLVVAGIDIAKDKVDVCIRAVSQLQTFPSTAEGRRQLISWLRKHKVTKAVMEAGGGYEREWAKALRVKDIEVRIVDPKRVRHFAKSAGRLAKNDVIDADTIAWFAEIFGETPGQAHDAARETLQQMVNARLGLMDMRTMVSNKGEHDVPEPVRKSHAQLLKSIAVEIANLEAAIAAMVKATPHFAARAEIIESVPGLAGTTSAGLIAMMPELGEASNEAVSALLGVAPYDDDSGKRQGGRQINGGRRKARNLFYMACMGAATRHNPALKAFYQRLIAKGKLTKVALVACMRKLIVILNIMLARGEKWDASRYAVS

SEQ ID NO: 146498 - protein, 399 aa, unidentified
MTDVIIGVDPHKLSATIEVVDDQERLLGSGRFSTDKAGYGAMRTYVKTWPRRVWAIEGANGAGRPLAQRLVQAGERVVDVPAKLAARVRLFDTGHNRKTDALDAHSIAIVAVRTPGLRVLAPDGELEALRMLTDRRDELARLRVQTVNRLQRLLSELIPGQRKPDLSALQAKAILATVRPRDIAGKTRRRMAAEELADLVAVDAKLKKIKAELKTMVLARGSTLLDIHGVGPAGAARTLADVGDVARFTDRNRFASWTGTAPLDASSGEQIRHRLSRAGNRRMNHVLHVAAIVQLRNDTEGRAYYRRKLAAGKTPLEALRCLKRRLSDVVYRQLVADADTAEQTGPGGHCGATQESSAVDLPPHIDTSDQPLPGPAHPTLQPTQPTRKTTRPKTSQTTG

SEQ ID NO: 146499 - protein, 350 aa, unidentified
MKVLKQVLGVDVSQKELEVSLGRLNEDLSIELYSHRVFKNKETGFEALYKWLVKNTIVEFPVRIVMEATGVYHQKFACFIIEKGCNISIVLPNKISNYMRTLDTKTVTDKTCSEAITRFGLERKLEDWNKPDDTYRSLQQLTRERDQIVNERTVCKNRLHAEESEAFPNEGSIRRINELIKFLNKQEQEIKQEIAIILNENPAIKEQVKRISTIPGMGELTATIILAETNGFELIRSKKQLTSYAGMDIKEKQSGTSVKGKPRLSKKGNRHIRKAMHLPSLSAVKYNPIHKDLYARLVAKHGIKMKGLVAVQRKLLELSFILWKNKINYNPEYEKEKRAVQNDKPSLKLA

SEQ ID NO: 146500 - protein, 418 aa, unidentified
MNDEVHWFVGIDWASEGHRVCLLDADGKPVSERDVAHTGAELAQLCGWLVETTGAQPGAIAVAIEMRRGPVVETLLERGFALYAINPKQLDRFRDRFTVAGAKDDSRDARVLGHSLRTDRHAFRRLTVDDPLVIELREWSRMHDELKREQNRLTNRVRDQLWRYYPQAGALTDDLAAAWFLDLWQQVPTPAKAARVSEKTIARVLKAHRIRRLDAATVLATLRQQPLAVAAGTVEAASAHIGVLVAQLRLINQQIKDAERRLDELCAAIEAAAETAPGQSCEQRDVTILRSFPGIGRINLATLLAEACEPLRRRDYHALRTLSGVAPVTRRSGKSCIVVRRYACNQRLVQAVYHWARVATQHDPASRQRYRALRQRGHSHGRALRTVGDRLLGLACTLLERQVLFDPHHVTAQVAAAA

SEQ ID NO: 146501 - protein, 346 aa, unidentified
MTQEYIGVDLHKSFFQACAVSATGERQWEGRFHRTAEGLAQFVARGVGVDQAVAVEASGPTWAFVDALTPTGARVCVVDPRKTRLKAGMAAKTDRLDARRLADALRRESVVSIYVPPPAIRELREVCRGRHQLVRLRTRLAQMIRALLLRCDAGEPPGTRLYAPRALKWLSEVSLPPDAATTLQRLEGLYRAVHTEAQAAEADLRQRAATDPIARALDALVGIGPVVALTLRAEIGDITRFRRGPALASYAGVVPRVDRSADRVYHGRITREGSPWLRWVLIEAARHAIKRQDATGRWARRLAVRKGGAKAYVALARVLCNDIVATWPRTTEGPTSSPRADDRERA

SEQ ID NO: 146502 - protein, 362 aa, unidentified
MEYFAGLDVSIDETSVCVVTDKGEVVAEASVATDPAEIAAALQHYIARLRRVGHEAGALAPWLHAELAALGVPIVCLETRHVRAAMSAQRNKTDANDALGIAHIMRTGWFRQAYIKTEDCYRMRLLLVQRRSLKRKFLDLENTIRHSLKVFGIRLGSVGRTGFEQAVRKAVAADPVTAGVMECMLRARAALWLEYLTLNKMVVQIAMRDELCRRLMAIPGVGPVTALSFKSAIDDPKRFRRSRDVAAYFGLTSKRWQSGSSIDVQGRISKAGDPEVRRALYEAASAMLTRFKGRDTIKTWGLHLAKTKCHAKARVAVARKLATVMHAMWTDGTCYIGDPDASETDVAASWSAKEKRLSYARS

SEQ ID NO: 146503 - protein, 341 aa, unidentified
MAVAGGLDLHRGQLTFDYVDTGTGESWRGRISPADRESLRGWLRRFDGVPDVEFAVEGRTGWRYVVEELQRAGITPHLAEPAETAGLRGRKRRAKTDWADARHLRDLLLDGRIPESWIAPAHVLEARALVRLYKDLLEERTSWQQRVHATLFHQGIPVVPKLGTADGQQRLDAAELSAAGRRAVQAGLRQIERLTQETASLRRELARLSSRQPGCRALRRAHYGIGGLLSVAVRAELGDCRRFSSSDDAVRHTGLDITIYDSDGKRARGHIARQGPPVLRWALYEAALYASRPASPDYAYFCAVRDRIDGQRALLSVARKLARRCYHTLRDLGEDALLPAA

SEQ ID NO: 146504 - protein, 381 aa, unidentified
MELHRRNDPTPDGGEGMRIDIGVDLHTTQFTVYARGEEKSGVNGQYLTNEEGYKSFLRKLGQWTRSGHDIRIGVESTGNTRYFKHRMEEKGYSVVVINTMKFKVINESVKKTDKHDAATIAEFLSKDMLPESRLCSEASEQLRRLLKVRSTLVRTRVTVKNQIHGLLISMGMEDTRASLQSKRGRQRILDTLAGAGNGLVVQPLFETIDRLSENVKAIEGEIEKLVAGDRVVKLLQTIPGCGPVTACTIRAYTDDIQRFSNHKKYASYAGLAPWVQCSNETEHYGRITKRGPEELRTAFVQLVMGIRRSRQSASWRLMERYEAMKRVKGSGKSIIATARKLSRIVWVMLTRGEEFNVSLMTDRTLEGLSNSMRAAVVSLSA

SEQ ID NO: 146505 - protein, 438 aa, unidentified
MSNKVIFNLDELFISVGIDVGADFSWMSIALPNQQFVGKPYKILHNSIDSLTNAVSKIKEAEELYSLESRIFLESTGIYHYPLFCYLRDKGFNCSVINPIITKNSTNINIRKVHNDRFDSKKAALVGLKPDLKVSLMPSDLALNCRNLCREYYDLMDNRSAYVNKLQGELRMAFPQYLGIFSKVTINTSLTLLETYTSPSAFLKADKQEIIDIIKSTARFGLTYAQNKYNAIIQAATDANQFGYIIDSNIKRIRLYISFIRKYDEEINSILESLHELVDANEDSDFVKQIHLIETFKGAGFLSAVSIMGEIGDFSAFSKPKQLFAYFGLDPAVKQSGKFEGTKVQMSKRGSAIARRVIHTLTLQSISISRNREAKNPVLREYYLKKCDSKPKLVAMGAVSHKVCNMIFAILRDNKPFKIIAPQEHIKQYNSAKCDIAA

SEQ ID NO: 146506 - protein, 344 aa, unidentified
MIWIGMDVHQRFSRMGCFDPASGEVRDLGSVSNEASALEEVLEAVASPRTVVLEAGRSSYHMAGLLESMAEEVWIVDPGEVRRLQHTISKTDRRDAAALAWWAAKGVIRPQWRPDRQTMDLRELTRGKTALTGMSTQVRTMMRMLLARHGHDCPHRDLMSARGQLWLEEVELEGHAGQMLAGLREILVVVQSKVDDFERMVEQTSEAHPVAQRLRTIPGIGPFLSLALAVEIGDIHRFPGPAQLRGYSGLVPAVYQSGDRDARGPLTKAGNKWLRYAAVLGAQRIAQMKQPDPRLKRIFLSVAFRHGRNPGKIAVARRLLDLVYHMLKKEADYKAPRARTAAAA

SEQ ID NO: 146507 - protein, 343 aa, unidentified
MKLHVLGIDLGKTVFHLVGLDSTGKVVIRKKCSRTQLLAFTANLQVQLIGMESCSGSHFLGRALREQGHEVRLMPAQYVKPYVQTNKSDFLDAEAIAEAVQRPRMRFVPIKTEEQLDLQALHRVRERWVMRRTAVVNQIRSLLLERGLTLPKGRSYVDRQLPRILEDGELRLSGSFRVLLAQLKLELEQLTARIEEMDRVIQKTAQENEDCQRLTEIPGIGPVTATALIAAVGNASAFQKGRNLAAWMGIVPGEYSTGGKQKLLGISKRGNKYLRTLFIQGARSVLQQRHKQAPGLSHWLAQLLGRTHQNVVIVALANKLVRMAWAVLCKNERYRAPVLAVTT

SEQ ID NO: 146508 - protein, 432 aa, unidentified
MKHKQYSTQTEKIKRITPETLVIGVDIASQKHCARGFNFRKMELGPQLYFQNDLAGFRTFIKWLERLTKANNCLDVIVGMEPTGHYYFALDHYLKEKGIEVVLVNPRDVKRQWEVENNASIKSDPQDAGIIGKLLTDGRYSPSIRYEGVKAELREVIKTRDMLIEEKTRLVNQIHQWLSTYFPEYRQVFKTGIGKWLITLLKEAPTPAEIARLKPDGIHRLMQTCRRSMSRSKVNKLYELARQSIGIQAGVQEAKERLKMLLKRLEQNQDDLRKKEKKIKTLTEQIKEAKLLTDITGIGNLTAATFLTEVGDIDQYETPKQIEKLAGLTLTSKSSGNKKGRGHISKMGRKKLRTVLYHIALTLSSKNDAFKKLYHYYKDIRKKPGTKALIKLCCKLIRVLFTILKKGEPFDPEKMLADIRWPENMTPGYSLS

SEQ ID NO: 146509 - protein, 414 aa, unidentified
MLKIVYPICCGIDVHKDFVYACIATTENGVTTYKSHRFSTFTKGLRELLSWLLSNNCKDICMESTGKYWIPVYNILETDCKIVLAHPKYVKAIRGKKTDKKDAKWIADIFKHDLVSGSFIPPADIRQLRDLVRYHKKLTSFTVGEKNRAQNCLTVSNLKLDSVFSDVFGKASSNIIGHILANPSEKLSDVSAFRTRGLKATDEEILEAVDGNICPEQAEKLRIIRNHMSNLDFCKANLESLILSIAEKYIQQIDLVCTVPGFDTFSAISVIAEIGVDMSVFPTSKHLCSWAGLTPQNDQSAGKKKTTRISRAGVYIKPLLVQCALAAIKANSKHPEVFNRYNALKKRRGHKKAIIAIARMLLTAIYNILKKTEPYNPELYAHSYDTLPEHRAVSTEEAIFILQRQGFIVTPRVT

SEQ ID NO: 146510 - protein, 340 aa, unidentified
MSLVLQSFLPYPDSCLGTSPHQQGWDTKMAELSFGGIDVSKDRLDVLLLPEGLCFSVCNDAPGWAELIVRLRPFAPAAIGLEPSGGYERGIIRALLAAGLSVRRINPNKLRQFARARGVLAKNDHLDARLIAEYVAIMPTRVLQRDDAVEHLAEIVTMRRQLYDEHVAAMNQATHLEDAMLRRISKRRLLRIEADILLLDKRLAELVAANSRLAHRYRLLTSMPGVGPTLAYTLLATLPELGQLDRKQIAALVGLAPYDFDSGKLRGHRSIYGGRMPVRNVLYMAALSASRYNPALKTFSKRLAAAGKKSKVIIVAVMRKMIVTLNAMLRDDTAWRPTFV

SEQ ID NO: 146511 - protein, 410 aa, unidentified
MTKIIVAQDAPVLVAIDIAKARHEVLIAIPDKKRRRRLTVLNELADFNRLVTALKEYGRPVRVAFEATGNYHRALAYHLATAGFEVKLVSSVALARTREALNNSWDKNDPKDAQVILHMMEIGNEQYYHDPLVCGTNDIQELSKTHDIVSKSKTELWHRVLTHYLPLYFPEADRFHRSSRSDWFFAFLERYPSPHLITAMGKAAFTADAWDVIGRKVAKERLLADIYETAKSSVGLPVAPDSDAIRMFRLVLGEGRSLIAQRNQIEDRAVALLKDLPDYQLLTSIPGIGPINALTILAEAGDLRRFGHHRQFLKFCGMDLATIQSGTFRGQTQLSKYGNARLRRTLWMAGQVAILQRTNSFRDKFERYIAKDRQNTHLRRKAYTAIAAKMARTVHGIIKHGEPYRPFFEG

SEQ ID NO: 146512 - protein, 535 aa, unidentified
MRQPNGGLFDLDPPRQCRFAGSKVAMDQKGGCGILLHIPQTILAANSYRHCRPAANETVLDLRRAVGTEVVHRLGANKPAYKLDPEFLEHPRLSPRVVIGPGARFLEFLFTGLHADDATQEKVMELLHRRCCGLDVHKETVVACLRLVSNGKVTTEVRTFQTTTADLLRLSEWLAANDCTHVAMEATGVYWKPVWHILDDGEFELVLANAAHVKNVPGRKTDVNDATWLAELLAHGLIRASFVPDTQTQEMRNLLRTRKQLVREQSSHVLRVQKTLEDANIKLDSVLSDLMGKSGRAMIEALIVGETNPAKLASLADRRVKASPEELREALRGRVTKHHRFLLRLHLNQIDALDAAMATLDAQVAANLGPFRTAVDLIMSVPGIKNLGAQAIVSEIGIEMSRFPSDAHLISWAGICPRNDESAGKRRSNRLRKGAPWLKTTLVQCAWAAVKKKNSYLQAQFYRIKARRGPNKAIMAVAASILTAIYHMLKDGTMYQDLGRDHFDRRSTDQQKKSLVKRLADLGYAVEIKPLVASA

SEQ ID NO: 146513 - protein, 349 aa, unidentified
MTDQRLSYCGRIVYVGIDVHKETYTVTCVCNKQIVKTATVQADPAALAASLPRWFPGATLYSVYEAGFSAFVLHRVLTKAGITNLIVNPASVAVAANDKVKTDRRDATKLAIDLADGRLRGIYVPTEAEELARLLPRTRAQIVKHRATIARQIKAKLHQFGLIAPSSRRLISRRYLREMAAWSLPPELSVRLTLLAEQWRFATRQLIEMRRLLRDQAQAQEAIEKVYRSVPGIGEVVARTLATELGDMTRFANERALFSYTGLTPSEYSSGASVRRGHMSRQGSSRVRHWLVETAWRALPRDGVLKEMFDRIAATRGKKRAIVAIARRLTGRIRACFRQGTTYAVGTYA

SEQ ID NO: 146514 - protein, 349 aa, unidentified
MECYAGIDVSLELSSVCVVDAKGKIVREAKVVSHPEDLVAFLRALGLSIERVGLEAGPLSQWLHIGLTAAGFETVLLETRHVKAALSAMTVKTDRKDARGIAQMLRMGWFRPVHCKSPGAQEVRALLVARKQLLTKLLDVEASIRGILRGFGLKIGAVTRNGFEARVRELCAGHMMLSEITEAMLVARSALRKEYTKLHKAMLSIVRADAICRRMMSVPGVGPLVAITFKTAVDDPARIRKSRDIGPLFGLTPKKYQSGETDVTGGITRVGDEMVRTSLYEAANTLLSRVTRFSALKRWGMDVAKRRGTRRAKVALARKIGVIMHRMWVDGTTFRWTKEAPNASQPARA

SEQ ID NO: 146515 - protein, 351 aa, unidentified
MEIIAFDSHKRYTLASVETPEGRLVTEERINHRRGNIAGFLSKCQAGSAVAVETIGNWYWIVDEIEQAQMVPKLVHARKAKLMMGCINKTDKLDVRGLNRLQRAGTLPTVWIPPGDLRDKRELPRTRMVFAAERTRLKNRIHSVLAKYGLTDFGELSDIFGKSGREIIRDYLKQLPAQTRYTTRGLLRQLDVVQKEIDRIEKRMMEVFETNRDIELLMTMPGVGFILAVVIWLEVGDVSRFGGPERLASYCGLTPRVHSSGDKVRYGRLRPDVNRYLKWAFSEAGNSVAVNRERLGFRHVSKLYNRIRARRGHSKAIGAVGRHLSEATYWMLKKKEPYFERGVGQVSSTEA

SEQ ID NO: 146516 - protein, 529 aa, unidentified
MATRKSRKNRSVSQAALGKPRGIIQERVRKVGPESFGIVAVDCAKARSKWMLCDFYGKVLIPPTEVEHQKAQLQLATTQLRDACEQHHIRDHIVAVEMTGTYHRPVQRAFRKAGSETRLVHPFASRHYRLPASADIKTDDKDLEGIFRAAINGFGLLEPVWNETYQRLQLLARHRRDLVGKRAKLQCQIRNYLERCLPGYAALFPDDNLWTRPVAMPLARRAGCANAILEAGVKGVTQWIHEDKLRCQSRTIDRVVAWAGNAADADPLAKHLARVWQALHDDWKAKTQQITQIERDLAEILAKTPYILLLSHPGINVVSGSELAGELGPIEHYAHAKAITGRAGLFPSRYQSDEVDRTGPLARFRNARLRVACMRVADNLIKCNAHFHGKFQLWKQQGVNSRDIRCRVANRAMRTVFQMVSGRRLYHHPSRLDRQYVLDKLLTFHQDRKTPPHEILRDLKLAADQIPKHEQATEAEPLQARYERTRRSRRKSVQPIGEILLAVLARYGITGLECEESQGPHANESDTST

SEQ ID NO: 146517 - protein, 314 aa, unidentified
MIVIGTDTHKRTHTCGAVDAFTAAARGELTAPARGGSFGVLLRWARALDAERVWAIEDCRHVSGAFERFLIARGERIVRVAPKHMAGARRSSRERGKSDSIDAFSVARAALKEGIENLPGAHLDGAALDIRLLVDHREDLIAARTADQQRLRWHLHDLWPELEIPAGALDTSKWLGKISRRLARAQQTTRVRVARELVRQITARTTRIRELQAELAALVESYAPQLLAERGCGPLTAAKLIGEIAGADRFATDAKLARTGGAAPIPASSGNTSRHRLDRGGNRQLNCALHRLAVNKGRLDPRPRPTWPASKPRA

SEQ ID NO: 146518 - protein, 314 aa, unidentified
MNIIGPDISKDTIDATLHKTNGSIHYIKFKNNDDGLKQFRLWIKGNRIRKVYIGMEATGIYYEKAADMLSSYYTVYVINPLKIKDYGKSRFNRTKTDKADSNLIADYIKRHQDTLIPYQIPKNKALQKLINLKNQLQQQQKQIKNRLHSTEEDFIRNIHQDLIDTIQDKMEQVKIAISEQIKKQTDNNHYRNLQTIPSIGKDTASVLYAQLTEKHFKTANQFVSYAGLSPAIIQSGTSVRGRGRLSRYGNRRLKSTLYMPALCAYRFNAFPKLINNLKKAGKPKMVIIVAIMRKLAKPAYYIVKTGQPYDAERH

SEQ ID NO: 146519 - protein, 352 aa, unidentified
MNQYIGLDGHKESCTFVVLDEKGRLKRKAVVETNTQALIKFIKTIPGKRHLCIEEGTHSQWFYEIFSPHVHDLAVVEGRKNREDKDDARDAWGLAKRFLKGDLGSRIWKVPESLTTLKDLVKSYERINKDLTRVRNRIKHQYRSRGFAYSEGKCPYCKKSALIPWDCRKPGFHQNLVLLHKQQQELVPLKTEAQKAMVAEAARHSITPILKTAPGFGPVRSAELLSIIIDPYRFRTSRQLWKYCGLAIVMRSSSDWVQKPNGQWVRAQVAQTRGLNQNFNRPAKAILKGAAMTVITAKKETPLRADYDRLLKKGTKPNLARLTIARKIAAIVLAMWKNKEVYNPGKYSMTNK

SEQ ID NO: 146520 - protein, 416 aa, unidentified
MFAVGVDVANGRSMVAVLDGMRNIVAKPFEVVHTAQGFAALVEKLRQLDGEVRIVMEHTGRYYESFAMSMHRAGFFVSAVNPLLIKNYQGSINVRKVKTDKADAQKIAQFALDKWTILPHYTPMDTIRYNLKTLHRQFQLASKTKTALSNNLIALLEQSYPGANRYFDSPVRTDGRQKWVDFVDTFWHVDCVAMSSEHAFVERYRKWCKRHGYVFSEQKAIQLHADARQKIPLVPKSDTCKLLVREAVSQLNAVSRTVETYRAEMDRLASQLPEYETVMGMTGVGKSMGPQLMAEIGDLRCFAHQKSLVGFAGTDPIKEESGDKVSQSAPSSKRGSPYLRKTLFVIMSILLQLQPQEDPVYQFLDKKRSEGKPYYVYMTAGGTKFLRVYYGKVRDCLKAKGLWEVPASASQEVNPG

SEQ ID NO: 146521 - protein, 311 aa, unidentified
MKIICGVDVCKARLDVYTEPIGHAASFDNHAAGIAALAAFCHGHAVNLVVMEASGGCERAAFLLLWEAGLACALTNPRNVRCYAEAMGTLEKTDRVDAALIARFAIAKDIQPTPLPSLPQRRLKALVARLRQVTDDLTVQKQRRSAATDAETLASLDEVIALLKRQSRTLEGEIASLLDDDPLWAKLAAALRAVKGVAGRTVARLMADLPELGIYSNKAIAKLAGLAPLADDSGARQGKRRIRGGRESVRSILFLVADIARRFDQSLADFHQRLLLAGKPKMVVRIALARKLLVRLNAKARETRIAYAHAT

SEQ ID NO: 146522 - protein, 373 aa, unidentified
MTTVRFVGLDVHADTIAVAVAEPSGETRNLGIMPNRADAVRKLMKKLGPVERLRVCYEAGPTGSAIYWQLVGLGIACEVVAPSLVPTKPGDRVKTDRRDAVKLARAYRAGDLTPVWVPDAAHEALRVLVRAREAAKRDQLRARHRVVKFFLRHGHRAPLGCRAWSTRYWLWVETVRFPYPAQEATRLDYLQEIQHAAERVARLEQAIQEVVRTAPAPLRAVIDAVQALRGIAPLTAITLVTELGSMARFAKARQLMGYTGIVSSERTSGTRIRRGAITKTGNAHVRRVVVEAAWAYRHPPHLGPTLRKRQAIVEPAVREIAWKAQHRLYQRYRHLTRTGKPSQQVVTALARELLGFIWAIAVRVETAARTHAA

SEQ ID NO: 146523 - protein, 357 aa, unidentified
MPSKLNIAIASVIGIDIGKNSFHVVGQDQRGAIVLRQKWSRGQVEARLANLPPCLIGMEACVGAHHLSRKLQMLGHDARLMPAKYVRPYSKGQKNDFRDAEAIAEAVQRPTMKFVATKTAEQLDLQALHRVRERLVGQRTGVINQIRAFLLERGIAVRQGLRFLRTELPAILATRSDVLSPRMLRLVEDLAGDWRRLDARIESLSDEIEALARQDQACERLMSVPGIGPIISSAMVAAIGTGDAFSKGRDFGAWLGLVPKQISTGDRTILGSISKRGNRYLRALFVQAAWVVLVKLGPKQWERYGLRSWIEAAKKRLHHNVLAVALANKLARIAWAVLHNGRAFECVKTDEMAPRSA

SEQ ID NO: 146524 - protein, 425 aa, unidentified
MGVILTDGQLAGRVVAGVDTHADTHWLCVLDENRRVALSREFAATTEGYAELAEAIGDPAGCAAVGVEGTCSYGAGLTDELQARGFVVLEVLRPKRDRRMAGEGKDDGIDAERAARDVLSGKYTSVPKARGGWVEDLRSLGVARERCVRSRVESLAAARSLLTTAPETQRRRWEGMSANALMSSLLALAEEGATALERSLLALARQWDAARGEADELEALMRGLIEDNCPAILSIYCCGTVDAADLVMSSGENASRFGTEARFAKHCGVAPIPASSGKTSGRMRLNRGGDRRANKALHEIVVRRMRVDEETIAYVERRCSGRRGLTRKEAMRCLKRYVAREVYRALTHPFDLPEPDVSGRELREARLMADMRQKDVAGILGMSVPSVSKVERGLASERSGTYRTYLKWYRDGMPTNVEKKNQIGT

SEQ ID NO: 146525 - protein, 425 aa, unidentified
MRITQVGQAINLEKVMDVCVDVHQEELFAVSRIKGAEYEVSFANSNVQIREHLNEYQEIARQHGCSGIRVVCEPTGCYDQKLLRTARQLGCLTAIVNVECVAKYRVIETNDANKTDTKDPRVIASLAGEGRVLKHRQLPEDYLLLRKLGAMYEDEDLRLVQLRGMIHQVLVELFCDYHFKNRFLYEVTGRALVGKYSCNPYKIVKAGYKRFAGTIKALSPRVRQKTIERLWNQAESSVLNAIPEAYVDILVERFQQLWHDYWQCCHRKEHITQQMIDIVGRLRLQDPHIPEPTKGVISAKSLARLLAETGPLSDFRHWRQLLKYSGYNIRMRESGKYKGQNRISKKGRPLLRKILQQIVLPMVSPGRLYTDIFKAKCKEGSVPGNKVVTAIARQFLRKLFGWYRSGTAFDQQRYFKCISQHQKAA

SEQ ID NO: 146526 - protein, 417 aa, unidentified
MTVDSVTLKRSVIKPDTLVVGIDLAKHTHVARARFSDGSYTRPVKVANTRAGFLALIEQIGAWKPRPDSLVIVGVESTGSYGVNLVRWLSEHGCRVVLVPSLHVCREKELFDNGRGTSDNKDALIIADLVARGQYLGFVALCGACLELRPLVGLRARLVKEQTGWLNALHQTMDVLFPEFETVFADLKSPSARLVLDRFGTVSAARAHSPTAMRRLLARDGARVSLAKLKRLKAAAAESIGPLEVSAGQERSLREMLDTLATLDGRIAGLEAEIVSLLEQLPEAEYLMSVKGVGAMTAAVVLAETGGLAQYSCAAAVLKLAGLNLYQNSSGQYQSGRHISKRGRSQLRRALYMVAVQHAKRGWPLQPYYAALVARGKPKTVALTAVCCRLVRLLYALVRDGRCYSECPPNVGRPQAA

SEQ ID NO: 146527 - protein, 408 aa, unidentified
MNPLYVGIDVSSKNNVIYLMLPNGDKHSSFSLANSHDGSTQLVKRIFTAMTSNNIDSVLIGLEATSVYGDNLVYFLKEDTTLASFDRKIHVLNPKQVNKFKESYNDLPKNDYVDAFVIADCLRFGRINKEVYMDDYRYKALQNLTRARYFAVTNLTKEKQRFINVLFKKYSTMTQEKVFSDTFSTTALAVYEKFESAETLAKMDLQELTAFIMEKGKNRFPDPDAVAKALQKAARSSYRLPKTVNDSVNQVLAISITSIRALESQIKAFDKAITKQMELLPNVLISIPGIGPVLSAGIMAEIGDINRFQNQAALAKYAGLAWQQHQSGDFEAQTTRMIHSGNRFLKYYLCEAAFSLVRCDKEYSDFYHLKYKEVNRCQHKRALALTAHKFVRLVFRLLKDNRLYCPAK

SEQ ID NO: 146528 - protein, 376 aa, unidentified
MSKVRFVGLDVHAETIAVAVAEPGGEVRSHGVIPNRLESIRKLVNKLGPVKQIKACYEAGPTGYVLYWQLTQLGVACEVIAPSLVPVKAGDRVKTDRRDAEKLARCYRAGELTAVWVPDAAHEALRDLVRAREAAKKDQLKARHRLGKFLLRHGRRPEGMKAWTKQHLEWINAHVHFDQPALEATLEDYLNEVKHVAERIVKLEKAIDEAVQQAPPEIRAVIEALQALRGVAQTTAATIVSELGSLSRFESPRQLMGYSGLVAREHSSGNRIQRGSITKTGNAHLRRVLVEAAWAYQHRPNVTGYLLRRQKSLALSEEVKNIAWKAQHRLNKRYKGFAARGKNKNQIVTALGRELLGFIWAIAMKAEQQHKLAAAA

SEQ ID NO: 146529 - protein, 451 aa, unidentified
MTKSKRRHTERDFTPTHPNAAAIDIGSRMHVAAVPTDRDPEPVRAFGTCTGDLHQLADWFERCGVRTIAMESTGVYWIAAYELLEQRGFEVVLVNARDAKHVPGRKTDISDAQWLRRLHEYGLLRASFKPKGELAALRAYLRQRERLLDYSASHIQHMQKALMQMNVQLHHVVTDVTGETGMRIIRAVVAGERDPAVLATHRDRRCHASEAEIAAALAGNWREEHVFALGQALELYDAYHAKVVECDLRIEAVLRRLRDVAAKPVGRLPPARHRDKTANAPAFDARAALHAVLGVDLTQIHGLGPSLALKLIGECGTNLSAWPNAKHFTSWLCLAPANKISGGKVLSTRTRRSGSRAAALLRLAAVTVGRTQTALGAFYRRLSARVGKAKAVTATARKIATLFYNTLRHGIDYADPGASYYEDRYRARVLANLRRRAKSLGYTLHEMPTPG

SEQ ID NO: 146530 - protein, 427 aa, unidentified
MIADTTPVSAPVHWVAIDIARRYNAVLVETAAGLRHRFKMTNTAQDFDRLIAFLVALGGKINVALEPTGDYHRALAHRLLRAGFHVSSVSSVAQSRFREAMFNSWDKNDPKDAAVILEMLKQGRVQIYVDPLIAGHHDLQELSKTYYQVSRARTKVQHAIINHHLPLYFPEMHRYWAASRNEWWIRFMIEFPTPAHVRQLSCEAFCTAAWELVGRKVNKAAKLAEIWELAAQSAALPHAPDSLAVETFRVTLRHYQSLTKLRAELEARAEAALGENADYAMLKSIPGIGPINALTIMAEAGDMRRFGHHRQFLKYCGLDLAKHQSGAFRGRERLSKRGNARLRMTFWLAGAVAIRTRENSFRDKYDRYVSANPVDADLKRKALTAVAAKMARVTYSLLKKNQPYRQFFEQSLPGGSIPLIRAVGAPT

SEQ ID NO: 146531 - protein, 327 aa, unidentified
MNQPATIVGIDVSKATLAVCHQVQDKFQHTEVSNSKAGFQQLVRRCGVECCYVMEATGVYYLALAYYLVEHGAQVAVLNPLVVRRFIQMHLGKGKSDRKDAQWLLRYGQQQPLPAWQPEEPVLVECRQIEQVMEQFIRQRTMVRNSLQGLQQQPVVSAVARKRLQQTLQSLDQQIQALEAELLTLLEQHYTREMPLLCSIPGIGRKTAAQLLLFAKGFAQVQNYRQLIAKAGLCPREYSSGSSVRGKTRITRMGGGLIRSKLFMCSFAAKQSNAACKALYDRLVAKGKNGKVALVAVCNKLLKQACAIVQSGVPYQAEFTSKLVPNP

SEQ ID NO: 146532 - protein, 387 aa, unidentified
MMTKKITNAEILAIRAAAEVDPACGRVWVGLDVGLKSTSVCVLDRDGKVVHQASMKTHPIEIGRYLAKNFASNVSVVGMETGAMSAHLASGLRKQGYQVAVMDALQVHRVLSLKRNKTDTNDARGIAEITRTGRDYLTEVYVKSTACFEVRAQLIMRHRLVQQRLANENMIRGLLRVYGGRVEPGAKSSATYRDRVVEQLLIIQDREGINLRPRIVPVLDLCERLQADTARIETELEALAAANPVCRRFMAVPGIGAITALSFFTAIEEPSRFRRADDVAAYLGLTPRVYQSGESLVHGKISKMGNRLTRTHLVSAATVLLSATKTFSSLKDWGIRLAKKIGFNKAKVAVARKLAVILFGMWRDGTHFQFKTETVEPHRQMMQAARA

SEQ ID NO: 146533 - protein, 317 aa, unidentified
MALQRIFVGIDVSKDWLDLWLEPPKRFERVSNDAAGWAAILGLLNALGAAAGLVVAFEATGGYERGLRQVLLEAGFEVRRLNPLRVRLYAKSLGRNAKNDRIDARVIARYAEAADTMPETLDPARERLAELVAHRRRLIAERVALGNQTAMLGCRLLQTQNRKRLALIARHVDQTDALIREAVGQIPSLLAKLELLKTLKGVKDITAITLLALLPELGRITRRAIAALVGLAPFDHDSGKLKGARAIAGGRTPVRTALYMAARAAARSKSPLGDFYRRLIAAGKTPKVATVALMRKMLVTLNAMVRDNQTWKHAKPC

SEQ ID NO: 146534 - protein, 370 aa, unidentified
MIKSVVYVGLDVHKDSITVAFAREGREPAEEWKAVPYDGTRLLKSLKMLTRNGETLKVCYEAGPTGFGLCRRLREAGVDCCVVAPSLVPGKPGDRVKTNRRDARKLAHFLRSGDLTEVHVPDEAVEAVRDLERARGDAKCAERVARHQLGKFLLRHDRHWDGKAWTQKHLNWVRTQKFAYPAQQSVLADYLKAAEDLAERVASLTAAMEKLVEETVLAPLVKALQAFRGISVVSAVTIAAEVGGDLRRFATAGQFMSYVGLTPSENSTGEYRRQGRITRCGNGHLRRILVESAWHYRHAPAIGLELRRRNRGVADGVRRIAWEAQKRLNKRLYHLLHAGKSSQKAVVALARELAGFIWSVGQEERLLAAS

SEQ ID NO: 146535 - protein, 393 aa, unidentified
MLYLAIDQHKHHLTINIRNEQGEVMQKGQINTNHADVDDFFVAFAKKARKHRGYMAIVEVCGFNDWLLAKLQKTRCSEIVVIQPDQSAPHKTDKRDADALGALLWNNRNLLRGGKRPNGIRRIFPADPADAQVRQLANFRQHLVKQRTRVVNKIKGIINKHNMAQDAPTEDYSTTKFKKWLAAVQLPEVDRIEVNMNIQSWELCDKQILEVEAELVKRSEVRVADVFRLKAIPGISVMGAITLLSRIGDIKRFKNPDSLANYFGLTPGCHNTGGKHRVGGITKRGNALARHVLNFAVLHVVRKDPLMKAWHKKIKNKHGAKTAKVAVMRRLATIVWHILRWGKPYQFRYEPPAPAPKKGDLRSPKEVLGGIGNRNHSQRKKGTPLKCRCKTKA

SEQ ID NO: 146536 - protein, 352 aa, unidentified
MDKQRLGDGEIVGGIDTHKHAHVAAVVDRTGRLLGTFEFPATSAGYRELLRWLREHGSVELVGVEGTGSYGAGITRYLAREGVAVVEVIRPNRQLRRRRGKSDPLDAEAAARAALSKEANVTPKSADGPVEAMRMIRLARGSAVKARTQAANQIDALVTCAPQSLRSQLKELSVLRLAERARRWRPGDIQDPLSACRATIKGLARRWSQLGAEIAGYDKQLLRLTQRVCPELLARLGVGFEVASSLLVAAGDNPDRLHSEASFAALCGVSPLDASSGQQRRHRLNRGGNRDANRALWVVAMTRLRVDERTQAYAARRTKQGRTKREILRCLKRYIARELYSVLRCNTLLTPP

SEQ ID NO: 146537 - protein, 355 aa, unidentified
MDKINSNFAGQNIYVGMDIHKASWNLGIHLNDMFVKNVHQKPNPHIMAKYLKQHYPDAHYKAVYEAGKFGFWIQRQLTALGIECLVVNPADIPKSQKDTLQKTDPRDARNLAMRLQSGVLKSIHIPDEQQEADRVFFRHRKRIWKDLTRCKNRIKGMLAFSGIDIPEQYDNASWSHNFINWLKVLDCRQQSRRSSLDYMISQMEFLRKELLSISNAIRKMMRDQRYKTNYYLLRTIPGIGPLTAASILVEIGDVHRFETFYHLNSFVGLLPMEHSSGQSENKLSLTVRKHRQLRSDLVESAWTARRTDPAMALYFQEQIKRKDSKIVIIKIARKLLNRIRYVLINQTAYEFGIVK

SEQ ID NO: 146538 - protein, 385 aa, unidentified
MSELNDLSRSLTSLEQDKTIIAVIEMSQSSWLVAGIVPGIERHPLKKLEPSEEELVRLLMRWRTEATKNGQTITRIAVAFEAGRDGFWLARWLRARDIETYVIHPTSVAVSREHRRAKTDRLDTGLLKRVFIGWLRGEPDHCHMAAIPTLAEEDAKRPNREREGLVRERTRIVNRMKSCLARFGIRNFKPTLRKAPERLATLATPEGVPLPPNTLLELRRDMARLRFVMDQIKEVEEARAQRLEQAPQEKTHAMVRLIARVIGVGIETADMLVHEILSRQLRDRRAVARYAGLTGAPDESGNKRREKGLAKAGNARVRRGMIQLAWRFLVFQKDSALARWYRTRTESAGKKRKTMIVALARKLLIALWRLVTIGEVPAGVLLRAA

SEQ ID NO: 146539 - protein, 368 aa, unidentified
MRMDVTGFVTFIGVDLHKCTVTLRAVRADGELLGQLKCDTKCIERIAEWIKALPGPKWLAVEACPFVEWFIDRFTPCVDRMDIADATELSMRRGKRRKNDPNDALDIALRLARGECPLGYIADPQLMQLRKFGRHWRQLSRSLAKAKQGMKSMLNAANIRGPQFDGPRAHRWFLTFSGLLQPAQRLAFGNYLDQILLIERQREILRRELLTAARSPQFAATEKLLRTTPGIGPIWALVIASEIGPFDRFPNADALEFWAGMTADLKESAGRTQSGNITKAGSATLRWALCQAAVTLCQSDAKQEATRQRFIARMPRAKANVVMGRRLLRTLYAMVRDQKAYQCGERRDRTKAANKAKAKRTARALQPA

SEQ ID NO: 146540 - protein, 429 aa, unidentified
MRTESTPGARGPVFCGVDTHADSHWLYVLDWRGRKVLSRQFPADAAGYEALAGAIAAAGEPACVAMEGTSSYGAGLTRHLASLGMPVREALSPARTQRRRPGQGKCDESDAERAARAAMSGSKLGTPKSQDGWVDGVRCMLAARSGAVKARTSAINTARSLLTTAPEGLRSRFRGVAGPRLMEELPSVRAEGALGAALGALADLWAAARDAALDMERAIEASLEENCPALLAMYGCGPVSAAKLAVAAGDNPGRLRSEASFAAICGACPIPASSGKTVRHRLNRGGDRQANSALHEIARQRVMRDPETAEYAERARARGKSDREVMRCLKRYVAREAYRALMHPHEIRRPEDASELVAARRAAKVSQVRAASILGTSEKYISMLERGQRELKPIRRAYEAWVEAGLPLDWDRQAFEAERKMDSKKHLAK

SEQ ID NO: 146541 - protein, 459 aa, unidentified
MRQKSKRTKGIEQAHPFDGMSKVNPHAAGVDIGAEEIVVCVVSNETTQLVRGFGNYTVDLHTISDWLTEHKIKTVAMESTGVYWIPLFEVLEQRGFECLLISSRSLRRVAGRKSDITDAQWIQTLHNYGLLESSFRPQADLIALRSLLRHRRSLVDHRSPHVLHMQKALLQMNIQLSQAVSDVTGVTGQTVIRAILSGVRDPQMLASLREPGCKKSEEEIGKALTGTWREEHLFVLKQAMALYDFYTQQILECDEEIERVYGETRPDWDGGELKPLSARKRSSHSKNARYDTEKIRQHLKRVSGVDVSLVDGFGVSLAQTVILECGTDMSKFPTEGHYCSWLGVAPKHEISGNKVLKNTTLKTKNRAGQAFRMAAQSVKQADCPFGVLYRRLRARLGPAQATVATAHAIARVVYRMLKYKVEYDPLSVNEYQKQYEEQQIKYMQKRAAKLGYQLLPVPA

SEQ ID NO: 146542 - protein, 342 aa, unidentified
MSVIIGVDPHKATHTAVAIDRSEAELARARVRATRKQVPQLLRWAEPLGERTWAVESAGGLGYLLSQQLVAAGETVLDVPSTLAARIRVLGSGRSDKNDPNDALSVAVAALRTPALREVVPADHSEVLRLLAKRNIDIGNHRTRVVCRLHNLLMELAPGGIAKELNASDAVALLDLLAPATPAEAARRDQAVELLTDVQRLDEQLKASHRRIRTAVAASETTLTELFGVGPIIACYLIGFTGDISRFPNRDGYAAYNGTAPVERSSGGRVVHRVSQRGNRRLNHALHLAAICQIRQPSSEGRVYFERKLAEGKTKKDAVRSLKRHISNAVYRQLLIDAGAKK

SEQ ID NO: 146543 - protein, 314 aa, unidentified
MKMAMLSFCGIDVSKDRLDVVVLPEGWFFSVSNDTAGWAELVVRLRPLTVSAIGLEPSGGYERGIIRALLAVGMSVRRINPNKLRQFARARGVLAKNDRLDARLIAEYVAIMPTRVVQRDAAVERLAEIVTMRRQLCDEHVAAENQAAHLEDAMLRRLSKRRQTRLEADIRLLDKRLAEMVAANVALAQRYELLTSMPGVGPVLAFTLIALLPELGKMTRKQIAALVGLAPYDFDSGKLKGHRSIYGGRMPVRNVLYMAALSASRYSPALKAFHNRLADADKKSKVIIVAVMRKMITTLNAMLRDNAAWQPQSA

SEQ ID NO: 146544 - protein, 314 aa, unidentified
MPENSMYVGVDVAKATIEVASRPEGLKLSAPNTPQGHRQLLATLEGRDVKLVVVEATGGYERAVAAELLACGVNAVVVNPRQVRDFARGLGELAKTDRIDAQVLARFAEVVQPKPRPRASQDLDVLAELVTRRQQLVSLLTQETNRMPHAGEKAVKKSLKLMTRALAKQIAELERLISDRIESDDVLREKNAILKSMPGVGPKASAMLLSHLPELGSLDRQQIAALAGVAPWDMSSGTWSGRSRIWGGRAEVRAVLYMAALTAMRCNETIRAFAERLTAAGKAYKVVATACMRKILVILNTMLRNNTKWQSRNS

SEQ ID NO: 146545 - protein, 383 aa, unidentified
MKSVCGLDVHKDSVYLCILSEFGELIEKVFGVLTFQLEEMRDLMLHHHVVEVSMESTSVYWIPIWRVLSPHFKLNLANPYFIKQLPGRKSDVKDAQWIAECTMKELIRGSFVPPEIIQQLRQYDRRIFDLNEEIVRKLSKLDAVLQRCNIRLSNYVSNVDSKSYKTVVRAISQGISAPEELVKLIHGRIINHHGIDVITASLKGVVSLAEIDMISQLRDELDMAEAHKEKCQARMLEICEREFPEELKRLQTIPGIKERAATSLIAEIGTDMNKFETANHLASWSGLKPRNDESNKKIKSRSITHGNVYLRKTIIECAWAASRTKDCFFSRFSYHQTQVRKKNKMKVLVAVARKMLIAVWHVLHDNTNYIDFTTDRKTSRTKG

SEQ ID NO: 146546 - protein, 365 aa, unidentified
MEQDQEMEGRVVGGVDTHKDLHVAAVVDNLDRVLGSRCFPTTRHGYKQMLTWMRSFGPLQRVGVEATGTYGAGLLRYLQHAGVAVLEVTTPDTHDRRKRGKNDDLDAQNAAHAAFAGRRTVTPKSRDGMIESLRVLKACRKTAVAARRVALQMIHNTIVCAPDELREALRQMTRMQLIRTLAAWRPDLTDYRNVVSAYRITLKSLARRYLELHDEIADLDAMITAIVDELAPNLLARNSIGPGSAAQLLLTAGDNTERLQSEASFAALCGVSPVPASSGKIIRHRLNRGGDRAANSALHIIAIGRLRTDPRTKAYVAKRIAEGHSKLEAIRCLKRYIAREVFTLISNRQREINQGRTARNPDERL

SEQ ID NO: 146547 - protein, 427 aa, unidentified
MNHSTYQPILCVGADVHLDEIVLRAVDKALGHEVVERFRVTNNLPGAQLAAATIAEAATELGYTRIEIGCEATGMLWIPFHRYLSTEPLLQPFELELVCFNPKLVAKFKDGLVLRSPKNDDRDALDVAARLRFGELPVSYVPSDFWQGLRRLTRYRYHLSKALSREKMRLQSHAFLKCSDWKRVKVFSDIFGATSIALLTEFTAAELQEMTHDQLVALISHRGRGRFHDPAATARAVRQALHTSYPIDPQMDEMVTAALAAGWDHIRYLTRSMKHLDQLITRHIDLVPNPIITIKGLGTVITAGILAEIVDALRFSEEKHLAQYMGLTWHKRSSGSFVSQNTRLTKVGNVYLRYYFILGANLLRQYNLEYKAYYWRKYQEVSKYQHKRALVLTARKLVRLVHALLTKNEPYVRPRTTSQDQEDDGLQ

SEQ ID NO: 146548 - protein, 352 aa, unidentified
MPMLEGKIDHVIGVDTHRDTHAAAVLDRNGGLIGQLEVPANQAGYARLFGVVVERAPGRRCWALEGTGCYGAGLASFLAAQGEWVTEIDRPKRPRGRNGAKSDPLDAVRAGREALSREHLAVPRQRGHREALRVLQLTRAGAVRVAADGRRHLKALLVTAPEPLRAALGGRTWLQQARACAALQAKPAAAVEDRASVLALRLTAERVLRAHAEARTLEKELRALVTTMAPVLLSQPGVGPITAAQLLISWSHPGRLRSEAAFAMLAGAAPVEASSGQVVRHRLNRGGDRQLNRALHTIVMIRQRYHQPTKAYTTRRTGEGKSQRDVRRCLKRSVARQLFRLLERQAPRPVAA

SEQ ID NO: 146549 - protein, 341 aa, unidentified
MDIAVLGIDLGKNSCSVVALDSSGKVTLRRRMLRKTIVALTSKLTPCIIAMEACCGAHHLGRVLSAQGHTVRLMSPEYVRPYVKAQKNDDRDAEAIAEAATRPTMRFVALKSEQQLDMQTLHRARDRAVGERTSLMNQLRAVLLERGVIVPQGRAKLRLRVTELLQQSPEQISSRIRLLIEDMLMRWQALDEWIAGFDGEFAAELKRDEAARRLTSIPGIGALNATALVAAIGDAQTFARGRDLAAWLGLVPRQATTGGKPRLLGITKRGSKYLRKMLIQGARAALPTLSRSNTRLGQWLRGLLARAHSNTVVVALAAKMARTVWALLRYGTTFEPRAVAI

SEQ ID NO: 146550 - protein, 325 aa, unidentified
MNVPGKTVLKPLTFSNNKAGFELLDLSLRQLNQDCLIALEDTGHYAFNLLNFLHEQGYKVYTYTPLLIKEFAKSLSLRKTKTDKKDAHGIALKLLSDPNREQFQHDNRQVELKILARHIHRLKKKQSDWKVQYTRCLDIIFPELDKIVGKHSEYTYQLLTCYPNPQKRLEAGFDKLIEIKRLTASKIQDILSVAPRSIGTTSPAREFEIIENIKHYKRLIDKAEKCVNDLMAEFNSVITTVTGIGNRLGAVILAEIQNIHAFDNPAQLQAFAGLDSSIYQSGQIDLAGRMVKRGSPHLRWALIQAAKACARFSPAFKAYLKTKLE

SEQ ID NO: 146551 - protein, 338 aa, unidentified
MKITTIGLDIAKSVFHCYAVNKMGRFVNKKQLKRQQVLVYFAKLESCLIVMEACGGANYWARELADLGHEVKLISPQYVKPFVKGNKNDYNDAEAIAEAAQRPNMRFVPIKSVAQQDIQNFHRQRERIKKERTALVNQLRGLLAEYGIVINKGVTAVRKGLPGILEDAENGLTAFARELFAELLEELRGLDQRFEQCEQRLACLNQDNEVCQRLDGILGIGPITASATYAAAGDGKDFVNGRHFSAWLGLVPGQHSTGGKTVLLGISKRGNGYLRTLFIHGARAVLRHSAHKTDSFSRWAQALLARRGHNKACVAVANKMARMAWVIMAKGENYRAAV

SEQ ID NO: 146552 - protein, 349 aa, unidentified
MTMTIVEAARGITGGVDTHRDVHVAAALDPLGGLLGSESFSTDSAGYRALLAWLESFGDVTKIGVEGTGSYGSGLARYLKRVGIEVIEVDRPDRQKRRRAGKSDPLDAIEAARAALSGRAKGKPKSRDGAVEAIRVLVVAKRSARQARGKALVQMRHLGYSAPEQLRCRLKGLSVPALVAEGKGLRPTRSPDPVTAATKASLSSLAHRISSLDRELAELNERIEALLVATVPDLLELFGVGPDTAAALLMAAGDNPERLRSEAAWAHLCGVSPIPKGSGKNSGRVKAHDGGDRQANSALWRIVMVRIAHDPETQLYFERRVKEGKTTHEVIRILKRYVAREVYRYLPRG

SEQ ID NO: 146553 - protein, 388 aa, unidentified
MSKPVDLSKSLAALDQDSTLIVVIELSQSSWLAAARAPGVARDPLKKLKPDPEQLFKLIDRWREESRLAGRVVRRVCVAFEAGRDGFWLARLLRQHDIEAYVIHPTSIPVKRDHRRAKTDRLDTALLMRAFLGWLRGEADHCSMAAIPTLEEEDGKRPTREHESRVKTRSRIVNRMKGALARLGIQGFNPKLRKAAEKLEQLRTGAGEPLPPNTLAELRRDMAELRFVADQIKQIEKARETRLEKAPDEGMHPMVRLLASIKGIGLETAEMLVAEILSRHLRDRRAVARYAGLTGSPDESGSKRREKGLARAGNGRVRRGMIQLAWRFLMFQKESALAKWFEARTVDGPRGVRKTMIVAMARKLLIDLWRFVEDGVVPAGVVLFDPAG

SEQ ID NO: 146554 - protein, 399 aa, unidentified
MDRVCGLDVHKDSIFMCILTESAERTEEVFGTSTPELDRLRDVLVEHGVGKVAMESTSIYWLPVWRVLIADFELKLVNPSIRQLPGRKSDVKDAHWIAVVLQKELIRDSFVPGPVIQQMRQYNRRRFALTRNLQRAEQALDMVLQRSNIRLSNYVSDIGGKSMKKVLNALSQGETDTDILVALVHRRIINKHGKDTIRASLTGIVSCADRDMLCMCLEEAVLYEGQIKICEEKLLQLCMQYYERELELLQSVPGIKQLSAACIIAETGADMSYFQNAASLVGWAGLRPRNDESAGKIKGRKTLHGNKYLRIMLIQCAWGASRTRSSAFFLRYNNLKKRKNHNKALMANARKLLVVIWNILASKQGWHMQLSRLKNECFQGPYIYGGIQKHSGKKLRLSF

SEQ ID NO: 146555 - protein, 383 aa, unidentified
MKAVCGLDVHKDSIYLCILHSDGELFEQVFGVLTFQLEEMRKLLQKHHVSEVCMESTSIYWIPIWRVLSSYFTLRLANPYFIKQLPGHKSDVKDAQWIAECTMKELVKGSFVPPEIIQQLRQYDRRIFDLNEEIVRKVSKVDGVLQRCNIRLSNYVSNIEGKSYRDVVRRLSEGVTDPNELLKLVHGRIVNRHGAETILASLSGVVSQAETDVLRQLHEEIDIAESHRDECQQRMLEICEKHFPEELKRLQKIPGIKERAATSLIAEIGTDMSKFETANHLTSWSGLRPRNDESNKKIKSRKITHGNVYLRNTIIQCAWAASRQKDCFFSRFSYHQTVVRRKNKMKVLVAVARKLLVAVWHVLHDETDYVDFKLDREESANNG

SEQ ID NO: 146556 - protein, 312 aa, unidentified
MTEHCYCGIDVAKERLDVQVLPHRQRFSVDNNVTGWAELVERLHALAIAAVGIEPSGGYERGIIRTLLAAGLSVRRINPNKLRQFARARGILAKNDRLDAQLIAEYVSIMPTRAVQRAAAAERLAEVVTMRRQLCDEHVTIENQAAHVEDAILRRLNKRRLARLKADIHLLDKRMAEIVAADALLAQRYELLTSMRGVGPTLAFTLIALLPELGQMSRKQIAALVGLAPYDFDSGKLKGHRCIYGGRMPVRNILYMAALSAARYNPVLKIFHNRLAATNKKPKVIIVAVMRKMITTLNAMVRDNAAWQPRTA

SEQ ID NO: 146557 - protein, 413 aa, unidentified
MDKIYDICCGIDVHKKLIVACLNHKRKKELREFGATTRELMELAEWLQKNECEIVAMESTGSYWKPLYNIMESYGLHAIVVNPAHMKAVPGRKTDVKDAEWIAELLQHGLLQPSYIPSKDQRELRELVQYRKSLVGERTRELNRLQKMLEGANIKLSGTVTNINGKSARKILEYILSGNEIDEKKYDEMYEEKLIAHNLKASKEQILDDLKGFMSPLQRRMLKELLQHLDELNVHIENLNDEIDNFMKPEEKQASQVIQDVTGIGNTSAQTIVAVIGTDMERFPSDRHISSWAGLCPGDNVSAKKRKSGKIRKGNALLKSTLVLCAHAAVRHKSSYFHAQFKRISTHRGKKRAYVAVAHSILIAIYHILKDGVKYQDLGAEYYNQFNAERKIHAYLKKLKALGWEPPKEAVPA

SEQ ID NO: 146558 - protein, 372 aa, unidentified
MQDTAARKRKQVPEGYLVIGVDPHKKRHAAVAITQDFTTRAKFKFDNTREGLEMMLYRTRLEMVKSGCRGVIFAIETGGHYWRNIAYYLDERGIPFRFINQYTLKRRREGKDINRRKNDYRDSEVAAQLLCTREFVESVIPQGVYAELRTSHNAYQRLVKERTRITNLVKGLLDALFPEFTQVFKNPGGLTALSVLSTCTIPRVIAGMTEDEFVATIEARHKGRRLMRKKLRALHYSARTSIGIHPGARSVSSEIVFLVDKLELIRQQIRIMEGMLVKLVDETEEGKYLLSIRGLNYIAVAGLLAELGCFKLYRSAKQMIKMAGSNPTESESAGKKRSKTPMSKQGRPLLRYCAWTSVIPMLRFNPDFRAWA

SEQ ID NO: 146559 - protein, 345 aa, unidentified
MHYVGMDCHITTLDFAVVDDAGRLVKSCKVDTSAKNFMEFVKSVAAPRIVYMEESALAAWALETCIRFGEKLVITDPKQNHWIGSSTQKDDPLDAFKLAQLGRGGFIKEIRHPVGDRRRFRELMDCYHDTVKSTTRIKNKIKSKFRQNGIHCTGMTVYSETYREEWRQKLPQDQTLLLIVEGLWNQLKESEQTEKNLLKAARNFAKHYPEIKLFEDIPGIGFISAATISAILETPHRFANKRKVWMYAGLGITIRSSGSKTYSEKLSKDYNRLLKYTLKQVAETAVQAKDNPFRQKYLAMTTLRGIAPHRAKLTISRDLLATMWAMWKNGEKYNPEIRRSLVLNK

SEQ ID NO: 146560 - protein, 398 aa, unidentified
MKMPRPLRERIIEMQVMMEGQSHFQPFGVPYWGRQDLNKGVGSMTASYEYHIGVDYHKSYSHLVVQDSAGKTLRSGRVKNDRQSLGGFLERYRENSHAVVEATRNWMVIYDWLDDICDDVVLAHPLKVKAIADAKIKTDKIDATVLAHLLRADLVPEAWAPSDKARELRVALRERMFYVRLRTMVKNRIVTVFDRYPEQTAQLKKLGDLFGKAGRVQLAQVKVSEIDRIQIDRGLDFIGDIDVRIKQSEATIRAMTRANGNVKLLKTIPGIGEFFARLIDAEIDDIKRFRNPKKLAAYAGLVPSTYSSGGKTFHGKIIRQGNKWLRWAFVEAVTPAIVTDPQLRAQYEHLKLRGVNKARVAIARKLLTIAFQILRDQRAYEPRGESTTEGASTISRLS

SEQ ID NO: 146561 - protein, 380 aa, unidentified
MRKNITKKTDTVGKKDTTGKKGTAADAGAEVAGVTIGMDMGDRAHKAVVLGADGREVERREVANTEAGVAAFLGRHPGATLAIETGTHCRWTGALAAALGLRVLVANARKVEAIWKSSNKNDWRDAEMLAKIARTDKSLLHPVRLRGAGDQRLMRLAKSRDLLVRFRTATVNQVRGFCKSEGARLKKCSAESFARLKGDLPAEVADVACHLFEVLGKLNETIRAYDGILREAVLRLRKEDAEAVMQIPGVGPVTTAVFLAAIGDAKDFGKPRDAGPFLGLAPRRGQSGESDPQLRVTKEGNGMARRALVTAANYIMGPFGKDCDLRRHGERIAARGGKNARKRAKVAVARRLAVTMLALARNRTEYRPLMGEPAEAEATQ

SEQ ID NO: 146562 - protein, 315 aa, unidentified
MTAEIFIGIDVARDNLEVAVRPAVEQWRVANDTAGIAELLLRVRALHPTLIVLEATGGLELPVLGVLGSAGLPVVAVNPRQVRDFAKATGKLAKTDALDAHVLAHFADAVRPAVRPLPDAATQALSALVARRRQLVEMLTAEENRRTSAAAPIRADIQEHIAWLRKRLKGIERELSQALRNSPLWREQEDLLRSVPCIGPVVTVTLLADLPELGILGRKQLGALVGLAPLNRDSGTLRGKRSVWGGRSTVRAVLYMAALVGTRSNPVLKALYTRLLAAGKNKKLALTACMHKLLTILNALLKHRTFWAPPTTVGA

SEQ ID NO: 146563 - protein, 344 aa, unidentified
MQINTIGLDIAKNAFQVHGIDAAEKVVVRRQLRRGQVIAFFEFLPPCLVGMEACATSHHWARELTKLGHEVRLMPAKDVKAYVKRNKNDAADAEAICEAVRRPTMRFVRVKSTEQQGELMQHRTRDLLMRQRTQVVNALRAHLAELGIIAAQGREGLKELLAIIADEANERLPVNARVSLMVLAAQLEALQTLIGSIEKRIVTQHRLNQASKRLETIPGIGVIGATAIAATVTDPTVFRSGRDFAAWIGLVPREDSTGGKRKLGPISKRGDRYVRRILVVGAHAVLRRAKQNPQRYPWLTELLARRPFRVVAVALANKMARVAWALLARGGTYRAPEIALAAAR

SEQ ID NO: 146564 - protein, 398 aa, unidentified
MVPSDYAVFVGLDVGKEEHHACALDRGGVRLHDKVLPQSEAQIRQVLTGLATRGPVLVVVDQPASIGALAVTVARDVGIDVAYLPGLAMRRIADLHPGNAKTDARDAYVIAEAARSMPHALRRVDAGDEALADLEVIVGYDDDLAGEVTRVSNRIRGLLTQIHPALERVLGPKIQHAAVLELLIRFGGPQGLAGASRRQLLAATKTRAPRSYERLLDALTAALGEQTVTVPGTRAAELVLPKLATTLRELLQQREQAAGQIEEMLDAHPLSTVLTSMPGIGVRTGDRILLEVGDGSSFPTSGHLAAYAGLAPVTRRSGTSIRGEHPARGGNKQLKRAFFLAAFASLSDPTSRAYYDRKRAAGKKHNAALICLARRRIDGLHAMLRNGTLYEARTPAAA

SEQ ID NO: 146565 - protein, 347 aa, unidentified
MPEDIVLSVDYHDQNCVIRRRALGSGAEEVFSVPTTDGDLRRVLAQARASAGRGGRVVWIQESTTGWARVQALLGGRVEFVLANVLQMPLPPKGRRRKTDKVDTARLQREYLNGELPRAHQPPAWWRRLRRLVACREDLVSRRTALRNWVNRYLAHETWEDRAGLWSAKGRRRLSAITARLPRPDALVLGTKLAELDRSPAALAGVEAELFAAYHECPDAQRLDAVRGIGVVAAVSIVARIGPVGRFGSAEQLIAYAGLAPGVRQSDRTRHDGRIGGGGTDKHLRHYLIEASVWARQVPRYRATYERAARRRGPKIGRLVVARLLLRSIYKVLRDGVAFAPAAAAGG

SEQ ID NO: 146566 - protein, 459 aa, unidentified
MERKMKIGMDVVNFNASGIDVGSRSHYVAIGQELEDVKEFGVYAEDLTALCQWLLECGVTTVAMESTGDYWQNLYTELIGFGFEVVLANGKFTKNAKGKKTDVKDCRWIQKLHTLGLLTGSFLPDLETEQLRTYCRQRGNWIELASSATHKMQKFLKLLNFRLDVVVKDVCGLTGMKIIEDICRGNLDPYQLAEHRHYNCRKPKEEIARALHSNNRPDYLFGLEQELENYKFCQRKIKACDHQIERTLKVHIKLHPERKKLNTVEKPHKRTNKNAPQMKDMNQLAFQYFDGVDLFAIEGLSHASILSIMSEIGPEGFKKFRTAKHFTSWLRLAPNNKISGGKILSNRVPKGSNRLKIALRQAANAIGNLKDTHLSDFFRRVAYRKGRHSAVSATARKLAVIVWNMITKKIAYQPPKQYLFLDQKRKLGLVNRIKKQIDKFELKPEDLGFANNLNTNNLI

SEQ ID NO: 146567 - protein, 402 aa, unidentified
MQDSATIDAAVFVGVDIAKGDHYACALTREGAEVLARGVPNDEAAIGRLIDEAAARGPAALVIDTTSSAASLLIETAARREVPVAYVSGLSMRRAADLYAGAAKTDPKDAFVLADYARRNSDRLTWVEPGDELLARLRILNGRDADLAADATRAANRLRDALLAVSPALERAVGDKLASNAGLRDALARWGCPTALRAAGKARVRARVAKRSPRAAGRLTDAIWAALDAQSLTVAAEAAWGDAVSELAADLDRVCERRGRLAGDIEAAFLAHPLGKVLASMRGFGPRTGARTLAEIGDPHRFADGGRLAAYAGLAPTDWQSGRSHTARKPRGGNHRLKNALFTAAFVATQHDPDARAYYHRKRSEGKRHNAAVICVARRRCNIILAMLKTQTHYQPPQPQPA

SEQ ID NO: 146568 - protein, 412 aa, unidentified
MQDILTCAMGLDVHRDIIVACLVKGAVDAEPEAETRTFSTLIPEMQKLRDWVIESECRNIAMESTGIYWKPIYEMLESCFDGEISILVVNARHMKNVPGRKTDMKDAQWIATLLRAGLLKGSFIPDKAFRELRHLTRYRKSVVHDITAQKNRIDKFLQSSGFRFTAFLSDTFGASGRNIIRHLIEHGSIDREALDKCLKTKTRNRIDEILVALNGSLSEHQRRFLNMVFRHLEDLEAHKHTVEDEITEEVLKHTDALNLLCSIPGIDVTAAAAIIAEIGTDMSSFPDSQHICSWAGLSPGNNESAGKRKSVHINKGNPYLKSMLCEVAWIMASHRKLYLSGWYWKVKQRKGAKRATIALARKILSIIYTMLKTGTPYNEECFEQRRLRCERKRANRLVNELQKLGYVVVAPD

SEQ ID NO: 146569 - protein, 360 aa, unidentified
MDPFAPSDTEALITLGVDTHADVHVGVALDRLGRRLGSKNIPTTEAGYAELVAWAESFGALDCVGVEGSGSFGVGFVRFLRARGVGVVEVNRPNRQHRRRFGKYDTADAEAAARAVQANMATGEPKAADGIVEMMRALRVARRSAVKARTQAANQLRTLLFTAPEELRTQLCGLSTNRLVSTAAGFRPGREPRDLVAVTKLAMMSIARRHRDLSEEISALDERLKQLVAQAAPALVALKGVGTDTAVSLLIAAGDNPERVRREAAFARLCGVAPIEASSGMIRRHRLNRGGNREANRALYVLVLGRMSWDERTRGYVARRTAEGKSKREIIRCLKRFVAREIYRILTATPPVLPSPLSGS

SEQ ID NO: 146570 - protein, 355 aa, unidentified
MEKPEITVGLDLGDRFSHYCMLNGDGDAIESGRIQSTEEAIRCHFEGEPAMRFALECGTHSPWLSRLLEQLGHQVIVANTRKIRAITASESKNDKNDAEKLARFAFCDPRLLSPIRHRSRQRQQDLNLIQARSTLVRARTMIVNALRGLVKSAGGRLPACSPQGFEARVEASIPSALAEAARPLLNQIAALNASIQQMDRAVEQLGNRYPEIPVLRTVPGIGPLIAAAYVLTLDRPDAIQHSRQAGAFLGLRPRQSQSGDSDPQHRISKTGNVYLRSLLVQAAHYVLGRFGPDSELRRWGLKLAASGGKRGKKRAIVAVARKLAVILHRIWTTGSPWQAFPQSANNTASKNVRMA

SEQ ID NO: 146571 - protein, 342 aa, unidentified
MNFIGLDIHKKTISYCVKDNSGKVLSEGKIPATRQGLQEWIRTLAKPWTVAMEATMFTGWIYDYLRPHAAAVKVAHPLMLRAIAVAKKKNDRIDAGRIADCLRCDFLPECYMAPMEIRQRRRTLRYRKLLVRQNVQLKNKIAQLLMESGVTYNKEKLHQQGYFHQVLPANQEIDPSVWPLLKLTREMIERTQKTERALLRSLEADPLLAARVERLMTIPAIGHVTALTWVLEVGEVERFHSVKQAISYCGLCSGEKTSADSSRRMPISKQRNRHLQTVLLEAAHLAPRLNPELAVLYEREAAQSNHNQATIAVARKLAAYLLAIDRGERAFVTHQVHSRDAA

SEQ ID NO: 146572 - protein, 476 aa, unidentified
MTQNLKPTSTMRKKTKSTKRRANPPRLESNHHPHAAGLDISSREIVAAIPPDSTDGDTVRSFSTFTQGLHELRDWLLKNQIATVAMESTGSFWIPCYGILEKAGIEVFLVNARHVKGVPGKKSDVLDAQWLQQLHAAGLLNKSFRPADDIASLRALLRHRSHLVADSSSQVQLMQKALNEMNLHLHHVLSDLDGHSGMAIIGAILGAILGGERDPATLAALRDIRCRSPKDKILQALRGDYRAEQLFILRQCHQTHGQLLKQIAELDSEIQKNLELLTQSLPPVPADFKPAKSLRGHKTHTGDHLFKQAWRFYGVDLSSVDGVSAATLATFMGELGTAEQIRKAFRTPERFCAWLGLCPLNQISGGKILKTSTRKSNNKVAASLRLCAQSLSRSQTKLGDFCRKMKGRLGKAEAITATAHNLARILYAMIKTKKTYDESLAFKTTPEKEARRLKRLITSAKNLGFDLVPIPKPLSC

SEQ ID NO: 146573 - protein, 345 aa, unidentified
MSIVGGLDIHRKQITFDYLDTVTGQVRRGQVSPADREHLRAWLARFAGREDVAFAVEGCTGWRYVVEELAAAGVAAHLAEPADTAFARGRKRHAKTDKTDCRHLRMLLAEGRLPECWIPPGHILECRALLETYHDLRAEHTAWVQRIHAVLFHQGAPALGEGALRTGQGLAALRAAAADCLSPAGQLQVATALEITEALETRLHAVRHELLDAARHLAGAKVLAARLYGVGPVTALAMTCWLAGEGRFSSSRQAVRFAGLDVTVHSSDRKGPPGRLSRQGPPVLRWAVYEAGKTHARSSAPDHGYYAQVKDRCNGKRAALSEARKILRQACHILTELGDDALSAA

SEQ ID NO: 146574 - protein, 340 aa, unidentified
MSEVTTIGLDLAKHVFQVHGIDAQGATVLRKRLRRGQVLAFFSRIPRCLVGLEACATAHYWARELAALGHEVRLMPAQYVKAYIKRNKHDAADAEAICEAVQRPSMRFVPVKTAEQQAAQLLHRGREQLVRQRTMLVNALRAHLAEFGIVAAQGLRNVAQLIAIVRDEDDLRLPDVARQVLQVLANQIEQIEAAITALEKQLMAWHKTNPVSQRLASIPGIGPIIATAIATTVADPNVFRSGREFGAWLGLVPRQNSTGGKTRLGGITKRGNRYLRRLLINGASANLLRSKATKADPWVIGIRRRRPPLVVAVALANKTARIAWAVMLRQEQYQPRALAA

SEQ ID NO: 146575 - protein, 368 aa, unidentified
MTTEASTVIGGVDTHKHTHYAAAVDQHGRLLGHQEFPATDRGYQRLLAWMRRHGQIAAIGVESTGSFGATLTRALTKAGARVVEVNRPNRLARHMDGKSDRLDAEQIARAVLGQTSTAIPKAKSGMVEVIRTLRVTRASAVKARTQAFNTLWGVMIGAPSPLRDELVVLTKRTLVKRCLRLRPETQDLLVLSADSDRLLMAGVKTALRNLARRWRDLDEEIKALNQQIEALVRSTAPELVQLHGVGVELAGQFLVTAGDNTNRIHSEAAFAKLCGVAPQPASSGRTTGRHRLCRGGDRAANSALYIVAIVRIRHHQPTRDYLQRRTAEGLSKREIIRCLKRYIAREIYNNLPRPATAALSLPAVPAAA

SEQ ID NO: 146576 - protein, 429 aa, unidentified
MNYTQNEKIEQVTDSTLVIGIDIGSQTHYARAFDNRGRELTRKVFSFGNDIEGFNTFNQWAENIKTEKNKTKVMIGCEPTGHYWFAFAKYVGEHDKTLVMVNPFSVKKIKELDDNSPKKTDAKDPKTIAKLVIDGRYSIPYMPEGIYAEIRDLVYSRDRIVKQHNISANRIQRWLAIHFPEYLGIYTSFDATSGLAVLEKAPLPKDVIALGVSGIRKIWHDKKMRGRGVTEDRAKTLVEAAHNSVGLDGGAGTRSELYMLLEEHRLWISQLEAVEKAIVQTVLKVDHVEKLLAIKGVGVITIAGFIAEVGDIRRFKSPKQIQKYAGLELVENSSGKHKGRSRISKRGRRKLRRILYQVMIPLLASNKEFRGIYDYYVTRVKNPLKRRQAMIAVSCKLIRVFYAVLTKGMDYDRFKMMSDIHRNSELIAA

SEQ ID NO: 146577 - protein, 314 aa, unidentified
MEPVYVGIDVCKEALDVVIHPCGEHRRFSNELSGFRKMWRWLAIHDLVQIIVEASGTLHRAVCRYVHQQGVAVTIANPYRTRQFAQSLGLLAKTDKVDARMLAMFGAYLKPTPSRIASAQQERLQNLLTLRGQISTQIASVKTMDKAHTEPMAKALMHAQCELLQAQRERVDAELLAIIEAEPALQQKYAIVRSIKGIGHVNAVLMVAHMPELGQCNEKEIAALIGVAPYNRDSGSMRGKRMIKGGRKHVRNGLYMAAVSAARHNADMRQFYDRLIAKGKSHKTALTAVMRKLAILANALVKQNRHWNENYACA

SEQ ID NO: 146578 - protein, 352 aa, unidentified
MITLGIDAHKRTHTVVAVDELGRQLGTKTTRATTTKDHLGIVEWADQFGIDRTWAVEDCRHLSRRLERDMLAAGERIVRVPPKLMAHARDSARTYGKSDPIDALAVARAALREPGLPTAFLDEESREIRLLVDHREDLVAERTRHINRVRWHFHEIDPGWAPKERGLTAFKNLDLAEERLCGNDTTLGRITRDLIGRIRELTTEINKLASELDERTSDSAAHVRAIPGVAALSAAKFIAEVAGIGRFKSKAAFARHNGTAPLPVWSGSHERHRLSRTGNRQLNAAIHRIALTQARHHPDAIAYLERRTTAGDTGKEAIRALKRRLSDVVHRAMTADLAAASTQASTHEPLAA

SEQ ID NO: 146579 - protein, 339 aa, unidentified
MGLHCGIDLHGDNGFYGIVDEEGKRIFKKRLPNNLDEVLIALAPYKDNLVNGVVVESTFNWYWLVDGLNEADYRVRLGNPAAMEQYNGLKNTDDETDAFFLAELSRLKILPEGYIYPKEDRPVRDLLRRRLLLVHQKTAHILSFKSLLARQNGEDISSNRVQQLKTDDVKPFFDDEHLVLMGQTNISTIRFLTERIHEIENVVLGEAKLRPEYEKLLTVPGVGKILALTIMLETGELSRFEKVGNYTSYCRCVKSRRLTNQKPKGENNRKNGNRYLEWAYVEAANFIRRYCPEAKAWYQRKLSRTNRVVATKALASKLAKACYFIMKDQVAFDVKKIFG

SEQ ID NO: 146580 - protein, 346 aa, unidentified
MRYFIGIDISKFKHTAAVIDQDGVVHIEPFDFDNDIIGFNSFFTSVSSFIQDDFIIGMEDTGHYADNLQKFLLSKNLKVAMFNPLATNHIRLAFNLAKNDRLDSLTIASALAMPRLYRIIEDEHFTYHEIRELSRYHQSLSKTMNRYKNRLQKFIDIAFPEFNKLFDTKYSKTYLKILKDFQSAQNIANTDIRTLRKALLSKGRCVSITAEELKSAARDSIGHSHTALDLEIQQTVEMIEKIDSNLNIVDKKIEEFSLQLNSPILAIPGISHISAMSILSELGDFTQYESAKKIIKLSGTNPYIYESGTYRLPLYLPYRLSFFFYSTFLSQYFNSFKGSLQSEITK

SEQ ID NO: 146581 - protein, 352 aa, unidentified
MLESIKTETQTQGIVGMDLGDRSSQLCRLDRESGAILDEQRVSTTTAQLQSYFGALAPQLVVLESGTHSPWVVRLVRQLGHEVIVANPSKVRAISASRRKTDERDARCLAQLGRVDPELLCPVHPRSEEAQRALAVVRCREGLVRARTQLINQVRGTVKSFGHRLPSGSTASFARRATQALPVPLKAALDPLLRIIAELSQEIASFDKDVEALAERWPATQYLRQVKGVGALTALVYVLIVGDPKRFARSRAVGAYVGLVPASRNSGNSAPQLPITKQGDQLLRRLLVQASHYVLGLGEDSDLKRFGLQLAQRGGKNGKKRAVVAVARKLAVLLHRLWIDKSKYVPLRSATA

SEQ ID NO: 146582 - protein, 338 aa, unidentified
MNMSLLAIDLAKNVFQLHGVDESGQPVLCRQVSRKKLPQVVHNIPPCRVVMEACGSAHHWARRFQAMGHTVELIAAQFVKPFVKSQKNDRADAEAIAEAASRPTMRYVPIKTIEQQDVQTLHRVRSLLMRDRIAQGNQIRGLLAEYGVIVPQGSTQVRKLLPAILEDADNDLTVLTRQMFAELYERLVALDERIAHYDRQIQQLHRASPQSCRLEQVRGVGPLIATALLASIGDAKAFKNGRQFAAWLGLVPRQHSSGGKPRLLGITKRGNTYLRMILVHGARAVVAQATRRDDSFSQWINALRKRRGTNVTVVAVANKTARVIWTMLAKGEDYRPAV

SEQ ID NO: 146583 - protein, 362 aa, unidentified
MNQRYEKSVQYVGIDLHRRRSVVVRMDGEGEVVDCVRIDNSVSNLVGEVAKAGPGAEVAVEATYGWYWAVDALSQAGFVVTLAHPRGIASMQHRRAKTDQLDARELADLLRIGRLASAWIAPPQVRELRELVRYRHKLVHTRAGVKASVHAVLGKCGVIPQIADVFGPVGVKMLDALVLPEPYASRVASQRRILAALTAEITLLEVETASRLKDNPEYRALLSIDGIGPVMASIFVAEIGDVHRFTSADQLACWAGLTTRVDSSDAKTRRGHVSKQGSRLLRWAAVEGCQRAREPYLAERRRAIVARRGKSAQHIATVAAARHLIRIVFYTMRDGHARCLDGPIRATAAPATPARVRVPALR

SEQ ID NO: 146584 - protein, 362 aa, unidentified
MAESTTIVAFDQHAATTVAAVLLPGHRTPALHPMTSELAELRSWIRRLRRHGAVRCCYEAGPCGFELQRALQADGVPCDVIAPALIPRRPGDRIKTDRRDAGQLAVLYRAGALTAIHIPTEQEEAARDLLRCREDIRADLLRARHRLSKFLLRHGRRFTGTKKAWSRRHDTWLRAQTWPIPALDQTHRAYLRAVDEAVARLRAVEVDLQALLTLEPLRARVARLRCFRGIDDLTALTIAAELGDPRRFPSAPSTMAFVGRVPSEHSSGTKRARGAITKTGNAHLRRVLVEAAWHYRHHPFVGDALRRRQQGATDAVTACAWAAQQRLHRRYRVLAGRGKPKQHVVTAVARELTGFVWAALTQ

SEQ ID NO: 146585 - protein, 418 aa, unidentified
MAFKIFRKNCCGLDVHKTWIYACIGITDADSRTEYKQARFSSFSKGLQELSSWLAKYSCTEVCMESSGKYWIPVFNILEKTCWVTLAHPKYTKPQKGNKTDRKDAKWICDLFMCDMIKPSFIPPPDIRHLRDLLRFRMKLTYQITGMKNRALNCLTVSNLKLDDVFTDVFGKSSRSIIQQILDHPEETFDVTPYIHKNCKHPVEEIQAAIDGAICPEQATKLKICLDFIDEQERRIAELDTEIFRLAEPYSSVLEFMRTVPGFSKEPLTAIRLLSEIGSDMSVFPTSKNLVSWAGCCPRNDSSAQKVKSTRISRAGSYLKPLLVQIANALLRSKEHPEFKERYRRIKARRGHKKAIIALCRMLLTAIWNVLSKCEPYSAKGYLADKLTEHSVVISKAEGLALLRQRGYIFKDEVADFA

SEQ ID NO: 146586 - protein, 367 aa, unidentified
MKKSIKIFVGMDVHKESIDMTVAEVGGEVRRWGQIGGERAALEKAVRKLESQGGKLHFVYEAGPCGFWIQRLIAARGHACWVVSPSLIPKKSGERIKTDRRDSEQIARMARAGELEPIYVPGEADEALRDLVRTRDDAMIAQRRARQQLKALLLRNEVRYSGKSSWTQAHRRWLAEVKLAQPVQQIAFEEYVDAVEVASGRVERLTRAIETSTEGWRFAPVVEQLQALRGVQFVHAVTMICELGDLARFDNPRQLMAYLGLVPTENSSGERRRQGAITKSGNRFARRALIEAAWAYQHPARVSPVIARRQKGLPKRARDIAWKAQLRLCARFRKLCARRLNKNKAVVAVARELAGFVWAIAKDVKIS

SEQ ID NO: 146587 - protein, 355 aa, unidentified
MQRNKKTFKGQNIYIGIDVHKKNWQVAVITESGYTERLSTAADAKALFKFLKSHYPDGNYRAVYESGFSGFATHYALSDLGVSCVVAHAADIPSSQYELTMKSDRIDAEKLARALRAGLVRGIYVRPKDNLDDRGVLRIRKTIQIQVGGYKTRIKHLLHSNGVELPERFSRSGTHWSRAFIAWLREDVRLLSDTRRSLELLLLQVETLRANLLEATRRVRALSMTDRYREDCALLMGIPGIGLTVAMTILTEVCDIGRFGNERQFASYLGLVPSSGERVSHGEMTFRGNKHIGPLLVEASWVLIVRDRELGRMYTEYRWRMAGQKAIIKIARKLSNIIFAVLKTRKAYEPYRRDA

SEQ ID NO: 146588 - protein, 322 aa, unidentified
MESQVSFNQVVSRGCGIDVHKKMLVATISGEGLNTETREFGTVTRSLTELKDWLLENRVTHVVMESTGVYWKPVYHVLEPSGLTVWIVNARHVKNVPGHKTDKQDSRWLCKLLLAGLLKPSYIPPREQRELRDLTRYRTKLVQDISSNKNRIIRILEDCNVKLSSVLSDTSGVTATRLIDKLCQGKEVTMGDIEEVYHKKIEATKEELFEACNGYITDHHIYLLGTIRGNNRHLESLIRDLDEKIKQALAPYENALERLREIPGLNRKSVEDLIAEIGLDMDVFPNEKHLSSWVGVSPGNNESAGKKKTDAPPTGTSRPNPS

SEQ ID NO: 146589 - protein, 331 aa, unidentified
MKKKDVIGIDVSKLTIDAYLKMAQAHAVFGNDTKGCRQLVKWIRKHTDCKTEELLICFETTGLYSLQLASFLSQSNIDFVMENPIQIKRSMGLVRGKDDHVDSKRIAEYAYMRKEKLKLTQLPSEELIKMQNLLAIRERMIRQKAGYQVSLGEYKRVLVQEQQKDFFLLLNNMINALKKQIRKADETLIEIIHSSSKLLNIYTLLTSIKGIGVILAANIMVTTICFTKFNDSRKYACYCGTAPFKYSSGTSINGRTKVSQMANKKMKALFNLAALSAIQHDPELKLYFDNRMANGANGMSTINIIRNKIIHRVFAVVKRGTPYVVMAKYAA

SEQ ID NO: 146590 - protein, 416 aa, unidentified
MNAVGIDISSRKSTVAVLRPLGEVVRLPFDVTHDTEGLASLAEQLKALDGETRIVMEHTGRYYETVAKALHEAGLYVSAVNPLLIKEYGANSLRRVKTDKADAVKIARYALDNWADLRDYTPMDTTRYDLKTLNRQFQLASKQRTASANNLIALLEQSFPGIRKCFDSPVRSDGTQKWVDFAHTFWHVDCVRKQSLNAFSERYRKWCRHHGYFFKQSNAEEVYTLAKNAVVLTPKSQVIKVLVQEAANQLTSISRSVETYRTEMERLASMLPEYPVVMKMYGVGKSFGPQLMAEIGDVRRFERKQALVAFAGIDPMPNQSDDKNVRSNKSSKRGSPYLRKTLFNIMGIYLKCAPKDEPVFQFLDRKRSEGKPFYVYMIAASNKFLRRYYAKVRDYLAILENLPSVDMDSTRLKAND

SEQ ID NO: 146591 - protein, 340 aa, unidentified
MQITTIGLDIAKNVFQVHGIDAAEKAVVRKQLRRGQVMKFFAALPPCLVGMEACASAHYWARELTKLGHEVRLMPAKDVKAYVKRNKNDAVDAEASCEAVRRPTMRFVTVKSAEQQGQLMQHRTRDLLMRQQTQVINALRAHLAELGIVAAQGREGLKQLLAIIADEKDERLPIDARASLIVLAAQLQALHTMIGSIEKRLTVQHRANEASKRLQSIHGIGVIGASAIAATVTDPKAFRSGRDFAAWIGLVPRQDSTGGKHKLGPISKQGDRYLRRILVVGAHSVLRRAKHNPQKYPWLTQLLARRPFKVVAIALANKMARIAWALLASGGHYRPRLAAA

SEQ ID NO: 146592 - protein, 404 aa, unidentified
MFYFGIDWSQAHHNLCILNEAGARVSRMEFEHSLSGFERIETERCKLGVAASECLVAIETAYNLVVDFLLEHNYVIHIIPPQATDGYRNRQRSSGAHDDDSDATLLAGILRTDRDTHRRLRPNTTLTQQIAAQIRLIETLRRSIQRQENQLRAALLRTYPTALGLFGEVTTQIGLEFLIAYPTAQAAHGLSLDSFKAFCQDHHYSRTDLLPKRYAHLIETVPLASPAAVLAYQDHVRVLAQVLLPQVRCRSQALTQLGLLFEQHPDAPLFASLPGAGNLLAPGLLVKFGDHRDRFPTPVGVQALAGTCPVTERSGKKKLVKFRHGCDKEFRRIAQQFARASLLESSWAAAYWDELRPTCASDSHAYRVLANRWLAVIWKMWHDSKPYDEAYHLQQRALRRKPRA

SEQ ID NO: 146593 - protein, 341 aa, unidentified
MTKAITIGIDIAKNVFHLHGAAPDGAVVFQRKLSRARLLDFLAKQAPCLVAMEACAGAHHWGREIGRLGHVVRLIPPQYVKPFVKRQKNDAADAQAIAEAASRASMRFVAVKSAEQQAQAMVLKVRDLLQGQRVQTINALRGHLAEHGIVAPQDPSNVVKLEAALDDLGLALPEIVIELCRGLFDHLRALSGQIDALTARIKAAARRDATAKRLMTVPGIGPICATALTALAPPKESFAKGRDFAAWVGLTPKQHSTGGKVRLGRTSKMGQRDIRRLLIIGAMSVIQAAERRGGAPVGSWLARMLARKPKMLVAVALANKMARTVWAVMTKGEIYRVPLAA

SEQ ID NO: 146594 - protein, 377 aa, unidentified
MHSENIAAYIWLDVHKETLAVAIAAPERLGEVRYYGTINNEAQAVRRLFQKLQGLYGNILSCYEAGPCGFGLYHQLTAMNIKCQVIAPSRIPKSPTDRIKNDHRDAISLARLLRAGELTPVWIPDLTHEAMRDLIRARAAAKRDSRVARQRILSMLLRTDKRYAGKHWTGKHRTWLANQSFSQPSQQIAFQHYCQSLEQIEDRILQLDQEISRLLPEWSLCNLVCQLQALKGVGQLTAITLVAELGDFSRFSSPKQLMAFLGLVPGEYSSGNSIRPRGITKVGNSELRRLLYEAAWSYRTPAKVGAWLIYYRPDSVTQYSKDIAWKAQQRLCSRYRSLTAKGKKSQVAITAVARELTGFMWDIALAAQSSFSQQKQN

SEQ ID NO: 146595 - protein, 365 aa, unidentified
MSIAHQPAGFREFFCRVETQEARYGCPVSVAMEAYNGYARPLDGLVLLHEYRLYNINNLKFARFKEIFPGAAKTDALDARKGLELFQLRDHLPLAKQVLQEVGVIPEENRVLKRLTRRRRRLVNEKTRVLNNLQADLQAVCPNLLAITNEAENLWFLRLLTSTDRLPKLARVQRKSLLKIPGIGVKYADTIQSWQKEAQWSSEVEWVGEMIQEDAARVLELQENIKALKAKLAKVSECSTMARLLDSIPGFGLICASELAGEIGTLERFHSEASLSLYFGMAHLDNSSGKKTGSKPPTHVNTRAKAAMMIAVDRHRKQVPASQRYYEKKRAEGKGHNQAIRALGRHLCRIIYKMLKEERPYQLRE

SEQ ID NO: 146596 - protein, 465 aa, unidentified
MKTKRSKAKIRGDRKGISVPCSEPAKELRILRPDAAGIDCGAQEHYVAVPPDRVSVGQPTVRRFSAFTEGLDAVVDWLKDCRVTTVAMESTGVYWIPLHQKLETAGIEVYLVNARHVRHVPGRKTDVQDSQWLRQLHRFGLLNASFRPEDIICRLRSLHRHRDNLVSSSASEIQHMQKALQQMNLHLHHVVSDITGLTGLRIIDAILAGQRDPQQLVRLRDRRVYKSTPQEMQAALVGDYRGEHLFVLSQSLQAYRFYQARIEECDREIEQLPEPKPTSSPKSKRKRKPRANEPKIQLAGLLERICGIDLTQVVGLNVLNVLLIVSEIGVDMSKWRSAKAFCSWLGLCPGNKISGGKLLDSRTRQVVNRVADALRLAAQSAGRTQTCLGIFYRRKQAHLGAPKATTATARKLACLIYHLLKNKQPYQEPDSASYQLRLQKSALSKLQRQAIALGYTLLPTAPVPA

SEQ ID NO: 146597 - protein, 451 aa, unidentified
MGRKKKLELEIINPNAAGIDVGSRSHFAAVGQNLDEVKEFGVYDEDLKKLSAWLIENNIDTVALESTGDYWQNLHSQLLEDGLKVILVNGKFTKNIKGKKTDVLDCMWIQKMHTLGLLSGSFLPDDITMQLRTYCRQRLNMLRWSAQASSKMQKYLKFLNFRLDVVVSDVCGLTGLKIIGAICDGNLNPNELAKMRHYNCRKSEEEIEKALQGNNRKEYLFGLKQEFESYQFFKQKIKECEEEIKEFLETYFLSQEFPIDDMPSKKPYKRLNKNAPKNIDLNVASYQYFGGVDLMAIEGVSHSTLLTLMSEIGPDGMKKFGSAKQFASWLRLAPNNKISGGKTLSNRTPRGSGRLKIALRNSANAIGNLKEGQLAKFFKRIAYKKGRQIAITATARKLAIIIWKMVTNKEEYQPAESHMFLDEKRKLGIVKRMRKKIAKLGITNEDLGLST

SEQ ID NO: 146598 - protein, 412 aa, unidentified
MLFVGDDWAEGHHDIEIVDDEGKVLVRRRLPEGLQGVTRLHALVAEQLPDDWIDRDPEQAAALVKVGIETDRGSWVGSLVAAGYEVFAINPLSVARYRERHSTSGAKSDAADAHLLAEIVRLDRAHHRPVAEDTDLGEAIKLTARTHQSLIWDRSRHVARLRSTLREYFPAALLAFEDLDAPDALELLARAPDPDQAARLSAAAIAASLNHAHRRRVEDRTKRLRSILHAPELQQPPVLQNAYAAVVTSEVAIITALNAQIDRLGAVVGEHFGRHRDAEIYASLPGLGVILAARILGEFGDAPGQYADAKARKNYAGTSPVTRASGTKKIVLARYARNRRLGDALQQWAFCSMRGSPGAKAYYQQLRARKIGHQAALRQLANRLVGILHGCLKTHTTYDEHTAWAHILTATA

SEQ ID NO: 146599 - protein, 359 aa, unidentified
MLQSPITATPKLYIGLDIHKKSWSVHFRTDLFDHRGFNMPPEPEQLLVYVTNHFSGYEVNITYESGCCGFSAARFFEQQGWHVTIVNAADIPRSNKLHFQKSDRIDCRHLCHQLEAGQLRAIYIPSEYQDHLRSLVRHRNSIVKQLRQVKLQIKGMLLYQGVTIPVEYDNANWSKLFLQWLQELPWAYHPAAYSMQSKVRILLMLHTEYLQSANELRSYCRQHHKKDYYLLKSIPGIGGYLASALLAELGDIRRFDNEKQFSSYIGMVPAMRSSGGTESTLGITPRSKNLIRSYLVEAAWVAIRRDPEMQAYYRKHFGKNIKNVIVKVAHKMVKRILSVIKNETPYQVNHQQQSTLKLT

SEQ ID NO: 146600 - protein, 344 aa, unidentified
MQITTIGLDLAKSVFQVHGVDATGQVVVRKSLRRSQMLAFFTKLPPCLVGIEACGTSHHWARELIKLGHEVRLMPPAYVKAYVKRGKTDAADAEAVCEAVARPTMRFVPVKSPQQQAALSMHRTRDLLVKQRTQLINMIRNLLAEFGVDIPKGLERALLMARQIVDGKAPDVPIEAAKILGTLSQQVLTTHVRLREIDRDLAVLLRGNEVARRLMTIPGIGPVGATALAASVTDPHQFRSGRQFAAWLGLTPLQKSSGGKERLGRITKMGDKYLRKLLIVGMTSLVRRAKYNPGKIDPRLADLLTRKPTRVATVAMANKTARIIWAIMTRGETYRAGHRPTLAA

SEQ ID NO: 146601 - protein, 416 aa, unidentified
MFSVGVDVANGRSMVAVLDGMRNMVAKPFEVVHTAQGFAALVEKLRQLDGEVRIVMEHTGRYYESFAMSMHRAGFFVSAVNPLLIKNYQGSINVRKVKTDKADAQKIAQFALDKWTILPHYTPMDTIRYNLKTLHRQFQLASKTKTALSNNLIALLEQSYPGANRYFDSPVRTDGSQKWVDFVDTFWHVDCVAMSSEHAFVERYRKWCKRHGYVFSEQKAIQLHADARQKIPLVPKSDTCKLLVREAVSQLNAVSRTVETYRAEMDRLASQLPEYETVMGMTGVGKSMGPQLMAEIGDLRCFAHQKSLVGFAGTDPIKEESGDKVSQSAPSSKRGSPYLRKTLFVIMTILLQLQPQEDPVYQFLDKKRSEGKPYYVYMTAGGTKFLRVYYGKVRDCLKAKGLWEVPAPDSQEVNPG

SEQ ID NO: 146602 - protein, 386 aa, unidentified
MIFIGIDIAKNSHFASAVNSDNEVIVKPFKFTNDDKGFNLFADTFKNFDLSNCLVGLESTGIYGDNLTTFLFSKGFKIGRINPIQTDSLRSSNIRKTKNDKIDTLLIAKCLMLGNYTLVTEKDIEIIKLRTICRFKFDVKKSQSKAKVQLVTCLDIAFPELSNFFNGNLHSKSSYALLTKYPTAKIIANTRIDALTNLLYSASKGHFKTDKAIALKALAKHSIAMDNPAIGKQIQMLIEQIQMLQKQIDLLDIDITNIMEKLNSPILSIPGIGIWLGAIILSEIGDITRFSSATKLLAFAGLDPSVRQSGNFNATNTKISKRGSKHLRFAINYAAELIIWNNDTFYQYYTMKLAQGKSYLNAIGHVAHKLTRVIFKLLTTNTTFKS

SEQ ID NO: 146603 - protein, 409 aa, unidentified
MLKIVYPNCCGIDVHKTFVVAVIAITNNQGITEYHRKHFSTFTNGLTQLRDWLEYYSCFDVCMESTGKYWIPVFNILEEQTNVCLAHPKYVKAIRGKKTDKKDAQWIADLFKHDLVASSFIPPLKIRQLRDLFRYRMKLTQLQVGEKNRYQNCLTWSNLQIASVVSDVFGKSAQAIIKSILDNPQDKPNIEQLVHKRMKNKVQDLEIAMEGALTPEQAEKIRVIKAHYDALAICKEDLEQMIRELGQDYQHQVKLIQTVPGFKEDLSALRIISEIGCDMTVFDSAAKLCSWAGLVPANNESAGNKFSTRISKGGKYLKPFLVQVANAVVKSDKHPDLRNKYLKLKKRRGHRKAISAICRRLLFSVYQVLRKQEDYNPVLQGLTEIRNPDKTMSVQDAVRFAQQHGFNVA

SEQ ID NO: 146604 - protein, 370 aa, unidentified
MVQINEAYVAIDTSKMRNAVAIAESGREGEVRYLGEIDNTERGTRKLVTSLEKRYQQLTFCYEAGPTGYGLYRLIKILGHDCIVIAPSMIPVKPGERIKTNRRDAVNLARLLRAGDLTAVWVPDERHQAMLDLARARDTAQRDYKSKRQHVSSFLLQLGRHYPGKKTWGKAHLNWLTSQKLEHLEQRIVFEEQLLAVRQAKERIERLEQAMRERVPDWSLAAIVEALQAMRGIDLITAVSFLAEIGDLSRFESPRQLMAFLGLTPSERSTGENVKRGAITKAGNARARRLLVESAWSYRFPARVSKEKLTKVEAAPRAVREIAWKAQTRLCGRFRTLTKNGKRSTIVATAIARELSAFIWAINRVVAGAH

SEQ ID NO: 146605 - protein, 388 aa, unidentified
MQFAADRLEAPTAIRTDLGAIFISLELSRSSWVVTSLSPGGGEKMSKHTVRGGDVAGLLKRFAQLREKAKGRTGKVFPLIVIQEAGLDGFWIDRVVQNEGIESHVVDPASIATSRRRRRAKTDGIDGEALVRALLAYKRGEPRVCSMVRLPTPEDEDRRRLCRERKVLIAERVKHVNRIKGLLFSQGVSGYEPLRRDRRERLDALQTGDGRPLPPHLKAQVHRELDRLELLMAQIKTVEAERDALLAVEQTTAPVPPAMLLGVKGIGPEFAAVLWSEGLSRPFENRRQIAAYAGLAPTPWQSGSVDREQGISQSGNPRLRTTMVQLAWLWLRHQPDSALALWFHDRVKRNGGRLRKTTIVALARKLLVALWKYVTAGVVIEGAVMKTA

SEQ ID NO: 146606 - protein, 345 aa, unidentified
MEIRTIGIDLGKTVFHLVGVNARGEVVVRKKCSRTQLLRFTSNLPACLIGMEACGGSHFLGRALREQGHDARLMPAQYVKPYVKTNKNDYIDAEACAEAVTRPRMRFVPIKSEDQLDLQSLHRVRERWMMRRTAVINQIRGMLLERGITIAKGRRHIEQSLPGILEDADNKLSGALRVLLSELRREMQYLHGQIEECNKLIDRIVGELEQCKHLVTVPGIGPITATATVAAIGNGAAFKRGRGFAAWIGAVPGERTTGGKQKLTGISRRGNKYLRKLFVQGAHAVLLHRTKQDPGLSMWLAKLVSRKPPQVATVALANKMARIAWAVLSKGEAYRPPLAAQAAAA

SEQ ID NO: 146607 - protein, 426 aa, unidentified
MAYRIAGIDVHKKMVAVAIADVEIVETWRFERRQIGTSPSDLRALAEWLVEREVDEVVMESTAQYWRPVWEALERDWQPRTRQARSGLRVGTLHLAQAQSNEGPRGRKRDFPDAERLVKRLVAQELILSFVPDVTQRLWRTVARRKYQSTCNRVQLQNRLECLLEEMHIKLSSLVADLLGPSARRMLRAVASGETDPGAIAALGSRRLHATPDQLRDALGACADLHPVYRRLLVLTLDELDVIERHIDQLDEELAQLLRGHQDAVERLAAVPGLGVDSAQQIITEVGPTAATFATAKRLASWVGACPGHDESAGINHSHRAPNGNRQMRRLLNQAAHAAVKAKGSIFEVVYRRLVVRLGHAQAIGAIAHRLCRLVWKILHDGVTYEERGPAVTKHRAQRRAAKMIRELRSLGYRVEPIHAPASALP

SEQ ID NO: 146608 - protein, 353 aa, unidentified
MDVHFIGCDLHPRYQVVAWVEEETGEVLTRRLEHQDGAVGAFYAPRPRGTIVGIETTFPALWFERLLGECGHQLWVGHAAQVRASVVRKQKTDDRDALNLLDLLLSGRFPRIWLPTPEERDLRQLLVHRVKLVRVRTALKNQLHALAMGQGVCRKQKLWSARGRAELQGLRLLPWATRRRQELLELLDQLDASIAELQQAVYAEAQKRQDAILLMTHPGVGAVTSLAWALTLGPVERFPNSRKLVSYLGLNPREHSSGGRQRLGAISKQGNSLLRWLLVEAGQTAARLDPQLRRVYYRLKFRRPSGVAKVAIARHLAVRLYWMLRARVDYAQLVRMSGSPSSAVVPPAAGSRV

SEQ ID NO: 146609 - protein, 352 aa, unidentified
MIVLGADTHKRSHTIAAVSAATGEVVGEQTVQVGAKGFAALVLWARGLGGERVWAIEDCRHVSGSFERFLIGRGERVLRVTSRLMAASRRSGREHGKSDRIDAIAVARAALREGLDALPAAQLEGPELDLRLLVDHRERLIRQRVALNNTLQWHLHDLWPELVLPASSLFYGNWGPRIARRLARTEQTMRVRIARDELRRIRELSQTIKQLQREIAGLVAQLAPQLLSEPGFGPLIAAKLVGEVAGARRFSTDAKLARAAGVAPIPVSSGKTNRHRLDRGGNRQINAAIHRVAVTRLRCHPETQNYIARKRAEGKSTKEAIRCLKRHLARRIWHLLLEPQPGQGTPPSPSIS

SEQ ID NO: 146610 - protein, 352 aa, unidentified
MSRYIALDVHAESTTCAVVSSTGKRLKQQVLETSASALISFLKTVPGRKHLVLEEGTYSAWLHETLTPFVDELVVAIPEKLIGNKSDARDAWHLAEQLRMGTIQRQVFKRPRELAALRAAVRAHRLLTSDIVRVKNRLRALFRSRGLAVTAKVYEASSRDTVLGLLPRDSRYQAEILGKQLDALGPLREETEKHLQEEAKRVPSVATVATLPGFGLIRAATLVAVAITPTRFRTTRQFWSYAGLGIVTRSSSDWVKHQQGWVRAEVKQTRGLNRNRHPWLKSVLKGAATSVTTRMPGHPLHADYQRLLRDGTKPNLAKLTIARRIASAALACWKKQEEYDSSKHQSHITAAS

SEQ ID NO: 146611 - protein, 461 aa, unidentified
MPKQNAKKSQRDKGVKDVENLPPLNQNAAGIDVGNAEHHVAVPAGRDAEPVQKFGSFTADLHRMARWLKACGVKTVAMQATGVYWVALYQILEDYGLQVNVVNAHHTKTLPGRKTDVLECQWLQKLHTFGLLNNSFQPAAEIWVLRTYMRQREKLVVGASTCIQHMQKALTEMNIQLANVISDISGMTGMAILRAMVSGERNPQALARLKNERIQASRQEIAQSLEGNWRPELLFVLEQSLALYDTYQQKIAECDHRIEAHLNCMESKADAEQQPAPQARIARSHRKQTSWVDLRVRLYRIAGVDLTQIDGINVQTAQTVISEVGVDMTRWRSEKQFASWLGLCPDNRVSGGKVLKRGTRHVINRAATALRMAAWSLFRSHSALGANFRRLRRKLGAPKAITAMAHKLARLVYGMLKFGQSYVDKGMEHYEGKYRQQQIKWLAKMAAALHLQLTPSPEVVE

SEQ ID NO: 146612 - protein, 413 aa, unidentified
MEILHSCCAGLDVHKKVVVATILVSDANGQVEKLTQSFETMTGDLLALSDWLLNYNVTHAAMESTGEYWKPIFNILEENFEVLLVNAQHIKAVPGRKTDVKDSEWIAELLRHGLLKASFIPPKGQRELRELTRFRSTFVKERANLINRLQKSLESANIKLASVVTNIAGVSGKAILQAIIDGNVLPETMAALAKGRLKSKRELLERALCGRVQSHHRFILQEMLYQIDSLDETIEHFDAKIQEYCRPFETEVQELDTIPGIARRAAEVIVSEIGVNMSRFPSDAHLASWAGVAPGNHESAGRRLSGRTNKGKQALMSALTQAAWAASHTKNTYLSAQYHRISSRKGRKKAIVAVAHSILIIAYHLIKNGQTYQDLGGDYFDRRNSAKTAKRMVHRLEQLGYKVSLDCPTPLAA

SEQ ID NO: 146613 - protein, 352 aa, unidentified
MAKTDFDELMSIGIDIGKDTFHLVGFDHDGQRVLRKQIKRLALVATFEKLPRCIVGIEACLSTHFVNRTLRQMGFEPRIIPAIYVKPFTKGQKNDYNDAEAIAEAGLRPNQQTVSEKSQDQLDLQALDRVRSRLVSPRTATINQIRAFLIEQGITVRKGLRALRNSFEAILEERKGEISPRMRSILIGLYGDWVWMDDRIDKVSAEIEEISRTEENCANVMSVPGIGPMISTAMVAAIGEGEAFDRGRDFAAWVGLVPRQYSIGGRTVLGRISKRGSRYLRMLFVQAAKIIMMRPYRWPDFSFGAWLARACERMHRNKAAVALANKLARMAWSILRHKTAFDAPRDEVAIGI

SEQ ID NO: 146614 - protein, 341 aa, unidentified
MKHEMHVLGIDIAKRVFHAVGMDDRGHIVYRKRLARHDLMPCIAKLPPVRIGIEACGGAHYWARRFRACGHEVKLMAPQFVKPYVKSNKNDSRDAEAIAEAVTRPTMRFVPIKDVAQQDIQALHRVRERLIGERTALVNEVHGLMQEYGIVLPKGVAKFRQAVVGKLEAEKDKLTPLSQELFWKLVEEFAALEKQLAYYQEKLDTLAQTHPECQRLMTIPGIGPLTATALVAAVSDASAFKNGRQFAAWLGLVPRQHTTGGKERLLGISKRGDSYLRKLLVHGARTTIRWVGHKTDRRSQWIRHLVERRGKNRTAVAVANKNARIVWALLTSHQDYQPVTS

SEQ ID NO: 146615 - protein, 371 aa, unidentified
MQEGTTYVGLDAHQETIHAAVLLPGIGKAAEDRFANTPETVRRWARRVGKRVPGPVVCGYEAGPLGYGLMRELEASGLQCLVVAPALIPVRPGDRIKTDRRDARKLAELLRAGLLTAVHPPTPEQEAVRDLTRARGAVKTDQIRQRHRLSKFLLRRGVRWTLGRKAWTQAHLDWLRGRRLEHAADQAILDDHLLGLEQIEGRLSALDAKLEAIAQAVPYQEPVGWLRCFRGIDTLTALACVAELHDWRRFDSPRALMAYLGLVPSESSSGGKEQRGAITKAGNVRLRRLLVEAAWHYRHRPGVSYRLRARRAGQPARVIAIADRAQQRLHARYTRLQARGKAHNKIVVAVGRELAGFLWAAMDPKGVASVS

SEQ ID NO: 146616 - protein, 398 aa, unidentified
MRFAGIDIGGERHAVAVVNEGGAVLVKSTFFGEDAAGYERVKDLLDDPDDYLVAMEATGHYWRNLFAFLVGHGFKVALLNPLRTRRFAEEELERTKTDSVDALGIARFAAQKRPVPTPVADEVTAELRELVRLRTRYVDEHSDRMRQLHRAVDLGFPEFTRHVRINTVLATAILARYPTARSFANVSVRKLARLAYDGRHQVGEVLARALIETAKISVGSHHTEAYELQVKYTCSDMELLRNRVKQLDQEIERKLQTHEVGRLLTTIDGIGARTAACLIAELGDPSRFRDAAALASYVGVVPRLRQSGKRAFSGARGLPLGNARLRHRLWMPTLVAVRKNPWLRAHYDRLLAAGKRPKVAIVACMRKLLGAIFSVARNRRPFVPHLATALYVQAMTAN

SEQ ID NO: 146617 - protein, 313 aa, unidentified
MYYIGIDVSKKDLSVFNGKKDLKFINQEGLRPFKKYLKGKYKNFSDLVIIFEPTGIYSFNLKEFCAENSIKAYIVNPKRSHSFARSLGIRSKDDKIDARILYQFHKLIDSKDIKVPKIDQQAKVLSSYLTSYEFAVKQRVAISNHLESLRDKKLVSLLKKELKRAQKLEDKIFNDIKEYIRQNQNLREDYQRLLTISGVGEKMAIALLTLFKTYQGTNRAQITALVGLDSTKRESGSSVRGRAKISKNGKAIYRKVSYLPAVCATVHNQKIKIFYQRLLANHKPKKLAIIASMRKILLIAHAMYRDKTEYMAV

SEQ ID NO: 146618 - protein, 447 aa, unidentified
MAQRNRAFSRRGLEVTHPDAAGVDVGGAAHFAAVRADVTDEPVREFSCLTGDLHAMADWFEQCGVKIVAMESTGVYWIPLYEVLERRGFEVLLVNARHVKNVSGRKSDVLDCQWLQQLLTFGLLRGAFRPAEQMCALRALSRQRARMLRDQGRYVQHMHKAMTLMNIQLANVISDVAGTTGLKIVRAIVAGERDPHTLAAYRDARIHASEDEIAASLLGNWRDEHLFALKQALAAFDFCGTQLAECDSEVERAMTLLHAHSGTPEPGKRRSRARNAPKFDVREHLFKICGVDLTRIDGIDVTTAMTVISEIGTDMGRFPTVKHFTSWLGLCPGTKISGGKVLGAATKRSVNRATQALKLAAAALRSSKSALGAYYRRMCARMDKGKAVTAAAHKLARLIYLMLTRGEEYTDQGQLYYEERYRERVVRNLSKKASELGLQLVPCPQAA

SEQ ID NO: 146619 - protein, 345 aa, unidentified
MRQVCQIGLDIAKEYFQVHGVDKNGKDVFNKKLKKKNVLSFFANLPPCLVGLEACGGAHYWAREIAKLDAGHTVKLISPRHVKPFVLNNKTDAADARAICEVVGRPSTRFVTVKTVEQQDLAAWHRIRERKIKERTALANQAKALLLEQGIVVAKGITRIRKFLPIAVENLENRLSMTARDYLSELYAELVTCDELVEKYESRIISFAKNDEACKRLQKIPGVGPITATAIVVHAADATEYKNGRGFAASLGLTPKEHSSGGKQKLLGISKRGNNTIRKLLIQGARIITRYALAGEDKGYPVQKWIQGVATRRGRQIAAVALANKTARIIWNLLAKKEEYRPVMA

SEQ ID NO: 146620 - protein, 347 aa, unidentified
MTYYIGCDVHKKYSVFAMIDNDGRRMPARRVEHELEGFRLFLRNLPPASPIAVETTGNWYWIIDEMEKAGHVPALAHATKSKLMMGQINKTDKLDADGLAVLLRNGTLPSVWIPQGELRDQRELPRMRLALVHMRTALKNRIHATFAKYGIHFEGESDLFGIRGRKKMEQKLSELPPETRHSVEQEIELLDQIEEKIDIAEKRIRQVIAVTPAMKLLMTLPGIGPILAITISLEVGDVSRFPDAHHLASYSGTVPRVNSSGGKTRYGRTRSDVNHHLKRAFVEAANVVMLNQARMSNRHVVKLYQRVRAKKEHGKAIVAVGRHLAESTYWVLKKNEPYKEPVSSKQG

SEQ ID NO: 146621 - protein, 405 aa, unidentified
MNAVGIDVSKGKSMVTILRPFGEIVSRPHEVRHSSAQINALIREIQSLDGDTRIVMEYTGRYHEPIARWLSDAGLFVSAVNPKLIKDFDNASLRKVKTDKADSVKIARYALDKWHDLKQYGLMDELRNQLKTMNRQFGYFTKVKTAMKNNLISLLDQTFPGANTFFDSPARSDGSQKWVDFVDTYWHVDRIRCMSLSAFTEHYQKWCRRKGYAFQPDKPEEIYEAVRDIIAVLPKDEVTKFLVRQAVTQVNTVSAAVEELRARMNETASQLPEYPVVLAMKGVGTSLGPQLIAEIGDVTRFAHKGALTAFAGVDPGKNESGSYAQKSVRTSKRGSASLRKTLFQVMDVLIKTMPQDDPVYAFMDKKRSQGKPYYVYMTAGANKFLRVYYGRVKEYLLEHTESSEN

SEQ ID NO: 146622 - protein, 372 aa, unidentified
MESILYVGMDVHTSNYTLCTYSIETDKEFGLVKFEPDYLNIVRYVKRLEEHHGEGVRVVCGYEAGGLGYSLYRSLLDNGIECVILAPSTMPKSPNERKTDYRDAAKIARCLAYNAYRSVYIPDTEDEAIKEYIRMRDNTKDHIKQLKQRILALCTRWRKEFTGTKKLWTIAHMKWLQHLKFENPIAQEAFDEYVIQLNEENARLKRYDERIEKMAKLPRYAENVSKLTCFCGIKTHIALATIAEVSDFDRFPNANRFASYLGLVPGEHSSGNSINRLGITKQGNSHIRKLLIEAAQCYSRALPGKPSAALLKRQEGNDPKVIAYANRGTERLKRKYRSIAARKPKPLAVTATARELACFIWGMMTNHLDYVY

SEQ ID NO: 146623 - protein, 343 aa, unidentified
MELFVGLDVSLNSIAICVLSSRGKVHKETTSACEPDDLIAFLRTLQGDAACIGLEAGPFSQWLYRHLVEARFETVLMKTRQVKGALKAMPIKADRRDAEGIARLLHMGWFRPVHCKSISAQEMRALLSARKTIVQAITNLELSIRGILRNFGLKLGRVSKGGFAERVIELAEDNLKLYAAAKPILDARRALRHDLASLEKLLGDLARTDRLCHLFMTMPGVGPIVALTVKAAIDDPNRFHSSKDVGPWAGLTPRREQSGERDIIGSISRAGDAGLRTVLYQAAMVMLHKGRPSWLTTWALNVAKRRGKRRAMVALARRIGVILHRMWRDETPFRFTRAEPISS

SEQ ID NO: 146624 - protein, 413 aa, unidentified
MEAYYVAGIDVHKAMLAVVVSEVKPGEVEFRRRRFGTRRSQLRELNQWLIEVGVQEVVMESTARYWRPVWVALEETGMRKHLAHAHSNGARRGRKSDFRDAERLVHRLVAGELVLSYVPEDEQQGWRWLTRTRYQLVCERGRVQSQIEGLLEDAQIKLSSVITDLLGASGRRILEALVREQGQHNPAKLAELGHAKLRASREELTDALDGRWLDRHRFLLGLHLDRIRQLDSQIEQIQQQTALAMQSCQGAVARLIRVPGIRTEGALQMLAEIGPTAAAFPSPEQLASWVGVCPGQQESAGQSSSQRSAKGNWQMRRLLSQAAHAASHAKGSFFESLYRRLLVKIGPQKAIWAVAHRLCRLIWKILHQGVSYQEQGSPTASPKSIQRRQHKLAAEFRKLGFQVQFTPINPSHP

SEQ ID NO: 146625 - protein, 323 aa, unidentified
MSQPNLQCMGIDVAKLSLDIATTDTIEPFTVGNDEDGFAVITDKLKHTKINLILMEATGGLEAAIACKLQSEGYDVVVINPRQARDFARSMGYLAKTDKLDAAMLAQLALVIDRHPDRSRYIRHLPDEARAVLAAMVVRRRQLNHMLVAERNRLYPSHPQSRKSINNIIDALQNELDRINEQMKQHMTAFFQEQARLIGSVKGVGDITVASLIAELPEQGKLNRREISALTGVAPLNRDSGKMRGKRTTFGGRAGVRATLNMAALVATQFNPAIKLFYQRLLAAGKPKKLALVACMRKLITILNTMLRKGEEWNASFQSQVIS

SEQ ID NO: 146626 - protein, 464 aa, unidentified
MTRKARRKESKAKQPNVDWKALDIVHPDAAGIDIGGSEHWVAISPERDEQPVRCFDCFTQDIEHMADWLLERGVRSVAMPSTGVYWIGVFEILQQRGLEVFLVNARHTKNLPGRKSDIQECQWWLKLHTFGLLNNSFQPSDEIRIARNLWRHRGGLIAQASSAIQRMQKALTEMNLQLSNVLSDLSGVSGMKIVQAILNGERDPQVLAAMADPQVKAPPEGIAKSLAGNWRPELLFVLQQQLDQYRMLQSQIAECDRMLQPHLHTMAPKIDLATQPLGPRPKGKRAQGNAPHLFDLRTELYRITGVDWTQIDGIDVQVAQTVIAEVGVNLKPSFPTENHFASWLGLCPRNDSSSGKVLNRRTPKVKNRARTAFRQAASTLLRSQSYLGAQYRRLRTRLGAPKAITAMARKLACLFYRLLMSGKSYVDKGVEYCERRYRDQQIRSLMKRPKQLGVQVLIPTTVTT

SEQ ID NO: 146627 - protein, 316 aa, unidentified
MQTFPNIGVDVAKDAVVVACAAQSFSTHRVTNQRTPLLAWLKSLPTGSRIGLESTGGYHELLADLAHAHGHVVFLLNPLDTKHYARAMGNRAKTDRVDAELIARLIAQEHTRLRPYTPPTADQRKLDRMIRRRANIVRIKSSLTLTMGNLSGFTAELKAVSNKLDALIAKIDSTMTAIAGHSPQHKEAQQRLQTIAGVGPVVGMALTNTLERVPFRNADAFVAFTGLDPRANDSGNKIGRRRLSKRGPAELRRLLFNAAMAAAKSKAWKPVYEHYRTQGWSTTAALVIIARKIARAAWSIHHYHSTFDPDRITKNV

SEQ ID NO: 146628 - protein, 355 aa, unidentified
MRKNIILSQTIPATTIGIDLSDRTFQFCQLNAAGEIVEEGQASLTRAALGKFLASRPAGARVAFETGGHSAWVREVVEQMGHEAVVANARELAAVTGRSHRTDHHDARQLARLARVDPALLNPVELRSGPAQVDLFVIRARAVLVEARTMLINFARGITKTLGHRLPSSTSHRFAERVRAAVPEALGPALLPVLDVLAEITAQIATFDGEIEALAVERYPETRWLKQVPGVGTLTALTFVLTVGEPARFAHSRDVGPFLGLVPRRRQSGECDPHLRISKCGDRYLRRLLVQCAHVMTGRFGGDCALRQWALDRARGSRTAKKRTVVAVARKLAVLLHRLWHRQEVFQPFPTALAA

SEQ ID NO: 146629 - protein, 322 aa, unidentified
MAMLSFCGIDVSKDRLDVMVLPEQQCSSVGNNVAGWSELIERLRGFSIAVIGLEASGGYERGVMRALLAAGMSVRQINPFKLRQFAKASGVLAKNDRLDARMIASFVAIMPTHPAQRRAPAVERLAEMVTVRRQLSNEKIAAENASRMLENAMLQRLSRRRIARLATDIAVIDQHLVEIVASDAALAPRYRLLTSMPGVGAVLACSLIAFLPELGQLSRTKIAALVGVAPYDFDSGKLRGMRCIWGGRTPVRNVLYMAAMSASNWNPRLKAFHDRLAATGKKPKVVIVAVMRKMITMLNAMVRDDILWADRYCGRHSVPTAR

SEQ ID NO: 146630 - protein, 412 aa, unidentified
MEVIYPTCAGGDVHKREVKVCLITRDASGQRTKEVRTYRTMTQDLLALRDWLQDQGCPIVAIESTGVYWKPVFNLLEGDLEVLLVNPSHIKHVPGRKTDVKDCEWLAELLEHGLLKGSFILPQAIRDLRDLTRYRRKLVEMRASEVNRLQKVLEDANIKLASVVSDVMGVSGRAMLAALLAGERDPKQLAELAKGRLRQKKEELVAALEGRFRPHHARLLAQMLAHIDFLEESIAECEAQIDEMCRPFAEGIERLDTEPGVDRRAAQDLVAEIGVDMSAFPSYKHLCSWAKICPGNNESGGKRKSGRIGKGNKWVRAILTECAHAAGHTKETYLSAQYARFARRKGKKHAAVVVAHSLLGGAYFILRDKVPYRELGPHHFDEINQAHAIRYHIRRLESLGLQVQIQQLPLAA

SEQ ID NO: 146631 - protein, 340 aa, unidentified
MNINTIGLDIAKTIFHFVGLDQHGKQVNKKKLRRGQLLAYFANMTPCTIAMEGCASSYYWQRELTKLGHQVKLLPAQHVKAYVRGNKNDYNDALAIAEASRVPELREVTPKSIEQQSIQALHRLRETTVGERTALSNQIRGLLAEFGIIFNQGILSVKKGLPSVLEDAGNGLTHTFRDALALKYAHFQQLDDLVEELGKLIKEAASEHKEIERLQTIPGFATLVASSYYSVIGDGRSFAKSRDAAASVGVVPRQHSTGGKTVLLGISKRGDKYLRKMLVNGARSVVNHAHKKDDALNVWVTRLVEKRGRNKATVALANKLARIAWAVTITGKPYQENHAI

SEQ ID NO: 146632 - protein, 372 aa, unidentified
MNYNTVYVGMDVHKESFSLCAYTIEAEKASHYQRTEADYKKVLNYLEFLRTIYGDDANFICGYEAGCFGYTLYHQLTANNVKCIILAPTTMLEQRSKKRIKTDRRDAEIIAKCLAQHNYSPVHIPTAKDEETKEFLRMRDDHKLALKKVKQQILAFCLRHNYRYDGKSHWTAAHLKWLKALTPEALYKEILDEYLLTYQTLSDKIERLDKRIEELATQDEYKEAVKKLCCFIGVKTHTALSVLVEVGDFKRFASAQHFASYLGLVPGEDSSGDDQNRLGITKAGNRHVRLLLTEASQCYARGQVGFKSKELKSRQSGNTPAVIAYADKANERLRRRYYKMVLNKYKKHNVAKTAIARELACFIWGMMTDNIH

SEQ ID NO: 146633 - protein, 341 aa, unidentified
MEITTVGLDIAKRVLQLHGVDAAGKAVLRRKLQRSEVLAFFKALPSCLVGIEACGTAHYWAREIRELGHEVRLMPPSYVAPYVKRGKTDAADAAAICEAVTRPTMRFVPIKTAEQQAVLMRDLLVRQRTMLVNALRGHMAELGIIAPQGIARVADLIAVLLGEDTTNVPALAREALRGLAAELEALDRRVKEIEVAIVTWHNDNEASRRLATIPGVGPITASAIVATITDPFQFHSARHLAAWIGLVPRQHSSGGKQRQGGISKQGDRYLRRLLVLGATAVIRHSRSKSTAEAGWLKSLLERRPARLVSVAQANKTARIVWAFLVHGEAYRMPAAVPSGVA

SEQ ID NO: 146634 - protein, 456 aa, unidentified
MDAFLGVDVSKGYADFTLLDPDKNQLEKVFQLDDTRKGHDSLKKQLMRMLDDYNISHLHCAVESTGGFENNWYGSFVHWSKTMPLSIARLNPAGVKKSIEAGLNRNVTDALSSRYIAEYLVSHPEAVRYDVQSVEYSSYRSLHNHINLLKKQQTQLINQLKSILYYTFPEAMRYCKTSVPSWILQVLRKYPSVKRIAALKPETLSKLNHVDAVKANSLIDKAKNSIASRNNESSIFLIQSLADQILEKQQLVVKHKKFLEETCKGPEVTLLTTIIGVGAYSAAAIMIEIEDIKRFITPKSLVCFFGLHPVLKESGDKKLVMRMSKKGRSSMRATLYMCATSAVRYDEHMKAIYLRHRSNGKNHKQALGVIMQKLLRVIWGVLTTKTAYSASIDQTNQTRVSKETVEKRNGQMVEKRRFQELDQDAPISGKQTKKRKAYAESQAPELETNTGSSADA

SEQ ID NO: 146635 - protein, 486 aa, unidentified
MKKRVANHKEEVIKLLKKQKIRNLKDLEDYKLSICHPYSAGIYIGSREIYVAINPEVAAELDMPIVRVFSTFTSGLQECRDWLKYCGIDSVSMESTSVYWKNIYDILENAGIEPCLVNPRKFRMVPGRKTDVLDCQWLQTLHMYGLLSGSFVPQGNIRQLRSYMRHRDCVLKERGKYIQRMQKNLIEMNLMLVNVVDDIMGMTGAKIITAILDGERNPNVLAAFRHGGCKRSEQEIAEALNGNYKEEQLYLLKANYEAYKFFNDQITDLDNQIEVLLDKFPLAQKKEPGTDTSNECGSMENYSPVKKKKQSKSKNDLRIKNLPDKLTEIIGIDLTTVTGLQANTILQIISEVGTDMSKFPSAKNFASYLGFVPHNKITGGVIISSSTDRVKSPAAHAFRKVVASVGQGKTALGAFYRRIAAKGSKAKAIIALCRKLAMIYYNTIVYGKEFVEYGAEKYKKQQELREKRLIAKLAKKHKLTVQAAVC

SEQ ID NO: 146636 - protein, 347 aa, unidentified
MRFATPTAAYYGGIDLHARTMYLVVLDQAGNVRLDRNYPARPDAFLKAVAPFRPDLVVASECVHSWYWLANTCATEKIAFVLGHALAMKAVHGNKTKSDPHDAATIARLLRGGNLPQAYVYPQQRRSLRDLLRTRLRFVRLRARTYGHVHTALRQLNLPPVSNDVKYKSKRGTIADTIPDEHVRRSVQADLELLDPLDTTIRHLERDLEVAAQQHYAQELAVLQSIPGVGLIISLTVLLEIDTIDRFDTRQQFCSYARLIAPPQESAGKKVGVGCRKQGNAWLKWAFSEAAVLCAQKDERVGHYLQRLTSRYGTGKALSILAHKLGRAMYHMLHTKKVFDLDKFLRH

SEQ ID NO: 146637 - protein, 350 aa, unidentified
MYRKRIAVDLAKDVFQIAESARPGEITLRKRLSRAAFVRYLQTIPEPALIIMEACGTAHYWARFARALGHDISLLHARYVKPYRQRNKTDRNDCDAILEASRAGKMIPVPIKSEQQQMIQQLHRLREQWKKNRNQRINLLRSILREFGIEAPVKMEKFLKAAPLLADDPLLQPIAPQLHLILADITHFELSMKECEKQLARLLKNDNVAERLDEISGIGILTASAFIVAVNQPERFKNGRMLSAWLGMTPRENSSGSKRQLGSISQQGNKYVRTLLIHGARSALLAAKRAEKNSPDTLTALQQWAVQCADRIGFNKATVALANKMVRICWAVWCHERRFNGNFALTFKTS

SEQ ID NO: 146638 - protein, 341 aa, unidentified
MEPLFVGLDVSKDETAICVRTQSGSVKSAYKKATDPDAIYRALMSELELIRCVVLETGRMANWLYSELSLRGLPIVCIDARQAHAVLSQMHNKTDKNDAAMLAELARTGFYKRIEVKSRVSQERRALLRAREVAIKSRLNVENTIRGLLASFGIRLPKYLKTYDQRVRTALEGQSDLMRIIMPLLRLRTEALRQAAALTKDMVRQAQMNETCRRLMTIPGIGAVSAVTYVATIDTPDRFAHSRSVGAYIGLTSRKYQSGDIDYNGRISRRGDQMLRAVLYEAANSLLCRVKSGLGQRLRDWAIALKKRTSHKKAVVALARKLAVIMHAIWKDGTEFEPRGA

SEQ ID NO: 146639 - protein, 322 aa, unidentified
MSVSVLGIDIAKQKFDAALLVEGKTKHKTCKNSAEGFEMLRLWLEKQGIQEVHACMEATGNYGEELAIYLHEAGHMVSVVNPARIKGFAQSELLRTKTDKLDAALIARFCLAMKPGAWIPPSSEIRSLRALVRRVDSMIDMRSQEKNRISTAHESVSLLIKEHIAYLDQEIEKIRKQIANLIGQDPNLKRKKDLLDSIPAIGKVTIPHILAELDDLEKFNHVSELVAFIGLAPKETLSGSSVKGKPRLCKIGHARLRKALYMPALVSIQCNPVMIAFYNRLKDKGKNGKVIVCAIMRKLVHVIFGVLKSGKKYDPNFQPISA

SEQ ID NO: 146640 - protein, 327 aa, unidentified
MQTTSAVVGVDVSKATLAVCHQPGPSPQHLDVPNTPAGFRELVRRCGVRSLYVLEATGTYYLALAYHLVAAGAEVAVLNPIVVRRFIQMHLGKGKSDRKDAQWLWRFGQQQATPRWQPEEAALVECRQLQQAAELLIRQQTMVSNALEALLHQPLVCAEARRQLQLTRRRLDEQVQRIEAELLTRIEQRYAAEMPLLCSIPGIGRKTAALLLLFAGGFTRLNNHRQLIAKAGLCPHEYTSGTSVRGQTRITKTGGNLVRSKLYLCSWSACRANAACKALYQRLVAKGKHKKLALIAVCNKLLKQAFAIVKSGVAYQPDFAQKALHMT

SEQ ID NO: 146641 - protein, 394 aa, unidentified
MRFVGIDVASEQHMVASVDEASRVVLRATPFTEDAEGYDKLFDRLGAAADTLVAMEATGHYWKNLFAALAAHGFAVALLNPLRTHRFAEEELQRTQTDAIDAVGLARFAAQKRPAPTRLPDRALEELRELVRFRDRLVQDFGDRVRQLHRLVDLGFPEFTRYVRDLGGALATALLQSYPTAAAFVGLAPRRLAALRYDGRHRVGAELAQALLTAAPRSVGRHHGEAYRIQVRYTCEDLDLLRRRLHTLERDIERLLEAHEVGRLLTTIDGIGPQTSARLIATFGDFTGFRSGAAVASYVGVIPALRQSGKRTWTRAALTSLGAADLRAKLWMPVLVAVRKNPWLRAYYQRLIARGKLPKVALVAAMRKLLHAVYSVAIHRRPFVPQIAAPESRP

SEQ ID NO: 146642 - protein, 351 aa, unidentified
MNNATARKRTQITIGLDLGDRRHTYYVLDGAGKMAREGSLGNTREPLATMARSYPGATVVMEAGTHSPWVSRFLQELGLRVIVANPRKTRAIYQNERKSDRRDAMMLARLARMDPTLLHPVEHGSQEAQQDMLQLKLRDSLVRARVALINALRFTLKSLGYPVSNPSSERFPKLVLSEIPESIGEMIAHNVAAIAELTQRIKALDVSISRLAAERYPETIYLQQVSGVGPITSLYFVLKVGTPGRFQRTRDIGAFLGLCPRRDQSGETDKELRISKCGDQYLRGLLVNAAQYILGPFGTDSALREHGLRLAQEGTARAKKRAVVAVARKLAVLLLTLWKSREPYESFPTMA

SEQ ID NO: 146643 - protein, 401 aa, unidentified
MDPHICVGIDVGCRSHRVGIARPDGSILEEFDISHSDAGFQEFFRRVEAHRCEFSLPVAVAMEGYNGYARPLDRLVQERGYRLYNVNNLKLARFKEVFPGAAKTDPIDTRKILELFRLKDQLPLAKDVIQEVLSAPAVNEKLKRLSRRRRHLVTEKMRVLNRMQADLQAACPELLAATNDADNLWFLRLLTFREDLRQLARLRPSTILQIPGVGQKYARLIREWQAKARFSGEVEYVGPMIIQDAKRILELRKQIHALDEAMAGLAEQSEIARRISTMAGFGKTSIAELAGEIGTVKRFTSEASLALYLGMCPLTRQSGQMCTARVPRQVNTRCKAAMMTAVARHMACVPQSRAYYDRKRAEGKTHNQAIRSLGRHLVRVIWAMLRDGRDYEIREDIHPLP

SEQ ID NO: 146644 - protein, 385 aa, unidentified
MAPIRMPEAVIGLDVGKSSHWACVATRDGEVLLSTPVANREDDLDSLFGRFPDALVVVDQSRNIGALALARARAAGMSAAYLPGLGAHGAARLFAGDAKTDERDAMVIAKTALGIPDALLPVGDPGPTIAAARALAAQRNFLTCENTRNKNRLRSILLESCPAFEALVDLSDGPQLRLMASLGGAWSVADAGPRRAAALTRGAARGKIEALVRSTTSSTRPDASVVAAEDRAVKLLARRISENSAEIEAITAEISALLEGDDTYRCLLTVPGIGPKTASELAISIDIEDFPSHDRLASYCGLAPRNRQSGTSISSVTASRQGNKRLKNLLIFSCNCLTRTEGRWGDYYTRCRERGMSHGKALKALARKRLKVIYAVMRDRVPYAA

SEQ ID NO: 146645 - protein, 475 aa, unidentified
MSTRGYHHNSPKTGGIMSIAHCKAKAKYSAFHALHQSCIGVDVHANLIVGVYQRAQFGKTTIEEQYWNSDAIKSSLKKFALWCKSLAPEIIIMESTGVYWQSLYEQLELVGFTSEQLVVVNARDVKNRRGSKTDRADAVHLAEVARQGNYRSSFVPRKDIRELRCISRAYSQLKNQRKSLVNVLHKQLCQVGCRASSVFSDIRGKMATKILDALIDGYEGDELLKKVKEICKNSRGRLKASPKEIVEALDADMESKVWFSIRKIIEHIRYLDKELEEHLDKLREETKPYKSTLDLLMTIPSVKEITAIGIVCELGDDLSAFESVRKFSRWIGLAPGNNESAGKRYSGKITPGNKYLKTLLVEAASGIGLSKTGYLKEVHQRLKERRGTKRANVAIAHKLCRIIYSVLKNKTAYVEQYKPVLKDHRLEKAVHAVAGLRTVGYACDDITVEDIETGMTSVIFGANKSKLTSNSQLVT

SEQ ID NO: 146646 - protein, 388 aa, unidentified
MQVVTGQAAAPTAIQTNLRAIFVSLELSRSTWLITSLSPGAAEKMSKHSVQAGDIAGLLRRLAQIKEKARARTGRDFPIITIQEAGLDGFWIHRVLQSEGIESHVVDPASIATSRRRRRAKTDKIDGETLVRTLLAYKRGEPRVCAMIKVPTPEEEDSRRLCRERKVLTAERVLHVNRIKGLLFCQGISGYEPLRRDRHERLEELQTGDGRPLPPHLKAQVNRELDRLELLLKQIKAVEAERDALLVAAHTPAAVPASMLLNIRGIGPEFAAVLWSEGLFRHFDNRRQIAAYAGLAPTPWQSGAVDREQGVSKAGNPRLRTTLIQLAWLWLRNQPHSALTLWFHERVSRNGGRLRKTTIVALARKLLVALWKYVTAGVVIEGAAMTAA

SEQ ID NO: 146647 - protein, 345 aa, unidentified
MKKIVKQIVGIDVAQKELVVCLGRMQDDWSPELYAHKTFGNTQSGFAALLVWVKRLTQTGTPLRFVMEATGVYHELLAYFLDEKQYEVSVVLPNKISNYMRTLDTKTSTDKTASEAIAQFGLERKLSNWHRPKDIYKKLRQLTRERDQIVQERTAAKNQLHAEQAEAEPHPKSIARIRERIALLDKQQKEIQTELAALIKGDEEIQLLVMIICSLPGVGLLTAAIVLGETNGFELIRNKRQLASYAGFDVKEKQSGTSVRGRSCISKKGNKYLRKAMHLPALAAIRHDERCKVLFVRLVSKHGIKMKAAVAVQRKLLEMIFTLATKKMKYDKNYSVKTAQNKQAA

SEQ ID NO: 146648 - protein, 343 aa, unidentified
MLYIGLDVHKEFCQACVMNKSGKVISNERFLSTQEALDSFLDRFDKAKFVLESTGIWEFIYEGIERRGFEVVLAHPLKVRAIAEARVKTDKVDAQTLAHLLRADLIPRSWVPSKDVRDLRQLVRQRSYLVRQSTSLKNRIHAELLRRGARRPEELKEAFTKKGVGWMRSLRIPTVDSCLCCLENVQGQIEAINGKLLEEFGRRPEARLIATIPGIGFYGALLIHAEIDDIHRFAHPSKLCAYAGLVPTVSQSASSVRYGGVSKEGSAYLRWILTEAVHVHIRHNPTSRLSKFYARVERRRGKHKATVATARKLLHIIYWMLLNKERYHGHGFNPGSQTCTRSA

SEQ ID NO: 146649 - protein, 409 aa, unidentified
MIHPKMQYTYVGIDSHKDTHTAVFMDCFFEKLGEMTFANLPSTFDAFFTQAQQFRAGGTVFLFGMEDTSSYGRTLMSFLRGKDQQVKHVNSLLVARERKNSNIVQKSDTIDAECAARVLLSKFGELPNADPEELHWILRSLVVHRTSLVRQNSASKNRLHDFVMQHYPNYRSFFFYIDCNSSLAFLARYPSPKTLENTTLEELAAFLELHSYGQFSLAKATEILETLQDTTVPFQEIRDGIIQATVQQVQYNMKELMKVEQQLASFLDNFDCPLLSITGMDVVSAAQFLSCIGDIKKFSSPAKLARYAGVAPVTHASGKNDLQFANQRGNRELNSLFFNLAVRLTMTAGPKRKILNSFCYDYYNRKRSEGKTKRQALKCVQRRLVNIVWTMLTYGEEYVNPPTYNEPPK

SEQ ID NO: 146650 - protein, 335 aa, unidentified
MEFDFFIGIDVSKSELDFAVQQGNSFLFHKEIANESAAINNFIKELCKLPGFKLSRALFCMEHTGIYNNHLLSCLHKKGAQLCLEAASQIRNSLGNIRGKNDKIDAMRIAGYAYDKQHKLRLWQLKRDIVQQLAHLSATRLRLITVKKQLQVPLQEHAAFSTRKTGRQNLQICSHSLKAIDRDIARADKAIEQLIADDQELTRIFKLTTSVSGIGKVTAVQLIVTTNEFKDIDNPKKFACYSGIAPFTDDSGKVIKKARVSHMANKKVKTLLHLAAIVAIQYNQDLKLFYERKVLQEKKNKMSVINAVRNKLILRIFACVNQNRPYEKNYQRALV

SEQ ID NO: 146651 - protein, 314 aa, unidentified
MKALRTHVAGVDVHKEMLAITALIGDAESEPKAYQFECQTFTEDLMKCGLKLKELGVKEVVMESTGVYWKPIHNVWHPMGFEITVAQAAHVKNVPGRKTDMNDSHWLAQLHRFGLVRASFIPDEIFQRMRLLSRHRTNLTEDLARVKNRIQKVLEDGNIKWGVIASDVFGKSGLDILDLIADGVTNAKTLTSKVTTKIKRKEEAEKALTNCLTTVHCFVIKELMDQYHHLEAKILAVENELAEKAKPYAHLIEKLDEIPGIDKILAMAILSEATDQMQNFEDERKFAAWAGVASGNNESAGKKKDQKPERAILT

SEQ ID NO: 146652 - protein, 343 aa, unidentified
MTISTIGLDLAKHWFQVHGVDAGGTVRVRRKLRRSEVLAFFQSLPPCLVGMEACATAHHWARELTALGHTVKLMPPAYVKAYVKRNKNDAADAEAICEAVARPSMRFVPMKDAGQQSVLMLHRTRNLLVRQRTMLVNALRAHMAEFGIIAPQGLRNVELLTKEVAREQERLPELARSILQLIVDQLTDTMVRVRAIEVRLTRWHRQSRVSQSLATVPGVGIMGASAIAATVADPSLFRSGREFAAWLGMTPRQNSSGGKERMGRASKRGDKYIRSLLIAGAVAVLRHARNRPTRDGAWVRALMERKPTKVAAVALANKTARIVWAVMTRGDGYRAKQVLGQSA

SEQ ID NO: 146653 - protein, 342 aa, unidentified
MLYVGIDVAKNKHDVTALNVPGKTVLKPLTFSNNKAGFELLDLSLRQLNQDCLIALEDTGHYAFNLLNFLHEQGYKVYTYNPLLIKKFAKSLSLRKTKTDKKDAHGIALKLLSDPNREQFQHDNRQVELKILARHIHRLKKKQSDWKVQYTRCLDIIFPELDKIVGKHSEYTYQLLTCYPNPQKRLEAGFDKLIEIKRLTASKIQDILSVAPRSIGTTSPAREFEIIENIKHYKRLIDKAETCVNDLMAEFNSVITTVTGIGNRLGAVILAEIQNIHAFDNPAQLQAFAGLDSSIYQSGQIDLAGRMVKRGSPHLRWALIQAAKACARFSPAFKAYLKTKLE

SEQ ID NO: 146654 - protein, 424 aa, unidentified
MSKKKQTVAGLGAIYGRVCGMDVHKKLVVACVRILDVKDGTVQSTLRRFGTMTADLVELRQWLAEQQVTHVAMESTGVYWQPVFNVLEGHMAVWVVNAQHIKKVPGRKTDIKDAEWIAQLLQCGLLKPSFVPDRQQRELRDLTRQQTKLVEQRNAVDNRIQKVLETANIKLGSVASDVLGVSGRKMIEGLIAGETDVSVLAELAHKRLRAKIPQLQRALEGEITEHHRFLLRQLLGQYDFLEKEIARVSERLGAIAPRSFRAAVEQLDEVAGVGERGARALLAETGTDMNRFPSHKHFASWAGSCPGNRESAGKRKSGKTPEGNRHLDAVLTEMAHAAVRKKDSYFKSQYHRLAGRRGKKRALGAVKHSLLVTVYFMLRDNKPYKDLGANYFDKLNPQQQIHYHVRKLKELGHKVELTPMADAA

SEQ ID NO: 146655 - protein, 299 aa, unidentified
MPHYVGLDVSQKTTAICVVDEQGRRLWRGACVTDPGAISARVLRHAGVVDVKVGVETGSMTPWLVHGLRSAGLDVECLDARRVKAALQMRLNKTDENDAEGLAQVLRTGWYRPVHVKSFDAHRARALLGARAQLVGMTTRLSNMIRGVLKTFGLLPGAGRGLRFDRRVEALLEGAPEIGLIVRPLLATWRQLREQIAVFDKAVQQRVRADPICRLLMTVPGIGALSSLVYVSTVEDPGRFSRSRAVGAHLGLTPRRYQSGETDRSGHISRCGDGLARTLMYEAAVVILHRIKRSLHLKD

SEQ ID NO: 146656 - protein, 299 aa, unidentified
MIVLGADAHKRSHTIAAVVAATGQVLGDKTSAATARGFGLLLIWARGLGPERVWALEDCRHVSGALERFLIARGERVVRVSTRLMAGSRRSSRERGKSDRIDALSVARAALAAGIETLPTAALAGPELDLRLLVDHRERLVRVRVALNSTLQWNLHDLWPELELPGGALFSVKWSRRIGRRLARAEQTMRVRIARDELRRLRELTQTIKALEAEIADLVGRLAPQLVSEPGCGPLTAAKLVGEIAGAQRFSSDVKLARAAGIAPIPVSSGKTNRHRLDRGGNRQINAAIHRIATINVLT

SEQ ID NO: 146657 - protein, 404 aa, unidentified
MSVHLAPVMSSTIVVAVDVGKTSVMLSATDSDRRRVFGPVECAMTRSELAATVHRVSAVVPRSAQVKVGIEAAGHYHRPVLDYRWPAGWEVLEFNPAHVAEQRRVAGRRRVKTDVIDLEAITELALAGRGRLSGDREVIIGELAAWASHRSRRVATRTATKNQLLSQLDRAFPGLTRALPDVLGTRIGRLVAAEFADPARLSALGASRLIRFAAVRDVAVRRPVAERVVSAARDALPTRDAVVARRVLAADLGLLADLDTQIESAGCELAALVPLSPYATLTSVPGWGVVRVSNYAAALGDPDRWPGPRQIYRASGLSPMQYESAGKRRDGKISREGSVALRRALIDLGIGLWLTELAAKAYAAELKSRGKHGGIIGCALAHRATRIAYALVRDHASYDPSRWS

SEQ ID NO: 146658 - protein, 526 aa, unidentified
MTNTQRWARGCKLDNRRWLDTATGGMCVTGHSIGIDLSINGAHDCTVLDATGQLVQRFTFDSSSAGLQKLEQCVRATDPSYGAPVVIMEPTGLAWFLPCLCLRAEHPEVKVVRIKTSKVAALRRYLKQDAKSDRLDSLTLAKMPLVDPEKLYAVDLPPAAVQGLDRMTRQRARLVASLTGRKNRLQALVGGYLPGLMAVAGKPWEPVFRAMLAVSLNPFTLTDQGTTALRKSLQDKRSREALPEARLPRLRIACEQLTRLYRPIIEAGLLTEAFFDDVQDEVARELRLMDVEEQEVKELEAAIARRYQEIVPEDHLRTIKGLGAVTAPTILAAVGTPQRFHSQAAFRGWTGVVAHASQSADSDAKGLPMTKAGPRRVKLALYQAAEIARQWDPQLAKIYYDQMVHKGKPHYKAIGAVMSHLASRIHAVLSEQRDYVLRDTDGREVTPQEARAIILTRYRVPAEIRAERRTRKRRKPDVSTGSHRGSTKRSSRRSSTSSHLHSTRSQEAHQTGAVAITHDGSAVARA

SEQ ID NO: 146659 - protein, 356 aa, unidentified
MAVADRGREAPRSLGVIRNDLDELRKVLRRLGSPASLEVCYEAGPCGYVVYRFLQRLKIECTIVAPSLIPRKPGDRIKTDRRDALALARLLRSGELTATWVPDPQHEALRDLVRAREDAVEDHLRARHRLGKFLLRLGIAPPAGVRAWTVRHRQWLDNLRWQDRAQELVFSEYRHNIEEIKQRVLRLEKELGALAQNSPHAPTIVALQAMRGVKLVTAASIVSEIGDIGRFQTPRQLMAYAGLVPSEHSSGNRVNRGNITKNGNAHLRRVIVEAAWHTRHRPLVTPLLRQRQRGVLPQVCTIAWNAQQRLYKRYCHLTARGKSRPQAVVAIAREFLGFIWAIGQVVKASQTLKTAA

SEQ ID NO: 146660 - protein, 345 aa, unidentified
MQPMYYIGLDVHKRKISYCVKDSSGKIHTEGSIAARRLDLDHWMKKLPQPWSAAMEATMFTGWIYDHLKPHAATLKVAHPLMLRAIAAAKKKNDRIDAGKICDCLRCDFLPESYMASTAIRERRRTLRYRNLLMRQMVQMKIKTGALLMEAGVSYNKQRLHKAGYFRELLATNPDIDEGLCSLLRLCRETVVRLGKTESALVRSLERDSLLVERVERLMTIPAVGPITALTWALEVGDVQRFSSIKKAVSYCGLCGAEKSSGNTVQRTPLSKQRNKHLQTTLIEAAKMAPRYSPQLAILYDQEKQKGNANRATLAVARKLVAYLMAVDRGQRNFQLAETRSNIAA

SEQ ID NO: 146661 - protein, 422 aa, unidentified
MLTTTHDNEEIIERVAALDIGKAELMCCVRVPDGDHPGRRLQEVQACPAMTRAVLGLADHLGRLGVTRVVMEATADYWKPVFYLLEAAGLETWLVNAKDVKHLPGRPKTDKLDAVWLCKVAERQMLRPSFVPPPPIRQLRDLTRYRADLVAARTAEKQRVEKLLEDACIKLSAVVADIFGVSGRDMPAALVAGERDPKVLAQLARRSMRAKIAVLEEAFTGHFTTHHAFLLRTMPGRVDAISADIAALDDRIAAQAAPLAGAVARLDEIPGISLASAHVILAEIGTDMTRFPTAAHLASWARLAPGISGSAGKKKGKGSTGHGNAYLASVLGNAAAGAAKTDTFLGEKYRRIARRRGSKRAIVALGRSILVIAWHLLSDPEGRFYDLGPGYHAARIDPERRKRTHIRELEALGYTVTLKPAA

SEQ ID NO: 146662 - protein, 342 aa, unidentified
MDHFAGLDVSVKETSVCIVDGTGKIVREVRVASEPNALLAVLKNPAYHFKRIGLEAGPLSQWLCSALAEAELPVVCVETRHMQAVLKAQINKTDRNDARGIAQMMRVGLYRPVHVKTLRSQKLRMLLTHRKLLQSKAIAIENDLRGTLRNFGLKVGMVGKAKFEARIKELVENLPDLAILIEPLLIVRRALREQVVILHRRLLAIVRDDEVCRRLMTTPGVGPVVALTYRATVDVPARFRKSKSVGAVFGLTCSKYQSGEIDRSGRISCCGDEMMRVMLYEAAQSMLRSKKWSWLKAWAMQIARRRGMKKAIVALARRLAVIMHRIWVDGTEFRWTREAAAA

SEQ ID NO: 146663 - protein, 322 aa, unidentified
MQQGEVMVGVDVSMLQLDVALWPSGQTFSVSNHVQGVEQLLARMVRLQPRAVVIEASGGPEDLLVGELCAAQVPVAVVNPRQVREFARSLGQLAKTDRLDALVIAKYGHSAHSSGRLVLTQLRPEAEAELKALVRRRRQIIEMLVAETNRRQRASKIVKRSIVASIRGLKRALAELEQQLHETVKNSPAQKAKAAILQQVPGVGPRLAHTLLAEVPELGQLGRRQIASLIGVAPHAHESGKFKGRRMIWGGRAPVRSTLYMAMLSASRYNPLRAPFYRRLLERGKSKKLAYIACARKLLVILNAMFRDHTTWSPNLDFQHSR

SEQ ID NO: 146664 - protein, 416 aa, unidentified
MEVIYPRCAALDVHKKTVVAGVRIAEESKVTTDTGIFATTTKGLLELLDWLSQYSVTHVVMEATGVYWKPVWQVLSGDDDLTLVLANAAHVKNVPGRKSDMNDTAWLRELFAHGLIRQSFVPDIATQQLRTLMRSRKQLVRDQTRHVQRIHKTLEEANIKVASLLSDMLGKSGRAMLEAMIANETDPARLAALAHKGVKATQEQLREALTGRVTEHHRFLLALHLEVIDHLDGSIARIDERVEATLSPFRDAVELVATAPGIRDLTAEGIIAEIGIDMSRYPNEGHLLSWAGFCPRQDESAGKRRSTRLRRGNRWLKTLLVEAAWAAIKKKGSYLQAQFLRLKSKRGPQKAICAVAASLLTSIYHMLKNGVPYKDLGAEHFQKRSGKSHAQRLVRQLQRLGYAVNLSAAKEEFVPA

SEQ ID NO: 146665 - protein, 664 aa, unidentified
MSRSCQNRRRAAARTATNQDAGGAVHAAAMPTEGPVPSTTDPKTSRSRAAPGDTPAATPVAIGVGIDTSRYGHHAIFLDADLQPAAPELKFVESAQGYQQLQSRLAALRQKHGPVHFHFRLDVAGSYADNLLAFLHGLPEPRTISCGDPQRNKNYRAAIFGHKKSDATEANATARYALTEKPKPMPVVAPAVQQLCQIASRLESQARHCTRVVNQLHNLLGRTFPELALLVKDLSAGWVLTLLDRYPTAAKLAAARPSSLEKIPYLPHEHIARLREQARTSIAALTGPVTEELVRELVGQLQDAHVRHKALEKLLVSAYRQLPEPNHLDSIIGFGEVTAAILTAKMVTTGRFVEPAKLTGYFGIYPVEASSGIDRDGQSRLPLRMVMSRRGNDLVRRYLWMAALSAAQHNPAVRPLYQRVRAKHPDQPGIAIGHAMRKLLHLALAVWQTGKPFDPEHYPWDQAAHLPGSQQPATAEPVAPSPTHEHTGPHAQAAGHKNPVTTPVRSVVTAACVPTSVTEAASAGNDSARSVASEHPEATACDMPMSQDAQAEATALAWIDFAHLKTQLPLQRVLEHLNLLTDLRGRSRQRKGPCPVHAASGKSRTFSVNLDKNLFQCFDPHCGSKGDVIDLWAALHKLSLRDAAADLIQTFNLEPASRTEKRHG

SEQ ID NO: 146666 - protein, 428 aa, unidentified
MNEDELSRVQEFRQLKKQIQGSESHLIVGIDVAKDRHHAFLGTATGRTLVKKLIFENSASGFSELLARVEAVRAQSGLSGVVFGLEPTGNYHKPLGRYLISKGCHVVLVGGKAVKNNRELLDERWDKHDTKDAANIADLVSRGKCFYYDMPSGQIEELRELHSLRARLKKEEHSLNLRIRNNLLAKHFPELDSFYTASERETLAIVRWCLNPQQIAGMPFDEFFKRVAPNARGIGQKLRLQKIHRLAHESIGCPVDSAVQLQAGLLVEKIKQVREQIVQVEQVIQQLCVQFPSYEYLLSIPGFGPYVASKVLATIADPRRFDTAKQVIRTAGYDLCADRSGKSSDQAVPVISKKGNSQLRYALYQAALIASSRHRFFMAYFARMLQGRERERGIRTKMRVKLAAKMLVIAWTLMKRGEPFNPEYLKMQ

SEQ ID NO: 146667 - protein, 342 aa, unidentified
MDEYDGRQFVGIDLHRRRSVIVRQSESGEQLSAVRIVNDPVALQLQLEEAGADPEVVLEATYGWYWAVDVLHAGGARVHLAHPLGVKGFRYRRVKNDVRDAADLADLLRMGRLPEAWIAPPETRELRELVRYRAKLVAIRSGLKAQIHAVLAKAGVLIAVSDLFGVTGRQRLAKVPLGPAYAQRIRSLLELIDILDSHEARFAAMIAERLDTHRGYQAIQQVPGIGPTLAAVFVAEIGDVHRFTDSAHLCSWAGLTPRHRESDTVVHRGHITKQGSKAVRWAAIEAVQRHPTTAKIAADKQRIEARRGKNIAKVAAARKLLTLVYYGLRDGQIRALDRARAA

SEQ ID NO: 146668 - protein, 350 aa, unidentified
MAKHNRIYVGGDLGDRYTDVAVLDAGGAEVDAIRVKTTRAALERYLGTYKQARVVIEVGTHSRWVAEVIQRLGHEVLVANPRQVRLISRRRVKTDQSDAMLLARLGRFDPELLAPVKLRCRRAQVDLAVIRSRDALVSTRTKLLNQVRGTIKQFGLTMKRASSFGSVFKDAKRAVPAELAPALRPVLEVLDVIEAQIEAQDVVIDQVAAKLPQVQCMTQIHGVGVLTATAFALTIDDPSRFEKSRFAGAFLGLTPAKDQSGDSDPQKRITKSGDPLVRKLLVQCAHHVLGHRGRDSDLRRWGLRIAERGGKNARKRAIVAVARKLAVLMHRLWLSGEIYQPCGYAPGARA

SEQ ID NO: 146669 - protein, 413 aa, unidentified
MELEVMVERCAFLDVHRDTAVACARTPDGRGGRTEEVAEFGTTVSQLLALGDWLCERGVTRVGMEATGVYWKPVHWVLEATVPEVWVINARHMRNVPGHKTDVADSVWGASLLEHGLVRASFIPPPPIRALRDLTRYRKSVIEDRTRETQRLHKVLEDAGVKLSSVASKVLSKSGREMIDALIAGERDPEILAGLAKGRMRSKIPRLKDALAGRFNEHHALLCQAMLARIDQADATIDALGVRIGELLDPFEAAVSLLVTIPGVSQRTAQVIIAEIGADMSRFPDAGHLASWAGMCPGNNESAGKHRSGRTRHGSKWLRKALIEAAHAASRTKDTYLAAQYAQIRYRRGPQRAAVAVGHSILVIVWHLLTNGEPYNDLGGDYFDKQRTSDARQRRLVAQLEAMGNTVTLTQAA

SEQ ID NO: 146670 - protein, 337 aa, unidentified
MTRYVGVDLHRRRSVIVVLEADGTELWTNRIDNDPLTLGMEIERAGPDPEVVLEATWGWYWAADVITQAGGKVHLAHPLGIQGFENRRVKNDRVDARLLADLLRMGRLPEAWIAPGSIRQQRELVRYRRKLSQLRAGLKSQVHAVLGKEGLIPPINHLWGPGGKAWLDDTEMGDAYETRVRSLRRLIKTYDTEITKIDARIAAEFKGHPGYEAIQVIHGVGPVFGAVFTAELGDVTRFRSAKHVCSWAGLTPRHRESDTKIQRGSITKQGPPLVRWAAIEAVSKNHGDDPIKDLYRRVAERRGLNKGRVAAARKVLTLVYYGLRDHEIRSLAPPEAA

SEQ ID NO: 146671 - protein, 343 aa, unidentified
MKEISIIGVDLAKNVFQLHGAAADGTVLFRKKLSRPQFQRFMADQPPCLVAMEACGGAHHWARELERTGHEVRLIAPRYVKPFIKRQKNDAADAEAIVEAALRPTMRYVERKTGDQQARSILFRTREQFVKQRTEAVNALRSHLYEFGFVAPEGIGYLPRLGAVLEDSNSDLPPLAREICRELLDQIVHLTGRINAMKKRIDAIAKEGETSRRLQTMPGVGPISALAVETFAPPMGQFKRGRDFAAWLGLVPRQASTGGKQKLGKTSKMGQRDIRRLLVTGAMAVICWALRRGAPGNPWLARLLERKPPMVAAFALANKMARGIWAMLTRREDYRGPEIGSAT

SEQ ID NO: 146672 - protein, 444 aa, unidentified
MTLEVIHACCAGFDVHKETVAVCLRRVTPGGQTHKVVHTYRTETRDLSRLVRWLTDEGVTHVAMESTGIYWKPIYNILEEQGKFEVLLCNAHHVKQVPGRKTDVKDCEWLAQLLQHGLLRGSFIPPKPVREMRDLTRHRAKLTDQQTAVANRIHKVLQDANIKLSSVASDVLGVSGRAMIESLIGGESDPKKLAGLARKQLRGKIPQLEIALEGRVTEHHRFQLEMLYQHLQYLESLIVKLDQRIADVIRRASEHVPPAPKEAGPLFADVTSKEEAEPSPLPFDRAVSLLTTIPGIKQRTAENILAEIGTDTRQFSTEKHIASWVGICPGNNESAGKKRSGRTNKGNRWARRALSQAAWAAAHTKDTYFSSAFGRWAARRGKKRAVVALGHALLTTVYTMLKTKKPFAELGANYFDKLDPERMVRHYVRRLEALGYKATLEVAA

SEQ ID NO: 146673 - protein, 363 aa, unidentified
MEEEKRRYVGIDLGKREYTMAVIGRNGKMTIHHGKTCIHGRQALYRLLEPTDKIALEAGNLAFLMAREVMEQIGSEVRVLNSAKLPFIWDAPTKTDKEDAMKLAHLVEERRDEKLPIVPLPSEKEMERRKTISSYGREMNNRTRLINTLHAIFVHQGHTTIVKKNLATAERRRQAIKVLTGHEREEAEWLLKYLELHEQRINELRVKIKEESKKDEDMKRLQSIPGIGPIVAYAYVAHVGDGSRFSKGAQVSNYIGFVPRLDYSGTIQRHGHITKRGNGYLRGLLVQAAWTMTLSKKGGSLSTRYKYYTLCQEVSKKKTIVSIARKLAELMYSVLRNKTIYEVRKWDGPRNNPAVITGQTMCA

SEQ ID NO: 146674 - protein, 363 aa, unidentified
MYESTTVTVGLDVHARSIRLAAVRVDELLEERTLPYDEEAVERVLRRWPVVRCCYEAGPTGFGLYRHLTDRGIDCAVVAPGLVPQRPGDRVKTDPRDARKLARLLAGGLLEPIHVPTPEQEAARDLVRAREDARLDRMRDRHRLSKFCLRHGRMLPTSSWTVARRKWLGEQRFEHAAEQITFDTYLHAVDLVDRRIEALERAIRETAAQAPWQELVARFRCLRGIDTLTALALAAEIGDFSRFGSAEEFMAFVGLVPSEHSSGEKRRQGSITKVGNSHIRRLLVESAWHARRRPKVGYELARRQRGQDALVVERAWRCQQRLFQRWQRMAGRGKPQQKIVVACARELAGFVWAIATDQPLRSA

SEQ ID NO: 146675 - protein, 451 aa, unidentified
MSKPQVIDDEEHERVHERVAAVDVAKDSGMVCTRLPHPSRPGARPSTVWTVKARMGAVGKLGRQLKDSGIELVTLESTSDYWRIWFFVLEACGLAVQLVNAAQAKNLPGRPKTGKLDAQWLARLTELGLLRASFVPPAAIRALRDCTRARTRLVQERTRCYQRLEKLLEGALVKLSSAASKLTTESAKDMVKAMIAGQRGPRTLAALARTRMKAKHDDLAEALDGMFDDRHGELAGLLLDQIAFLDERVTQLTARITAAVAAMPAAWGVDGDGTTGPDAGTGPDAVVLPAAARLAEIPGVSQDLARAIIAETGLDMSRFPTAAHLVSWAGLCPSARQPGPRTRAGKKSQGDTWLRGSLGQAATGAARTDTFLGERYWRIARRRGKAKAQVAVARSILVIIWNLLKDPAARFTDLGPGYYQARTDKVKKIKNHIRQIEALLGHPITITPKAA

SEQ ID NO: 146676 - protein, 429 aa, unidentified
MQNESTPGARGPVFCGVDTHADSHWLCVLDWRGRRVLSRRFPADAAGYEALAGAIAAAGEPACVAMEGTSSYGAGLTRHLASLGMPVREALSPAGTQRRRPGQGKCDESDAERAARAAMSGSKLGTPKSQDGWVDGVRCMLAARSGAVKARTSAINTARSLLTTAPEGLRSRFRGMAGPRLMEELPSVRAEGALGAALGALADLWAAARDAALDMERAIEASLEENCPALLAMCGCGPVSAAKLAVAAGDNPGRLRSEASFAAICGACPIPASSGKTVRHRLNRGGDRQANSALHEIARQRVMRDPETAEYAERARARGKSDREVMRCLKRYVAREAYRALMRPHEIRRPEDASELVAARLAAKVSQVRAASILGTSEKYISMLERGQRELKPIRRAYEAWVEAGLPLNWDRQAFEAERKMDSKKHLAK

SEQ ID NO: 146677 - protein, 390 aa, unidentified
MDVLYQSCAGIDVHQATVVVCILHGPLTSTRPKREMAQFDTTTKGLKACHDFLSQFHVEAVGMESTGVYWRPVWHELCDDFELILAQPAHMKAIPGQKTDKKDAHWIAQLTRIGLLPRSFVPDETIQELRELTRQRKHYVESRNRETNRIHKILQSGGIKLTTYIEDIMGASGRNLLQLLIDETPVTPRMIHQSVYTSLKRKVPQLLEALDGYFSAHHRFMLGQSLEIYDFYQKQIDCLEERINGYLNLYERPVEILDSIPGIDLITASVIISEIGVDMSQFPTAGHLASWAGLCPGNNESAGKKRSTKIRHGNSYLKRCLCQAVFAAKRQKGSPLAERYYQIQSRRGPQKATIALAHQLLKIAYILLKENLTYQEFVLQKKATRDEPVA

SEQ ID NO: 146678 - protein, 413 aa, unidentified
MDVLHSRCCGLDVHKSSISACILLREAGRVQKHQRRFGAMTQELQELAEWLRQFGVTQVAMESSGVYWKPVWNILEGQFTVVLANAQHIKNVPGRKTDQKDAEWIAQLLQYGLLRASYVPCEIIRDLRDLTRMRASLSQEGSRISSRIQKVLEDANVKLASVATNVLGKSGRAMLEDIITGEDNPEHLASHALGHLRVKIPQLRLALEGKIRPHHRFLLRRLVDQIQFVEQEIALLDERLDDIGRQRPDFAQAVDRWDSIPGIDRVAAWALLAEIGDNMGQFPTADHLASWTALCPGNHESAGKRLRGTTRQGSPWLCRMACQCAWAAARTKNTYLSSQFRRLAARRGKKRAIIAVAHTIIVIGYHLQKNQRNYEDLGGNYFDRIHSDGLKRYLVKRLQQLGHKVTLEPMEAA

SEQ ID NO: 146679 - protein, 405 aa, unidentified
MRVIGMDIHRSFAQAAILEDGQFIKELRVDLTHERIVKFSKTLTLDDEVVIEATGNSLAVERLLRPFVKRVIVANPRLVRAIAYARVKTDKIDARVLAQLQASGFLPDVWVPDDDTQRRRRQTTERLGVLEQAVRTKGRIHSILHANLIPKFTGHLFGKAGKKWLSSLPLPDDERSILARLVDELERITAQLAEFDKVIASESLVDPRAVRLMTIPGIGPIVASTVLASIGDISRFPTPEKLSSYFGLTPKIRQSGDRPARHGRISKQGNVAARRMLVEAAWSAKLAPGPLRAFFNRVQKARGAPAAAVATARKLAVMIWHVLTSGADYAYARPAFTAMKMRKAALKAGAPRAYGKAGPAQDYWIKEIRDREAQYVERVEKAYEQMVAAWKQAPPKQKPASAEKT

SEQ ID NO: 146680 - protein, 342 aa, unidentified
MKDTMIGVDLAKNVFVLHAATMAGEVRYRKKLSRGQFLRFLSEQPPAIVIMEACGSAHYWARELVKAGHEVRLIAPQYVRPFVKRQKNDAADAEAIVIAARQPEMRFVPPKTADQQARAVLFRARERIVRQRTELVNALRAVLYEYGQAIPPGIAHIQRIEAIVERAEIDLPELVREECRDLLVQIDEKTARIKEKAKKLVDLSRQSGIAHRLQTMPGVGPLVALAVEAFAPAMENFRCGRDFAAWLGLVPRQFSSGGKERLGRVSKAGQADIRRLLIIGAMTCVSWAGRKPPVHGSWLSRMLAKKPKMLVAIALANKMARNIWAMLTKQEDYRNPALAIMA

SEQ ID NO: 146681 - protein, 338 aa, unidentified
MSIVMGLDQHRGQITGEWIDTDTGEVQRTRVTPADRAHVRKWLTRFRGSELEVALEATTGWRFVVEELRRVGASVHLAEPAETAGLKGPKKRAKNDRADARHLRELLMVKRLPESWIPPDHILDLRARVRLRHTLSEQRGEWQQRIQATLYHHGCPQRRQLMTGDGREWLAAQPLPAAARETVAVALAMIDSLDRQLAPLDRELRAYARRQAGCKALMGHYGIGPLVAVTILAELGDCTRFSSSRLAVRYAGMDITVYQSDQHRAPGHLSRQGPPALRWALFEAAQSACRRGSPDLEYYRQAAARVGHNRACLSVARKLLKRSYHTLRELGEEALQPA

SEQ ID NO: 146682 - protein, 343 aa, unidentified
MTQRQPVVEVFAGLDVSAREIKVARVQGQDQNPTLATFANHASGHQALLAFLLEKTERVRVCLEASGNYSLDLALSLHAQRQVEVSVINPRRARKFAESLGERSKSDPVDARELCQYAARMPWESWKPPSATALRLRAIPRAMESLGVMHTQESNRGHALASSQALPALVLRERQRHQRYLENRMKQLRREARRLIARDAELDRRYRLMLTVPGIGETSALQILGELVVLSDTADARQWVAFAGLDPCIFTSGSSVEKRPRISRGGSRHLRRALYMPALVALRREPHLKRFYERLLSRGTARFQAVVALMRKLLHALFAMFRANQPYDGSKLCPSELITKAAA

SEQ ID NO: 146683 - protein, 387 aa, unidentified
MRRQSRIRRRPVVATNTITWVGMDAHKNSIKVAAWLPEQAEPVEWAEDTTAEAIRRLARRLRRLAPGEVRACYEAGPTGYGLQRLLGVEGVICEVVAPSLTPVKPGSRIKTDRRDARKLGELLRAGLLTEVHPPSETDEALRDLCRCRDDVRVDLLRARHRLSKFLLRRHRIYRQTKHHWGSRHMQWLAELRFDDPMSQATFDSYQLIVHQLDERLGQLDARLAEFGTQEPYREKVAALRCFKGIDTVTAVCLVAELHDFQRFRSPRQLAAYVGLVPSEDSSGERERRGPITKSGNRHVRRLLVEASWHHRHRPALSRPLRARREGQPARVIAIADRAQERLAARFRRMSEAGKVHPKTIVAMAREMCGYLWAVLHPAALPTRSKSA

SEQ ID NO: 146684 - protein, 427 aa, unidentified
MSLDPHEEPAAIQTHIGAIFISLELSRSKWLITSLVPGGGQRMSKHWVEAGDLAGLLARFWAIRDKVLARTGKSYPIVVIQEAGLDGFWIHRSLVKEGIESHVVDAASIAVSRRRRRAKTDKIDGEGLLRALLAFKRGEPRVCSMVRVPMPEDEDRRRICRERQTLTAERIRHVNRIKGLLFSQGIGDYEPLRRDRRRALEAVRTGDGRTLGANMKAQIGRELDRLELLLDQIAAVEAERDAMLARQPEAGTAQSAQGAPAPVQKPMDLNGPGVETVPKAEAAAGVQSASARVQKLMDLNGLGAETVAKLETEAFYRSFDNRRQLAAFVGLAGTPWKSGRIDHEQGVSMGNQRLRQTMIQLAWLWPLHQPSSALTRWYLERTKGASKIQKKKMVVALARKLLVALWRYVDAGVVIEGAVLKRAARAR

SEQ ID NO: 146685 - protein, 347 aa, unidentified
MPVTIGVDPHKASHTAAALDEHGHLLGQQRITATLEGYQALRQWAGQWEDRRWAVEGAHGIGRALAQRLVGDGEQVLDVPAKLAARVRVLSVGHGRKSDPHDAISVAIAARSVPCLRQVGVEDQAVVLHLLTKRRQDLVAARTQTINRLHRLLMDLVPGGARRNLTAKRAAALLAAVTPAGAPAVTRWQLATELVADVRQLEQRIAAVEARIKTAVAQANTSLLELFGVGPVLAARFLGEVGDVRRFPTKHHFAAHTGTAPLEASSGQVIRHRLSRAGDRKLNHALYMMAMVQVRRPSTGQAYYRRKLAEGKSPKEALRCLKRRLSDAVYRCLLADQHHQPSPVGLA

SEQ ID NO: 146686 - protein, 506 aa, unidentified
MAPPLRFPERGLAALENSERIAEVPIADSKEVCAVLGPVKGRLRRPRRKASAAAPLTIPARRRAGAATSAMGTTASGNSKAIPSPSAIAEGSPHAFRDAFRRGSKEGTALRSVGLDLGKKEVAYCEVQDGKVVARRTARGIEELDDLLGPQSPSATVAIEACREAWHVHDRLTKYGHKLLLIDTTRVKQLGVGHHGRKRDNIDAEVIAFAVDRQQIPQAHLLSPHRRELREKIHARRALVETRATYVTMMRGIIRARGEKLASCDTEHFRATLERAVLTREARGAIAPLMAVLETIDIQLSSVEAELEELAAKDATIAHLTSAPGVDLIVASVFVSVIDEAKRFPDAHKVASYLGLVPREDTTGGRDKQKLGSITKCGNPHARAMLVQAAWCILRGRGGDPLRTWARQIEKRRGRRITAVAVARRLAGVLWAMWRDGQTYDPSRLGTASARGLKAAARDTEAAAGAMRTIAMKAAKRMNRIGARLKADPTKLKPTAATTATKEVAR

SEQ ID NO: 146687 - protein, 412 aa, unidentified
MQIIHECCSGLDVHAKTVVACLIRRGKKQTRTFSTMTDDLLRLSDWLVEEGCTHVAIESTGVYWKAVFNILEGVLEVILVNAQHVKAVPGRKTDVKDSEWLADLLRHGLLRASFIPPLEIRELRELTRYRQSLIREQTALSNRVQKLAESGNIKLSQVASDALGVSGKLMLRAVASGETDAEKMAELARRRMRSKIPELRRALEGRMTKAQRWVLGELLTRYEEIERAVERVERQIDEEVSQGPDHFVEEAVTLLQTIPGIGESVAETIVSEIGVDMGRFATDGHLASWAGMCPGNNESAGKRKSGKTTKGNTYLRAALTQAAWAASHTRGTYLQAQYQRLAKRMGKKKALVAVGHSILVIVYHVLANRASYQELGGDYFDRQNVVQQRTRLIRKLETLGLKVTVEELPVAA

SEQ ID NO: 146688 - protein, 320 aa, unidentified
MMAQNEVVVVGIDVAKDKVDACIRAFKLRQTWLSTARGHRKLVAWLRKHQVNKAVMEASGGYERDWARVLREAGIEVRIVDPKRVRSFALSAGRLAKNDAIDAEMIAWFAETFSEAPGQPHDAAREELQALVKARLDLIDFRMRLVSRSEHAAPGLVQKAHAHILKSLASEIAKLEAAISAKIKSTPDFAERAEIIESVPGFAQTSSANLVAGMPELGQVSDEIAAALIGVAPYDDDSGKRRGERHIKGGRRWVRNAIYMPCVGAATQNNPVLKAYYQRLLAKGKEPKVAIIACMRKLIVILNTMIARRQKWDPSRYVLS

SEQ ID NO: 146689 - protein, 340 aa, unidentified
MNATTYGLDVAKRVFQMYWVDAQTGEIVNRRFGRDELIRFLAQRPAGQVALEACGSGHWWARKIKALGHEVVLLHAKFIRPFVQTNKTDAADARAIWTAVQQPEMRTVAAKTEDQQAMLSLHRMRALLVKFRTMQVNQLRGLLYEFGATFRAGRVAGLAEIRARMAELADALPEAMLCSLQDQLQRIDALEQDIDRLEQRIGAWQKQEAECRAIAAVPGIGKLTATALVATIGDAKTFKSGREFASFLGLVPRQSGTGGKIRLGSISKRGDPYLRTLLIHGARSVMHHAKEPTAWQREIRARRPANVAAVAAANKMARTAWAILSHGQAYQKDYVRVKPA

SEQ ID NO: 146690 - protein, 403 aa, unidentified
MNSVGIDISKGRSTVAVMRPFGEVVISPFEVRHTDSELSELARQLKSLDGETRVVMEATGNYHTPVAKLLHDAGLYVSVVNAKLVHGYGNNDLRRVKTDKKDSVKLANYGLDRWLTLPRYIPEEDTRLLLKNCYRQYRQYSKVQTVLKNNLISLLDTVFPNVNRLFSSPAREDGSEKWVDFVAEFWHCRCVSEKSEKAFTNKYQRWCRKHGYNFSEAKVHTIYAEASGHIGVMPKSETTKLLVEQAVAQLRATSTALAALKHEMQTLVSQLPEYPAVMDMFGVGPTLGPQLIAEIGDVRRFYSKKALVAYAGLDAPPNDSGDVTGRHKSMSKIGASSLRRTLFLVMSVYLQTAPLDEPVYQFMDRKRAEGKPYRVYMMASANKFLRIYYATVKAYLESLEHTA

SEQ ID NO: 146691 - protein, 345 aa, unidentified
MNHIAIDLGGVKSQVCVRNGKGQIVHEAAVRTQVLPVMLQFKHRRRSRVIVETCAEAFAVADAAKQAGHEVRVVPATLVRTLGVGARGIKTDLRDARILSEVSSRIDLPSVHVRSQPSRDRKSMIGMRTALVGSRTQLINSVRGWLRTRLLRLPSGTPESFPVRVRKFLSANALVIPSYVERQLLVLDELNTQLKQADKELEKLAHDDPTCRRLMSAPGVGSLTAVLFVATLDQVERFANAKALTSYLGLTPGEHSSSERKSRTGITKAGSPQLRWALGQCCWSAWNHYPHDPLVTWAHKVAERRGRRVAIVAMARKLATIVYAMLRDEKNYRPDKVGHSSLTED

SEQ ID NO: 146692 - protein, 402 aa, unidentified
MNCVGIDVSKGKSMIAVMRPFGEVVISPFEVQHTASELSELAKLLKSLDGETRVVMESTGNYHAPVAWLLHGAGFYVSVVNAMLVHDYGNNSLRRAKTDKKDAVKLANYGLDHWLTLPRYVPEEDTRLLLKTCYRQYQQYSKVQTMLKNNLISLLDAVFPEVNRLFNSSPRADGSEKWVDFVSTFWHCQCVSTLSLKSFSARYLKWCRKHGYYFSQEKAFEIHSKAQSCIGVMPRNETTKLLVQQAIAQLKETSAALAALKQEMQSLAASLPEYPVVMEMFGVGSTLGPQLMAEIGDVRRFHSKKALVAFAGIDAPPCQSGQMDIHSRSISKRGSAALRRTLFLVMGIYLQSAPLDEPVYQFMDKKRSEGKPYKVYMMASANKFLRIYYASVTAYLNTLARI

SEQ ID NO: 146693 - protein, 407 aa, unidentified
MQTLHKRCAGLDVHKKEVVACLRLVARNKASHEVRRFPTTRGLVELAEWLEEAKCSHVAMEATGVYWKPVWHMLEGRFALILANAAHIKGVPGRKSDTNDATWIADLLAHDLIRASFVPPRPIQELRDLTRTRKQLTREIVQHTQRIQAVLEEANVKLSSAITDILGQSGRRILKAMIAGETDPDKLASLGSPRLASVRFELSAALHGRVRDHHCFLIGQHLKTIEQLEQTISDFDARIEAALAPFRDTIERLKEVPGLSETSAQILLAEIGMDMSQFPTAGHLLSWAGLVPRLDESAGKRRSTRVKKGGPWLKPVLVQCAWAASRKKNSYFQAQFLRLKSRSGPKKAAIAVAASILATTYHMLADGAYYHDLGNDHFARRDPARVAQKLADRIRNLGYQVDIKVAA

SEQ ID NO: 146694 - protein, 338 aa, unidentified
MERPYVGIDLHRRRSVIYTMDAAGEKHDCVRIANDPVTLLEEVSRAGSDAEVVIEATYGWYWAVDLLQDAGFRVHLAHPSGNDWGNRRVKNDERDARDLADLLRLGRLAEAWIAPPAVREVREVVRYRAKLVQLRSGLKAQVHAVMGKEGVLPTLTDMFCPAGQRELDRMELGDVYVIRVESLRDLIALYDREVAMVERKIHQLLRGDRGYEAIQALNGVGRTIAAIFVAEIGDVHRFPSPESLCSWAGLASRHRESDTKVVRGGITKMGSRLVRWAALEAIVRYHGGSWLQRDFHRIANRRGKNKARVAVARKLLTLVYYGLRDGEIRCLRADREAA

SEQ ID NO: 146695 - protein, 346 aa, unidentified
MILIGCDFHPSWQQVCWLDRTTGETEDTKLVHAPGEAERFYRRFPAPALIGMESTGNCQWFVDLLARLGHELWIGDAAKIRASDARQQKHDRRDARLLLQLLAEGRFPRIWTPSSEQRDQRQLLIHRHKLVRLRAQVKNELQHLALNQGVQKKRRLWSAAGEKALVELPLRPWASRWREDLLSVKRMLDGPIAELDQALAQAAAQNEHARLLMTQPGVGPVTSMAFVLTIGDVRRFPRGKQVASYLGLIPREYSSGGHQRLGSISKQGNRFLRMLLVEAAQIAVRYDPGLRNEYLHRCHSKAKGVAKVAAARKLAIRLYWMLRTNRKYPEVVRIESSSRVPLVSAS

SEQ ID NO: 146696 - protein, 291 aa, unidentified
MQITTIGLDIAKNVFQVHGIDATEKVVVRKQLRRGQVIKFFEALAPCLIGMEACATAHHWARELTKLGHEVRLMPAKDVKAYVKRNKNDAADAEAICEAVRRPTMRFVMVKSPEQQGRLMQHRVRDLLMRQRTQLINALRAHLAELGMAAAQGREGVKELLAIVAQDGDPRLPVDAHASLIVLAGQLQAVQTMIGSIEKRVVRQHRSNEESKRLETIPGIGFLGATAIAASVPDPKVFRSGRDFAAWVGLVPRQDSTGGKQKLGPISKQGDRYLRRILVVGACSVLRRARQ

SEQ ID NO: 146697 - protein, 358 aa, unidentified
MDVSKARAPMTAGLDIGDRYSYLCLIDTLSGEVIEEGRLRTTPEALGRRFASERPPMRIAIEAGTHSPWVSRVLEGLGHEVLVANARKLRLIYANKRKTDEVDAENLARLARLDPKLLYPLKYRGEVGQAHLAIIRSRQALVDCRTQLVNHVRGAVKSFGHRLPKCPARSFHKRAKEHIPEALRPALEPVLEQIASLTERIRGYDRQLETICQEHYPETELLRQVEGIGPLTALTFVLTLEDPHRFEKSRSVGAYLGLVPATGRSGDSDPQKRISKEGDEMLRKLLVGSAHYVLGPFGSDSDLRRHGEKIATRGAKNSKKRAAVAVARKLAVLLHSLWINAEVYDPLRNVRTPGVRAA

SEQ ID NO: 146698 - protein, 433 aa, unidentified
MKVLYERVAGIDVHKDMVKVAIRSPGGKPWTRTTEILEFRTFYGVLQAMARELRRRGVTHVVMEASGVYTEPVYYALCEQDFTEVAVINPAHAKALKGHKTDAKDCARLAELFECGLLRGSYIPPAELREVRDLTRYRMKTVQARTPEIQRLAKALESAGIKLGSVASDITGVSATAMIESLIDGERRGAVLADLARGRMRTAGKLTDLSMALAGRFTEHHALLCRLHRDRVTVLDEAVAGLDGRIAGKVTPWQREAGLLTSVPGFGDVVAQAWLGEIGPAPHRHFATCEKLASWVTLCPGSNISARKRKHGRTGDAGTYIKPMLIQAAWAAIRVRGRLQARYNRLVRRFGGDKNPAAKKKAITAIAHTLLKIACQVLKSGMPYQEPGADYYTRRESPEQKQAWLERQLQKLHPGCTVTITISPPEAALPAGA

SEQ ID NO: 146699 - protein, 430 aa, unidentified
MTKRSSTPADAVLVAIDMSKHRQEVLLERPEGGRRRRMTVMATKADYDRLADDLTIIGKPVIVGFEATGNYHRTLAHRLLSAGFELRLISSVALARTREALHNGWDKNDSKDAQVILHMLRIGATQRYVDPLAAGINDLQEMSKTHEAISKAKTQAWHRILTHYLPLYFPEIERFAGNSRSDWFLALIERFPTPGSIISIGREAFTEQAWPLIGRKVSKARVVNDIYETASASIALPIDEDSTAITMFRMVVAQARTLIQQRNEIERIAHDALAATRDYQLLRMIPGIGPINALTILADAGDLRRFSHHRQFLKFCGLDLATCQSGMFRGRTKLSKYGNARLRRTFWMAKQVAIRQRDNSFRDKLGRYVAGYPNDPDRRRKAMTALTAKMARVAHAVIKTGTEYRPFVERADTRWKDPSLCSREGATATL

SEQ ID NO: 146700 - protein, 430 aa, unidentified
MKSNTQNAKIEAITEKTLVLGIDVGSETHYARAFDYRGIEYSKKPFKFSNTEAGFVTFKEWILDLKERHEKDKVVPGMEPTGHYWFNLGKFLQDNEMKPVLVNPHHVKKSKELDDNNPTKNDSKDPKVIAGLVREGRYMIPYLPDGVYADLRTASNIRFQLQAELTRIQNRISRWFNIYFPEYKTVYGKSDAKSGMLILKQAPLPEDILTLGIDGVNQIWRDAKMRAVGKARAKTLIEAAEHSVGSKEGAISARMEIRMLLEDYESRNIRLQEIMTLIEELVNQIPMAEKLLEIKGVGIKTVSGFLAEVGDISRFNNPKELQKLAGLALVENSSGKHKGRTTISRRGRKRLRYLLFEVAMSLVAKNPEFRELHTYYTTRRLNPLKKMQSLMAVAAKLIRVFYVMLTKGVDYDPKKMVGDIKRPAVYLQAA

SEQ ID NO: 146701 - protein, 450 aa, unidentified
MSTLNSAEEKKPSYAAHIGLDWADQKHFWTMLTADGKCTRGDLKQTPEAIEIWAAELAQRFGGRPIALALEQVRGALVAILSKYAHVHLFPVHPTKLAHYRLSVCPSGAKGDPSDADLILDYLVKHPERLCCLEPDTVETRSLQFLVEERRKLVNQHTCQVQILIHWLKQIFPQMLEWFDNMSTPLVGDLLKRWPQLPNLQKASAKTLRRFFDQHNCRSEERIQQRLEEIDQAVPATNDAALLRTGNLCIRISVQLLASLRAGIAEFDSQIEAIYLTHPDRFITASLPGAGPALEPRLLAALGTNRERFESASNMACCFGIAPVTESSGKSRWVHWRWACSKFVRQTLHEWANCSIRTCGWAREHYDKQRLKGKGHHASVRSVAFKWIRILFRCWRDRVPYSEQRYLEALRTHGAAPSTPAAIVVESTSALPGTRWESCGDFAKLAKVSS

SEQ ID NO: 146702 - protein, 370 aa, unidentified
MEKYKFVGLDVHKETIAVAVAEADGGEVRYLGEIPNTTDSVVKLVRRLKNEDARLSFCYEAGSCGYGLHRQLQELGQDCQVVAPSLIPRKPGDRVKTDRRDSLNLARLHRAGELTAVWVPDGAQEALRDLTRAREDMKHLQRQAKPRLLGFLLRHGKRFEGKDNWSQAHFRWFETVKFEQPVQQIVFQEYVDSVQAMTRRVAALDEQIESVAGESVFRPVIEGLMALRGVGLITATTIVAEIGDLRRFATAPQLMAYLEVVPSEHSSGESKSRGGITKTGNGHVRRVLVEAAWKYRYPARKTAILQRRAERASEQVQEIAWKAQKRFCARYRLLEARGKLKVQVCIAVARELAGFIWTIGQTLPQPAARV

SEQ ID NO: 146703 - protein, 401 aa, unidentified
MIKEGPSISVDVSKSGVAYQGWLSYGKPHGKARTADMTRTGLSAIKALADDLGAKDGVAVPVAYEDTGIYSKPLRMFLSESGMVEAVISPLLSAKVRKADDKPIKTDMRDCASIAEAYYTKDKVRIAAAAVGQDALKQLSKSHQTRKAELRKAKERFRKNLDEVWPLWDSVFADPYRKGPWAMVSKYRHPYVLARKRKSDVVALLEANGIRGKRADAMADKAMAYAKDCVSGALESSPEVESLGRWMAGVELAAAEDSAVMGKMVAMLEGNRDFEHLKEIRGIGASLAAIIVAELGDAFRFGSAKAVVSYAGLNPMVCQSGKMTGRHLPITKKGNARLRWALVMAVRVMGLTDADNKVTRFRDHLINENRLSSEAAIVAASSKLLRIIYSMMKSGQPFEQD

SEQ ID NO: 146704 - protein, 387 aa, unidentified
MPKPNDLSRSLVALEQDSTLIAVVEMSQSSWLVAGIVPGVERQPLKKLAADEDALLRCLLRWRDEAAKAGRAISRIAVAYEAGRDGFWLARWLRAKGIEAYVIHPTSIPVTREHRRAKTDRLDTGLLKRAFLGWLRGEPGHCSMAAVPRLAEEDAKRPNRERECLVGERTRIVNRMKATLARLGIRNFNPKLRKAAGRLAGLRLPEGEGLPENTLAELRRDMARLRLVREQIDAIEAARAARLEEKPATGPHAMIQLIARVIGVGLETADMLVNEVLLRNLRDRRAVGRYAGLTGAPDESGARRREKGLARAGNPRVRRGMIQLAWRFLRFQPDSALVRWYRERTADAPRGVRKTLIVALARKLLIALWRLVTAGEVPQGLAMRPAA

SEQ ID NO: 146705 - protein, 424 aa, unidentified
MNLTQNDRLKQVTSDTLIVGVDVGSQTHFCRAFDWRGFELSRRVFKFSNIGMGFLTFLRWTEEIMNKTEMKKVIVGCEPTGCYWLTFQKFLQDHDVQLVTVNPFTVNRSMELDDNSPEKSDLKDPKTIALLVKDGRFSTSYLPSGVYAEIREASVCKDQIMKQHVRLSNQIQGWIQKFFPEYLECYADWDSTSGLMLLREAPLPQDILKIGAGGINQIWRNAKVRAAGIKRAQTLVEAAQNSVGLEAGEAARLEIWVLVNDYILKAEQLKRLDEYLEEKVKEVPNVEKLLAIKGVGMSTVIGFIAEVGDIGRFTDPKQIQKLAGLEIVKKSSGKKKGQPRISKRGRRKLRRTMYESAKALMLWNPAFQDVFLYYRNRTKNPLGGMQAKIAVACKAIRVFYVVLQTGCDFDEEKFRKDIIRPEAA

SEQ ID NO: 146706 - protein, 424 aa, unidentified
MKEKLRFLGLDVHAETIAVAVAEPEGEVRSLGTVPNRAESIRKLIKKLGPADKLRACYEAGPTGYVVYWQLAELGVECEVVAPTLVPVKAGDRVKTDRRDAEKLARCYRSGDLTTVWVPDEGSEALRDLVRAREAAKQDQTRARHRLSKFLLRSGQRPPTGVRPWTRPYLIWVAQLRFTQIAQESTRQDYLHEVEHMRGRVERLEQAIMEAVKLATPAMQQVINDLQALRGIADISAVTIASELGQVSRFESARQLMGYCGVVPSEDSSGKRTRRGAITKTGNAHLRRIVVEAAWSYRRPPGIWYGLRRRQESISEEAKEIAWKAQHRLHKRYMKLGAAQILYSLRDEVPPLMFLVLVLWRVPVKRLHHDCHGLCSPMPFVAPATHTIRMFVTRRAARSAVSWRRDPISRKPERSGPLVYCQLH

SEQ ID NO: 146707 - protein, 361 aa, unidentified
MEYYIGLDVSQRQTAICIVDGKGERVKEGKALTLPSDIHAWITKHVEACTVVKVGLEAGAMSSWLYTELTKLGLPMICLEAYQAHLFLKTQRNKTDKNDARGLAQLVRMGGSFIRAVTIRSQANQEARALLTMRQHLVGQKISLENNITGTLKPFGLITPRGHACPTTFRERVCTTLCQANERGIAVGVAVTPLLDLYDNLCQQLAILTKQVTALAKANPICKRMMTAPGVGPIVALSFVTAIDDPRRFKTSSDVGAYFGLTPQQYQSGETDIMGNASRRGDIMTRCHLVQAATTLLASTKKWCALKVWGVKLAKKHGFSKARVAVARKLSIILCRMWIREQDFCWTTIPINTPSAGTIPA

SEQ ID NO: 146708 - protein, 349 aa, unidentified
MILVGCDLHTRKQQVALLNTDTGELWDQELSHDGDAIERFYATLPPPVTVGIESTGYSLWFHALLQRLGHTLLVGEAAKIRAMVVRKIKTDRRDARHLRDLLKDDRFPVVWIPDPATRDLRALIKHRLRLVRIRTMVKNGLHAIALNQRLALGPSLWSRAGLAQLHALVLPPHTRRRRDDSLELLQWLNGHINELDLHVATAAAADPDARRLMTHPGVGPLTALTTVLVLGPVGRFPNSKHVVSYIGLAPAVSASADKYRLGHISKQGSALLRWVLGQAAPLATRGDAALKRIYFAVLRRRGRPKAKVALARRLLIRLYVMLRDQIDYDEFCRRGRTQRPGLEPARIPV

SEQ ID NO: 146709 - protein, 453 aa, unidentified
MPKRSRVLRHQRKFIGHFDVVNPDAAGIDGGDESHFVSVPEDRSVEPVREFGTFTEDLHALADWLLACGITHVAIEATGVYWVPLYEILEERGLKPQLIDSRSIGRRNKKTDVLDCQWIRQLHTFGLLDAAFRPPNEILPLRAIVRQRGMLIERAAQNIQRMQKSLNLMNVKLHVVLSDIVGVSGMRIIRSIIAGKHNPAELAALRDPSCKASEQTFVTALSGNYRREHLFALRQAVESFDFENRLIADCDAQIEQELQQLNKQTTVEKAKKSKAKRRKNRLHFDGNTILHELAGINLTAIDGLEASSVLTILSETGTDMSPWNSGKHWAAWLTLAPNNRITGGKPIRKKGPRIHPNRAAQAFRLAAQTLERANCALGAFFRRIRARYGRQSAIKATAHKLALIFYSMLKNKTAYVDPGVDYYEQRYRERRLNSLIRQAQALGCTLVPAMEVH

SEQ ID NO: 146710 - protein, 392 aa, unidentified
MDSPPPRHHSATVAFEEANGSEGETMKKHSSKHDSLSSTDVELCTTICVDLAKQVFQLAGEDATGRVIYEDRIKSRQAFHDFLIRLPTTVAVLMECGPGAQAWARLLQTKGNPVRILPAQRVAEHRSGAKNDRNDAHAILRAGRDTSIASVPIKSTTALAIQALHRIRRGNIKRHTALGNQIRGLLLEHGVSMPQGDAAISQQVPRALEDASLPLPDLLRELLDELLTDWLSLGERIAALSGRLEVTAQQDKVAQRLITIRGVGPIIATAIVAKQTEPSRFASGRMYSAFFGIVPDQHSSGNKIRLGRMSKRGDGYIRSLMIQGAHAVLSQLRPDSDQPDDRRLLRWLSRLGRKEAAIRLANRNLRIIWALLQSNQVYQRKPNNNPEAAMSL

SEQ ID NO: 146711 - protein, 300 aa, unidentified
MLGDLKKLYSKLKKIYKKEIEEIIFIFEPTGSYSELLRKFCADKQIKCFIINPKQFSNYAKALGEEVKNDEVDAKVLAQAITLAKPHQIKIPAYDVDVEQIKELMSFYKFTTKQTAQLKGHLESLVSKDGDKFSIKELKKSIAASKEREKRIIAQVHQMIQSNPTYKKAYENITSIVGVGQIGGIALLHLFIKYPEANQRQITSLAGLNPIYKQSGSSLQTLYKISKSGSVFYRGALFMGVMTAIRYDENFKTFYDRLKANGKHTTQAQIAVMRKMIIVAHSLYKNDTKYVKKGTDNVLV

SEQ ID NO: 146712 - protein, 356 aa, unidentified
MKITTVGVDLAKNVFQVHGIDERGKAVLRKQLRRAQVAVFFASLPPCTIGMEACAGAHHWARTLQGFGHTVRLMAPQFVKPYVKTNKNDVADAEAICEAVDRPNMRFVPIKSIEQQAILSVHRVRQGFVKARTAQANQIRGLLGEFGLVIPQGIINVTKRVPEILEDASNELPAPFRHLIDRLTEHLKELDRQVKEFEREIIAWHRSSELSRKLEQIPGIGPLAASARVASIADARSFDNGRQVSAWLGLVPRQSSSGGKPTLLGMSKRGDAYLRTLLIHGARSAILAAKNKVDNTQGWLTNLLKRRHPNIAAVALANKNVRTVWALLAHGREFKADYVATRMAARFLVMDPPGFG

SEQ ID NO: 146713 - protein, 374 aa, unidentified
MSAAKCQLNEAELKLLKEKQARGVTVVGIDLAARVIQVCYLQKNGTLYNKPKTREEFIKFLEEPPFTGKILAGIEACGSCNFWARKIKALGHDCKVMPAFQIKAFLSLDTKTDKVDALAILRAVMSVSIKEIGIRDEKNQVLMQLLTVREQLMKQKVQIQNARRAVLYELGEVCSLGENAIDECAQKLLVSLEKSKSEVLSEFSSCDAVAKANLNNVNTQLNTIEKHLTDFAKNDPVCQNLITIPGIALLSAAAVLRIVMGDPNDYPDSRHFAAFVGFAPKVTGSGGKVSVGGTRKSGNRILKRVLYMCAIVRYGQTKKHDPERTSKVATLIDNEDVSNKRIVCSIANRMARVAWTLAKHGEKFDGKKCRLLGL

SEQ ID NO: 146714 - protein, 414 aa, unidentified
MTILAIDLGKGNSVACVYELGTDRHRFLRVPTTPSMLGDLIAAVRPERVVIEVCPISGWVADLVRSLNVDLQVVHGNHEGWRWRNVKRKTDRDDALKLARLSAMNQVSEVYVPSRPIRQWRSLIQARQSVVKRLRRTKNRIRSILEREALAWPEGKKGWSKSQLMLLWEMARPLSEVGMDDLWRGELHVELTLFDQALSALATVEQRLDELAQADSRVQLLETIPGMGRRTAEMIVAVIDDPHRFRRGKQVGCYLGLTPRQYQSGATNRQGRISGEGHKTLRALLVEVSWLGRRWNPRLRAIYDQVHRGSPARKKIAIVATARRLLIWCWAMLRDGRTWDEHMVAQGRFGLGEPVRRGPLRPTLSAVAHSLRSNRASDGRQGPEPQGQVEPILQSREDREESVTAFFKRCRCQA

SEQ ID NO: 146715 - protein, 441 aa, unidentified
MAMRTQDEEVVFPNAAGIDVGGSSHWVAVPPRSTDDPIREFGAMTDDLNAMADWLLACGVDTVALESTGVYWIPVYEVLEQRGLKVWLVDARQMRYVPGRKSDVQDCQWLQKLMSLGFLRAAWRPNGEVCTLRAVARQRDVLLADQASWVLRMQKALVQMNIQLTEVLTDVMGMTGQAIIRDIVAGECDPKVLARHRNGRVKASEAEIVKALTGNWRDEHLFVLGQALAMYDDIGRHLVECDAKLQGLMTDLGRTQVDLGKAPRPGSKLRQEFDIRQILANWAGVDLTRINGLGLAAAMKILTETGPDLSRFETVKQFCSWLGLSPGTKISGGKVLSAKTKRSANRVRQALKMAAMSLWHSDSALGAFYRRLCSRMDKPRANTAVAHKLARMVYFMLTRGEDFVDKGQQHYEEQQHQRSVAALKRRAAALGFKISPAVALA

SEQ ID NO: 146716 - protein, 395 aa, unidentified
MDKAWVGVDAGKEFHWVHALDASGVELLSRRVENDEADLLGLVEEVASLAGGGEAIWAIDQPGGGAALLLALLWEREQRVIYVPGLAVDRARDAYCGESKTDERDARVIADQARMRGDFSELAPEEDALAELQLLLARRRDLVVDQTRAITRLREALLALFPALERALDLNTKGSLVLLTRYQSPKKIRRTGHHKRLATHLKGRGVKGADELAKKALAAAKTQSVELPAQQVASRIVAEIAGEILALKERLCTLDKEIASRFFDRPEARILASLPGIGPLLGAEFLVAVGDLSVFESADQLAAYAGLVPAARDSAKRVGNNRRMRGGNKTLKRVFFLSAFSSLRSSPNSRAFYDRKRREGKRHTQALIALARRRVNVLWAMLRDGTTFKSPPLRA

SEQ ID NO: 146717 - protein, 390 aa, unidentified
MICVGIDVAKDKHDCFIMNSEGEVLAEVFTIPNNLEGFESLLSRIRSCCGEKQIRVGLEATGHYSYNLLGFLMNNGMPTFVLNPLHTNLYRKSLTLRKTKTDRVDARTIAAMLLSGVDLKPYTPVAYHNEQLKSLTRYRFDKVRERAKLKQSVSRLVTILFPELEKLVPSLHMASVYALLDEFPGASHIASAHLTRLTNLLVTASRGHYGRDKAVEIRETARRSIGSVLPAKSLELRHTIQLIRILDSEIDEVEAEIRAMMGQIHTPITSVPGIGVFMAAMILAEVGDFSDFDSPDKVLAYAGMSPSTYQSGQFTSTYARMEKRGSRYLRYALYNATKYVCQWDTNFSSYLAKKRAEGKHYNVALSHAAKRLVRLLYALQLSGKQYQPAA

SEQ ID NO: 146718 - protein, 366 aa, unidentified
MFYLGIDVGKFTHSLCLIDESGHHDIWQINNDKSGFESLRKKINSLNLLIESRLLVGMEATGHYFLNIYDFLLHLGLSTEQIALLNPLQVKSFRNTNLRGAKSDNVDAEQIAVLLQFGNFDRCNVSTDHIMNLRELTRLKSDLTANLGNLKRKMIAVVDRIFPEFAKIFANKFGLTVVTLLTDYQTPEEFAALSLEELTALIKGLSKRGVNRDKIQRLHEAARNSIGISFGREGFKIELSILLTQLKSIEEQIDFLEGKIAEMVNELNSPLFTIPGIGKTTGAAILAEIGDINHFASAVKLIAFAGLDPKLKSSGTYQGRTPISKRGSKYLRSALWYSAMVLCRVDEKFHKQYQDRKNLANLTAMR

SEQ ID NO: 146719 - protein, 340 aa, unidentified
MKKNKQFYLGIDISKPFFDVSVLAVTQTAKQEMQTAQFGNDASGLRLFAKWLTGLGVSYDENSLVVIENTGIYHRPVWNFCSSKNLPIHIGNAAHIKWSLGITRGKSDKIDSIRLCEYGYRHREELKCTAALNPVFLQLKDLMTNRTRLMHQLTSLKSYLKELKGVSGKSFISVQQRCNKAVIAGLKKSIGLIDEEIKKLISQDKQLLTNYQLLKTVPGIGHWIAVYLICCTRNFSNGITGKQLACYAGVVPFEHSSGISIRGRNRVHKMANKDLKKLLHLGALATLKYYDEFKQYYNRKKEEGKHSMSILNAIRNKIILRAAAVVQNQQPYVNYSANNV

SEQ ID NO: 146720 - protein, 319 aa, unidentified
METTEVSFTQVVSRGCGIDVHQKVVVATISGDGIKKETREYGTFTRSLTELKEWLLEQGITHVAMESTGVYWKPVYHVLEPTPIKVWIVNARHIKYVPGHKTDKQDSAWICKLLLAGLLKPSYIPPREQRELRDLTRYRTKLIQHVASEKNRIIRVLEDCNVKLSSVLSSTQGVTATRLINQLCEGRTVTMKDIEEVYHGKLGASKEDLYEACQGLMTPHHIYLLETIREDIRSTEGIIEGLNDRIRAMLSVYENVLENLKAIPGLSKKTVEDLVAEIGLDMSVFPTEKHLASWAGMCPENNESGGKKKADAPTTAISR

SEQ ID NO: 146721 - protein, 321 aa, unidentified
MSKVIGIDISKQTFDVCWKEKDKNVSMAFPNNQEGFKSIFKHLKKGDHCVMEASGTYFLKLAMFIYTRKVNVSVVNPLIIKRYCQMKLARTKTDKKDAQMICEYGREQKPEFWQPDPDYIKEMGTIITTIQGHEKMATQVSNQMEAERQLDVINTVAKASKEFILAHLEQEIDKLQEELKALAEKHCPETLAKLTTIPGIGIKTAVVLIAITGNFEYFADARALSAYCGMCPRIYRSGTSVKGKEHICKMGGSRIRKLLYVCAWSAQRHNPQCKELKERLEAKHKPGKVISIAIANKLLRVAFGVVKSNKDYDKTKGLKAA

SEQ ID NO: 146722 - protein, 362 aa, unidentified
MNRNTGMSAGQIIGTLNGLQVMGLDIAKHVFQLHTVDMGTGEIANVQIKRAKVLEYFVNKPKSLVAMEACGGAHHWARELTALGHTVRLLHAKIVRPFVSGNKTDATDARAIWLAVQQPGVKFVGIKTAAQQATLTLHRQRELLMKMRTMQTNALRGLLYEFGATFAQGRKALFKDIERALEELSTQLPQMVRDSLREQVGRIKEMGDAMLEIEKRLALQLKADPHMQRIAQIPGVGLLTATAAIATMGEASAFKSGREFCAWLGLVPSQTGTGGKVRLGGISKRGDTYVRTLLIHGARSVLSHAKEPSPWLQQIKERRPANVVIVAQAAKMARTIWAVTAKEQSYQRGFQSLRPSAAMHAA

SEQ ID NO: 146723 - protein, 372 aa, unidentified
MHDTIFVGMDVHKATISVAVAGGARGEEVRHLGNFLNRLDHVDKLVQHLSKTDGQRRLRFCYEAGPCGYGLHRRITDLGHECVVVAPSLIPVKAGDRIKTDRRDAVMLAKLHRAGELTAVWVPDAAHEAMRDLIRARATAVRVLGKARQHLQGFLLRHGRVYAGKKGWTLPYRRWLTTVRFHHPAQQVVLQDYIHSVYDAEERIARLTKQIEDLVPTWSMAPVVEAFQAMRGVAFVAAVTVAAEVGDFTRFDNPRQVMAYLGLTPSEHSSGTAIRRGGITKAGNALARRVLIEGAWTYRMQARVSRKLHDRLEGLPQIVRDIAWKAQVRLCSRYRRLAATGKPKVVVTTAIAREMAGFLWAIARQTQIGSAA

SEQ ID NO: 146724 - protein, 346 aa, unidentified
MKINRVGVDLAKNVFQLHGADSRGKAVWRRRLSRGKWLAVLCDTVEPGTEIGMEACAGAHHWARQLVQRGYPVKIIPPQFVKPFIKSNKNDANDAAAICEAMGRPDMYPVKVKTVAQQDLQAMHRIRDEIKSHRIAKANQIRGLVTEYGLVAPQQLPALRKAIPDWLEDAENGLSFLFRQLLQGLWGDLYVLDQRMAELDKQIAVIAQEDPTARRLQQLRGVGPLIATALVATVGDARQYRKGRDMAAALGLTPRQHSSGGKDRLLGISKRGDAYLRCLLVHGARSAMRTAKDKDDRLSQWIINLQARRHSNVVAVALANKMARMAWAMITSSMDYDPDLAAASVN

SEQ ID NO: 146725 - protein, 429 aa, unidentified
MQNESTPDARGPVFCGVDTHADSHWLYVLDWRGRRVLSRRFPADAAGYEALAGAIAAAGEPACVAMEGTSSYGAGLTRHLASLGMPVREALSPARMQRRRPGQGKCDEADAERAARAAMSGSRLGTPKSQDGWVDGVRCMLAARSGAVKARTSAISTARSLLTTAPEGLRSRFRGMAGPRLMEELPSVRAEGALGAALGALADLWAAARDAALDMELAIEASLEENCPALLAMYGCGPVSAAKLAVAAGDNPGRLRSEASFAAICGACPIPASSGKTVRHRLNRGGDRQANSALHEIARQRVMRDPETAEYAERARARGKSDREVMRCLKRYVAREAYRALMRPHEIRRPEDASELVAARRAAKVSQVRAASILGTSEKYISMLERGQRELKPIRRAYEAWVEAGLPLDWDRQAFEAERKMDSKKHLAK

SEQ ID NO: 146726 - protein, 366 aa, unidentified
MKKISTLAKSGNEIFKEPKLTIGLDLGDRTSRYCILDELGNVILEHSLPTTPKGIYQVFSRIPRSRIALETGTHSPWVSRQLTQMGHEVIVAHARNVRLIGESSRKDDQLDARTLARLARIDPGLLGPVRHRSAKAQVHLTVIRARAALVSTRTALVNAARGLTKSYGERLRKCGTRQMNREIAKGLSQELRDALEPLLEEIESLNERIAEYDRRIEQIAKEVYPEVALLQQVKGVGTLIALTYVLTLDDPHRFRRSRDAGCFLGLRPGRRNSGRSEPQLHISKEGDRYLRTLMVQGAHYILGPFGQDSDLRRWGLQLAERGGKNAKKRAVIAVARKLAVLLHKLWVSGEVYEPLRNNHKVVSAVA

SEQ ID NO: 146727 - protein, 369 aa, unidentified
MNTTTFVGLDVHARSIKAVALDAMTGEVRSATFAYDAAAVAEWVGSLDPAAKCVYESGVTGFDLQKKLSSMGIDCVVGAVSKMIKPSADRRRKNDRNDAEFLARMLSVGNVVEVCVPDDECEAARDLVRALDDAREDLKRCKQRLSKFLMRHGYAFGETTPTGRRKGNWTAAHWAWIRSIEFPEKADDDVLAYYVDAVRQAMENKKRLEKLVEAEASKPRWKKRVDSLRCLKGVDAMTAADIVFEAGEFSRFKNARSFAAWLGLTPSEHSSGESARQGGITKAGNKHLRRVLVEAAWHYISASPHPKDLAKGQAPDPAARRHAAKGIRRLVKRREEMLGRGVHKNKANVATARELACWCWAVGRMVENG

SEQ ID NO: 146728 - protein, 339 aa, unidentified
MKYTPVGVDIAKHLIQVHFINEHTGEVVDKQLRSRDFLTFFSNREPCLIGMEACGGSQHWARELTKLGHKVRLLQTRFVKAFVIGNKNDVMDARAIWMAVQQPGKDIAVKTEEQQSVLVLHRTRRQLVKFRTAQINSLHGTLLEFGETIHKGRAAMNREFPAALERMKTKLPPYLITVLEDQYNRLSELDMQIDGLEKQLSSVAQQNETCKRLMEIPGVGPLIATAAVATMGEASAFKSGREFAAYVGLVPKQIGSGGKIRLLGISKRGDTYLRTLFIHGARAASLCAKEPGPWITELKKRRPASVAIVAMANKLARIVWAIAAHERKYDKNHVSIRPY

SEQ ID NO: 146729 - protein, 366 aa, unidentified
MKKPSTPTVRQRGKLQDGQLTIGLDLGDRSSFYCVLNGTGEVILEERVATNPEAMKKTFSTMPRSRIALETGTHSPWVSRLLSDLEHEVIVAHARNVRLIGESRRKDDRLDAQALARLARIDPQLLSPIQHRSAQAQADLSVIRARYALVRARTALVNAARGLTKSFGERIRGRNPKGFRQATSEALSPQLQIALAPLLSALETITARIREYDAQIEELAEKSYPDVALLKQVKGVGTLIALTYILTLEDPRRFRKSRDAGCYIGLQPGRRNSGQSEPQLHITREGDSYLRMVLVQGAQHILGPFGEDSDLRRWGLKLAERGGKRGKKRAIIAVARKLAVLLHHLWISCEEYEPLHNARKRRLVAA

SEQ ID NO: 146730 - protein, 335 aa, unidentified
MERQYVSIDLHRRRSVIVRMTKEGEKLETVRIANDPLGFASELAKAGPDPEVVLEATYGWYWLVDLLQVNGASEHLAHPSGLNWENRRVKNDELDAIELADRLRMGRLPEAWIAPPVVRELRELVRYRAKLVALRSGLKTQVHAVMAKQGILPELVDMFGPGGQRLLDAMPLDHAYAVRVESLRDLIEIYDREVAMLEGEIARWLAGDRGYAAIQAIDGVGPTMATIFVAEIGDVSRFGSADRLCCWAGLTPRHRESDTKVVRGRITKMGSTLVRWAAIEAVARYRGGAPIRDAYQRIADRRGRKIARVAAARKLLTLVYYGLRDGEIRCLAETG

SEQ ID NO: 146731 - protein, 419 aa, unidentified
MDVLIERCAGIDIGKHEVVACVRTPAPGGRGRRKQTRTFASFTGALEEMADWFTDQGVTDIAMEATGSYWKPVWYVLEERSFHLELVNAQQVKILPGHKSDVLDAEWLAELLEHGLLRGGFVPPAAIRELRDLTRYRKRLIQSHTAEGQRIDKTLQDAGIKLDSVASDLLGVSGRAMLGALVAGERDPDVLAGLARGRLRRKLPELRQALRGRFREHHALLIGMSLEHLVYLEAAIARLDERVDALMATHTSGVGVPFARARDHLDTITGVGKRAAECILAEIGVDMTRFPTAAHLASWAGACPGNNITGGKRGSGKTTHGDVWLLDILTQCAWAAAHTRDTYLAAQFWRLARRIGKKKAAIAVAHSILVISWHLLADDCDYDDLGGDYYTRRNPDRQRDRLIAQLQGLGYRVTLDKAA

SEQ ID NO: 146732 - protein, 337 aa, unidentified
MKFSGIDLHSNNSVVVISEETDRIVYQKRLPNNLEQILAALEPHRDELVGVVIESTYNWYWLVDGLMDAGYRVHLAHPSAIKKYEGLKYSGDFADAGYLAKLLRLGLLAEGYIYPREARGARDLSRKRMQLVRYRTAQILAIENILARQTGARLSGEAVRRLTAEQVEELGFVPDVALAVEANRAVSQALGQQIEALEKRLKERVRLRGEFKLLKTAPGIGETLATTIMLETGTVARFAKVGNFSSYCRCVDSLRESNDKKKGEGNTKNGNKYLAWAFVEAANFARRYCPQAKAFYERKKRKTNGIVATKALAHKLARACYHMLSEQKPFDVSRCFG

SEQ ID NO: 146733 - protein, 371 aa, unidentified
MTEVVKYIGLDVHKETIAVGVADGERGAEVRYVGTVANEDDAVRKLVKRLAAPGTTLSFCYEAGPCGYGLQRLLIKLGQMCIVIAPSMMPRRPGDLVKTDRRDAMTLARLLRAGELTAIWVPDEAHEAVRDLIRARRSAKDDATAAKQTVRSFLLRHDRRFGGRSAWTKMYWRWLSEQRFDYPHQQLAFEELQKRVLEAQARVARLESALTEAVKTWRFAPLVRGLQALRGIKLVSAATLVAEIGDLTRFDNPKQLMAYVGLVPSEHSSGARTHRGRITRAGNAQARTTLVEAGWSYRLPAREERRYRERVADLPEDVQAIGWKAQVRLCQRFRRLSATGKPQPKVTTAIARELVGYAWDIARRMSPAMVG

SEQ ID NO: 146734 - protein, 347 aa, unidentified
MKEIATIGLDIAKNVFQVHAADADGSTAFNRKIKRADLLKFFAKLPPCLVGLEACSTAHHWGRRIAEFGHEVRLIHPAYVKPFVKRGKSDFNDAEAINEALTRKTMRFVSVKSAEQQASAMIFRTRTLAIRQRTQAINALRSHLAELGVATPQGTTGLKALIAIANDEHDGRIPASARFALQQIHKQIEFLGEYIARLDREILARTKNDADIKRLMTIPGIGPIIAVAITALVPDLSGFKSARHFAAWIGLTPKSHSSGESQALGNISRMGNSHLRALLVTGAMSVIRSAKTAERVSPWLAKLRKRRPFKVAAVALANKTARIVWALLIRGGNYIKPGGTVDVGTMA

SEQ ID NO: 146735 - protein, 339 aa, unidentified
MSPGTAADVTHDRTVAWFQPHCARQVTVTRLICGVDVSGETLDCRLGQDGPCLETARTAEGIGRLARFCREHAVELVVMEATGAYERMVFSLLWEAGIACAIVNPRSVRRFAEAMGFLEKTDRTDAGQIARYAEVKGIVAQEPASPSQQRLRALVTRLRQLTDLSVAQANQRRLVEEPDVLEGVEELLKLVKRQIRKLEGQIAELIDSDPLWRAFDEAFRSIKGVADRTVARLMADLPEIGTLSNKAIAKLAGLAPMAKDSGKRKGKRSIRGGRTSVRSILFVVASVVSRHNADFKDFHQRLSVEGRTKKAVRIAVARKLLVRLNAKAREIRHTFANAT

SEQ ID NO: 146736 - protein, 403 aa, unidentified
MNSVGIDISKGRSTIAVMRPFGEVVISPFEVRHTGSELSKLAKQLKSLDGETRVVMEATGNYHASVAKLLHNAGLYVSVINAKLVHGYGNNELRRVKTDRKDAVKLANYGLDRWLTLPRYIPEEDTRLLLKNCYRQYRQYSKVQTVLKNNLISLLDTVFPNANRLFSSPIRGDGSEKWVDFVAEFWHCRCASEKSERAFTSKYLRWCRKHGYNFREAKAHTIYAEASGHIGVMPKSETTKLLVKQAVSQLRATSTALAALKQEMQSLASVLPEYPVVMDLFDVGPTLGPQLIAEIGDVRRFYSKKALVAYAGLDAPPNDSGDVTGRHKSMSKIGASSLRRTLFLVMSVYLQTAPLDEPVCQFMDRKRAEGKLYRGYMMASANKFLRIYYATVKAYLESLEHTA

SEQ ID NO: 146737 - protein, 334 aa, unidentified
MYYIGLDIHKKFTQACVLDADGRLVCNDRIRTDVHDIGHWFERMETRTNDELAVALEATGFYFWIYDTIVSRGHDAKVVHPVKVKPLMRARSKNDKNDAYMLAELLRSRCLEGIYVPSSDVREMRELTRHRESLVRKKGDLKREVLAHLLQKGMKVPDDLRTNFSQKHISWMRSVDDFILHEKLDVLELLMTKIRNIESKLDELYGEDEDVRLIRTIPGIGLVTATVIKAEVGDVTRFSSAENLAAYVGLTPMTYQSGEKEWGGHTRPGNSRIKHVLIEAMLFHLHHCPDSRISRYNHRKREAIGRQKAVVATARKLMEAIYFMLVRRQEFQAH

SEQ ID NO: 146738 - protein, 435 aa, unidentified
MNHSATQIQSNINEPFAAFVGLDWADEKHAVVLQAADSQTKEHTTLEHTPEALSDWVAQLHQRFAGGKIAIILEQSRGSLLYALLPHVHLVLYPINPQMAAKFRKAFYPSGAKDDPLDADLLLEILVQHRDRLKAWQPDEPVTRQLQLLVEARRRFVADRVRLSNRLEHALKSYFPQALQLVGESLTTPMACAFLQKWPTLAAVQKAGPQRLRKFYYGQHSRAEDLIQQRLQLLAQTQPLTTDAAVVAAQSLLAKSVARELAALPAILTEYDQQIAALFALHADQEIWDSFPGAGAALAPRLAAAWGTQRERFESSDAMAAYSGIAPVKQASGRSVWIHMRWACPRFLRQTFHELARTSLSFCVWAQCYYQMQLQRGKGRHAAFRALAFKWQRIMWRCWQDHVPYNDLKYVESLKRDNNELYSRIINFQSKPTRE

SEQ ID NO: 146739 - protein, 367 aa, unidentified
MMGWMAPLRHRRAKLVFWRITRNREPSMSEITTIGLDLAKHVFQVHGIDAQGKTVLRKRLRRGQVSAFFSRIPRCVVGLEACATAHYWARELGGLGHEVRLMPAQYVKAYIKRNKHDAADAEAICEAVERPTMRFVPVKTAEQQATQLLHRGREQLVRQRTMLVNALRAHLAEFGIIAAQGLRNVAQLIVIVRDGEETRLPDVARQVLQVLAHQIEQIEAAIAALERQLLAWHKTNPVSQRLASIPGIGPIIATAIATTVTDPNVFRSGREFAAWLGLVPRQNSTGGKTRLGGITKRGNRYLRRLLINGASANLLRSKATKADPWVIGLRRRRPPLVVAVALANKTARIAWAVILRQREYQPRAVAA

SEQ ID NO: 146740 - protein, 387 aa, unidentified
MSRLDDLSSCLVPFGQGNTLVVVIELSQESWLVAGTVPGVQRQPLKKMEPNETALLRLLHRWRDEATRAGRTVERIVVAYESGRDGFWLARWLAKQGIEVHVIHSSSVAVSQEHKRAKTDRLDTAMLNRVFLGWLRGERGHCKMVVVPTLAEEDAKRPSRQLEKLTRECTRIVNRLKAALARLGIRGFNPKLRKAAARLETLRNPEGEPIPQNLLEELERDLAHLAFLREQKREIEQLRLERLQQAPKTGTNVMVLMLASVIGIGIDTADLLVQELLSRNLRDRRAVGRSAGLTGSPDESGSKRREKGLSKCGNARVRRTMIQLAWRWQQFQPDSALAKWYKSRIEGAKRVVKLKLIVGLARKLLIALWRMVNTGEIPEGVVLRQPA

SEQ ID NO: 146741 - protein, 454 aa, unidentified
MKILALDLGKFNSVCCLFDSKTRKTQFVSTPTTREHFGVIFQDTKADLVVMEACGPSGWINDLAQHHGHETLVCSTNEEAWRWANVKRKTDRDDALKLARMAAMGELKGVHTPTLEHREFRSLVKYRKTLDGRINKTKNAIRAWFVNHGIEIATGEKAWHSGREHINSFRKPLTDCGPEELWKGELDIELTILDSLAEQLTGVVKKLEAIGKNDERIKRVQTIPGVGPRTAEILVACLDDPHRFENGRQVSAYFGLVPRQYQSGETDRNGRITKRGNPLARTILVECAWASLRYNPWAKGVYERICGKQKTRKKKAASALARKIAVIAWAMLRDEKDWDPKQMIQVTESFGRMPAGLKDSLQNMKPKENADQRKSRLRKEARAAREAAERGASKTTGQNPVKRTSTGSAKPTASKRKATNSPATRSPRSTSQSNEKLRTKTSKPRRARKPVISA

SEQ ID NO: 146742 - protein, 387 aa, unidentified
MEKLIKYSIGVDGAKDKFDVCLMSVDIKLSSKVKASKKFSNNLSGFKEFLSWAKKHCKEEVPVQILMEATGVYHEKLAIWLTEQKMEVFVVLPNKARKYMQALGLKTKNDTVDAKGLALMCIQHKFEVWKPICKYNYELRLLTRHYQSTQEMKTAFSNQLHALDHSGYTSKEVSKKLKKTIEFFEKQVKAIKKDIVEHIGRNEEVKRQVGHICLMKGVDVLTVATIVAETNGFELFNNQSQLVSYAGYDVVENQSGNHVGKTRISKKGNSRIRRILHMAALNVVRYKETSFQRLHERVFERTKIKMKGYVAVQKKLLLVMYTLWKNDQPYSRDYEGKMISGNDEQKLLFPFFSEGESKKVVPQQSSTTLDKLRYNESQEVLFPLIQN

SEQ ID NO: 146743 - protein, 370 aa, unidentified
MGKSVLYVGLDVHKMSIDVAIAEAGPGAEVRFYGQIGGDLDSLDRVIRKLQATGAQLQFAYEAGPCGYVVYRHLTAQGWSCLVAAPSLIPRRPGDRIKCDRRDALSLARLFRAGELTSVKVPDADDEAMRDLTRAREDAVSVERRAKQRTGALLLRHGRRYPGKTTWGRGHWRWLLQQVMDHPAQQIVLQEYLDAVREASARVQRLTGQIQELLPQWRRAPFVAAYQALRGVSLIVAATMVAELGDLSRFKNPKELMAYLGLVPSEHSSGASVRRGRITKTGNGHARRVLVEAAWAYRLRARVTRPLLQRQEGLPENIRQISWQAQVRLCARYRRFLARGKHKNTIVTAIARELAAYIWAIGQAVEPLTA

SEQ ID NO: 146744 - protein, 364 aa, unidentified
MIAYERSTLVNYEKYIGLDVHQATISVAVMDSTGKLIMESILETKASTILEFLGGLRGTLSVTFEEGTWAAWLYDLLKPHVAHVLACNPRKNAALNQGNRNDKIDARELANRLRLNDLKSVYHGENGIRMLRELARSYLTIVKDLTRVMNRLKALYRSWAIPCAGRDVYYTRHRSQWLAKIREAGPRRRAEQLYQQLDMLQHLRQQARRELLRESRKHSIIAKLRQIPALGPIRCALAVALIQTPHRFRSKRQLWKYCGLALETRISGEYVYVQDERRRSKKQLSIRGLNKDHNHDLKGLFKGAATRASVMPGPFQEFYQRSLAKGIKPTMVCLTLARKIAAITLTLWKKGESFDVQKLKSQAA

SEQ ID NO: 146745 - protein, 347 aa, unidentified
MKLHVVGIDLGKAVFHLVGLDSTGKVVIRKRCSRAQLLVFTSNLQVQLIGMEACSGAHFLGRALREQGHEVRLMPAQYVKPYVQTNKSDYLDAEAIAEAVQRPRMRFVPIKTEEQLDLQALHRVRERWVMRRTAVVNQIRSLLLERGLTLPKGRSHLDEQLPRILEDAELNLSDSFRVLLAQLKLELEQLAVRIEEMDRVIQKTARENEACQRLTEIPGVGPVTATALIAAVGNGSAFGKGRKLSAWMGIVPGEHSTGGKQKLLGISKRGNKYLRRLFVQGARSVLQQRHRQAPGLSEWLAQLLARMTKMWSSSRWLTSWCACPGRSCARTNAIAHPFLRWQLKIPV

SEQ ID NO: 146746 - protein, 427 aa, unidentified
MIKSVGIDLGGIGEHKVRCLDERAQMCDGFSFDTTRAGLAKLEGRVFSNGSNPVIIFEPTGLAWLLVAVYIKARHPDSQLVRVQAQKVVALRKYLNRSSKSDKIDSLTLAKMPFIDPEKLEEIYFPPAKIYAIQRLARQRKRLESEIAGRKKRIGSIVDGHFPGIRSTFSDSWSAHARAFLRSRLNPLAVVRSGEKALCAFLTKARRHCKIEASVESHGVYLACREVATLYKASSSVGTIDDDFFSALQDEISRELRLMEIEEAESAAIAKRLEKLYLELHPSDNLRTIPGVGDHTAPIFLATVGDPARFHSQSSFANYCGIVPGANQSSGSEAKGLRMTKAGPAIMRWALFQAGHIGRSHDPQLACVYYREMVHNGKTHMQAMGAVMSHLSARVLAVIREDKPYELRDIDGRWWQRSKIEPNTVLK

SEQ ID NO: 146747 - protein, 343 aa, unidentified
MKISRVGVDLAKNVFQLHGVDRHGETVLKRRLSRGKWISTLIKSAEPGCEIGMEACGGAHHWARLLMAKGFTVKVIPPQFVTPYVKSNKNDAKDAEAICEAMSRPNMRFVTAKTVEQQDIQATHRVRSELMCHRTAKANQIRGLVTEYGLVAPLQMASLRAAIPRWLEDAENGLTSRFRALLHGLWDDLLTLDHRIETLNGEIESIAKSDPLAQRLQQLRGVGPLVATALIATVGSGEQFDRGRQMSASLGLTPRQHSSGGKDRLLGISKRGDAYLRSILIHGARAVVAQAKHKEDRLSRWVTELAERSHPNVAAVALANKTVRMAWAMMKYDADYDPEFAAS

SEQ ID NO: 146748 - protein, 412 aa, unidentified
MQDILTCAMGLDIHRDVIVACLAKGELGTDPEIEIRSFSTLIPEMRKLRDWVLEAECRYVAMESTGIYWQPIYEMLEPCFDGQINILVVNARHMKNVPGRKTDMRDAQWIATLLRAGLLKGSFIPDKTFRELRHLTQYRKSIVRDITAQKNRIDKFLQSSGFRFTAFLSDAFGASGQNIIRHLMEYGNISREALDRCLKTQTRKRIDEILIALNGSLSEHQRGFLRMIFGHLEALEQHRHTVEDAITKEITKHEEALSLLCSIPGIDVTAAAAIIAEIGTDMSAFPDSQHICSWAGLSPGNNESAGKRKSAHINKGNPYLKSMLCEVGWVISGKRSLYLSGWYWRIKQRKGAKRATIALARKLLALIYTMLKTGSPYNEDCFEIRRKQSERKRASRMVNELQKLGYFVVAPG

SEQ ID NO: 146749 - protein, 343 aa, unidentified
MEVYVGLDVSLKETAICVVDGSGKIVSEGKVLSEPLALAEFLRAKAGNAKRIGLETGPTTTWLWHELRALGLPVLCIDARHAKAALSLQINKSDRNDAVGLARIMQCGWYKEVQVKSLSCHEVRAVLISRAQLVKTKVDLENQIRGLLKNHGLVIGKAGGNIFRRRAEELVGKYRLLREAVRSLLAVHEVVRREIAGLTRKLLALARTNDQSRRLMTVPGIGAINALAFCAAIDEPSRFRRSRSVGAYFGLTPRRYASGEVDRTGRISKCGDVMVRTLLFEAAGVLLTRVQQWCKLKAWGHKLWKRIGFKKAKIAVARKLAVILHRMWRDGTDFVWSTKEAVA

SEQ ID NO: 146750 - protein, 386 aa, unidentified
MPQLNDLSRSLVILEQDATLIAVIEMGQSNWLVAGIVPGVERSPLKKLAVDESALLKLLNRWREEAEKAGHRIERIAIAFEAGRDGFWLARWLRARGIEAHVIHASSVAVSREHRRAKTDRLDTELLKRAFLGWLRGERDHCKLVAIPTLAQEDAKRPNRERESLVGEQSRIVNRMKAALARLGIRGFNPQLKKAVERLDGLRTPEGEPIPPKTLAELKHDMERRRLVRSQIRDIEGTRLERLKQAPGDGPHVMVRLLARVIGVGVETADMLVQEVLSRNLRDRRAVARYGGLTGSPDESGKKRREKGLARSGNARVRRGMIQLAWRFLMFQKDSALAHWFYARTKNAPQTRKTMIVALARKLLIALWRLAREGAIPEGIVLRPAL

SEQ ID NO: 146751 - protein, 349 aa, unidentified
MTNIVKQTAGIDVAQNELVVSLGRMNHDTGIDIFAFKTFANNTKGFNDLVTWVNKMAIKEVKVRYVMEATGVYHEKLAYYLSDQEQEVSIVLPNKISNYFRTLDIKTITDKTASQAICRFGLERKLEVWQKPKKIFKDLKQLTRERDQMIADRTVLKNQLHAEKAEAFPNESSIKRVTKRIQLIDKQELEIKAEIAAIVKTDTELVKKINTITTIPGVGKLTAVIVLAETNGFELIKSKKQLVSYSGLDVRLKDSGTSVKSKPKISKKGNRHLRKAMYMPALSAMRFNDHHKAVFVRLVSKHGIKMKAAVAVQRKILELIYTIYKTDKAFDKDYVKTNIKQHVEEVLNS

SEQ ID NO: 146752 - protein, 418 aa, unidentified
MKVIFPICCGVDVHKTFLVATIITTQGFTLHYAKKRFSTFNNSIRQFKQWLIDNNCYDVCMESTGKYWIPVYNILEDTIRITIANPKWVKAVKGNKDDVKDSKWIGELFRLGIVPGSYIPDKPIRILREYTRYRSKLVSCKSSEKNRLQNALTVCNVALDAVVSDMFGKSASSITDYLISSDSFDPEHCVSLLQRSLKKKADSVVESIEGYQMTKEQKERMVMVRSHLEFVQQSISKLDEKLDKMVVPYESAVALFCTNPGIDRESAITILSEIGTDMSQFANSKRLCCWAGLTPGNNESAGKKKSVKISRAGVYLKPALVQVAHAAVKSNKSPYYKNKYERICKRRGKKRAIIAIARMILTALYHMLVTGEEWNPSDLYKIDMPQEMLEKQKQKAIKQAAKLLISQGIIKASDISLA

SEQ ID NO: 146753 - protein, 375 aa, unidentified
MEEHSEAFVGLDTSKLRNAVAIADGGRDGEVRFFGEIENTATATAKLVRKLTARYGRLTFCYEAGPTGYGLYRQITSLGHGCIVAAPSLIPRKPGDRVKTNRRDAMSLARLLRADQLTAVWVPDRGHEAMRDLTRARESAMLDLRAKRQQVSAFLLRLGRHYPQTKKTWTKAHMSWLSSQKFEYREQRLVFEETMLAVRQARERLLRLEEAVRDAVPDWSLGATVTALMAMRGIDVIAAATLLAEIGELSRFANPHQLMAYLGLVPSEDSTGDTVKRGPITKAGNRRARRILVECSWSYQHPPRVGPNKQHKVDAAPQAVREIAWKAQCRLHKRYRALIRKGKPKTVAVTAVAREFAGFIWAVGREIPAAGAAVG

SEQ ID NO: 146754 - protein, 351 aa, unidentified
MPRTTTVHAVTAIGMDMGKNTLHMIGLDARGAIVLREKVSRGRIALRFANMPPCLIGIEAGLATHYVARELAALGHDVKQVPPAYAKPFRQVHKNDFRDAHAVAEAVQRPTTRFVPAKTDEQLDLQALHRVRSRLVSDRTAVINQIRGFLLERGIIVRQGLRFLRQALPDILAKRTDVLSPRMIRIVADLASDWRQLDERIEAVTDEIETLAKSDDSCRRVMTVPGIGPIISSAMIAAIGSGGAFARGRDFSAWLGLVPKQMSTGDRTILGRISKRGNGYLRMLFMQGARVILMRPASWPKHGFGIWLARAAQRLHPNVLAAALANKLARIAWTVLAQERSYEVRVTMTAA

SEQ ID NO: 146755 - protein, 438 aa, unidentified
MSNKVFFNLDDLFISVGIDVGADFSWMSIALPNQQFVGKPYKILHNSIDSLTTAVSKIKEAEELYSLESRIFLESTGIYHYPLFCYLRDKGFNCSVINPIITKNSTNINIRKVHNDRFDSKKAALVGLKPDLKVSLMPSDLALNCRNLCREYYDLMDNRSAYVNKLQGELRIAFPQYLGIFSKVTINTSLTLLETYTSPSAFLKADKQEIIDIIKSTARFGLTYAQNKYNAIIQAATDANQFGYIIDSNIKRIRLYISFIRKYDEEINSILESLHELVDANEDSDFVKQIHLIETFKGAGFLSAVSIMGEIGDFSAFSKPKQLFAYFGLDPAVKQSGKFEGTKVQMSKRGSAIARRVIHTLTLQSISISRNREAKNPVLREYYLKKCDSKPKLVAMGAVSHKVCNMIFAILRDNKPFKIIAPQEHIKQYNAAKCDIAA

SEQ ID NO: 146756 - protein, 338 aa, unidentified
MLHIGLDLHKRFSTVTVMGEDGKVLLEDTLYHDDRARLREFFSAYAGKAVVTVEATRNWYWLYELLEELGVTVKLANARKVRLIAEARLKNDKVDPKALAQLERTGFLPEAYIPPRAIRDNREYLRYRLTLVRLRTGLKNKVHALLDKLGVRHQFADLFCPAGRRFLGQLKLRPAYQEELSNYLALMDDIERRIVAVTKEIKRQLKPDPRAKLLISIPAIGHLTAYLLLNEIGDIKRFPSPGKLCAYGGIVPIVKQSADHRWQGHITREGNRYIRWALTESACLAPSKDYALGSFYRRVAFRRGPLKARVAVARKLLVAVWYVLTYGEPYKVTQFPTV

SEQ ID NO: 146757 - protein, 339 aa, unidentified
MENFVGVDLHKKVSQLATLREPKPASQVRFPNHTVTVEKVLKKLPQGSKIALEATGSWWWFVDLAQRTGHEVVMSHPKQTKAIASARLKSDKVDALMLAKLLKADLLPTVWIPPAAQRYVRELLTHRARLVRQRTSVINELHALYAKRNIDAGMIFHRVRPPAFRAEDLSGYGPRIVEEDVALLGFLNRQVQGLDKELKAIAEKDPESKRLMTIPGVGPLNAVAGSCWIGTIERFSNSKKLSSYFGLAPRVRQSGERERHGHITKEGNRMVRSLLIQAALWHIRRGPVSSRRHYLGVCKRRGKSIARVAAANKLLGIIFQMMKEKIDYEEFLRRGGNAQ

SEQ ID NO: 146758 - protein, 446 aa, unidentified
MEVVFPYCAGLDVHKKRVTACRLVSDSTGQVPEGVAELQTFGTMTHELLALADWLVEAGVTHVAMESTGEYWKPVYNLLEGLVTIFLVNASHVKNVPGRKTDPADARWLAKLMRYGLLQASFIPPIAQRDLRDLTRYRTKLVQERAREVNRVQGVLERANIKLASVASDVLGVSGRAMLEALITGQADPATMAALAKRRMRSKIPALEQALTGTVRDHHRRLLAMQLRHIDFLDEQIAALNSAIAQCVTTLRQEAPVSPAPLAPTTIDVPTPADPPPPLTFTRAVELLDTIPGVNQRGAEMIIAEIGIDMTRFGTAARLAAWSGVAPGNDESAGKQRSGKTRKGNQVLRAGLTQLAHGAVRTKGTYVSALYRRLAARRGKRRAILAVAHSIMGSVFHMLSRNEPYRELGPNYFDERRRHYTVDRLTSRIEHLGYRVHLEPLPTAAA

SEQ ID NO: 146759 - protein, 326 aa, unidentified
MNQASPASLGIDVAKATFDAALLTNGRLHQRSFAMTAPGFDALHAWMRKQGVEQVHACLEATGEYGAAVALSLYEAGHMVSIVNPARIAAYAKSRLARTKTDKADAALIAHFCRTQQPLPWTPPPAEVRELQARVRRVEMLQEMAQQELNRLHSGLHSPAVRASLEATLAFVRQEIAQMRRLVQAQVEQSADLQHKQRLLCSIPGIGRWTAARVLAESEQVRTSVSARQLAAYAGLTPRERTSGTSVRRQPRLAKTGNSRLRRALYLPAIVAMRHNPAVRAFAERLRARGKRPMVIVGAAMRKLLHLVYGVLKSGKPFDPALAMAA

SEQ ID NO: 146760 - protein, 345 aa, unidentified
MLAEQTDYVIGVDTHRDRHSAAILAASGGLVDETSAGADQAGYATLLRWAAWHAAGRRVWAIEGSGSYGAGLTTFLDQHGERAIEIGRRVRRNSPSRAKSDPLDAIEAAREALSQSRQAVPRATGEREALRVLVNTREGAVLARTAAINQLRALIVAAPEPLRASLRELSFGKLVTRCARLRPGARDATTRASALALRSTARRIATLSVEARQLTREITQLVDSTAPTLLDEPGVGPISAARILIAWSHRGRFHSEAAFAMLAGASPIPASSGQTVRHRLNRGGDRQLNRALHTIALSRRATHRPTRDYIDRRLRNGKTTREINRCLKRYLARHLYRLLERSATT

SEQ ID NO: 146761 - protein, 312 aa, unidentified
MKIICGVDVSKARLDACIEPGAIFASFDNDGAGIAELAAFCRQHAAELVVMEATGGYERRAFLLLWEAGMPCALTNPRSVRRYAEAMGILEKTDRLDAGVIARFAHAKNLQPTPAPTPAQQRLKALVARLRQVTDDLTVQKQRRASLADNAEMLASIGEVTTLLKRQSRTLEGEIASMIDDDPLWAQLAEAWCSVKGVAGRTVARLMADLPEIGTYSNKAIAKLAGLAPLADDSGKRQGKRSIRGGRAAVRSILFLVAAIAAKYDKTLAAFRDRLLAAGKPKMVVRIALAHKLLVRLNAKARDARAQYANAT

SEQ ID NO: 146762 - protein, 391 aa, unidentified
MICVGIDVAKDKHDCYILDSEGTTLADCFTIPNNLDGFKRLLQTIKDCTQKSDKIKVGLEATGHYSCNILGFLLDNDLPVYVMNPLHTNLYRKSLSLRKTKTDRVDAKTIATMLLSDVDLKSYTDTAYHNEELKSLTRYRFDKVQERAKLKQSVSRLVTILFPELEQLVSSIHGTSIYALLSEYPGAKQISEAHLTRLANILVTTSRGHYRKDRATHIRDAARTSIGSVMPAKSLELKHTIKLIQELTSEINEIEDAIRKIMDELKPPILSIPGMGFHSAAMILAEVGDFSNFNSPDKVLAYAGCSPSTYQSGKLTNCYAHMEKRGSRYLRYALYTATKYVCYWNPVFTEYLTKKQAEGKHYNVALSHATKKLVRLIYALQKSGKAYLAIT

SEQ ID NO: 146763 - protein, 416 aa, unidentified
MAQMEALYERVGGLDVHKKSVVACRRRFTASGRVEHEVATFGTTTPQLLALLAWLQAWEVTHVAMESTGVYWKPVWNILEGHVELLLVNARHLKTVPGRKTDVKDSEWIAQLMQYGLLRGSFVPSPEVRQWRDFTRHRTQLTGQRTSVVNRMHKVLEDANVKLSSVISDILGVSGLRMLRAMVAGETDAEVLSQLGDPKLRASQAALQESLQGKLTAHHRFMLEGLLDQVAFLDTQIARVDARLEEQMRPFEAQLRRLDTIDGIDRVGAQSVLAELGPDMAQFPDADHLSSWAGMSPGNDESAGKRRSGKTAKGNKWLRRTLTQAAWAATRHKGGYLSAQYRRLASRRGKNRAIVAVGHTILVAAYYILKDEVEYHDLGADHFDQLRRERTVSHLVSRLQRLGYNVSLETIESDAA

SEQ ID NO: 146764 - protein, 414 aa, unidentified
MDVVYERCAGIDISKADVKVCIRVPGRGKGTRRRGEVRTFPALTSGLLAMRDWLLAEGITVVGMEATGSYWKPVFYLLEHDIECWLLNARHMKAVPGRKTDVKDSEWIAKLVEHGLVRPSFVPPQPIRQLRDLTRYRTDVVRERAREAQRLQNLLEDCGIKLTSVVSDFLGVSGRRMLEALIGGERDPRVLAELAAPNLRTRREVLIEALTGYFTDHHAFLARTMLDRIDEATAMEQRLNARIEEHIRPFQRQVELLATIPGVSAHTAEVILAEIGADISRFPSAGHLASWAGVCPGNYESAGKNPSGRTRPGDPWLKGVLGQAAISACRTKNTYLAARYRRLVGRRGRRRALVALQHSILVSIWHMFTRDIEYTDLGGDYFIERTGKTRATRRLVSQLNRLGYQVNLQPAEAT

SEQ ID NO: 146765 - protein, 408 aa, unidentified
MVVFVGDDWAEDHHDVHLMDEAGTRLAARRFPEGAVGIGGLHALIAEHATDPGQVVVGIETDRGLWAGALSATGYQVFAINPLAAARYRERHQLSGAKSDPGDAKVLADLVRTDRHNHRPVAGDSTGVEAVKILARAHQNLIWSRTRQTNSLRSALREYYPGALVAFEDLHDRDALAVLGRAPHPDQGARLSLSAISAALKRGGRQRNLDTRAGAIQAALRSEQLNAPPAIAAAFAATTLAAVSIIAELNRQITDLEATLAEHFETHPDADIYRSLPGLGVILGARVLGEFGDDPNRYTTAKCRKNYAGTSPLTVASGKKRAVLARHIRNKRLYDAIDQWAFCALNSSPGARTFYDQRRAADDSHHQALRALGNRLVGILHGCLRHHTHYNEHKAWHHRQTDTITQAA

SEQ ID NO: 146766 - protein, 352 aa, unidentified
MGIVVALDVHRNQITYKALDRGTGEVSRGRITPAARVDVRAWLGQFAGRQAEFALEGTTGWRFVVEEIERADHTAHLTDPAETAARRGPKRRAKTDNADCDLQLRLLLAGELPESWIPPAHILELRTLVRLRKTLIDQRTAWQQRIHAQLFHQGVPAGLRLRTETGRQALAKAELSPAGRELVALGLRMLDAFDLELAPLDRQLRAFARRQPGCRALVQRLYGVGPVSATAILAELGDARRFSSSDDAVRHAGLDITVYQSDQKRAPGHLSHEGPAVLRWALFEAAQSAARASSPDRGYYLQVAERIDHNRACLSVARKLCRRAYHILRELGEAALAPIEQPAEEEASAAAA

SEQ ID NO: 146767 - protein, 391 aa, unidentified
MFYIGIDIAKHNHEVSIIDDNGKALDKSFSISNSQKGVDKFNTYLDSFNITSENCVIGMESTGHYWINLFSFLVNLKFNVFVINPIQSDAFRKMYIRKTKNDSKDSYIIAQIMRFGEYSSSNISDENIFALRQLSRYRTSLVDECSSWKRKIISILDQVFPEYSDLFSDTFGVTSKELLSKYPLPENMLELSTEELTNLLNKASKGRLGNEKAQEIKESAKNSFGVSFAKQTFSFQIKQIINQISFIENQLKELDNEISNMLKVLNSEITTITGIGDVLGACILSEIGDISRFEKASQLVAFAGLDVAVKQSGEFTGTEMKITKRGSPYLRRAIWLAATVASFKDPALSIYYKNLIARGKKHLTAIGAVSRKMCNIIFSVLKNKKAYTPNI

SEQ ID NO: 146768 - protein, 410 aa, unidentified
MDIIYDCCAGLDLHLKSIQAHVRRRAEGGAVTAASRKFATTAAAILSLGDWLAEYGIQKVAMEATDVYWKPVWNLLEERFSLMLVNAQHFHNVPGRKTDAGDAEWLAQLLQGGLRRDGFVPPRPQRELRDLTRQRICLVDDQSRVVNRIQKTLEDANIKLSSVASDVMGASGRDMLRAIIGGQEDSTVLAELARRRMRAKIPELREALRGGVRDHHRFLLKQLMAQVEMLESQIALFESRIAQLMDEDQGTIDRLTDIPGVDQRVARIVVAEIGTDMTRFPTADHLCSWAGVCPGNHESAGKRKSGRTPGGNRWLCRTLVQAAWAGSHTKNSYFQAQHRRIARRRGFKRATMAVARSILVVTYHMLKTGTVFKEAGAAFFDGIKPERAVKDLLKRLETLGCDATITTSAA

SEQ ID NO: 146769 - protein, 395 aa, unidentified
MRKVRGLDVHKDTIFMCILDGNGQVRSEEFSTLTPDIERLRDLLVKESVDEVAMESTGIYWIPVWRILEGHLNLKLVNPYFIKQLPGRKTDVKDAQWIATVLQKDLIKGSYIPEANIQELRLYERRQVRLSESITRIEQEIDRHLHRCNIQITNYASKVGSKSVMNVVKALIDSETRPEELLKLIHGRIINKHKNKIIESLIGIVSFADRFVLRQCYDEWEMLNKQQLDCLFAMQGLCEQYYKEEMELLCTIPGIQKHSASTLIAELGTDMNAFSTASKLVGWSGLCPRNDESAKKIKSRKITNGNKYLRRIIIQCGWGASRNKEGWLPQKFKSLCKRMSSKKALVAIARKLLVIIWNILLKKEPYRDYVPQVDEKQRQRQIQKLEKKLLELKTA

SEQ ID NO: 146770 - protein, 409 aa, unidentified
MLFAGDDWAEDHHDVELMDSAGGVLARARLGEGGAGMAGLHAMIGEHLGPDGEAEEVRIGIETDRGLWVVALAAAGYTVYGINPLQVARYRERHSVSGAKSDTADAHTIADMVRTDSHQLRPVAGDSAGAQAVKVVARAHKTLIWERTRHVQRLRHQLRDYFPAALAAFEDLAAADTLELLARAPDPASAARLTNAQISAALKRARRRNIAEKAAAIRAALRTPQLAQPPAVTAACAAAVRALAAVITTLNEQVTIMEGQVQAHFSPHPDAEIITSQPGLGLILGARVLAEFGDDPARYASAKARKNYAATSPVTRQSGKRKTVMARYVHNDRLLDALGGQAFAALNASPGARAYYDHQRARGVSHRAALRQLASRLVGILHGCLKTRTLYDEATAWPQLTSQEIKTAA

SEQ ID NO: 146771 - protein, 411 aa, unidentified
MNNTLFVGIDISKRSNVATFMNCEGKVVGRLAFSNNGSGADRLVAKILSYYEKEDFEAIRIGMENTSVYSKKLVWFLYEHEALNEHKLSIIPLNAIMVANYKKSFLDMDKDDITDSFAIADFIRIRPGLLPFKLDDRQEALKIMTRSRYNYVQALSRMKSQFLTRLFLSFSEMEAGKPFYSIFSKTSLSLLEEEFTLDELAEKPIPELVEFLQEKGGGKFQNPEEIAKVLKKAASSSYRVPAMVRESLNRTMASDMEIMRILENEIHNCDKNIEKLMKSVPAILVSIPGIGPVLAAGIMSEIGDISRFQKQESLGKMAGFKWKRNQSGKKESEDKAAVLSGNKKLRYYLVEAANRVRIHDPVFEAYYRKKYAESKTHAHKRALILTARKLVRVIFYLLKENKLYKPDVGIS

SEQ ID NO: 146772 - protein, 339 aa, unidentified
MMSSFVGVDLHRNNFTYCIRENGEEKKIGKCEISELKCFASMLGKNTAMAVEATGNTFMFCRFLKAHVGRLVVVNPSQFKVISMSTKKTDRHDAKVLAEFLEKDMLPEVRMKDDLQAKISSLTQTREKLVQLRTVLKNKVNNLLAANFIVLKREELSTETGLRKALSFHFDPITDTEMFVVVEQIRSLNQSIEKLDKAIEDHGSKMDGFKNLKSIKGIGSKGAATLLSTIGNIHDFRSSKQLAAYIGIVPRVSNSNDTVCHGRITKNGSKIARTTLVQCALVAKRYSPYLHAFHESVKSRRGGAKANIALARKFLDIVYRTLKNNWMFEEFTQFKLVKN

SEQ ID NO: 146773 - protein, 352 aa, unidentified
MSMLADLVEVVIGVDTHKDTHTAAVLDTRTGGVLARATVSTDPDGYGELVALAEHHSGLRAWALEGSGGYGAGLARHLADAGELVVELDRPQRPNRRGGAKSDAIDAERAARDALARTRLAQPKTGPERAALQARLTARRAAVEASATAQRQLHALVITSPEVVRARFRGQSTRAMLTTATRLRPTTNADVEVFTCLTVLRDLARRVRFLEAEAAEHEKAIRAIVRSWRPDLLQLTGVGPIVAATVLTAWSHPGRCRNDAAFAMLAGAAPIPASSGKTIRYRLNRSGDRQLNRALHTIVLTRLQRDEPTRAYADRRRAQGKTDREIKRCLKRYVARDLYRRLETPPQPLDAS

SEQ ID NO: 146774 - protein, 346 aa, unidentified
MERKLSLQWIKLEEVESIGLDVSMEKIDVCLSNHWQKQYYRIQNNSQAISQFSKELQEWWLNSNVPLVIESTGMFHLEATLKLSEDGWNVKEINPIITNQQIRCTIRWTKTDKTDSAILAELWQTKENELPTFSRDISTMSLRKKMSVLNFIEKTIINMQKSRNNYVKTMGILKVDCTWLGEFDQAIEHLKNLKQEIEKSMVKETLDEEWKRKVEIFDSIYGISTLIAIICYAVFGNITFKNKKQMLAYIWLDPKLKQSWKSFSWYRLSKRWDSYIRKKLRQAAHCVTLKNCYFKSIFEREIQKWKHYTEAILTVAKKMVYIMFSLLKKNELYDENYVLNFENVNM

SEQ ID NO: 146775 - protein, 339 aa, unidentified
MSSMHYVGMDVHKKTISYCVKTPGGRVREEGTVASTRAALDAWVAERKQPWVGAMEATLFTGWIYDHLEPHARELKVAHPAMLKCIAASKRKSDRIDAGKIADLLRCDLLPECYMMPGQARELRRVLRFRNLLLSQAVRMHNKSAGLLMEVGAPYSKRKLKGKRYFQALTESVEDVPKSVVEMLRMSRAAYDLFQQGQKTLVRALRTHKALRERVELLMTIPGVGEITALTWALEIGDPHRFASRRRAVSYCGLCGAQVESAGKTKRTPLSKQRNKHLQTKLIEAAKLAPHWNARLAVIHERELERGNRNRATLEVARRLVGLMLAIDKSGEPYDAERS

SEQ ID NO: 146776 - protein, 351 aa, unidentified
MNYVGVDIHKRYSVLVAVDERGRELGRSRINGNTAFGFAQFFGGLEGKSKVVLEACWNWGRIYDLLSEIEQVEEVVLAHPLKTRLIADAQIKTDGLDAHALATLLRGDLIARAHVPAKPTRQRKEVLRQRLYWARLRTRIRNRIHALIDRQRELKMPQCSDLFGRKGLTALNKLVLSEPDATLLREELGLLELIQGQIKAQEARIVEFNSNDEMTLRLQSIPGMGKILAAVAAAEIDSIERFSSAAKLCAYAGLVPRTHASGGKVYQGHLLKSRNKWLQWAFIEAAWVAVGCSAYFGGLYRQHRARGKNANIAITIIARRMCQICWTLLKERRDFIETFPGRSAVRLTAAA

SEQ ID NO: 146777 - protein, 375 aa, unidentified
MTKLRFVGLDVHAETIAVAVAEPGGEVRCLGTIPNRLESIRKMIGKLGPVKDLRTCYEAGPTGYVLYWQLVQLGVECQVVAPTLVPVKSGDRVKTDRRDAEKLARCHRAGDLTPVWVPDEAHEALRDLVRAREAGKKDQLRARHRLGKFLLRHGRRQPDGMKAWTKMYLEWVKSHVHFDQPAQEATLQDYFHEVEHAAARIERLEKSLDEAIGKAPEQIRAVIEALQALRGVARLTAATIVSEIGSFSRFEPRGLMGYSGLVASEHSSGNKVKRGSLTKTGNSHLRRVIVEAAWAYQRRPWIGGYLLRRQRDLKLSDEVKEVAWKAQHRLHKRYSKLTGAGKNKNQTVAAVGRELLGFIWDIAVRTERKYQPQAA

SEQ ID NO: 146778 - protein, 355 aa, unidentified
MNYIGVDCHISSLDFAVVNEKGTVTQRAKVNTGIKEFMEFVKSIPKLRKIFIEEGELAGWLLETSLKFREKLVITDPKTNKWIGKAGQKNDTIDAEKLAQLARGKYVKEVYHPVNDRRKFKNLVFAYHDTVKNQIRIKNKIKAKFRSAGIKCSGKTVYLENHRDKWREKLSRNSMTRLILEELWVQMDQLHNSKEKLKKIIRIQSKRYSEIKKFMKIPGIGLIHGATISAIIETPHRFANKKKLWMYAGIGLMERSSGGTIYSRKLTKEYNRPLKNAIKQSTEVAISAKDNQFRRQFLKLTMEKGIASHRAKLTVARSLLAALYGMWKKGEEYDSEIDKKRENKKFVRPILPRLV

SEQ ID NO: 146779 - protein, 412 aa, unidentified
MDILYRCCAGLDVHKKTVVACVRRLDATGQARQEIRTFGTMTGDLLALSDWLAEQGVEQVALESTGVYWKPVFNILEGRFAVMLVNARHIKQAPGRKTDVKDCAWIAQLLQHGLLRAGFVPPPPIRELRDLTRQRAQLVAEKATAANRVQKVLEDANIKLASVATDVMGVSGRDMLEAIIAGEGDAEKLADKARKRLRNKIPALQTALRGRVTEHHRFQLRLLLDHVTHLEELIGRLGGRIEEVMVPFAEAVGRLTTIPGVEQRAAEAVIAEIGTDMNQFPTAEHLASWAGMCPGNNESAGKRKSGKTTKGSRWLRQMLTQAAWAASHTKGTYLAAQFRRLATRRGKKRALVALGHTLLVIMYHLLKRRTTYQELGGDFLERLEPDRLTRQLVQRLEKRGHDVTLRPKEDAA

SEQ ID NO: 146780 - protein, 317 aa, unidentified
MMDASYVGIDVSKQRLDVHIAASAEAFAVPRNDAGLAQLAQRLAGLTAPVVVLEATGGFENVVTAHLAAAGIAVVRVNPAQVRAFARALGQRAKTDAIDAALIARFAQATRPAQRALPDEDTRLLADLVARRRQILDMMVAERLRRQHQANPRLRRSIDRLLAALEKEIAEIDTTLDDTIGGHPVWQAQEALLTSVPGVGPGTARTLLAELPELGRLNRHEVAALAGLAPWTRQSGQKHGRSQIGGGRTSVRSALFLAAMAASRHNKQLRAFRDRLVAAGKPRMVAIIAVARKLLVVLNAVMRTGQPWREDHAAAST

SEQ ID NO: 146781 - protein, 343 aa, unidentified
MKLIRVGVDLAKNVFQVHGVDRNEKAVWRRKLLRENWFKVLLETVEPGCEIGMEACGGAHHWARLLQAHGYKVRLVAPQFVKPYVKSNKNDANDAEAICEAMSRPHMRFVSVKTVEQQDIQAVHRIRAELTKQRTAKANQIRGLVAEYGLVAPKELMHLRRALPCWLEDAENGLSARFRRLLNGLWADLRTLDERVAELDREIAVIAQNDPAAKRLQQLRGVGPIIATALVAAVGNGEQFANGRQMSAAFGLTPRQHSSGGKERLLGISKRGDAYLRVLLIHGARSVIHHSKDKDDRLSQWVTRLAARRHTNVAAVAMANKTTRMAWAMLRNRTDYQPAMVTS

SEQ ID NO: 146782 - protein, 365 aa, unidentified
MITEYYTTIGMDVSDRKIQVCVMTKSGVNPKIVTETTIPTTKEGVQKFLSTQDKNTPVVFETGMHCRWMHEIGEGMGFKVYVANPCRLKMITESKTKNDVNDARMLARIALSDPGLLHPVKLRDAEHQKMLNLHEMRNLLIKQRTGMIVQMRFIAKSMGFRMPKTSTRCFHKLDTTLWPKEFRDIAWPMLKNLEQLDITIKTYEKKIRELAETPTFKAQVDRLMEIHYVGLYAATGFIAVTGGDMDRFERPRDIGPWLGLSPKQDQSGDIDKQCHITKAGSPLMRRLLVECAQMIVRDGAIETDLKIKGMRICVRGAKITKRKAITAVARSLAALMVAMLKKMDKPYRPLSEVNEKAFSDMQFSA

SEQ ID NO: 146783 - protein, 342 aa, unidentified
MNATRVGLDLAKSVFQVHGVDIAGQAVVRRRLARSQLLGFFARLPPCIIGMEACSSAHHWARELIRLGHEVRLIPPQYVKPYVKRNKTDAADAEAICEAVGRPNMRFVPIKTEAQQAVLALHRVRSLLVRQRTATINAIRGLLGEFGLVAGKGAARLDELRRKLSTTASEQIPPATRLAIEELFTHVDDLRARVEALEAEIVAGHQANEASRRLAAIPGVGPLTASALVAAVGDGRQFRSSRHFAAWLRLTPRMASSGDKQRIGQISKGGDRYLRTLLIHGARAVVGAVNRPNLRPRSWLTPLLARRPIPVAATALAHKTARIVWAMLVRGETYRVRVTAMA

SEQ ID NO: 146784 - protein, 340 aa, unidentified
MRQLYAGCDLHGNSNFLGIIDEQGKRIFKKALPNELPLIRHTLQPFHAELGGIVVESTYNWYWLVDGLMEEGYRVHLANPSAIQQYGGLKHADDKHDAFWLAEMLRLGILPEGYIYPKEERPVRDLLRKRGHLVRLRTSLVISLENILSRNLGKKVSAHDVEGLREDRVTPLLERNEDLALAGRVSKDAIDHLTRQIHKIEGAVQKRMGVKEAYRYLLTLPGVGKILALTIMLETGPISRFETVGDYVSYCRKVPSQWISNGKWKGSGNRKNGNKYLSWAYAEASEFARRLYPEPRSYYHRKLQKTNEAVAHSALSNKLARAAYYVMRDQVPFRPEKLFG

SEQ ID NO: 146785 - protein, 353 aa, unidentified
MIVIGVDSHKQTHTAVAVDAVGRRLAERTVRANSDGHLQLVAWATGLRDGSTDTLEPAFAVEDCRHLTRRLEGDLLAAGLTVTRVPTRLMADARRGGRSPGKSDPIDAEAVAIAALRHPGLPTARLDGPAREVKLLCAHRADLVKQRTRVSARLRWYLHELDPDLQVPARGLRHHRHVQQVYSALETTPGVVARLARAQLDRLIELNAAITALDKELKVLVTAMAPALLKMPGCGVLSAAVIIGETAGVDRFRDKDAFARFTGTAPIPVWSGSSAGKACCLSRRRPKSATTPPSSRVRPREPRALLWTRTRPRREPSHPGLPPLGIPHVRPSERPVERFGRRAAAGSARAGHG

SEQ ID NO: 146786 - protein, 400 aa, unidentified
MKKHNNSGKKSEPTSKRAKSRGPMQRDTKEVLAELMGKLKEKLDPKKVAATSAGEEHPRGELRPNLDRLTVGVDLGDQWSHYCILGLEGETLAEGQLRTTQQDIAEFFQTWNAARVVFEVGTHSAWVQEVICGCGHEVLVANPRLMEGSKRRKRKNDRIDANKLARLGRIDPQSLHPMQHRSREVRQDLVMLRARDALVAARTELINATRGLVKSMGTRLPKCSSPSFAQKVEEAVPGEIREALVPLVRMTAALSDCIQGYDEKIEKLAGEKYGHTALLRQVKGVGPITSLAYVLTLENPERFAKSRDVGPYLGLVPKQEDSGESQPQLGISKAGDTMVRRLLVGSAHYIGAIRTGHRFTTIRAGVMRTRWEECEEASGGSGGPEAGSSTAPALGEWRGV

SEQ ID NO: 146787 - protein, 406 aa, unidentified
MPCGLQAEIGPIRTHDVLVIDETSRQVSSCRVTHTVEGLRQLQAFLLSICGPARKEEMACIIETTHGLLIAARLPAGFPVYPVNPKTVDRHRRASGAKTDQIDAYLLAKHGRAEWADLRRLEPDSSIVAELKALTRDQESLIQSQTRLVNQLTACLKAYYPVALTLFSKLHQRSTWLFLQTYPPPEVAMAASAQQITLVLKKAKHPQAEQVAAKIYHKLHQPHLRADAITTRTKARLMPVGIKQLLPLLEEIATYDEEIERLFLMHEDNEVFSSLPRAGKRLAPRLLAEIGDDRTRYAKTASLQALAGTSPGPYESGNYSKPHRRYACSKPLRNALQQFARPRTQTEAWAQDYYRRKRQEGKSHSEAVRALANLWVRIIFAMWNKKEKYQTRTFEEAQRLHAKRTA

SEQ ID NO: 146788 - protein, 414 aa, unidentified
MAVIRWVGRAIGLDVHREFCEVAICEDGEVRSAGRVPATAEGIQTLAESLVSSDRVALEVTGSCWEVARILERRVDRVVVVSPDDTGITSARAKTDRLDARALASLLWKGELEAVWVPDQRCRVLRRRLARREQLVHARSRAKNEVHAVLVRRLQPRPPCSDLFGVKGRAWLAGLELPAEERESVDAAMRHVEFLDQEIAAVERLIAKQALSWPEIRRLMTVPGVNLVCAASFIAAVGDPHRFLTSRKLVAYLGLDPRVRQSGEGPARSGRISKRGSPMARWALVEAAWTAVLQPGPLHGFYERTRARRGHGKAIVATARKLAVLFWCMLTRGEDYAHQQPSLTRKKLRRLEITAGAPKYTRRAAGIWSTNDLMRTAELELARQAEASYKRMVQDQQAGAPATKAGASVTLERA

SEQ ID NO: 146789 - protein, 342 aa, unidentified
MKEFIRIGVDLGKRYIQIHALESKDGRAVKRKLPRSKFLEFFADVAPCLIGMEACGSAHYWARQLRAMGHDVRLMPPAYVKAYVKRGKNDAVDAAACCEGVSRPDMRFVPVKSEEQQATLTLHRTRELLVRQRTMCVNALRGHLTEFGLVAAKGIGRAGELIDMAGNDAELPEIAKSVVKIFAEQLAAIQALIAALEKQIAGVHAQSPMSQLLAGIPGVGKIIASAIVASVPDPQVFKSARDFAAWLGLVPRQNSTGGKTKLGPITKKGDRYLRKLLVLGATSALRVAGRRKGALRDWLAALLEKKKSARLASVALANKLARIIWAMMTSGETFRKDMFEPA

SEQ ID NO: 146790 - protein, 343 aa, unidentified
MQAITTIGLDIAKSVFQVHGIDAEGKVMLRRRLKRRYVLAFFQKLPPCLIGIEACASSHYWSRELQALGHSVRLMPPAYVKPYVKRQKNDMADAEAICEAVTRANMRFVPIKTPEQQSGLMLHRTRHLFIRQQTSVINAIRAHLAEFGVTAPVGRKGIEELLRVIADPSDKRVPDVVRACLAALGSQLISLKKQILDFDRMIMAWHRSDQTSKRLNCIPGVGPLLATALVASVADPKVFRSGRNFSAWIGLVPKQHSSGGRARLGSISKKGDRYLRSLFVAGAFAVIRYAKLHGTKYRPWVAALLARRPTKVAAIALANKLARMAWAMMATGERYNYPASLRV

SEQ ID NO: 146791 - protein, 394 aa, unidentified
MKLIGIDIGKNKHFFCVMDQQTGEIISQPVSFSNDKEGFDFLVQKIKSYPKDSILIGMEDTGHYHFALLKYLLDLQYTVALINPKTTDFNRKMQGGITKNDKLDTINICDVLDTPERKKQYRITKVNSFDLYEQKQLTRHHHNLKEEENVYKNRLQKCIDIVFPEFNKLFNSKYGIVYMNILKMFGSAENIANTDIRTIRKCFEIEGRGNRISLTPERLKECAISSIGISSSAEVIQIKHLTAQIELIEEQLTEIDKKIEEFSIQNNSPILSIPGISHFSGTSILAELGDISNYSKPSQIIKFAGVAPLHYESSQFNAQHTAITKKGSKYLRKTLYQIILPVIRHNQVFYKYYQLKISQGKGHRCAQGHCVRKLLRIIYHLLKTNQQFDPQLLR

SEQ ID NO: 146792 - protein, 416 aa, unidentified
MNALSPPTVERFLAVDLHKAYVMVGGVNARQEVVLAPRRIELATWPRWSQAHLEKTDALVVESTSNAWDFYDQVAPLVGRAVVANPRLVKLIARARVKTDKVDTLALAKLLAAHLIPEVWVPPLEVREARGLLAHRRRLVKTHTMAANRLQSVLQRHNLPGPTGEPFSATNRAWWAALKLSPIETLRVRQDLATLDHLDQQIAELEVEINRLSTSTPWAEQVPYVMQLSGFSVLLTMTILTAIGDIKRFPHAKPLVGYAGLGASVHSSGETHKTGHITKTGRRELRWALVEAAWSAVRYHPYWKAEFERLARRMPDNQAIVAIARKLLVAIGHVLTEQVADKHADEKMVATKLMRWSWELTDEQRGGLSTRQFVRLQLVRLKLGENLTHFTYGGMPRRIASVEEVLALKPELRARD

SEQ ID NO: 146793 - protein, 341 aa, unidentified
MNAIYYIGLDIHKKTIAYCIKRIDGVLVQQGTVAAERKALSRWLSELPGPWYGAMEATIFTGWVYDYLKPHAVELKVAHPAMLKAITAAKKKNDRADAEKISDLLRVNLLPECHMMPEELRELRRILRYRNMIVRTAVKMKNKMSGLLMEVGAQYNKRQLHGKKYFAALLERVEDVPDSVKGLLKLSRNGFEMFDDIQKKLITALRKNKQIQERVQRLMSIPGIGEITALTWVLETGEPKRFSSSRHAISYCGLCSAQHESAGKEQRGPISKQRNKHLQTTLIEAAKLAPHWNEQLALLHEKELARGNKNRATLAVARKLVEFMLAVDRRKTDFESLKEAA

SEQ ID NO: 146794 - protein, 352 aa, unidentified
MPKGSTATVATIGIDIGKYSFHVVGLDRRGAIVLRQKWSRSQVETRLSNMPPCLIGMEACVGAHHLSRKLQACGHDARLMPAKYVRPYSKGQKNDFRDAEAIAEAVQRPTMKFVVTKTVEQLDLQALHRVRERLVGQRTSISNQIRAFLLERGVAVRKGLRFLRTELPIILSNRSDVLSPRMMRIIEELVADWHRLDERIEALSAEITALAKQDAACARLMTVPGIGPIISSAMVAAIGNGATFSKGRDFGAWLGLVPRQISTGDRTILGKISKQGNRYLRVLFVQAAWVVLVKITDWDRYGLRTWIEAAKKRLHHNVLAIALANKLARIAWAVLNTGHNFECTTATASHPA

SEQ ID NO: 146795 - protein, 418 aa, unidentified
MGQSEAAYWVGVDWGHEEHVVCVLDAQGTPVLRFRVVHCPEGLQELVRRLREYEPVEGIAVESTRSVLIDALLQANFAVYPINPKLSSKWRKAWSVSGAKDDGRDALVLAHALIHQRQWLAPLKPDSESARELALLCEDEARFIGMQTCMVQQLKDTLRQYYPAALGWFKDWTSQSAWDFVLSFPTPESIATASKKKVYGFLRSHRIGLSAKRREMVEARGSATEWPSDRAATTAKSLLAVSLAKQLRALAPTLKEYRRRIEEQFEAHEDKEVFESLPGAARKLAPRLACALGTDRTRFDSARSVQQLSGTAPVTSQSGKRKEVRMRRACQKDFRCALHLFALQTLQRSRWSRAYYDLARARGQSHALALRNLANKWLKILYRMWQNRETYDEQRYIRQLVKKNSPVAYQLGLLKTRG

SEQ ID NO: 146796 - protein, 391 aa, unidentified
MEARVVNNLSPAAAHDGAVRCLLAIELSKKSWVVAVNRPLLDKINLYKLKPCDWKGLLQLIERIRKRVSEELKKPVEVISCYEAGYDGFWLHRLLEAHGVHNHVIDPASLQVDRRARRAKTDGIDVGKLLRSLMAYLRGEPKVWSVVRVPTVIEEDNRRLHRERSRLINERIQHVNRIKGLLAIHGIYDYEPMHPERIQRLERLRTADRHTLPLHLKAEILRELQRLELVLGMIQTIETERDAIASAKSKSQQTTSAKKIKHLVKLKSIGPEFATVLVGEVFYRTFNNRKQIGSYVGLTPSPFQSGSTSHDQGISKAGNTKARTTMIELAWLWLRNQPDSLLSIWFRERVASRKGRIKRIAIVAMARKLLIALWRYLETGVVPEGAVLKSK

SEQ ID NO: 146797 - protein, 342 aa, unidentified
MNEYVGFDVSKEETSFCVMDEAGKIMAQGKAFSDPQSLFEALRKHTLCPTRIVLETGTLSNWLARGLHEYGLPVDVIDARQAHAVMKLQHNKTDANDAILLAEIARTGFCRPVSVNSEDSHKQRILIKARRLLVCQRRDTQNAIRGFLCALGIRFPKGSGKLANRVQTALVERPDLKVMIEPLLASSEALKIQIKHLDEEVLKQAKASKASQLLMTIPGVGPITALAFAATIDDATRFEKSRTVGAYLGLTSRRYQSGEMDYSGRISKFGDDLLRSLLYEAANSLLTVVRKSHPIKDWARRIRKRSSHKKACVALARKLAVIMHRMLITGEAFRWPTQEATA

SEQ ID NO: 146798 - protein, 357 aa, unidentified
MQKQGSKSSFEGQKVYVGLDVHKKTWKAATCTKHTNPGPWTVTIEKPFDENLRGYLDKHFPGATFLCGYEVGFCGFWIHDALEVKGLQTKVMHAADIPTTDKERDQKEDRRDARKIAKALKNEDTEGIYVPSKLAQRDRSVVRERYSIVKSARRIKVQIKSHLALYGIEIPEEMGEKHWSRNFIKWLEQVRDEYQDDTLSLQLERLYAMRTLQLKANRKLRQLGMEDRNRKIYEILLSVVGVGPLTSMLLLTEIVDMKRFSSFRHLCSYSGFVPMTHSSGDKEAHSNITNRRNKHLRTALIESSWVAIQWDTELLSKYEEYRKRMNAQRAIVRIARILLRRIRFVWLNAQPYKKALA

SEQ ID NO: 146799 - protein, 373 aa, unidentified
MNCNTQNAKIASITEKTLIVGIDVGSETHFARAFDWRNYEYTKKPLEFSNTEAGFMMFKAWVEDIAEKQGKTAVIPGMEPTGHYWFALGKFLQDSGMKPVHVNPHHVKKSKELDDNNPNKNDRKDPKTIAALVNEGRFSYPYIPTGIYAEIRSLSNLRFQTQEELTRIKNRIARWFAIYFPEYKDVYGDLMAVSGRMILKEAPLPEDIRILGVNGVNQIWRNAKLRGTGMKRAKILVSAAEHSVGSKEAPEAARIELKNLLNDMDVYVSRMEELLQTIEEKLKTIPYVDKLMEIKGIGLITVSGFIAEVGDIGRFDNPKQLQKLAGYAIVANDSGKHNGESRISYRGRKRLRYVLYEAAISLVGKNAEFKEYT

SEQ ID NO: 146800 - protein, 444 aa, unidentified
MDIINPYAAGVDIGSRSHFVAINQEHSDVREFGVYAQDMKELLKWLLDNDVKTVAMESTGSYWQNLFTELQNSKIEVILTNGKFTKNIKGKKTDVLDCMWIQKLHSLGLLSGSFLPDFQTEHLRTLVRHRSNLIQTAAKASKRMSQNMRLMNLRLDVVVKDIVGLTGLKIIQEICNGETNGQELAKLRHGNCRKSEEEIAKALQSNNRQDYLFVLKQELKKYQGTQQLISECDIEIKNLLNKFINQDDVKKSLYIDKKIHKRINKNTPKNLDLNLIAYQYFDGVDLYAIEGFSHGTVLSLMSEIGEKGIRKFQNAQHFASWLRLAPNNKISGGRILSSRTPKGSNRLKIALRQAANAIGNLKDTHLSNFFNRIAYRKGRSVAVSATARKLAIILWKMLYYNQQYNPPTIYEYLDQKRKRKVKELQKQIANLDARMSNLPETLIS

SEQ ID NO: 146801 - protein, 313 aa, unidentified
MHQAPLFIGIDVAKSTLDIATYPPAEGWQTSNDSQGIDALISWLKHRPVELIVLEATGGLEVMVAGMLANAQLPVVVVNPRQTRDFAKAIGRLAKTDRLDALVLAQFAEAVRPEVRAMKSEREQYLSALLSRRRQLIDMLVAEQNRLREGLPKDVLKDIREHINWLKKRIRDTDKDMGKFIKSSPVWRARDELLQSVPGVGPVLSMSLLACLPELGQLNRRKIAHLVGVAPLNQDSGLHRGKRRVWGGRAELRSMLYMAALTGIRHNPMLKSFYQRLCSAGKPRKVALTACMRKLITVLNVMVKNNTHWRYQP

SEQ ID NO: 146802 - protein, 391 aa, unidentified
MIYVGIDVSKDKHDCYIVNSDGVVLADVFSVENNLDGFDLLLQRLKSVAPDLLNVKVGLEATGHYSYNILGFLLDKGLATFVLNPLHTNLFRKSTSLRRTKTDRVDARTIAAMMSSGVVLKSYTAISYHNEELKSLSRYRFDKVRQRAKLKQAISRLVTILFPELEKLVPSLHIASVYALLAELPGAKQVASCQLTHLTNLLSAASKGHYDRSKAVVLRNAARRSIGSTMPAKSLELQHTIRLIRELDAEINEIEAAIKQFMDQIASPILTIPGISYRMGAMILAEIGDFSRFDSPDKILAYAGLSPSTYQSGKLDNAYAHMEKRGSRYLRYALYNAAKYVCHWDASFCAYLAKKRAEGKHYNVALSHAAKKLVRLIFALQRSGQPYCPTA

SEQ ID NO: 146803 - protein, 416 aa, unidentified
MTNQERWYAGVDWASESHHLFLTDGDGRKIGERVFKHGGEGLAEMAAWLMATSGASEPGQVSIAIEIPHGPVVETLIERGFAVHAINPKQMDRFRDRFTLAGAKDDSRDAEVMASALRTDARCFRRLAAADPIVIELREHSRIAEDLGAERTRLTNRMRELLWRYFPAMLELDSDLGAEWLLDLWDIAPTPDKAARTREATIAKLLKRHRIRRFDAAHVLAVLRQPPVQVAPGTREAASAHIETLVARIRLTNQQLRQTHGRLDALTAQLASSEETEPGQAKQHDVEILTSLPGVGRIVLATLLAEAWDALQRRDYAALRSLTGVAPVTKRSGKSCSVVRRQACHDRLANAMYHWARVAVQHDPRSRAKYAALRSRGHSHGRSLRSVADRLLNVACAMLKAGTPFNPSLATSKTAC

SEQ ID NO: 146804 - protein, 350 aa, unidentified
MRIIGCDYHPGFQQIAFVDTETGECGERRLQHREEAERFYRDLAAQGMKVRVGMEASGHARWFERLLAELQFELWIGDAAVIRTKRVRKQKTDRQDAQLILQLMMEDRFPQIWVANWENRDLRQLLWHRHRMVQARTRIMNQLQAVALNEGLRCKKRLWRDAGREQLESFPLAPWASRRRRDLLEVLDRLNPTITELSQAIEQEAEKSPEARRLRTHPGVGSLTALAFVLIIGSAERFQCGKQIASYLGLVPSEDSSGDRRRLGHISKQGNALLRFLLVEAAQVTVRSLPEWRNKYFHLAMRRGRKIAKVAMARKLAIQLFWMMRKGWDYEQVRRFGPHAGQPENRRGVQ

SEQ ID NO: 146805 - protein, 315 aa, unidentified
MSDMPCFVGIDVAKAQLDIALRPSGERWAVPNDTHGVTTLVERMQTLQPTLIVLEATGGLERLVTSALATAGLPVVVVNPRQVRDFARATGQLAKTDALDARALAHFADVIRPTLRPLPDAQTQELRALLGRRQQLIGMRTAEQNRLAGTNARLAKDIEAHIAWLNAGIATLDDDLETMLRASPLWRENDDLLQSAKGIGPVSAHTFLLELPELGTLTRQQIAALVGVAPLNCDSGTLRGKRTIWGGRAHVRTVLYMSTLVATRFNPQIKVFYERLLAAGKVKKVALTACMHKFLTILNAMLKHRTPWQPQEVQS

SEQ ID NO: 146806 - protein, 349 aa, unidentified
MRFIIGCDFHPSYQQLALLDTQTGEVVEKSLTHENLEEVRAFYAGLPGPARVGIEASGQSQWFERLLAELGHELWLGDAAKIRAREPRKQKTDRRDALLLLELLQQGRFPRIWVPTLAERDTRQLLLHRHKWVRLRTQVKNQLQALALNQGVRRKGKLWSVAGRAQLEGLPLPPWTQRRRADLLKLLDDLQPGILDLDRDVAEQARARPEVRRLMTHPGVGPVTALAFVLTLGPASRFPRGKQVASYLGLIPSEHSSGGKQRLGHISKQGNAFLRGLLVEAAQSAVRYEPRLRREYSRLAQRKGRAIAKVAMARKLAVQLYWMLRGEKDYAQQVQVRVQDSPRHPVVVA

SEQ ID NO: 146807 - protein, 425 aa, unidentified
MRITQNLCEIKMNQVLDVSVDVHKDTLNFFFSLEGKEYRDECPNHTRSIEKRLLKYHGIAQEQGIQRLRLICEPTSDYQNKLLRTARRQGHLTCLVNAESVYKFRVVETNDTGKTDTKDPKVIATLGRLNKVIRHRVLSDDYLVLRKLGRIYDELESEITSLRCRIDKLLIELFCDFSFTKDFLYGTSGNVLIDRFGCNPYRIIDTGYEAFASTMRQAVPRIRLESLQRLWQDAGSSVLNELPAGYRDVLEEQFRDLVAAFRNRETRMEQIVEQMKIVLQRIRDDDPRIPPPTAGVISEKNLARLLAETGPIGDFRHWRQLMRYGGLNIRMRQSGKYMGKNRISKKGSPLLRKVLNHIVLPLVRQNCLYGTYYHKKREVDKMPGTKAMTIVARHFLRKFYGWYKSGAAFDEKRFFASEREYLKAA

SEQ ID NO: 146808 - protein, 414 aa, unidentified
MTPHHELTAFAGLDWACDHHDLVIVDRTGQHLESLRFDHTREGWQQALQSLQTHRPAAIAVETTHGVGVQQLLDAGLTVYPVVPKAAAHYRGRKAPSGVKDDQLDAWSLADALRVDGHTWHALAPADPLVSELRLLCTDEIALIEQRTALINQLQAALREYYPAALEAFEDWTVRSAWQFLITFPSPQLLTKAGKRKWRTFLHTHRLWRPETREQRLEIFARADAFCGPPAVTAAKSLLAVSLAKMLLTVETQLDHYRERIEKLFAGHPQSGLFGSLPGTGAKLKPRLLSMILHRTGAGADAAVLQSLAGTAPVTFKSGQIRKCKLRRHCDKELRSTVHLWANLSRKKCLWAQTYYQAHRDKGQSHACALRCLAQRWLKILAAMCRSGKPYDEAVHLKNMTRHGSWNLTLKTAA

SEQ ID NO: 146809 - protein, 359 aa, unidentified
MNYVGIDYHKAYSVVAAMNERGQLLNEARIPGNSPVAFAQFFQSLDGPARAVLEGTRNWGYLYDRLHELAPIQDVQLANAYKLRVIAEAQVKTDKIDARALANLLRGDLIPQLHVPSPKNRCRKNVLRQRVFWVRSRTMIRNRVHTVVERQRGLSVPQLRDLFGKRGTDWLKGLQLSEPDATLLRQDLAVMEKLNEQLKELDRMVAAENRNDRTAALLQSLPGVGDFFAAVLASEIDTIGRFHSPAKLCAYAGLAPTTHASGGKCYQGRLFGQCNRWMRWALIEAGWVSIQCSSYFGELYRFHKARGKKSNQAIVIVARRLCEIAWHLLQENRPYEERPVSLRKIFPGRSESKVIESVG

SEQ ID NO: 146810 - protein, 377 aa, unidentified
MDRCAGLDWAKDAHQVCVLEVDGEPLVQRGFAHDERGLDGMCELLVEELGVKRVAIERPDGVLVERLLEAGLVVLPIHPNQLKAARPRFRASGGKSDSFDAFCLAELARTDHHRFRILAPDSDETKALRALTRVREDLVKTKVSLTNRLQAELDAFWPGAARVFCRLDSPIALAFLERYPSPTDARSLGQRRLQSFLARHSYCGGKSAAELLAKLRSAPRGLAKETEKAARRAAVLSLLAALRPVVEQIGLLESRIADAVRAHPDGELFLSLFRHPDSTLTAAKLLCEIGNRRERYPSAEALAADAGMSPVAKESGRRKVATFRRSCDKRLRDAMTTLADSSRLHNPWAKDIYLFGRAGAAVTTRTPFGCWAGRGCG

SEQ ID NO: 146811 - protein, 318 aa, unidentified
MVCAGIDTGKHKLDVALNGCAKQLQIDNTADGHEALSVWLKRHKVKRLGIEASGGYEQEVVAWLRRDGFVVVVFQPAQVRAYAKFLLQRAKNDKIDAALIAACTAAIKKIHAPPDPRLAPLAERMTLIDQLTDEIAGFKNYREGSRDPQIRQFWKEQIAHFNKLLRAELKELMAAIRQHRDLAERLDLIESVDGIGLKTAVAILVRMPEIGRLTRTQAASLAGLAPFDDDSATHAGIRHIAGGRERLRGSLYKAALAAAFHWNPQLIAFYRRLIAAGRPHKYALVACARKLLIFVNTVVERGTPWVSAASPSADRAAA

SEQ ID NO: 146812 - protein, 339 aa, unidentified
MKITTVGLDLAKNIFHVVCFNERNKEVKKRMLRRKQILEFFTQLAPCQVSMEACAGSHYWGRQLRGLGHDVKLIPPQHVKPYLRGNKNDYNDARAIAEAAARPGMPFVGIKTVEEQDMQAIHRMRSQCMRDRTALSNSIRGLLGEYGIVFPKGVPTLRKKIPEILEDADNGLSVLFRNLLARRYEQLVELEAYIAFYTKELEAISQQDDACLRLQTVPGFGPIVASAYRSVIGDGRSYARGRGVAASVGLVPRQHSSGGKHVLLGISKRGDKYLRKQLIHGARSVVLQAASKDDPLSRWVNRIRKERGWNKAVVALANKMARMGWAILRHGTTYQAPTI

SEQ ID NO: 146813 - protein, 349 aa, unidentified
MNVNHYIGFDVHKKSISYCVKAADGTILEEGKLPAKRATLRAWAILRTEPWHGAMEATLFSGWIYDTLKPFAAELQMGHPAMMKAIGASKKKNDQLDARKISDLVRCNLLPVCYVAPAELRELRRLLRYRNLVVAQAVRMKNKMSGLLMEVGAEYNKQQLHGAKYFTALLDRLEEVPESVKDLLRLSRGALETFETTQKQLLARLEKHPRLAERVKRLQSIRGVGDVTALTWALEVAEPQRFRSIAKAVSYCGFTSALDSSAGQEHRGPISKQRNAHLQTALVEAAKLAPRWNPQLAAVHEREVQGGDRNQATLAVARKLVAYLLAVDKSGKPFQIRTPATAEQEVGAA

SEQ ID NO: 146814 - protein, 367 aa, unidentified
MKQVTTFVGIDAHKKDLFVAMVIGAAPVPVTWQLANEPGAVRRLVRKLEREAPGPVHVFYEAGPCGYALQRQVTTERIACDVIAPALMPRKPGERIKTNRRDARKLAQLGRAGLLTVVQPPTPADEAVRDLARARDDAREDLQRCRHRLGKLLLRRGLHYPGKKNWTQAHRRWVDSLTWTHAAERAVIDDYQLAIDHTEARLLELDARLAEFAEQAPYREPVGWLRCFRGIDTLTAMLILAELHDFRRFGSARALMAFLGLVPGEDSSGEKHRRGRITKMGNALVRRILVEASWHYQHRPGVGRALKARRTGQPARVIAIADKAQQRLCRRFRRMMAEHKPAPKVAVAVARELAGFIWAALQPPVMA

SEQ ID NO: 146815 - protein, 317 aa, unidentified
MPTTPNPTADSAVSTTYIGIDFSKDKFDFNNLQISGSSPNDPSHHRRFLAKLPKGAHLICESTGAYHRPLVMAAHAAGFKVTVANPRQVRDFAKGLGRRAKTDSIDAQTLFLFGVKVEPKSDQPPTPAQVELNELSVARQQAVLERSTLKVQLPSQSTKLTRSLTKARIDLLTTQIKKLEAAIKKAIASEEKLAAAAARLVQIKGVGLITAASCLAFCPELGSLSRNQASALLGVAPFNEDSGNVNGPRHIAGGRMRLRNVLYMAALSAIRFNPILRAFYTKLRTAGKPAKLALTAVMRKLFMLINHLIKNPEFQLA

SEQ ID NO: 146816 - protein, 345 aa, unidentified
MQTITTVGLDIAKSVFQVHGVDAQGKVIVRRQLKRRYVLAFFQKLPPCLIGIEACASSHYWSRELQALGHTVRLMPPAYVKPYLKRQKNDSADAEAICEAVTRTNMRFVPTKTVEQQSCLMLHRTRHLFIRQQTAVINAIRAHFAEFGIVAPVGRTGVEELLKIASDGNDKRLPDVARVCIAALGAQLQMLKARILEFDRLIMAWHRSNQVSKRLDELPGVGPALATALVASVADPKAFRSGRDFSAWIGLVPKQNSSGGKNKLGGISKRGDRYLRSLFVAGALAVIRYAKKRGSKNRPWLAALLARKPTKVAAIALANKIARMAWAMMAKGERYKQPVALVAVW

SEQ ID NO: 146817 - protein, 416 aa, unidentified
MEPPGEFAALIGIDWSDTKHDICLVDTTTGAQELSVVKQTPEALNDWVLGLRARFGGAKIAVCLEQSRGPLVYALLKYDFLILYPINPKTLARFREAFTPSRAKDDPRDAEYLVELLIHHRERLRAWMPDSERTRTLQLLVEHRRRLVGDQTRISNRMTALLKGYFPQILAWFPDIRTAMVCDFLLRWSSLDALRGVRRQTLLKFFREHNSQRKETLDARLDAIKAAAPLVTDAAVINASVMMARALAAQMKTTLAAVKEFDQQIEALCAAHEDFELFTSLPGAGPVYASRLLTAMGSNRERWASADELLRFSGVAPVVERSGKSSWTRWRYFCPKFIRQAFVEYAGESIRHSEWAKSFYERQRAKGKKHQAAVRALAYKWIRIIWKCWQTRMKYDEARYVECLRKKGSALVAAAA

SEQ ID NO: 146818 - protein, 416 aa, unidentified
MKIVRPICCGMDVHKNIIVATIGITNKKTRITEYIQETFSTLNPDLLNLKQWLINHKCFDACMESTGKYWIPIFNILEDEINIYLTHPKYVKAIKGKKTDKKDSKWICDLFKHDLIKFSFIPPKEIRALREISRYRYKLVGMRSSERNRYQNCMTVSNIGIGSVFSDPFGKSAQAIMKEVLESDIIEDEKILKCIHGSCKNKDKILDSIKHCNIETDQRFKMNESMTHMEELKVHIDNCEIEMMKRAAPMFDQFMHITQLPGISTLSAILIISEIGVDMKQFESDKQLTCWAGLAPANNESANKKKSVRISKAGQYLKPLLVQCALGAIKDKEGYFGIKYSRIKKRRGHKKAIIAIARMMLVSIYHMILTGETFNPSDYESFRNPNPPIKQQVLTEESAIEFLKKSGFDVSKLTKP

SEQ ID NO: 146819 - protein, 406 aa, unidentified
MQVLFVGVDWAEDHHDVCVMAEDGEVLTKRRVPDSVAGIGELHALVAEHVSDDEAVVIGIEVDRGLLVGSLVTAGYEVFAVNPMASARYRDRHAVSGAKSDPGDAKMLADLVRTDRHNHRSVAGDSDLAEGVKLLARAHQSAIWGRQRQVNALRSALREYYPGALETFGTDLASTDALGILEIAPTPELGRGLSRSKIASALRRGGRQRSIERRAEDIQVSLRAEYLEAPKLIADAHGLVTRSAVTLIGSFNNQIAELEAGLSEHFEQHPDAKVVLSLPGLGTVLGARVLGEFGDDRTRFSSPKSRKNYAGTSPVTKASGHSRVVLARHARNRRLGDACDWWAFCALTKSPGAKRYYDELRARGKTHHQALRQLGNRLVGILHVCLDREVPYDEAIAWPTESEIAA

SEQ ID NO: 146820 - protein, 386 aa, unidentified
MTQHSHIAASHQLDYERTLILAVEVSGRSWVVAAQVPGLRQKGVKQQLAPRADALMAAVEGYKRRAAAAGMAVERVIVAYESGGSGFWLARWLQQRGVEVYVMQPSSVPVDRRMRRAKSDRIDADMLLRTLLAWLRGEPRVCSMVPVPDEAVEDARRPIREREELIRARVALVNRIEAVLTVLGAGDYNPLRRDCRERLGQLRTALDQPLPPHARAQIERLLDRLDLIRQQVADLEAQRDQAVEGEAAGRTEQMIQRLARLRGIGVQTATVLVHEAFVRRFRNARALGSYAGLTGTPYSSGGTQREQGISKDGNRRLRATLVELAWMWLRYQPGCALSRWFHDRLGGSRGRLRKVMIVALARKLLIALWRYLQDGAVPQGMELKPA

SEQ ID NO: 146821 - protein, 408 aa, unidentified
MHDLTQPAWPVFAGIDWGGDNHQLCVVAPDGKRLLETRVSHDVAGLRQLDDHLNGFGPQIPIAIERSEGLLVEHLQATGHPVFPVSPRISARARERYKVAAVKDDRFDAFVLADTLRFDHAHWRPLSVPSPLLAEIKALTRDRDRLLETQQATESQLRMILEAYHPAPVRLFSSVDRQITLSFVTDYPTPANASRVKTTRMAGFLSRHHYTGRVPAQTLADRMRQNLLSGSPGTVTGKSFSALAFTQVLQLLNTQLAEFDDAIAAATAEHPDAPIFTSFPGIGPVLTAVLLAEIGEDRARFPQPEVLLAEAGLAPVTRSSGRSRSVRFRYAANSRLREATMWWAFNSIKTSPWAAAAFRDARDQKGQRYHRALRGLAARWTRILWRCWTDHETYDPARHGSAALITAA

SEQ ID NO: 146822 - protein, 469 aa, unidentified
MAIRVGIDIACRAHHRAACATTDGTLLWSNVRFQTRAEELENIWRRIPDGETDVTIVMEPTRNAWVPLAAWFRRHGAKIVLVPPEQSSDLRAYYNKHAKTDRLDAELLARLPSLHPEGIHHERGIGPAQPLRRTVKIRSSLVKRRSACMHRLDALLEILGPDWIAAVGSAMTITILHLLSRWPDPHQVIRLGRSRLALWLRRQSRGKWGTEQAEAIIQAAQATIRLWGHDGMDFEALAADIALEAQLALELTAQVDKLEERISVYYKQADPLQILTTVPGIGPTLAAQITGRLGDIERFATLSAVRSYSGLVPRHSSSGLAGATGGLSKKGDACLREAVCIAADLARRCDPSLAHRYHRLMMENGKHHTSAVCSVGAVLITRIVACIRKQEPYVIRDFDGQPITMQEGRSLVKQHYSIPEDVRKSRRTVNRNLTCQKQANEDRVRGGAATAGVAKRSKARTTPQPACNG

SEQ ID NO: 146823 - protein, 463 aa, unidentified
MAKKTTTSRKGKSKAGKNVLERINLNAAGIDIGANFHLVAIPEDRAEENVRKFGPFTSDLHQLADWLTEHHIETVVMESTGVYWIPVFQILEQRGFEVKLVNAAHVKNLPGRKSDVSDCQWLQQLHTYGLLNGSFRPKDEVCVLRSFLRLRDTLVKDSSSHVLRMQKALTEMNIQIHRVLSDITGYTGMAMIRAILAGERDALKLAQMKHPLVKASTQQIVKALEGDYRAEHLFALQTALELYDAYQLKITECENKIEQQLEQFDSKLDFEQVLEQSGALKTRSAQVRRQLQRQAHLSSVCGVDLTRLPGLSTLAVEVIISETGLDMSCWKSEKHFCSWLKLCPDNRISGGKLLSSRPRKTKNRAAAMFRLAAQGAMQSKTAIGAFIRRLKARLGAPTAINAGAHKLARLFYRMLKFGATYVEQGQAYYEQKYKDRLLRNLSKRAKEFGFQLTPLESATDLVS

SEQ ID NO: 146824 - protein, 348 aa, unidentified
MALTIVETRAVTGGVDTHADVHVAAALDPVGGLLGVQEFPATPAGYARLLDWLGGFGTVCLVGIEGTGSYGAGLSRHVTAAGVRVVEVDRSDRQDRRRQGKSDPLDAVSAARAAQSGRARGAPKGRDGTVEAVRALMVAKRSARSERTQTINQARALVLTGPADLRARFARHTVAALVAQTAALRPRPGDVVGYATRVALRELGRRAEFLDSQLGRLDELLVPLVAGHAPGLLALYGIGPDTAALLLIAAGDHPERLRSESAWAHLCAAAPIPASSGKVTRHRLNPGGDREANHALWRIVITRMSAHPPTRAYVERRSKEGLSKKEIIRCLKRYVAREVYPWLRPPAG

SEQ ID NO: 146825 - protein, 357 aa, unidentified
MVESKTEAKSSEVGVTNPYRRTEHCGKIHRYRCDKEVGVIGIDVSKDHLITSRGRVRKYKNNKEGYEEILEMKPCAIVLEPTGVYAIRPCQYFKEKGIKVLQVSPNVLSREKEFRGKKTDFYDAEKLENMVNKAKEYEYNPLRELVTLYLFLKDIEVKYKNRLKRALFLVSDNDRISKDRLERLAKGDFTQEELYNLEYTPIVLEEIKVLAKTLLETQEKLEEVRRMIEEQVPQDHVLLTIPGVGRLAAGVIIGIVGDIKRFPKPESFVAYCGLDPVVERSGKVLVSKGISKRGNKYLRSLFYFLAEMNYSKNPTLLKFYESHRDRLQGKKLFTALARKLARIVWSVWYNNKPYEPK

SEQ ID NO: 146826 - protein, 333 aa, unidentified
MESQSQRHVGIDVSKDRLDVAVGSEGELWQVSNDSAGHSELLERLSEVKPALIVLEASGGYEAVVAGVLWDAGHPVAVVNPRQVRDFARGMGKLAKTDQIDARVLAMFGEKVPIEVRAPLDAEARELQTMVVRRRQLVEMLTMEKNRRPLVPSGRARKSLDKHIAWLEEAVRRASDDIDQTVRQSPLWREKEDLLRSVKGIGPVSARTILVELPELGRLNRKQIAALVGVAPFNRDSGRFKGQRTIAGGRSHVRTVLYMAAVTAARHNPLIRPLYQRLIATGKKKKVAIVACIRKLLTILTAMVRDNVHFTGAPHPGLRPTAATAGRGGKISL

SEQ ID NO: 146827 - protein, 341 aa, unidentified
MKHHISVLGIDIAKRLFHVVGMNERGQIVLRKRLARNALMPFIAALPPVLIGMEACGGAHYWARRFREHHHDVKLMAPQFVKPYIKSNKNDMRDAEGIGEAVTRPTMRFVPTKEVDQQDIQALHRVRERLIGARTALVNEIHGLLHEYGIVVPKGVSKFRRTVVGKLEADKAKLTPLSQEMFGKLIDEFAALEKQLAYDQEKLEALATTHPECQRLMTIPGIGPFTATALVAAVSDASAFKNGRQFAAWLGLVPRQHSTGGKERLLGISKRGDSSLRTLLVHGARTTIRWVGRKTDRRSQWMRQLVERRGKNRTAVAVANKHARIVWALLTSHQDYQLATG

SEQ ID NO: 146828 - protein, 411 aa, unidentified
MENIFLRCVGLDVHKASVEACVRRMEPSGRLHQQTRHWGTMTRDILMMADWMAAQGVTHVAMESTGVYWKPIYNILEGRFTVLLVNARHLKQVPGRKSDIRDCQWIAQLLQHGLLKGSFIPPRPQRELRDLTRHRTPLVEEKTRTNNRIEKVLEDANIKLGSVASEGMGVSGRAMIQALLEGEKDPAQMADLARRSLRGKIPELQKALEGHLTEHHRFLLRLLWKELTQQEALIAELEAKIEELTRCFAPEIERLDAVPGVDRRVAEAVLAELGGDMSPFPTHRHLSAWAGMCPGNEESAGKRRKRRITPGNRWLKRTLVQAAWAASHTKSSYLASQYRRLVGRRGKKRALIAVGHSILVILYYLLKDGRQYADLGSDFFDRLEPQRLTRYYVNRLQHLGHKVTLEPWVTV

SEQ ID NO: 146829 - protein, 370 aa, unidentified
MEKRSMFVGLDVHKESIDISLADDGRAGEVRHYGKIAGDLEAVGKVLKALRAPTRRLRFVYEAGPCGFGIHRYLTSQGEECVVVNPSSMPKRSGDRIKTDRRDGEALARLHRAGELTAIYIPTADDEALRDLVRAREDAVTLSTQAKHRLKAFLLRQARRYPGRAGWTRPYRRWIADLSFPLAPQHIALQEYRDTIDETERRVERLTDQLRQLTPAWRWAPVVDALQALRGVSFVTAVGLVAELGDIRRFTHPRQLMAYLGLVPSEHSSGPSVRRGGITKAGNPHARRLLAEAAWAYQGPPRIGRVMLYRQEALPKAICDIAWKAQLRLTSRFRKLVARGKAKPKVATAVARELTGFIWAIAREVPAPSA

SEQ ID NO: 146830 - protein, 320 aa, unidentified
MMAQNNLVVAGIDVAKDKVDVCIRSQSLRGTFASTAQGQRELACWLRQQKVGNAVMEASGGYERDWAKMLRAARIEVRIVDPKRVRSFARSAGRLAKNDTIDAEMIGWFAETFGEAPHQAYDAERERLAQIVNARQGLLDLQTELQNRGEHSVPEVVQKVQARLLKKIAAELATLEAAVAATVKATPHFAELAEIIESVPGLARITSAGLIAAMPELGQVSNKVAAALLGVAPYDDDSGKRKGERQIKGGRRKVRNLFYMACLGAATRHNPVLKAFYRRLVAKGKEKKVALVACMRKLIVILNIMIARREKWDASRYVLN

SEQ ID NO: 146831 - protein, 429 aa, unidentified
MSEDKAIELRVSVDVGYRRHNVAIGLASGEVLEEFEIEHRPEGFQEFFSRIEKHRKTKSSPVAVAMEGYNGYARPLDSLVRGRGYRLYNLNNLKFARFKEIFPGAAKSDRIDARKGLELFQLQDHLPLAKEVLQEVKGTPAENEILKRLTRRRRRLVNERVRVVNNLQADLQAVCPGLLEITNDAGNQWFLNFLLSGESLTQIARLRRSTLLKIPAVGVKTAAIIAGWQKRAHFSDEVEWVGEMIQEDARRCLELDEKVKRLEAKIAGLAAKSRIAKIFRSVPGFGAVCSSELAGEIGTIERFSKEGSLALYLGMSTLDNRSGKYQGTKAPKQVNTRAKAAMMIGVDRHRKKVAESQRYYEKKRAEGKKHNQAVRALGRHLTRIIYRLLKEEREYEIRPEKGNTKTKVSPAACVKTQMRRPKTSGKKKN

SEQ ID NO: 146832 - protein, 341 aa, unidentified
MNKPNTICIDLAKTVFQVALFNKSGKLKSNQKMSQKQMVVFITKYPGALICMEACATAHFWGRKFQKGGHTVQLIPAQIVRKYRSGNKNDANDALAIFEAAQRSDVHFVQVKTTEQQDIASVLKLRESYIKQRTATANRIRGFAMEYGVKFPQSINKLRKLLPFELESTDNALTPSARFILNHLFEQLIALDKPIQEVTDCLIAYAKQIPACQLLITLRGIGWIVASALYARLGSASSYKSGRDASASIGLVPAHTGSGGSNRLFGISKVGDRTLRSLLVHGARAVVSNIKDKTDVLSCWIRQLLERNHFNKVVVALANKTVRMACAMLKSNQPYQEKLPA

SEQ ID NO: 146833 - protein, 354 aa, unidentified
MSETVKTTVAVIGIDIGKNSFHVVGLDQRGTIVLRQKWSRGQVESRFANMPPCLIGMEACVGAHHLSRKLEALGHDARLMPAKYVRPYSKGQKNDFRDAEAIAEAVQRPTMKFVATKTVEQLDLQALHRVRERLVGQRTGIVNQIRAFLLERGIAVRQGPRFLRTELPRILAMPSDVVSPRMVHIIEELAGDWRRLDERIEGLSIEIETIAHQDVGCERLMSVPGIGPITSSAMVAAIGAGDTFSKGRDFAAWLGLVPRQISTGDRTILGKISKRGNRYLRVLFVQAAWVVLIRPKSWERHGLKAWLETARKRLHRNVLAIALANKLARIAWSVLARGRAFEARRIDEATVQPA

SEQ ID NO: 146834 - protein, 355 aa, unidentified
MSQEKYIGMDVHQATISVAVMDSSGKLIMECILETKAATILEFIDGLRGTLSVTFEEGTSAAWLHDLLKPYVSHLVVCDPRRNALLKDGSKSDRIDARKLAELLHGNKLHAVYHGEHGMRTLKELGRSYLTITKDLTRVMSRIKALYRSWAIPCSGTTVYAERHRAEWLAKIPEPGVRLRAERLYQQLDLLQPVRQGARRDLMVESHKHHAVKLLRQIPSIGPIRAALLVALLQTPHRFRTKRQLWAYSGFAVETHDSGEYRFVRGKLRRNRERITVRGLNHNHNHDLKNLFKGAAISASTRPGPLCDFYLALVEKGMRPTMARLTLARKMAAITLTIWKKGVEFDAKQLNRQAA

SEQ ID NO: 146835 - protein, 406 aa, unidentified
MNTGTITAVGIDVSKHKSTVSARRPGGEVVLLPFDVEHTAEGLKKLITKLRELDGEIRIVMEHTGMYWRPIAMTLKEAGFYVSVVNAILIHNFSDNSIRKVKTDRADAMKIANYGLTFWSDLQEYAGEDENRQLLKIQSRLYERTATTAGMLRNGLISLLDQTFPGANKLFRDESRNSKGHVKWIDFVLRFWHKECVAALSLATFTDTFQKWCKRTGYKFSASDAERIHAIARNAVATLPKNDSTKLLITQATNSLNSIYDSLQAIRTEMDRLASMLPEYELVMGMEGIGKVTGPQLMAEVGDVRRFSHKGALVAYAGVDASPYQSGSFDSKSRHVSKRGSPHLRRVLFVIMSMTLIRANTANPVFCFMDKKRAEGKHFYVYTVAGSAKFLGSVKYFSQNGLQALA

SEQ ID NO: 146836 - protein, 364 aa, unidentified
MIVIGADTHKATHALAAVDAGTGRARASREIKAEEPGHLAAVRWARGLDDDRVWAIEDCRDVSRRLEQALLAARVVRVPPHRMGASRKGEREPGKSDEIDALAVARAVVKDGVEQFPVAYLDEHAMEIRLLFDHRADLVAERTRIINRLRWHLLEMCPELERSCKRGSLSKSRSLDRVERGLRKLPLSARVRVAREQVRELRKLSREIDALHCELSVLVSAHRPQLLAELGCGALTAAILIGHTAGNERFRSEASFALQAGTAPIPCSSGQRVQHRLNRGGDRHLNHALHIIAITRAQHDPATKEYLNRKEAEGKTPKGALRALKRHLARRFHRLLSEPAADQQRAAVDPNSNGLAPSPMACIT

SEQ ID NO: 146837 - protein, 417 aa, unidentified
MNAVGIDVSKGKSTVAIYRPGDQVILRPRDFRHTQTGINSLIEIIKGLDGETKVCMEHTGRYYEPVATWLSKADIFVSAVNPMLIRAFGNDSLRAPKTDKADAKKIARYTLDRWTKLKQYGRMDETRNALKTMNRQFGFYMDQKTAMKNNLIALLDQTYPGANTFFDSPARSDGSQKWVDFVYTYWHVDCVRGKSLNAFTEHYKNWCKRKGYNFCAAKAEQIYHGSADLIAVFPKDANTKMLVHQAVEMLNTASKTVETLRTEMDRTAATLPEYPVVMAMNGVGPTLGPQLMAEIGDVTRFEKRGSLTAFAGVDPGKNDSGQHSQKSVKTSKKGSPHLRKTLFQIMDSLIQRSPEDDPVYAFMAKKRAQGKPYHVYMTAGANKFLRIYYGRVNEYLSGLSDVGEQPDQPAIEGESCS

SEQ ID NO: 146838 - protein, 348 aa, unidentified
MAILAELVDLVIGVDTHKHTHTAAVVVATTGATLHQATVPATPAGYQQLLQLADQQPGQRVWAIESTGGYGAGLTRFLHANAEQVVELDRPKRAARRHGAKSDPLDATRAAREALGRDQLTQPRAAGQRAAVSVRLAARRSAVQATTDAQRQLHALVVAAPDVLRGRLRGLTTHQLVLTCGRLRQRSGWDSETTATAASLRTLARRIQLLDREIAEHTRALTTLVRAWRPDLLRQHGVGPIVAANVLCAWSHPGRCRSDAAFAMLGGAAPIPASSGQTVRHRLNRSGDRHLNQALHLIVLTRLAHDPATRAYAAHRRAQGKTNREIKRCPVRYVARQLYRLLETDPTH

SEQ ID NO: 146839 - protein, 385 aa, unidentified
MQDHKPEDQTAIRTDLGAIFVSLELSRSTWLVTSLSPGGGEKMSKHSVPGGDISGLLMLFSRLTERARKRAGEEFPIIAIQEAGLDGFWIHRTLEQEGIESHIVDAASIMTSRRRRRAKTDRIDGEALLRALMAYKRGEPRVCAMVRVPMPEDEDRRRISRERHVLIAERVAHVNRIKGLLFSQGIRYEPLRRDRRARLEELRTGDGRVLPEHMKRQISRELDRLELLLAQIKAVEAERNTMLAKTNEANLAPAKMLMGFKGIGAEFAMTLWSEGLFRHFDNRRQVGAYAGFAPTPWQSGMTDREQGIAKSGNPRLRTTMIQLAWLWLRHQPDSLLSHWFQERVAGKGRRIRKIMITALARKLLVALWKYVTAGVVIERAVMKTA

SEQ ID NO: 146840 - protein, 409 aa, unidentified
MEVLYGRCAGLDVHKDTVVACARIAAPGGEAKREVRTFATTTRGLLELSDWMTEHGCTHVAMEATGVYWKPVWHVLEGAFELVLANAAHIRNVPGRKTDINDATWIADLLAHGLIRGSFVPPVAIQRVRELTRTRKQLVREVAQHTQRIQRTLEDANIKLTGTISDVLGLTGRAILDALVAGETDPERLAALAHSRIKAPRAKLAETLRGRVTEHHRFLLQLHLGQVDALRAAIAQVDEQLGKALGEATAMAKLLTTMPGVGELVAQVIVGEVGTDMSRFPSAAHLVSWAGLCPRSDESAGKRRSTRIRHGAPWLKTTLVQAAWSASAKKNSYHRAQFQRLKARRGPKKAIIAVAASMLTAAYHMLRDGTAFEDLGPHHFDRQDRTKVAQRLTRRLEQLGYVVDLRPAA

SEQ ID NO: 146841 - protein, 426 aa, unidentified
MGSDEVWICVGEAADDPVRKFGTTTAALRAAGEWMQACRVDTVAIEATGVYWIPAYELWEQMGLHPVLVHSQSIYSVNGRKKSDFVDAQWLQILHTFGLLRPCRRVEADMVRLRAIMRRRRELTEGASGCIQHMHAALTLMNLRLDQAVTDVTGVTGMRIIRAILGGERDPHKLAAMRDKRCQKTAAQIAEALTGHYRSEQLFVLRQAVTLWDYYQMQLRECDTEIEPLLESLPKKAERKDLPKSRVAATGTPRKNQPHLDGRTLLFERLGVDLTLINGIQVLTILTIISECGIDLSRFPTDKHFCSWLGVCPGTNKSGGRVLSSRSRRTANRAATALRLAAQALHRSPTALGAFYRRMKARLGPEKATTATANKLARIIYLALTKGLVYQDPGPLYLDDQTHERRLRQLTKQATRLGFHLTPIAA

SEQ ID NO: 146842 - protein, 319 aa, unidentified
MKTSLGLDMAAASFAACLWFSATSHAKAVFPNTRAGFRRLNSWIKSHGLSALRVGIECTNTYGQAVAQWLFDHGHQIYLLNPECTSHYAKARGQQNKTDPSDALNIAAFVALHELTAWQPPSPEQAALCALTRARADLVSQSQQLANQLRTAQPIVRPYLKDCLQFIKLQISQIEKKLRQHLKEYPHLHDKVQLLRSIKGVGWLTAVIAIAELPNIDQNTDARAICAWAGLIPKRWQSGKTELPSRLSKRGNKHLRQALFMPALVAKKYNPLLRAFAEKLRSKGKRPGAIVGAVAHKMLRIIVGLLKSNSPFDPNWSFN

SEQ ID NO: 146843 - protein, 402 aa, unidentified
MAYDCVIGMDVGKYFHHACVLDPQGRQVLSKRINQHEGSLRKLFGTYLADNASVLVVVDQPNNIGRLTVAVAQAMGADVRYLPGLAMRQLSRIHVGNSKTDVRDAYVIAHAGLNLPDALRSVDRVEEVFLQLKVLNGIDEDLARAYTRLINQMRSALVGTYPAFEHVLHGQMIHRKWILHLLAKYGGPTKIRRVGKARLAAFARSHRARNPEPVIDAMLAAIEGQSVTIAGAEYAELGVAMSAKDALAKLEHRKEIEAQVLELIQDIPQTEILLSMPGVGPRSAAQILMTVGDMSDFPDAAHLASYAGLSPRTNQSGTSIMSNSPNRAGNKKLKNALWQSSFASIRFHERSRQFYERKRKEGKRHNAAVVALARRRLNVLFAMMRSGELYRDISTVQEAAAA

SEQ ID NO: 146844 - protein, 364 aa, unidentified
MYDSTTTVTVGLDVHARSIRLAAVRADELLEERTLPYDEEAVALVLRRWPLVRCCYEAGPTGFGLQRFLVERGIDCQVVAPGLVPQRPGDRVKTDSRDARKLARLLAGGLLEPIHVPSRELEAARDLVRAREDARLDRMRDRHRLSKFCLRQGRALPTRSWTVARRKWLSEQRFEFAAQQQTFDSYLHTVDLVDARIQALERAIRETAEEEPWRRLVASLRCLRGIDTLTALALVAEIGDFDRFSSAEELMAFVGLVPSEHSSGDQRRQASITKVGNSHVRRLLVESAWHARRRPTVGYQLARRQRGQDAVVVERAWRCQQRLYQRWQRMAGRGKPQQKIVVACARELAGFVWAIATEQPLRST

SEQ ID NO: 146845 - protein, 344 aa, unidentified
MEHYAGLDVSLELTSVCIVDTQGGMVCEAKVASEPEALIQFLLEQELEFGRVGLEAGPLSQWLHTGLIAAGFDTVLLETRHVKAALSAMVIKTDRKDARGIAQLLRMGWFRPVHAKSPAAQEVRALLVARKLLQTKLLDVEFSIRGILRGFGLKMGEVSKGRFETRIRELVEGNATLETVIGSMLAARASLACEFKRLHRELLALVRADPVCRQLMSVPGVGAIVAITFKSGVDDPTRFRRSRDVGSHFGLTPRKYQSGELDVTGSITKVGDRMVRTALFEAASVMLTRTVRFSPLKSWAMAVARRRGTKKAKVALARKLGVILHRMWVDGTTFRWSNEETAIA

SEQ ID NO: 146846 - protein, 399 aa, unidentified
MTESTLIVAGADTHADTIHVAAISLTGAAIGDREFPTTRVGYAGAIRFLYSLGQVERVGVEGTASYGAGFTRALTAAGIAVAEVTRAVKSTRRLKGKSDPLDAYGAARTALAGDGLATPKDDATSGLRALQIARRSAVKHRTAVINQIKAMLVSAPDAVREKYRELTTLRLIEALARCRPDAQSDPWAQSVLTAAKMLAQRVQFLETQAEALEAQIDVLVTAANPGLRAAYGVGSDTAAQLLITAGSNPHRLHSEAAFAALCGVAPVPASSGKTNRHRLSRGGDRSANNALFRIALVRMSHHQPTKDYAQRQLLKGHTRMEILRKLKRAIAREVFKLLTRQIAVPEYTDLRPARQAKNITVTAAANHFGIWPTVISRIERGLQRDDAFADTYRNWLKAA

SEQ ID NO: 146847 - protein, 407 aa, unidentified
MPSSITLFVGTDVSQATNRTRFYDAAGVEIGRRYQSANDLPGARALAAEAILRADTVGADEIRWALEATNLFWWHLATHLTTSPELVARRLKLYSFNPRVVSKFRESYPDLGKDDWVDAMVIADRLRFGRLPAECYLDERYQPLQRLTRYRKHLVDTIVAEKQVALGYVWLKLSGYELEEEGLTNTFGATSQAILERYLTPDEIVAAPFEELVSLIAAESRGKADAEAVAQAVQQAARRSYRLPAGMVEPVNLVLSSSLVTIRTLTAQLKPLAPSQTIRTIPGLGPVFTAGIVAEVGDVTRFDNEEKLAKFAGLTWRRHQSGEFEGEDRSLTKTGNRYLRYYLVEGANSVRQHCPEFGSYYAIKYKEATRHKHKRGVVLTARKLVRVVDSMLRSGQIYRPPGARQAS

SEQ ID NO: 146848 - protein, 381 aa, unidentified
MRIIGCDLHARQQTLAMLDTTTGEVVKMTLKHEGDNVREFYSKLPLPVRVGIEATGSMQWFLNLMEELGIECQVGHPAQIRASEQRKQKHDRRDAELILKMLVEGRFPAIWLPSKELLDLRALLRHRHQWVRMRTRVQNALQSIALANGLRRGTALWSHDGQSRIASLPLAPHAAYRRSELQAMYEKFEAEIEKLNQRVEEQACKRPGARLLMTHPGVGPITALATEVFLGDPARFADSKALASYVGMIPREYSSGEWQRLGGLSKQGNPLLRFLWGEAGAHAVRRDPELQRFYRRKLVQKGLGKASVAVARKLGIRLWIMLRDQIEYNEFCRRGQSSRKAVVPVRECQKRGMVRKVTGRLIRLPASLKDWGVRINHHGRW

SEQ ID NO: 146849 - protein, 413 aa, unidentified
MDYCLAIDVGKGRSCYGLMKNVDVTLGIRDGMETVIRPKFFRHTAEDLDAILKAVAKYPKEEVAVVMESTGIYHLPLARSFRARGFTVIVVNPLITGRDQPTLRKTKYDEGDVAKIANSYFKGNCNIQYIRTKEEEDAAELSREIEHSKGVLAAYKNELRQLLYKTAPAYEIVYGKSSLFEKATLALIRKCPHADRIASVSEEEALDAMCGAGLPRYRESYREGFRRLRKENASRLFSLDSDSPAVEGIEHLIDSILALKAEIRKREEDLVNREKDRNEFRALESFRGIGGVLAAHISAEAGDLSRFSKPQKLISYAGLDPSKEQSGTSLDTNGAVTKRGNRHLRKWLYVAVMSILMHPKADDREFTDYYQMKRGDKRKGGQSHHHFYAMTACCNKLIRKFYFRYLDLAKEKR

SEQ ID NO: 146850 - protein, 447 aa, unidentified
MDTESATQYAAYIGIDWADKDHAYALRATEDKKVEQGKVEAKPEAIEKFVAQLRLRFGGKAIAVALEQSRGSLLFTLSKYDHLVLYPVHSSTLDSYRKACHPSGAKSDPDDAALILDLLQKHPEWLQPFAPDTVPTRTLQFLTEERRDAVNDKTRYLNQLTAALKTYFPQMLEWLDVDSKVMCEMLQRWPTLEQLQQQKPSVVEEFLREHRYPVVRVKPLQEAMEKAIPATTDQAVIEAKKFTVQRTIAQLEALRENIAELDRRIEQITRLHEDYRVFASLPCAGKVMVPRLIAAMGTQRDRFQTASELQCQTGIAPVKEASGQREWIHWRWACPKFLRQTFVEWAWLSTRKSQWAREFYDRQRAKDKSHHAAVRALAFKWQRIIFRCWKDRCPYDEARYLATREQRARTAKASTDGSPQLKSSQAGGVEITWKNVSGFSRPDSISC

SEQ ID NO: 146851 - protein, 459 aa, unidentified
MPAGKKRRKKRQNQKVIKLDSLKQLNLNAAGLDIGSAEIWACVPEDRAEVSVRVFETFTPDLHALADWLTACEVETVAMESTGVYWIPIYEILEERGFEVYLVNARHLKNVPTKKTDVLDSQWIQQLHTYGLLNASFRPEVEMVALRAYIRHRDNLIRYRTGHVQHMQKALDLMNIQLTNVLSDITGRTGMQIMRAIVAGQHDPITLAQYRDGRCRSSEAEIAKALSGHYRAEQLFALQQALELYDFYNQQIQACDAEIERKYATIKPVFDSDRQPPAPKKGRSKNEPDFDLHRYLYQLCGVDLTQIKGLDVLTVQQIITETGVDMSPWPTVKHFASWLTLAPHNAITGGKVINSKTQKSTNRAAQAFRMAAQSAGRSDSALGAFYRRMRAKHGGPKAITATAHKIARIFYHMLKYKQEYQDPGSNFYEQKYRDRVIKNLKRKAKALGLELVPLQPSVS

SEQ ID NO: 146852 - protein, 452 aa, unidentified
MGNARRRKIPAQLVDDEDYQLRHERVAGIDIAKAKADVCTRLPPPREGGRRRSRVEEVPATARDILDLGARLLADRVELVVMESTSDYWRIWYYLLESLGLAVQLVNASQARQLAGRPKTDRLDCQWIARLAEMGLLRPSFVPPPEIRALRDLTRTRLQLVRDRTREWQRLEKLLEGALIKLSSVVSSLAAAKSAHKILEAVAGGETSPQALAALAHGNVKGGRAAVERALEGMRPEAHHLMLIRLHLDRIKDLDRKAAALEDEAAAALDAIPAARVTADGEPAPGPAVLSAAERLAQVPGVSAELAIAIIAEAGLDMTRFPTAAHLVSWAGLAPAARASGSRTRKPKKGQGNDYLKGYCTQAALGTANTATFLGERYRRLARRIGGVRAQCAVARSVLTIIWHLLADPAARFTDLGPDWHTRKADRDRKIRTHLRQLQALGLDVTITPRAA

SEQ ID NO: 146853 - protein, 363 aa, unidentified
MHESMTVTVGLDVHARSIRLAAVRADELLEERTLPYDEEAVERLLRRWPAVRCCYEAGPTGFGLYRHLVERGVDCAVVAPGLVPQRPGERVKTDPRDARKLARLHAGGLLEPIHVPSREVEAARDLVRAREDARLDRMRDRHRLSKFCLRHGRLLPTSAWTVTRRKWLSEQRFEFAAEQLTFDTYLHAIDLVDARIDQLERAIRETAEQRPWRELVASLRCLRGVDTLTALAVVAEIGDFGRFKSAEEFMAFVGLVPSEHSSGEHRRQGSITKVGNSHVRRLLVEAAWHMRRRPKVGYELARRQRGQDAVVIERAWRCQQRLYSRWQRMSGRGKPQQKIVVACARELAGFVWAIATDQPLRST

SEQ ID NO: 146854 - protein, 353 aa, unidentified
MTSVTRLSEVVDVIIGVDTHVQTHTAAAVEARTGALLGQITVETTPAGYEELTAFADEHAALRAWAIEGTGGHGAGLARHLAHDQEVVVELDRPERARRRNGAKSDPLDAERAAREAMARTRLGTPRAGGDRQALSVLLAARRSAVEAATLAQRQLFSLVIAAPEPIRARFRGKKIPAMVATAAVLRLDPSWDTETTTTVTVLRSLARRARDLAAEAAEHEKAILAIVRAWRPDLLDQIGVGPIVAATVLCAWSHPGRVHSEAAFAMLAGVAPIPANSGQTTTRYRLNRYGDRQLNRALHTVALSRQRYHQPTRDYTARRTSEGKTPREIKRCLKRYIARDLYRLLENPSPTT

SEQ ID NO: 146855 - protein, 343 aa, unidentified
MQTVTTIGLDIAKSVFQVHGVDAAGQVLIRRQLKRRYVLAFFQKLPACLVGIEACASSHYWSRELQALGHSVRLMPPAYVKPYVKRQKNDMADAEAICEAVTRANMRFVPTKTPEQQSGLMLHRTRHLLIRQQTSVINAIRAHLAEFGITAPVGRTGIEELLRVVADSSDKRVPELVRTCLAALGSQLLGLKKQILQFDRMILAWHRSNQTSKRLNCIPGVGPLLATALTASVADAKSFRSGRNFSAWIGLVPKQHSSGGRERLGSISKQGDRYLRRLFVAGALAVIRYAKLHGTNHRPWLTALLARRPTKVAAIALANKLARMAWALMARGGRYNYPIALRP

SEQ ID NO: 146856 - protein, 316 aa, unidentified
MAVQIWNAGIDVGKETLEVAVWHSPVLLFQTTRDADGLARLIGWLREHNVARIGLEASGGYEREVLDTLQDAGFMVACLNPRQVRRFAQAKGRLAKNDRADARVIAEFMAKMTDRDPIRRDHSFDVLVEHLTVRRRLRDWISDCDTTLEHLRDPLMRKTIVAKRKTFETALRHQDKAIAALIAAHPDWCETERRLRTVPGVGPVLACTLIALLPELGQLSRRAIAALAGVAPFDDDSGKRSGARAIAGGRDTVRHVLYMAALVGKTHNPVLAVFAKRLAGKKPKVIIVACMRKLLVTLNAMMRDKRDWEPCRQPAS

SEQ ID NO: 146857 - protein, 434 aa, unidentified
MKSDFAAFVAIDWADQKHAWMLQTASSTARQAGTIDHTPEAVAIWASELRLRFDGRSIAVAVEQSRGSLVFMLSKYEHLVIFPVHPTTLANYRKSFRPSGAKDDPNDAALLLDLLTLHYDKLRRLQPDTPETRTLQFLVEERRKFVHERTRCSNRITSHLKLYYPQVLEWFDEIGSNIAAEFLERWPSLDKLQRARPATIERFFVDHNSRNAESIARRLDQIRKAVPATTDSAVIASCAAAVIAWAALLKQLVLTIESYDKNIDALARQHPDYALIKSLPGAGPALTPRLIAALGSQRDRYQTAHELQCYSGIAPVVASSGKQRWVHWRWCCPRFLRQTFHEWALHSVAYSTWAREYYDRQREKGKRRNTVIRSLAFKWIRILFRCWHDRTPYNEATYQQAIAKSHPNKAKGAQAVDLRWKKIAGFSKIMAVSA

SEQ ID NO: 146858 - protein, 337 aa, unidentified
MEGNYWTGIDISKQQLDWQVNEARNQPLAVGKAQNSPGGIAKLLEGWARQGICLAQMIICFEHTGPYGLLLAAMLEKAGIRYVMVPAAEVQGSLGIRRGKSDAIDARRLAEYVWRFRDRLSLSRLPSKALLELRSWLLWREKLVKMRTGLTNALKANALTSRVVNLDELNSQIQDQRELLTRQLKQVDRKIKLLLRRYNNAKGQYELLISIPGIGPVIAGWLLVYTEGFTRFDNGRQLACFAGSAPFPSRSGQVTNPDRVSRWRCVRLKTLLLNGVHSAIQYDPELRAYYKRKCREGKHPKSVKNAVVCKLLYRVFAVINRGTPYVKLYQHEAATMT

SEQ ID NO: 146859 - protein, 331 aa, unidentified
MNYVGVDLHKRYSVLCAVDERGRKLREARIEGNAASGFAQFFESLEGPSKAVLEACWNWGLTHDLLEEIDCVEEVVLAHPLKTRLIADAQIKTDRLDARAMATLLRGDLVARAHVPRKETRARKNLLRQRLYWARLRTMLRNRIHALLDRQRDLELPHCSDIFGVRGLGFLRRLELPEPDGTLLREALTLHDLIAQQMKAQEKRIAAEFHLEPMHARGYAGVVPTTHSSGGKVHHGRLLPSCNKWLRWALVEASWVAIGCSPYFGALYRQQRARGKKANTAITIVARRMCRILFQLLKERRDFEKRTEVAHTYPVPGCSGYRLTAVSTVRP

SEQ ID NO: 146860 - protein, 370 aa, unidentified
MSKSSKLFVGLDVHKDSIDIAIAEAGAQGEVRHFGTIPGDLASLDKAIRRIRRKGCSLHVVYEAGPCGFEIYRHLFDQGLDCIVVSPSLIPKRSGDRVKTDRRDAINLARLHRAGELLPIYVPDPEDEAIRDLIRARTDAVHAQTRARQQLKAFLLRHGIHYQGKTSWTLAHMRWLSEIKMPHPAQHVTFEEYIKAVDAATQQVIRITLHIEHLVQHWRWLPVVQALMSMRGIALLNAATVVAEIGDLSRFDKPRQLMHFLGLTPSEYSSGPSTRRGSITKTGNTHARKALIEAAWHYRWPPQVSRSLRIRQQSQHQSVNTIAWQAQLRLYARYRNLRTKGKCSQQAVVAVARELSAFIWAIARQVKALN

SEQ ID NO: 146861 - protein, 475 aa, unidentified
MNVKGTKKKNQAVTADIFEQQELLKKAEVIKENLTASTWRELETNGKFGKNEKLSFISDGTLILGCDVGSETHYMRAIDTRGRELSRAAFPFSNDLEGFQSAREWAVKIAAEYNKSQIVLGLEPTGHYWFCLATWMISNGISVVQVNPYAVKQTKEVEDNSQLKDDRKDPKLIANLVKDGNFGMPYLPEKLYGELRGLSMFRDQLNEDRIRTINRMHREMKIYFPEYKDALGKVDGAFSLELLKQAPFPDDLAALGEDGIRKIWHDARLRGRGYSRAGEILRYAKASVGIKDGAAAGRTAVKWFVQKILELDAELAVIEGQINQKCQEIPHAGNILEISGIGKNTLSGILAEMGDISRFDDVKEIQKLSGLGLVACSSGKHKGETKISHRGRKRLRYWLFQAAKSAVAHAGEFKELHIYYTARADNPLKKMQSLIVIACKLLRIIYAILKKGTVYDPKKMLMDIRRPEKKEAAAA

SEQ ID NO: 146862 - protein, 438 aa, unidentified
MSNKVIFNLDELFISVGIDVGADFSWMSIALPNQQFVGKPYKILHNSIDSLTTAVSKIKEAEELYSLESRIFLESTGIYHYPLFCYLRDKGFNCSVINPIITKNSTNINIRKVHNDRFDSKKAALVGLKPDLKVSLMPSDLALNCRNLCREYYDLMDNRSAYVNKLQGELRMAFPQYLGIFSKVTINTSLTLLETYTSPSAFLKVDKQEIIDIIKSTARFGLTYAQNKYNAIIQAATDANQFGYIIDSNIKRIRLYISFIRKYDEEINSILESLHELVDANEDSDFVKQIHLIETFKGAGFLSAVSIMGEIGDFSAFSKPKQLFAYFGLDPSVKQSGKFEGTKVQMSKRGSAIARRVIHTLTLQSISISRNREAKNPVLREYYLKKCDSKPKLVAMGAVSHKVCNMIFAILRDNKPFKIIAPQEHIKQYNSAKCDIAA

SEQ ID NO: 146863 - protein, 424 aa, unidentified
MNLTQNDRLKQVTSDTLIVGVDVGSQTHFCRAFDWRGFELSRRVFKFSNTGMGFLTFLRWTEELMNKTEMKKVIVGCEPTGCYWLTFQKFLQDHEIQLVTVNPFTVNRSMELDDNSPEKSDLKDPKTIALLVKDGRYSTSYLPSGVYAEIREASVCRDQIMKQHVRLSNQIQGWLQKFFPEYFECYSDWDSTSGLMLLKEAPLPQDILKIGAGGINQIWRDAKVRAAGIKRAQTLVEAAQNSVGLEAGEAARLEIWILVNDYILKAEQLKRLDEYLEEKIKEVPNVEKLLAIKGVGKSTVIGFIAEVGDIGRFTDPKQIQKLAGLEIVKKSSGKKKGQPRISKRGRRKLRRTMYESARALMNWNPAFQDVFLYYRNRAKNPLGGMQAKIAVACKALRVFYVVLQTGCDFDEEKFRRDIIRPEAA

SEQ ID NO: 146864 - protein, 315 aa, unidentified
MTQTNMTTAGIDTSKLKLDIAVHGRTERWKVANALPGWRALAANLAKADVTRVGIEATGGYERGVVEHLRAAGLIVLVLQPVQVKAFGRVHLRRAKNDALDAELIAACAAAIDRLRMVPDARLTELAGHLTFLEQTEEDIARFKTRLEHIDEPGLRRIVNSDIARLKARKAAQIRDIAKRLRAHDDLAERLDLVLSIPGIGERTALALLIRMPELGQVSREEAAALAGLAPFDDDSGQRKGQRRIAGGRGRLRRSLFAAALPAAYRWNRALIALYARLKARGKAHNAALVACARKLLIYANTVVQRGTPWTEKAA

SEQ ID NO: 146865 - protein, 402 aa, unidentified
MNSVGIDISKGRSTIAVMRPFGEIVISPFEVRHTDSELSELARRLKSLNGETRVVMEATGNYHAPVAKLLHDAGLYVSVVNAKLVHGYGNNDLRRVKTDRKDAVKLANYGLDRWLTLPRYVPEENTRLLLKNCYRQYRQYSKVQTVLKNNLISLLDMTFPNANRLFVSPARADGSEKWVDFVAEFWHCECVSERSLKSFVNKYWRWCRKHGYNFSEEKAHAIYDEASGHIGVMPKSETTKLLVEQAVSQLSATSAALAALKQEMQSLSSQLPEYPVVMGMFGVGPILGPQLIAEIGDVRRFYSKKALVAYAGIDAPPNDSGDVIGRHKSMSKVGASSLRRTLFLIMSAYLQNSPPNEPVYQFMDRKRSEGKPYRVYMMAYANKFLRIYYATVKAYLETLEQF

SEQ ID NO: 146866 - protein, 342 aa, unidentified
MNSIGFDVHKTNVFMVAVNDRGKITHCREYPTTEKNVIKLVTMVPGPRQVMFEEGGMAGWMKMVVEPYADKVIVCDPTQNRLISKAEFNDDKSSATKLAQLLLLGNYKEVYHPQGKAAELRSLFMQYYYANHDITRYKNRLKACFRQMAIPVSGSSVYNPNNRADWLAKLAEYPHLHSHATRLFRIIDRHEKIKQKILRQMRKLACKQPAYKLLQTMPGVGPLIACGYMAQIVTPDRFSQENKLWAYAGFANSHRESGGVIYSQRSSQSGNRPLKWVVSQHFRVALRCSKPNRFKDYYHRRIQQGKSCTDARRDTCRCILSSVRAIWSKEKPYRNDHVSKPQ

SEQ ID NO: 146867 - protein, 347 aa, unidentified
MTEYFIALDTHCAFCEMSVVTTSGKLVCREQLPTSVPALREAIAKVRSPRRLTFEEGPLANWLSRELRDLVTELVVCEPTRNHWIARDGDKDDPIDARKLADLYRGGYLKPVHQSDSLKRSLLKQTTWLYHDRVGERVRQGHQLVALFRRHGVFAPADKLVDEEEWQQRLRHLPRERSLHFGLKQIRDVYLLMLEQEDSLRTQLIGLARNEEPVRRFQELPGIAWIRGVTFYVAVDTPWRFRSKEALWKYCNIGLERRHSGNGPTRMRLSRQGNRRLKNVLLGAAQSAIGQAETPFADKYRNWMEEKGLAAPHAKRNVARCLATTMWSLWKTGQRYDPSRATVPEKV

SEQ ID NO: 146868 - protein, 338 aa, unidentified
MDVTCIGIDLAKQVFQIHGVDHHGKAVVKKQLRRGQMLSYFRKLAPTLIGMEACGSAHYWARELGEMGHEARLMSPQFVKPYVKSGKNDANDAEAICEAVSRPSMRFVQVKSVEQQVMQAEHRIRARLIKARTALSNEIRGLLGEFGIVLPASLTRLRRAIPELLEDGENGLLSDFRRLLCLLGEELRKLDDNIKEYDARIAQRAREDERIQRLLSIEGIGPVVASALVSAVGNGKQFCKGRDMAAWLGLTPSQHSSGGKSQLGRISKRGDIYVRMLLIHGARAALKAAENKEDARSRWVTGLAKRRNKNIATVALANKNARIAWSILSREETYRAAV

SEQ ID NO: 146869 - protein, 321 aa, unidentified
MVYIGIDISKSSFVAAYPSVNGYRTKAYPNTAAGVRKFIATPSVAEHHCVMEATGNYGFLLLYLLHQSGIAISLVNPKQIKHFARMMMAVTKTDEKDACMIAMYGEKMNPPIYKMPSQAILLLKQKKTVIRQLRKQLVASKNLRESLVVLPYRDKACVRALDKTIDFLTKQIEQLEAELADIASTEFDKQLKALTSIKGIGITLATALILTTGGFTYFDNAKQLSRFIGICPTYQQSGTSVNIKGHINRNSDEHLRSLLYVASWTALRYNAACRECYLRLKANGKPSKVALIAVANKLVRQAFAIATTDSTYIDGFISAKK

SEQ ID NO: 146870 - protein, 326 aa, unidentified
MRFYNRQHRYYCGIDLHVKTMYVCILDAAGQVLVHRNVKSSAETFLEIVAPYRDDLVVAAECMFTWYWLADVCAAEGIVFVLGHALAMKAIHGGKAKNDKIDSQKIASLLRGGLLPQAYVYPAAMRSTRDLLRRRLHLVRKRGELLAHIQTTRAQYDLPAFERRLAYPANREGVSAHFSDPSARKSMDVDLALIDQYDTLIIDLELTIVREAKRHDADAFHRLRSVPGIGKVLALTILYEIHDVTRFDRVQEFASYARLVKCVKTSAGKKLGTGGAKMGNVHLKWAFSEAAVLFLRHTKDGKKILAGIEKKHGKGKALSIPPAPII

SEQ ID NO: 146871 - protein, 325 aa, unidentified
MESKTWYCGIDISMDTMDVCYQTKEGEECHLTLSNNKSGFRELLKACPKDYHFVMESTGVYHLNLVFFLHQKQAVFSVENALKIKRYIQMHLERNKTDKKDAKRIMEYGRDTNPKEFDMPEEAYFACRSLNNAIHDLTKEITQISNRIHSLTHSPYDTSEVIRSYRSILKKLREEKTKLLESLDKKLAEWQPEMLKQIRSVKGVGQRAAAELIVYTKAFRGMENYRQLISYAGLSPVEYSSGSSIRGKSKICKQGGSQLRHILYMCALNAKENNRSCRALYNRLVAKGKNKKLAIIAVCNKLLKQVYGCVKNQTLYDDDYGKILE

SEQ ID NO: 146872 - protein, 444 aa, unidentified
MTPSSPATESPIVAYVGLDWADQQHVVCWRAADSIQLHTAIVRQQPEPLRAWVAELRQLFPQGLIAMALEQSRGPVIAALMHYDFLRLYPINPKSLARYRETFFSSGAKDDPGDAALLLDLLVKHREQFSPWVPDDALSRQLALRVEHRRQLVDLRTALTHQLSSHLKLYFPQALDWVGELDRPLACDFLERWPTLEAVQQVRPAQLEQFYHDHHCRRVHLIQERIGQIQQARPLTEDPALVEASSRMVLALVAQLRVLISTLEQWQAEISQLFARHPDAFIFASFPAAGPVFAPRLQSAFGSRRERFAAAPDLLQFSGLAPVTRRSGKSLQVHRRWARPKFLHQSFVEFAALSIPHCGWARALYHQLRARGHRHWAAIRVIAYKWVRILFRCWKDRVPYDESKYLESLQRRNPQLWAASQQPPPPRKTAAGRKQLVEKTVPAL

SEQ ID NO: 146873 - protein, 355 aa, unidentified
MSSKADTAIARTIGIDTGKNTLHLIGLDEKGAIVLREKVSRTRMTARFVNVPPCLIGIEAGMASHHIARELVALGHDVKQVPPAYSKPFRQGHKNDFRDAHAVAEAVERPSTRCVPIKTDAQLDLQALHRVRSRLISNRTAVTNQIRGFLLEHGIPVRQGHHFLRRQLPQLLATRVDVLSPRMIRIIGDLMADWIYVGERIERVTDEIEALARADEACQQLITVPGIGPIISSAMVAAIGNGAAFCKGRDFAAWLGLVPKQMSTGDRTILGHITKRGNRYLRTLFIQGARAILLRPTGWAKHSFGSWLAAAARRMHRNVLTVALANKLARIAWTILAQGRCYEARVEPRVEPAAV

SEQ ID NO: 146874 - protein, 430 aa, unidentified
MISAEIERCAGIDVGKEWLAVTIMVGPLAGEPRVEYREFGTVTAELERLRQWLQDEGITHVVMESTGSYWKPVFNVLEDSVRVYLANPQEVKNRKGHKTDKKDSWWLAHLLRHAMIRPSFVPPRGLRELRDLTRRRRKMIGVGTSERNRVDKVLQDANVKLSSALSDIFGVSGQLMLEALLEGKAQPAEIAQFAQRRAQRKIPQIVAALEGHRMSDHHRQMIRYSLEHLRFLEEHISELDQQIVAKIEALGYKPQWQLLQTVPGMKENSAASILAEIGPDMSQFESEKKLSSWAGVCPGNNRSAGKNKGSKTTKGNRWLRGALTECAWGVSAKKNCFLKEKFWRLATKKQRKPPATMAIAHTLLVLCYQVLKTGQPYQERGLPVMDETQRNRLICHHVRRLGKLGIRVRSLPVPKESSKRKPKKTTAKRN

SEQ ID NO: 146875 - protein, 358 aa, unidentified
MNRNTGMNAGQIIGTMNGRQVVGLDIAKHVFQLHTVDMGTGEVINVQLKRAKVIEHFANRQPCLIAIEACGSGHHWARELMALGHTVRLLHAKAVRPFVSGNKTDATDARAIWLAAQQPGVKFVGIKTAVQQATLTLHRQRELLMKMRTMQTNALRGLLYEFGATFAKGRNALFKDVEQALEELSPQLPQMVRDSLHEQVERIKALSQDMQTVEKRLALQLKADADMQRIAQIPGVGLLTATAAIATMGEASAFKSGREFCAWLGLVPSQTGTGGKVRLGSISKRGDTYMRTLLIHGARSVLAHTKEPGAWLEGLKSRKPANVVIVAQAAKMARTIWAVTAKQQDYQRGFQSVRPQTA

SEQ ID NO: 146876 - protein, 419 aa, unidentified
MSFKIFKFNCCGLDVHKTWIYACIGITDSNNRTEYKQARFSSFTKGLNELCDWLAKYNCKDVCMESTGKYWIPVFNILEQHSFWVTLSHPKYTKPMKGNKTDRKDAKWICDLYMCGMVKPSFIPPADIRELRDLVRYRFKLTCMITGEKNRAQNCLTVSNLKLDDVFSDVFGKSSRSITEHILQHPGEKFDIAPFVDSRCKTPITEIQAAVDGAISKEQVVKLRQCLDHIDELNKHISEVEQEILRLSDKYEAALNLIRTVPGFNKNPLTAIQVLSEIGGDMSVFPTAKHLVSWAGCCPRNDQSNQKIKSTRISRAGSYFKPVLVQVANALIKSKKHLEFTSRYKRIKARRGHKKAIIAICRMILTAIWHILSDLKPYTPEGFLESRPVKEGKVLSTSQALNLLKQRGYIIKGEPLAVS

SEQ ID NO: 146877 - protein, 351 aa, unidentified
MVVVGADVHKRSHTFVAVDEVGRKLGEKTVKATTEGHLVALMWARDQFGAELTWGIEDCRNMSARLERDLLGAGQSVVRVPTKLMAQTRKSGRTRGKSDPIDAESVARAVLREPDLPVASHDEVSRELKLLTDRRDVLVAQRTSAINRLRWNVHELDPERGPAPRSLNAAKHQQALQAWLHTVAGVVAELARAELADVIRLTSEINALEKRLSQRVREVAPALLEIPGCGDLTAAKLVGEAAGVARFKSEAAFACHAGVAPIPVWSGNTAGQMRLSRSGNRQLNAAIHRIAVTQIRIHDTEGHAYYQRLITGGKTNAAARRCVKRGISRAVYRALLSDHHTRTQPHQPVAA

SEQ ID NO: 146878 - protein, 343 aa, unidentified
MYFIGLDVHKKTISYCVKDAAGRVHQEGKVGSTRRELDGWIRTMPQPRMIAMEATIFTGWIYDHLLPHAEKVKVAHPVMLRAIAAAKKKNDKIDASKIADCLRCDFLPECHMASTEIRDRRRTLRYRNLLVRQTVQMKNRVSGLLMETGVSYNKQRLHKVGYFADLMTTNGEVDESIRPLLKLSREMICRSQKLDYVLVSSLERDPLLKERLRRLRTVPGVGPITALTWALEIGDVTRFTSIKQAISYCGLCGDEKSSADKVMRMPISKQRNKHIQRVLIEAAKLGPRECHELAEVRAKELEKGDRNRATLAVARKMVCYLLAVDRRKQDFVPAEKFARRPAA

SEQ ID NO: 146879 - protein, 410 aa, unidentified
MEPKLIVAGIDVHKRMLAVVIVDDEDPQQGLEQRKFGTGASELKHLAAWLGGRGVTMAVLESTAQYWRPVWQALEQEMDLYLAQAQSNAAPRGRKSDFADALRLARRFLAAELRLSFVPDAEQRSWRNLARSKHQKRRRRVQLQNHIEALLEQSQIKLSSVVSDLLGVSGMRILRALARGESDPEKLAELAANNLKASREQMADALSGPMLARYRKVLSLQLEELDLIDRHIEELDRELETALKEHQETVLRLCEMPGIREDAARQVIAEIGPRAAVFDSPEQLASWIGVCPGRRESAGESKSNRSAKGNPTLRRLLSQIAWSAVRTKDSFFQELYRRLIPRLGIHKAAWAVAHRIAKVIWKILHQQAHYLERGRLALDPLARKRRLEKLSRQIRRLGYSIEVKSITPAG

SEQ ID NO: 146880 - protein, 425 aa, unidentified
MNYKQNEKINQVKESTLVVGIDIGSTTQYARAFDWRGIELGKVFTFSNSREGFESFKAWMQHLQDKYRKSDVIVGIEPTGHYWFDLGAYLEDEGILLVMVNPYAVKQTKELDDNSQSKNDRKDPKVIAKLVTEGRYSAPYTPDGVYADLRIMVTNRKRLIREMTQIKNRFARWFAIYFPEYTDVFGDYEAQSSMLLLKKVCTPEAIVELGAEKINQIWRDAKLRAVGMKRATTLCETAKRSIGLKKGSSAARYEMKLLLEDYEYKKAQLDAVMEEIEKLCRKIPESEQMLAIKGIGVITTAGFLAEVGDVRRFESPRQIQKLAGLSLRENSSGKHKGQTIISKRGRSNLRAVLFNAAIPLIATNPEFKSLHEYYTTRANNPLKKKQSVIAISCKLIRVFYAILAKGVTYDAQKLISDIHRQPQVA

SEQ ID NO: 146881 - protein, 361 aa, unidentified
MKSTTIIAFDQHAATTVAAVLLPGHRTPALHTLASDSPTILRFVERLRRQGPITCCYEAGPCGFDVQRALTSHGIHCDVIAPALIPRRPGDRIKTDRRDAGQLAVLYRAGALTAIHIPTEQEEAARDLLRCREDIRADLLRCRHRLSKFLLRHGRRFTGTKKAWSKRHEIWLRAQTWPIAALDQTHRAYLRAVEETVARLRAVEEDLRALLDLEPLRPRVQRLRCFRGIDDLTALTIAAELGDPRRFPTAPSTMAFVGLVPSEHSSGARRAQGGITKTGNGHLRRVLVEAAWHYRHHPFVSATLRHRQRGAPDTVIAQAWTAQQRLHRRYHRFAARGKPKQHIVTAVARELTGFVWAALTQ

SEQ ID NO: 146882 - protein, 417 aa, unidentified
MEDNPSASPCRYIGLDIHKYYSVVAGVDREGEEILAACRVEHVDLEDWSIKHLLPTDQVVIESTTNAWHVYDLLEPLVGEVLVANPIKVKQIACARVKTDKKDTFILARLLAANLVPTVWVPPKHVRELRQLISHRRRIAGMHTQVVNRMHSVAHRHHLNHPKGKDFQPKNTLWQRDESLSRLEKMQLELDMGTREHLEKQIERMTRELGKMSHEEPWASDMLYLMQVPGCGVVTGMTILAAIGDITRFETPKALASYSGLVPGLEQSGVKLRGKGITKEGRKELRWVMVEVAWRAVKADPYWKKYFEELQRRMHKNQAIVAIARHLLTMVWYVLTRHEPYSHYSPERIAEKYLYWSRTLDEEQQQGKTAPQFARYYLMRLGIGNELHRIALNPKFPRKLASVEEVLALWPELRPPE

SEQ ID NO: 146883 - protein, 349 aa, unidentified
MITIGIDPHKGTHTAAAVEDATGQFLEELTVPATDEGAARLHTWAHRLADGEELRFALEDVRNVSGGLERFLLAHSELVLRVGTRLMAGTRKTARTFGKSDSIDALAIARAALREPDLPVARHEPQLRELKLLVDHREDLVSERTATVSRLRWHLHELDPGLEPMARTLNREPTRRGLSQRLGRYGDGVQVRICRELLARTGEITRAEIALRAEIATRVRPMAPRLLELSGVGDLIAARLLAEAGGAGRFPTDAQLARHAGCAPIEVSSGRVRRHRLSRMGNRKLNAALHQVVLTQARVHPPARAYLDKKRAEGKSNKEAFRCLKRHLVRSVWKALQEPSSPALEAAVS

SEQ ID NO: 146884 - protein, 328 aa, unidentified
MQFSIGIDVSKDTLDVSLFDGDKFTNKHFKGNHIKAFKNIIKSFGINKETTLITMEATGIYSHQAAHFFFEQGFKVAVVNPLQTKRFAQMLLTRVKTDKADAQTIARFGYQQKPKLFQPRPKQREQLIQLLRAADNLEETRIQFKNRIYALNKHSDPSLTPILHYKNLLDALDSELHLIRKKIQKCIQEYASEEQYLIQSIPGVGPRISSAMIAFFGDFKDFETANQAVAFVGINPNPRTSGSSIRKASSISKKGPGYLRKVLYMGTLSASRYNPICKALYQRLIQAGKPKKVALIAVANKMMRQIFAVVKHKRPFDPDYVKSQTNLA

SEQ ID NO: 146885 - protein, 390 aa, unidentified
MALKIVYKICCGIDVHKTFVVACIASTNSKGITTYERHRFSTYTSGLKDLLQWLLKRNCKDVCMESTGKYWIPIYNILENDCSIVLAHPKYVKAIRGKKTDKKDAKWIADLFKHDLVAGSFMPPADIRQLRDLMRYRFKLTCFQSSEKNRLQNCLTVSNIQLGNVVSDTFGKSAQAILDKILENPEDTSFDLEPFVYRSLKKKLPELRDAIDGYITPEQAGKLKVIKAHYESLESRKAELEELILALAAPYQQELAILQTAPGISSDFTAIGIISEIGTNMEAFPSAKHLCSWVGLTPTSNESAGKKKSVRVSKAGCYIKPLLVQCANAVVKSSKHPEMRNRYLRLKKRRGHKKAIIAIARMLLTALYHMLKNGENYNAELYLNFSIFNF

SEQ ID NO: 146886 - protein, 367 aa, unidentified
MRRVIGIDIHRTFGEVVIWENGLTRHEGRVEMTRTALEGLGRQLQRTDKVVIEVTGNCMAVSRVLSPHVKRVVIANPLQVKAIAHAHVKTDKVDAATLASLYAAGYLPEIWTPDPATERMRRLVARRYQVVRHRTRIKNEVHAILNAHLIPKCPHADLFNQRGREWLTRQPMPDDERAAITRHIRELDRLAEDLAVLDCDIAKDALDDEAIQRLLTITGVNLTVAAGLMAAIGSIDRFKSPQKLVSYFGLNPRVRQSGLGPAHHGRISKAGRSHARAMLVEAAWAAAKAPGPLRAFFIRTRTRRGHQIAAFAVARKHTTLCWHMLTKGEDYRWERPSLLAHKRRAWNWPPDNHRRKVTSAARAMLTT

SEQ ID NO: 146887 - protein, 387 aa, unidentified
MYFVGIDISKFKHDCAIVDELGDVITPSWSFQNDREGFSLLKELLDALDGEKKIGLEATGHYGQNLKLFLENNDFSFMEFNPLLINRFVHSKSLRKTKTDSIDALMIAQYLMTVEYKPYPPSFYTFEKLKSLTRFRDSLIRQRSRQLVELTNILDKVFPEFKPFFKGRFSATALYILSHYASPEKISNMNSKSYEPLRRLSRGRFSMVDFVELKTLARNTVGSTSDYLLQEMEITIDIYNQLQSKVEEIELQIHDCVLALAPPILTIPGIGAASAAVILSEFGDLSKFNNPSKLLSFAGMEPGYFQSGTSESTGKMVKHGSSHLRYAMMNCAQTVINNEPTFAAYYAKKRAEGKEHRVALTHVAKKLLRVIYTLQTKELSYNPDLVR

SEQ ID NO: 146888 - protein, 376 aa, unidentified
MKEYARFLGIDQHKDSLVIGQADAGREPGMVLGRIRNREDDIRRWFRQRGREWGGLADVLCCYEAGPCGYVLQRQMVEMQVACQVIAPSLTPRKPGERVRTDRRDATKLAVLLRAGELTPIWVPDAEHEALRDLIRAREAARVDLLRQRHRLSKFLLRQGQYPPEGVRAWTKAHARWLDQLALKERAHQVLLPELRQTILGVEQRVARLDTAIREAVLSSPWCAAIQALQCFRGVDLLTAATLVAELGAVARFAKARQVMAYAGLVPSEDSSGQTIRRGRTTAAGNTHLRRVVVEAAWHYRHTPKVGRRLEQRQKGQPAEVIDVAWRAQIRLHKRYRKLMARGKEKNKVITAIARELLAFLWEAWQVLPIPTPQGE

SEQ ID NO: 146889 - protein, 363 aa, unidentified
MRMKKHPQYFISKSPLRGTGVGTTIGIDLGDVWSHYCTINEEGEVIDRGRFRTNPSGVDKRFRDLEPIRIAMEAGTHSIWISEQIRDLGHEVIVANVRELRAISHSDRKSDSVDAEKLARYARLDPEILRPIAHRTVAQQETLTLIRARDVLVRLRTGAVNSVRGLAKPCGCRLPASSTLCFAKRCLAMMPPGLSVALSPLLHQIADMTVKIKEYDRAIKKLTETEFPETQALIKVYGVGHLTALTYVLTLGKKERFQRSRDVGCYLGLRPKRSQSGDSDPQLGITKAGNGYLRQLLVECANHAIGPHGKDSSLRRWGLSLGARGGSHARRRAVVAVARKLAVLLHRIWITQEAYVPFYAAAA

SEQ ID NO: 146890 - protein, 451 aa, unidentified
MESTTKTVFEEIRRNVAGIDLAWRADHYVCGPRLENGEYEIASFGTTTPELYRMLKWLQDRDVESVAIESTSVYWIPTADLLESNGIEIVLVDAREVRMVPGRKSDIKDCQWLQRLHSCGLLRGAFRPSETIVAIRTILREKDTMIAMRVQAIQQMQKSLDQMNIRVHHAVSDIDGKTGTAIIKAIVEGERDPVKLAMLRDKRCKKSAKEIADHLTGTWREEHLFNLSQSFKTLQFLDERIAEYELQASNMFQSISENINETDDLPPETPQSKKQTAKERTDTKGKAVLQKIMNFDLTLIPGIGYDTAAIIVSELGSKFDSFPSEKHFASYLGLAPSLGKSAGKDVRQRRCRNTSRAGRAVRQGASSLYCSGSELGAYFRNVARQTDRKTAVKATARRIAHMIYRGVKYGKEYIDRGAEAYEARMRDKALKTVNRMIKSFNINNSELVLSA

SEQ ID NO: 146891 - protein, 384 aa, unidentified
MRSVGLDLGARHIAYCEVRNGVVVDRASVKKLEQLKSRLGPGTAPARIAFDASREGWYVHDTLVAWGHEPKMIDTTRVRAMGVGHHKRKNDALDAEVAARAVEQGRIPEAHVLSPERRALRAKLSVRGALVETRSQYVTTIRGLCRAAGVLLPTCATENFVTKVDDAELEPATRALIQPLIAVLVGIEKALLQVESELSEMAQRDPIITLLATAPGVGLIVASTFVSVIDEARRFHNAQAVGAYLGLVPAESTTGGPDKRRLGSITKQGNTYARKMLVQAGWLILRARDKDDPIRQWGERIAKTRGKRIAVVALARKLAGVLWAMWRDGTAYDPVGQAKASARGTRKAGRSKSAHADALERAAKKLQRRATARCDKASEATAMS

SEQ ID NO: 146892 - protein, 388 aa, unidentified
MKYNTQNAKIKSITEKTLIVGIDVGSETHFARAFDWRNYEYSKKPLEFSNTEAGFMTLKAWMADFAEKYGKNVVIPGMEPTGHYWFNLGAYLQDNGMKPVHVNPHHVKKSKELDDNNPNKNDRKDPKTIAALVNEGRFSYPYIPTGIYAEIRSLSNLRLQTQEEITRIKNRIARWFSIYFPEIKDVYRNPDSVSGLMILKEAPLPQDIVKLGVDGINKIWRDAKLRAAGLKRAKTLVTAAEHSIGSQEACDSARIELKILLNDYEIYHQREEELMELIEEKLSEVPYIDKLLEIKGIGMKTVSGFVAEVGDIKRFDNPKQLQKLAGYAIVECSSGKHKGESHISYRGRKRLRYVLYEAAISLIARNTEFKEIHRYYPVSYTHLTLPTT

SEQ ID NO: 146893 - protein, 319 aa, unidentified
MTPEGQRLEVPVRIDNDPLELARQVASWGESPEVVLEATYGWYWAADVLADAGAVVHLAHPLGIKGFNYRRVKNDERDAADLADLLRMGRLPEAWIAPPEVRGLREAVRHRCKLVALRSGLKAQVHAVLAKQGVRVAMSDLFAVGGQKMLDELRLDAPFNARVASLRRLIDAFNFEIDILARRTAAQLRAHPGFRAIQAIHGVGPVLAAVFVAEIGDVTRFRRPQQLCSWAGLTPRHRESDTKVHRGRITKQGNPLVRWAAVEAVQGLGQRAGAIGTARVRIAERRGANIGKVAAARKLLTLVFYGLRDGHIRCLPAPA

SEQ ID NO: 146894 - protein, 391 aa, unidentified
MVCVGIDVAKDKHDCCILDSEGTTLVDCFTIPNNMDGFKSLLQTIQDCSQKSDKIKVGLEATGHYSYNILGFLLDNDLPVYVMNPLHTNLYRKSLSLRKTKTDRVDAKTIATMLLSDVDLKSYTDTAYHNEELKSLTRYRFDKVQERAKLKQSVSRLVTILFPELEQLVSSIHGTSIYALLSEYPGAKQISEAHLTRLANILVKTSRGHYRKDKATHIRDAARTSIGSVMPAKSLELKHTIKLIQELTSEINEIEDAIRKIMDELKPPILSIPGMGFHSAAMILAEVGDFSNFNSPDKVLAYAGCSPSTYQSGKLTNCYTHMEKRGSRYLRYALYTATKYVCYWNPVFTEYLTKKQAEGKHYNVALSHATKKLVRLIYALQKSGKAYLAVT

SEQ ID NO: 146895 - protein, 386 aa, unidentified
MPQSSDLSRCLIPFRQDETLVAVVEMSKTSWLVAGMIPGVARHPLKKLVPDEKALFELLERWRDEAVKAGKIITRITVAYEAGRDGFWLARWLRARGFEVYVVHSSSVAVTREHRRAKTDRLDCEMLKRVFIGWLRGERDHCRMVAIATQTQEDAKRPNRERENLVGECTRIVGRLKAGLARLGIRSFNPKLRNAAERLESLRTPEDVPVPANTLCELRRDMARLRFVKDQIKQIERARVRQLEQAPEQGPQQMVRLLARVLGIGIETADMLVHEILSRNLRDRRAVARYAGLTGSPDESGQKRREKGLSRAGNARVRRGMIQLAWRFLMFQKTSALAQWYRVRTKDAGGAVRKTLIVALARKLLISLWRFVTTGEVPVGVTLRVA

SEQ ID NO: 146896 - protein, 326 aa, unidentified
MHYIGIDVSKAKLDCCWLRDVEKNKFKTKVFKNSATDCNALNTWLKAQAKAEPDEITVLMEATGIYHENLAYYLFEHGYQVCVVNPARTKEFASSLGNTHKTDAKDSQILALYCHRMHPELWQPERPEIRELKALLARLEALETDLNRETNRLEKAEFNCSSERVIESLNLMIEQLKAEKKRLEDDIDNHIGRYPQLRKDRQLMESIPGVGPIISRLMLSILHSRSFRTAGQVAAFLGLVPRIQQSGQWKGRSRLSKQGPANVRAKLYMAAVVCLRYNPDIQAQCQRLMENGKSKMQALGAGMRKLVQICFGVVKHQSEYRPQVVS

SEQ ID NO: 146897 - protein, 337 aa, unidentified
MEYFAGLDVSMAETHVCVVTRNGAVVHQAKVPSTPADIAAELAQVPTCRRVLFETGRMAPMLYHGLSQLGLPVVCVESRQAYQALKSLATHKTDRNDARGLAHLARTGFFKPVHVKSLAAHAVRSLIVARKKLVGQRVTLENQIRGLAVVFGVRLPRALSSTFIRQALQASEGIPGLSAAMQGLVAARTAVLAAIVAIDGDIRRMVRASDACRRLMSIPGVGQLTALAFTAAVDDPGRFRRSRDIGAYLGLVPRRHQSGEIDYTGSISKCGDRRVRTLLYEAANVMLTRYKGALKLKEWAFAIAKRSTMRKARIALARRLAIIMHAMLRHGTEFKPA

SEQ ID NO: 146898 - protein, 432 aa, unidentified
MRGALVKPTPERIDCASESTFDVCCDVGMTDLHLTAGRAGASRFPRVFSIANRTEPIRAALAEIRTIADGAGLARVRVVVEPTGVYHKLLLRLSREAGFEPCLVNAEHVVKMRQVLFGDDGKTDRRDPQAIAAVAAQDRLIVDRQLPETYELLRGWGGLYQNAEDAIIEVKNRVHSIVKSLFPDFDFGVDFLYGPSGSAIVKLFGLNPHRIAALSPSRLQKRLRGHCRILAGSVRRLSGQARISATSTPAGARNALAEETLRLAFEELDLHRRRREVARDHLESLYATACAEDPRLPRPTKGVVSATMLARLVAESGPLGDFASWRQLLRLAGLNLRERQSGKYRGLTKIARKGRPQLRRILNIMALPLVRSGHLFGDWYAQKTDLQKMPGKKAMTAVSRKLVKMIWGWYHSEAVFDPQRVFRCESDYRKAA

SEQ ID NO: 146899 - protein, 348 aa, unidentified
MKATTIGFDLAKAEFQVHAVDAAGKVVMRKKLRRAQVLPFFAKLSGCTVGMEACASAHHWARKLIGLGHTAKLMAPQFVKPYVKANKTDAADAEAICEAVARPNMRFVPVKSMEQQAILAVHRVRSGLVAERTAELNRLRALLAEFGLIAPRGRRALIERLPALLADETLPGVARQLFERQSTRMRELEAQITAEEAVIMHWHRNNELCRRIDAVAGVGPITATALVASFGEAREFDNGRQLAACLGLVPRQHSSGGKTRLLGISKRGDSYVRMLLIHGARAVIRTLERRARGALNRTDQWLTKLLARRNPNVAAVALANKTVRVIWALLAHDRTYDRNWMNQQPIAA

SEQ ID NO: 146900 - protein, 352 aa, unidentified
MTVTIVETRVQSRAITGGVDTHADVHVAAALDPIGGLLGVQEFLATPAGYAQLLGWLGRFGTVCLVGVEGTGSYGAGLARHLAAAGVRVVEVDRSDRQDRRRSGKSDPLDAVSAARAAQSGRARGAPKGRDGQVEAIRALVVAKRSARSVRTQTINQARALIITGPDDLRGRFAGHAPADLVAELASLRPRPGSMVRYHTLLSLRELGRRAQFLDGQLQRLDEFIVPLVTTRAPGLLGLYGVGPDTAAILLVAAGDHPERLRSEAAWAHLCATAPLSASSGKVTRYRLNPGGDRQANHALYRIVITRLSSHPSTRAYAGRRTKEGLSKKEIIRCLKRYVAREVYPHLRPPVG

SEQ ID NO: 146901 - protein, 338 aa, unidentified
MELYAGIDLHGNNSVVTVLDEQDRTIYAKRLANDLDLIVAALRSCVGTLHGVAVESTFNWYWLVDGLQAAGFSVHLVNTAAVKQYDGLKHGGDFSDARHLAHLLRLGILPEGYIYPREDRAVRDLLRKRSQLVRQRTSQVLSIENLVARNLGARVGGNEVKRWTAQHVDTMELLDEQKQALKANVAVMHCIDDQIEQLERSILAKAKLRADYKALKTVSGIGQVLALTIALETGDVGRFAGPGNFASYARMVDSRRESNGKKKGVGNAKCGNKHLAWAFIEAAHFAVRFDATIKRWYQKKCSSSLSVVAIKAVAHKLARACYHVIKDGTPFDAAKAFG

SEQ ID NO: 146902 - protein, 368 aa, unidentified
MESILYAGLDVHKNSIEVALAEGGREGEVRRYGRIGGDLDSLDKVVRKLVSTGKEMRFVYEAGPCGYEIYRHLIGRGYECVVVAPSQVPRRSGDRIKNDRRDAMALARLYRAGELTAVYIPTVEDEAMRDLVRGREDAKRDERKAKQRLGAFLLRHGHRYPGRKTWSQAHMRWISDIRMPHPAQQITMHEYITAIHERSDRVDRLTDQIRKLLTTWRMAPVVMALQSLRGVALIVAVTTVSELGDLGRFANPSELMAYLGLVPSEHSSGERNRRGKITKTGNNHVRRALVEAAWAYRLPPRVSRVLLKRQEGLPQQICDISWKAQLRLCGRYKSMMARGKTKQVVITAIARELAGYMWAIAREVTVPT

SEQ ID NO: 146903 - protein, 307 aa, unidentified
MTAVGIDVGKAALDVAIDGVAGVVRFANTAAGIGKLIGRLRGVAEARVVVEATGGYEEPLLDACCDAGIWVARINPRQARDFARATGELAKTDEIDARLLCLLSGLFAGRLRRYDAPCRWQRDLRGWLRRRGQVVTTLQAQKQQAAMAPAAIGKLMARTVAALRHELAAIDREMKALLDEHLTPALRSSKGMGPIFQATSLALLPELGTLTRQQIAKLVGVAPMNRDSGQTRGKRRIRGGRAPVRVALYMATLSAVRWDPVMKAHYQQLRERGKLAKVALVACMRKLLTIVNARRRDELMAGAPVAT

SEQ ID NO: 146904 - protein, 479 aa, unidentified
MVKHKKPSIFERLRDGKLGRKQRQELARRVRSEDPGLEVVHRDVAGIDVGNGSHFVAAPPGRDPEPVREFGSWTADLERMAEWLKSCGIRQVVMQSTGVYWIGVHDVLEKHGFEVCLTNARDTKNLPGRKSDVQEAQWLRKLHTYGLLRNSFRPPEAIRGLRSVWRLRERHVREAGREIQHMQKALTTMNVQVANVISDISGVSGQAIIRAILQGERNPHELAKLKDYRVRASEEEIARSLEGNWDEEVLFELRQAVEQYDFLQQQIVQCDQRLQQHMSALPGRAASGGEAGGGKAQGKSKKKGGKPRKNQPQFNQRAELERVCGVDLTTIDGVDVMTAQTFFSELGWDMRHWRTEDHLVSYLKLAPNRQISGGKVIRHEPSKTHNRVTIALRMAASTLAHSDSYLGARFRYLRARLGPAKAIKAMAAHICRLIYRMLTRGQAWVDRGAQEHERRRAEREHQALRRKAAALGYRLEPAA

SEQ ID NO: 146905 - protein, 317 aa, unidentified
MDKVYAGVDVGKATLEVGIYGERWVGQYNYDVAGVAQLIGAVQGREVGLVVVEATGDLERRLVTALVVAGVPVAVVNPQRVRYFARADGQLAKTDRLDAQVLAKFGWAMQPTLYEAQSAEGEELSAVVTRRKQLVEMLAAEKNRLNTATGSVRRQVEAHIRWLEEEVKALDEAISHLIQTAPQWQERDALLHSVPGVGAVTASTLLAELPELGTLSRQKVAALVGVAPINHDSGRRRGERHILGGRATVRRVLYMAALTATRVNPVIRSFYQRLLAAGKCKKVALTACMRKLLVILNAMLRDHRRWNPDLTLMPSPA

SEQ ID NO: 146906 - protein, 310 aa, unidentified
MTLSPTWIGIDVSKAWLDIASSGGEGVQRIANTMDAIAAFAATLEREGTLVVLEASGVYDKSLRAGLALAGIGHVRVNPQRARDFARASGRLAKTDALDAAMLAEMGRALRLVADPLPEAGRERLGLLSRRRDQLVAMRTQEKQRRIEITDSFIGADLDRHMAGLNQAIAAIEVEIQNQIGSDAALAQDQALIRSVPGIGPVTASVLAALMPELGRRSGKQIATLAGLAPLNNDSGLRRGQRSIRGGRRRVRQALYMAAVASLRTQSPLNAFYHRLRQAGKPPKPALVALARKLLVTINAIMKTRTSFAT

SEQ ID NO: 146907 - protein, 312 aa, unidentified
MPADGHQTDRLLAWAEPLDTDRVWAIESAAGLGRLLAQQLVAAGEHVIDVPPTLTARVRLLGSSKASKNDPNDALATAIAGLRHCGLRNVAPDGDTAILRLLADRHHDLTGLRTQAACRLHVMLRELSAGGAGLRISAAQGTEFLKRIDATDRVSIERKRLAAEHLADIRRLDIDIAAIKIRIANAVTASTTTLTELHGVGPVIAAIILGHVHDISRFRTRAQFASYNGTAPIEASSANKQRHRLNPRGNRCLNHAIHIIAVTQVAHDTPGRAYYLRRQAEGKTRKEALRALKRRVSDAVWRQLQIDAHARR

SEQ ID NO: 146908 - protein, 319 aa, unidentified
MDTLGIDISKNTFDVALHRNGKFKHKKFKNNVAGFNELSQWLLKQNAGQLHACMEATGMYGERLADYLYEQGMDISVVNPARIKGFAQSELARNKTDKLDASLIARFCAAVKPELWKPEAAEIKALRALVRHLDSLVEMRQQERNRLESAHSDIVNIIQTHIDYLTQTIEEVQNQIDDHINRHPGLKNNKQLLESIPGVGRATAQVILSECASIDRFDGAKSLASFIGVAPKIVQSGQSVKGRSRMTKTGRSALRKSLFLPAMVCLRYNPIIKAFGERLAANGKTKMQVIGAAMRKLAHIIYGVLKHQRPFDENYFTQA

SEQ ID NO: 146909 - protein, 408 aa, unidentified
MEVLYERCCGIDVHKKVLVCCFKCGKKQEIRTFGSNNDDIREMAKWLLDGKCQMIAMESTGSYWKPLYNIFELSGLEVIVANARDIKNVPVRKTDIGDAEWITDLLKHGLIRASYIPSREQRELRELSRYRVSLIQERARELNRLQKMLEGGNVKITNVVSDINGRSSRNLLKALLENDEPLTEERVQGMVHGKMAHKVDAILKAMNGFLTPLQKQLIRKVVDHIDDMTKRIGEMDDMLTQYLEPYQEAIEKLDELPGVGKRSAETILIENGLDMERFPTDKHFSSWAGLSPGNNESVAKKKLCRTVKGNKTLKTTMIQCAKSAKRCKSYFRAQYERLVVRRGANRATVAVAHSMLIAIYHILKNGSRFVDLGEDFYARFNREKKISHHLKQLTKLGWLPNAAEAALA

SEQ ID NO: 146910 - protein, 313 aa, unidentified
MPVSLSKPIVGVDVAKNELVIYQADGDLLEEIPNTKTSIKQWLKALSGTVAIAIEATNIYHLDFADLAYEAGCTIYMVGGYELKHYREGVKIRAKTDALDAKLLARYLKNEAEELRPWTPPSPLYRQLLSLFRRRAALVQARVGLVQSWSNEPLLKAAFSEQVKSMQQLETLIEKTINDQLKEAGLLGQLKRCLKVEGIGFLTGARLITAFQRGDFRNADAFIAFLGMDLRVAKSGQKDARRSLTKRGDPEARRLLHNAAMSASRTKVWKGYYEEQRARGFSTTQALVMLARKLARVVFALLKGQSEYQPKAS

SEQ ID NO: 146911 - protein, 337 aa, unidentified
MGQLYVGLDYHKAFIQVCVVKGDGDVLGNRRCANDWRAVVECVQPLGIVHRCSIESCSGAANLAEQLVVLAGWSVDLAHPGYVSRMKMSPDKSDFSDARMLADLTRVGYLPKVWLAPEVIRELRRLVRYRQQLAQERGDAKLRLRALLREHRIIEPSGKPWTKRWLVWLAMCDGLGEQSQWLRDQYLLCLQRSEEDIRTVERRLALVTKDDAQVNRLLEQPGIGPVTAWTIRAEIGRFDRFNNGKQLARFCGLSPRNASSGQRQADAGLIKAGNAMLRATLIEAAWRLIRCDERWRTLALSMKARGKPACVIAAAIANRWVRSLYYEMRTLGQATAA

SEQ ID NO: 146912 - protein, 356 aa, unidentified
METAYDGRQVVGMDLHRRRSVLVRMAEDGRRLATARIANSPAELRREIARAGKSPKVVLEATYGWYWAADTLAAAGAEVHLAHPLGVKAFSYRRVKNDEKDAADLADLLRMGRLPEAWIAPAQIRELRELTRYRQKLVGLRTSCKDQVHGVLAKLGIPVTSSDIFGVAGSAWLDQLRLPQPYAGKITSLRQLAGELSTEIAMISGVIGDLLAGDRGYQVIRQLPGIGPVLAAVIIAEIGDVTRFRRADQLCSWAGLTPRHRESDVKVTRGHATKQGSRMLRWALIEAIQHQPAGSRPRAAKDAIIARRGKQARNIAKVAAARQLLTLVFYGLRDGQIRALAPRSAPPAATSAEPAA

SEQ ID NO: 146913 - protein, 354 aa, unidentified
MIIIGADYHPAFQQIAFVDTETGELQERRLEQPEGAEKFYRELAAQGKRVRVGMEASGHARWFERLLAELNIELWIGDAAEIRRKRERKQKTDRQDAQHILRLLLKDDFPRIWVPSWENRDLRQLLWHRHRMVQARTRMMNQLQAVALNEGLRCKKKLWREAGRKQLEAFRLAPWASRRRHDLLELLDRLNPTIAALSQAIEQEVEKCPEAQRLMTHPGVGPLTALAFVLIIERADRFQCGKQIASYLGLVPLEDSSGNRRRLGHITKQGNSLLRFLLVEAAQVTVRSLPEWRSKYVHLTMRRGRKIAKVAMARKLAVRLYWMMRKGWDYEQVKKFGSHPGQPGHRDGVKSNIE

SEQ ID NO: 146914 - protein, 454 aa, unidentified
MEKNKGQRKQKIIELDALEQINLNAAGLDIGAEEIYTAVPKGCAEESVRSFPAFTADLHRLADWLEACEIETVAMESTGPYWIPIYEILESRGFEVYLVNARHIKNVSGRKTDVLDCQWIQQLHTYGLLNPSFRPPEQICAIRSLVRHRDMLTRYRSSHIQHMQKELNLMNLKLSNVLSDITGVTGMKIIRAIVTGEHNPEVLAKFRDSRCAHSETEIVKSLEGHYKREHLFALKQALELYDFYDQQLKACDTELEALYAEFEPPEDPGTDPPKPNRRKRRKNQPDFDLSQSLYCMTGVDLTQVDGLDAMSVQVILSETGTDMSHWRTVKHFASWLRLSPNNKVTGGKVRRRSTQPTKNRASTTFRVAAQSLARSDSALGAFYRRIRAKHGAPKAITATAHKLARIVYFMLKNRESYCDPGAYYYEVQHQDRVIRNLRRKATKLGFCLEPIGTT

SEQ ID NO: 146915 - protein, 359 aa, unidentified
MFAVTNAIPMDVIIGVDTHKDVHAAAAISGAGVHLATTTVPVSSKGYGELEAWAKSMGAVQAFGIEGTGSYGAGLSRFLRERGHTVVEVNRPNRQLRYQQGKSGAVDAESAARAVLAGQAVGQPKSGTGAVEMIRHLKIARDTAVKARTQAMQTLKAIIVCSPDALREQLDQISGKMTLLRRLVALRPGPLTSTLASAKASLRAIARRWLVLDAEIKQHDAHLETLTATRAPELMEAHGIASGTAAEMLLLVGDNPERIHSEAAFAKLCGACPIPASSGKTIRHRLNRGGNRQANAALYRVVIIRMRGHQPTLDYVRRRTAEGKSKSEIIRCLKRYVAREIFGYLCTKPALADAAATSS

SEQ ID NO: 146916 - protein, 461 aa, unidentified
MSANKPKGKRNGSVRKKVDWKALEIVHPDAAGMDVGGSEHWVAISPDRDPEPVRCFGCFTADLRKMAQWLVEKGVHSVAMQSTGVYGMPVLEILEQHGLEVYLVNAQHTKHVPGRKSDIEECQWLLKLHSFGLLNNSFQPTDEIRIARTLWRQRGNLVAEASSTIQRMQKVLTEMNIQLSNVLSDLTGVSGMKIIQAILDGERDPWTLAGCVEPGVRATRDEIVKSLEGNWREELLFILRQHVELYRIYQEKITDCDLQLRKHLESLGSKLDLKAQPLGPRPKGKHKSRNAPFFDLRTELYRITGIDWAQINGIDVLTAQTVIAEAGADLSAFPSEKQFASWLGLCPTNEQSGGKILKRRTRKVVNRATVAFRNAASTLLRSQSYLGAQYRRLRTRLGAPKAITTMARKLACLFYRLIKHGQQYADKGTAYYEARYREQQIRSLTKRAQKLGLQLVTPQTA

SEQ ID NO: 146917 - protein, 365 aa, unidentified
MTTRQRSTSSSTDPPVRREVVLGVDTHGEVHVAAVVSPLGKILGTESFPATVAGYRRLLVWARKRGTVRRAGVEGTGTFGAGLSRYLLAQQVEVYEVNRPDRSARRLLGKSDPLDAQAAARAVLSGRARARAKSGDGPVHSARIFKLAKDSVVKARTQAINQLKAVLVIADPALRERLSGLGNRELFRTCARLGPGAGEDGENAVAQATHTTLRMLAERIEQLTGQINELNQRLTQLVEHHAPQLLVPVGIGPDSAVTLLITMGDNPERLNTEASFAALCGVSPVEYSSGRRSTRRLNYGGDRQANAALHRIVFTRLRHDPRTQAYYERRTQEGKTRREIIRCLKRYAAREVFNLVRTVSSVPPL

SEQ ID NO: 146918 - protein, 388 aa, unidentified
MEARTVNNPPSAASHDETVRCVLAIELSKKSWIVAVNTPLSDKVSRHTLEACDWKGLLELIARIRTRVMALNRPVEVVSCYEAGYDGFWLHRLLEAHGVCNYVIDPASVQVDRRARRVKTDKVDVGRLLRSLLAYLRGEPKVWSVVRAPSIAEEDDRRLHRERDRLINERVQHVNRIKGLCAVHGIYDYEPLRPNRLARLEQLRAADSQELPPRVKAEIVRELQRLELVLNMIKTIEAERDAIVSAGKSSMHANAKKIQDLIRLKSIGPEIGTALVGEVFYRQFNNRQQLGSYVGLTPSHFQSGPMSRDQGISKAGNPRARTVMIELAWLWLRHQPNSPLSIWFRERVGTAKGRIRRIAIVAMARKLLITLWRYLETGVAPTATVLKG

SEQ ID NO: 146919 - protein, 328 aa, unidentified
MTAPLVFDNIFIGIDVGGASFEAAWHRGGFARHENRPDAIAAFVSHLRTQRGIVRIAIEPTGGYERPLVKALRRAGLPVEIVHTSRFKAYRALVGANAKSDSSDARLLAAYAASPDEVRGRKYPRIALAEDADREELAALAARRHQLKRMIHAETCRLATTDSETVRRGIIAMLDVLNQQERETHAAMVKIVRRRDDLNRAKRLLQTIGGIGEKTALVCLAMLPELGHIHNKCAAALVGVAPFIYQSGTVKAPARIYGGRSPVRDIFYMAALAASQHNPVLKPFYDHLIAEGKPKKVALVAVMRRLVVFANAVLRSDQPWKGANALDT

SEQ ID NO: 146920 - protein, 417 aa, unidentified
MAFKIFRKNCCGLDVHKTWIYACIGITDTNGRTEYHQSRFSSFTNGLRDLAKWLDKYACREVCMESTGKYWIPVFNILEQSCMVTLAHPKYTKPQKGNKTDRKDAKWICDLFMCDMVKPSFIPPPDIRQLRDLMRFRMKLTYQVTGMKNRALNCLTVSNLKLDDVFSDVFGKSSRSIIQQILDRPGETFDVAPFVDKRCKHPIEEIQAAVDGAVSREQAAKLKICLDFIDEQQKRIKEIEAEIFRLAEPYSYALELIRTTPGLNKDPLTAIRILSEIGADMSAFPTSKHLVSWAGCCPRNDKSAKNIKGTRISRAGSYLKPVLVQIANALLKSKDHPEFRERYRRIKARRGHKKAIVAICRMLLTSIWNILSKLEPYTAKGYLADKVKEHSVVITKAQGLELLRKRGYIFKEELADA

SEQ ID NO: 146921 - protein, 399 aa, unidentified
MNAVGIDVSKGKSMVTILRPFGEIVSSPFEIKHTSSDIHSLIKLIHSIEGESRVVMEHTGRYYEALAHQLSAADLFVSAVNPKLVKDFNNDSLRKIKSDKADSVKIARYALDKWQSLEPYSITDELRAQLKVMNRQFHFYVKQKTAMKNNLIGLIDQTYPNANTYFNSPTRSDGSQKWVDFVSTYWHVDCIRKMSLNAFVEHYQNWCKRKKYAFNKSKAEEIYTKTKELVPVFPKNEITKHIIRQAIDQLNSTSVTVETIRTLMNETASKLPEYSIVMQFKGIGPQLMAEIGDITRFTHKGALTAFAGVDPGVNESGSYAQKSVPTSKRGSSNLRKTLFQVMDVLIKTMPQDDPVYQFMDRKRTQGKPYYVYMTAGANKFLRIYYGRVKEYLSVFPDPS

SEQ ID NO: 146922 - protein, 354 aa, unidentified
MIEKLSSVIAVIGIDIGKNSFHVVGLDGRGAIVLRQKWSRGQVETRLSNMPACLIGMEACVGAHHLSRRLKLLGHDARLMPAKYVRPYSKGQKNDFRDAEAIAEAVQRPTMKFVATKTADQLDLQALHRVRERLVSQRTGIINQIRAFLLERGIAVRQGIRFLRAGLPGILATPPDVLSPRMARVIEELADDWRRLDERIEGLSSEIEALARQDSGCERLMSVPGIGPIISSAMVAAIGTGEAFCKGRDFAAWLGLVPRQISTGDRTILGKISKRGNRYLRVLFVQAAWVVLIKPKSWERYGLKAWIEAARKRLHRNVLAIALANKLARIAWSVLAWGRNFEARKTDDAAAQSV

SEQ ID NO: 146923 - protein, 414 aa, unidentified
MSYKIAGIDVHKKVLMVVVMDASTPEAKPERRRFTTMPSDLRRLLLWLREQGVEEVVMESTAQYWRSVWLELEPYMRLQLAQAFSNRAPRGRKHDFKDAERLVRRLIADELILSFVPQGEQRTWRNLTRMKLQLTRDQVRLQSQMECLLEEMRIKLSVVVSDLLGASGLRILRALAQGETDPKKLALLGDDRLKCTEEQLIDALTGRPQPMHREMLALQLERLQLMDEQIAKLNGLIAQAMKPHQDAVIRLAEVPGLGVDSAQQVIAEVGVKASTFPSAAEFTSWVGTCPGKDESAEENHSSHSAKGNKYLRRVLNQAAHAAVKKNGSHFQTVFRRLLPRLGYQSAIWAIAHRLCRVVWKILHEGVRFIEQGTEPGPKAKKQRARMLARALRKLGYDVAITPMNPATAENGMQI

SEQ ID NO: 146924 - protein, 339 aa, unidentified
MGYIGVDLHTNKFTAAYRTSDEVKWVGTFNLDLVGISKFREKISRRDSIAVETTGNTRYFVEQISDAVKEVVIVNTRQFEVIKRSTKKTDENDSKTLAFFLSKGLLPRARMKDKEQSQLSSLINTRDKLVQLRTVLKNKIHNILTSYGIKLKKESLSSNKGLESVFCYGLDPLVTFELEIIVGQIKSLNESISKLENQIKEHGKELKGYKNLTSIKGIGGLSASILLTVIGDVNDFSDGDKLASYFGIVPRISSSNETTHHGRITRQGDKLGRTTLVQCTLIAKRYSPYLQSYYERIKSRRGSGKAIIATARKLLLIIYRTLKNDWIFEDFTNFVLANK

SEQ ID NO: 146925 - protein, 450 aa, unidentified
MAKKKRKYRKLERSLPVMRPNAGGIDIGATEIFVAVPADRDTESVRSFPTFTQDLHALADWLQQCRVDRVAMESTGVYWIPLFQILEARGIEVHLVNAQHVHHVPGRKSDVLDCQWLQYLHSVGLLRASFRPEHAVCEIRSLMRHRENLVQMACVHVQHMQKSLDQMNLQIHHVISDITGITGLAIVDAIVAGITEPKELAKLRDYRIKASIETVKKSLVGDYRPEHIFTLKQSVTAYRQYQQLISDCDQEIQQRVQTFQTKDDRPSATADASGATTPSQSSFDLGTHLERIFGVDLTLIPGFDTLRVQTIFSELGADLSSKFPSDDSFCSWLNLCPKDGTSAGRRIPGPKLKIKNRVTQAFRMAAQCLHNNKSFLGDYYRSQRARFGALKAIKNTAHKLARIFFHLVTTRKPYDETVFAELEARNQKRRLHNLQMRARQMGYTLVEAHA

SEQ ID NO: 146926 - protein, 392 aa, unidentified
MVVSVGIDVSKDKHDCFIVNSESEVLADVFIIPNNMDGFHYLLQRIQDCTNTQDKIKVGLEATGHYSYNLLGFLLDNGLSTYVLNPLRTNLYRKSLSLRKTKTDRVDARTIASMLLSDAGLKPYTDTAYHNEELKSLTRYRFDKVKARSKLKSSISRLVCILFPELEKLVPSLHLASVYALLEEFPGAKQVAGAHLTRLKTLLETVSNGRYKRDMALEIRNAARNSIGSRMPAKSLELQHTIRLIRELNAEITEIEEQIQSIMAELHSPITTIPGLGFRMAAMILAEVGDFTRFDSPDKLLAYAGMSPSTYQSGQLKNCYPHMEKRGSRYLRYALYNAAKYVCHWDSSFASYLARKRAEGKHYNVALSHAAKKLVRLIFAMERSQKPYFPTS

SEQ ID NO: 146927 - protein, 460 aa, unidentified
MSLKGLVSQNNQEDVVVQGSGLSRGDKRRNGQLARLRELVPVDNAILGIDLADTKQAVVVTDHDSRVLARGRVKAKAWELGPVLDWARQVAHARGFTDVTVGCEPTGHRWRVLDQLAAQQNMALVCVQPLLVGQARQREDYTSDKRDDKDAVLIARLVSQLNCYAPERAEETWAQLRQLGARREELITQATRCVQQLRDLLECAWPAVLDAAASPFDSTNWCAALAVVLERCDGDPRRLARRGRDRFSGAVRRELPRWGGQRLWRPIVGAVFSALSDPAGVLAQRRGALQRARWVLDDWRLVKIRRAEVETHMVTLLDELGLTELVTSIPGVSAVGAAAILAETGDPTRFDSPRATVKHAGLCPRENTSGTYTGRSRISGRGRPRLRAAAWRAVWGALPTNPVMATRYRHLTTRKANPLKDGQARAALAAALLRWIHVIVTQHVTWDAALAGAGALAAAA

SEQ ID NO: 146928 - protein, 450 aa, unidentified
MSPLALDVVTKTDKTPVLGRMLSKYVGRKTSSIENGITKARNHSRQRGNIMRVVFGIDVSKASSEVAILVNGEKVHGYTIPNDAIGFNRLLGDLKTVHQPEIVFEATGVYSRRLQAFFEDNSYTYTRLNPLESKKQLDSLRVRKTDKIDAEKLAMSQFILNRKPSYVQEALYQELRDLSRFYQNLTEDIVCAKNRLHKVLQITFPELENILSAPTGEQYWNLVITFPCNSFVLESDDATLTAIIRQSTAKRISEKRVTYLVDKLTKLANQSYCAVKKTSPVIEEVKYYAGELLRLSEHRQGVVEEMVTLAQSLPEYEILLSIPGIAETTATSIIGELGDIRRFHSANQINAFIGIDLRHYEFGNFLAKEHITKRGNPYARKILFKCIHNIASASHTNPCHIADFYEKRKRQSQVTSTKPHTIASIHRLIRTMYYLITHNKLYDYTSIQNR

SEQ ID NO: 146929 - protein, 319 aa, unidentified
MEQNNYEVYIGIDVSKAKLDIKYDDSDSLLTIDNKPGDFKQLNRCFPKDKKSVLVILEATGGYETKVVKWLLSRNIPVVVANAKRVRDYAKATGQFAKNDKLDAGIIREFGMKVGHKLYLQQKKNRVEEQIDDLTHRRKQMISVRNKEKQHLAMIQNIEGQRSIKRAIKFYNSEIDNIEKKLAATLKQDKQLQAKAELLQTIKGVGDVTTYTMLGELPELGHVSNKQISALAGVAPFCRDSGTMKGKRTIWGGRAQVRTALYMAALSASKYNPAIKVFYDRLIAKGKCKKLALVACMRKLVIVMNTMVKNNEPWHAEML

SEQ ID NO: 146930 - protein, 340 aa, unidentified
MNALYAGCDLHGNNNLIGIIDGEGKRVFKKKLANDLALVRDTLKPFQEKLVGIVVESTYNWYWMVDGLMEKGYQVHLANPSAIQQYSGLKHSDDTHDAFWLAEMLRLGILPEGYIYPKEERPVRDLLRKRGHLVRLRTSLIISLQNILSRNLGRRVNVNDVKALKEDRISPLLEMNEDLALAGRVSKEAIDHLTGQIRKIEGVVEKKIKLKKEYRYLLTLYGVGKILSLTIMLETGPISRFETVGDYVSYCRKVPSQWTSNGKRKGSGNSKNGNKYLAWAYSEASEYARQLYPEPRAYYNRKMQKTNAAVAHSALANKLSRAGYYVMRDQVPFQPEKLFG

SEQ ID NO: 146931 - protein, 351 aa, unidentified
MCLESLTHLLAVKNNIMQNYQHFVGIDVSKDTLDYAVVCDGIQAFYLQTENTIIGIKTFIKALKKIGVLNFKDVVFCMEHTGIYCHHLVSYLTSSQYDLWLESPVQIKKSLGIQRGKNDKVDAKRIAMYAFKNRDAVSLWQPPRKEILKLKHLSSVRNRIIKTIGILSKIFIEKSFYDTELIQMTKTNTRASLKALKEDLERTNNAINEIIKNDEQLNHLFNLVSSVDGIGAVSATQIIIATNEFKTITTGKKFACYCGVVPFEHQSGSSVRGKSRVSKMANMNLKKCLHMAALSAMHYSVEMQDFFNRKVAEGKNKMSVINAVRNKLILRVFACVRDNRPYSKDYVYLAR

SEQ ID NO: 146932 - protein, 440 aa, unidentified
MHGLHKFLPEGGELTKNEDVLNTLYVGIDVGSQTNAVYATDFCGEKTFKCTMDNNHPGAAMIAEKIAAFMKDKHLSGLVIAMESTSVYSTHIASFLSTADILITYNPKVYCLNPKITNAYKKTFIAEGKSDPGDAFSIADLARAKKIKSEPWRGSQHLAIQRLTRHRLHLVEAIAREKNYMLSNIYLKFSELAVIDDDRQPFSDRYGATASAVLTEFLSTEDIASMPLPDLTVFVNQKGRGRFADPEATARLLQQAAQNSYRLDKCACEPITLSLASSFNCLRAFEKEVKAVDKAIFQTIKGFNTNEYQCFTSIPGIGPVYAAGVLSEIGTISAFKSHESLAKYAGIIWPPNESGKFKADDKRLSKQGNAYLRYYLMEAANSVKNHLPDYKDFYNKKYAEATTHKHKRALALTSRKLIRLIFGLLDKNQLYTPTEGVNTT

SEQ ID NO: 146933 - protein, 405 aa, unidentified
MKVVYQRCAGIDVHKKTVVVCIDVPGNREVRTFATTTRPLLELLAWLEKQKIEIVAMESTGVYWKPVWNILEGSECQLMLVNAQHIKQVPGRKTDVKDAEWITELLRHGLLTASNVPNRDRRELQELVRLRRSLTEERARITNRIQKVLEGANIKLASVVTDITGKTGMSIIRELVRGKANPTQMADLAVGKLVKKKEQLAESLEGSMNEHQRFMLKVLTDGMQTMDVQISQIDSEVEQRMRPFESSIQLLDAVPGIGRQGAEDILAVIGTDMTKYPTANHLSSWLKVCPGNSQSAGKKVRSKHQGTPWGKSLMVQLAWPAVRKRGSYFEALFKRLKARRGAKRAIVAVAHAMVVTIYHMLSKGTPYEDLGADHHDKLNKEKLIKRLSHRLGRLGYDVALTPTAA

SEQ ID NO: 146934 - protein, 349 aa, unidentified
MTMLADTTDAVIGVDTHTDTHTACMLDRLGRQIATVTITADPDGCRMLLAWAVRHAPGPQLAWAVEGTRSHGLGLARMLQARGHVVVEADRPARVSKRPGGKSDAADALRAARDALAADKLAQPRSDGPREALRILLTARAQASTARTAAVNTLKALLLGAPDDLRQALRGLSTPRQASKCRSLRVRASQPVAEQILRTELRRLATHIGTWDRELRANEAQLRQLVAQVMPALLGQSGVGPMSAAQLLVSWSHPGRCRSEAAFAALAGVSPLAASSGKITRHRLNRFGDRQLNRSLHVIVNWRILHHHGPTQAYLARRAGHKTEREIRRCLKRYAARSLFRLMETAAKT

SEQ ID NO: 146935 - protein, 356 aa, unidentified
MISRGYLHVPGIVVGVDTHKDEHVAVVIDKLGVRIGQHNLPTTNTGYVGSEHWASSLGEIDAFGVEGTGSYGAGLARFLRGQGYKVVEVNRPDRSTRRRLGKSDPTDAEMAARAVLAGVARDRPKSGVDKVEMIRMIKSTKDSAMKGRTQAINQMKAIIVTAPGELRAVLRGLTTNQLVARCARWCHGQLGTPTAAAKYALRSLARRHIQLTREIEALDTQLARLTAAFAPALIESFGIGPDTAAAILVTAGSNPERLKSEAAFAALCGVSPIPASSGKTNRHRLNRGGDRKANAALYRIVIVRLRYHDRTRTYFQRRIEEGKTKTEVIRCLKRYVAREVFGILHDIGKRSTAYNA

SEQ ID NO: 146936 - protein, 392 aa, unidentified
MFFLGIDIGKNTHVASLIDDNGKTVFKAFSFPNSTIGATSLLDKLTPFSNEIEIGMEATGHYWLALYSFLVEHGFVIHVINPIQTDGWRNATEIRKHKTDIIDSLIIADFIRYGEFLETSLANEDILSLRNLTRFRNYLVSSIGDLKRKTICILDQIFPEYESVFSNIFGKTSKEILLHFSSPAQFESITSEQLETALEQVSFKKFASKKISCISNIAKTSFGITFGLQSLTLQLKLLIQQINFIEQQVHDVEIQIKQLLHKINTPITTIPGIGDIIGATILGEIGDIERFSNPSKLVAYAGIDASVHQSGDYISTNNKMSKRGSPYLRTALFRAALIASVHDPVFKAYYQKKRSEGKHHLTCLGAVARKLCYTIHAILKNNCEYKVQLPTE

SEQ ID NO: 146937 - protein, 328 aa, unidentified
MQKDLLYCAIDVSKDKLDLDAAALALPAQLGNDHASFRQLIKAAKKYPGPVQFVFEATGPYHLGLALALWEAQIPLSVLNPARVRYYAKAQGKAKTDPLDKQVIGDFARSFRPPPTPAPDPVRRELTELLQRRDGLISTRAAEQNRLGQCRHKIIKGQIRRLMAQLAEQIGQIDGLMKKLVNSSQELKAKVKALCQVKGVGHLTAVTLLITLPELGTLGRNRIVRLVGLAPLNDDSGTQKNKRYIQGGRARPRCALYMPALSASRHNPVLKEVYERLLKAGKLKKVALTALMRKLLICLNALLRKLADQHPSPRTLPCKALVTQPLNA

SEQ ID NO: 146938 - protein, 339 aa, unidentified
MKLYTGFDLHSSSSYLGIIDENGKRIWKKKLRNDPILISKTLRRFKKDIDGIVVESTYNWYWAVDLMIEEGYHVHLANPSRIQQYSGLKHADDEHDAFWLAEMLRLKILPEGYIYPKDQRPLRDLLRKRGHLVRLRTSLITSLQNILARNVGSKMNTNSMKALTEDRVTPLLAGNDDLSLAGKVSKDAIDSLSRQIIAIEKAVEKKLPLKKPFDLLMSMPGVGKILAMTIIMETGSLDRFPKVGNYVSYCRKVPAARFSNEKKKGSGNRKNGNKYLSWAYAEAAELARRFDPEARAYYDRKRRRTNAPIAYNALANKLSRAAYYIMRDGVLFMPERMFT

SEQ ID NO: 146939 - protein, 397 aa, unidentified
MYIVGIDIAKRKHEAAVIDGEGTVIIKPFSFTNNCSGYNRLLAMLAKAKLPLDEVSFAMEATGHYWLALFTRLQKEGFRVQVINPVQTNSIRSFYIRQAKTDPRDALLIAEVIRFGHFSESTLHPENIYELRELCRGRHAIVSMQADVKRKVVALLDQVFPEYETAFTNLFGDTSMAILQTCPTPKELSEMPLEELCHLIEVSSHKRFRMAKAQELQALARNSFGFAMAGDVFSTMIRLYAKHLDFLKQQVREMDRKIAEIMETLDTPITTITGIGPTLGAYILSEIGDISRFSSAAKLAAYAGIDPTMRQSGEYNGVRNRMSKRGSPYLRHAIWLAASSAVLHDPALKLYFQKKRDEGKPYMASVGHACRKMVSIIYAVMRDNKAYTPYIPNEISA

SEQ ID NO: 146940 - protein, 331 aa, unidentified
MDHFAGLDVSVKDTSVCIVDDTGKITREVKVASEPDALLAVLRNPAYHFKRIGLEAGPLSQWLFSALAEADLPVICVETRHMRAVLKAQINKTDRNDARGIAQMIRVGLYRPVHVKTLRSQKLRMLLTHRQLLQSKAIAVDNDLRGTLRNFGLKVGMVVAARFEARIRELVERLPDLAVLVEPLLVVRRVLREQIAVLHRRLLAVVRDDEVCRRLMTAPGVGPVVALTYRATVDVPARFRKSKSVGAVLGLTCSRDQSGERDRAGAISRSAFRSFFRARRTFGTCSRIGLEGILQRIIGIDLLRGLLSLRLFGQFHGEHALLEARGGTKSA

SEQ ID NO: 146941 - protein, 337 aa, unidentified
METERIESMETEQYEHYIGLDWAQMNMAAAVLSKGFKKVRYLEDVPNIEKLKKFIKSFSGTKMLVIEETTSTQWLFIALIDCVDKLVVCDPYRNRLMTHGAKTDRIDSLKLAQLGLRGDMNIVYHSTAGIMNLRKLVSAYEDVVRAIVRAKNQMSAVYRGECKSYQKKDALYYEENIFVESKKKKEIEFLEEQKKDYEKKFKVYMKKTSIRNLMTIPGIGLINAVKIACTIIDPRRFKDKSKLFGYCGLAKHIKISGGRSYGKKNTRYSRIMKCVFKTAAMAAINADKNEFKTYYESMVSAGVHEHSARNAVARKIAVIAMAIMKKGQKYIEKQIAA

SEQ ID NO: 146942 - protein, 352 aa, unidentified
MQHFIGCDVHTRNQVVAWIEEETGEIKKRRLEHEGKEVKEFYAQFPRGTVVGIEATFPAYWFERLLGELGHELWVGDAARIRASEVRYQKTDCRDAELLLDLLRTGRFPRIWVPTLEERDLRQLLVHRMKQVRARTQVKNQLHALAISQGVCRKGKLWSAQGRKELESLALWPWAARRWKELLEWLDRLDEQVRELDRAVEEAGRARPEVALLRTHPGVGMVVSLAFVLTVGAVERFPNSRKLVSYWGLNPRENSSGGRQRLGSISKQGNTMMRWLLVEAAQTAARLDPQLRRTYQRLKKQKTSGVAKVAVARRLAVRLFWMLRTRHNYTQLVHMSGSPSSVVVPPPAEPMV

SEQ ID NO: 146943 - protein, 475 aa, unidentified
MQILVSRACGIDVHKDMLAVCVLIYREGKEPEARYKEFATHQKALTALRNWLSSQKVTHVAMESTGVYWKPVWYALENHFQLLLANPFQVKALPGKKTDKRDSHWLAELLAHGLIAGSFVPPEQTRALRDLTRYRVKLSEEMNRIHNRIHKVLEDASIKLDTVVSHILGGTGRSIIEGIIEGKEAPRQLAERAQGSLRGKRAQLELALHGRVSEHHRFMLKELMEDFQFVEAKILRLDKTLSGSVDWEVGTRLCTIPGVDVITAWTLLAELGSDMRVFANSKKAASWAGLCPGNKESGGKRLSGRTRKGNRWLRRGLCQAAWGASRKKDCFLNAFFQRHKAKHGAQKAIIATAHRMLVIAYCILRDGTTYQERGGDFYDQLNAARTRQRLVERLRRLGVQVTISSPAPAPTSEALESAPPAPALALSPANPPPASLPTIKRKRGRPCKCAERQIPCTHRLLLAQTPVATTPVATQ

SEQ ID NO: 146944 - protein, 327 aa, unidentified
MWAGIDVGAFKHAVSVKDDIRLFDAHRVDDIIDYLSEHDIQSVVLEPTGIYHLPLARSLLDAGFKVFMIHSTRFGRFRAGFGKKKGDEEDAKLLRKYAETGEGFLYEIDDEWIDAKTLGLFVQEHMRTTKSLTSEMNRLRRDIYLVDPALAFMTPSSYKYEYLKNVDFGDFTQYILSRVKAVEELREKKKKLEKQIKDMVKAHPDGEILTSIPGISYITAGLLISTYVNVERYKDVKHFKSMLGFGLNVKDSGSSVHVVKSSKAHIPIRAALFRVVISNVRRGNKISEYYEKYKQRMPFKKAVMRTAAKLIEWIYYMLKRREMWKDE

SEQ ID NO: 146945 - protein, 340 aa, unidentified
MKLYAAIDLHSTNNVTVVIDEQDRVVYQKRLPNDLALILKELSVYQSELEGIVVESTYNWYWLVDGLMEQGYKLHLANTAAIQQYEGLKYTDDHSDARWLAHMLRLGVLPEGHIYPRADRPVRDLLRKRSQLVRQRTTNLLSIQNLLTRNTGSSMKANRVKGLDVQQVDELLPNGDLALAVKANLSVMSSADEQVQLLEQTVTQRVKLSPQFSFLKTVPGIGQILALTIMLETGDIGRFATVGNYASYCRCVGSQKISNGKKKGQGNTKNGNKYLAWAFVEAANFAIRFNSRIKSFYQRKKAKTKGVVAIKAVAHKLCRACYYIMRDRVGFDLIKAFGQK

SEQ ID NO: 146946 - protein, 337 aa, unidentified
MEAGDSQVLLTLIADLRKKVAAKLGVEASVMSCFEAGRDGFWLHRLLSEHGVINHVVEPTSILVNRRARRAKTDRLDAQGLLRILAAHAKGDHDVCSVVRVPTIEEEDAKRQHREREHLVQERVRIENRIAALLTTQGIRKRPSLRSWEKDMEEMRTGDGRPIPSLLRAEVNRLRRRLVMTLEMIRELEAEREQALQTQDDMASRMIRALCRIRGIGDNFAAVLTREVFYRPFQNRRQIASYLGLTPTPFQSGGMDRDRRISRAGNARARKTLIQLAWLWLRYQPDSSLACWFRERVGNLQGRTRRIAIVAMARKLLIAIWRYATHGIVPEGAQISI

SEQ ID NO: 146947 - protein, 328 aa, unidentified
MEVIGIDVSKVTLDVCFHSLNTFEVVDNTTKGFSKLISWVKKQTNIPMDQILFCFEHTGLYSSILARYLAAKQINFAIVPGLEVKRSLGIQRGKNDKVDAGKIALYAYRRRHEIQTYQIPESSLYKLKQLLSLREKLVKQRAGYKATLKEQSSFLKKSENELLFSIPCRLIKELDKQIDKIESEMDVILEENQKLKNMYELIISITGVGRQTALHVLVITNGFLLFDNPRKLASYAGIAPFPYRSGTSIRGRTKVSNLANKKLKALLSSCASAAVQHDPELKLYYKRKIDQGKSKMQVKNAVRNKIVHRIFAVVKRGTPYVSTHDFAA

SEQ ID NO: 146948 - protein, 350 aa, unidentified
MRIESKQLLPAWNGIDVAKETFDSALYMPVEPGQSPRDIMSIPKKTFARTLEGVKEFHDWSFQVRDKAGLEGGNMRIVMEATGRYSKELAGWLNAEMPFTRPVIEDPRAVKDFIKSLKLRNKTDRIDAGALARYGAERMPEPSEDMPEEYQYLREFTRQREALKDQLTAARARLTEMGEFKKMIKIQQAVIKSMEQAVAKMELEIKRCINDSEELRKSLKYAVTVPGVALIVSATVLGECGPLYRHTSRQLGSYSGIAPQIRQSGTSVCGSKISKRGSGNLRRVLYMASIAAIDHNPEMKMFYNRLIAKVKKPLQARCAVMRKLLILIRAVVVNETEYDKNFAKKSILKT

SEQ ID NO: 146949 - protein, 351 aa, unidentified
MPDLNQQVDLGEIIVGVDTHKDTHVAVAIDPLGRRLAQQAVSTTPAGLLTLLAWSRQMSTTRTWGIEGTGSYGAGLTRLLTLSGELVHEVSRPNRRLRRERGKSDPIDAEAAARSVLAEHSLAAPKADDGASESLRQLRATRRSAVKARTQASNLLQALLITAPSDLRAGLDSARVKDTIRTCSRLRPTATHSPREACKTSLRSVACRWQHLNAEIAELDTAIGAITAAAAPQLLDRFGVGPDVAAALLITVGDNPDRMRSESSFAALCGVSPIPASSGKTHRHRLNRGGDRQANAALHHVALTRLRSDTRTKDYAAKRTAEGLSRRDIRRCLKRYIARELYAVILAAQAS

SEQ ID NO: 146950 - protein, 401 aa, unidentified
MPDGIRWVGLDVHARESTVAIFDQATGEVLTRRVVGRPHELLSVLLEIERPARMVYEAGPTGYGLARRARAAGVELGVCAPGKTERPPADRVKTDKRDAIRLARLLAAGELTLVTIPSVERERLRDLVRCREDIRIDLQRARHRLGNFLLRREIYWEGGETWTRKHRSWLTSIRFADHASQATLADYLHAHDVLIARRDQVEADLAKLAVSAPCAQAVARLRCLRGIDTLSALGLCAEIGEWDRFDHPDQLAAYVGIVPSEYTTGSQRRLGSITKAGSTHARRLLIEAAYHYRRSPVVGQALERRQRGLAPEIIHISWRAQRRLNARWRQLKDARRKPNGIVAVAIARELAGYCWEITTWAGPHPDPVPPASLPAGDPLTQTAPLPPKHSPTTRRRLTNSR

SEQ ID NO: 146951 - protein, 346 aa, unidentified
MIVIGIDPHMKSHAAVALDAASGRSLGHITVGSDKAGCEALVTWARGLGAERLIAIEDCRHVSGRLERGLLPHGERLVRVPPKLMAKARASARTPGKSDPIDAECVARAALREPQLPEAHLAGPEADVRLLTDHRGDLVGERKRLQNRLRWHLHDLGFDLALPARALDRYVWLDRVEASLAAMPASMRVRIALEQVRRCRELTREVRALEREIAALVRALAPELLALPGCSALSAAQLLGQVAGAGRFRSEAAFAMHVGAAPLLASSGKTARHRLNRRGNRRLNSVLHIIAVTQARMHPPAKAFVARKRAEGMSMREALRCLKRHIARTVFRTMRRAEQARPAVCC

SEQ ID NO: 146952 - protein, 335 aa, unidentified
MSLRPYLTRRGLVQKGGMIMDGDKVFIGVDISKDSLDMVAYPTGQIWQYKNSKGGIAKAIAKLRGLELKLIVMEATGGLEKPLCEALFQAGLPAAIVNPRRIRDFGRSMGILAKTDKLDAKVMAYFAAKIEPAPRPVQDEASQKLENLLTRRSQISDMIVAEKHRLKQGSDRLLQKHIQGHVKWLDSELKDLEKELKDSIQQNPKFAEKVKLYKSMPGVGDNLSYNLVANLGELGYLNQREIAALVGVAPLNRDSGKQRGRRMIWGGRATVRKALYMPALSAIRCNPVIRDLYQRLIAKGKLKKVALVACMHKMLTILNSMAKNYTPWDYASAKY

SEQ ID NO: 146953 - protein, 309 aa, unidentified
MNKAVVYIGVDVAKASLDVAWAERSRRFANNKSGLSALTKWAKQSPFAVHLICEASGGYERGLLDAAEQNRIKVSLVQANRVRQYARAAGILAKTDKVDARVLCAFGSAMQPEPTPPLSAQQKRLRELETQRQHLSRMMVAEQNRLAQLNDKELQRLTRSLLATLKKQMTAIDMRMEGLIAEDQTLKQKAQKLTAIAGVGTRTAVLLLARMPELGTLNRTQAAALAGLAPFNRDSGTLRGKRTIFGGRRALRCGLYMAALVAARHNLILRNFYQRLRSNGKPHKVALTAVMRKLLLALNHTLKPTHCFV

SEQ ID NO: 146954 - protein, 320 aa, unidentified
MSALSVTVGIDVAKAHVDVCVLGTHSDVQRFANDVDGHSALAAALQSLDVGLVVMEATGGYEAALACALQAVGLHVAVVNPRHARDFARSMGRLAKTDAVDARMLAEMAAVLVHRVDLARYLRPVADECQQWLAALVTRRRQLLAMLGSERQRLQITNRKLHPSIEAIITVIKAQLDDLETQMVGHVREHFGELDGLLQSTNGIGPVASATLIAQLPELGRLNRREIAALVGVAPMSNDSGNRKGRRRVQGGRFEIRRVLYMATLTAARYNPVIRAFYERLKAAGKLPKVALVACMRKLLTMLNAMVRTGKPWDASLHSA

SEQ ID NO: 146955 - protein, 356 aa, unidentified
MALYCGIDLHSRDCWLAILDERLKVVQEAKIGNDLEVLLHVLEPYREDLEGVAVESTFSWYWLVDGLEEAGYRMHLTNTWAVKQCEGLKYTDDRHDARWLAHLLALGILPEGYIYPKKERAARDLLLRRAFLVRKGTSFLLAMRGAFECRTGMRISSIDLKKWKAKDVEAHMEDPAEAFSITCLLEPMHALSAQIKKIEKGALSRGRLRPEFAPLETVWGIGKILALTIMYEVGDIARFRKVGNFTSYCRLVNTARLSAGKRKGSGNPRNGNPHLSWAFSEAAHHAVRHHPEAQKFYQRKRTKTNGIIAIRALAHKLARASYHVMRDHVGFDPKKPSHEDPGRDRSQYGCWRNHEM

SEQ ID NO: 146956 - protein, 339 aa, unidentified
MNVMIGIDPHKASHTAVAIGGDEDQLSSVKVRATNRQVDQLMNWAGAFEKRTWAIESAGGLGYLLAQQLVARGEGVLDVPATLASRVRVLATNRSNKNDPNDAHSIAVAALRAPMLRGVERADHGEVLRLLAKRNTDIGSHRTRVVCRLHALLAELAPGGIAKEMNVSDADSLMAKIRPETPAQQMRFDLALELLDDVRRLDVQLKESHRRIRVAIKASGTSLIELYGVGPIIASTLIGYSGDVTRFANRDAYASYNGTAPIEFSSGGRIVHRVSTRGSRKLNHALHMAAVTQLRNPGTSGRIYFERKVAEGKTKKEALRSLKRHISNAVYRQLLLDAQ

SEQ ID NO: 146957 - protein, 324 aa, unidentified
MFVGLDLHKVYTQYAVMDDDGVLLDEGRMENDPDRLRAFSDSLSSASVVMESSSAWYWVYRILSEKHEVILSNPAKTKATAWAKVKTDRIDSVTLANLLRGGYIPESYVPPRETMELRELVRYRANLVRQRSQLKNRIHTYLLMNNVTMEGKPFTKEFIEELRKVDDYRVQGYLRLIEAVSREMEDVSKVIAEKAMGNEDAKLLMTIPGISFYSALLMASEIGDVNRFQDSSSLVSYAGLSPSTHSSGGTTYHGGITKEGSPYLRWILNQCVRVHMRAEPDGSVAAFYSRLARKKGNSKAIVAASAKLLKVACWVLRKRREYHS

SEQ ID NO: 146958 - protein, 330 aa, unidentified
MERHYIGVDLHKGFLQACTMDETGQRLWEARFPRTTEGIAAFMARWPAVPAIAVEASGPTWHFVDAVAAGGARVCVVDTRKTKIKAGYAAKTDRLDARRLADALRRESVVSIYIPPPAIRAARDMCRGRQQLVRVRTRLVQTIRALLLRHGAGDPPVTVLSSPRGLAWLATVHLPGESEEVLRRLERLLGPVQREVVDATAAVRQRAAADPLVRALTATIGIGPILGLMIRAEVGTIERFATGPALACYAGLVPRVERSADHAWHGRITRDGSPWLRWALVEAALHNVKRADQTGRWARRLAVRKGILKARVALARVLCNDIVRIWRTVA

SEQ ID NO: 146959 - protein, 329 aa, unidentified
MKRVFVGVDISKAWFDFYYRTSDDQKSLKSERLDNNPKGISALIRQLLKRFKKEDIWICFEHTGNYGLLLASMLQSEEITYSVVPAMEVKKSLGITRGKSDEIDAKRLAEYAFTFKHKIKPSELPAEELMQVKNLLSYRAQLVKMKTQLTNSLKSYQTASNVINLDFICKDLKKKIDGLDKDIKKLDQSIEMLIATDESLKKNYQLIKSVKGIGLVLAACMIVHTNNFSSFDDPRKFNCYTGLAPFQNSSGIKNGKTRTSHYRHKYLKTLLFSGANSAAIHDPQLRHYYTRKKEEGKAHQTIINAVACKLVYRAFATIKRQSPYVNLQH

SEQ ID NO: 146960 - protein, 408 aa, unidentified
MEVLYARCCGLDVHKRTVVACLLTPGLSGQPLREVRTYRTTTRELLALMDWLVANGCTHVAMESTGSYWKPVYNLLEGTLELLVVNAQHLKAVPGRKTDVRDSEWIADLLQHGLIRPSFIPSRPERELRELTRYRTTLIRERASEVNRIQKVLEGANIKLASVASSVVGVSGRAMLSAMVAGVVDAETIAEMARGKLRNKIGALKEALEGRLGPHQRFVLATQLRHVDELDKLIDEVGVEIEERLRPFEEDLARLTTIPGVGRRTAETLLSELGTDIGRFPSARHLASWAGICPGNHQSAGKSGIGRTRKGSPWLRSALVEAARAAARSRTYLGAQYHRIAARRGGNRAAVSVAHSILVIVYHMLSARRDYHDLGGNYFDERHREQVSRRLTRRLEALGYSVSLSPAA

SEQ ID NO: 146961 - protein, 409 aa, unidentified
MNLYLGIDVGKSNLAFCALDSDRQCRFQDETTNDLNGARQIKQTILAETHHQDYNQIIAGMEATSIYNFHPMTFLSTDPELKALGLTVIIINPYTSHHFSQLFDDGKTDKIDARHLADLLRVEPLGNPVMRQEKYVALQRLTRERYHLVRQLTDSKNHFLNNLYYRCNTLDQTVPTSVFGATMLTLLTDEELSLDEAAALPLAQLVDHLQQLSHGKFGDTEAVAKAIKQAVRSSYRLTKVVADSVNEILAVYAEEIRMLNKQIKSIDKTIAQVSSQVEGIQCLTSVPGIGPVYAAGIVAELGQIERFPDESHIAKYAGLAWLPHESGTSVRQKTPHTRKGNQYLRYYLVEAANSVRRYDTTYQRYYQKKYNEVPKYRHQRAVVLTARKLVRLVEVLLKNRQLYTAPPVA

SEQ ID NO: 146962 - protein, 451 aa, unidentified
MLRLRKQKPTSLETPILQPNAAGVDVGANEIYIAVPADRDAQAVRRFRTFTGDLKAAADWLKRCGIQSVAMESTSVYWIPFFQILEESGFTVFLVNARHVKNVPGRKSDVADCQWLQYLHSVGLLRASFRPEQAVCAVRSVVRHRESLVRSASAQVQHMQKALDQMNLQLHHVISDITGVTGIAIIEAILKGERDPAVLAKMRDKRIKASGETIAEALAGDYRREHLFTLRQSLQAYRQYQDLIAACDQEIEQYLKEFDAKLDPTQTPLAKPKDRHKPRRNEMKFDLRAHLYRIFGVDLTEIPGINALTAHVLFAEIGPDLSRFANASAFVSWLGLCPDNRVSGGKILSVRTRPVKNRAAIALRMSGQALHGSQSYLGNYFRRMRAKLGGPKAITAAAHKLARIVYHLLTTRQSYQESVFIQYETLNQHRTEARLRRQARALGFDLIKAST

SEQ ID NO: 146963 - protein, 402 aa, unidentified
MIFINCLGIDIGKSESVVAHYKDEVLVKEMVIQNNQNGYRYLKNYIKHLDSLFILFESTGIYSRGMKRFCEIHKIDYLEMNPLEAKFKTSSLRSWKTDKSDAHKLALLAFRMKDSKVQRQSEEIYFELRERARFHLEMEINQNRLKVELVETLHQTFPGLEKLFTNRYSKIALNIAKAFPHPDFVSTLTHDELVEKVLHSTDKGISVNKAHKYVQKLIEIKNNSFPNVDKSSFLLQKVQYLCDKLLIGIEEMKEFDQEMIDLAENTTEFENIISIPGIGELTAALLIGELGNIREFKTNKQLNAFVGIDIKRYQSGTSKSRDTINKRGNKKARRLLYLIIMNIIRGRNHYQSHIVDYYYKLREQPHGKTHKTAVIASINRLLKTIHYLIVNNKLYDYQKAPH

SEQ ID NO: 146964 - protein, 354 aa, unidentified
MSHLNSGIAAIGIDIGKNSFHVVGQDERGAIVLRQKWSRGQVEARLANLPACLVGMEACVGAHHLSRKLQALGHDARLMPAKYVRPYSKGQKNDFRDAEAIAEAVQRPTMKFVATKTAEQLDLQALHRVRERLVGQRTGIINQIRAFLLERGIAVRQGLRFLRAELPTILATRSDALSPRMLRLIEDQAGDWRRLDARIEDLSEEVEALARQDQACERLMTVPGIGPIISSAMVAAIGTGDAFSKGRDFGAWLGLVPKQISTGDRTILGSISKRGNRYLRALFVQAAWVVLVKLGKKWERYGLRSWIEAAKKRLHHNVLAIALANKLARIAWAVLHKGRAFECVKVNEMAPRSA

SEQ ID NO: 146965 - protein, 371 aa, unidentified
MKNSSMFIGLDVHKKSIEIAIAEDSRTGEVRRYGEIAGDLAALDKVVRKLVSKGGELHFVYEAGPCGYEIYRHLIAQGFDCQVVAPSKIPKKSGERIKNDRRDAQMLARLHRAGELSGVFVPAAEDEAMRDLTRSREDAKITQKKAKQRILAFLLRHGFRYNGRTPWSQAHMRWIAEIKMPHRAQQIALQEYVDALTESTCRVKRLTDQVQQLLPQWRMFEITKAYQALRGVSLIVAATTVAELGDLTRFDSPVELMSYLGLVPSEHSSGEKTKRGAITKTGNGHVRRVLVEAAWAYRLPARISRVLHKRQEGLSQEICAISWKAQLRLCARYKYMLERGKSKQVIITAIARELCAFMWAIAHEVDIPQMA

SEQ ID NO: 146966 - protein, 347 aa, unidentified
MERTLNHHWCVGVDLHKDTLTACVFCGCCGEYSFQKIPCKCRKQIGAYFAALPRPHTVAIESVGFYRWLWEMLEPIVQELVLADATQARALAGRRLKTDREDALNIAQLLDAGRLPTSYAPPLEVQWLRDLTRHRNGFSRQHARVLCRVKSIMNANNRPGPARLSSDGLIRYLKAQGEKLPTRHVAMLWQCVDQLALTERQIAEAERTIGEVIRRETFRPRYEILVSFPGVATVAAATILAEVGDFGRFADAKAIGRYAGLNPRVFASGGKQRIGHIAKTGSADLRWILQQVAWTAIRCDEHVRGIFLRIAKRSGRKAAAVAVARKLLTWMHSAVIKGESYRTRVAA

SEQ ID NO: 146967 - protein, 445 aa, unidentified
MRTVRLTLELRLPPFYSYSLKNPYTGVISFMHYKQKHVYVGLDLHKAHYTAVIIDCWNTKLDEIQIENKPSSFDDLMKTVKKHCKKGMTPVYGLEDTGGNGRALAVHLVERKQIVKEVNSALSYNERKSYATTQKSDSWDAYCIAKVLLSRLDELPDANPQDIYWTIGQLVARRNALVKHASSLKYQLHQQLSYHYPSYKKFFCDVDGKSALAIWEKYPAPHHLESVGAEELAVYLRKASHNTCSTRKAEEILELVKKDGETKRKFQTSRDFIIVNMVQDMKRSRELIKQTEVQLRQVLLETDYKLESMDGISIVTAAELIAEIGDIRRFSNADKLARFAGIAPVRFSSGGKGKDQASGQGNRVLNAISHNLTVQQIQVAKGDNKKQRNPVFYEYYQRKLAEGKTKKQALICVMRRLVNIIYSMMKHKTEYRAAATLTETSSKLI

SEQ ID NO: 146968 - protein, 365 aa, unidentified
MTTRQSSTSSSTDPPVRGEVVLGVDTHGEVHVAAVVSLLGKVLGTESFPATAAGYRQLLVWARKRGTVRRAGVEGTGTFGAGLSRYLLAQQIQVFEVNRPDRAARRLLGKSDPLDAQAAARAVLSGRARVRAKSGDGPVHSARMYKLAKDSAVKARTQAINQLKAVLVIADPALREQLSSLGNAELFRTCATLGPPDGGGDEDTVAQATHMTLRMLAERIEQLTAQIKELNQRLTRLVEHHAPQLLEPVGIGPDSAVTLLITMGDNPERLNTEASFAALCGVSPIEYSSGRRRTRRLNYGGDRQANAALHRIVFTGLRHDPRTQAYYEHRTQEGKSRREIIRCLKRYAAREVFNLVRPVSRTPAL

SEQ ID NO: 146969 - protein, 411 aa, unidentified
MEVLVERCAFLDVHRDTVMACARMPDGHGGRREEVREFGSTTSQLLGLADWLSERRVTLVGMEATGVYWKPVHWVLEAQVPEVWVINARHMRNVPGHKTDVADAVWGASLLEHGLVRPSFIPPEPFRALRDLTRYRRSVTEERARESQRLHKVLEDAGVKLSSVASSVLTKSGREMIDALITGQRDPEVLAELAKGRMRSKIPQLQDALAGRFNEHHGLLCQAMLARIDQADATVAVLGGRIDELLGPYEAAVSLLVTIPGIARRSAQVILAEIGADMSRFPTAGHLASWAGMCPGNNESAGKHRSGRTRHGSKWLRKALIEAAQAAGRSKNTYLAAQYAQIRNRRGPQRAAVAVGHSILVIAWHLLTTGEPYNDLGGDYFDQRRNSPARQRRLIAQLEAMGHHVTLEPAA

SEQ ID NO: 146970 - protein, 347 aa, unidentified
MRFFTNNHQNYCGIDLHARSMYLCIQNQEGKVVLHRNMEAKPEQFLKAIEPFREDVVVGVECIFTWYWLADLCAEHKIPFILGHALYMKAIHGGKAKNDRIDSRKIAALMRGGTFPLAYAYPAKMRATRDLLRRRNHLTRKRAELLSHIQNTNSQYNMEPFEANISYKKNRAGVAEQFIDPDVRMSMEADFELIALLDELKNRLELHITRNAKDHDPQALYRLRTVPGIGSIISLGILYEIGDIDRFGRVQDFASYARLVKCTRESAGKRYGTGGGKIGNAHLKWAFSEAAVLFLRGNPEGMKFKKRLEKKHGKGKALSILAHKLGRAVYYILKRDQAFDMNKFLKS

SEQ ID NO: 146971 - protein, 409 aa, unidentified
MKRYYIGVDWGDRLHQVYVGDEEGRKVRDIKVPESVEGLAEMGRWLDEQRAEGVELWAAIEKPAGRIVDFLLDHGVEVYPVNPKAVDRVRDRYRMSGSKSDAFDAYVLAEFLRTDQAHLKALQPSSEKAQELKMLCRDQRRVGRHKARLLNQLTITLKEYYARPLDAFGGLDTELALDFLTRYPTPAHLSALKRKEFNRFATQEHHLSKQRCEELWEKLSPAQLKVPEHVVRAKAQLVEVLIDQLRAAIKAVKSYNHKVESFFASSPAALIAKTLPGGNSGTLVAAIWAELGDGAGRWESFRHLQAEAGVVPVTKASGKSRVVHFRFACNKHLRYLLYWFSFVSLNHSEWAKIYYRQQRAQGHNHPQALRALGAKWLKIIFVMWRDHKAYDEKLHLANIALQKMRQAAA

SEQ ID NO: 146972 - protein, 366 aa, unidentified
MDVHLRSTTVCALDAETGEAVARRFRGNPWGEVAEWMSGFPGPSLAAYESGYLGFAPQRELSALGVDCVVAAVSKVPRSAADLSSKNDRNDAARMAKAILSHDVTPVWVPSPEIEGLRDLAAAHDAATARLAAAKQRLLAFLARRGHVYGGTTPAGNPRKYWTYGFLRWLDKVRPADDGGIRALAALRNEVEAADEAREALLAEYRAAVAAGPLSAEVEALQSIKGCGFVLAAAFASEVGDFSRFRSGRQVTAYFGLAPKQRSSADSVRLGGISGAGNALVRRLAVEGSWRYAQAGHQPKLMPKGSGVPLEIRMHGRKGSERLLRRREEMLERGMPQAKANAATAAELVRWLWALGMMCREAGEET

SEQ ID NO: 146973 - protein, 352 aa, unidentified
MDKERRWLVGIDWGSQEHVVSLYDDTGQKIGQRRFAHGGNGLTDMIAWLLKASGGKPGDIHVGIETPHGPIVEALLERDFNVYSINPKQLDRFRDRFTVSGAKDDGRDADVLADSLRTDMRAFRKLSIAEPIVIELREWSRIDEELKVEHGRLANRFRGQLWRYYPQMLELTDDVGANWFLDLFEAVPTPEKAANVREKTIARILKNHRIRRFDAAHVLSELRKPALAVAPGTIEASTARIRGLIERIRMINNQLRDAGRQLDRLCKILSEPVADKDEETSPGQKNEQRDAAILDSLPGVARTVLATLLAEASDTLQRRDYHALRALCGSAPVTRRSGKAAWWCAGMPAINA

SEQ ID NO: 146974 - protein, 336 aa, unidentified
METVCAVVGIDVSKKKLDIALLVNGKTKAKVVENSADGYKSLLEWLSKAKVAKETLHVCMEATGIYYEPVALALHDAGVSVSVVNPACIKGFGHSENIRNKNDTADAGLIARYCAAMKPAPWTPPPLEQRQLRAWSLRVQALKDIRQQEENRLEANTFTGMTDVAEHVKQHIAWLSAEINKLEDDIDDHIDRHPGLKHDAELITSIPGIGTTTVARILGQLGDIRRFDSAKAFAAFLGVTPKQRSSGTSIKGRTMISRAGSMSMRAALYMPSLVACRHNPILRRFAERLSATGMAKKAVIGAVMHKMTHLIYGVVRTGKPFDPNYLTNGLAIQDGI

SEQ ID NO: 146975 - protein, 506 aa, unidentified
MTRKTKTKSWLTLLLLWLGLSLYGYSTISLAEEDVAEEVDAVFAKFEQGDFTDQQKINDALAFLSANITPEDTQHYLKLQTVLCWNSFDVSKPEGIKKAIAFADLKLLSEGISASAEAATDLRLCRAFMHQLLGEVEEAMDDEMDTSCKVGVKSAILNLRVQYQQKVSTMKVTLIGIDLAKNVFQVCGVNQACKSVFNRALRRHQLMAFLAQYPDAIIAMEACSGSNYWGRSLKAQGYQVRLIPPQHVKPFVKGNKNDRNDAFAICEAAHRPNIQFVEPRTLEQVDMMLAHRIRERQVDARTTLINQIRGLLNEYGIVIAQGKESLKAALPDLIEDAENELTERARVHFTLLHQEWSAIDEAIKSSEKDIKQQAQASEGAKLLMQIKGIGEITATAVVSFAGNGSSYKNGRHFSANIGLVPKEHSSGGKQSLGGITKRGNRYLRKLLIQCAWSIIRHCKTAQDRLSVWVKTLIERRGSHKSAVALANKLARIVWAILFKKTEFRAV

SEQ ID NO: 146976 - protein, 314 aa, unidentified
MNKNHEEKQPIHYVAIDISKDTLQIQDDKGPFTVANDPSGIGKLISHLKDCSDALTVFEATGGYERPLLETLRKAGLPIAMVNPARVRDFARSEGIRAKTDPIDARMILAFAKSKQLKPMVAPSASCIKLAALLDRRDHLTEQMAREKNRLQNSEAFIHRSIKRMIRILERELAAIEKEIQTLIDSDPGLKARAEIIETVKGVGPVTAWTLLAYLGEIEELSRNGVVAMAGVAPFNRDSGRFSGKRCIQGGRAKVRKCLYMAAHTAARCNPVIAPYVKRLRDRGKPYKCAIVAAMRKLLIHLQSLLKKPKIALA

SEQ ID NO: 146977 - protein, 413 aa, unidentified
MDVLHPRCCGLDVHKSSISACILLREAGRVQKHQRRFGAMTQDLHELAEWLRQFGVTQVAMESSGVYWKPVWNILEGQFTVVLANAQHIKNVPGRKTDQKDAEWIAQLLQYGLLRPSYVPCEIIRDLRDLTRMRASLSQEASRISSRIQKVLEDANVKLASVATNTLGKSGRAMLEDIIAGEDDPEHLASLALGHLREKIPQLRLALEGKIRSHHRFLLRRLLDQLQFVEREIALLDERLEEIGQQRPELAQAVARWDTIPGIDRVAGWALLGEVGDKMAQFPTAEHLASWAALCPGNHESAGKRLRGTTRQGSPWLCRMACQCAWAAARTKNTYLSSQFRRLAARRGKKRAIIAVAHTLIVIGYHLHKKQSNYDDLGGDYFDRIHSDGLKRYLVKRLQQLGHKVTLEPIEAV

SEQ ID NO: 146978 - protein, 349 aa, unidentified
MDSMSPTGRDVIGGVDTHQDLHTAAVVDAAGEVLATQAFATTRAGYRAMLAWFRSYGELARVGVEATGTYGAGIARHLAAAGIPVLEVTGPDRAARRGRGKDDRLDATAAARAALTGQRVQVAKDRSGAIEALRVLRTTRKTAVRRRRATLQQLHNTIVAAPDELREQLRHLTRMRLLRTCAAWRPDLVAYRDPAVATKIALRSLARRVLDLGDEIADLERLIAPLVAELAPGLLALPGVGTQNAGELLVTAGQNPERLRSEAGFAMLCGACPIPASSGKTTRHRLNRGGNRQANSALHMIVVCRMRRDPRTKAYVSRRSAEGLGKREIMRCLKRYVAREVYHVLVPST

SEQ ID NO: 146979 - protein, 362 aa, unidentified
MVQRTCVGLDVHARSVVAAAIDGQTGQVYRRRLTPDRGEILTWIGSLPLPVMVTYEAGPTGFGLARFLVGAGVDCVVAAPSKLQRPVGDRVKTDARDAVHLARLLLLGEITAVAVPSVEQEAARDLVRAREDVRADLMSARHRLSKLLLRQGIVYCGGKPWTGMHDVWLRRQRFELSGLQIAYDTAYETMLATLARRDRLDAAIKAMSVDSMFTPVVQRLGCLRGISTLTAFGLAVEIGDWQRLTGRSIGAYLGMVPTEHSSGGSRSQGGLTKTGNGHARRLLIEAAWHHRQPYRAPGVDLRRRWENAPAAAAARGHSGNRRLHQRWLMFLQRKKTPVIANAAIARELAGWCWSLAVLDATG

SEQ ID NO: 146980 - protein, 408 aa, unidentified
MEVVHPRCCGIDVHQASLAVCVSIKEGGKSEKHKLCCGTSTAELLRLADWLHGHQVRHVAMEATGVYWKPVWHILEGQFDLLLANPMQVRALRGRKTDLKDGERIADFLQHGLLQGSFVPPRAIQQLRDLTRSRTTLKQEQVRIGNRIRKVLEDANVKLSSVMSDVMGVSGRQMLRAMARGESDPAALAELARKRLRGKIPLLQQAAAGTLSQHHRFLLEQWLGVWDELAERIAKFEQRIEEQMLPFAPAVKVWTSMPGVDRITAWTMVAEMGADMSRFPTAAHAASWAGLCPGQEESAGKRQSGRTRKGNVWLRRALTQAAWGASMKKGSYFKALYHRLAARKGSKRAIVAVAHAMLVTGYMLLWKGQTFQDLGADYFDQLDRDRLTKRLVKRLEKLGHHVSLHPAA

SEQ ID NO: 146981 - protein, 439 aa, unidentified
MICAAVERCAGIDVGKTFLAVCVMTGPLDGETRTQRRRFATMTAELEALRDWLKQEGVTHVVMESTGSYWKPVYNVLETSVKVYLANPQEVKNRKGHKTDDKDGWWLAHLLRHAMIHPSFIPPRSIRELRDLTRRRKRLLGNASAEKNRIQKVLEDANVKLGNVLTDVFGVSGQLMLDALLKGEAQPAEIAQFAKHRAKRKIPAIIQALEGHRMSEHHRQMIRYSLKHLEFLEEQIAEIDADIVGKIKNAGLEHEWQLLQTLPGIQDRSAASILAETGADMEQFPTAKDLSSWAGVCPGNNRSAGKSKSSHTTGGNPWLRSALTECAWAAAAKKNCFLKDKFWRITSKSGGKKGPAIVAVAHLLLLLAYQVLRTHKPFEDRIAPPIDERQKQRLIQHHLRRLGKLGIAIRRYAPSAPGTTTPDLVPPPNTSRKCSPPST

SEQ ID NO: 146982 - protein, 381 aa, unidentified
MSAATRRIECNGETVLFMAVEVSDKTWKVGTTVSPAQKARTKNVPGGDVEALRREIQRAKKRFGMAEETQVVSCYEAGREGFWIHRWLESEGVINAVVDPASIDVNRRKRRAKTDRLDVFMLLSNLMRWWAGEKKTWSVVVVPTERDEDARHFHRERGTLKKERTAHTNRMKCLLKLYGISQQKIDGNFVEQLGKLRQRDGSPLPPQIRQRLEREYQRLAFVESQIELLARQRSEALRHSKDERIAKVRKLTQLKGAGEVGSWTLVMEIFGWRKFDNRRQVGSLAGLTGTPSDSGATNREQGIDKAGNAQVRALLIEMAWSWVRYQPDSEITIWFNRKFGGAGKRHRRIGIVGVARRLLIAFWRYLEQDIEPKGAIIFKTP

SEQ ID NO: 146983 - protein, 372 aa, unidentified
MPDVSSNQPADVRLWVSLDQHKLSIVAATLPPTGGQPQLHRIETTRAAIRRFIDRLGGPEGLAVCYEAGPGGFDLLRVLAELGVACDVIAPSLIPVRAGDRVKTDRRDAKKLVRLYRAGELVYVQPPSPETEGLRDLMRCRDDLRRARTAARHRVSKQLLRHGRVYRDGKSQWTKMHRAWIARQRLDDTLAQTALEQMLVHLDGLDRQLDALDRDPEQIARGERWAATVEILTRFFGIATRTALGLIAEIGDFARFGHPRELCAWLGIVPSEYSSGDQRHRGHITKTGNQHARRLLIEAAWSYQHRPRRPDRGPAPDARAWQAQIRLHHRYRHLTVERGKRSTVATVAVWRELACFLWAAATNQPFALEAAA

SEQ ID NO: 146984 - protein, 367 aa, unidentified
MKKVSTVATKQGRNISRQTLTIGLDLGDRNSWYCVLDETGQIQLEQRVRTNAKALQEVFGAMPRSRIALEIGTHSPWISRLLSGLGHEVIVANARKVRLIGESRKKDDRLDAQTLARLARIDPELLYPVKHRSAQAQADLMTIRARAGLVRARTALVNTARGLAKSYGERLRGCNVRNMDPEKAEGLSPELQRALEPLLATIEDLSERIVEYNDRIEALAQTSYPQVELLKQIKGVGTLIALTFLLTLEDPHRFRKSRDVGGYLGLQPGRRKSGESEPQLHISKEGDPYLRTLLVQGAQHILGPFGIDCDLRRWGLKLAERGGRNGKKRAIVATARKLAVLLHHLWVSGEVYEPLHNSSRITVAAAA

SEQ ID NO: 146985 - protein, 409 aa, unidentified
MQILYPRCCGLDVHKSTLTACILINEAERKARHVRRFGAMTGDVNALAAWLREHEVRKVAMESTGVYWKPIWNLLEDGFDLMLVNAQHIKAVPGRKTDIKDCEWIAELLQHGLLRGSLVPPQAVRELRDLNRNRAILVQQRATVSNRIEKVLEDANIKLAAVASHVLGQSGRTMLQAMVDGISDPSKLAEMARAKLRNKIPKLRLAFEGRFVEAHRFQMEQLLDQLHFLDATVAEFEQKIEERNRPWDDKITLLLTIPGVDWITASSLVAEIGGDINQFPTAQHLASWAGICPGNEESAGKRYSGKTRKGSRWLRRVLCQAAWAASHTKNTYLAAQFRRLAARRGKQRAIVAVAHSILVAAFYILKRNEPYREAGGRYFEQRDPAAVRRYLVKRLERLGHRVILEPAAA

SEQ ID NO: 146986 - protein, 343 aa, unidentified
MQTITTIGLDIAKSVFQVHGVDTGGEVVIRRQLKRRSVLAFFEKLPPCLVGIEACASSHYWSRELQALGHTVRLMPPAYVKPYVKRQKNDSTDAEAICEAVTRPNMRFVPTKTVEQQSCLMLHRARHLFIRQQTAVINSIRAYLAEFGIVAPVGRRGVEQLLEVVANTADRRLPEVARMCLAALGSQLRALKAQILEFDRRIMAWHRSNATSKRLDAIPGVGPALATALVASVADPMAFRSGRDFSAWVGLVPKQNSSGGKDRLGSISKQGDRYLRSLFTAGALAVIRYAKIHGTGHRPWLAGLLARRPTKVAAIALANKIARMAWAMMARGERYKEPAALTA

SEQ ID NO: 146987 - protein, 423 aa, unidentified
MPQLWAGIDAGKTEHHCVVIDGNGAKLLSQRFKNRETAILTLMGDVASLPGGTDVAWATDLNHGGTGLLQTLLSSHAQPLFYISGRIVHHASGAYRGEAKTDAKDAVIIADQARTRRDVTLMRQADEVTAELRLLSARREDLVHDRTRAVNRLRAILVHYFPSLEGAFNYATTRGPLVLLTRYATPGAIRRMGEARLASWLKGQGCWKSAAVAKAAVDAAREQTSVVVGEGAAARLVSRSARDLLRIRDEVAELDAEIDAALQDSRAADLLVSIPGFGRRLAADFLAATGTDLAAFETPDRLASFAGLAPVPRDSGKISGNHHRPRRYDRRLLNACFQAAFIASRNCPVSRSFYERKRHEGKSHKQALIALARRRINVIWAIFRDQTTYNPTPTRPNDPVTPLPQHGPDSLLRKRTAPALAAV

SEQ ID NO: 146988 - protein, 364 aa, unidentified
MYKYFLGIDISKDSFDFCFTDETEKVLYKDHYQMDMTDFTKLSDYLAPFSKDKILIIMEATGIYHLTLLSYLLEQELNVSVVNPLFIHAFTKSMTIRKTKTDTKDAHIISIFAKRNYTTIRLSSASDVETIKPIVREKEKLTNQISAIKTDIKSIVNQVLKNTNIFLKSSLNLLLQAPSKRIIRNLKEKKIASYLSCDTKRGAKPKVDAKEILLMAKNSIGINNQSLEKILVSKIKQLNFLQTQLDEFNKTIEQFVDKHHNNDIDLLTSIAGVGKPSAASFLTELGDINNFATYKQLTAFIGTDPTIYQSGTSVNVKGSISKRGNSHLRRTLWHMARAATVWNETLRAYYDKKRSEGKTFKQYY

SEQ ID NO: 146989 - protein, 406 aa, unidentified
MEILYPRCAGLDVHKDTVVACVRCVSEPQHREVRTFGTTTKELSLLANWLEARGCTHVAMEATGVYWKPVWHTLEGRFELVLANAQHVRNVPGRKTDVNDATWIADLLAHGLIRSSFVPPARIQELRDVTRTRKQLVREIGQHTLRIQKTLEDANIKVASVLSSVIGTSGRSMLGAILAGEDDPERLADLAVGTARRKKPELVEALRGRVTPHHREMIKLHLGLITALEKALAKLDKSAGKLLTPIRERAALLTTMPGVADIASQTIVAEIGVDMSRFPTPGNLISWAGLCPRNDESAGKRRSTRVRKSGTWLKTTLVTAAWAAVRKKDSYLQAQFLRIKSRRGSKKAIVAVAASMLTACYFMLRDGVPYRDLGSAHFDRRDRSKTINRLIRRLGDLGCKVEVHAA

SEQ ID NO: 146990 - protein, 406 aa, unidentified
MRDYIGVDWADREHAVCVQDESGARVTQRMVAHRAEGFADWGRWLEERRAEGIELWAAIERPDGRVVDFLLDHGVVVFPLNPKALDRARDRFRMSGAKSDPFEAQVAADFWRTDHPHRAPLRPSSEAAQERKAVTRDDARPVRPQTRGLNQLTVTVKEYYPRGLEGCPDLKSRGAQEFRAADPAPAARHGLSERQWPRWARGHRLSAARAAELWPVIAGAQRPVPAQVVRVNARRLAVLLEQLAVTGRAVAAYREAVEGFFARLPAAPWAATLPGGRSGTTVPAGWAELGDAPGRWQTAPHLQGHAGMVPVTARSGKAHGVLFRFACHTPLRAAVQQLAFVSLRHSPWARAYYKRGRARGHAHQHAVRALGAKWLKIIFAMWTRSVPYDEQYHLASIGRHHVGQPA

SEQ ID NO: 146991 - protein, 378 aa, unidentified
MDRATNSTAPADRLFCAVELSKNSWLLGIQFPDHQKASVYPIKGGDSEGLMAKLVAARDRWAKVSGKKPSIILCYEAGYDAFWLARFLKGHGIDCLVVDSASMQVNRRSRRAKTDRIDLGKLLRALIAWCGGERHVWSVVRIPSVDEEDLRRSHRERSRLITERTAHINRIKGLLFAQGIRGINVKARYKTLQIDKLVTGEGRPLPPRLAQEITREIERLGLVQQQIAAIEHERDESPTTCKQTEKKRAQLLLLKGIGPTGSAVMAREVYYRQFSNRRQVAGFLGLATSPYDSGQTERSQGISRAGSGPVRATMIQMAWLWIKHQPKSAIAQWFVQRTEGQNGRIKRIMIVAVARKLAIALWRYLEQGLVPQGATLTR

SEQ ID NO: 146992 - protein, 394 aa, unidentified
MILVGIDIGKNKHTFSIIYKGTGEILSSPAVFDNNQIGFLYLIKKLSNYAKSELLIGMEDTGHYHFALLKHLLDNRYTVALINPTTTDLTRKIQGGITKNDPLDSLTICDVIGSNQRKKPYRITKVNRFDLYEQKQLTRHHHNLKEELNLYKNRLQKCIDIVFPEFNSLFRSKYGIVYMNVLKTFASAENIAAADIRTIRKCFECKGRGKHISLSAEQLKAVAKTSIGIPSVSEEIQIRHLVCQIEMIEGQLSEIDKKIEEFSLQNNSPILSIPGISHFSGTSILAELGDICNYTKAPQIIKFAGVAPYHYESSQFTAPHTAITKKGSRYLRKTLYQIILPVINHNKVFTAYYNKKLAEGKGHRCAQGHCVRKLLRIIYHLLSTGQTFDPNLLI

SEQ ID NO: 146993 - protein, 348 aa, unidentified
MFLIGCDFHPSSQQVCWLDRTTGETEEKKLIHAPGEAERFYRQFPAPTLIGMESTGNCQWFVEMVTALGHEVWIGDAAKIRASDSRQQKHDRRDAQLLLRLLAEGRFPRIWTPSSGQKDLRQLLIHRYKMVRLRAQAKNGLQHLAMNQGLQKKKHLWSKKGQKLLRELPLRPWASRRREDLLSVMKMLDQQIESLDLAVIEAAEKDPNARLLMTQPGVGPITSLAFVLTMGDVSRFQRGKQVASYLGLVPREYSSGGHQRLGSISKQGNRFLRMLLVEAAQVAVRCDPQMRQEYLHRCHEKPKGVAKVAAARKLAIRLYWMLRTQKQYPEIVSIESSSRVPLVVRHGG

SEQ ID NO: 146994 - protein, 347 aa, unidentified
MTEAYDGRQVVGMDLHRRRSVLVRMSEDGRKLGTARITNSPAALRAEIAKAGTNPRVVLEATYGWYWAADELAAAGAEVHLAHPLGVKAFAYRRVKDDVRDARDLADLLRMGRLAEAWIAPPAVRELREITRYRQKLVGLRTSCKDQVHAVLAKLGIPVTCTDLFGVWGTAWLDGLRLPQPYAGKVCSLRQLIGELDAEVTMLTEVTADLLAGYRGYQVIQQLPGIGPVLAAVIVAEIGDVTRFKTPAQLASWAGLTPRHRESDVKVIRGHVTKQGSRQLRWALVEAVQRTPSGNRVREAKDAIIARRGAQARNIAKVAAARQLLTLVFYGLRDGQIRCLSGPAGAA

SEQ ID NO: 146995 - protein, 379 aa, unidentified
MKAAAARGQYSEAKETLYLALELAWTEWKLAFTVGLGQQPRLRTIRAGDLESLEKEVARGKARFGLAESARVVSCFEAGRDGFWLHRYLVSQGIENGVVDSSSIEVSRRRRRAKTDRLDAAKLVAMLVRYEQGERRVWSVVRVPTVEQEDQRHLHRELDTLKKERTRQSNRIKGLLAGQGLRLLVDKHFLERLESARLWDGSPVPGGLRFRLEGEFERLEFIAGQIEELEHERRRLMKESRSVGAEKARRLTRLKAIGENSAWMFSLELFAWRKFENRKQLGGLLGFTPTPFNSGESSREQGISKAGNPRLRAMAIQIAWGWLRFQPQSQLSLWYQERFANGGPRLRKVGIVALARKLVIALWRFVELGIIPDGAELKA

SEQ ID NO: 146996 - protein, 460 aa, unidentified
MNRARKTRHVPKPVRPGAEVDELTLINSNAAGIDIGMDETWVSVRADRDPAPVRRFGMNTPDLIAVADWLKACGVETVAMESTGVYWIPLYEILEARGFKVYLVNARHAKNLPGRKQDETDAQWLRRLHTFGMLNNSFRPEGEMCAVRAYWRHRADLIEHRAAHIQHMQKALQQMNVRLSPTVKDITGVTGMAIIRAILAGERDPVKLAALRNPCCAQPESEFIKALTGHYREEHVFALKQAVALYDAYTQQIRECDQELERKFSALKPIHEDDLPPLDTTDKRNTHSKNAPAYDGRSLLYHLLGIDLVAVDGLNEVTAQIIISEIGTDMSRWMDEKHFCSWLGLAPHNDISGGKVLRSRTLKTHNRAGQAFRLAAQAVAKTETAYGAFFRRMRAMHGPKKAIVATAHKIARAVFIMLREHKSFHDTTAQEYNQREREREIARLKKKATKLGFTLAPATA

SEQ ID NO: 146997 - protein, 430 aa, unidentified
MLARYLEVRCRRRPRIDKYETGTGSEAPRDRQGVEDGVRYAGIDVGKAHHFVAVVDERSEALSRSRRFAATDEGFSLLRERLGEPDDCLVVMEATGHYWCNLAARLQQWGFAFVLLNPLRTHRFAQEDLQRGKTDRVDALMIARFGAQKRPDATELPAELSEEIGEFVRLRDGAVQELGDRTRQLSRHVDLGFPEFQRHVKTLDSTLALFLLAKYPTAKSWIRVSARTLGGLKYDGRHRVGEELARALVTDAKRSVGSRHGQSAQLGVRYCCRDIVELKERIAELDRLLEESIDRHDAGKLLLSIDGVGLQSAARVVAAVGDPAKFSSGKAFAAYLGVVPATRHSGSSTPRRAPTSSFGNHDLRRALWMPTIGAVRRNPWLQATYERLVARGKPKKVALVACMRKLALAMYAVCRSGEPFVPRLPEAGDG

SEQ ID NO: 146998 - protein, 444 aa, unidentified
MTKAKSKLEIVNPNASGIDIGSAVHYVCVPEGRDKQRVQKFGCFTADLHNLARWLKKCKVTTVAMESTGVYWISLFQILESYEFEVKLVNARHVKNVPGRKSDVQDCQWLQQLHSYGLLRGSFRPDNQMCVLRSYVRQRKKLTESASTHVLRMQKALIQMNIQLHKVISNITGVTGMKIIEAIIEGERNPEKLAEFRSSNIKNDKATIAKALTGDYREEHLFVLKQELELYNIYQEKIAECDENIENYYKTFETKFCGNKQCSKIKNRSTKNRPNFSIHEELHRVTGMDFTKVPGLDALSIQTIISETDINHNKWPTEKHFSSWLGLSPANKITGEKVFSTRTCRVINRAANAFRMAAHCVSRSNSGIGAYCRRLKKRLGAPKAITATARKLACIFYSMLKHGQEYVEKGIDYYEKLYKERVLKNLSKKASELGYVLTKKHELI

SEQ ID NO: 146999 - protein, 335 aa, unidentified
MTIVMGLDQHRAQITAEWVDTATGEVCRSRVAPAHRESVRRFLARFEDHELEVALEATTGWRFVVEELQRVSATVHLAEPAETATRRGRKKRAKTDRADARLLRELVMVGRLPESWIAPDHILDLRARVRLRHTLIDERGEWQQRIHAVLYHHGCPHHHGVGLLTGMGREWLSSLELPATAREQVAVALQMIGAVDAQLAPMDKELRAYARRQPGCKALMGLYGIGHLTAVTILAELGDARRFSSSREAVRYSGLDITVHQSDQRRAPGHLSRQGPPALRWALYEAAQSAHRASSPDREYFLQAAERLGGKRACLAVARKLLKRSYHTLRELGEE

SEQ ID NO: 147000 - protein, 373 aa, unidentified
MRQNITCPQKQKTRSPKARMKSESITIGMDVGDKTSRLCLLNSHGEVVKEGSVATTKKALPQMFGAMRRCRIAIEAGAHSGWISRLLSGLGHEVIVANARQVRLISQSSRKDDRVDAQTLARLARADPELLRPIRHRGERAQEHLMAIRVRAALVEARTALINGARGLVKLFGERLAGCDAGQVRVELLEPLPAGLQLALRPMIEEVESLTERIKASDRMIEQIAREHYPETELLRQVSGVGTLIALTYVLTVDDPWRFRKSRDVGCYVGLRPKRSQSGESQPQLRITKEGDRYLRGLLMQGAHYILGWRGPDTDLRRWGMQLAARGGKNAKKRAIVAVARKLAVLLHKLWTTAEVYEPLRNSQARPPHPAVA

SEQ ID NO: 147001 - protein, 348 aa, unidentified
MIVLGADTHKRSHTIAAVSAATGELLGEKTVAVGAGGFGSLVLWARGLEGERVWALEDCRHVAGSFERFLIARGERVVRVATKLMADARRAGRERGKSDSIDSIAVARAALREGLDELPVAQLDGPELDIRLLVDHRERLVRQRVGLNNTLQWHLHDLWPELVLPGGALFSAKWSARIGRRLTRTEQTMRVRIARDELRRLRELTQTINALEGEIAQLVAQVAPQLLTEPGFGPLTAAKLVGEIAGASRFNTDAKLARAAGVAPIPVSSGKTNRHRLDRGGNRQINAAIHRIAVTRARCHPETRAYIARKRAEGKTTREAIRCLKRHLARRIWRLLQPPIPTETLSIS

SEQ ID NO: 147002 - protein, 350 aa, unidentified
MTNITTIGIDIAKRIFQFHGVDKNGKTVLKKKLMRDQVLTFIANLPKCLVGMEACGGANYWAREISKLGHEVKLMAPQFVKPYVKTNKNDQADAEAICEAVSRPNMRFVPIKSIEQQDILSIHRVRARLVKNRTALANEIRGLLHEFGIIIPQGINKITSKLTEVLDSGKLSPISQQTFSDLKEEFIENDKKIKCLESRLKIMASELDKYQQIIAIPGIGLITATALIASIGNGSCFENGRQLSAWLGLVPRQASSGGKEKLLGISKRGDIYLRTLLIQGARAVLNTKLRFTTESQKDKKDYSKFAQWMFNLYDRSGHNKTVVAVANKLARIVFAVLSSGNDYVENKVCS

SEQ ID NO: 147003 - protein, 341 aa, unidentified
MHAITIGLDIAKSVFQVHGEDAAGKVVIEKKLRRSQVVEFFRKLPASLIGIEACGTSHYWARTLRELGHEVRLVPPAYVKPFVRRNKNDARDAAAICAALRRPDMRFVAIKSVEQQASRGLERSRALLVKQRTQLMNSVRSQLAEFGIIAAQGRRGFSELATLVAAGETDIPPLALDVLRLLIQQIDRLDAAITTLEARIRATARDNPVMRRLGTIPGVGSLTAHAVVSAIGDGRQFRSARDFAAWCGLTPRQHASAGKQHSRGISRQGDHGLRKLFVLGASNLMRHARTRSDRATAWQRGILARRPVKVAVLAQAAKNARIAWAVLVSGETFRRATPAAA

SEQ ID NO: 147004 - protein, 345 aa, unidentified
MTVYIGVDFHPHQQTVCYCDTADGVMHWQTFEHDKRTELRAFYMQFGGEVVIGLDAGGPSQWFEAMIETMSYKLLYGDPTKIRQRARSRHKNDKRDAELLLELLIKGEFPSLWRRSAENERVLGQLRFRHRLVQQRTRVCNQLQSLSHGAGLPRQNMQTRVARKRMEQTELDKPQSIQRKHWFEMLDDLSTRIAEVEQWLTKKVAESPQARLLITQPGVGVLTALCIAHTLGDVSRFSNSRKVVAYVGLDPLEDSSGDRRRFGKVSKAGSRHLRFLLGQAGQVAVKGDPEMRQFYQQLSQRRGKSAAKVAVARKILVRSYVMLRDQIDYTEFLRRGRRSQSVRVA

SEQ ID NO: 147005 - protein, 345 aa, unidentified
MNITTVGIDLAKNVFQMHGVDALGKVALRRQLRREQMARFFVNLPPCLIGMEACASAHHWGRTLERFGHTVRLMAPQFVKPYVKANKNDVADAEAICEAVGRPNMRFVPIKSIEQQAILSVHRVRRGFVKARTAQASQIRGLLGEFGLVIPKGICHVARCVPALLEDASNELPPAFRQLIDRLSGQLKDLDQQVRELERQIIAWHRGSELSRKLERIPGIGPLAATVLVASIADARSFDNGRQVSAWLGLVPRQNSSGGKSTLLGISKRGDVYLRTLLIHGARSAILAAKRHSGNKNVWLANLLNRRHPNIAAVALANKNVRTVWALLAHGRDFNPDYVPIRAAA

SEQ ID NO: 147006 - protein, 436 aa, unidentified
MKVKAVSALRERGLRPAGRVAEPQVVGLAPQTTNERKANTMKKYILLKTEPVQSQIITARTGSKASLLFVGLDVHNDSIAVSMAPSDSTEVRRYGIIGGEHDDVLKLAKKLQAAHPKATLKLCYEAGPRGFALCRCLRAHGLDCILVCPSKVPRKPGERVKTDRRDADQLARLYRAGELTGLYVPEPEDEAMRDLIRARYQVGKAQHRARQQLKMYLLRHNLRYTGQTSWSAAHLRYLAQIKMPFPVQQIVFQEMLDVITEATERLERYDQEIERAVPGWRWEPVVRALMALRGMALLHATTLVAELGDFHRFAHPSQLMNYLGLVPSEHTTGNDRQQGGITKMGNGPARRALVEAAWQYGVPARISPHLRKRQEGLPKAITDIAWKAQLRLSHRYHHLTRVGKKKSQVAVTAVARELTGFVWAIACQVQPRPAKP

SEQ ID NO: 147007 - protein, 346 aa, unidentified
MEVVIGVDPHKGTNAAAVLNDREELLEYAVFATNRAGLRSLTRWAKRFSERRWAVEGASGLGRPVAQHLVAAGETVVDVPAKLSSRIRLLSVGNERKNDQVDAICVAVAALRGKWLTEVGEEEGQATVLRMLSERRKDLIKERTRTLNRLHGLLRDLVPGGAPKNLSAHKAALLLRGVRPRVDPALTRRRLAADLIGDVRRLDRRLSDLERHIREAVEQASTSLTGLFGVGPILAARIIGEVGTIARFPTKAHFASYTGTAPIEASSAEVVRHRLSRAGNRQLNHALHLIAICQVRHDTEGRTYYRRKLAEGKSQKEALRCLKRRISDAVFKKLYADLESEISTAA

SEQ ID NO: 147008 - protein, 442 aa, unidentified
MLRFVGCDVHKRTAVFTILLADGKLFATYAVPVTREALAAFAERQLTREDRLAMEATTNTWAVAGVLRPFVEEIVIGNPLKVRAIAEAKIKTDKVDSRVLAELLRCEYLPVVWQPDQETQRLRRLTHRRAALVSDRTRLKNRLPAILHHTLVPLPDYELFSKRGIAWLRQVPLAQEEALARESDLRLLELTELEIAQLDELLVCEAWQDEKVRLVMSIPGIDYTVAQTCLAAIGNIARFPNAKKLSAYLGLNPSTRQSGAHCYHGPITKQGNAHARWLLVQAAQHLAQYRGPLGQTMRRIVKRKNRNVAVVACARKLAVLLWHVLSSGEPFRYAQPKSLQAKFSRLRVRATGQRRRGGVPKGTPRSAQYGHGRTRAVPSLPQVLVENGLPGVAPLAKGERIMLERNRLDTFYRELQNPSRIQANTPTPQVEETGRNGGGFQI

SEQ ID NO: 147009 - protein, 356 aa, unidentified
MSYEVKYIGMDVHKEAIVIAVQNESGKLVMESVIETKASSILQFLHGLRGELHVTWEEGTWAAWLYDLLQPQVQHIVVCNPRRNALLKEGSKSDKVDAHKLADLLRTGMLRAVYHGENGLRTLRELGRSYQNISKDLTRVMNRRKALYRGWGIPCAGTQVYAARAREEWLSKIPQAGVRRRAELLYQQLDGLQALRREVRPELLAESRKHKAAKLLRQIPCIGPIRAARLIGLIQTPHRFRSKRQLWTYSGLGIETHDSAQYRFVSGHVQRSKKPQQVRGLNQNHNHEMKEIFKSAATRASCGTGPFHDFYATLLAKGMKPEMARLTLARKIAAITLTLWKKEERFDVEQLKTQAA

SEQ ID NO: 147010 - protein, 343 aa, unidentified
MEFYVGLDVSLKQTSICVVDQTGSVVREGVVDSDPEAISVYVKSKAPDAVRIGLETGPTSTWLWTELKRLGLPVICIDARHAKAVLKMQINKSDRNDAIGIARIMQTGWFKEVHVKDIDSHSVRALLASRALLVKIKRDLENHVRGLLKNLGLVIGRAKFNVFAVRAEELIEGRPELIAAIRPLLEARNAVGEQVSELDRKVMKLARHDAQVRRFMTAPGVGPITALAFKATIDDPARFARSRSVGAYVGLTSRRHASGEVDWTGRISKCGDAMLRSYLFEAAGVLLTRVPKWSAVKAWGVRLAKRNGLRKAKVAVARKLAVILHRMWIDGTEFNWSKQEIAA

SEQ ID NO: 147011 - protein, 340 aa, unidentified
MNAATHGTWAHVGIDVSKRKLDCAILLNGKIKSKVVNNDRPGFAQLNAWLQERGAVTDSTHLCLEATGPYSEQVALALVDFGWMVSVVNPARIKGFAQSELARNKTDRADAALLARFCAAMRPSVWTPPSPAYRQLRAMVERLQALKDMYQQESNRLEAHHASGETTVLANVESHITWLDERIAELQREINDHIDGHSELKQDADLIASIPGIGGATVAKVLAYAGDVRRFTSAKALAAFIGICPRQRQSGSSVKGRTMISRTGHADLRKALYMPGLVALRHNPTLKVFGARMKANGLAPKAVVGATMRKLDHLIYGVVKSGKPFDASFAINGVAIQDGI

SEQ ID NO: 147012 - protein, 338 aa, unidentified
MNIVFLGIDLAKNVFQLCGLNQAGKPVYTKRTGRKELLQTLANIPACLIGIEASTGAFYWQREFEKLGHKVKVISPQYVKPFVRGQKNDGNDAQAIAVALMQPTMQFVPPKSPEQQDIQALHRARQRIVNHRTATVCQIRGLLLDRGIPIGSAVSRARRAIPLILEDAENGLSSRMRRTIAELYDLFNDLGRRIHFFDKEIETVFRQSEACQRIAKVKGIGPKTATAVVAAIGKGTEFKNGRHFAAWLGLVPRQHSSGDRQVLMNMTKKGDKHLRTLFIHGARAVVRVATNNNDGHMNQWVNQLKEWRGFNKTTVAVANKNARIIWSMLRNETEYQVV

SEQ ID NO: 147013 - protein, 403 aa, unidentified
MQQCTAGLDLASEEHRLVIVDGDGREREQRRIPHNEDGIVALIGALQASNVDRVAIEQPNGLVVDRLLDQGIQVVPVHPNQLAAARDRYRTGGKSDGFDAYVLAELARTDMHRLRLLEPDSDETKALKALTRAREDLVEQRVALANQLRAQLEAFWPGARRIFSVVDSPVALAFLGRYPSPADTRGLGAKRLAGFLARNSYSGRRSPDELLERIRTAPQPRIGEAELEARRAVVLALVTTLKPLVEQIRLLTSQIAGALRAHQDGQIFLSLFRDPKSVITAAELLAEIGDNRDRHPFSASLEAIAGQAPVAVQSGKKKVARFRWACNKNLRDAVSVLADSSRKHNPWAADIYQRARARGHDHPHAIRILGRAWLRIIWRIWQDKTAYDPSRHGSLTRPPTAEG

SEQ ID NO: 147014 - protein, 441 aa, unidentified
MAKVKSKLEITNPNAAGIDVGSAVHYVCVPEGSDEQRIQKFSCFTEDLYNIAKWLKKCKVNTVAMESTGVYWIPLFQVLESHGFEVKLVNAKHVKNVPGRKSDVQDCQWIQQLHSYGLLQGSFRPDDQMCVLRSYVRQRKNLIENASTHTLRMQKALTQMNIQLHKVISDTTGVTGMQIIKAIIDGESNPEKLAELRDGRIKSDKSVIAKALAGNYRKEHLFTLKQEFELYNIYQEKVAECDRSIEEYYKTFETKSDESKKLGEEKNKYRKSKPNFALHEELYRVTGIDFTKIPGLDILTVQTIISEVGVNYNKWRSEKHFTSWLGLSPANKITGEKVFSTRTRKVINRAANAFRMAAHCVSRSNSGIGAYCRRLKKRLGAPKAITATARKLACIFYSMLKYGQEYVERGIDYYETRYKEKVVKNLIKKAQEFGYILVQQE

SEQ ID NO: 147015 - protein, 368 aa, unidentified
MVTIARIGIDTSKGSFQLHGVDAEEQVVLRKTLRRKQFLEYLAKLEVGEIGLEACGASHHWARALRQLGHRVVLVPPQYVKGYVARGKNDKNDAEAICEAMSRRRVRERLVPVKTLEQSAGQMMMKVRSSLIERRTQLTNSIRGHAAEFGLVAAKGMDKIGPLLERIAVDESLPARAREMFAMLAEDYAELAARIVRIDKRLLAFQRDNEVARRLMEVPTIGPIGACLWVTKVVDPHAFRSGRSCAAWLGLTPKDRSTAGKQRLGGITRAGDESLRATLVLGATAYLRHVRSGRIAATPWLAGMLARKPPKLVAVALANKTARIAWKLMISGERYDPAHQPTREGLDASQWGGLRAEPLTAGGVEAVA

SEQ ID NO: 147016 - protein, 417 aa, unidentified
MICAAIERCAGIDVGKTFLAVCLMTGPLEGEPRVERQRFGTVTAELEKLRNWLQQEGITHVVMESTGSYWKPVFNVLETAVKVYLANPQEVKNRKGHKTDDNDGWWLAHLLRHAMIHPSFIPPRAIRQLRDLTRRRKRMIGNATAEKNRIQKVLEDANVKLGNVLSDVFGVSGQLMLEALLEGKAKPEEIAEFAQRRARQKIPQIIESLNDHRMSAHHRRMIRYSLEHMRFLEEQIGKLDEDIVAEIREAGLVEQWQLVQTVPGMQEASAANVVAETGGDMKQFPSSKHLSSWAGVCPGNNRSADKNKGSHTTGGNPWLRSTLTECAWAAAAKKNCFLKDQFWRIATKSGGKKAPAVIATAHTILSLIYQVLATGKPYTERNEPILDEPRRQRLIRHHVRRLGKLGVPVRSCSRSRR

SEQ ID NO: 147017 - protein, 322 aa, unidentified
MTSVDNTPVSYLGIDVSKETLDLAVDGQEGVWTFANDAAGIAQLIERIRPLRPRLIVVEATGGYERAVLNAILEAALPIARVQPGRVRHFAKAQGLLAKSDGIDAHLLALYARCLQPAVSEKRSKNQVELGALLVLRRQLIDTRTAHGNQLPMADSSFVRATLAKLLRQIHDRIKQVDKRIARLIDSDEDLAGRRDLLLSVPGVGKTTAATLAAQLPELGKIDRCQISALVGVAPYNRDSGGWSGKRAIFAGRAAVRSVLYMATITAIRCNPTIRLFAERLQKAGKMPKVVITACMRKLLTILNAMARDGLTWSPKCQLQTT

SEQ ID NO: 147018 - protein, 406 aa, unidentified
MTGYFAGLDWASRDHAVCVVDASGAVRDRFDVTHDAAGLCELVTRLRRYASIPAQLPVAIERPSGLVVDALIEAGFTVVPIHPNVVKATRPRYRSHGAKSDASDAYLLADLLRTDGARFRPLQPQSDAIRALRALVRGRDDLVATRVHLANQLRSLLDSFWPGAAAIFADIDSPIALAFVQRYPTPASAARCGEKRLAAFLAQHRYCGRRSAAELLERLRAAPTGNAGEFESDAKGSLVQALATTLSTLVEQIAQITSRTEHAIAELSDGQIVMSLPRAGRVCAAQILAELGDVRQRFPNDAQLAAEAGVAPLTYESGKHRSVTFRWACNHRLRCAITCFADNSRHASPWAARVYAAARARGCDHPHATRILARAWIRVLWRMWVDRRPYDPTRHRAALALNAAGG

SEQ ID NO: 147019 - protein, 425 aa, unidentified
MTRISVGVDVSKNRSTVCIMDQDGKVIMRPFLVWHSTEELDFLADTLKRLNGEVRVIMESTSVYQYPIALQLKERGLFVSIVNAYEMKQFANTDFRGGKTDKKDSRTIASYGISYWDKLVEWQIPKDTYFNLDLLNRTYMNAKKHRQIILQELQHYIDCAMPGMDKELHSLNLNTKKDFMLDFVEKFWHRDEIVNMTEAEFTEVFTAWAKEKGYRPGKGKAAKIYAIAKSCIPYYPANPTVKTILQCIVDKLSGVNRTLVTIVTQMIEEAKKLPEYQIVREMPGVGDPLAARFFGSAGDIRRFKNSKALVAYAGIDSPPDESGDFSSTHRHITKKGSKVFRDTGYEIMMALRAQKRTWEKVRKNPEVYDYMLKKEAEGKPRKVAKIAALNKFLRIVYARIKELCDNMALAERAKTKTRAKTKVTA

SEQ ID NO: 147020 - protein, 334 aa, unidentified
MPIHLFVGADIAAETIQIDWYDEATGHSAQLSLRQQRGDFAHLIQDLIRQAVPSDIHVVMEATGNYWMSFADVLHQAGLRVSVLNPSQAKHFAQARLQRTKTDRADATLLREYGRVMQPDEWTPPPPICQQLQQYLNRRDDLIQMRTAEHNRLHALQRHACPQPDLLAQLSEHIATLKAHIRHLEQTIQALLLSDHDWAQATRRLRTLKGLGYLTIARILTSTHAFARCTCPEEAVAFAGLAPHPRESGKWTGKRSVGGGGQAALRQALYMAALSAARFNPRLRVFYQHLLQRGKLEKVALCAVARKLLHIAWALVVKQRDFDPNWVPNSQPVS

SEQ ID NO: 147021 - protein, 409 aa, unidentified
MAESEYQFFVGVDWGSETHVMCVLDPGRLLIAERSIPHTGRGLTALADELTALAEPGRIAVAIEVPRGAIVDTLLDRGLHVFSLNPKQLDRFRDRHTVAGAKDDRRDAFVLADSLRTDRPAFRRVQPDRPRVVELRELSRVEDDLGQELRRLSNRLREQLHRFFPQALTLCPAADEPWFWALVERAPTPAHAQRLPVKTVAAVLKVYRVRRFTVENIREALQTPAVHVAAGTVEAAHAHIALLLPRLRLLQQQGTAVARRIEALLEDLGPEAGPGEHRDVTILRSLPGVGRVIAATVLAEAAQPLAERDYQTLRAHGGIAPVTRKSGKKFSVSMRYGCNPRLRNAFYHWARTSVQNDPHCRGHYDRLRSQGHGHARALRGVADRSLGVLVAMLTSRTLYDPERRRKIAT

SEQ ID NO: 147022 - protein, 448 aa, unidentified
MKQEPEEIPDTEHELVLERVCAIDVAKDSGKVCVRVSSRAGRRVSKVWDVPARSGAVAELAEHLLAEGIEKVTVESTSDYWRIWFYVLEAAGLSVQLVNARDVKNVPGRPKTDKLDAVWLAKLTEKGLLRPSFVPPAPVRELRDYTRLRIDLTRERSRYWQRLEKLLEDALIKVSAVASTLDTISVRDMLEALIAGERDPRRLADLARGRMRTKHASLVEALTGRFDDHHAELTRMLLDQIDALATQIATLTTRIDELLTAMEPQARADEPDTPGGAGAVADGARESTTIERLDEIPGISPGLAQIILAEIGLDMSRFPTAAHLVSWAKLCPRTIQSGAIQRGGKTGRGNPYLKGALGEAAAAAAKTNTFLGERSRRIVKRRGKLKALVAVARSILVIIWNMLNDPTARYADLGADYHATRINTERRTRNYVTQLMAMGYRVTLEPAA

SEQ ID NO: 147023 - protein, 387 aa, unidentified
MARKRTLSTLDTSIAYEAVGLDLAKEDVALAAFDSEHKEPYLIDRISYDKLYELLADMAPTLVAMEPCSGAHQIAEQIQELGHEVMMISGRHVQAWVKDHCNGQKTDLNDAFAILNLAYDRWLTPIRGKTREECRLLALQASYRQLKGQRTKTLVHVKATLHAWGFPIRTGSFNQKVLHELIDANREAFGDEMAETLHLMINRVRDLDHDIATVLKLLTEATKRDPRASLLRSIPGFGVLTTSRWCAVIGDIARFDSPKQTMAFVGLVPNNRITGHHTETSSGREARGQGRMSKRGDKMLRSLCILGAGALCLMVRNDRLPDCPFVTCIKERLASPRPWFKVLVYVAAKLVRIATALLKYGETFSYEKAGISKAVLKQWELEQAKAA

SEQ ID NO: 147024 - protein, 365 aa, unidentified
MASVTSAPGPIHLGMDTSKKTIVVAVLMPGEEIPVLDRIWNEEGSVRHLVGRLGEVSALRACYEAGPCGFELHRLLSAMGVACDVVAPSLIPRRAGERVKTDRRDASRLARLHRAGELTAIRVPTEAEEAVRDLVRARAALMADRRRAQQRITAMLLRHGRVWRGTSWTEAHERWIAGQRFGEPALALALAHYRAALDTRRAELDAVEAELAAWAGKPPLGEAVARLGCYRGIAALNGLTLAAEVVDWRRFPAARAFMGFTGLVPAEYSSGERTRRGSITKAGSAPVRTALIEAAWSYRFRPAIGVTLRRRQHGAAPDTVARSWQAQRRLHARYKAMTARGKPAGVAVTAMARELAGFAWAEMTS

SEQ ID NO: 147025 - protein, 345 aa, unidentified
MHIASIGIDLGKTTFHLVALGERSKVLVRKKFSRTQLLAYTANLGSSLIGLEACSGAHFLGAALRAQGHQARLIPAQFVKPYRKTNKNDFIDAEAIAEAVTKQNMRFVPIKTQEQLDVQALHRVRDRLVQRRTALINEIRGFLLERGITFSRQPIHLRKNLPAVMEDAEQNLSPRLRWLLDRLWQEWKQTESDIQTVTDEIERIGNEDELCQRLRQIPGFGPLVSSATVAAIGNGSAFRRGRDFAAWVGVVPRQYSTGGKQKLFGISKRGNIYLRRMLIHGARAVLFRIRYNTEGLGQWVQRLSQRAPRNKVIVAIANKLARIAWAVLSKGRDYRHQPLLQPVAA

SEQ ID NO: 147026 - protein, 410 aa, unidentified
MSILEVAVDPATVIVAVDPGKVLNRVWVSNGAGLLEDPVSLPVSREGIGQLERLLRAHAAAAPVIAIEATGSLHRSWASELERLHPGGVRLFAPSETKAARVQLGSGRFKTDDRDCAALTYLARQGAGRRHCDESAVETLRAAVRHRRGLVADRKVAQQRFHDQLNALCPGLSAPSGHGRSLAIETPTGQAVLACAAAFAGRSPSARSLIARAPGRLTKTTAEYWVRRWRGCLPPPADAESRARRLARDLERFRTLRADIAAVEDEIAVVLGATDGQILTSLPGVAILRAAAFAAHSLPIDRFSDAEHLYSATGLAPALYESATVRRRGRISRQGLAEHRDALMGIAWGLSRYSPSFAQRDAELRARGMRPIQARVAIARNACRLAYRLLVTQQPFDEEAYLRGRLSRGR

SEQ ID NO: 147027 - protein, 314 aa, unidentified
MNLSTIGVDVSKDWLDVHRLADGVARRFTNDKTGRKALIKWLTAAPVKCVVFEPTGPYHRALEYALGAAGLPIAKVNPRQARRFAEAAGKLVKTDRADAAMLARMVELLDLPPRPCVSQTIAELKELHLARAALIKDRTAAKNRAKAITLPLLEKQNKKRLAEIGVKIEEIDIAIEKLILDDAELARRFEILLSIPGVSKITAFALLIEMPELGGLEGKQAASLAGLAPVERQSGSWKGHAYIRGGRAFLRQALYMPALVACRFNKDSRALYQKLVQAGKPAKVAITAVMRKLVVLANALLRDDRPWAQNATCA
